United States Patent Application Publication US 2019/0348154 A1 - sequence listing, part 47

SEQ ID NO: 174667 - DNA, 1233 bp, Klebsiella oxytoca
atgggaattaacgaaatcatcatgtacatcatgatgttctttatgctgattgccgccgtggacaggatcctgtcgcagtttggcggctcggcgcgctttctcggcaagtttggtaaaagcattgagggctccggcggccagttcgaagaggggtttatggcgatgggggcgctgggcctggcgatggtcgggatgaccgcgctggcgccggtactggcgcacctgctcgggccggtgattattccgctgtatgaaatgctcggcgccaacccgtcgatgtttgccggcacgctgctggcctgcgatatgggcggcttcttcctcgccaaagagctggcgggcggcgacgtggcggcgtggctctattccggcctgatcctcggggcgatgatggggccgacgctggtgttctccattccggtcgcgctcggaatcatcgaaccctctgaccgccgctacctggcgctgggcgtgctggccgggatcgttacgattccgatcggctgtatcgccggcggcctggtggccatgtactccggcgtggagattaacggtcagccggtagagtttaccttcgcgctgatcctgatgaatatgatcccggtgcttatcgtcgcggtgctggtcgcgctggggctgaagtttattccggaaaaaatgatcaacggcttccagatcttcgccaaatttctggtggcgctgatcaccatcggcctggcggcagcggtcatcaagttcctgctgggctgggatctgatcccggggcttgatccgatctttatggctcccggcgaccagcccggcgaggtgatgcgcgccattgaagtcattggatcgatatcctgcgtgctgctcggcgcttatccgatggtgctgctgctgacccgctggtttgaaaagccgctgatgcgcgtcggtaatctgctgaaaatcaataatatggccgccggaggcatggtggcgacgctggccaacaacatcccgatgttcggcatgatgaaacagatggatactcgcggcaaagtcattaactgcgcgttctccgtctccgccgctttcgcgctgggcgaccatttaggcttcgccgccgccaacatgaacgccatgatcttcccgatgatcgtcggcaagctgatcggcggcgttaccgccattggcgtggcgatgctgctggtgccgaaagatgaaaacgcaccggcggcggcgacaaccgaagcggagacgcaatcgtga

SEQ ID NO: 174668 - DNA, 1404 bp, Klebsiella oxytoca
gtgaaaactcgccagctgctgagcgtcggcatcgatatcggcaccaccaccactcaggtgatcttctcccgccttgagctggttaaccgtgcggcggtgtcgcaggtgccgcgctacgaattcatcaaacgcgaaattagctggcaaagcccggtcttctttaccccggttgataaacagggcggtctgaaggaggacgaactcaaggcgctgattctggcgcagtatcaggccgcagaggttgccccagaatcggtggactccggggcgatcattatcaccggcgaaagcgcaaaaacccgcaacgcaagggcggcggtgatggcgctctcgcagtcgctgggtgactttgtggtagccagcgccgggccgcatctggaatcggtgattgccggtcacggcgccggggcgcaaaccctttctgaacagcggatgtgccgggtgctgaacattgatatcggcggcggtacctcaaattacgcgctatttgaagcgggaaaagtcagcgccaccgcctgcctgaacgttggcggacgcctgctggagaccgacggccagggacgggtggtttatgcccatcagccggggcaaatgatcgtcgatgaggtttttggcgcaggcgtcgatgcgcgcgcgttgagtgcttcgcagttagcgcaggtagcgcgtcggatggcggatctgatcgtcgaagttatcgacggcacgctctctccgctggcgcaacggctgatgcaaaccggcctgctgcccgcaggcgcggtacccgaggtgattaccctttccggcggagtgggcgagtgctaccgcaaccagcctgccgacccgttctgttttgcggatatcggaccgctgctggccacggcgctgcacgagcatccgcggctgcggaagatgaacgtgcagtttccggcgcaaaccgtgcgcgccacggtgattggcgccggcgcgcatacgctctcgctttccggcagcactatctggctggaaggggttcagctcccgctgcgcaatctgccggtggcgatcccgcttgacgaatccgatctgctgagcgcctggcagcaggcgctgctgcagctcgatctggatccgggatcggatgcttacgtgctggcgcttcctgcttcgttgccggtgcgctacgccgccctgctggtggtgattgacgcgctactggcttttgtcgcgcgctttcccaatccacatcccctgctggtggtggccgagcaggactttggcaaagcgctgggcatgctgctgcgcccgcagctgcaacaactcccgctggcggtcatcgatgaggtgagcgtacgggcgggggactatatcgacattggtacgcctctttttggcggatcggttgtgccggtgacggtgaaatcactcgcatttccttcctga

SEQ ID NO: 174669 - DNA, 1362 bp, Klebsiella oxytoca
atgaaattaaagaccacattgttcggcaatgtttatcagtttaaggatgtaaaagaggtgctggctaaagccaacgaactgcgttcgggggatgtgctggcgggcgtggcggcagaaagttcgcagcagcgcgtagcggcgaagcaggtgctctccgatatgacggtcgccgatattcgtaataacccggtgatcccttatgaagaggactgcgtgacgcgcctgattcaggacgatgtcaacgaaaccgcttatcagcggattaaaaactggaccatcagcgacctgcgcgaatacgtgctcaacgatgaagtcaccagcgacgatattgcgtttgtgcgcaaagggctgacctcagaagtggtggcggcggtggcgaaggtctgttccaacgccgacctgatctacggcgcaaagaaaatgccggtgattaaaaaagccaacaccaccatcggcctgccgggcacctttagctgtcgcctgcagccgaacgatacccgcgatgacgtgcagagcattgcggcgcaaatctacgaagggctctcgttcggcgcgggcgatgcggtgatcggcgttaacccggtgaccgatgacgtggagaacctgacccgcgtcctcgataccgtctacggcgttatcgacaagtttaatatcccgactcagggctgcgtgctggcgcacgtcactacccagattgaagcgatccgccgcggcgcgccgggagggcttattttccagagcatctgcggcagcgaaaaggggctaaaagagttcggcgtggagctggcgatgctcgatgaagcgcgggcggtcggcgccgagttcaaccgtatcgccggagaaaactgcctctattttgaaaccgggcagggctcggcgctgtcggctggcgcgaacttcggcgccgatcaggtgacgatggaggcgcgcaactatggcctggcgcggcactacgatccgttcctcgtcaataccgttgtgggctttatcgggccggagtacctctataacgaccggcagattattcgcgccggtctcgaagatcactttatgggcaagctgagcggcatctcgatgggctgcgactgctgctacaccaaccatgctgacgccgatcagaatctcaatgaaaacctgatgattctgctcgccaccgccggttgcaactacatcatgggcatgccgctcggcgacgacatcatgctcaactatcagaccaccgcgtttcacgataccgccaccgtccgtcagctgctgaatctacggccgtcgccggagttcgaacgctggctggaaaccatgggcattatggcaaacggtcgtctgacccaacgggcgggcgatccgtcactgttcttttga

SEQ ID NO: 174670 - DNA, 897 bp, Klebsiella oxytoca
atgatggatcaaaagcagattgaagaaattgtacgtagcgtgatggcgtcaatgggacaaccgcagacggccgcagcggcgcctcaggctgcggcgacgaagtgcgccagccagtgtgaggtcgcggcggagagctgcgcgctggatttaggatcgccagaggctaaaggctggattggcgtgcagcagccgcatcgcgcggaagtgctggccgaactgaaacgcagcacggcggcgcgcgtttgcaccggccgcgccggcccgcgtccgcgcactctcgcgctgctgcgcttcctcgccgaccattcgcgctccaaggatacggtactgaaagaggttccggaagagtgggtgaaaaaccagggattgctcgaggtgcgttccgagattagcgacaagaacctctacctgacgcgcccggatatgggccgtcgcctgagtccggaagcgattgacgcgctgaaggcgcagtgcgtggcgaatcctgacgttcaggtggtggtatccgatggcctctctacggatgcgattaccgtcaactatgaagagatcctgccgccgctgctgtcggggctgaagcaggccgggctgaaggtcggtacgccgttcttcgtccgctacggacgggtcaaaatagaagatcagattggcgaaatcctcggcgcgaaggtggtcatcctgctggtaggcgagcgtcccgggctggggcagtccgagagcctctcctgttacgccgtgtattcgccgcgcgtggcaaccaccgtcgaagcggaccggacctgtatttccaatattcaccagggcggtacgccgccggtagaagccgctgcggtgatcgtcgatttggccaaacgcatgctggagcagaaagcttccggcatcaacatgactcgttaa

SEQ ID NO: 174671 - DNA, 660 bp, Klebsiella oxytoca
atgcctgcattagatttaattcgcccttcggtgacggccatgcgcgtgattgcttcggtaaatgacggctttgcccgcgagcttaaattaccgccgcatatacgtagcctcggactcatcacggcggattcggatgatgtgacctatattgccgctgacgaagcgacaaaacaggcgatggttgaagtggtttacggtcgctccctctacgctggcgcggctcacggcccgtcgccaaccgcaggggaagtgctgattatgctgggcggcccgaacccggcggaagttcgcgctggcctggacgcgatgatggcgcatatcgaaagcggagcggcgtttcagtgggccaacgatgccgaagatacggcgttcctggcgcacgtggtgtcgcgtaccggctcttatctctcgtcttcttcaggcatcgcgctgggcgatccgatcgcctatctggtggcgccgccgctggaggccactttcggcattgacgcagcgatgaaatcggccgacgtgcagctggtcacctacgtgccgccgccgtcggaaaccaactattcggccgccttcttgacggggagccaggccgcctgtaaggcagcctgcaatgcctttaccgatgccgttctggatattgcccgtcatccaatccagcgcgcgtaa

SEQ ID NO: 174672 - DNA, 549 bp, Klebsiella oxytoca
atgcctttaccgatgccgttctggatattgcccgtcatccaatccagcgcgcgtaagggggaagcgatgatcaacgccctgggattactggaagttgacggcatggtcgccgccgttgatgcggcggatgcgatgctgaaggcggccaacgtgcggctgctcagccatgaggttctcgatcccggcaggttaaccctcgtggtggaaggcgacctggcggcgtgccgggcggcactggatgccggaagcgctgcggcgcagcgtacggggcgcgttgttagccgtcgggagatagggcgcccggaagaggacacccagcggctgatcggcggctttcagccgcagccggaagccccgcagccaccggtgatagcggagtcctctgagcctttactggcgctgctggcatcgacgcgtcagggaatgacggcaggggaggtggccgcccattttggctggtcgcttgacgaagccagaaaggcgctggaacagctgttttctaccggatcgttgcgtaaacgcagtagtcgctatcgtctaaaaaattaa

SEQ ID NO: 174673 - DNA, 1053 bp, Klebsiella oxytoca
atgaaaaagaaaacaccggccagcctgcaccatctttatcatgaagcattacccgaagacgttaaattgacgccgatggtcgaggtggataacgtccaccagcgacggaccaccgatgtctatgaacatgccctgacgattaccgcctggcagcagatttacgatcagctgcatccggggaaatttcacggtgaatttaccgaaatcctgctcgatgatattcaggtttttcgcgagtatactggtctggcgctgcgtcagtcctgcctggtatggccgaactctttttggttcggcatcccgacaacccgtggcgagcaggggtttataggatcgcagtgtctcggcagcgccgagatcgccacccgacccggcggcaccgagttcgaactcagcacgccggatgattacaccattctgggagtggttatctcagaggatgtcatttcccgtcaggccagcttcctgcatcacccggagcgggtgctgcatatgctgcgtaaccagtcggcgctggaggtcaaagaggagcacaaggcagcgctatggggctttgtgcagcaggcgctggcgacgtttagcgagaatccggaaaaccttcatcagcccgctgtgcgcaaggtattgggcgataatctcctgctggcgatgggggcgatgctggaggaggcgcagccgatggtcaccgccgagagcatcagccatcagagctaccggcggctgctttcccgggcgcgggagttcgtgctggagaatatgtcggagccgctgacggttctcgatctgtgtcagcagctgcacgttagccgccgcacgctgcaaaatgcctttcacgcgattctggggatcgggccgaacgcctggctgaagcgcattcgtttgaacgcggtgcgccgggagctgattagcccgtggtcgcagagcgcaacggtgaaagatgccgcgatgcagtggggcttttggcatctgggccagttcgccaccgattatcaacagctgttcgccgagaaaccgtcgttgacgctgcatcagcggatgcggcagtgggtttga

SEQ ID NO: 174674 - DNA, 900 bp, Klebsiella oxytoca
atgaaacccgacgcgcaccaggtaaaagctttccttcttcagctccaggatgacatctgccaaaagcttagcgccgttgacggtagcgaatttatcgaggatagctggcagcgggaaggcggcggcggcggacgcagccgggtactgcgcaatggcggtatctttgagcaggctggcgtgaatttttcccacgtgcacggtgatgcaatgccggcttccgcaaccgcgcatcgtcctgaactggcaggccgcagcttcgaagcgatgggcgtctcgctggtcgtacacccgcgcagcccgtacatccctaccagccacgccaacgtgcgcttttttatcgcggaaaaagcgggtgccgatccggtatggtggttcggcggcggctttgatttaaccccctactacggttttgaagaagatgccgttcactggcatcgtaccgcccgcgatctgtgccagccctttggtgaagaggtttatccgcgctataaaaagtggtgtgacgactactttttcctcaagcatcgtaacgagcagcgcggcatcggcggcctgtttttcgatgatttgaataccccgaactttgaccattgtttcgactttatgcaggcggtgggcaacggcttcaccgaggcgtatctgccgattgtcgagcggcgtaaagagagagtctggggcgagcgcgagcgcgatttccagctctaccgtcgcgggcgctacgtggagttcaacctggtgtgggatcgcggtaccctgtttggtctgcaaaccggcggccgtaccgagtccattctgatgtcgatgccgccgctggtgcgctgggaatacgactaccagccggaagcgggcagcccggaggccgcgctaagcgagtttattcaggtacgtgattgggtttaa

SEQ ID NO: 174675 - DNA, 876 bp, Klebsiella oxytoca
atgagcacttttaaaccattaaaaatacttgcttcgcgccgccaggtgctgaaagccgggctggcagcaatgacgctttcagggatcgcctctcaggccagcgcgaaagaacaacagccattgaaaacatccaatgggcacagcaaacccgtagcgaagaaaaaaggcgccaggcgcgtcgtgatgctcgacccgggccatggcggtattgataccggcgctatcggccataacggttcaaaagagaagcacgtcgtgctggctatcgccaaaaacgtgcgcagcatcctgcgcaacaacggtatcgatgcgcgtcttacgcgcagcggcgatacctttattccactctatgaccgcgtggagatcgcccataagcacggcgccgatctctttatgtcgattcacgccgatggcttcaccaacccgagcgccgccggcgcctccgttttcgccctctccaaccgcggcgccagtagcgccatggcgaagtatctctcggatcgcgaaaaccgggcggatgaagtggccggcaagaaaacgaccgataaagaccatctgttgcagcaagtgctgttcgatctggtgcaaacggacaccatcaagaacagcctgacgctcggctcgcacatcctgaaaaagattaagccggtgcataagctgcacagccgcaataccgaacaggctgcgttcgtcgtgctgaagtcgccatcaattccgtcggtgctggtggagacgtcgtttattaccaacccgaacgaagaaaaactgctgggcaccaccgcgttccggcagaaaatcgccacggcaatagccaacggcattatcagctatttccactggttcgataaccagaaagcccactcgaagagacgttaa

SEQ ID NO: 174676 - DNA, 426 bp, Klebsiella oxytoca
atggagatacgcgtttttcgccaacaagatttcgaagaggttattaccctgtgggagcgctgcgatctcctgcggccatggaacgatccggaaatggatattgagcgtaagctgaaccacgacgccagcctgtttctggtggccgaagttaacggtgaagtggttggtacggtgatgggcggttacgacggtcaccgcggctctgcttattatctcggcgtgcatccggaatatcgcggtcgcggtattgctaacgcgctgcttaatcggctggagaaaaagctgattgcccgcggctgcccgaaaataaacattatgatccgcgaagataatgatgtggttcaggggatgtacgaacgcctgggctatgagcattcggacgtgctgtgcctcggcaaacgcttaattgaagatgaagaatactga

SEQ ID NO: 174677 - DNA, 450 bp, Klebsiella oxytoca
atgaagaatactgagtttatccccgccgattttgatacccacggccgcctgcgcctgccgttccttttttggtgcgtgctgctgcttcaggcgcggacgtgggtgctgtttctgatggccggcgcgtcgcggcagcagggtgacgcgctgctgaatctgttttatccggatcacgataatttttggctgggattgctgcccggcatcccggcggtactggcatttctcatcagcggtcatcgtcagcgttttcctcgcctctggccgatgatgcgctggcttctggtgctttctcagagcctgctgctggtctggcagccgctgctgtggctgagcggagaatcgccctcggcggtgaccatctccctgctggcggcggatctttatgcgctctggtggctgttaagcaaccgtcggttgaaagcctgttttcgcgaagagcaggtttaa

SEQ ID NO: 174678 - DNA, 576 bp, Klebsiella oxytoca
atgaaatcgcgacgtttacttctctgcgcattaccgctggcgttaaccggctgctcgacgatgagctcggttaactggtcgtcggcttatccgtggaactggtttggttcctctacgcaagtaaccgaacagggcgtaggcaacctgacggcgacaacgccgctgaacgagcaggcgatcggcgatgcgctcggcagcagctaccgcctgcgcagcggcatgaaaacggctaacggcaatattgtgcgctacttcgaagcgttaaaagatgacaaggttgcgctgaccattaacggcgagagcgggactattagccgtatcgacgtgcgggatagcaacatcaaagccgccagcggcgtgaaaatcgggaccccgtttagcgatatttacagcaaagcgtttggcaactgtcagaaaggcagcaacgataacggtgcggtggtggagtgtaaggccgagggcagccagcatattagctatgcctttaccggtaactggagcggccctgaggagttaatgccttccgatgacacgctgaaaaactggaaggtgagcaaaattatctggcgtcgctaa

SEQ ID NO: 174679 - DNA, 900 bp, Klebsiella oxytoca
atgtctcaggttcagagcggcattttgccggaacattgccgtgcggcgatttggattgaagcgaatgtcaaaggcgatgtggacgtactgcgcgaagccagcagagtgtttgccgataagttagccacctttcagacaaaatatccggaagctaagctgggagcagtcgtcgctttcggtcatcacgtctggcgccatctgagcggcggcgtaggggccgaagagttaaaagcgttcccgggctacggtaaaggtctggctccgtcgacccaatatgatgtgctgattcatatcctgtccgcgcagcatgagctgaacttctccgtcgctcaggcggccatgtccgcttttggcgccgcgattgaggtcaaagaggagattcacggcttccgctggattgaagagcgcgacctcagcggttttgttgacggtaccgaaaacccggcgggggaagagacccgtcgtgaagtggcggtgattcaggatggcgtggatgcgggcggcagctacgtattcgtgcaacgctgggagcacaacctcaagcagcttaaccgcatgagcgttcccgatcaggagatgatgatcggccgtaccaaagaggccaacgaagagattgacggcgatgctcgtccggaaacctctcacctgagccgcgtggatttaaaagaagaagggaaagggttgaagattgtgcgtcagagcctgccttacggtaccgccagcggtactcacggcctctacttttgcgcctactgcgcgcgtctgcacaatattgaacagcagctgctgagtatgttcggtgataccgacggtaagcgcgacgcgatgctgcgttttaccaaaccggtgaccggcggatactacttcgcgccgtccctggataggctgctggcgctgtaa

SEQ ID NO: 174680 - DNA, 1017 bp, Klebsiella oxytoca
atggccgttaaatcactgaaaaaaggatatctggcgctggctgcttctgtgctgctggttgcgcaggcgcaggcgacggaactgctgaacagctcctacgatgtttcccgcgagctgtttgccgcccttaacccgcagtttgaacagcagtgggcgaaagataatggcggcgataagctgacgattaaacaatctcatgccgggtcatcaaaacaggcgctggcgattctgcaggggcttaaggccgacgtggtgacctacaatcaggtgaccgacgtacagattctgcacgacaaaggcaaactgattcccgccgactggcaaagccgtctgccgaataacagctcgccgttttactccaccatgggcttcctggtgcgtaaaggcaacccgaagaatatccacgactggaatgacctcgtgcgttccgacgtgaagctgattttcccgaacccaaaaacctccggcaacgcgcgttacacttatttagcggcgtggggcgcggcggacaaggctgacggcggcgataaagcgaaaaccgagcagttcatgacccagttcctgaaaaacgtcgaagtgtttgataccggcggtcgcggggctaccacgaccttcgccgagcgcggtctgggcgatgtgctgatcagcttcgaatcggaagtgaacaacatccgtaaacagtacgaagatcagggatttgaagtggttatcccgaagaccaatatcctggccgaattccctgtggcctgggtagataaaaacgttcaggccaacggaacggagaaagcggcgaaagcctatctgaactggctctacagcccgcaggcgcagacgatcatcaccgactattactatcgcgtgaacaacccgaaggtgatggaatcgctgaaagataaattcccgcagaccgagctgttccgcgtggaggaccagtttggctcctggccggaagtgatgaaaacccactttgccagcggcggtgagctggacaaactgctggcggcggggcgtaagtaa

SEQ ID NO: 174681 - DNA, 834 bp, Klebsiella oxytoca
atgtttgctgttgcctcaaagcgcgtgctgccgggctttaccctgagcctcggcaccagcctgctgttcgtgtgcttaattctgctgctgccgctgagcgcgctggtgatgcagctcgcggaaatgacctggagtcaatactgggatgtgatcagcaacccgcaggtggtagccgcttataaagtcaccctgctgtcggcctttgtggcgtcgatctttaacggcgtatttggtctgctgatggcgtggatcctcacgcgctaccgctttccggggcgcacgttgctggacgcgctgatggatctgccgtttgcgctaccgacggcggtggcgggtctgacgctggcctcgctgttctccgtcaacggcttttatggtgaatggctggcgaagcttgatattaaagtgacttatacctggctgggtatcgccgtggcgatggcctttaccagtattccgtttgtggttcgtacggtgcagccggtactggaagagctggggccggaatatgaagaagcggcggaaaccctgggcgcgacgcgctggcagagctttcgcaaagtggtgctgccggagctttcacctgcgctgatggccggcgtcgcgctgtcgtttacccgcagcctgggagagttcggcgcggttatttttatcgccggtaacatcgcgtggaaaacggaagtgacctcgctgatgatttttattcgtttgcaggagtttgattaccctgccgccagcgcgattgcttcggtgatcctcgcggcatcgttactgctgctgttctcaatcaacaccctgcaaagtcgctttggtcgacgcgtggtaggtcattaa

SEQ ID NO: 174682 - DNA, 876 bp, Klebsiella oxytoca
atggcgatcgttgctcaattaaagcgttatgacgccccccgcattaactgggggaaatggtttttgatcggtatcgggatgctggtttccgcctttatcctgattgtaccgatggtctatatcttcgtgcaggctttcagcaaaggtctgatgccggtgctgcataacctggccgatccggacatgctgcacgccatctggctgacggtgatgatcgccttaattaccgtgccggtgaatctggtgtttggcacgctgctggcatggctggtgacgcgttttaactttcccggccgccagctgctgctgacgttgctggatattccgtttgccgtctcgccggtggtggcggggctggtttatctgctgttttatggctctaatggcccgcttggcggctggctggatgagcataacctacagattatgtttgcctggcccggtatggtgctggcgaccatttttgtgacctgtccgtttgtggttcgcgagctgatgccggtgatgatgagccagggcagtaatgaggatgaagcggcgattctgctcggcgcttcgggctggcagatgttccgtcgggtgacgctgccaaacatccgctgggcgctgctgtatggcgtggtgctgactaacgcccgcgcgatcggcgaattcggcgccgtatcggttgtttccggctctatccgcggcgaaaccttgtcgctgccgctgcaaatagaactactggagcaggactacaataccgttggttcgtttaccgccgcggctctgctgacgttaatggctattttgaccctgtttttgaagagtatggtgcaatggcgtttggccaatcaggaaaaacgcgcgcaactggagggaaatcatgagcattga

SEQ ID NO: 174683 - DNA, 1095 bp, Klebsiella oxytoca
atgagcattgagattgccaatattaagaagtcttttggtcgcacccaggtgctgaatgatatctcgctggatatcccttccggacagatggtcgcgctgttggggccgtcaggctccgggaaaaccacgctgctgcgcatcattgccgggctggagaatcagtccagcgggcacattcgttttcacggtaccgacgtcagccgggtgcacgctcgcgaccgtaaagttggctttgtttttcagcactatgcgctgtttcgtcatatgacggtgttcgacaacattgccttcggtctgacggtgctgcctaagcgtgaacggccaaatgccgccgggatcaaagcgaaagttaccaaactgctggagatggttcagctggcgcatctggccgatcgctatccggcccagctttccggcggacagaagcagcgcgtcgcgttagcgcgcgcgctggcggtcgaaccgcaaattctgctgctggatgagcctttcggcgcgctggatgcccaggtacgtaaagaactgagacgctggctgcgtcagctgcatgaagagctaaagtttaccagcgtattcgttacccacgatcaggaagaggcgaccgaagtcgcggatcgcgtggtggtgatgagccagggcaatattgaacaggcggatgcgcccgatcgggtatggcgcgagccggcaacccgctttgtactggaatttatgggcgaagtgaaccgcctgaaaggcaccattcgcggcggacagtttcacgtgggcgcgcatcgctggccgttaggctataccccggcgtatcaggggccggtggatctgttcctgcggccgtgggaagtggatatcagccggcgcaccagcctggattcaccgttgccggtacaggtgctggaagcgagcccgaaaggccactacacccaattagttgtgcagcctctcgggtggtatgacgaaccgctcaccgtggtgtatcagggcgaagaggcgccgtatcgcggggaacgcctgtttgtcggcttgcagaatgcccgcctgtacaacggtcgtgagcgtattgagccgcgcgaggagcttgctctggccgaatcggcctga

SEQ ID NO: 174684 - DNA, 1032 bp, Klebsiella oxytoca
atgtttatcgccgttttcgcaacggcaggattgggtagcccggataagacgcctgcgtcgccatccggggatgtttgcaggccgggtaaacgcttcccggcctttttattgggcaaaaccgtgaatacattagaacaaacaatcggcaacacgcctctggtgaagctacagcgtctgggaccagataacggcagcgaaatctgggtcaaactggaagggaataacccggccggttcggtaaaagatcgcgccgcgctttcgatgattgtcgaagcggaaaagcgcggcgaaattaagcccggcgatgtattgattgaagcaaccagcggcaataccggcattgcgctggcgatgatcgccgcgcttaaaggctatcagatgaagctgctgatgccagataatatgagccaggagcgacgtgcggccatgcgcgcctacggggcggagctgatcctggtcaccaaagagcagggaatggaaggggctcgcgatctggcgctggcgatggcccagcgcggtgaaggcaagctgctggaccagttcaacaatccggacaatccctatgcccactacaccactaccgggccggaaatctggcggcagacagaagggcggataacccattttgtctccagcatgggcaccaccggcaccattaccggcgtttcccgctttctgcgcgaacaggctaaagcggtgagcatcgtggggctgcagccggaagagggcagcagtattcccggcattcgccgctggcctgccgaatatatgccggggatttttaatgcgcagctggtggatgcggtgctggatattcatcaacaggacgcggaaaacaccatgcggatgctggcggtgcaggaagggattttctgcggtgtgagttcaggcggcgcggtggcgggcgcgctacgcattgcccgtgaaaatcctggcgcggtagtggtagcgatcgtttgcgatcgcggcgatcgctacctttcgaccggcgtatttggcgaagagcactttacccagggcgcgggaatttaa

SEQ ID NO: 174685 - DNA, 408 bp, Klebsiella oxytoca
atgcacaatcccaatccgcagcttaaagccgccattgaagcctgcgatcgcgctatctcgcaggaagattacgcgacgttgatggagtattacgccgacgacgccgcgctggtggtcaaaccgggcatggtcgtcaagggcaaagaaaatatccgtaaagcgtttatcgccattgccgactatttccagcaccggctggtggtaacgcaggggaaaatggagattattgaaggcggcggcaatgcgctggtgatcatggaaacccggctggatataccgacagcggaagccgggataactcaggttacgcgccgcgcaacctacgtctttcggcagcagggcgagcgctggctgtgtaccgttgataactcttacggtacggatctgcttgacgcgcccgaagtttaa

SEQ ID NO: 174686 - DNA, 708 bp, Klebsiella oxytoca
atgcagatccactttatcgtccatgaagtctttgaagcgccgggagcttatctgcactgggcgcaggcgcgcggttacgataccagctggtcgcgggtttatgccggggatgcgctaccggaaaacgctaacgcctttgatatgctggtagtgctgggcggcccgcaatcgccgcgtaccaccctagccgaatgcccatattttgatacccacgccgagcagcgtttgattgcgcaggccattgccgccgggcggatcgtggtggggatttgtctcggttcgcagcttatcggcgaagcgctgggcgcaccggtcatgcaaagtccggaaaaagagattggccactttccgataacgctcaccaccgccggcctgcaggacggcaaactggcccattttggcccgtcgctggtcgtgggccactggcataacgatatgcctggcctgacgccggaagcggaagtgctggcctccagcgaaggctgcccgcggcaaattgtgaaatatcgcgatcgggtttatggcttccagtgccatatggaatttgacgctgaggtcatcgaactgctgatcgcccattcacagcaggagctcagcgccgccagaggcagacgcttcatccgcagcgaacaggagatgcgcgcctgggattaccgcgaaatgaatcagaagctgtggacattccttgataagctgacggaaaagtaa

SEQ ID NO: 174687 - DNA, 1299 bp, Klebsiella oxytoca
atgatcattggaaaaactgccagtgagatcttcgataatatccgccatctggtgcaaagcggcgtactcaaacctggcgatgttttgccgccggtacgcgaactggctggcaagctgtcggttaaccgcaatacggtcgccgccgcctataagcgactggtaacctccggtctggccattagccaggggcgtaacggtacggccattaagacgcataatacgcttcccgcccttgaaggtggcgatccctcttcgccgctaaaagatatctccagcggcaaccccgatcccacacgcctggcgaacgtcaaaaactacctcagcgctatcgccgccgctccacgcctgtacggcgatgcggcggttgacccacggctggccgcgtgggcccatgcctggatgagcaaagattcaggcgtggacgcggagattaacctcgccagcggcgctatcgatgcgctcgaacgtctgctgtgcgccctgctgctgccgggcgatagcgtggctatcgaagatccctgctttctcagcagcattaatatgctgcgctatgccggctttaccccctcgccggtgccggtcgacgctgaaggcatgcagcctgatgcccttgaggaggcgctgcgcaacggcgcccgggcggtgatcatcaccccgcgagcacataatccgacgggctgtagccttagcgagccccgcgcccgggcgatacgcgatatcctggcccgctatccgcaggttctggtgattattgatgaccatttcgccctgctctcctcaacgccctggcactctccgctggccgccgaaagccggcgctgggcgctggtacgctcgctgtcgaaaacccttgggccggacatgcgtctggctatcgttgccagcgattgcgaaacgtcggcggcgctgcgcctgaggcttaattccggtagccagtgggtcagccatctgctgcaggatctggtcatcgcttgtcttaatgatgacgcatttatggcatcgctgacggagagtcgccgccactatcgtcgacaacatgaaaagctgatcgccgcgctcgctcgctgcgggataacccacctgacgccaggagacggcctgaacttttggtttccgctggaggaaccaagccagccggtagcgcttcgcctggcgcatgctggctggctggtccgcgaaggcgaaacgttcggaattcgcgccccttcacacgggctgcggctgtcacttgctacgctcagcgatgaagaaattaataagctcgccagtgacttatgtcagatattacaacaacagtga

SEQ ID NO: 174688 - DNA, 867 bp, Klebsiella oxytoca
atgggccagcaggatgaaatacaatcggtgctcttcaacgataaaagtcgggcactacaggtcgatatcgtggccgtgcagtcgcaggtggtctacggcagcgtaggaaacagtattgcgataccggcgataaagcagcacggcctgcgggttatcgcggtgccgacggtgctgttcagcaatactccgcactatgacacctactatggcggcgtcatcccggaagagtggtttgccggttatttaaaggcgctggaggagcgtgacgccctgcgcgagttgcgggcggtcacgaccggctatatgggaagcgcggtgcagattaagcgccttgcgcaatggctgcagcgcattcgcgagcatcatcccgagctgtgtattctcgttgatcccgtcattggcgatgtggatagcggtatttatgttaaggccgagattccggaagcctatcgtactcatttgctcccgctggcacagggaatcacgcccaatctgtttgagctggagacgctaagcggactgccttgccataatcagcaggaggcgattgtcgccgcccgcagcctgctctcggattcgttgaaatgggtcgttattaccagcgcgccgggagcggatagcgccacgatcaacgtgctggtggttagcgcagagtcggtcgaggtgatcgaacatccgcgcgtagaaaccgaccttaagggaacgggcgatcttttttgcgccgagctggcgagcggcctggtgtgcggaataccgctgggtgatgccgctcatgccgccgcgcagcgggtgctggcggtaatgacctggaccgatgaacagggctgcgacgagcttattcttccgccgtcaggggaggggatatga

SEQ ID NO: 174689 - DNA, 240 bp, Klebsiella oxytoca
atgaagagctatcgtttagtggttcgtcagcagggaagagtcgtcggccattttgagacgaccggcagcgaagcgctggaagatgtttgcgaagtggggtcgctatttggcgccgttggcggatatcagtgtgatttacaggtttctgatagcgagaagcggattctggaaagcggccctgaggggatgaaaatactttcacgggagaagtgctatcggccattcaaagcggcgagataa

SEQ ID NO: 174690 - DNA, 510 bp, Klebsiella oxytoca
atgggtttgttcgataaattgaaatctctggtttctgatgacaaaaaagacaccggaactattgagattgttgccccgctctctggcgagatcgtcaacatcgaagacgtgccggatgtagtgtttgcggaaaaaattgtgggtgatggcattgctatcaaacctactggcaacaaaatggttgcgccggtagatggtaccatcggtaaaatttttgaaaccaaccatgcgttttcaatcgaatctgatagcggcatcgagctgttcgttcacttcggtattgataccgttgaactgaaaggcgaaggcttcaaacgtatcgctgaagaaggccagcgtgtgaaagtcggcgacccggttatcgaattcgatctgccgctgctggaagagaaagccaagtctaccctgactccggttgttatctctaacatggacgagatcaaagagctgatcaaactgtccggtagcgtaaccgtgggtgaaactccggttatccgcatcaagaagtaa

SEQ ID NO: 174691 - DNA, 1728 bp, Klebsiella oxytoca
atgatttcaggcattttagcatccccgggtatcgctttcggcaaggctcttctgctgaaagaagatgaaattgtcatcgaccggaagaaaatttctgccgataaggttgatcaggaagttgaacgttttctgaacggccgcaccaaggcctccgcccagctggaggtcatcaaaaccaaagctggtgaaactttcggtgaagaaaaagaagccatcttcgaagggcacatcatgctgctggaagatgaggagcttgagcaggaaatcatagccctgattaaagataagcacatgactgccgatgcggcagccaatgaagttatcgaaggtcaggctactgccctggaagaactggacgatgaatacctgaaagagcgtgctgctgacgtacgcgacatcggtaagcgcctgctgcgcaacattctcggcctggccatcatcgatcttagcgcaattcaggatgaagttatcctggttgccgcagacctcaccccgtctgaaaccgcacagctgaacctgaacaaggtgctgggctttatcaccgacgcgggcggccgtacttcccacacctccatcatggcgcgttctctggaactgccggccatcgtgggcaccggtagcgtcacaagccaggtgaaaaacggcgattatctgattctcgacgctgtaaataaccaggttctggttaacccgagtgaccagcagatcgaagagctgcgtaacctgcaggctcaggttgctgaagagaaagctgaactggctaagctgaaagacctgccggcaattacgctggacggccatcaggttgaagtttgcgccaatatcggtaccgtacgcgacgttgaaggtgccgagcgtaacggcgcagaaggcgttggtttatatcgtactgaattcctgttcatggaccgtgattcgctgccaactgaagaagaacagttcgcggcttataaagcggttgccgaagcatgcggctctcaggccgttattgttcgtaccatggacatcggcggcgacaaagagctgccgtacatgaacttcccgaaagaagagaacccgttcctcggctggcgcgccgtgcgtatcgccatggatcgcaaagaaattctgcgcgaccaggtacgtgccatcctgcgcgcctctgctttcggtaaactgcgcatcatgttcccgatgatcatctctgttgaagaagtgcgtgcactgaaaaaagagatcgaaatctacaagcaggaactgcgcgacgaaggtaaagcatttgacgaagcaatcgagattggcgtaatggtggaaacccctgccgctgcgactattgcacgtcacttagccaaagaagttgatttctttagtatcggtaccaatgatttaacgcagtatactctggcagttgaccgtggtaatgatatgatttcacatctttaccagccaatgtccccgtctgtgctgacgctgattaagcaagttattgatgcttctcatgctgaaggcaaatggaccggcatgtgcggtgagcttgcgggcgatgaacgtgctacacttctgttgctgggtatgggtctggacgagttctctatgagcgccatttccatcccgcgcattaagaagattattcgtaacacgaacttcgaagatgcgaaggtattagcagagcaggctcttgctcaaccgacaacggacgagttaatgacgctggttaacaagttcattgaagaaaaaacaatctgctaa

SEQ ID NO: 174692 - DNA, 258 bp, Klebsiella oxytoca
atgttccagcaagaagttactattaccgctccgaacggtctgcacacccgccctgctgctcagtttgttaaagaagcaaaaggcttcacttctgagatcactgtaacctccaacggcaaaagcgccagcgccaaaagcctgttcaaactgcagactctgggcctgacccagggtaccgttgtaactctctctgccgaaggcgaagatgagcaaaaagcagttgagcatctggttaaactgatggctgaactcgagtaa

SEQ ID NO: 174693 - DNA, 972 bp, Klebsiella oxytoca
atgagtaagatttttgaagacaactccctgactatcggccatacgccgctggtacgactgaaccgcatcggtaacgggcgcatcctggcaaaggtagaatcacgtaacccgagctttagcgtaaaatgccgtatcggtgccaatatgatttgggatgccgaaaaacgcggcgtgctgaaacccggcgttgagctggtagaacctaccagcggtaatactggtatcgcgctggcctacgtggcggcggcgcgcggttacaaattgacgctgacgatgcccgagacgatgagcatcgaacgtcgtaaactgctgaaggcgctgggcgccaatctggtcctgaccgaaggcgcaaaaggcatgaagggcgccatccagaaggccgaagagatcgtcgccagcaatccggagaaattcctgctgttgcagcagtttagcaacccggccaacccggaaattcacgaaaaaaccaccggcccggaaatctgggaagataccgatggtcaggtcgacgtcttcatctccggcgtcggtaccggtggtacgctgaccggcgtgagccgctatatcaaaggcaccaaaggtaaaaaagatctgattaccgttgccgtagaacctaccgattccccggttatcgcccaggcgctggcaggcgaagagcttaagcccggcccgcataaaattcagggtattggcgcaggcttcattcccggcaacctggatttgaaactggttgataaagtggtagcgatcaccaacgaggaggcgatctccaccgcacgccgtctgatggaagaggaaggcattctggctggtatctcttccggcgccgccgttgccgctgcgctgaagctgcaggaggatgaatcctttaccaacaagaatattgtggttatcctaccctcttcaggtgagcgctatttaagcactgcattgtttgcggatctgttcacagagaaagaactgcaacagtaa

SEQ ID NO: 174694 - DNA, 762 bp, Klebsiella oxytoca
atggtttcatcatccgtaacgaccccgcgcagtggcgtctactatttttcgcagggttggaagctgatcgggctgccggggatccgtcgatacgtcttcctccctctactcgtcaacatcgtgctgatgggtggcgcattctggtggttgttcacgcgactggatagctggatcccttctttgatgagccatgttcctgaatggctgcaatggcttaactatctgctgtggcccatcgtcgtcatttctattctgctggtgttcggctacttcttctcgactatcgccaactggattgccgcgccttttagcggccttctggccgagcagcttgaggcgcgtctgactggcgcgacgccgccggacgtcggaattttcggtatcctgaaagatgtgccgcgcatcatgaagcgcgagtggcagaagtttgcctggtatctgccgcgggcgatcgtccttttgcttctctattttattcccggtttcggccagaccgtcgccccggtgctgtggttcctgttcagcgcctggatgctggcgattcaatactgcgattatccttttgataaccataaagtgccgtttaaaaccatgcgccaggcgctacgcacccgcaaagtcaccaacatgcagtttggcgctctgaccagcctgtttaccatgatcccggtgctcaacctcgtgatcctgcccgtcgcaatttgcggcgcgacggcgatgtgggttgattgctaccgtgacaaacacgcgatgtggaaatag

SEQ ID NO: 174695 - DNA, 1044 bp, Klebsiella oxytoca
atgatgcaggatttgcgtctgatattaatcattgttggcgcgatcgccataatcgctttactggtgcacggtttttggaccagccgtaaagaacgttcctcgatgtttcgcgatcgcccactgaaacgtatgaagtctcgcgacgatgaagagtcggaaggcgacgactttgatgacgatgttgaaggcgttggtgaagtccgggttcatcgggcgagtcatgcgccgaacggcgttcatggggagcatgaagcacctcgtcagccgccgcagcaccagtatcagcctccttatgagcgtcaggcgcagcagcctgtgcgcccggaagagcctgcccgtgcagcgcagcagccgcatcagcagccggttcactctcaggctccggttcagcaaccgcattatgccgcgccgacgcagcagccggtgacacagcccgtgcagccccagcagccgccgcaaacgcagccacagcaatcgccgcagccacagcagcatgtgcagcaacccgttcagcatgtgcagcagccggttcaacagcagcctgttgccgctccgcagccgcagccgacgcctgaacctccggcccctgagccgcagccggcagcgccgcagcctaaagagcgcaaggagacggtcatcgtgatgaacgtcgccgcgcatcatggctcgcagcttaacggcgagctgctcatcaacagtatccagcaggcgggcttcaaatttggcgatatgaatattttccatcgtcacctgagcccggacggtagcggccaggtgcttttcagtctggcgaatatggtcaaacctggcacctttaatccggacagcatggcggatatgatgacccctggggtgactatctttatgcaggttccgtcctttggcgatgaactgcaaaactttaagctgatgctgcagtccgcgcagtacatcgccgatgaagttggtggcgtggtgctggacgaccagcgtcgtatgatgacgccgcaaaaactgcgtgaatatcaggaccgcattcgtgaagtaaaagaggcgaacgcctga

SEQ ID NO: 174696 - DNA, 2025 bp, Klebsiella oxytoca
atggaatcgaacgaacaaaaactgactgaactgcgaaccacgcttcgccatcatgaatatctctaccacgtcatggatacgccggaaattcctgatgcggaatacgaccggttaatgcgtgaactgcgcgagctggaagctcagcacccggagctgatcaccccagactcgcccacccagcgcgtcggcgccgcaccgctagcctcctttagccagatccgccatgaagttccgatgctgtcgctcgataacgtctttgatgaggagagtttcctcgcgtttaacaagcgggtgcaggaccgtctgaaaaatagtgatgatcttacctactgctgcgagctcaagctggatggcctggcggtcagtatcctctatgagaacggcttgctggtacaggcggcgacccgcggagatggaacgaccggtgaagatattacctccaacgtgcgtaccatccgcgcgatccccctgaagctacgcggcgacaatattccgcagcggcttgaggttcgcggagaggtgtttctgccgcaggcagggttcgaaaaaattaatgaagaggcccggcgaaccggggggaaagtctttgctaacccgcgtaacgccgcagcaggttctttacgtcagctcgatccgcggattaccgcgaagcgtccgctcactttcttttgctatggcgtgggcgtgctggaaggcggcgagctgccggccagccactcggcacgcttgcagcagtttaagttctgggggctgccggtcagcgagcgcgtaaaactctgccatacgccagaggaagtgcttacttactatcgcaaggtggaagaagatcgaccgaatctgggatttgatatcgacggagtggtgatcaaagtcgattcgcttgcgttacaggaacagcttggcttcgtagcccgcgcgccgcgctgggcggtggcgtttaagtttccggcgcaggagcagatgactttcgtgcgcgacgttgagtttcaggtcgggcgaaccggcgccatcacgccggttgcgcgtcttgagccggtacacgtcgccggagtactggtcagcaacgcgaccctccacaatgccgatgaaatcgagcgcctgggactgcgcatcggcgataaggtagttattcgtcgtgccggagatgtgattccccaggtcgtgaacgttgtgctctcagaacgcccggaagagacgcgggaaatcgtgttcccaacccattgtccggtatgccactccgacgtcgaacgcgttgaaggcgaagtggtaacgcgctgtaccggcggattgatctgcggcgcgcagcgcaaagagtcgctcaagcattttgtctcccgtcgcgctctggacgtcgatggtatgggcgataaaatcatcgatcagctggtagaaaaagagtatgtgcacacgccagccgatctctttcagctgacgccgggtaaactcaccgggctcgatcgcatggggccaaaatcagcgcagaacatcgtggatgccctggataagtcaaaagaaaccaccttcgctcgttttctttatgcgctggggatccgtgaagtgggtgaggcgacggcagccggtttagcggcccactttggcactattgaggcgcttgagcaggcctcgattgacgatctgcaaaaagtgccggatgtcgggattgtcgtcgccacgcacgtgcgtaatttctttgccgaagagagcaaccgcgaagttatcgctcagctgcgtaaagagggcgtccgctggcctgcgccggtggtggtcaatgctgaagagattgatagcccgttcgccggaaaaacgattgttctgaccggtagcctgagccagctctctcgtgacgatgcgaaagcgcagctggttgcgctgggcgcgaaggttgcgggcagcgtgtcgaagaaaaccgacctggttatcgccggggaggccgcgggttctaagctcgctaaagcgcaggagctgggaattgcggtaatcgatgaagacgaaatgctgcgcctgctcggagagtcgcgtggataa

SEQ ID NO: 174697 - DNA, 219 bp, Klebsiella oxytoca
gtggataaagagcagcttattgaaattgccaatacggaaatgccgtttggcaagtacaaaggccgtcgattaattgatgtgccggaagagtatctgctgtggtttgcccgtaaggatcaatttcctgccgggcatctcggcgaactgatggcattaaccctgttgattaaaacagagggactgaccggtctggtccagccccttaagcgtccgcgttaa

SEQ ID NO: 174698 - DNA, 999 bp, Klebsiella oxytoca
atgaaatttttccgcattcttgatccattcaccctaacgttagtcaccgtcgtcctgctggcctctttttttcctgctcgcggcggatttgtccccttctttgagcatttaactaccgccgccatcgcgctgctgttctttatgcacggcgccaaactctcgcgtgaggcgatcgttgccggaggaagccactggcgtttacatctctgggtcatgtgcagcacgtttatcgtttttcccgtgcttggcgtgttgtttgcctggtgggcgcctgtcaacgtcgatccggcgctatacaccgggtttatttatctctgcattctgccagccaccgtccagtcggccatcgcgtttacttccctggcgggcggtaacgtggcggcagcggtatgctcggcctcggcctcaagcctgctggggatctttatttcgcctttgctggtcggcctgctgatgaatctgcacggcgcgggcgggagtctggagcaggttggtaaaatcatgctgcagctgctgctgccgtttgtgctggggcatctttctcgcccatggattggcaactgggtgacaaaacataaaaagtggatctcaaaaaccgatcagacctctatcctgctggtcgtttattcggcattcagcgaggcagtcgtgaacggtatctggcacaaagtgggtatcggatcgctgctgttcatcgttattgtcagcatcgtgctgctggcaattgtgatagctattaacgtgtttgtagcgcgcaggtgtggatttaataaagcggatgaaattacgattgtcttctgcgggtcgaaaaagagcctggcgaacggcattccaatggccaatattctcttcccgacttcaatcctggggatcatggtgctgccgctgatgatcttccatcagattcagctcatggtgtgcgcagtgctggcgaggcgctataagcgccaggccgaagcattgcaggcgcaggaaaaaaaccgcgcctccgaagcttaa

SEQ ID NO: 174699 - DNA, 927 bp, Klebsiella oxytoca
atgaattactcgctacgacagttgaaggtttttgtgaccgttgctcgcgtcaaaagctttagccgggcaggggagagtattggccttagccagtcagcggtaagccatagcgtcaaagagctggagcatcagaccggggtacgcttgcttgaccgaacgacgcgcgaagtggtgcttacggaggccggccagcagctcgcggcccggcttgagcgtctgttggatgaactaaacggcacgctgcgagaggccggacgcgtcgggcagcagctgatgggaaccgtccgggtggcggccagccagactatttccgcccatcttatcccgcagtgcattgccgacagcaaccgtcgttatccggaaatcgatttcgtactacacgaccgcccccagcagtgggtgctggagagtatccgccagggggaagtggattttggcattgtgatcgatcctggcgctgctaccgatttacagtgtgagacggtgctcgccgaaccttttctgttgctttgccgtagcgatcacccttttgccggacggagcgcggtgaactggccagacctccagcagcagcggctggttctgcaggattatgcttctggtagtcgtccgctgattgacgccgcgctctcgggatttgccgttaaagcgaatatcgtgcaggaaatcggtcatccggccacgctatttccgatggttgagtcggggataggtatcagtattttacccgcattagcgctgccgcttcctcagggcagccatttgcaggtgaaacgactcactccggtggtggagcgtcaactgatgctggcgcggcgtaaaaatcgctcgctttcaactgccgcagaagcgctgtgggaggtggtgcggcatcaggctggccagctgaccgctttgcgcgagaatgaccccttgtatcagaaatga

SEQ ID NO: 174700 - DNA, 834 bp, Klebsiella oxytoca
atgagcgacacgcttttttcacagaacccatggtatagcgcagacatcattcgcggacataagccggactttatgccgcgggtggcttttattcttggttcgggtcttggggcgctagcggagcaaattgaagatgcagtggcaatttcatacgagaagctgcctggattcccggtgagtaccgttcacggccatgccggcgagctggtgttgggaaacctggctggcgtaccggttgcctgcatgaaggggcgcgggcacttctacgaagggcgcggcatgacggtcatgaccgatgccatccgtacgctaaagcttctgggatgtgaactgctgttttgtactaacgcagccggttctcttcgtccggaagtggggccgggaagtctggtggcgctgagcgatcatattaatactatgccgggtacgccgatggtgggcctgaatgatgaacgcttcggcgagcgctttttctcgctggcaaatgcctatgatgcggattatcgcgccgttctgcagcgcgttgcggcagaggagggttttccgctgactgaaggcgtatttgtctcctatcccgggccgaattttgaaacggcggctgagatccgcatgatgcaaattatcggcggcgatgtggtggggatgtccgtggtgccggaggtgataagcgcccgccattgcgggttgaaagtggtggctgttgcagcgattactaatctggctgaaggtctgggcgatgtgaagttatcccacgcgcaaaccctggcagcggccgaactttcccggcagaactttatcaacctgatctgcggcttcttacgcaaactggcctga

SEQ ID NO: 174701 - DNA, 1257 bp, Klebsiella oxytoca
atgggtatcgcttctcgcttaaagctcatgtcgtttttgcaatattttatctggggaagctggctggtcaccctgggttcttacatgatcaatacgctgcatttcaccggcgcaaacgtcggcatggtgtatagctctaaggggctggcggccattatcatgcccggcatcatggggatcattgctgataaatggcttcgtgcagaacgggcctatatgttctgccatttggttggcgcgggagtgcttctttatgcgacgaccgtgaccgatccggatacgatgttctgggtgatgctcattaacgcgatggtctacatgcccactatctccttgtctaacagcgtctgctattcatgtctgtcgcagtccggccaggatccggcgaccgcgtttcctcccattcgcgtttttggcactctcggttttattgccgcaatgtggacggtgagcctgatggggctggagttaagcagcacacagctatatatcgcctctgccgcgtcgctattactggcgatttatgcatttacgttaccgaaaattcctgtcgtcgagaagaaagccggaaccaccctggccagccggctggggctggatgcctttgtgttatttaaaaatccgcggatggccattttcttcttttttgcgatgatgctgggagcggtactgcaaataactaacgtcttcggtaatcctttcctgcatgattttgcccgcaatccggagtttgccgacagctttgtcgtacgttatccctcaattttgctttcggtgtcgcagatggcggaggtcgctttcatcctcaccataccgttctttcttaaacgctttggcatcaaaacagtcatgctgatgagtatgctggcatggacgctgcgctttggccttttcgcttttggcgatccctctccgttcggttttgtgttgctgctgatgtcgatgattgtttacggctgcgcattcgacttctttaatatttctggatcggtatttgttgagcaggaggtcagtgccaatattcgcgccagcgcccagggcctgtttatgaccatggtgaacggcattggagcatgggttggttcagttctgagcggtatggccgttgattacttctctattgatggcgtaaaagagtggcagactatctggctggtgttcgccgcctattcattactgctggcggttatttttgccctgttcttccgctatcaacatgagcctgagaaacttatcaacaaagcgctgacgcattaa

SEQ ID NO: 174702 - DNA, 885 bp, Klebsiella oxytoca
atggaacgcacgcatcgtatcgatctgaaattattgcgctattttctggctgttgcagaagagctgcattttggtcgtgcagctgcccgtctgaacatgtcgcaaccgccgcttagtatccacatcaaggagctggagcagcagctcggtacgctgctgtttgttcgccactctcgtagcgtggcgttgacccatgctggaaaaattctgatggaggagtcccgccgcctgctttccagcgccaatcaggcgctggcgcgagttgagcagattggccggggtgaggcggggagggtagaactgggcgtgataggtacggcgatgtgggggaaaatgcgcccggtaatgcggcgttttttgaaagagaaccctaacgtagaggtgcttttccgcgagaacatgcccgccatgcagatggcgatgctggagcgacgggagctggatgccggcgtgtggcggatggcgacagcgcctacgccaggatttaccagcctgcgtttgcacgagtcctcttttctggtggccatgccggaggagcatccgctggcgatgcttgaggcgatcccgcttgcggcgctgcgtaacgaatattttgttacgatgccttcaatacataccgactggacgtttttgcagcgcgtctgtcagagtgccggattcttgccgatgattatccgtgaagtgatggagccgcaaacggtactggctatggtcagcatgggaattggtattacgctcatcgccgatagctatgcgcaaatgacctggccgggcgttgtgtttcgtccgctggaagagcgcatacccgctgacttgtatattgtctatgaccaacaacaggcgacgcccgcgctggagaagctggtagcggcgctggtgaattga

SEQ ID NO: 174703 - DNA, 840 bp, Klebsiella oxytoca
atgaaaataattatcgtcaactcgttatattatccttataagtttggtggggcggaagtttctgtgcagttacttgcagaaggtttagtcgccagaggcattacagttaaggtaataactttaaataataaaaaggaaatagaacgtttcaatcataacggagtagaggtggtatccttccctctccgtaacatttattggccgtttgataaaacaaatcatactaagataaaaaaagcgatttggcatgtaagagattatttaaaaaatcctatcgttgaaatggttcaaaaagaaatctcaaatgacaacccagatattatacatacaaataaccttgctggcttttcagttggtatctgggatatagctgaagatattaaatctccattgatccatacaacgcgtgattattacttattccatcctaactctacactttttaaaaatggagcgaatatggacataaataatagcttcgttaagtcatactcatggtataaaaagaagaagagccaaaaaatagatgcaatggttggcatcagtaaatacattagtgatttacataaggaaaatggttttgcgggtaaagcaacgcatacacatatatataatccaatagaaaaagtaaatattagaaaaaaagcttgcaataagctaactattggctttttgggcagattaacaaccgaaaaaggatttgatgtctttattgagtatgcagtcaagtataaaaataattttaactttgttgcagcaggcgattttgcatccactagtaattcggtcgtgttgttgcagaagccgctgttagtgggattccagtgttcgccaatttaa

SEQ ID NO: 174704 - DNA, 1323 bp, Klebsiella oxytoca
atgacacttcttgcgagaaactttatcgtcagcgccgctcttgccttttcagatttgttaagttttacaatatcgctttatatagcattagctattttgacaacaaatcagagcgttgatttatatagctctgcacaaattgaagagtggacagttttacattggctactcgctatctgttgcgttggttggtattcaattaggttacgacattatttttatcgaaaaacattttggtttgagcttaaggaaatattaagaactttagtaatatttgctgtgattgaaattgcagttgtagcatttacaacttggtcaatatcacgttatttgtggatactgacttggttgttaataattatactagtaccagtttcacgtatgattactaagcatattttaaatttctttggattatggcgaaggccaacatggattataggtagtggttctaatgcaaaagaagcgtacaaagcaataaatagtgaaggtaatcttgggcttgaaattgtagggtttatctctacagaagcgcatgacacactggagagtaatattgatggtgtgccagttattattaatgatcaaaattggctaagtacaattgataaaaaaacgcagtttatagttgctgttgaatcagcacaaagtgatatcagaaatgcgtggttacgcaacttcatgattaaagggtatcgatatgtttcagtaataccaaccttacgaggaatgccattagatagcactgatatgtcattcatttttagccacgaagtaatgattttccgagtacagcaaaacttagctaaatggtcttcacgaataatcaaacggctttttgatgttattggtgcaacgctaattataataataatatcaccacttctgctgtatattagtaaaaaagttaagcaagacggaggggcggcaatttatggacatgaaagaattggtaaagatggtaagccatttaaatgtctgaagtttcgctctatggtcacaaactctaaagaggttttagaagaattgttggctaataatcctgatgcaaaagcagaatgggatgaaacatttaaattgaagaatgatcctcgtattacaaaaataggtcattttttgcgaaaaacaagtttagatgaattacctcaattatttaatgttctcaaaggagaaatgagtttagttgggcctcgtcctataattacagctgaattggaaagatataatgaagaggtcgattattatttattaagcaaaccgggcatgacaggattgtggcaagttagtggtagaagtgacgttgattatgaaacaagggtctaa

SEQ ID NO: 174705 - DNA, 2166 bp, Klebsiella oxytoca
atgtcactaacttcgtataaaaaaacagaaaaagataatgatgaaattgatattggtcggcttataggtgagttgattgatcatcgaaagttgattattgcaattacatctttatttactcttgttgcacttatctatgccctatttgccactccagtttatcaagctgatgcattaatacaggtagagcaaaggcaaggcaatgccattctaaacagtcttagtcaagttctgcctaatactcaaccacaatcacaaccagaaatcactcttctccagtcaaggatgatattgggaaaaaccgtagacgatttaaacttgcaggccaggatcaaacaggattactttcctgtttttggtcgtggctgggcaagattaaccggagaaagtgaaggttccctctcaatttcaagattatatttgttttctgatagcaaaaaaatacctaagatagaagtcgtaattaatgataaagataattacacggttattggtgatggctatgaaataaaaggtaaaaaaggtgaactggttgaaggaaaaggattatctcttaaaattgatgatttcaaggcccaaccgggtaccaagtttattgtatcttatgtaagtcgcttgcaagcgatcacagatctacaagaatcattggaggtacttgaagagggcaaaaatactggcatgctaacagtatcatttgttggcgagaatccagataaaattactgctatcattgatagcattagtaataattacttagcgcagaatatatccaggcaagcagcccaagatgcaaagagtttagattttcttaatcagcaactacctcaagtacgtaatgatttagacatagcagaggataagttaaatgcttatagaagacaaaatgattcagttgatctatccttagaagcaaaatctgtacttgatcagattgtaaatgttgataaccagttaaacgaattaacattcagggaatctgaggtatcgcagttatatactaaagagcatccaacttataaagcattgatggaaaaacgaaaagttttacaggatgaaaaggtaaaacttaataaaagagttacctcaatgcctgaaactcagcaggaggttttacgtttaagtagagatgtagattcaggtcgagctgtatatatgcaactacttaaccgacagcaagaactaagtatctcgaaatcgagcgcaataggtaatgtacggattatagatagtgcagtaagccaaccagatccaattaagccgaagaaagctttggtggtcctaatcggtatcattgtagggatatttatttctgcgattattgtgatgtttagggtgtttttacggcgtgggattgaatcaccagaacagctcgaggagttaggcataaatgtatatgctagtatacctgtctctgaaacattcacgaaaaacataagccagaaaaaagattggcgcgggaaaaagcaggaaaaaattcagggacttcttgctattgaaaatcctgctgatttagcaattgaggctattagaggattaagaacaagtttgcattttgcaatgcttgaagcacagaataatattctgatgatatcaggtgcaagtcccaacgcaggtaaaactttcgtaagttctaatcttgcgaagattatttctcaggctgataaaactgtattatttattgatgcagatatgaggaaaggttatacccataaattattttcgacgaataatgaaaatggtttgtctgagtatttatctggtatgtcacaaatcacccaggtagtcaaaaaaataccagccattggattcgactatatatctagaggaatggtgccgccaaaccccgcagaattattaatgcatcatcgttttcaggagttgctgagttgggccgcgaaaaattatgatttggttattgttgatacaccaccaattttagcggttactgatgctgcaattattggaggttatgtcgggacaacacttttagtcgctcgtttcgaattaaatacagcaaaagaaatagaagttagtatgaaacgatttgagcaaagtggaatacatgtcaaaggatgtattttgaatggtgttgtgaagaaagccagtagttattatggatatggatataaccattatggctattcatattctgacaaaaaagactaa

SEQ ID NO: 174706 - DNA, 1068 bp, Klebsiella oxytoca
atgccgggacaggggttaaatagtctgcgtaagaacgtcgttgagttaccggatagcgactacgatttggataaactggtgaatgtttatccattaacaccgggtttagtggatcaacttcgtcccgaaactgtaatggcgcgaccaaatccgcagttagataatttattgaaaagttatgagtaccgaattggtgttggcgacgtcttgatggtaacggtctgggatcaccctgaattaactactcctgcaggccaatatcgtagcgcgagtgatacggggaactgggtaaattctgatgggacgattttctatccttatattggaaaagtattagtagctggaaaaacattgagccaagtgcgacaggatatagcgaatagacttacaacatatatcgaaagcccacaagttgatgtaagtatagcagccttccggtctcagaaagtatatgtaacaggtgaggttacaaattctgggaaacaagcaattacaaacattccattaacggtaatggatgctatcaatgctgctggtggacttgcccctgatgcagattggcgtaacgttgtacttacccataatgggaaagataaaaaaatctcactctatgcattaatgcaaaaaggagatttaactcaaaaccatttattattcccaggcgatattttgtttatcccacgaaatgacgaactcaaagtatttgtgatgggtgaggtaggaaaacaaagcacgcttaaaatggaccgaagcggaatgacactcgcagaagccatagggaactctgaaggtatttcacaatcaatgagtgatgctactggaatttttgtgattcgccaattacaaggtgataagaaaggtaaaatcgcgaatatatatcagctaaatgcacaagatgcttcagctatggttttaggtaccgagtttcaattagaaccctatgatattgtttatgtaacaactgcacctctggttcgttggaacagagttatatcccagttggtcccaacgatcactggtgtacatgatatgacagaaaccgtccgctatattaagacatggccataa

SEQ ID NO: 174707 - DNA, 1440 bp, Klebsiella oxytoca
atgataaaaatcgcgcgaatcgcactcgcactagggctgcttacttctgccagctcacttgcctatgcctccggcttggtaatgaacgacaacgaactgcgcaacgatctggcgtggctctccgaccgcggcgttattcatctcagcctgtcgacctggccgttaagtcaggaagagattaatcgggcactaaagaaagcaaaaccctcttattcatccgaacaggtggttctggcacgaatcaaccagcgcctcgactctttgaaagctgattttcgggtcagcggctatacctcaacggataagcccggcaccccgcagggatttggtcagaatcagcctgctgacagctctttatcgttagccttcaataacagcggcgagtggtgggatgttcacctgcagggaaacgttgagggcgacgaacgcatcagcaatggttcacgttttaatgctaacggcgcctacggggcggttaagttctggaaccagtggctttcctttggacagatgccgcagtggtgggggccaggttacgaaggcagcctgattcgcggtgatgctgcccgtccgatgaccggctttttgatgcagcgtgctgaacaggccgcgccagaaacctggtggctgcgctggatcggcccatggcagtatcagatctccgccagccagatgaatcaatataccgccgtaccgcataccaagattatcggtggtcgtctgactttttcccccttccagtcacttgagcttggcgcatcgcgcattatgcagtggggaggggagggcagacccgagtcgtttagtaatttttgggacggcctgacgggtaaagataataccgaagcaaacgatcccaatgaaccgggcaaccagcttgctggttttgactttaagttgaaactggaacctacgctgggcctgccggtcagcttatacggtcaaatgattggcgaagatgaatccggctttttaccttcagcgaatatgttccttggtggagtcgaaggccaccacggttggggtaaagatgccatcaactggtatctggaagctcacgatacccgatcgaacatgagccgcaccaactatagctatacgcaccatatctataaagatggctactaccagcaaggttactcactcggtgatgctatgggaggggatggccaactctttgcgggtaaagttgaactggtgacagaggataatcagcgctggagcgcgcgtttagcgtatgcgaaggttaacccagaaaatcagtcaatcaacaaggcgtttcctcgttcggatacattaaaaggtgtgcagctgggctggagtggcgacgtgtacaaatcggtacgactgaacacttctctctggtataccgatgcgaaccataatgatagcgatgatgtaggcgcaagcgccgggattgaaattccctttaatttatag

SEQ ID NO: 174708 - DNA, 630 bp, Klebsiella oxytoca
atgaactggcaggttgtcactttttttggcgatagcaccgtactgttacccagtgcggccgtgttgtttatcgttctttttctgcgcaaagattcaaagcaggtcgcctggcactgggcgctgctgttcggcatcactggcgccattgtctgcgcatcaaaactggcatttatgggttgggggattgggattcgcgagctggacttcaccggctttagcgggcacaccgcattatcttcagctttctggccaattctcttatggctgctgtgcgcgcgtgctacaccagctcttcgtattgcttctgtcgtatttggttatgcattagccggtttggtcggctattcccgcctggtgatccacgctcattcaacgtctgaagtgattgccggtttactgctgggaacagcaggcagcgcattgtttctgctgctgcagtcgcgcacccgcggcactcatacagcgcagttatcatggggagggctggcaagcgtggtcatcatcccggcgctgctgttgaataccggcgctaaggcgccaacgcaatcgcttctgggtgagatcgcagtgaagcttggcccactggagaaaccgtttacccgggccgatctgcacaagcgcttttactga

SEQ ID NO: 174709 - DNA, 849 bp, Klebsiella oxytoca
atgcacatgttgcccgccaccaaggccattccgaaagagatgctgccgatcgtcgacaagcctatggtgcagtacattgttgatgaaattgtagctgctggcatcaaggaaattgtgctggttacccattcatccaagaatgcggtagaaaaccatttcgacacctcctatgaactggaagcgctgctggagcagcgcgtcaaacgtcagcttctggccgaagtacaggctatttgcccgccaggcgtaacaattatgaacgtgcgccagggtcagcagctgggtttaggtcactccattctttgcgcgcgcccgctgattggcgataacccgtttgtggtggtgctgccggatatcatccttgatgatgccagcgccgatccgctgcgttataaccttgccgctatggtcgcgcgtttcaatgaaacgggtcgtagtcaggttctggcaaaacgtatggaaggcgatctttccgagtactcggtcattcagaccaaagacgcgctagaaacggcgggtcaggtggcgcgcatcgtcgagttcatcgaaaaacctgatgaaccgcaaacgctggattcagacctgatggcagtagggcgctatgtgctttctgctgatatttggccggagctggagcgtactgaacccggcgcatggggccgtattcagttaaccgacgccattgctgaactggcgaaaaagcagtcggttgatgcgatgttgatgactggcgagagctacgactgcgggaaaaaaatgggctatatgcaggcctttgttaattatggtctgcgtaaccataaagaaggcgcaaaattccgcgagagcattaagaagctgttagcgtaa

SEQ ID NO: 174710 - DNA, 1587 bp, Klebsiella oxytoca
atggaatggattgccgacccctcgatctgggccgggctcataacgcttgtcgttattgagctggtacttggtattgataatctggtctttatcgccattctcgcggaaaaacttcctcccgctcagcgagaccgcgcgcgcgtcaccggcctgctgctggcaatggtaatgcgtctgctgctgctggcgtcaatctcctggctggtgacgctcaccaaaccgctgattacctggcacgatctgagctttagcgctcgcgatctgatcatgctgtttggcggtttattcctgcttttcaaagccaccgttgagcttaatgaacggctggaggggaaggacagcaataatcccactcagcgcaaaggcgcgaaattctggggagtggtcgcgcaaatcgtggtgctggacgccatcttctccctcgactcggttattaccgcggtcggcatggttgaccatctggcggtgatgatggcggcggtaattattgccattagcctgatgctgatggccagtaaagccctgacccgcttcgttaacagtcatccaaccatcgtcattctctgtctcagcttcctgctgatgattggttttagcctgattgccgaaggcttcggctttcctattccgaaaggctacctgtacgcagcgattggcttctcggtcatgatcgagtcctttaatcagctggcgatttttaaccgccatcgttttctttcggccaacttgacgctgcgtcagagaaccactgaagcggtaatgagtctgttgagcggccgcaaggacaatagcgagctggatagcgataccgcctcgctggttgccgaccgtgacgataacccgctgtttaatcctcaggaacggcggatgattgagcgggttctgaatctcaatcagcgcaccgtcagcagcataatgacctcgcgccatgatattgaacatattgacctcagcgctccggaagaagagattcgcgccttactcgacaaaaatcagcatacccgcctggtggtaaccggcggcaatgatgacgaagatatgctcggcgtcgtgcacgtgatcgatcttctgcaacaatcgctgcgtaatgaaccgctcgatctgcaggccctgatccgtcagccgctggtgttcccggaaacgctgccgctgcttcctgcgctggagcagttccgtaaagcccgaacccattttgcctttgtggtcgatgagttcggttccgtagaggggatagtaacgctcagcgacgtgatggagaccatcgccggtaatctgcctaatgaagtggaagagatagacgctcgccacgatattcacaaaaacagtgacgatagctggacggttaatggacatatgccgctggaagatttggtccagtacgtgcccctgccgctggatgacaagcgggaataccataccgtcgccggtctgctgatggagtatctgcagcatgttccgcaggaaggtgaagaggtgaatattgacggttacgttctgcgcacgctgcaggtagagagccatcgcgtgcaaaaagtactgattgtgccgccggcgcaggaagaagatgaactggactatgaagtgtag

SEQ ID NO: 174711 - DNA, 1848 bp, Klebsiella oxytoca
atgagacgaattctgaccacgctgatgatcttactggcggttgttgtcgccggtcttaccgcgctggtattgctggtcaaccccaacgattttcgcgcctatatggtgaaagaggtagcggatcgcagcggctatcagctcgaactcgatggtccgctgcgctggcacgtctggccgcagctcagcattctttcaggccgcatgaagctgaccgcgccgggcgcggaggagccggttatccgcgcggataatatgcgcctcgacgtcgggctgctgccgctgctttctcatcagctgcaggtcaagcaggtgatgctgaaaggcgcggtgatccaactgacctcaaaaaccgaagccgtacgtagccagagcgcgccggttgtcccgcacgacaacacgctgcctcaggtgccggaggatcgcggctggtcgtatgatgtcgaaaaactgcagattgccgacagcgtgctcttcttccagcatgaagacggcgaacaggttacggtgcgcgatatccgtctgcagatggagcaggatgacagccatcgcgcgacggtcgatttttctggtcgggtgaaccgcgaccagcgggatttggcgctctccttctccgcccgggtgcagggcggcgactatcctcactctttgaaggctgatttttcacagctcaactggcagcttcgcggggcagaactcccgccggaagggttgagcggccaggccagcctgcaggcgagctggctggaagatgccaaaaagctcagcttcgataacctgaacgtaacggcaaacggcagcacggttaccggcagcggcagcgttgtgctgggagatcggcctgactggacgcttaaccttcatgcgggcacgctgaatcttgataacctgctttcgcgtggcgctgcagccagcaataatggcgtcaaccagcaaggccaaagccagacccggcagctccgcccggtgattgccgataacgattttcagcgggattacagctcactgcgcggttttaacgcgcggatgaccctggcggcggaccagctgcagtggcggggcatgaattttactcaggttaaaagcgatatcagcaaccagcaggggctgctgaccattaaccaaatgcaggggaacctggacggcggacagctttcgcttcccggctcgctggacgctcgcggcgagacgccgcatgcctcgtttaagcctcagctcgacaacgttgagataggcacgattctgcaggcgtttgattactcgattaacctcaccggcaagctttcgctgaccggcgaattttccggcgacaagattgatgctgatgaattccgccgcagctggcaggggcaggcgcaaattcagatgaaggatacgcgcacggaaggacttaacttccagcagctggtgcagcaggccgtcgagcgcagtactaacgttcaggcccaggaaaattacgataacgcgacccgactcgacgacgtcagtactgagctgcagctgaataacggactggttaccttaaagggtctgcaagggcagtctgaactcatggcattgaccggtcagggcgagcttaacctgctgaaagaagagtgcgatatgcgcttcaacgttcgggttctgggcggctggaagggtgagagcaagctcattgaccgtctcaaacagaccgcgatccctctgcgtatttatggcaactggcagacgctgagctacagcctgcaggtggatcagatactgcgtaagcagctgcaggatgaagctaaaaagcggcttaatgaatgggtcgaacgcaataaagatacccaggatggtaaggatgtgaaaaagctgctcgacaagctctga

SEQ ID NO: 174712 - DNA, 582 bp, Klebsiella oxytoca
atgcgtctgtgcgatcgagatatagaagcctggttggatgagggccggctggccatcaatccgcgcccgcccattgagcgtattaacggcgcgacggtcgatgttcggctgggaaataagtttcgcactttccgcggccacacggcgggatttattgacctgagcggccccaaggcggaagtcagcgcggcgctggaccgggtgatgagtgaagagattgttctgccggatggcgaagcgttctttttgcatccgggcgaactggcgctggcggtaacctatgaatcagtcactctgccaccggatctggtcggctggcttgacgggcgctcttcgctggcgcgtctgggcttgatggtgcacgtgaccgcacaccgtatcgatccgggctggtccggctgtatcgttcttgagttctataattcaggtaagctgccgctggcgctgcgtccagggatgcttatcggggcgttaagctttgagcctttatccgggccggctctacgtccttataaccgccgcgaagacgcgaaatatcgcgatcagcagggcgcggtagcgagtcgaatcgacaaggattga

SEQ ID NO: 174713 - DNA, 642 bp, Klebsiella oxytoca
atgactgatacgtctcatcagtgcgtcattataggcatcgccggcgcatcggcttcgggcaaaagccttatcgccagtacgctttatcgtgaattacgtgaacaggtcggcgatgaacatatcggcgttattccggaagacagctattacaaggatcaaggtcatctgtcgatggaagagcgggtaaaaaccaactatgaccatccgagctccatggatcatagtctgctgtttcagcatttacagatgttaagaaacggccagccgatagagctgccggtgtatagctacgttgagcatacccgtatgccggaaaccattcacattgaaccgaagaaagtcatcattctggaagggattctgctgctgaccgatgcccgactgcgcaacgaactcagtttctccatattcgtcgataccccgctagatatctgcctgatgcgccgcatcaagcgcgacgttaacgagcgcgggcggtcaatggattcggtgatggcgcagtaccagaaaacggtgcgcccgatgttcctgcaatttatcgatccttccaaacagtatgccgatattattgtgcctcgcggcggtaagaaccgtatcgccatcgatatactgaaggccaaaatcagtcagttctttgaataa

SEQ ID NO: 174714 - DNA, 849 bp, Klebsiella oxytoca
atgacgctgctaccctggaatcccccctacgactggcattggatgttcagctttcttggcgctcgtgcggtgcaggggattgaaaccttcggcgacgatggctatcgccgcagctttgcccttaatggctgcgccgggctgattacggtgatgccggatgaggccgcgcagggcatgcgggtgacgctttccgccggactgcagccggtggcggacgagtgcctgatgcgggtggggagattgttggacttatcctgtgacccgcagcaggttgccctgacgctgggggcgctcgcgcggccgaggccggggctgcgtttgccgggctctctcgacccgtttgagcaagcggtacgcgcggtgctgggtcaactggtcagcgtggcgatggcggcaaagctcaccgggaaagtggtggccgccttcggagaaccgctggccgacgcgccgggtttttacctgtttcccggcgcgcagcggctggcacaggccgacccgctggcgctaaaggcgctgggcatgcccctgcggcgcgcggaggcgctggtacacctggcgcgggcggccatcagcggcgatctcccgctggtggcgccggataatatcgacgccggcatgaagcagttgcagacgctgcccggcataggccgctggacggccaactatttcgcgctgcgcggctggcaggcgccggatatctttctgccggatgattatctgattaaacagcgtttccctggtatgacgccgacccgtattgcgcgctatgccagccgctggcacccctggcgctcttacgctttactccatatatggtatacggaaggctggtcgccggagccggaatag

SEQ ID NO: 174715 - DNA, 1437 bp, Klebsiella oxytoca
ttgcttttaaattccagttgtcgcagtgccgtcgatccgctaaagtcgccccccttcttcaccggcatggggattttgcaggctatgtatattggttttgactacggtaccgctaactgttcggtcgcggtgatgcgcgaaaatacaccgcagctgctgacgctggaaaacggcagttcactgctgccgtccatgctttgcgcgccgacccgcgaagcggtcagcgagtggctctaccgccatcatgacgtcccgcccaacggtgatgaaaaccaggcgctgctgcgccgcgcgataagcttcaatcgtgaggaagatatcgatgtactcagcaacagcgtgcagtttggcctcgcttcgctgcatcagtacgttgacgatccggaagaagtttacttcgtgaagtcgccgaaatcgttcctcggcgccagcgggctcaagccgcagcaggttgcgctgtttgaagatttagtctgcgccatgatgctgcacatcaaactccaggcgcaaacgcagctgccggacgccatcgaccaggcggttatcggacggccgattaacttccaggggctgggcggcgatgacgccaacgcccaggcgcagggaattcttgagcgagcggcaaagcgcgcgggctttcgcgacgtcgtatttcagtttgagccggtcgccgccggtctggatttcgaagcgacgctgagcgaagaaaaacgcgtgctggtcgtcgatatcggcggcgggaccaccgactgttcactgctgttgatggggccgcagtggcgggaaaaagccgatcgccagcaaagcctgctcggccatagcggctgccgcgtcggcggtaacgacctggatatcgccctggcctttaaatgcctgatgccgctgctggggatgggcggcgatacggaaaaaggtatcgcgctgccgattctgccgtggtggaatgcggtggcgattaacgacgttccggcgcagaccgatttttacagcgccgccaatggtcgtctgcttaacgatttgctgcgcagcgcccgcgatagcgagaaggtcgcgctgctgctgaaggtgtggcgtcagcgtcttagctaccgtctggtgcgtagcgcggaagagagtaaaatcgccctttccgcgcagccgaccgtgacaaccgatctgccgtttatcagcgatgagctggccacggctatcagccagcaggggctggaagccgcgctggatcagccgttaacccgcattatggagcaggttcagctggcgctggataacagcaatgagcagccggatgtgatttacctgaccggcggcagcgctcgctcgccgttgattaaaaaagcgctggcagcccatctgccgggtattccggttgccggcggcgatgattttggctcggtcaccgccggtctggcccgctgggcgcaggtggtatttcgttaa

SEQ ID NO: 174716 - DNA, 1287 bp, Klebsiella oxytoca
atgacgacgaaatcgctaacgctttctttggatgaacagcagtctattcctttgggtacggtggcgggaacgctgggccacctcggcatggatatccgtccgctggcgtcttcaggcctgtgcagtttcgaccccggctttgctaataccgccggctgcacgtcggctatctcctggatcgataccgagaacagcgttctgctgcaccgcggctatccggtcgatcagctggctcgccagtgtgactttctagaagtggcctggattctgctgcagggcgatgcacctgatgaagccagctatcaggtgttcaaaaacacgattacccgccatagcctggtgcacgagcagattgcccggatgtgcggcagcttccgccgcgactcgcatccgatggccttaatgtgcgccctggtcggcacgctggcggcgttttatcacgatgtgctggacgttgaaaacccggagcaccgggctctggccgccacccgcttgctgtcgaaaatgccgacgctggcggcgatgagctacaagttctctattgagcaaccggcgcagtatccacgcaacgatctctcttatgcgggcaatttcctgcatatgctgtttgccatcccggcggaaccgtaccagctgaatccggtgattgaacaggcgatgaatcagatcctggtgctgcacgccgatcacggccagtgcgcatcaaccaccaccgttcgggcggcgggctcttccggggcgaacctgtttgcctgtatcgccgcagggctcgcttcgctgtgggggcctacccacggcggggctaatgaagccagtatgcggatgctggaggagattaaaaccgttgatcaaatccctgcgttcctgagcaaagcgaaacgcgacccgcaggcgttacgtcgtctcggattcggtaactctcgctaccgtaacctcgacccgcgagccgctattttgcgcgaaacctgtcaccgggtgctggaggaactggggatgtgcgatatgccattgcaggtagcgatggccctcgaagaggtggcgctgaccgacccgtacttcgtggaaaatggcctgtcgccgagcgttgatttctatacagcggtgatcctcaaagcgatggggctgccttcatccatgtttgtggtgatcaccgccgttggcagaacgctcggctgggtggcgcactggaacgaaatgcacgaagcgccgctgaatatttatcgcccgcggcagatttataccggtgaaaagaggcgggattacgtttcgcggcgcgaagggcgctga

SEQ ID NO: 174717 - DNA, 1893 bp, Klebsiella oxytoca
atggccctgcagatgtgtacgccggcgcgcgcggaagtccgtcagctgggtatcgatattcccgttgactggtacgccgacgccagcggccagatgtccctcgacgcctttcttgcgctaccgcaagaggcgctaaaaacggcgtcgctgatcccgtcgtttgggtattcaaaaaaaactttctggctgcgcacgtcactcccggcggcttatttttccggcgagcagcgctggctgcagcttggcccaccgtttatcgatcgtttaaccgtctattatcgcccctacggcagcgatagcccgtggaaacaaaaagagtttggcgaccatgccccagcccgcgatagcgacctcgactaccgcgaaagcgtgctgattttagcgcccccgcccacgaaggcaggctacgagatggtcttccgtctgcagagcagcagcaccctgatcctgctggcgacgctctcatcgccgcaggaattcgtccgttcggccaccctcgataccgctttctggagtttctatttcggtctggcggtcattgccagcggcatcgccctgtggcttgccgttgcgctgcgccgacgtctgctgtgggggatctgcctgttttcgctgaactatccgctcgtcgcggccctgcatggctacccggaatggttattcggcgacgcccttctgccggttcaggattacatgattagctgcctgtcgctggtaagctacgccaccgcgctgtggctgcatagcgaggtcttcgatctgaagaagaacatgccgcggctgcatcaactgctgctggcggcgatcggcttaaacattgcgctgcaaatcagcatcccgctgggattttacggccgggcaatgcaaattgaagcggggatattttttatcgcctccccggtgctgttgatcacctcatggatgctgtggcggcgtaaagcggttgatatgaatacgctgttgctcgggctactgccgccggtttacgtggtgtcagccgggctggccctgctctcggtacacggcgtgattccgtttcataccagggtttattccacctggcagtatgcgctgatcatccatatcgtcacggtcctgatcatcgccgtactgcgggtacgggcggaaaaccgtaccctgatgcgcaagcagcagctggcgagagagttacaaattgaacgcgaggccagtttccaccagcgccagtttatggggatggtggcgcatgagttcagaacgccgctggccatcctcgaggcggcgctggaaaatctgcgcctgtgccccactgtgtccacgcagagcgcgcgcctcgatcgtatgcagcgagcgaccacccgcctggtgcagctcaccgataattgcctcgccgatgcccggctttcctccagagacctgcacgccgaccggcagaatgcggagctgctgccggttatctatatcgccgccacggtagtggatctgtcgctcaatcattatttacatgtcatctgcgaagggcaaactgtcgggccgcaatcgccttcgccggtactgtttattgatagcgggctgctgtgtattgcgatcgctaatctgctcgataattcagtcaaatattcggcatcaggtgaaataagaatcgagatttatcgcctgcaaaaagggtttgaaatacgcattggcgatcgcggccccggcatcgcgcctgaacaggttgagcatatttttgagcgctatcgacgcggcgaaacccatacgaccacgccagccggcaccggcctgggtctgtacgtcgcccgacaaattatacaggcccacgggggggagctgtgcctggcgaaaaataccgctgacgggtgcgaatttgcgctcacactgccgctggatggacagcagaaggacaaatcatga

SEQ ID NO: 174718 - DNA, 699 bp, Klebsiella oxytoca
atgacattacgcgtcgctatcgttgaagatagcgctgatttactcgacgaactgctggcctttttacgccatcgcggcttcgatgcatggggcgtgcgcagcgctgaagccttctggcggcagctgcatcgcgatccggttgatatcgtgctcatcgacatcggtttaccgggagaagacggatttagcgtgctggattatctgcatgaaattggccatttcggactggtcgtcatcaccgccagaggccatgagcaggatcgcctgcaggcgctgaacgccggcgccgacctgtatctcatcaagccggtcaacttttccgacctcgcggagagcattcacgcgcttggcgcccgtctccgccagcaatccgcgccccagcccaccgcgccgacgatatcagcggaacggtcagcctcttccacctggatattacaaagcgaacagttgattgcgccatcggggctgatcctgccgctaacgcagcaggagtaccgtctgctggaactgttaatgcgcaaccgcaatgaagtgtgcagcaaagttgacctgcacgcctctctgttcaccgatgaaggcgaaccggaactgcaccggatcgatgtcgtcgtcagccgcttgcgccacaaggcccgccttcagggcatggccctgccgattcgcgctatttttggcaaaggtctggcgtttctttcctga

SEQ ID NO: 174719 - DNA, 618 bp, Klebsiella oxytoca
atgaaaaaaataaacatcgcaatcaataccagcaacacttttctgcggcaatcgctggcttccatggtcaatgagctcacccgccgcgacggtcatctgcacgtcagcttttcgtataagaaaaatgatttttttgataaggatattattatcgccgaggttctccccggtgaaatctacctgtgtaataccagtctaaaaaatcgcaaatcagatagctcagttattatactgcacagctacgaccagctcccggagcaggaactgattgttaactgcctgaaaggggttattttcgtgtcgataaaattagttaatattgacaggatgttggccatccttgcccaggagctaagaaagtgcgaaggtctggttctggcccggcgggccgactcggcgatagtctgcagcaactgcccgcacaaaatgctgtcaaaatcgcaggttgccgtcgcctccggaattattcatggctttgatatcagtaaaatctccgccctgcacaaagtcacgcccaaaaccatcacctggcacaaaagtaaaatcatggaaaaatatcgcctcaataaccattatgactttttccagtttattaatttgttaaaagagcgctggtaa

SEQ ID NO: 174720 - DNA, 1275 bp, Klebsiella oxytoca
gtggcaagtgcaaacaaactcacgctgttcatcgttatctttatgctgttggggatcctctccggcgcggccattcacgcatacgccgcgcaaacgaccataaccgcatggtctgaaaatattacgctgctgaccgacgtattcctgcgcctgattaaaatggtgattgcgccattagtcttcagtacgctcaccgtcggcattatgcggcttggcgaaacggctaccattgggcgggtcggcggtaaagccatggtgtggtttgttacctcttcgattctctccattctggttgggctggtgattgttacccttgagcaccccggcgccgggttgaatctggcaattccgaaagagtcggtcgataccggcctggcggtgagcgggatgagcctgaaaggctttctgacgcatactattccgaccagcattaccgaagcgatggccaacaacgaaattctgcaaatcgtggtgttctcgatgttcttcggcattgccggggcgtcgctgggggagaaattcaacgctccgctggtggcggccctgaacgtggtttcccatattatgctgaaggtcaccgggtacgtgatgtacgtggcaccgctggcgatttttgccgccatctcttcggttatcgcctcgcaagggctggggatcctgcttaactatgcttcgttcatcggcggttactacgttgcagtgctgctgaccagcatggtgctgctggcggtgggatatatggtgctgaaaaaagaggtttttcgcctgcttaatatgctgaaagatccggtactggtggcgtttaccaccagcagctcagaagctgcctatccgaagacccttgagcgcctcgtggagttcggctgctcgcgtaatatcgcgtcgttcgtgctgcccatcggctactcctttaacctcgtcggctcgatggtgtactgctcgtttgccgcgatgtttatcgctcaggcctacaatattcatctgagctttagcgagatcaccgtgatgatgctaaccctgatgctggcatcaaagggaatcgctggggtgccgcgctcggcgctggtggtgctggccgcgaccatcccgagcttcaatattccggtggcgggtattttgctgctgatgggtattgaccattttctcgatatggggcgttccgcgattaacgtgctggggaatgggatcgcgacggcgatgctgtcaaaaaatgaaggtctgttgcaggaagaggtcgcggaagaagaagccgcggctcagcaggtcgaggcctga

SEQ ID NO: 174721 - DNA, 1119 bp, Klebsiella oxytoca
atgaaaattaaacacgatacattacctcaacatgcgctcggtgggcagcggcaattaagccattttcatttcggcgcgcccggcgccggcgagaaagtctatctgcaggcggggctgcacgccgatgaaattccgggcatgctggttctgcattatcttaaaagattactcagccaggcggaacgacggggcgagctgcgcggtgaaattattatggtgccggtagccaatccgccggggctggctcagctgctgcttaacagcggcattggccgtttcgatctggcgagcgggcgcaatttcaaccgcgactttcccgatctggcggcgctggcgcagccctggctacccgcggaatcgcccgctacgcgcgccgaatatctccagcaggtgcgcgatggcatgcagaaggcgctggcggcgcttcccgtggcaagcgaggttcaggccctgcgtcaacatctgctgagcctcgcctgcgatgccgatctggtgctcgatctccattgcgatgaccaggcgattttgcacctttacgccgatccggcctggcaacgcgaggcgaacgtactggcggcttttctcggtattggcgccgtgctgctgtcccaggagagcgggggcaactcgtttgatgaggcctgcggcctgccgtggcagcgtttgagcgcgctaaacccggcgtggggcccgcagcagcccggctgtatggcggtgaccgtcgagctgcgcggccagcacgaggtgaatcacgctaccgcctgcgacgacgccgaacgtatttaccgttatctgcagtaccgcggcgtgctggcgggcgacaagcctgcggtgccgcagcaggaaacggtgatgctgccgtttgctgccggagagattgtcaccgcgccggcgaccggcatcctggtgccgctaaaacagccgggcgaatgggtcggcgccgacgatgtcgtcgcggaaatcatcgacccgctgaccgatatggtcaaagcggtgcggccgacatcgggcgggctgatttatgccagccggcgggcaccgtttgtcacgctgggggcggaaataatgaaaatcgccggcgagcagccgttcagcggcggcggcgggctggcgatgtaa

SEQ ID NO: 174722 - DNA, 456 bp, Klebsiella oxytoca
gtggaaaagaaaacccggcttgaccgtatcgatcataagatccttgaaatcctgcgccgggatggccgcatttcttatcagaagctctcggagcaggtaaatctcaccgcgcgtccatgtctggaacgcgtgcgcggcctcgagcgtgacggcatcattcgcggctacagcgccattatcgaactgcccgagccggagcatgcgtttgtggtgcaggcgcaaatcgccctggccgaccacggccgctcgcagccggtgtttgaacaggagatgcgccagacgcccgaagtgctggactgctggctggtgagcggcagcttcgactttctggtacgcatcggctgtcgcagcatggcacactattgccagctggcggatagctggctgaccagtaaaaagtttcacgttgataaaatcgttactctgaccgaactccaggcgattaagcgctcctga

SEQ ID NO: 174723 - DNA, 726 bp, Klebsiella oxytoca
atgaatctgcaaacctttctcgatgcgatcccgagctttatctggagcgatggcaacggtgccgccagcgggctggcgataacggcggagctgtttttgctctccatcgttcccgggatggcgctggcgattgcgatggcggtggggcaggtgtacggcccgcgcgcgctggcgctgcccatccgtggttttacgtattttttccgcagcacgccgctctatctgcaactgatgctgatttactacggcctgtcgcagttcgatatcgtgcagacgggttggatgaacgatcagccgttctggctgctgtttcgcgatgcgaccttctgcgccacgctggcgctggtgctgaacacctccgcttacgtcgcggagctgctggcggggatgatgctgacctttccccgtcaggagtgggttgccggagaagcctacgggatggggaaatggcagattattcgtcgtctggtgctgcccgcgacgctcagacgcgggatcccggcgctgaataatgaaatggtctttttgctccacgccacctcgctggccagcacggtaaccctgctggatattaccggcgtggcccgcgcgttctacgccatgacctggtcgccgtttattccgtttctgatggccgcggcgctctatctcctgtgcacctttctgctgattttcgccttttcccgcgccgaacggcgctggctggcgtttatccgccgcggctaa

SEQ ID NO: 174724 - DNA, 693 bp, Klebsiella oxytoca
atggtcgcagactatttacccttactgttacgcggcgcggcgctttcgctgtgcgtgatgctctgctcattgctggtcgcgctgctgctgggcctgatcaactcgctggttaaactctttggcccgccgtggctgcgcctgttttccaccgcctacaccaccctggtacgcggtattcccgagctggtgattatgctactgctgtttttcggcggcgagatgctggttaacctgctgctggcagcggtggggctggggccggtgcgcttcaatacctttttttccggcgtgctggcgattggctttgtgttcggcgcctattacaccgagacctttcgcggcgcatttctgaccgtcgatcgcgggcaaaccgaagccgcgcaggcctacggaatgcgcccgtggacggtatttcgccgggtgatgctgccgcagatgctgagcttcgcgattcccgggatcaataataactggctggggctgatgaaagcgtcggcgctggtgtcgatcctgggtctggaggacatggtatggctggccgagcaggccgggcgcgctacgcaaaaaccgttcctcttctatttcctggtttccctgatttatatggtcattaccgcgctctccagctggttgtttagccgcctggcgaagcgttatgcgctgcgttcttccacggcgggggccgcgctatga

SEQ ID NO: 174725 - DNA, 774 bp, Klebsiella oxytoca
atgaaactacgccttgccgcactactggcctgcatggcgctcagcgcgccgctggccgcccagcagtttgataccatcagctttggcgtcgatggcggctatccgccgtttgacgtactggcccccagcggtgaaattaccggttttgatattgatatcgccaacgcgctgtgcacccagctaaaagccaaatgcgttttcgttaagcagccgttcgaaagcatgattgccgctctcaacgcgcataagttcgatgccattatcgcttcgctcaatatgaccgatgcgcgtaaaaaggaagtggacttcaccgaccgctactaccgcagcgcagcgcagctggtggcgcgcaaaggtagcccgctgctgcctgaggtcgccagcctgaaaggcaagaccgtcggcgtccagaccggttccacccatgaagcgtttgcgaaggctaactgggccaaccacggcgtgaagatcgtcagctacgcgaatcaggataacgtctaccttgacctgctctccggacgtattgacgccgctttgcaggataatatccaggcggcgaccggctttattgataccccgcgcgggcagaaattcgcttttgccggtccggtcattcaggacggcggcatctcttccgatgtggggattgcggtgaataaagataatccggcgctgcgggatgccctgaacggcgctatcaaggctattcgcgccgatggcacctacgacgctatccagaaaaaatactttagctttgatatttatggcaaataa

SEQ ID NO: 174726 - DNA, 762 bp, Klebsiella oxytoca
atgcattttacccaagctatcgcccgtctaccggccgccacctgcggcgcaggacaaactaccgcccaactgggcgcgccggatatcgccgccaccacgcgccagtttctcgcctatgtagagacccttctgcagctcggcctgaaggtcaccgtgcttcctgccgcggcggaatatcccgatgcgcactttgttgaagataccgcggtggtcatgccggaactggcggtgattactcatccgggcgcgccgagccgccagggcgaagtcgatactattgcgccggtgctggcggggtttcgtccactggtgcagatgagcgaaagcggacatatggacggcggcgacgtgctgctggtgggcaaacgattttttatcggcctgacggcgcgtaccgatgagcaggggatccgcgaatttgccgccgccgttgagccgcacggctacacggtgacggcgattgacgtgagcgccggtctgcatctgaaatcgattgtcaactatgtgggccgcaatacgctgctgctgacggaaggctacgttaaccatccggcgtttagcggcttcaatcgtatcgtgatcccggaggaagaggcctacgccggaaatacgctgtggatcaacgatactttaattacgccgcagggctacccctgtaccctgggcgaaatcagcaagctgggaatgcctgtcatgcaactcgacaccagcgaatttaagaaaatggatggcggcctgacctgcctctcactgcgtttttaa

SEQ ID NO: 174727 - DNA, 1254 bp, Klebsiella oxytoca
atgaaaggtagcaataaaagccgttgggcagccgtgctggtggtagcgatcgtcgcgggcgccgcgtactggttctggcagggtcgcgaagcggcaaatagcggcgcgccgacggcgacaggcgcgcgtcagcagggccccggaggcggacggcccggtcgttttggcgccgccctcgcgccggtacaggcggcaaccgcaaccagcgaagcggtgccgcgctacctttccggcctcggcaccgtgacggcggcgaataccgtcaccgtgcgcagccgcgtcgacggccagcttctggcgatccactttaccgaaggccagcaggtcaaagcgggcgatctgctcgcggaaatcgatcccagccagtttaaagtcgccctcgcccaggccgaggggcaactggccaaagatcgggcgaccctcgccaacgctcgccgcgatctggcgcgctaccagcagctggtgaaaaccaatctggtgtcgcgccaggagctggatacccagcagtcgctggtcagcgaaacccagggcacgattaaggcggacgaagccgctgtcgccagcgcccagctccagctgaactggagccgcatcaccgcgccgattgacggccgggtcggcttaaaacaggtggatatcggcaaccagatctccagcggcgacaccaccggcattgtggtgctgacgcaaaaccaccctattgatgtggtctttacgctgccggaaaaccaaatcgccaccgtcgtacaggcgcaaaaggcggggaaaaagctggcggtcgaagcctgggaccgcaccaataaacagaaaatcagcgaaggctcgctgctgagcctcgataaccagattgacgccaccaccggcaccatcaagctgaaagcgcgctttacaaaccttgatgacgccctgttccccaatcaattcgtcaacgcccgtatgctggtcgataccgagcaaaacgcggtagtgatcccaaccgccgcgctgcaaatgggtaacgaaggtcatttcgtctgggtactgaacgacgagaacaaggtcagcaagcacaccgtcacgccgggtattcaggacagtcttaaagtggtgatcaacgccggtctttccgctggcgatcgcgtcgtaaccgacggtatcgaccgtctgacggaaggcgcaaaagttgaggtcgtcgaagcccacgatgcggcaaccgccgccgagccggaaaaagccaccagccgcgaatacggtaaaaaaggagcgcgctcctga

SEQ ID NO: 174728 - DNA, 3123 bp, Klebsiella oxytoca
atgcaagtgttaccgccgagcagtacgggcggcccttcccgtctgtttatcatgcgcccggtcgccacgacgctgttaatggtggccatcatgctggccgggattatcggctatcgattcttaccggtttcggcgctgccggaagtggactacccgacgattcaggtggtaaccctctatcccggcgccagcccggacgtgatgacttcatccgtgacggccccgctggagcgccagtttggccagatgtccggcctcaagcagatgtcctcccagagctccggcggcgcgtcggtggtcacgctccagttccagctcacgctgccgctggacgtcgcggaacaggaagtacaggcggccatcaacgctgccaccaacctgctgccttctgacctgcctaacccgccggtctacagcaaagttaaccccgccgatccgccgattatgaccctcgcggtcacctcttccgccgtgccgatgacccaggtcgaggatatggtcgagacccgcgtggcgcagaagatctcccaggtttccggcgtcgggctggtcaccctcgcgggcggccagcgcccggcggtacgcgtcaagctcaacgcccaggccatcgccgcgctcgggctgaccagcgaaacggtgcgcaccgcgataaccagcgccaacgtcaactcggcgaaagggagccttgacggcccggcgcgggcggtgaccctctccgccaacgatcagatgcagtcggcagaagattatcgccgcctgattatcgcctggcagaacggcgcaccgattcgcctcggcgacgtcgccaccgtggaacagggcgcggaaaacagctggcttggggcatgggcgaacaatcagcgggcgatcgtcatgaacgtccagcgccagccgggggccaatattatctctaccgccgacagcatccgtcagatgctgccgcagctgaccgaaagcctgccgaaatcagtcaaagtacaggtgctttccgaccgcactaccaacatccgggcatcggttagcgacacccagttcgagctgatgctggctatcgccctggtggtgatgattatttacgtctttctgcgcaacgtcccggcgacgattattcccggcatcgccgtgccgctatcgctggtcggcacctttgcggcaatggtgtttctcgatttctcgattaacaacctgacgctgatggccctgaccatcgccaccggctttgtggtcgatgacgccatcgtggtgatcgaaaacatctcgcgctatatcgagaaaggcgaaaagccgctggccgccgccctgaaaggggccggagagattggctttaccattatctcgttgaccttctcgctgattgcggtgctgatcccgctactgtttatgggcgatatcgttggccgcctgttccgcgagtttgccattaccctggcggtggcgatcctgatctccgcggtggtgtcgctgaccctgacgccgatgatgtgcgcccgcatgctgagccacgagtcgctgcgcaagcagaaccgcttctcgcgcgccagcgagcgtttctttgaacgggtgatcgccgtctatggccgctggctgagccgggtattgaatcatccctggctgacactgagcgtggccctcggtaccctggtgctgtcgattatgctatgggtgtttattccgaagggctttttcccgattcaggacaacggcatcattcagggtacgctgcaggcgccgcagtcggcgtcgttcgccaacatggccgagcgccagcagcaggtgtcggcggcgatactcaaagatccggcggtggaaagcctgacctcctacgtcggggttgacggcactaacccggcgctcaacagcgcccgcctgcaaatcaaccttaagccgctggacgagcgcgacgatcgcgtgcagacggtgatcggccgcctgcagaacgcggtgagcgggattcccggcattgagctttaccttcagcccacgcaggatctgaccattgacaccaccgtcagccgcactcagtaccagttcaccctacaggcgaactcgctggatgcgctcagcaactgggtgccacagctgctgacccggctgcaggcgctgccgcagctctccgacgtcagcagcgactggcaggacaagggcctggcggcgtatatcaacgttgaccgcgatagcgccagccgcctcggcatcagcatggcggacgtcgataatgcgctgtataacgccttcggccagcgtttaatctccaccatctatacccaggcgaatcagtaccgcgtggtgctggagcatgatacccaggccacgccggggctggcggcgctggataatattcgcctgaccagcagcgacggcgggattgtgccgctgaaatccatcgccagcgtcgaggagcgttttgccccgctatccataaaccatctcgatcagttcccggtcaccaccatctcgtttaacgtgccggataactattcgctgggcgatgcggtcgatgccatccttggcgccgaacaggcgctggaattcccgagcgatatccgcacccagttccagggcagctctctggctttccagtcggcgctgggcagcaccgtctggctggtggtcgctgcggtagtggcgatgtatatcgtcctcggagtactgtatgaaagctttattcacccgataacgattctctccaccctgccgacggcgggcgtgggcgcgctgctggcgctgtggctggcggggagcgaactggacgttatcgcgattatcggcatcattttgctgatcggcatcgtcaagaaaaacgccatcatgatgatcgacttcgcgctggccgccgaacgcgaacagggcatgccgccgcacgaggctatctaccaggcctgtctgctgcgctttcgtcccatcctgatgaccaccctcgccgccctgctcggcgcgctgccgctgatgctcagcaccggcgtcggcgcggagctgcgccgtccgctggggattggcatggtcggcggtctgatgctcagccaggtgctgaccctgttcactaccccggtgatctatctgctgttcgaccgactgtcgctgtatatgaagagccgattcccgcggcgtgaagaggaggcgtag

SEQ ID NO: 174729 - DNA, 3078 bp, Klebsiella oxytoca
gtgaagtttttcgcgctcttcatttaccgtccggtggcgacgattctgatttcgctcgccattactctctgcggcatcctcggttttcgcctgctgccggtagcgccgctgccgcaggtggacttcccggttatcatggtcagcgcctcgcttcccggcgcgtcgccggagactatggcctcttcggtggcgacgccgctggagcgctctttggggcggattgccggggtcaatgagatgacctcctccagctcgctcggcagtacgcgcatcattcttgagttcaactttgaccgcgatatcaacggcgcggcccgcgacgtgcaggcggcgattaacgctgcgcaaagcctgctgccgagcggtatgccgagccgtccgacctatcgcaaagccaacccgtcagacgcgccgatcatgatcctcaccctcacctcggatacctggtcccagggtgagctgtacgacttcgcctcaacccaactggcgcagaccattgcccagattgacggcgtcggcgacgtcgacgtcggcggcagttcgctgcccgcggtgcgcgtcgacctcaacccgcaggcgctgtttaaccagggcgtgtcgctcgacgcggtgcgcaccgccatcagcaacgccaacgtgcgtaaaccgcagggggcgctggaagatgccacccaccgctggcaggtggcgaccaacgacgagctgaaaaccgcggccgaataccagccgctgatcgtgcactacaacaacggcgcggcggtgcgcctcggcgacgtcgccaacgtcaccgattcggtgcaggacgtgcgcaacgccgggatgactaacgccaaaccggcgattttgctgatgatccgtaagctgccggaggccaatatcattgagacggtggacagcattcgcgcccgtctgccggagctacagcgcaccatcccggcctctgtcgatctgcaaatcgcccaggaccgttcgccgaccatccgcgcctcgctggaggaagttgagcaaacgctggtgatctcggtggcgctggtgatcctcgtggtcttcctcttcctccgctcggggcgcgcgacgctgatcccggcggtggcggttccggtttcgctgatcggcaccttcgccgccatgtacctgtgcggcttcagccttaacaacctgtcgctgatggcgctgaccatcgctaccggcttcgtggttgatgacgccatcgtggtgctggaaaacatttcccgccatctcgaagcgggcatgaagccgctgcaggcggcgctgcaggggagccgggaagtcggatttaccgttctgtcgatgagcctgtcgctggtggcggtattcctgccgctgctgctgatgggcggcctgccgggaaggctgctgcgcgaattcgccgttactctgtcggtggcgatcggcatctcgctggcggtctccctgaccctgacgccgatgatgtgcggctggctgctgaaaagcggcaagccgcacgagccgacgcgcaagcgcggtgttggccgcctgctggtggcgattcagggcggatacggtaagtcgctgaagtgggtactgaagcatagccgcttaaccggcctggtgctgcttggcaccatcgcgctgagcgtctggctctatatttcgattcctaaaaccttcttcccggagcaggacaccggggtgctgatgggcgggatccaggccgatcagagcatctcgttccaggcgatgcgcggcaagctggaggactttatgaagatcattcgtgaagatccggcggtggacaacgtcaccggttttaccggcggctcgcgggtcaacagcgggatgatgtttatcaccctgaagtcgcgcgatgagcgccatgaaacggcgcagcagattatcgatcggctgcggaagaagctggccaaagagccgggggccaacctgttcctgatggcggtacaggatatccgcgtcggcggccgtcaggccaacgccagctaccagtacacgctgctgtcggacgaccttgcggcgctgcgggagtgggaacccaaaatccgcaaaacgctggcggcgctgccggagctggcggatgtcaactccgacagccagaataacggcgccgagatggacctgatctacgaccgcgataccatgtcgcgactcggcatcagcgtgcaggacgccaataatctgctaaataacgccttcggtcagcggcagatctcaaccatctaccagccgctgaaccagtataaagtggtgatgcaggtcgacccggtctacacccaggacgtcagcgccctcgataaaatgtttgtgatcaacagcgaagacaaggcgatcccgctatcctatttcgccaaatggcagccggccaacgccccgctgtcggtgaaccatcaggggctgtcggcggcatcgaccgtgtcgtttaacctgcctaccggcaaatcgctgtcagaagccagcgacgccattaaccgggcgatgacccagcttggcgtgccgtccagcgtgcgcgggtcgttcgccgggaccgcgcaggtgttccaggagaccatgaactcgcaggtgatcctgattctggcggctatcgccacggtctatatcgtgctggggatcctctatgagagctacgttcatccgctaaccattctgtcgactattccgtccgcgggcgtcggcgcgctgctggcgctggagcttttcgatgccccgttcagcctaatcgcgcttatcgggattatgctattaattggcattgtgaagaaaaacgccatcatgatggtcgactttgccctggaagcgcagcgcaacggcaacctgccgccggaagaggcaatcttccaggcctgtctgctgcgcttccggccgataatgatgaccaccctggcagcgctgttcggcgcgctgccgctggttatctctggcggcgatggcgccgagctgcgccagcccttggggatcaccattgtcggcggtctggtaatgagtcagctgttgaccctgtataccacgccggtggtctatctgttcttcgaccgtctgcggctgcgtttttcgcgaaaagtccatcaaccggtaagcgaataa

SEQ ID NO: 174730 - DNA, 1416 bp, Klebsiella oxytoca
atgacagatcttccttccagcgtacgctggcagctgtggatagtggcctttggcttttttatgcaagcgctggataccaccatcgttaacaccgccctcccctcaatggcgcaaagtcttggggagagcccgctgcatatgcatatggttatcgtctcctacgtgctgacggtggcggtgatgctgcccgccagcggctggctggcggatcgtgtcggagtaagaaatatcttttttagcgccatcgtgctgttcaccgccggctccctgttctgcgcgcaggccgccacgctcgatcagctgattctggcccgggtgctgcagggcgtcggcggcgcaatgatggttcccgtaggccgcctgacggtaatgaaaattgtcccgcgcagccaatatatggcggcgatgaccttcgtcaccctgcccggccaggtggggccgctgctcggcccggcgctcggcgggatgctggtggagtacgcctcctggcactggatctttctgatcaatattccggttggcatcgtcggcgccatcgccacgctgtggctgatgcccaactacactctgcaaacccggcgctttgatatcctcggctttattttgctggccgccggcatggcgacgctcaccctggcgctcgacggcaaaaaggggctcggaatctcccccctgtggctgacggcgctggtggccatcggcgcggcgtcaattctgtgctatctgtggcacgcgcgcggcaaccgcaacgcgctgttcagcctgaagctgtttaacaaccgcaccttttctctcggccttggcggcagcttcgccgggcgcatcggcagcggcatgctgccgttcatgaccccggtgtttttacagattggcctcggcttttcgccgttccacgccgggctgatgatgatcccgatggtgcttggcagcatgggaatgaagcgtattgtggttcaggtggtcaaccgcttcggctatcgccgggtgctggtgacttcaacgatcggcctcgcgctggtcagcctgctatttatggccgtcgcgctcgcgggctggtactggctgctgccggtggtcctgtttctgcagggaatgattaactccagccgcttctcttcaatgaataccctgaccctgaaggacctgcccgacgatctggccagcagcggcaacagcatgctatcgatggtcatgcagctgtcgatgagtatcggcgtcactatcgccgggatgctactcggtctctacggccagcagcatatcggcgtcgatgcggcgaccgctcatcaggtgtttctttatacctacttaagcatggcggtggttattgcgctgccggcactcattttttcccgcgtaccggacgacaccacgatgaataccgtgattcgtcgccgtaaaaggagtgagtcttga

SEQ ID NO: 174731 - DNA, 1530 bp, Klebsiella oxytoca
ttgaagttctggcgtcccggcattaccggcaagctgtttatcgcgattcttgccacctgcatcgtgctgctaatcagcatgcactgggcggtgcgtatcagttttgaacgcggctttatcgactatatcaagcgcggcaacgaacagcgcctgaccatgctcggcgatgccctgagcgaacagtatgcccagcacggcagctggaagttcctgcgcaacaacgaccgctttattttccagctgctgaaaacctttgagcgcgacaatgacgatcgctcgccgccgggtcgcggcatgggtccgatggacgaaccgcatccgggccccgaccccggagagatgccgccggatgccgcgccggaccgcccccttgagggcccgcgcggcgatcgtggcgatcgcggtcccggtcctgatatgcctccgcacggctggcgcacgatgttctgggtggtcgatcagaaagggcgcgtactggtgggcccgcgcgagcgcgtcccgacagacggcacccggcgcagcattatggttaacggcgtcgaggttggcgcggtcattgcctcgccggttgagcgcctgacacgcaataccgatatcaacttcgaccgtcagcagaaacgcaccagctggctgattgtcgccctcgctacgctgctggcggcgctggccaccttcccgctggcgcgcggtctgctcgccccggttaaacggctggttgaggggactcatcgtctggcggccggcgatttctccacccgggtcaccgccaccagcagcgatgaactggggcgcctggcgaaagatttcaaccagctagccagtacccttgaacgcaatcagcaaatgcgccgcgacctgatggccgatatttctcatgaactgcgcacgccgctggcggtgctgcgcggcgagctggaggcgattcaggatggcatcaggaaatttaccccggattccatcgcctccctacaggcggaggtcgccaccctcaccaaactggtcgaggatttgcaccagctttccatgtccgatgaaggcgccctcacctaccagaaaagctcggtggatattattaatctgctggaggtcgccgccggcgcgtttcgcgagcgcttcgccagccgtggactgtcgattggcgtttcgctgccggaaagcgcggcgattttcggcgaccgggatcgcctgatgcagctgttcaacaacctgctggaaaacagcctgcgctataccgatagcggcggcggcctgcagattagcgccagccagagcggccagatgctgattctcgactttgccgatagcgcgcccggcgtcaccgacgaacagctggagcggctggttgagcgcttttatcgtaccgaagggtcgcgtaatcgtgccagcggcggctctggtctggggctggcaatttgccttaacatcgtggctgcccacggcggcactttacgtgccgaccattcgcctttgggcggggttagcattaaagtagagttacctctggaacgtaatttatcgagagacgtatga

SEQ ID NO: 174732 - DNA, 723 bp, Klebsiella oxytoca
atgactgaattacctgttgatgaaaacacgccgcgcattcttatcgtggaagatgagcccaaactgggccaattgctgatcgattatcttcaggcggcgggttatgcgccgacgctgatcaatcacggcgatcgggttctaccgtacgttcgccagacgccgccgcatctgatcctgctggatctgatgctgcccggtaccgacggactcactctgtgccgggaaatccgccgtttctctgaggttccggtggtgatggtaaccgccaaaatcgaggagatcgaccgcctgctggggttagaaatcggcgccgatgactatatctgtaagccctatagcccgcgtgaagtggtggcccgcgtgaagaccattcttcgccgctgcaagccgcagcgcgatctgcaggcgctggatgccgaaagcccgctgattgtcgacgagggccgcttccaggcttcctggcgcaacaagctgctggacctcacgcccgccgagttccggctgctgaagaccctctctcaggagccgggtaaagtcttctcccgtgaacagctgctcaatcatctgtacgacgattaccgcgtggtcaccgatcgcactattgacagccatatcaaaaacctgcgccgcaagctggaatcgctggacgccgagcagtcgtttatccgcgccgtttacggcgttggatatcgctgggaagccgacgcctgccgcctggcgtaa

SEQ ID NO: 174733 - DNA, 1200 bp, Klebsiella oxytoca
atgagtaatattcatagaaaatatagtccacgaaatataattaacgcccctgatgtaaaatcggccattatttctcgcagcgaacagcgtgacgacggtagtagtattcaacgctggctaagcaaccatttttttcgctgggctatcggtaattttccccacgtttaccccgtacgctccgccgccgattatgcggtttactttggcgcggagaaggcgatccccgcgtggttgatatccgggctgggcggcggcggcgccttttactatcttaatccacagcatccgcagctgctggcgacggaaagggagttactggagttcctgttgcggctggaaggcacgcggctggaaagcaaacttcagcgcattaactgtttcaccgtcctggacatgcgcgaggccgagcaccagaaaatgcagcgcctgcgcgaacgaggctggtacccctccagcgacgacgccattaagccgctgatgaaggtcactgctgggcagtgggtcgccttcgatgccgccagcccggccttgcgtagtgaaatggcctatgaatcctggcatatgcagcactgcgtcggccagttcgaggataaagggtcactctccggcggctacggcgagtactacgcccggcaaattgaacaaggcgcatttcgccttctgagcctgcgcgacgaaaataatattccccacgtcaccctgagcctgaggataaataatgacagcatgagtatcgatcaaattaaaggtaagcagaaccagcatcctgttaaaaaatatgccgccgacgttttggctttattacattatctgcaaccacgtcccgagcgccacgccgattgtgaaggtatggggatcgtctatgaagcgacgccgcaatttgctggctggaaatttatcaccgatgtggttgattttgattttttactcaacgttctgcataacaattttcatttaatgacgcacttccctcacccaccggtggcgctacagtggctgcttctgcacagcgctccggaggcattgcgctatcttcggacgatcgatcccaacgtggcgaccgcggcggaaatgctgttcccacagcatgaatggcaccctacgcttgccgggaaaaacacctgcagccagccttttgaaattgagagcctgacgctacaaaccacgcgctaccgaccccacaccggagagagtccttga

SEQ ID NO: 174734 - DNA, 717 bp, Klebsiella oxytoca
atgctgctgatagccttgtttaccaccgcttattacctgcgcttacgcgccaaaaaaaagaataaacagctggttgccgcccgcatcgccgaggaaaaagaaaaggaccgtcttaacgatctgcgccgcgatagccgaagacgccagtgggcgctggcgttagccgatctcctctcgcaccgcaatggcctgccgacaaaaggcgtacagctggcgttgaaacttgatgatgaccagcgccgccacctgacgcagcaggtaaaaaaagaactgggcttgcatcagcacctcgacggcgcggcgttacgccagcagatcgccgagatcctgcgctgctggccggcgggcatgggcaactcgccgcgcacgttttaccaccacctggcggcccagggccgggttcgcgacgcgctggcgttcgactgcatgcgcaccgcctttctgacgcgctgtatcgccgggctcggctggtgcgacgaaaatcaggcctggctggttctcctgttaaacgcccagcgggcgcaggattgttttgcttcgtgggaagattacgccaccgcctacgtccgcgcccgccgggtacggctggcgttaatggatacgccaacggcggttgccggacgcgatgtgcaggaggtggcctgttatctgaaagcctccttcagccgctggaaaacgctgccgtggaatgacttcaaaattttcgacccggtttaa

SEQ ID NO: 174735 - DNA, 1191 bp, Klebsiella oxytoca
atggaaaaggatgacccactgctcaccgccatgtttgagatgtgcaaccgtaaaaatcccctcaatgacggacagcgcgagtggtctatcgcggatcttcccggcctgttgcgcgaaggatgttataacgagctcgaggcgcgctatagccgggcgctggcggaaagcctgaccagccgcgaggcggaaaaacgttacttcctcgcctggacgcagatgtgcaaccatttttacgatatggatgcgctggtcgaggccgggcctgctgggttagcgccgatcaaaaactggcagcgcgcccgcccgcgctccagctatgcctggcttgctgaggcccagtactggaaccaccgcgcgtggctctatcgcagctacggctgggcgcaggataccacccgcgccatgtggatctgcgccagcgcctgcaatgagcggatggtcattgccgctctctacgccatcgacctcgaaccacgccagtggatgggggcgtccctgaccagcactaactctaaggtcttcggccagcccgactggctggctgagttccttgccggcgctgaggttgcaggacgaccgctgatgcaggaactggttgagtatcaccgccgctcaccgcaggaagtggaggcgctgatggcccattccggcctgtcgtttgccgacgcggtatgcccggatctgcctcgtccgcaggtactgcctgcgtgcgatggcgacgccgggcaacgctactggctcgccgtttgtctggcgattttcccgacggcattttacgcgctggatgagtatattccgtttcgtatgccgcgctggggaggatcgcatcaggagatccgcgaatttctggcttcaacggtatgcgatcatcttaccgccgccgagcgggagcatctggaacttttaatctggtgggatgaccatcgcgatctgcgtatcaatgaagtggattcaccgaccgagcgggagcatattatcgccaaagccgaagagattgcccggcgggcgcacatggcgcagtctcgccaccatgcgctggagtggctgctgctctgctatagcgatttagacgataaagacgcgctctggctcaccctgcagcgttcggtcatggaaaaagtgaagctcaacaattactacaccgcgtgggcgttaaagtttgcgctgcgcgatttcccggacagcgagtag

SEQ ID NO: 174736 - DNA, 876 bp, Klebsiella oxytoca
gtgccgaaaatctatcgcggctacttccagtacgcggggttatttggctttgaaaaagataaagcgcagggcgccgtctggctcgatagcgtcgccgacattgaatacgaccataactggcgggcggcgataaaagattttcgctggctcggttaccccgaatatctcctgcctctggcccaccttggcgcccggagaaacatccccagcgcgcttaatcagctcggggtggaatctcatgccagagataacggaggcttgttgccgtacgatcccgccatcgccttcggttactgccagcaagcggccgagattttacgccagcacgtcgcgcagcgcgacgcagataataaatatcgcttgatcgccaacggcggcgatgacggctatgaacaggatctgcaggagatccatttccgcatggccaactgcagcgaacgtctgatcaaccaggctccgccggcggaaaagcgcgccgcttacgaaaaaaaccttctcgataatctctatctggcctcccgctatggcgataagcgggcctgggaactctttctgcttaatatcgccggcgtaaaagatttagcgctggcgcactcacatttgcaacaggtgcaggaagcggcaaataaaggttcgccggaggccatggtggcgctgtcgcagctgtacggtaacaaacgggataaagcgctttataatatgaaacagagcgcgcgctggacgcattttttcatcaccttgtaccctgaacatgaattattcatggatctggatgctctccatttcgattctttctggaaacgctggcgctttgcctggtacacctcacgtatcccggattccgagctgccggggcaggtcaactccatggtgtaa

SEQ ID NO: 174737 - DNA, 1362 bp, Klebsiella oxytoca
atgtttaaaccggaactcctttccccggcgggaacgctgaaaaatatgcgttacgctttcgcctatggcgcagatgccgtttatgcgggccaaccccgctactccctgcgcgtgcgtaacaacgaattcaatcacgaaaatctgcagctcggcattaacgaagcccacgcgttgggtaaaaaattctatgtggtggttaacattgccccgcataacgccaagctgaaaacgtttattcgcgatctgaagccggtggtggaaatggggccggatgcgctgatcatgtccgatccgggcttaattatgctggtgcgcgaacattttcccgacatggatattcatctgtcggtgcaggccaacgccgtgaactgggcgacagtcaagttctggcagcaaatggggctgacccgcgtcattctctcccgcgagctgtcgctggatgaaatcgccgaaattcgcagccaggtgccggagatggaaattgaaatcttcgttcacggcgcgctgtgcatggcctactctggccgctgcctgctctcgggctatatcaacaaacgcgatccgaaccagggcacctgcaccaatgcctgccgctgggagtacaacgtgcaggaaggtaaagaagacgacgtcggtaatatcgtgcataagcacgaaccgatcccggtgcagaacgtcgagccgacgctgggcatcggcgcgccgactgaccaggtgtttatgattgaagaggccaaacgtccgggcgaatacatgaccgcgtttgaagacgaacacggcacctatatcatgaactcgaaagatctgcgcgctatcgctcacgtcgagcggctgacccagatgggcgttcattcgctgaaaatcgaaggccgcacgaaatcacattactattgtgcccgtaccgctcaggtctaccgcaaggccattgacgacgccgccgcaggcaaaccgttcgatacttccctgctggataccctggaaaacctcgcgcatcgcggctataccgaaggttttctgcgtcgccatacgcacgatgactaccagaactatgagcacggctactctgtttccgaacgccagcagttcgtcggcgaatttaccggcgagcgcaacggccagctagcggcggtggcggtgaaaaataaattttccgtcggcgacagccttgagctgatgaccccgcagggcaacgtcaactttactctcgaacatatggaaaacggcaaaggcgagcgagtgtcggtagcgccgggcgacgggcacacagtatggttacctgtcccggaagatatggtgctgcaatatgctctgctgatgcgcaactttactggtcagacaacccgaaacccgcacagtaactag

SEQ ID NO: 174738 - DNA, 894 bp, Klebsiella oxytoca
atgtccacgtttccagccagcttactgattctgaatggcaaaggcgccaatgaaccgcagctacgcgaggcggttaaactgttacgcgacgaaggaatcgatattcacgtccgcgtcacctgggaaaaaggcgatgccgttcgctttgtcgatgaagctctgcagctgaatgtcgaaacggtgattgccggcggcggtgatggcaccatcaatgaggtggcgacggcgctggtcgagcgcgacggtaaaatggcgctggggattttgccgctgggcacggcgaacgacttcgccaccagcgtcggcatcccgcaggatctggccagcgcgctgaagctggccatcgttggccgcgaagtggcgatagatattgcgcgagttaacgataagaccggttttattaatatggccaccggcggtttcggcacccgcattacgaccgaaaccccggagaaactcaaggccgcgctcggcggcgtctcgtatttgatccacggcctgatgcgcatggatacgctcaagccggaccgctgcgaaatccgcggcgagaactttcactggcatggcgatgcgctggtcatcggcatcggcaacgggcgtcaggccggcggcggccagcagctgtgcccggaagcattaatcaacgacggcctgctgcatctgcgcattttcaccggcgaagagctgatccctgcgctgttcagcaccctggcaaatccgcaaacctcgccgaatatcatcgacggcgtctcatcgtggtttgagataaccgcccctcatgagatgacgtttaacctcgacggcgaaccgctgaccggtaaaaccttccgcatggagcttttaccggccgcgctacgctgccggcttcctcccgactgtccgctgctacgttga

SEQ ID NO: 174739 - DNA, 471 bp, Klebsiella oxytoca
atgcgccggcgtgaaattaaatggttaatcgctatcgtatttatcggagtattaagcggtatgacgataaaatcctggcaatactggcagcgcaatcatttccagtgcagcggtgagatgcggctattaaactcaggttatcagggcgatatttcattacgcttcgtatttgatagcacccgtgggctggtgattgtccggggagagattacgccgccgcagggtgaatcgtttaccatcaaccagaacatctggtttagctttacccgcgacggccagcactacttcctgcgatcggaaaccgtctctgccagcatcggcgaaaccgagcaggagaagcatattaacaacatcctgcccaagtttttcctgcagccgcaggtgccgttttaccttaatattcagcggctcaatcaacgaacccggctgctgtataccagccgggcgccgtctttgctttgcgaaacctga

SEQ ID NO: 174740 - DNA, 810 bp, Klebsiella oxytoca
atggaaaaaatatatacgattaatggaagaattgccttttttcctcagcgtagcgctctaatacttattgctgacgagacgaaaacggtttccttaaatatgccggccagccgctgtttattactgcttattcagcatgatggcaatactgttgcccgcgaaaccttttttgaggaagtgtggataaagcatggcgcccaggtaaccagcaacggtttttaccagaatatttccctgttacgtcgggcatttaaggagctgggggtagacgaggatattattattacggtgccgagggtaggcgtcaggctggatgcaacattaacggttacggaatctcagccgcgcgatgtagagaaggcaccgacggcggaggagccacaagcgcccgttgacgagcctgttcataaggaggtcgcagctgcgagtttgcccgaaaaaaagcggttaaggccgcgacgctctcttttgtgggggcttgcggcgctgctgagttgtctggtttgtggatttgttgcgtggcaaacagaattcgaatcttatttgcaaagttattcgcccataattgctaaattttcgcaacaatgtcacttctttgccaataatgacgtagttgaccatgttcgtcatgtcaattttatcaagcgcagtaaatttgaatgcgaagaatatccatggatttatttgacgctttatcccgggcaagcgcgggtgtcggtgattcgctgccgtcagccatttagtcaatggcgtgataatcaatgcctcaccaaatattacattaaggaggtagtcaatgcgccggcgtga

SEQ ID NO: 174741 - DNA, 774 bp, Klebsiella oxytoca
atgattgaagttcaacatctcaacctcgcgtttggcgagggggagaagcgtaaccaggtgctgtatgacgtcagtttccacgttaagcccggcgagatctacggtctggtaggcgagtccggctccggtaaaacgacggtgctcaagtgcctggcggggctgtttacccactggcagggggagctggccatcgatggtcagcgcttagggcatgaaattagccgcaagcgctgccgtcaggtgcaaatggtatttcaggacccctacggatcgctgcatcctcgtcacaccattggcgatatcctcgaagagccgctgcagatccatcgtatcaacgaccgcgaccggcggatcaatgcgctgctggacaaagttggcctcaaccgtgcctttcgcgagcgctatccgcatcagctctccggcgggcagcggcagcgcgtggcgatagccagagcgctgattcttgagcctcaggtactgctgctggatgagccgacgtcggcgctggatgtgtcggtgcaggcggagatcctcaatctgctggcagaattgcagcaggaggctaagctcacttacctgatggttacccacgatctcggggttattgcccatttatgccagaccgtggcggtgatgcagtacgggaagatccttgaaaccctgacggtcgatgcgctggtcagcggcgaggcgcggacggcctatacgcagatgctggtcaacgccagtcggcaatatacgcgcgaaatggcgcgcgaggtggcgacatactaa

SEQ ID NO: 174742 - DNA, 864 bp, Klebsiella oxytoca
gtgacatcctcgatccccgcagtgaataatgctccgctgctcgacgtgcgcgatctgtgcgtcgactttgttaacggcagcgcggtgacccatgccgtgcgcggcgtctccttccagctggagcgcgaaaagctggcgattgtcggcgagtccggttcgggtaagtccaccgttgggcgcgcgctgctgcagctgcatccgaaaaaggcccgcgtcagcgccagccggatgcagtttgccgacctcgatctgcagcatcttagcgaagcgcaaatgcgcggcgtacgcggcaaacgtatctctatgattatgcaggacccgaaatattcgcttaatccggtggtctgcgtgggtaagcaaatcgccgaggcctggcttactcatcatcccgggcgcaaagatgaggcgaaagccagggcgctggagatgctggaggtggtgcgtattcgccagccggagcgcgtttatcagctttatccgcatgaaatatccggcggacaggggcagcgcatcatgatcgccatgatgctgattaccgacccggagctgatcattgccgatgagccgacctccgcgctggatgtgtcggtgcgcctgcaggtgctgggcctgctggatgacctggttcagtcgcgcgggctggggctgatttttatcagccacgatatcaacctggtgcgcagcttctgcgaccgcgtactggtgatgtacgccggacgggtagtggagtccatcgctgctaaagatctcgataacgcccgtcatccctatactcagggattgattaactcgctgccggatatgcagcatcgtcgcccgatactgccggtgctgcagcgtcaggccagctggttaacggaataa

SEQ ID NO: 174743 - DNA, 906 bp, Klebsiella oxytoca
atgaccgtttctctggattcgcagctttcgggcggtgcgggcgaaggccgtcagcggctgcaacgcgcggcggcgcgggccgtcgggtttatcggcaaaatggcgcgcaacccgctaacggccatcggcggaggaattatctttctgctgctggtggtggcgattttcgcgccgctgattgcgccttataacccgctggtgcaggacctgaacagcgcgctggtcgcgccgaatgcgcagcactggttcggcaccgatgagtttggccgggatatctttagtcgcctggtgtacggctcgcgcatcacgctctatatcgtgctgctggtctcggtgaccgtcggtccgctcgggctgctgctgggcgtcagcgccggctatttcggcggtaaagtcgatatggtgctgatgcgcgtcaccgatattttcatctccttcccgagtctggttctggcgctggcgtttgtcgccgccttagggccggggctggagcatgtggttatcgccatcacgcttactgcctggccgccgatagcccgtctggcgcgcgccgaaacgctctctctgcgccaggccgattttatctccgccgtgcgtctgcagggcgcttcatcgtcccgcgtcctctggcgccatatcgtgccgctgtgtctgccttcggtcattatccgtatcaccatgaatatggccgggatcattctgaccgcggccggtctcggctttctcgggctcggcgcgcagccgccggagccggagtggggagcgatgatctccagcgggcgcacttatatgatggagtgctggtgggtcgtaacaattccggggctggcgattctgatcaacagcttagcgttcaacttcttaggagatggcctacgtgacatcctcgatccccgcagtgaataa

SEQ ID NO: 174744 - DNA, 1038 bp, Klebsiella oxytoca
atgagtaccgcaatccttgcgcccggctcacgcggccggcgcttatccaaacggctgctgcaggtggtgattacgctgttcggcctgctgctgctgacctttaccattggccgcgtcatgcctatcgacccggtgctggcgatcgtcggtccggatgctgaccagagtacctatcagcaggtttaccagcagctggggtttgataaatcgctgaccacccagtttggcatctatttcgtcaacctgctgcacggcgatctgggcaatgcgctgctgaccgggaaaccggtggtggacgatatcatccgcgtcttcccggccaccatggagctggcgacgatggcgattctcgtcggcgcgggtctcggaattccgctgggcgtgctggcggcggcgcggcgcaatagcgtctccgattatgtggtacgcattatcagcctggcgggctactcgacgccgattttctgggtcggaatgatggggctgctggtgttctatgcctggctcggctgggtgggcggcgccgggcgggtagacctcggtctggacggcattgtgccgcgtcgtaccggcctgatgaccgttgatgcgctgctggcaggaaacggacaggtgttctggaacgccattaatcatctgattcttcccgcctcgctgctgggttttcactcgctggcttatatcagccgtatgacccgcagctttatgctggcccagctgtcgcaggagttcattattaccgcgagggtgaaagggctgaccgagcgtcaggttatctggaaccatgcgtttcgtaacatcctcgtgcagttgctgacggtggtggcgctggcctacggcgcgctgctggaaggcgcggtgctgattgaaaccgtcttctcatggccgggtttcggctcctatcttaccggtagcctgctgctgggcgatatgaatgcggtgatgggctgcgtgctgctggtgggagtgatcttcgtgatgctcaacctgctctccgacatgctgtatcaattctttgacccgaggacaaaatcatga

SEQ ID NO: 174745 - DNA, 1623 bp, Klebsiella oxytoca
atgaaaaaaacctccctactggcagcgtgcttattcacgctcgccgtgtcgatgggaagcggggcggcggtggcgaaaacgccgcccgatcagctcatcatcggcatgaatatgaataacttgctcacccttgacccggcggcgatgaccggtaacgaagtggtgggaatcgtggtcaacctctacgactcgctggtggagcttgaccctgaacagctcaccaacgttaagcccgcgctggcgaaatcctgggatatcagccccgacggcaaaaccctgacctttcatctgcgcgacgacgttaagtttcactccggcaacccgctgaccgccgctgacgtggtgtggtcaatgcggcgcatcctgcacctcaacctggctcaggcctcggtatggaaatcctatggcttcagtaagaaaaatatcgacagccaggtcagcgcgccggaccgcttcacggtgcaaatcgagttacccaaagataacgatccgcagctggtgatttactcgctggcggcgctgggcaacctcggggtgctggacagtaaaacggtgcaaaactaccagcaggataacgactggggtaaccgctggctgaccacccatgaagccggttccgggccgtttacgctggaaacctggcaggcaaaagatgtgctgcgcatgaagcgcaatcctgactactggcgcggcgaggcgaaaatgagccgcgtggtgctgcgccatttccaggagtcgcaaaccctgcgtctgatgatcgaaaaaggcgacctcgatattgccaacaatatggcggtttccgatattaacgccctgcgcagcgacccgcagctgaccgtcgatgcggtgcagcgcggcaccatgtactacgtggcgatgagcatgaaagaggcgcacttcgcccaaccgaaagtgcgcgaagcggtgcgctatctgattgattaccagggtatcaataaagcgctgatgccgggctacggcgtgctgcaccagcggccgattaaggcgggcatgccgtctacgctgcctgaccctggctataagctggacgtggcgcgggcgaaaaagctgctggcggaagcgggttatcccaacggctttgataccacgctgcgggtcctctccgatcagccatttcttaacatcgctatcgccgtgcagtcgacgctgatgcaggcggggattaacgccaaaatcatcaccggcaccggtaaccagatctacggcgcgatgcgcgagcgtaaatttgacctgctggtaggacgcggcggcagcggaatggagccgcatccgcactccagcctgcgcgcgctggtctataacccggataacagcgatgaggcgcgtctgaccaactttcagggctggcgtaccggtttttacgacccgcagctcaatacgatgattgaccaggccctgctggaacgcgatccgcaaaaacaggtggctgactaccaggccatccaggcgcgctacgaccagctggttccggctttaattccgctttcgcagatggtcgattccgtggtggtgcgcaacgaggtacgagagtatcagccgcacccctccgccaccacttttctgcgtgacgtctataaagtccgcgaaggagagaaaggatga

SEQ ID NO: 174746 - DNA, 1155 bp, Klebsiella oxytoca
atgaaaattgaatctgtgaatgtcaccgttttccagtatcccacacgtcgggtttccgacagcgccgggcactcccatccgggggctgaaagcatggccaaaatggcgatgctgaccatcaccgctgatgatggggagcagggtttttcatttgcgcctccggaagtcgtgcgcccgttcgtggtgaatacttttttccgcaaagtgctggtggggcaggacccgtttaaccgcgagcgtatctggcaggatcttaaccactggcagcgcggtagtgcacatcagctaacggagcgcgcgctgtcgtttattgaacaggcgctgtgggacctgataggccgcagccttaagatgccggtttacaagctgctcggcggctatcgcgacaccgtcccggcttacggcagcacgatgtgcggcgacgatctgccgggtggactgtcgactccggaggagtatgccgcctttgccgaaaagctggtcgcccgcggctacaaggccatcaagctgcacacctggatgccgccaatctcttttgcgcccaatcccaaaatggatattaaagcctgcgcggcggtgcgcgaagcggtagggccggatattgacctgatgattgacggctatcactggtacagccgcgccgaggcgctgtggatcggcaaagagctggaaaaactcaatttcgcctggtttgaagagccgatggaggaggattcgatgtcctcctacgcgtggctggcggaaaacctgtcgatccccatcgtcgggccggagagcttcggcggcaagcaccacatgcgcgccgaatgggtgaaagccggagcctgcgacattctgcgcgccggcgctaacggcgtgggcggtattaccccgaccatgaaggtcgcggcgctggcggaatctttcggcatggattgcgaagtccacggcaacggcgcggcaagcctggcggtggtcggcgcgatccgcaactgccgctggtacgagcgcggcctgctgcatccgttcctcgactacgatgaaccggcggcttatctcaatagcattgttgacccgatggatgaccagggatttgtgcatttgtcacaacgtccgggcctcggcgaagacattaattttgcgtatatcgaagccaataccgttagccacgactga

SEQ ID NO: 174747 - DNA, 663 bp, Klebsiella oxytoca
atgagtattcaggcagtgatttttgacatggatggcgtgattattgattccgaaagcctgtggcggcaggcgcaaatcgacgccctcgcgcagtggggggcaacggcgagcgtcgaggagtgcgaaacgctgaccaaaggcaaacgcctcgacgaaattgcccgcacctggtgccgccattgccagcttgagcttgttccgcagcggcttgaagccgcgatattgcagcgtattaccggcctgatcgccgccgaaggcgagccgatgcgcggggtgcatgaggcgttacgctattttcgccatgccggttataaaattgcgctcgcgacctcctcgtcccggcaggttatcgccgccgtgctgaacaagctctcgctctggcactattttgatgtgatttgcagcgcggatgatgaagcgcagggcaagccgcatccggcggtttatctgacgacgttggataagcttaatctcgacgccagccgttgcctggtgatcgaagacagcttcaatggctttagcgcggcccgggcggcggggattgccacgatagtgattgccgaagatagccagcacgcgcgttttcaggccgccgctggccgctaccgggcgctgcctgaactgctggaagccctcaccgccgagccagaggcggtcgcataa

SEQ ID NO: 174748 - DNA, 1278 bp, Klebsiella oxytoca
atgtccatcaataataaacagtggctcggtttacccctgaacctgctctggggatacatcgccattgccgtgtttatgaccggcgacggttttgaactggcattcctgtcgcactacattaaagagctcgggttctccccggcgcaggcatcgttcgcctttaccctctacggcctggcggccgcgctgtcggcatggatctccggcgtggtggcggaaatcatcacgccgctgaagaccatgatgattggttttgtgctatggtgcgtgttccacgtgctgttcctggtcttcggtctcggtcatgccaactatgcgctgatcttaattttctacggcatccgcggcttcgcgtatccgctgttcctttactcgtttatcgtcgccattatccacaacgtgaaaagcgataacgccagctcggcgatcggctggttctgggcggtctattccatcggcatcggcgtattcggcagctatattccgagctttaccatcccgcatatcggcgagctggggacattgtggctggcgctcgctttctgcgtcaccggcggcatcattgcgctggcttccctgcgccatattaaaacgccgcaccatatgcagaacctgaccacccgcgagaagtttgccgaactgggccgcgcggcgacgctgctctataccaaccgcaatattctgctgtcgagcatggtgcgaattatcaatacgctctcgctgttcggctttgcggtgattatgccgatgatgttcgtcgatgagctgggcttcaccacctcagaatggctgcaggtgtgggcggtcttcttctttaccaccattttctctaacgtgctgtggggcattctgggcgaaaaactgggctggatgaaggtggtgcgctggttcggctgcatcggtatggcggtctccagcctggcgttttattacattccgcagcacttcggacataacttcgcgatggcgctgcttccggctatcgccctggggatctttgtcgccgcgtttgttccgctggcggcggttttcccggcgctggagccgaagcacaaaggcgcggccatttcggtctacaacctgtcggcggggatgtcgaactttctcgcaccggctattgcggtgattttgctgccgttctttagcaccatcggagtggtgatcgcctataccgcgctgtacgtggcggcctttttcctctgtgcgtttatccgcgtcgagcagccgggattttcccacaaggaagcgccggccagcgagcaggtggagttctcttaa

SEQ ID NO: 174749 - DNA, 1464 bp, Klebsiella oxytoca
atgtatctgggtatcgatctcggcacatcggaagtgaaagcgctggtcattgatgagaacaatgaggttattgccagccatagcgcgccgctgagcattcagcggcctcacccgcactggtcagaacagtcgccgcagtcatggtgggaggcgacagagtatctgatgaccacgctgcgggaaaaatgcgcccagcactggccagccattaaggccattggcctttccgggcagatgcacggcgcggtcctgctggatgccggcggggaggtcattcgcccggcaatcctgtggaacgacacccgctgcgccgcggagtgtgcggagctggaggagatggcgccggagctgcatcaggtggcgggaaacctggcgatgcccggctttaccgcaccgaagctgctgtgggtacgccgtcatgagccggaacactttcagcgcaccgccacggtactgctgccgaaagattatctgcgctaccggatgaccgggaagaaagtctccgatatgtccgacgccgccgggacgctgtggctggacgtggcgaagcgcgactggtccgactcgctgctggataaatgcgggctgtcgcgcagccagatgccgacgctggtcgaaggctgcgaggtttccgcgacccttgacccgcaggtggccgaacgctgggggctgaatgcctcggtagcggttgccggcggcggtggcgataacgcggtcagcgccatcggcgtcggggcggtttcaccgggggatgcgtttatttcgctcggtacctccggcgtgctgtttgtggtaaccgacgcctatcgtccggctccgcagtcggcggtccatgcgttttgtcacgttctgccgaatctgtggcatcagatgagcgtgatgctcagcgccgccagctgtttgcagtggttctgccgcctgaccggcaccacggaagtggcgctgctggaggagattgccgagcttagcgaagaggagaaggcccatgcgccgttcttcttaccctatctctccggcgaacgtacgccgcacaacgatcctgacgcgcgcggcatgttctggggcatgacccactccagcctgcgcgcccagctcggctatgcggtgctggaaggggtgagctttgggatcagcgatggtctgcaggtgttgaaagagagcggtacgcagatcgaacaatgttctctggttggcggcggcgcccgcagcccgttctgggcgcagctgttggccgatatcctcgatatgccggtggtgacccacaaaggtggagagaccggcggcgcgctgggcgcggcgcggctggcctgtctggcggcgggcaaaccaattaccgcggtatgtgaaaaaccggagatctggcagacctggcgtgcggacccggtacgccatcaaaccctgatgcggcgctatgcgcagtttaaggccctgtatttaaacgatctgaactatcggcagcattaa

SEQ ID NO: 174750 - DNA, 1368 bp, Klebsiella oxytoca
atgaacaatcaattcacatggcttcacattggtctgggttcttttcatcgcgcccatcaggcgtggtatctgcatcgtttgattgcttccggagataagcgctggcacattgcggcggggaatatccgcaacgacgccgagcaggtggtccaggcgctggcagctcagggtgggcgctacgtgctggaaaccgtcagccctgaaggggaacgtgaatatgaagagatcacctcaattcagaaactgctgccgtggcaggccgggctcaagccgctgattaacgaaggggcaaacccgcagaccaaagtcatcgccttcaccgtgacggaaggcggctactacctgaatacccgtcataagctggaaaccagcaaccccgacttgcaggccgatctggcaggggagtgcaaaacgatttacggcactatcgcgcggatcctggaaaagcgtatggcggacaacgccgggccgctgactctgctgaactgcgataacgtgcgccataatggcgagcgcttccacgacggcatggttgagttcctgcagctaaccggcaagcaggcggtgattgactggatggccgccaacacgacctgcccgaacaccatggtcgaccgtatcactccgcgtccggcgtcagacctgcccgcgcgcatcaaagcgcaaaccggcattgacgacagcgcgccggtgatgggtgagaccttcatccagtgggtggtggaaaaccatttccgcgatgagcgcccgaatctggaagcggttggcgtggagatggttgcatcggttattccttatgaagaggcgaaaattcgcattctgaactcgtcgcatagctgcattgcgtgggcggggacgttaatcggccagcagtatattcatgaaagtacgctaacggatttcatctacgccattgccgaccgctacgttacggaagatgtgatcccctgccttggcgataacggcattgatttaccaacctatcgcgatgtggtgcttaagcgctttaccaacccgtatatccaggacacgaaccagcgcgttgccgccgacggtttctcgaaaattccggcgatgatcgccccaaccctgcaggagtgctaccagcgcggcgcccgcccggaagcgaccgcgatgctgcccgcgctgttcttcgtctttatggaacagtggcataagggaagtctgccgtatgaataccaggacggcattcttgatgcgcaggcggtgcatcagatgttcgaagccagcgatccgctggcgctgtatgcccgcgataaagctctgtttggcgaactcgctgaaaacgccgatttcctcgcgctgatgcgcgaaaaagtcgcggcagtttatacgctgattaactaa

SEQ ID NO: 174751 - DNA, 942 bp, Klebsiella oxytoca
atgagcaaagaagatgatattcggctggatcaaaaggtccgcgccgcgtggatgtactacattgccgggcagaaccagagcgagatcgccagccagcttggcacgtcgaggccggtggtacagcggctgatcgccgccgcgaaagaagaagggattgtgtcgatcgggctgcatcatccggtggccaactgcctcgattatgcgctgttactacaggaaaagtaccggcttatcgagtgcaatatcgtgcccgcctttagtgaagaaagcaccctggatagcgtctccttcggttgctatcagctgatggcccgctacctgcaggacgataaagagaaaatcatcggtctgggttccggcctgaccctgaaaaaagcgctgcagcgtatcgatttcgacagtcagaatacccgctgcgtcgcgctgatcagcgccatggacgccgacggccagtgcaactattacgatgatgtcccgctgctgctgaccagcaaaattaaggcgaagtactatcagtggcccgcgccgcgctacgcgcagacgcaggaagagtacgacatgtggtgtaccagccggctgttccgcagcgtctccgccgtcgcccgccaggcggacgttatttttgtcggcattgggccattaggcacccaaagccctatttttaaagacggctttatcaatcaggcccagatggatgaagtgacggcgcaaggcggtatcggcgagattatggggcgctttatcgatgccgaaggcggagtggtggatagcgaaatcaacagaatgatcaccagctacgatatccgccagaatcagtgtccgcgcatcgcggtggcatgcggcgagtacaaacgcccggcgattctggcggcgcttaaaggcggctggatcaacggtctggtgaccgacgagcacaccgcccgctggctgctgacgcgctaa

SEQ ID NO: 174752 - DNA, 1002 bp, Klebsiella oxytoca
atgaagaaaatcacgatttacgacctggcggaactttccggcgtttcggcgagtgcggtgagcgctatcctcaacggcaactggaaaaagcgccgcatcagcgcaaagcttgccgaaaaggtgacgcggattgccgaggagcagggctacgcgattaaccgccaggccagcatgctgcgcagcaaaaaatcgcgcgtcatcggcatgattatccccaaatacgataaccgctatttcggttcggtcgccgaacgctttgaggagatggctcgcgaacggggcctgctgccgattatcacctgtacgcgccgaagccccgagctggagctcgaagcggtgaaagcgatgctctcctggcaggttgactgggtggtggcgaccggggcgaccaatccggataaaatttccgctctatgccagcaggcgggcgtgccaacggtcaatctcgatctaccggggactatcgcaccgtcggtgatttcggataactacggcggcgcgaaagcgctgacccataagatcctggcgaatagcgctcgccgccggggagagatggcgccgctgacgttcattggcgggcgcagcagcgaccataacaccagcgaacgtttacgcggcttccacgacgcgcatcgcgagcaggggctgagcgtgccgcaggggaacattctggctcccggctattcgaaaggcaaagtcgaagcctgcctgcaggagcggtttggcaacgcgaaggttccgttgcagggcatatttgtcaactcaacgatatcgctggagggggtcgtacgttggctgtcgcaggcaggactcaccggcagcgagcagccgccgatgggctgcttcgactgggacccgtttgtctatctgctggggcacgatatcgacatggtgcagcaggacgtgccggcgatgctggaagcggtgtttacgattatcgactccggcgatgccggccagcagcggattgaaattccgccgctactgatgagcagcagctga

SEQ ID NO: 174753 - DNA, 750 bp, Klebsiella oxytoca
atgaaccactgtgtctcctctatgaatacttcccttagcggtaaagttgccgctattaccggcgcggcgtccggtattggcctcgaatgcgccagaaccctgctgggcgccggcgcaaaagtggtgcttatcgaccgtgaaggggaaaagctcaataaacttgttgccgaactcggtgaaaacgccttcgccctgcaggttgacctgatgcaggcggatcaggttgataaccttgtgcagggaattttgcagctcaccgggcgtcttgatattttccacgccaacgccggagcttatatcggcggaccggtggccgagggcgatccggacgtctgggatcgcgtgctgcatctcaataccaacgccgccttccgctgcgtgcgtagcgtcctgccgcatcttatcgcgcaaaagtccggggacattatcttcaccagctctatcgcgggcgtggtgccggtgatctgggagcctatctataccgcgtcgaaatttgctgtccaggcgtttgttcataccacccgtcgccaggtttcacagtacggcgtgcgcgtcggcgccgtgctgccgggcccggtagtcaccgccctgctggacgactggccgaaagccaaaatggacgaagcgctggccaacggcagcctgatgcaaccgattgaagtggccgagtcggtgctgtttatggtgacgcggtcgaaaaacgtcaccgtacgcgacattgtgatcctgccgaacagcgtggatctctga

SEQ ID NO: 174754 - DNA, 1608 bp, Klebsiella oxytoca
atgcaaagcgatacgcaacatattattggcgtcgatgttggctcaggcagcgttcgcgccggcgtgttcgacctgcgtggcgaacttctcgcccacgcaacccgggaaattaccctgtttcgcagcgccggaagcgtggtcgaacagtcaagccgcgagatctggcaggcggtgtgctactgcattaaaacggcggtggccagcgccggagtcgctccatcgtcgattgccgggatcggcttcgatgccacctgctcgctggtagtgattggcgataacgacgtgccgctggcggtcgggccttcggaagatgcggaccgtaacattattgtctggatggatcatcgcgccaccggccaggcggaaaagattaacgctacgggccacgcggtgctgcagtacgttggcggcaaaatctcgccggagatggaaacgccgaaaattctctggctgaaggagaaccgcccgcacatttatcagcaggcgcgccacttcttcgacctcgccgattatctcacctggcgctcgaccggcgatttagcccgctcagtctgtactgtgacctgtaaatggacctacctggcgcatgaacaacgctgggatgccagctacttccgccagattggcctcgaagagctggcggatgaagattttgtccgcatcggccagcggattgtcgatccgggaaccccctgcggcgacggcctttgcgccacggcggcagaggagatggggctgccgatcggtacgccggtagcggtcggtatgattgacgcccacgcgggcggcatcggcaccgtcggcgtgcttaacggcgcggttaacaatatggcctacgtcttcggtacctcctcctgcaccatgaccactactcaggaagcggtattcgtgcccggcgtctgggggccgtattactcggcgatggtgccagggttctggctgagtgaaggtggtcagagcgcggccggagcggccatcgaccagctgctgagcttccaccccgccgccgcagaagctaagtcgctggccaaagcgcgcggcgtcccgctaccggtttatcttgccgatagcgtgctggcgaaggtagataatccgtcagcggcggtcaaacttgccgacggcctgcacgtggtgcccgagtttttaggtaaccgggcgccgctggccgatccgcaggcgaaagcgattatcgccgggctggggatggagcgggatctggacaatctgatggcgctctacgtcgccggattgtgcggcatcggctacggtctgcggcagattattgacgcccagaaggcgtgcggcatccgcagcgagaatatcgtcatcagcggcggggccggtcagcatccgctggtgcgccagctgctggcagacgcctgcggagtgaacgtggtgagtaccgaatccagtgaaccagtgctattaggttcggcgattcttggcgcggtggccggtcatatcgcgccttccctgccagaagcgatgaagcagtttacccgggtggataaaacctaccgctgcgtagaacaatttagcgccgatcatcagcggcgctatgaggcgtataaaatgctacagcacacggcgcggctgattcgcgagtaa

SEQ ID NO: 174755 - DNA, 1053 bp, Klebsiella oxytoca
atgactgatattacgcagttgcttggcaaagatgccgacacgcttttacagcaccgctgtatgacaattccagccgaccagctctatttaccgggggcggattacgtcgatcgggtgatggttgataacaaccgtccgccggcggtgctgcgtaatatgcaaaccctgtataacaccggccgcctggcgggaaccggctatctgtcgatcctgccggtcgaccagggcgtagagcattctgctggcgcctcttttgccgccaacccgctgtactttgatccgaaaaatatcgtcgaactggccattgaggccggttgtaactgcgtggcctccacctatggcgtgctggcctcggtgtcgcgccgctatgcgcaccgcatccccttcctggtcaagctgaaccacaacgaaacgctgagctacccgaccgaatatgaccagacgctgtatgccagcgtcgagcaggcgttcaatatgggggccgtggcggttggggcgacaatctatttcggttccgaacaatcccgtcggcaaatcgaagagatttccgccgcttttgagcgcgcgcacgagcttggcctggtgaccgtgctgtgggcctatttgcgtaattcggcgtttaagaaagatggcgtcgactaccacgtttccgctgacttaaccggtcaggccaaccacctggcggcgaccatcggcgcggatatcgtgaagcagaaaatggcggaaaacaacggcggctataaagcggtgaacttcggctataccgatgaccgggtttatagcaagctcaccagcgataatccgatcgacctggtgcgttaccagctggcgaactgctatatgggccgcgccgggctgattaactccggcggcgcggcgggcggggaaaccgatctgtccgacgccgtgcgcaccgcggttatcaataagcgcgcgggcggcatggggctgattctgggccgtaaagcgtttaaaaaatcaatggctgacggcgtgaagctgatcaatgccgtacaggatgtttatctggacggcaaagtcaccatcgcttaa

SEQ ID NO: 174756 - DNA, 801 bp, Klebsiella oxytoca
gtgaaacgaattaatgcgctaaccatcgccggcaccgacccgagcggtggtgcggggatccaggcggatctcaaaaccttctccgcgctgggggcatatggctgctcggtcatcaccgcgctggtggcgcaaaacacccttggcgtccagtcggtttatcgtatagagcctgattttgtcgccgcgcagctcgattccgtcttcagcgatgtgcgcatcgataccaccaaaatcgggatgctggcggaaactgatatcgttgaagcggtggcggaacggctggcgcgttatcagattaaaaatgtggtgctggatacggtcatgttggcgaaaagcggcgatccgctgctctcggcgtcggcggtggaaacgctgcgccagcgcctgctgccgcaggtctcgctgatcactccgaacctgccggaagcggcggcgctgctggatgcgccgcatgccagaacggaacaggagatgctggagcagggcagagcgctgctgggaatgggctgtggagcggtattaatgaaaggcggccatctcgatgatgcggaaagcccggactggctctttacccgcgacggggagctgcgctttaccgcgccgagagtccagactaaaaatacccacggtaccggctgtacgctgtcggcggcgctggcggccctgcgtccgcgttacgaggattgggggcgaaccgtggcggaagctaagggctggctctcggcggcgctggcgcaggcggattcgctggaagtgggacacggcatcggtccggtacaccattttcacgcctggtggtaa

SEQ ID NO: 174757 - DNA, 774 bp, Klebsiella oxytoca
atgtctgacctgctgaaccccgcgcatattgcccatctgcggcacctttttcaccgccattctccccttgttcactgcatgaccaacgacgtggtgcagacctttaccgccaacgtcttgttagcgattggcgcatcgccggcgatggttatcgatccggacgaagccagccagtttgccgccattgccgatgcgctgctgattaatgtcggcacgctgaccgttgagcgtgcggaggcgatgcgcgcggcggcgcgtagcgcaacgcaggcgggcaaaccctggacgctggacccggtagcggtcggcgcgctgaccttacggacagaattttgtctggagctgctggcgctgcagcctgccgccgttcgcggtaatgcgtcggaaatcatggcgctggccggaatgagcggcggcgggcgcggcgtcgatacgaccgataccgccgccgcagcgctgcccgcagcccaggcgttagcccgccagctgaataccgtggtcgcggtgaccggggaggttgattacgtcaccgacggccagcgcattcgcatggtcaccggcggcgatccgctgatgacccgggtggtcggcaccggctgcgcgctgtcggcggtggttgccgccgctgcggcgatgcccggcgatcggctggagaacgtggccgcggcctgcggtctgatgaagctcgcgggggggaaagcggcgcagcatggcggccccggcagctttactcccgccttcctcgatgcgctctatgcgggaggcgatctgtga

SEQ ID NO: 174758 - DNA, 948 bp, Klebsiella oxytoca
atgctcaccgttgacgaaaacatgatgaccgaaccctggcagcggctgcccgcgctctctctcaagcagattcagtactttgtgaccctggcccagctgcgtcacttcaccgacaccgctaaccggctggctatcagccagccggcgctaagcagcgcgctgcggcaaatcgagacggtgctcggcggcaagctggtcaaccgtaccgcctcggcggtgaccttaaccgagctgggggcggcgattttgccccacgcccggcgagtgttgagcgtggcgcagctggcttttcaggatatgcagcagatagtcgaagccggcggcgacggaacggtgcgtattggcttagtgccttcggtgagttcgctgctgtttccgctgctgccgcaaacgctggcccaggcgtttccgcgcctgagggtggagtttcacgatcagaccaacgacgccctgttctgcgagctgcagtcgggaaagatagattttgccgttggcgcaatagacagttcgttaccgcctgagctgcaggtttatcctctgcgcgaagatccgtttgtggcggtgctgcacggcgacgatccgctggccgggcagccgcatctgccgtggaaactgctcgcggggcgcgatatcgcggtgttttcaaagggcaatattcagcgtctggtcggcgcgctggccgagagccatcgcctcacgctgaatacgcgttatcaggttgactatatcgagacgctttacggcctggtgcgctcgcggctggcggtggcgattctgcctgagctttatactacccaccttcaggatccggcgttaaaggtggcgcagcttcagcagcccgcgctgacgcgaaccgtggcgctgatgcgcggaccgcagcctctgccgccgctgatcgaggaatgttttgcactattactgagttcgctgcgggaagtgaatctatag

SEQ ID NO: 174759 - DNA, 1812 bp, Klebsiella oxytoca
atgtccagcagtgctgaaacccgccgccgtgccgtccaggccgcgcgcggagaatccccgttcgatttattattaaccgacgcgcagattgtcgacatggccaccggagaaatccgcgaggccgacgtcgggatcgtcggtgaaacgatcgccagcgtgcatccgcgcggcagccgctccgatgccctcgaacgccgctcgctggcgggatgtttcctgtcgccggggctgatggatacgcacgttcaccttgaaagctctcacctgccgcctgaacgctatgccgaaatcgtgctggctcagggcaccacggcagtattctgggacccgcacgagctggccaacgtactgggcgtcgaaggcgtgcgctacgcggtcgctgccagccgccatctgccgctgcaggtgatggttgcggcgccttccagcgtgccgtcgacgccgggactggagatgtccggcgccgatttcgccggcgcggagatggaaaccatgctggcctggccggaagtctgcggcgttgctgaagtaatggatatgcacggcgtgctgcacggcagcgagcggatgcaggagatcgttcaggccgggttgaacagcggcaagctgatcgaaggccacgcgcgcggtttgagcggcgcggatctgcaagcctatcttgccgccggggtcacctccgatcatgagctcacctcggcggacgatgcgctggaaaaactgcgcgccgggctgactatcgaaattcgcggctcgcacccttacctgctgccggatatcgttaacgcgctgaaaacgctgccgcatctctcctcgcaaatcaccgtctgcaccgacgatgtgccgccggatatgctgctggaaaaaggcggcattatcgccttgctcaaccagctgattgagcacggactgccggctaccgacgtcctgcgcttcgccaccttaaacgcggcgatccgtctgcagcgtaacgatttggggctgattgctgccggacgccgcgccgatctggtggttttcgattctttatcccgactcaacgcgcaggaagtttacgtcgccggtaagctgattgcccgcgatggcgccctgcttcaacccattccgtcggcggcgggcgttaccccgccgcgcgataccctgcagatgccgccgctcagccctgacgattttatcctccgcgttggcgccattcgccacggcgtcgcccgtctgcggcatattcgcggcgcgcgctttacccagtggggagaagttgaggtgcaggtccgggatggccgggtgcaaatcccggaaggatttagcctgatttgggttaagcaccgccacggtcgtcaccaggcgacgccgcaaattgcgctgctggaaggctggggcgaactgcgcggcgccatcgccaccagctactctcacgattctcacaacctggtcgtgctcggacgcgatgccgacgagatggcgctggcggcgaaccgcctgatcgaatccggcggcggcatggcgctgtcgcagcagggaaaaatccttgcccacgtggcgatgccgatcgccgggatgctttctgacttacccgccccggagctggccagagagttccgccagcttcgcgacctgagcgcggaagtcgccgactgggagccgccctatcgcgtgtttaaagctatcgagggtacctgccttgcctgtaacgccgggccgcatttaacagatttaggtttgaccgacggcagcacccgccagatagtcgagccgctgatagactgccgggaaatcccggaacacacagaacacaacaataaacatcagggagcctga

SEQ ID NO: 174760 - DNA, 1344 bp, Klebsiella oxytoca
atggccgacaatacccttaactcatccgcgcagggaagctggctggagcgccgttttgccttgtactcccgcggcagcacgctgcgcaccgaatgcctcgcgggcatcaccggttttctcgccgccgcctatctactggtggttatccccggcctgctggcggtgggcgggatggataaaggcgcggcaaccaccggcacgattctggtgttcgtcggcggcacgctgctgatggcattttatgccaacctgccgtttatcgtcgggccgggcatcggcggttcggtgctggtcggcgtcacgctggcgggcagcgaaggcattggctggcagatcgggcttggtatcgcctgctggtcggggattctgtttttcctgctgaccaaattcggcctgcgtgaagtggtaacccgttcggtgccgcagtcgatcaagctcggtctgacggcgtccattgggctgttcgtcgcggtattgggcttccgtaacgccggactggtgctggctaacgccaaaaccaacgccctgatgctcggggatttcctttcgccgggggcgctggttgcgctctgcgggctgtttctggccattgccctgcaggcaagaaaaatccccggctcgattctgtgggcgattctctttgcaaccctggtcggtattccgatgggcgttaccagactcccgggcagttttatcgatatgccgcattcgctgacgccggtgctggggcaaatcgatatgctgggcgcgctgaatatcgcctttctgccgttcctgttcgtctttttcgcctcagagttcttttccacgatgggcaccactctggccgtgggcggcgaagcgggtctgctggatgaagaaggcaatatgccgcatatcaatcgcccgtttatggtcgactcgatcgctgcggctataggtccctggctgggtattccggcggcgaccgcgctgattgaatcctcggcggcagcggaagccggcggtaaaaccgggttaaccgcgctgtcggcggcggtaatgtttctcctgatgctgctgtttacgccggtggcactgatgatcccgaaagaggcgaccgcacctgcgctgatcctcatcggcctgaatatgttcagcggcctgcgcaaagtggatctggctaacttcaccgacggcctgccggtgctgatgatggtgatgattacgctgattgccaatagcttcggtaccgggattgccggcgggctgctgttttatgtcgtgatcaaaaccatcgccggcaaatggcgggaaatccccatcggcctgtggatccttgcgattccgctggtctactactttgccacgctggtgaagcattaa

SEQ ID NO: 174761 - DNA, 921 bp, Klebsiella oxytoca
atgttaaggctggaagatctggctctgtttgtccgcgctgcggcgctaagcagcttcagcgatgcggcgcgagaggccgggctgcagccggcgcaggttagtgcggcgatcaagcgtctggaaacgacgttgaatattcgtctttttgcccgttcaacgcggagcctgcgcctgacgccggaaggtgaggcctggctgccctacgccacgcagatgctcgatacgctgcacgccgggctgcaaaaaatccgcacgccggatgacgaagttcgcggtacgttacaaattgccgtgccgtccgatctcgggcgcaacctgcttctgcgtgtttttcgcggctttcgccagcgtcatcctgcgctgcgtctgcggatcctgttttccgatcatcggaccgacgtgtttaaagatccggtggacgtggcctttcgctacggcgataacgacgatgcttcgtttatctccctgcccgtcgcgcccgataaccgacgagtgctggtggcttcgcccggctggatagctgaaaacggcgagccgcaaacgctggaagagctggcgcgacataatgcgctcacctacgtgctgcgcggcagggcgtttgaccgctggccgttgagccgggaagggaaagtacatcacgtgcaggtttccggcactatcgtgagcgatgatgcggaggtgattcgccgcctggcgattgccggtgaggggattgcgtacaaatctgaactcgacgtcggcgacgatattcgtgcagggcgactccaggtgctgctgccgcactaccagggcgacgtggtgccgctgaatatgatttgcccgcaccgcaaacagctttcgcctgcggtacggctgctgtatgaggcggtgaaagaggcgtgcgaagcggttaattccagcgcgctctctgcgggccggtag

SEQ ID NO: 174762 - DNA, 318 bp, Klebsiella oxytoca
atgcgtaaaacaaaaatgatgcttctgggcgtactgttggcatgcaccagcggagcgtgggcggcgaccggcgacggcattcagaaatatgagctggacggggtgaccgcagactttaaacaattccacatcggcgataccgttccgccgctgtacctgacgccagaatacaatatcaaacagtggcagcagcgcaatctgccggcgccggatgccggcacgcgctggacctacatgggcgggagctacgtcctgattaccgaaaccgaggggaaaatcctcaaaatctacgatggcgaaattttctatcatcgctaa

SEQ ID NO: 174763 - DNA, 330 bp, Klebsiella oxytoca
atgaataatattgctctaatcgttaagttgcgggaacttctggtcatctttatgcattcgcgcacgctgccggagaaagccgctgacgcgctgcgttattgtcaggaaaatatcccgctggctgaccttccgattggcgcttatggtgaatattgtgaaatttatgaacagatagtttttttatcggatgataaaagtcgcactgcgccggatgatttactgcgcagcggcggggatctgatactcagtattttaatgctctacgaacaggtcgctgcctatattgccgtcgaggagtttatgcacaaacaaaaccgctttaacgaatag

SEQ ID NO: 174764 - DNA, 1110 bp, Klebsiella oxytoca
atgagttcgcaatcccaggccaaatcccccgaacgtctacgcgcgatggtcgccgggaccctggctaatttccagcacccaaccctgaaacataacctcactacgctgaaggcgctgcatcacgtcgcctggctggacgaaaccgtgcatattgaaattcagatgccgttcgtctggaacagcgcctttgaagctctgaaggagcagtgcagcgccgagctgctgcgcattaccggtgccaaagctattgactggaagctgacgcacagcatcgccacgcttcagcgggtaaaaaatcagcccggtatcaacggcgtgaaaaatattatcgctatcagctccggtaagggcggcgtgggtaaatcatcgaccgcggtcaacctggcgctggcgctggcggcggaaggggcgaaagtcggcattctggatgccgatatttacggcccgtcgattccgaccatgctcggcgcggaagatcagcgtccgacctcgccagatgggacccatatggcgccgattatgaagttcggtcttgccaccaactccatcggttatctggtgaccgacgataacgctatggtgtggcgcgggccgatggccagcaaggcgctgatgcagatgctgcaggaaaccctgtggccggatctcgattatctggtgctggatatgccgccgggtaccggtgatattcaactgacgctggcgcaaaatattccggttaccggcgcggtagtggtgaccacgccgcaggatatcgctctaatcgacgccaaaaaaggcatcgtgatgtttgaaaaagtcgaggtaccggtgctgggtatcgtggaaaacatgagcatgcatatttgcagcaactgtgggcaccacgagcctatcttcggtaccggcggcgcgcaaaagctggcggagaaataccacacccagctgctgggccagctgccgctgcacatcactctgcgcgaagacctcgacaaagggaccccgacggtagtggcgcgtccggaaagcgagtttaccgagacctatcgtcagctggcagaccgcgtcgcggcgcagctgtactggcagggggaagttatccccggtgagatcgccttccgcgcggtatag

SEQ ID NO: 174765 - DNA, 2043 bp, Klebsiella oxytoca
atgcccactatgactcaagtcgcgaagaaaatactggtaacgtgcgcactgccgtacgcaaacggctcaatccacctcggccacatgctggagcacatccaggctgatgtctgggtccgttaccagcgaatgcgcggccacgaagtcaacttcatctgcgccgacgacgcccacggaaccccgatcatgctgaaagcgcagcagctcggtatcaccccggaacagatgattggcgaaatgagtcaggagcatcagaccgattttgctggcttcgacatcagctacgacaactatcactccacgcacagcgacgaaaaccgcgagctgtcggagcttatctatacgcgtctgaaagagaacggttttatcaaaaaccgcaccatctcccagctctacgatccggaaaaaggcatgttcctgccggaccgttttgtgaaaggcacctgtccgaagtgtaaatcaccggatcagtacggcgataactgcgaagtatgcggcgcgacctacagcccaaccgagcttatcgaaccgaaatcggtcgtctccggcgcgacgccggtgatgcgcgagtccgaacacttcttcttcgacctgccgtcgttcagcgaaatgctgcaggcgtggacccgcagcggcgcgctgcaggagcaggtagcgaataaaatgcaggagtggtttgagtccggcctgcagcagtgggatatttcccgcgatgcgccgtacttcggctttgaaatcccgaacgcgccgggtaaatatttctacgtctggctggacgcgccgatcggctacatgggttcctttaagaacctgtgcgacaagcgcggcgacgccgccagcttcgatgagtactggaagaaagactccaccgccgagctgtatcattttatcggtaaagacatcgtttacttccacagcctgttctggccggccatgctggagggcagcaacttccgcaaaccaaccaatctgttcgttcacggctacgtgacggtcaacggcgcgaagatgtccaagtcgcgcggaacctttattaaggccagcacctggctgaaccactttgacgccgacagcctgcgctactactacaccgccaagctctcttcgcgtatcgatgatatcgatctgaacctggaagatttcgtgcagcgcgttaatgccgatatcgtcaacaaagtggtgaacctcgcctcgcgcaacgccggttttatcaataagcgtttcgacggcatgctgtccgccgagctggccgatccggcgctgtacaaaaccttcaccgatgccgcagcaagcattggcgaagcgtgggatagccgcgagttcggtaaagccatccgtgaaatcatggcgctggccgacgtggcgaaccgctacgttgacgagcaggcgccgtgggtggttgccaaacaggaaggccgcgatgccgatctgcaggccatctgcaccatgggcctgaatatgttccgcgtgctgatgacctggctcaagccggttctgccgcagctggccgcccgcgccgaagcgttcctcaacagcgaactgagctgggaggccattcagcagccgctgctcggtcacaaggttaacgcctttaaagcgctgtataaccgcatcgaaatgaagcaggtggaagcgctggtcgaagcgtcgaaagaagaagtgaaagcgctgtcagcgccggtcaccggaccgctggcggacgatccgattcaggacaccatcacctttgacgatttcgccaaagtcgatatgcgcatcgcgctgattgaaaacgccgagttcgtggacggttccgacaagctgctgcgcctgacgctggatctcggcggcgagaagcgcaacgtcttctccggcatccgctccgcctacccggatccgcaggcgctgattggccgcctgacggttatggtcgccaacctggcgccgcgtaaaatgcgcttcggcatctcggaaggcatggtgatggccgcaggccctggcgggaaagatatcttcctgttaagcccggacagcggcgcccagccaggccagcaggtcaagtaa

SEQ ID NO: 174766 - DNA, 3738 bp, Klebsiella oxytoca
atgaaatcttttatttatcaggacgaaaaatcacataaattctgggcggtggagcagcaagataacgagctgcatctgagctggggcaaggtcggcaccagcggccagagccagattaaaacctttgccgatagcgccactgctgcaaaagccaaacagaaactgattggtgagaagacaagaaaaggctacgcagaaaataccgcggcggaaaaaagcccgccccaggctgtcgctagccaatctaataaccgaccctggctcgctgatgatgcccatataccgctaacagaggagatcggctggtttgctttccctcaccgtaaccgttccagaccgtttaataccacaccggacggcaatcagatttggcaacgcattaccaggaatgataaagccgaattcaggccatccgactatcatttcacgtcaccggcctgggaacaggcctacgctgaactacaccaacggattaagcataatcaatccaccggaagcctgctttccgaagcggctcttctcgggcaaatgggctattattctggtgatttaatcgacctctttgtgacgcaatacgggcttgaaaccacggttgagatcgcctgtcataccctacaagtggcatgcaagtacgatgatgatcttaagaaaattgtcgtacgtagcgactttcctgttaacgaaacagaatatctgcccgactggctcccgcgcttgtgtcatcatctttcattagcgccagaggaagagtggctacgctgtgtcaaaaaactgattgctgctattcctgagctttctcccgctatgcagccgtttgtcgcactgatgttgccagagcgtccggatatcgccaatgagatagcattacgtttcgccgcagaagagattccggcaatggcgtggttgaaaatggttgtcaatgccccttctgcactgattacgctagaaaaatatccgttgcctccactttactctcactttctcccctatgttgccacattgatagccaaccaaggcatgatcggggtaagtcaactcgtcaacgatttggacgaaaaggaagcaagcacccaattacctgagcttgaagctactgactatttcactaagtggttagctaaaacgaaccatccggatgcgcttaagatattaattcttggtgccggcaacaaaaataagcgcctgggatatttaagtaaggccagtcaaaaatatcctcatgcagccattgccgcttatgcgtcgctgctgacgagctatgaagatccgatctggcgcaaagcgctaacggtactcatcagcgctgaaccagctcgggtagagcaagttctgccatggattgacgcacacgccgcagaaacgttaaccgcgacgcggccgcatagcgactcatcagcagaatatgccagcccggagaccctaccagaaatactggtatccccgccgtggctaaagcaaaatcaaaaaagcgcatcaccagtattcaaactatccatactccccgtcacttctacgctaagcctgacgccggcaataacggaagagctaactggctacgattacagtgattaccactgccaattcaggtacgcggacctgccgccatttgaaagctatcattgggaaaaagtgacggagcctttcaccccggaacaaaactttctgtggcgtctggggtttgaaaagtggcaacagttaacccctggcacatcgcaaaaagtccccattccgcaaagcgccgtcacagccctgcaatgtgcagactatgccaccttgataaatgagttccatcagtatacgggtaagcagtattcgcaatggaagctgtatctgctggcctggatgccgcgcgagcaagcattagccctgctggatgctctggctgatgaacctcacaaaggcgaagaggggatcttacccatttttggcatcgatgccctgccgatatttgtccgttatcttaaacacgatcgccagtcgctgtggccgtttaccccctattgcggcacaaccgatttggcactgccgatggcacaaaacttcagccgcaaaaaaacgctgcgcgaagacgcccgaagctggttacttgagtatcccgaacatgccattgccgggttattgcccgtagcgctaggaaaagcgtgcaaagacagggacgacgctcaacaagctttgcgattactggccgaaaataatcaccgttctctgataacccaaatagcacagcgctatcaacaaccggagattatcgctgcactgggagcctttctcgacgcaggagactttcacgatttcccgacgaaaattcagcctttgcctgaattttatcaatttgcactgtggcgcagaccacagctcaaaagctcggggttgccgttgccggataacgccatgcgttacctcggcgatatgttgaatttcccacgcgaagtgaaactttacgccggactgaataccgtaaaaagcatctgcactccaacatctctggctaactttgcctgggatctttttaacgcctggattgaagccggaggcccttcaaaagcgaactgggccttcacaacattagcctttttcggtaatgacgataccgcgcgagcgctgacgccgctcatccgtgcctggcctggagaatcacaacatcaacgcgcagcgcttgggttggacattctggcagaaatcggcagcgacatcgctttgatgttgctaaacggcattgcgaaaaaaatcaaatttgcggcgctacaggagaatgcacagaacaaaatcaagcaaattgccgaacagcgtgaactgaccattgccgagctggaagaccgcctcgccccggatctcggactggacgacaacggcactctggttctcgacttcggcccccgccgctttacagtcagcttcgatgaagctctgaaaccctttgtgtgcgatgaaagcggccgacgcctgaaagatttgccgaagcccggcaaaagcgacgatgaaccgcgggctgcggaggccgtcagtcgttacagacagttgaaaaaagatgtccgtaccatcgcatcccagcaaattcagcgtctggaaaccgccatgtgcctgcgccgccgctggaccgccgaacagttccgcctgttcctcgtcgaccatccgctggtgcgccatctcacccgccgcctggtctggggagtctatagccaggaaaacgtcctgctggcctgcttccgcgtcgccgaagataacagctacagcgatgcagaagataacctgttcagcctgcctgaagggcaaatcggccttccgcacgtgctggaaatctccgcggaagacgccgccgccttcggccagctgtatgccgactatgaactactgccgccgttccgccagctcgatcgcaaccactatcgcctgactgaaagcgaaaaccgggccacagaattaacgcgctggcgcggacgccagtgccaggccgggcgcatcgtcggactggagcgcaaaggctggcagcgaatagaagatggcggcagcatctgcggcatgttcaaacccgccgccagcggcgatattgtgctggaagtggaacctttttcgctgctgtatggagaaaccacctacgacgaactcatcccgttcgagacagtgaaaatcgttaccaaaggcgatattgactacggcaaaccgacctttgctttcgcaacgcttgacgctatcgccgccagcgaatttatcaacgatatcgaatcgctattcgattaa

SEQ ID NO: 174767 - DNA, 3738 bp, Klebsiella oxytoca
atgaaaacgtttatttatcaggatgaaaaatcacataagttctgggcggttgagcagcaggataacgaactgcatctgagctgggggaaggtgggtaccagcggccagaagcagattaaaacctttgccgacgcggcagcggccagtaaggccgggcagaagctgatcaatgaaaaaaaccgcaaaggctacgttgagcaaggcgaaaccacgccgtctgcggcagccagcctgccggaggaaccggcatctaccccagctgcgccgccgcccgcatgcgccaccgtgcctgcagacatagctcgtccgtggctggcggacgatgccgaactggctttgtcagatgagctgctgcaagatgtgctcccttcacgccgctttcccggtcaaccgatcgccgcgcccgcagatagcgaactgatgaatctcggcaaagagatccaccagcagtccgggaaagccgtgacctttgactatgccgactgttccgcctactggcagcaaaccatcaacgaagcccttagggatggcccgctctcccctgctgcgctggcggtgcagctcgccctcgccacgcgtcgcggctggcgcagcagcgacaatgccgacctgatggacgaaattgtttacgtctacggactggaatacgccgtcgagacgtttattgccctgcagcacattgcttttgattacaattaccagaccctgcaggtgaccttcctttcagaacccaccagcgcgcgcgggcccgggatgctcgacgtgcgcctgcgcgcgcatctggctcaggccgatgaaccgctctggcagcgctgcgtgaataaactgatcgccgcgctggcggatatgcccatcgggcagcagccgctggtggcgctattgctgcccgatcgcccggatatcgtccacgaaatcgcccgccgggtactggcgcataaaactatcagaacggcggaatggctgaaggtggtggttcgcgacccgcagctcgtcaaagcgctggagccttatcgggcggagaacctgtttaacgactactaccacggcagcgtctggaacgcgacggtgatgcgcgagcagggcgttgccggcatcgcccgcttcgcaccctacgttcatgacgatctgtgcggtaagctggtcagccaaattaaccatccgcaggcgctgggccagctaatcctcgcaagcgagcagggtaagcgttgtcacgaacggatgatccaggccagcgcgcgcttcccgcacgccgcgctggcggcgctggctgaactgctgacgcagaaagaagagaaacgctggcgcattatgctgatgaccctgctcagcgggcagccggggctagtcggagaaattgtgccgtggatctctgcacaggccgcgacgctactggaagcctgccagcagcagttaagccagcaggccgagtgcgcccgcgacgatatgctcccgccggtgctggtcaccccaccctgggcggcgaaaaagaaaaaatcccccattgcacagctgaatctgccgccgctcccattagagccggtctgtatgctgacggaagaggcaagcaaacagcttctcgaacagcgtagctggtatgcccgccagctcgataatggcaaagaaaaagatgaaaaggagctcctgtcctgcttaggtttccacagctggaaccggagccaaaatcgctatgaagatgtctccgatgccgctatcgatgcctggcaacgacaggattatccggcgctgattgcggaatttaagaatgcccatacctatcgccaggaagagtggaagctgtacatgctcgccgccctgcccgccggacgggcgctacaggcctggaacgcgctcagccaggagccccacaccggcgcagactttgtgatggcgcacctgcgtctcgccggtttgccgggctttatccactccttctcacgctatccgcaggaaaacctgtcggttgcgatctggtttgccgccagcgaactggcccccatcatcgcccgcgcttttaacaaacttaaatcgctgcgtgaaggcgcgcgcgaatggctgctggcctatcctgaacatgcgattaccggcctgctgcccgccgccctcggcaaagcgggcgaagcgcaggacagcgcgcgcctggcgatacgtatgctggtggataacggccatcagccgctgcttgaagaggtcgcccggcgctacaatcagccggcggtaacggaggccgttaccgccctgctcgccctcgatccgctggataaccatccgaccaaaattccgccgctgcccgcattttaccagcctgcgctgtggacgcgtccgctgctgcgggaaaatggcctggctctgccggatggccccataaaagcgctcggcgaaatgctgcgcttcccgtcagaggaggggatttatcccggcctgcagcaggttaaagatctctgtactgccgaatcacttgccgcctttgcctgggatctgttcagcgcctggcaaaccgccggagcgccatcgaaagagagctgggcgtttaccgcgctcgggattttcggcaacgatgataccgcccgggccctgacgccgctgatccgcgcctggcccggcgaatctcagcataagcgcgccaccgtcggattagatattctcgccgccatcggcacggatatcgccctgatgcagcttaacggcatcgcccagaagctaaaattcaaagccctgcaggaacgcgccagagagaaaatcggcgatatcgctgaaagccgcgggctgaccgtggaagaactggaagaccgcctggcgcccgatctgggtctgaatgaggatggtaagctcaccctcgattttggcccacggcgctttatcgtgagctttgatgaagcgctcaagccgtacgtcagggatgaaaacggcagccgtctgaaagatctgccgaagccgaataaaagcgacgataacgcgctcgccgccgaggctgtcaatcgctacaaggccctgaaaaaagatgcccgcacgattgccgcccagcaaatcgcccgaatggagtcggccatgtgccagcgccgccgctggacgccggagaacttccacctgttcctggtcaaccatccgctggtacgccatctcacccgtcgcctggtatggggcgtatacggtgaggacaaccgcctgcaggcctgtttccgcgtggcggaagacaacagctacagcaatgccgatgacgatctctttcctctgccggacggcgacattcgtatcggccttccgcatcggctggaaatgacgccgcaggatgccgccgcttttggtcagctatttgccgattacgaactgctgccgccgttccgtcagctcgatcgcaactgctacaccctgacgcccgccgagctggcgactacagagctgacgcgctgggcaggacgcaagtgcccgagcggccgggtcatcgggctggcgaacaaaggctggctacgcggcgagccgcaggacgctggctggatcggctggatgctaaaaccgctgggacagcgggcgctggtaatggaaatcgacgaaggcttcgccgtgggcatgctgccggatgagctcagcaccgagcagctattaagcaaagtctggctgtacgccggaaatgcccggcagtacggctggggcggcaacgctccgcagcaggcccgattttcggagctggataaagtcgccctcagcgaactgatcaacgatattgaagggctatttgaatag

SEQ ID NO: 174768 - DNA, 3594 bp, Klebsiella oxytoca
atgcacaacgcactaaccccaccctggctggcggatgacgcgcagctggagctgaccattaaaaaaggcaagacgccgttaagccaccgccgctggccgggcgagccggtgccgctggttaaagtggaacgacttcaacggctggcgaacgatattgcctcccgcagtcagcccctcgcctgggaagctgaacaatgtactgctgagtggcaacaggcgattgcgcaggcgatgcgctgcgtgggcgaggccagcgcggcaatgcccgcccgcgcgctggcggtgctgactcgtctggctgaagaggatagcccggcgcttttggatgaaatcgtccagctgcacggcgtcgagtacgcgaccgaggtggtgattgcccggcagaatatcgcggcgggccatagtaaatacccgccgcgcaaatgggtgttcagtcatccgcagaaagagaacgtttacggcctccactctgaaacctatagcgagttcgatctacgtctgcgcaaacatctgtcgctggcggaagaggtcgtctggcaacgctgcgccgaaaagctcattgccggcctggtcgaaacgccgttttatcgccagccgtttatcgccctgctgctgccggaaaggccggatatcgccaatcaaatagccggacgttgcattgacaactcctggcggtcgtcaaaagagtggcttaaagccgtcgccaccgaccccgccgtgctggcgaagcttgaggaaacctggtcgagtgatatttttaccgatcgccaggacagcgatggctattttgcaaaccgctacggctatgccgcttgcgccgcgcttttgcgtgaacaggggctggcggcagtcgccaggctggcgatttacgcgcataaagacgactgcggtagcctgctggcgcaaatcaaccatccgcaggttattcgcctgctgctgctggtggcggataaaaacaagcccagccagctgcgcgtggcaaaatatgccagacaatttcccgcctcgacgctggcggcgctggcagagctgctggcgctaccggagccgcccgcgcgtccgggctatccgcatattgaagcgaaaaagctcccgcagcagcagaaaaaacgcgcagagggctggcgaatgctgctccggacgctgctgaatacgcatccgccgctggtcgaacaggttagtccctggctaagcgcgcaggcgcgggaacttctggcgacgttccgacaggcgctgcccgcaggcgtcacggtgaccgtcgataaccccggcctgccggaaattctgctctcgccgccgtggcgcagtaaaaagaaaaaagccgccgcgccgcgttttgcgctatcgccgctgaagcttgcgccgcaggagtactggcagcctggagagcgggaggcgctggccgccggcaaaccggcctgcttctttaacgacctgccgctgcatgagcgcattagccgcaaaggtgaggtggtattagaggagctgggctttcaggatatggattatctttttcatcaatatactttgaatggacagcaagggcatttagggtcgccgtggcacagcgcatacaggactaaaacaggctgggataaagccgctatcagagcgctgcacagcggtgataacgaagcgcttctcaaagcctggcgagactatctcgaagaaagctatcaccccaacgagtgctggaatctttatctgcttatgcagctcccccgcaagcaggcggtaaccctctggcagcgcattaatgaagaaaatttcaaatttgtcggcgctgaatacctgttgagcatcctcgggactgacgccctgcccggcctgctgctggcgctccggcatcggccaaaagtgatctttccgctgctgatgcatctcggcgcaacggagctggcgctgccggtggcccgcgtctggcggcgctttcaggcgcagagccatctcgcccgccagtggctactgcaatggccggaacacgccgccgccgcgttaattccgctggcgttcgataaagcgggcgatagccgcgaagcggccattaacgccctgcgtctgctgtatcaggaaggccatcacgcgctgctgcaaacggtggcgcaacgctggcacgaaccgaggctatggccagcgctggagcaactgctgacgcaagatccgctggataattatccggcccgcacgccgaaagcgccggatttctggcagcccgcgctctggcgcaggccgcggcttctcagcaacgaccagccgctgaccgacgatgcgctggaaattctcggcgatatgctgcgcttcgcccagggcggccacttttactgcgggctggatttagtcaaagccgcctgtcagcctcaatcgctggccgctttcgcctgggatctcttcaaagcctggcagaatgccggtgcgcccggcaaagagaactgggcttttcagacgctggggatctttggcgatgagagtacggtgcgtgatttaacccaacttattctcgcctggccgcaggaagggaaatctgcccgcgccgccagcggcctgcatcttctgacccgcatcggcagcgatatgtcgctgctgcagctggaccatatttcgcaacgggcaaaatcccgcccgctgcgcgacagcgcggaacgttgtctgcaagagattgccgaagcgcgcgatttgagcgaagagcagctgcaggatcggcttacgccgacgctggggctggataatcccggtgcgctgacctttgatttcggtacccgcagctttagcgtgcgctttgatgaaaatctgcagccggtaatttatgaccagcagggagcgcggcaaaagagcctcccgcgcctgcgcgccgaagatgaccagacaaaagccgcggaagcgctgctccggctgaaaggattgaaaaaagatgccgctcgcgtggcgaaacgcctgctaccgcatctggaaaacgccctgcggctggcgcggcgttggacgcgcgcggagtttcagtcgctgttcgtcgaccatccgctgacccacaatgtgacccgccgcctggtatggggagtgtacgccgctaatgagcctcgtcgcctgctcgccgcttttcgcatcgcggccgagggagagttctgcgacggccaggatgagcccatcacgctgccggaagatgcactattcggcatcgttcatccgctggaaatggacgacctgacgcgggcggcgtttgaacaactctttgccgattaccagctattgccgccgttccgtcagctgacccgccatactctcctgctgctgccggaagaaacttcagtcagcaagctaacgcgctggcagggaaggtcgacgacctgcgggcagctgctgggcatccgcggccggggctggtggcaaggtagcgaaagctatttctgttacgatgttgctcagcatcggctgatactggaaatcacgccgggatttgttcactacagcatagacgctaaagctcctcagcagtttggcgcgataacgctctattacggcgcacaacccgttgcgttttcccggctcgatcctcaggatctcagcgaagcgctaagcacaatagagattatttcccgctag

SEQ ID NO: 174769 - DNA, 1089 bp, Klebsiella oxytoca
atgatacaacaggaaaaacatcttcagcgccccccagccgccgtgctctacgccgatgaactcgcgcggctgcaacagaatgaccctttcccctgcccgcccggctggcagttaagcctgcctgcggcgcgcgcgtttatcctcggcgatagcgctcgcgacatcagccgtaaagtggttatcagccccgccgccgtcgagcggatgctggtcacgctggcgaccggacgcggcctgatgctggtcggtgagccgggcacggcaaaatcgctgctctcagagctgctggccaccgccgtctgcggcgatgccgggctcaccattcagggcggcgcgtcgattaccgaagatcaaatcaagtacgcctggaactatgcgctgttgatcaaccagggaccctcgactcaggcgctggtgcccgcaccgctgtatcaaggcatgcgcgacgggaaaatcgtccgcttcgaagagataacccgcacgccgctggaggttcaggactgcctgctggggatgctttccgaccgggtaatggcgatcccggagctgagcggtgaggatagcctgctctatgcccgcgccgggtttaatatcattgcgaccgccaatacccgcgatcgcggggtcaacgaaatgagcgcggcgctcaaacgtcgcttcgacttcgaaaccgtctttccaatcatggattttcagcaggagctggagctggtggctaacgcgtcggcgcgcctgctggcgcatagcggcattccgcataaagtgcccgatgccgtactggaactgctggtccagaccttccgcgatctgcgcgccgagggcggaaagaaaacctcaatggatactctcaacgcgattatgtccaccgccgaagcggttaacgtcgcccacgccgtcggcgtacgtgcctggtttctggccgctcgcgccggagagcccgccgacctggtagactgcatcgccggtacaatcgtcaaagataacgaggacgaccgcgcccgcctgcgccgctattttgagcagcgcgtcggtacgcataaagaagcccactggcaggcctattatcaggcccgccaccgcctgccgtga

SEQ ID NO: 174770 - DNA, 2286 bp, Klebsiella oxytoca
atgccagagcagccgttaattatcggcgttcgacaccacagcccggcctgcgccaggctggtaaaagaacgcatcgaacaaacgcgtccgcgctacgttctgattgaagggccggtggactttaatcagcgcctggatgagctgtttttaccccatcaattgcccatcgccatctacagctactgccagtctcaggagggcggcgcggcgggacgcggtgcctggacgccgtttgccgaattctcccccgagtggcaggcgctgctgagcgcccgggcgacgggcgcgcatattcgctttatcgatttaccggtctgggcgcaaagaaaggatgacagcgatgcctctgacgctcgccgcgccgatgaccagcagcgcctgttagccgccagcggaatggagaataccgacgcgctgtgggaccatctgttcgaagatgaaacccagcgagccggactggagcaggcgctggaaacatactttatccagttgcgcggcgatagcagcggcggggaaaacagccggcagcgggaagcctggatggcccgctgggtggcatgggccatgcagcaaaatgacggcccggtcgtggtggtctgcggcggctggcacgccccggcgctggcagccctgtggcggaattgccgggcgccagcgcaggaacctgaatccccgccgccaccgacgcccgacgccgtcaccggctgctacctcaccccctatagcgaaaaacggctggacgttctggcgggctatctttccgggatgccggcgccggtctggcaaaattggtgctggcagttgggcctgcgtcaggccggggaacggctgctgaaaactatcctcgcccgcctgcgccagcatcgccttcccgcctcaacggccgatttcgctgccgcccacctgcgcgcaatggcgctggcgcagatacgcggccatacccagccgctgcgctgcgactggcttgacgcgctggcgggctcgttaatcaaagaagcgctcaatgccccgctaccgtggagctatcgcggcgtgattcatccgcaaaccgatccgattctgctgaccatcgtggatgcgctggcgggagccggtttcggcaagctcgctcagggaacgccgctgccgccgctgccgcaggacgtcgatcgcgagctggcgcgcgtcgggatcgccataccggcaaacctgaacatcaatcgctatacgcccgagggattagcaaaaagtcaggtcttacaccggttggccatccttgacattcccggtttccagcagcaaacgggcagcgcggtgacgctttccggcgatggcgaagagcgctggcgactgtttccaaccctggagcagcacgcggtcctgatcgaggcctcccgctacggcgcttccctggcggaggccgcgcgccagcggctggaagcggctattctggcctccggggggatcaaaagcctggccgccagcctgaatcaggccgcgctggcggggctctccaccttcagccagcagatgctggaacagctggcgcagctgattgccgaagagagccagtttgccgaaatggggccagcgctggaggtgctttacgccctatggcagcaagatgagagcagcggtatgcaaaacgccgcggtgctggaaatcacgctttgcgcggcgcttgaccggacgctgtggctttgcgaatccagcggcgttgccgacgagcagcagtttcacgcccatctgcatagctggcgcaccctgtgccacatcctgcgcgatctccacagcggcagcgttttaccgggagtttcgctcagcgccgccctggcgctgcttgaacggcgaattcacgccgcagatgccgcaccgctcgaccgcggcgcggcgctcggcgcgctgattcgccttgagcatcccgcggcgaccgctgaagcagcgatgaccctgctgacgcagctctctccgcagcgtctgggagaggcggtccacggtatgctggcgctggcgcgccatcagctcgcctgtcagcccgcttttatcacgggattcagcgcgctgctcgcccggctggcggacgatgagtttattctcgcgctgccggatctgcgggcggcgatggcgtggctgccgcctcgggaacgcggcgagctggcccgccaggtgcttgatcactatcacatgtccatgctaccgacctctgcgctacaggcgccggttgcctgctcgccggagcagttactctatcatcagcagctggaacagcaggcgctggccgcgctacgccattggggagtacgctaa

SEQ ID NO: 174771 - DNA, 1137 bp, Klebsiella oxytoca
atgaacaggttatccgatattctggcaacccaggagctccagcgctggcggctgattctgggcgaggccgccgaaaacagcctcggcggcctcgatgagcatgcccgtcaggtagaccatgcgctggagtggctctacggccgcgatccggagcgactacggcgaggcgagcgccagggtggactggaggattccagcctgacgacgccggaatggatcaacgctatccactcgctttttccgcagccggttatcgagcggctggagagcgatgcggtactgcgctacggcatcgatgaggtggtgaccaatctggaagtgcttgaacgtatcgagccttccgaaagcctgctgcgagcggtactgcatactaaacatctgatgaatccagacgtgctgaacgccgcccgcaagctggtgcgccaggtggtagagcaaattatggcccggctggcgacagaggtgcgccaggctttttccggcgcgcgcgatcggcgccgcccctcgcgtatcccgctggcgcgcaacttcgacttcaagaataccctgcgcgccaacctcaagcactgggacccgcagcgcagcaagctgtacattgaatcgcctaagtttatcagccgtattaaacgccacagcgaaaaatggcagctgattttgctggtcgatcagagcggttcgatggtggattccgttatccattcggcggttatggcggcctgcttatggcagctgcccggcattcgtacgcacctcgtggcgtttgataccagcgtggtggatctcacggacgacgttgccgacccggtagagctgctgctgaaagttcagctcggcggcgggaccaatatcgcccaggccgttgaatatgcgcgacagctgattgaacaaccgcaaaaaagcgtcatcgtgctggtgagcgactttttcgaaggcggggcgaactcgctactgattaatcaggtcaagctgagcgtgcaaagcggcgctaaagtcctcgggctggcggcgttagacagttcggcatccccctgttatgaccacgatatggcccaggcgctggttaacgtcggggcgcaaatcgccgccatgacgcccggcgaactggcctcctggctggcggagaatttacaatcatga

SEQ ID NO: 174772 - DNA, 2007 bp, Klebsiella oxytoca
atgatgcctttacgccccgaattactggaactcaccccgcaggcgctcatggcgctaagcaacgccggattcgtaaaacgcagccagaaagagctggataacggcaatatccccgagcttgcgcaggatgaagacggcaccctgaccgccgtatttcacgacggcacccgcacccggctggcaaaaggccaggcgctcaaagaatccagctgtacctgcggcgccagcggcatgtgtcgtcatcgcgtgatgctgatcctcagctaccagcgcgccaataccggtgatgagcgtcccgaaggggaaccggagagcggcgaacgctggcatccgggactgtggcaagcggagctggccgctctccccgagtccgttctgaagcgggcgcagcagctggcggataaaggcgtcgcggtggagctattctgccgacctaacgaaacgccttcggcaaagctgccgatgagcgatgtgcgtttttattcccgcagcagcatccgttttgcccgctgcgactgcgtcgacggctcgctgtgcgaacacgtggcgctggcggttcaggcttttaccgatgccgaagcccagcagcctggctttacgcacctggtctggcaaacgcgcagccgcaaggccgccgcccgcggagggccctttgatacccctgacggcgaggcctgtcgacaaagcctccgccagctcagccaactgctgtggcaaagcggcgtcagccagccgcctattggcttcgaggctgcgttcacccgggcgcagcgcgcggcgcagacggtaaactggcgctgggtcgtcggcgcacttgctcagcttcgcgaaggcgtcgaggcccttcagcagcgcgccagccattaccatcctgaacagcttctcagccagctggcaggacttaacgcccgccttgagagcgccgacagaatggcgcagcttgccgatgccgaccagacgccgcccctgccgtggcgcaccgtggtgggccagggtatcgccggcgaagcgcagctcgatcatttgcgacttatctccctgggaatgcgcagctggcaggataatcaccgctacggtttacgcatctggtttagcgacccggataccggcagcattatgcatctgtcgcgcagctggccgctggcggaacgggcgcaaagcccgctgtggcagcgccgcctgtttagcttccaggccggcgcgctggcgggcgggcagataattactcaatcagcgagccgcaacgccagcggcgaactgctgctgagcgcgcgccaccgcctgagcagcaacattccgctcagtgaagaggcctggcttttgctcagcgcgccgctgcgccagccgggggttgcggcgctgcgtgagtatctgcgccagcgccctccggcgtgggtgcgtccgcttaatcaggtggataatctgtttattttgccggtggatgcctgtcttgccgtcggatgggacgccgcccggcaaacgctggatgcgcaggttctcagcggcgaagggcaagacaacgttttgcagctgtcccttcccgccgccgccagcgcgccctatgccgttgagcgaatggcggcgctgctcagccaggcggacgatccggtagtgatggtgtccgggatggtcacctttagccgcgggcagcttagcctggaaccgctggtaatgatgacccgcacccgcggctgggcgctgaacgcggaaccgcttcccgttgggccgctgcctgccggcgatatcctgccgccgcggtcgctggccctgacgctgttgcagcgcacccgggcgctgctgatccagattatgcgcaacggcctgcgctatcagcaaaagggcctttttcgcgaagcgatgacgctgagcgacgatttaaccaacggcggatttaatcatctcgcgcgcctgctccgccagttggccgagcgcgaaacggcgacttccgaggatacgctcagcgctatcgcccaactctgtatacaattagagatgatgattgattaa

SEQ ID NO: 174773 - DNA, 462 bp, Klebsiella oxytoca
atgaaattttaccgcaggattaccgccgctctgggcgcaacgttaatgatggccgcgctcgtcggctgcgataacaacaaagatgaggtcaagacgtttcacaacacgatgaacggcgtagacctgacctacacctatcactacaaagacgatgttgttacccgccaggacgcggagaatactattccctatacatcactcggggtgagtaacgaagagcaggcgcgcaagatcatcgatcctatcggcgtggcctacagcaaaatcaaaggcgtcacccacagcgtcgactataaagagagcgccgcgcaggaacacctctccatcgactttaatcaggctaaaatcagcgagctgtgtcaattacccggggccagctttacagactgttcgcaaaagtttatttcgctgagcgagtcggaaaaaatgttgaaatcacagggatttaaagaagtgaaataa

SEQ ID NO: 174774 - DNA, 468 bp, Klebsiella oxytoca
atgatcagtaacgatattctccgtagcctgcgctacaccctgaaaaccaataacagcggcctggtacgtatttttgcgctagcggatgcgccggtcagcgccgaacagctggtaccctggctgaaaaaagaagacgaagaggggtttgtgcgctgcccggatgtcgtgctgtcgaattttctcaacggcctgatttacgacaaacgcggtaaagatgcgtcggcgccgccgctggcggtcgaacgccgggtgaataataatatcgtgctgaaaaaactgcgtattgccttttccctgaagacggatgacattctcgctatcctcactcagcagaaattccgcgtctcgatgccggaaatcaccgccatgatgcgcgccccggagcataaaaacttccgcgaatgcggcgaccagtttctgcgctacttcctgcgcgggctgaccgagcgcgaacacgcgaaatcctga

SEQ ID NO: 174775 - DNA, 720 bp, Klebsiella oxytoca
atgttaaaagtattaattgtcgacgacgagccgctggcgcgtgaaaacctgcgtattttgctggagacccagccggatatcgagatcgtgggcgaatgcggaaatgccgtagaggcgattggcgcggtacacaagctgcacccggacgtgctgtttctggatatccagatgccgcgtatcagcggtcttgagatggttggcatgcttgacccggagcatcggccctatatcgtctttctcaccgcatttgacgagtacgcggtgaaagcctttgaagagcacgcgtttgattatttgctgaagccaatagagtccgccaggctggaaaaaacgctggctcgactgcgccaggagcgcagcctgcaggatatgaccgccctcgacgatacccagcaggcgctaaagtatattccctgcactggccacagccgcatctggctactgcagatggaagacgtggccttcgtcagcagccggatgagcgggatttacgtgaccgaccgcgaaggaaaggagggttttaccgagctcaccttacgcacccttgagagccgaacgccgctgctgcgctgccatcgccagtacctggttaacatgtcccatctcaaggagatccgctttgaggaaaacggccaggcggagctgctgatgcgtgccgggcaaacggtgccggtgagccgccgctatctgaaaagcctgaaagaggcgattggtctgtaa

SEQ ID NO: 174776 - DNA, 1689 bp, Klebsiella oxytoca
atgtacgagtttgatctggtgttgctgctgcttcagcagatgtgcgtgtttttggtcatcgcgtggctgatgagcaaaacgcgtctgttcatcccgttaatgcaggtcaccgtccgtttgccgcataagctcttgtgctacgtgaccttctctattttctgcatcctcggcacctactttggcctgcatatcgaagattcgatcgccaatacgcgagccatcggcgcggtgatgggcggcctgctgggcgggccggtggtcggcggcctggtgggactgaccggcggccttcatcgctactcgctgggcggcatgaccgcgctgagctgtatggtttccaccatcgttgaaggactgctcggcgggctggtgcacagcattctggttaaacgcgggcgaccggataaagtcttcagcccgctcacggccggtgcgattaccttttttgctgaaatggtgcagatgttgatcattttgctgatcgctcgcccgtttgaagatgccctgcatctggtacaaagcatcgctgcccccatgatggtgactaataccgtcggggcggcgctgtttatgcgtatcctgttggataagcgggcgatgtttgaaaaatatacctcggctttctcggccaccgcgctgaaggtggcggcgtcgacggaggggatcctgcgccaggggtttaacgaagagaacagcatgaaggtcgcgcaggtactgatccaggagctggatatcggcgcggtggcgatcaccgatcgcgacaagctgctggcgtttaccgggatcggtgacgatcaccatctgcccggtaagcctatttcttcgctctatacccaaaaggcgatcgataccggcgaggtggtctatgccgacggtaacgaggtgccctaccgctgctcgattcatcctaactgtaagctgggctccacgctggttattccgctgcgcggcgagaatcagcgggtgattggcacgataaaactttatgaagcgaaaaaccgcctgttcagctccatcaaccgcacgctgggggaggggattgcccagctgttatccgcgcagatcctggccggacagtatgagcggcaaaaggcgttgctaacgcagtcggaaatcaagctgctgcacgcccaggtgaatccgcacttcctgttcaacgcgctgaataccctgaaagcggtgattcgccgcgatagcgaccaggcggggcaactggtgcagtatctgtcgacctttttccgcaaaaacctgaaacggccagcggagatcgtgaccctggcggatgagatcgaacatgtaaacgcctatttgcagattgagaaagcgcgctttcaggccaacctacagatccacatgctggtgccggaagcgctggcccagcatcaactgccggcttttaccctacagccgatagtcgaaaacgccattaagcacgggacttcgcagcaccttggggtgggggaaatcaccattcgcgccagccagtaccagcgctggctgcagctggatattgaagataacgccgggttatatcaggacaaacccagcgccagcggactgggcatgaatctggttgatcgccgtctgcgggcgcgcttcggcgccgattgcgggatcaccgtcacctgcgagccggaatgttttacccgcgtcacgctgagactgcctctggaggaaaacgcatgttaa

SEQ ID NO: 174777 - DNA, 759 bp, Klebsiella oxytoca
atggcgctttatacaattggcgaagttgcccagctttgcgatatcaatcccgtgacgttacgcgcctggcagcggcgctacggattactgaaacctcagcgtaccgacggcggccaccgcctgtttaatgaatatgagatagaccgtattcgcgaaatcaaacgctggattgactccggcgtgcaggtcgggaaagtgaaaacgctgctgatggataatgagcaggagagggtcgacggctggcgcgatcggcaggagatgctgctcggctatctgcaaaacggaagttatcatcgcctgcggatgtggctgaaggagcgtaaccacaccgactctgcgcaaaccctggtgaagcacctggttaaccccttacgccagcgcctgctcagcccgcagccaacgttgctggcaatgcggggcatcctggacggcattctgattaatcatatcgcccgatgcctgtcctcgacggcaaaatatcccggcgaccatgcgctgattatgggctggaatgtgaacgatatcacccggctatggctggagggctggatagccagcgaacagggctggcgggtggatattctcgcccattcgctgaaccagatccgaccggagcttttccccgacagtacgctaatggtctggtgcggagaggcgccctgtagcgcccaggtgaatcaaatgcgtcaatgggagcagcagggccagattatctggctgaatcaccccaccgcaacgtctcccggaggcggcgcctga

SEQ ID NO: 174778 - DNA, 738 bp, Klebsiella oxytoca
gtgaaggtgctacgtgatccgctgctgtggctgagcgcaatgtttgtcgcgctgctgctggcgttgccctacagcgcgccgctattcagcgcgctgtttcccgagctgccgcgcccggtttatcagcaggagagttttatttcgctgaccctggcgcactgttggctggtggcgctctccagcctcgcggctacggtggtgggcgtcggggcagggattgcggtcacccggccttccggccatgagtttcgccccctggtagagacgatcgccgcgatgggacagacgtttccaccggttgcggtgctggcgattgcggttccggtgatgggattcggctggcagcccgcgctgatcgcgctggcgctgtacggcatattgccggttttgcagggtacgctggcgggattgggggcggtaccgtccggcgtattgtctatcgctcaggggatgggaatgaccggctggcagagattgataaaggtggagctgccgctggcggcgccggtgatgctcgctggcattcgtacctcgaccatcgtgaatatggggacggcgaccattgcgtcaaccgtcggcgcgaatacgcttggcacgccgattgttatcggcctgagcggatttaataccgcttatgtcattcagggggcgctgctggtggcgctggcagcgattatcgtcgatcgcggctttgaacggctgacccggctaatcagccgacaccgccgcgaacaataa

SEQ ID NO: 174779 - DNA, 948 bp, Klebsiella oxytoca
gtgattgagttcgacggcgtcaataaagcctttgccggacagcctgcggtgaaaaacctcaatctgcatctgcgcgagggggcattttcggtgctgattggcacctcaggttcggggaaatcgaccacgctgaagatgatcaatcgcctggtggagcatgatagcgggacgatccgtttcgccgggcaggatatccgccagcagccggtgctcgaactgcgccgcagaatgggctacgccatccagtccatcggcctgtttccccattggacggtggcgcaaaacattgccaccgttccgcagctgcaaaagtggtcgcgacaaaaaacgcaggcgcgggttgatgaattgatggccttgctggggctcgaaccggtgctgcgcgaacgttatccccatcagctttccggcggccagcagcagcgcgtcggcgtggcgcgcgcgctggcggcgaatccgcaggtgttgctcatggacgaaccttttggcgcgctcgatccggtgacgcgggaagctctgcaacaggagatgatccgcattcatcgcctgctgggacgcacgattgtgctggtgacccacgatatcgatgaggcgctgcggctggcggatcatctggtgttgatggacggcggcgaagtagtgcagcagggcgagccgctgcagatgctgctggagccaaaaaatgcctttgtgcagaccttctttggccgcagcgaactgggcgtgcgcctgctgtcgctgcgcggcgtgagtgattatctgcgccgcgatgagcgcctggcgggagatgcgttaaacgtggcgatgaccctgcgcgaggcgctatcgcagtttattgctcatcgctgcgaggtattgccggtagtggatgagcggggagagtcctgcgggacgttgcattttgccgacctgctgcgcgaggaggcccggcgtgaaggtgctacgtga

SEQ ID NO: 174780 - DNA, 1158 bp, Klebsiella oxytoca
gtgacgattcgttgctgtaaccgcgttgcgctgctgctggcattattactgctgctggcgatggcgctgccgtttatcaattatgcgcctaaccggctgttatccggcgagggccgttggctatggcaggtctggccatggctggcgggcgtgcaggcgggggcggcgctgttaatcgcgctgctgtgctggcggccggggcgcttcccgctgctggtcatcttcctgctggcggatctgctgctgcctgcgctgctttggggggccggtggggcggcggtgcagctggcgcagaacggttcgtcgctggcccgtacctcgccgggcagcggcctgtggctggggctggcgttctgtctgcttatcgccagcgatgccgttcgccgtctgacttcccgtgccctgtggcgctggttgctcaatgcgcaaatctggctgctgcccgcgctgctgctgggactggggagcctcgatgaactctctctgctgaaagagtatttcaatcgccgggaagtgtttgacgatgcgctgtcgcagcatgtgactctgctgctcggtaccctgctgccggggctgctgattgggctgcccattggcgtttggctctggcgcttcccacgctggcaatcgccggtttttgcggttctcaatgtgattcagaccgttccctccgtggcgctgttcggcctgcttattgcgccgctggcggggctggcgcgccagtttccttcgcttgcccagctcggcgtttccggaaccggcattacgcctgcgctgattgcgctggtgctgtatgcgctgttgccgctggtacgcggggtgacggtcggcctgcagcaggttccgcgtgaagcgctggagagcgcagtggcgatggggatgagcggcggacagcggtttcgtcaggtacagctgccgctggcattgcccgtattgttgcgcagcctgcgggtggttagcgtacaaaccgtcggtatggcggtcgtcgcagcgctgattggtgcaggcggctttggcgcgctggttttccaggggctactcagcagcgcgctggatctggtgctgcttggggtgatcccgaccatcgcgctggcggtggtggtggatgcgctattcgcgctgtggggcgcattactcaaaggagaggtccgtgattga

SEQ ID NO: 174781 - DNA, 918 bp, Klebsiella oxytoca
atgataaaggcaagtatgtggtccggcacgctggcgctggcggccctgataagtctgccgctgcaggcggcggagccggttaaagtcggctcaaaaatcgataccgaaggggcgctgctcggcaatattattttgcaggtgctggaaagccacggagtgaaaaccgtcaataaaatccagctcggcaccacgccggtggtgcgcggagcgataaccgccggtgaactggatatctatccggaatataccggtaacggcgccttcttctttaaagcggagaacgacccggcgtggaaaaacgcgcagcagggctacgagaaagtcaaaaagctggacgcggaaaagaataagctcgtgtggcttaccccggctccggccaacaacacctggaccatcgccgttcgtcaggatctggcagaaaaaaataacctcgcctcgttaagcgaccttgccggatatctgcaaaagggcggcgactttaagctggccgcttcggcggaatttattgaacggccggacgcgctgccggcatttgaaaaagcctacgactttacgctcaaacagaaccagctgctgtcgctggcgggcggcgatacggcggtcaccattaaagcggcggcgcagcagacctccggtgtaaatgcggcgatggcctacggcaccgatggcccggtcgccgcgctgggcctgcaaaccctgagcgacccgaagggcgtgcagccaatttacgccccggccccggtcgtgcgtgaagcggtgctgaaagaatacccgcagatagccgactggctacagccggtctttgccagcctggatgaaaagaccctgcaaaagctgaacgccagtattgcggtagagggcctggatgcgaagaaagtcgccgccgactatctgcaacaaaaagggctgctgaagtag

SEQ ID NO: 174782 - DNA, 2298 bp, Klebsiella oxytoca
atgaaatggctttgtactgtaggcgtcgctgtgagcctggcgttgcaacccgcgctggcggatgaattgttcggcaatcatcccttaacgccgcaggcgcgggatgcgtttgtgaccgaactgctgacgaaaatgacggtggacgaaaaaatcggtcagctgcgcttgattagcgtcggtccggataacccgaaagatgccatccgcgaaatgataaaagaggggcaggtaggggcgatttttaacaccgtgacccgccatgatatccgcgctatgcaggatcaggtgatggcgctcagccgcctgaaaatcccgctgtttttcgcttttgacgtgctgcacggccagcgcacggtatttccgatatctcttggcctggcttcctctttcaacctcgatgcggtgaataccgtcgggcggatttcagcttacgaagcggccgacgatggcctgaacatgacctgggcgccgatggtcgacgtctcccgcgacccgcgctggggccgcgcctcggaaggctttggcgaagacacttatctcaccaccatcatgggggaagagatggtgaaatccatgcagggcaaaagcccggcggaccgctactcggtgatgaccagcgttaagcactttgccgcctacggcgcggtcgaaggcggcaaagagtacaacaccgtcgatatgagcccgcagcgcctgtttaacgactatatgccgccgtataaagcggggctggacgcaggcagcggcgcggtaatggtcgcgctcaactcgcttaacggtactccggcaacctcggattcctggctgctgaaggacgtgctgcgcgaccagtggggcttcaaaggcatcaccgtgtccgaccatggggccataaaggagttgatcaaacacggcgtggccgcggacccggaagacgcggtgcgcgtggcgctgaagtcaggcatcaacatgagcatgagcgatgaatactacagtaagtatctgcccgggctggtgaagtccggcaaggtgacgatggcggagcttgatgacgcgacccgccacgtgctgaacgtcaaatacgatatggggctgtttaacgatccctatagccacctggggccgaaagattccgatccgcaggataccaacgccgaaagccgtctgcatcgtaaagaagcgcgtgaagtggcgcgcgaaagcctggtgttgctgaaaaaccgtctcgacacgctgccgctgaaaaaatcgggcactatcgcggtaatcggcgcgctggccgacagcaagcgcgacatgatgggcagctggtcggcggcgggcgtggccgatcagtcggtcaccgtgctggccggaatgcaaaaggcgctgggcgatcaaggcaaaatcatctatgccaaaggcgccaacatcactgatgataaaggtatcgtcgacttccttaatctgtacgagaaagcggtgcaggttgatccgcgctcgccgcaggagatgattgatgaagcggtggcggcggcgaagcagtccgacgtggtggttgccgtggtgggtgaagcgcagggtatggcgcatgaagcctccagccgcaccgacatcaccctgccgcagagccagcgcgccctcattagcgcgctgaaagcgaccggtaaaccgctggtgctggtgctgatgaacggccgtccgctggcgctggtgaaagaggatcagcaggccgatgcgatactcgaaacctggttcgccggtaccgaaggcggcaacgccattgccgacgtgctgttcggcgactacaacccgtcgggcaaactgccgatgtccttcccgcgttcggtcgggcagatcccaacctactacagccatctcaataccggtcgcccgtacaatgcagataagccgaacaagtacacctcgcgctactttgacgaggccaacggcccgctctatccctttggctacggcctgagctataccacctttagcgtttccgatgtgaaaatgtcggcgccgaccctgcagcgcgacggcagcgtaaccgccagcgtgcaggtgaccaataccggcaagcgtgaaggggcgacggtgattcagctttatctgcaggacgtcaccgcttccctgagccggccggtgaaaatgctgcgcggctttaagaaggtgaccctcaagccgggtgagacgcaaaccgtcagcttcccgattgacattgaggcgctgaagttctggaaccagcagatgaagtacgacgccgagccgggcaaattcaacgtctttatcggcgtcgattccgcccgcgtgaagcagggcgagttcgaactgctgtaa

SEQ ID NO: 174783 - DNA, 1743 bp, Klebsiella oxytoca
atgtcatctgcaacaactcataacaacgcttttctggctgaactcgctcgcctggttggctcctcccatctgttgaccgacccggccaaaacccagcgctatcgcaaaggcttccgctccggccagggggaagcgctggcggtggtctttcccggcacgctgctggagctgtggcgcgtgctgaacgcctgcgtcaacgccgataaaatcattctgatgcaggcggcaaataccggcctgaccgaaggctcaacgccgaacggcaatgattacgatcgcgacatcgtcattatcagcaccctgcgcctggataaactgcacctgctggataaaggcgaacaggtactggcttatcccggcacaacgctctattcgctggaaaaagcgctgaagccgctgggtcgcgaaccgcactccgtcattggctcatcctgcatcggggcatcggtggtcggcgggatctgcaacaactccggcggctcgctggtacagcgtggcccggcgtataccgaaatgtcgctgtacgcgcaaattgatgaaaacggcaagctgacgctggtgaaccacctcggcatcgacctcggcaccacgccggagcagatcctcagccgcctcgacgacgagcgggttaaagatgaagatgtccgccacgatggccgccacgctcacgatcatgattacgtcacccgcgtgcgcgacgtgaatgccgataccccggcgcgctacaacgccgacccggaccgcctgtttgaatcctcgggttgcgccggcaagctggcggtgttcgccgtgcgcctcgatactttcccggcggaaaaacgccagcaggtgttctacatcggcaccaaccagccggaagtgctgaccgaaattcgccgccatattctcgccgaattcagccatctgccggttgcgggcgagtacatgcaccgcgatatttacgacatcgccgagcagtacgggaaagataccttcctgatgatcgacaagctcggcaccgataaaatgccgttcttctttaccatgaagggccgcaccgacgcgatgctggagaaagtctctctgtttaagccgcacttcaccgaccgctttatgcagaagctgggtcacgtctttccggcgcacctgccggagcgaatgaaaacctggcgcgataaatatgaacaccatctgctgctgaaaatggcgggcgatggcatcgaagaagcccaggcatggcttggagagtatttccagaatgccgaaggggatttcttcgtctgcaccgcggaagaaggcagcaaagccttcctgcaccgctttgccgctgcgggtgcggcgatccgctatcaggcggttcacgccgatgaggtggaagatattctggcgctggatatcgccctgcgccgtaacgataccgaatggtttgagcatcttcccgctgatattgacagccagctggtgcataagctctattacggccactttatgtgtcacgttttccatcaggattacatcgtgaaaaaaggcgtcgatgcccacgaactgaaggagaaaatgctggtgctgctgaaggagcgcggcgctcagtatcccgccgagcataacgtcggccatctctatgaggcgccggaaagcttaaaacgtttctatcgtgagaacgatccaaccaacagtatgaacccggggatcggcaaaaccagcaagcaaaaatactggggagaaacgccggataacgcggcaagccctaccgacccgcaataa

SEQ ID NO: 174784 - DNA, 555 bp, Klebsiella oxytoca
atgtccgcagtggataaattacacgacgctgacttagagatccgcgaggcgctgcccgatgacgcccacgccatcgccgcgctgtacgtctggcacgtgctcaatggacgcgcctcttttgaagagatcccgccgaccgtcgacgagatgcgcaagcgtattaaaaccgtgcgcgatagcgggctgccgtggctggttgccctgtggcgcggaaccatcgtcggctactgctacgccacgttttatcgccctcgcccggcctaccgctacactctcgaagagtccatttacgtggaggcgggaatgggcggacgcggcatcggcagcgcgctgctctcccggttaatagagaaatgcgaacagggaccgtggcgacagatgttggccattatcggcgacggccacagtaacgccgcgtcgattgcgattcataaaaagttcggttttagcgtggcgggccagctgcgcagcgttggttataagatgggcgactggcgcgacaccttgattatgcagcgcccgctcggcgatggcgactggacgctgccggagtaa

SEQ ID NO: 174785 - DNA, 948 bp, Klebsiella oxytoca
atgaccaaatttcgagtttctttgctcagcctgacgttgctgctggctgtgccttttgcgccccaggcgatggctaaatcccccgcggcggtgtccgcttcccagccggatattgcgtccggcagcgcgatgatcgtcgaccttgccagcaaaaagatcatttatgccagccagccggatctggttcgtccgatggcgtcgatcactaaagtgatgaccgcgatggtggtgctggatgcccatctgccgcttgatgagatgctgaccgttgatatcagccagacgcctgaaatgaaagggatctattcacgcgttcgcctgaacagccaaatcagccgccgcaatatgctgctgctggcgctcatgtcgtcggaaaaccgcgccgctgccagcctggcgcaccattatcccggcggctataacgcctttattcgcgcgatgaacgccaaagcgcaggcgctgggaatgacccgcacccgctacgttgagcccactggcctgtcgattcataacgtttccaccgcgcgcgatctgactaagctgctgatcgccagcgagcagtatccgctgattggccagctgagcaccacgaaggaagatatggcgactttcgcccatcccgcctacacgctgccgttccgtaacaccaatcatctggtctatcgtgataactggaatattcagctgaccaaaaccggttttactaatgctgcgggccactgcctgattatgcgtacggtgattaatcagcgcccggtagcgctggtggtgatggatgcttttggcaaatatacccactttgccgatgccagccgtctgagaacgtggattgaaaccgggaaggtgatgccggttccggcttccgcgctcagctataaaaaacagcgcgaagcgcagatggccgatgcgatgctgaaaggcggcgcgcagaccgcgcagaacgattaa

SEQ ID NO: 174786 - DNA, 588 bp, Klebsiella oxytoca
atgaaccatgtctgggggctcttctcgcatcctaatcaagagatgagcgttattaaaagcgaaaacgaaaccgtttcgcatcactacacgcatcatgtgctggttatggcagcggttccggttatctgcgcctttatcggcaccacgcagctgggctggaacttcggcgacggcacggtgataaaactgtcgctgatgaccggcctggcgctggcggtgctgttttatgccgtgatgctcgccggggtcgcggtgatggggcgggttatctggtggatggcacgaagctatccgcagcggccttcccttaaacgctgtatggttttcgccggctatgtcgccacgccgctattcctgagcgggatcgtggcgctctatccgctggtgtggctatgcgcgctggtgggaaccgtcgcgctgctctataccggctatctgctgtatctcgggatcccgactttccttggcatcaataaagaagaggggctaagtttcgccagctcgaccctggcgattggcgtgctggtgctggaagtgctgctcgccatcaccgtgatcctctggggctacggctatcgactcttctga

SEQ ID NO: 174787 - DNA, 570 bp, Klebsiella oxytoca
atggatatcaataacctgattacccagtacggctacgcggcgctggtcattggcagcatggcggaaggcgaaaccatcacgctgctcggcggcgtggcggcacatcagggattattgaagttctggctggtggttatctcggtcgccctcgggggaatgattggcgatcaattgctttatttgctcggcagacgctttggcggacgcatcctgcgccggttttcccggcagaagaagcggatccagaaagcccagcgtatgatccagcgtcgcccctacctgtttgtcatcggcacccgctttatgtacggcttccgggttatcggcccgctgctgattggcgccagtcgactgccaccgaaggtgtttctgccgctgaatattctcggcgcgattatctgggcgttaatttttaccacgctcggctatctcggcggcgaagcgataggcccgtggctgcaccatctggacgcgcatttgaaacactggatctggctgattctggcggtggtgctggtggttgcggcgcactggtggctaaagcgccgcgaggcaaagaagaaagagtga

SEQ ID NO: 174788 - DNA, 1440 bp, Klebsiella oxytoca
atgaacctgactttgagcaaacgcgcgttggctggcctgccactggccatcgcgctggcgggctgcgcgccatcgcacgatattggcaatccgctccagcagcaaaccccggcatcccacgtctcaatggaactgcccgccgccgtgaaaaacggctggccgcaaagcaactggtggcaggattatcatgaccctcagctcaatagcctgattcagcgtgccttagccaatgcgccggacatgcagattgccgggcagcgcatcaaactggcggaagcgcaggcgcggatgtcgcaatccaccctgggaccgaatctggatttttccgccgatattgaacggcagaaaatgtcttccgaggggctgatgggaccgtttgccaccgataccgacggcaataccgggccgtggtacaccaacggtaccttcgggctgaccgccggatgggacctggatctgtggggtaaaaaccgcgcgctgttacaagcgcgaatcggtgaagtcaaagctcaggtcgctgaagaagcccagacccgtgaactgctggccagcagcgtcgcccgtctttactggcagtggcagaccgaggcggccattaaaaacgtgctgacgcagatgaagcgcgaacagaataacgtcgttaccgtggatactgcgctgtatcaacgtgggatcaccaactcggccgaaggggcggagaacgacattaacgtcagtaaaaccgatcagcagcttgccgacgttgccggcagtatgaaagagattgaagcgcggctgatggcgctgaccaacaatcagagccaggcgctgaatctgcatccggcggatttgcctgccgtcagcgcgcaaatgcccaatgagctgggctatgagctgctggcgcgacgtcctgatctgcaggtcgcccactggtatatcgaagcttccttaagcgaaattgatgccgcgaaagccgcgttttatccggatatcaacctgatggccttcctgcaacaggatgctctgcatctcagcgatctgttccgccactctgcccagcagatgggcgtcactgccgggctgaccctgccgatctttgatagcggtcggctgaacgcgaatctggatatcgccagcgcgcaaaatggcctgtcgatagcgaagtacaacaaagcggtggtcgatgcggttaatcaggtggcgaaaaccgccagccaggttgagacgctgatggcgaaaaatcagcagcagcagcaggttgaaaaggatgctcagcggatggtcgctctggcgcaggcgcggatgaatgccgggattatttccggttcgcgcgtcagcctggcgaagctgcccgctttgcaggagcgcattaccgctctgcgtctgcgcggccagtggcttgatgccagcatccagctaacctccgcgctgggcggcgggtatcatcaggcggcgaagtag

SEQ ID NO: 174789 - DNA, 735 bp, Klebsiella oxytoca
atgagtcagaacatctatgacgatcccgctttttttgccggatacgccaccctcgaccgttcagttaaggggctggaaggcgcgcctgagtggccaaccatacagcaaatgcttccgccgttatccggtttacgcgtcgtcgatcttggctgcggctacggctggttttgccgctgggcccgcgatcggggcgccgcgcaggtcgagggactggatctctccagccggatgctggagcgtgcccgcgaaatgacccgcggcgaaggtatccgctaccgctgtgaaaacctggagaacctgaccctgcccgcaaatagctgcgagctggtctatagctcgctggcgctacactatctgcccgacgtggcgccgctgttcgctaccgtttaccaggcgctgacgcccggcggtacgctgctgttctccgccgagcatcccatctataccgccccgccgcagcagggctggctggaagatgagaacggacagaagcgctggccggtgagccactaccagcaggagggcgaacgtatcagcaactggtttgccgacggggtgaagaagcagcaccgcaagctgtccacctggataaacctgctggtggccgccggttttatcatcgagcatctggatgaatgggggccaacggcggagcagattgccgcccagccagcgctggatgaagaaaaagagcggccgatgatttttctgctgcgcgcgcgcaagccggcgtaa

SEQ ID NO: 174790 - DNA, 1395 bp, Klebsiella oxytoca
atgaagacattcccacaggcgtttttatggggcggcgcgaccgcggcaaaccaggtcgaaggcgcttatctggaagaggggaaaggattaaccacttctgacgtccaaccgcgcggcgtatttggcgatgtggtagaacgcgtacctggcgatagcggcataaaagacgtcgccatcgatttctatcatcgttacccggaagatatcagcctctttgccgaaatgggttttaactgccttcgcgtatcgattgcctgggcgcgtattttccctgaaggcgacgaaacgcagcccaacgaagccggactggccttttacgacaagttgtttgacgaaatggcgaagcacaatatcactccgctggtgacgctgtcgcactatgagatgccgtgggcgctggtgaaaaactacggcggctggggcaatcgcaaagtgattggcttcttcgaacgctatgcccgcacggtgtttgagcgctacaagacgaaggtcaagctgtggctgaccttcaatgaaatcaatatgtccctgcacgcgccgatgaccggcgttggtctgccggctgacagcagcaaagcggacgtctaccaggccattcaccatcagctggtggcgagcgcgctggcggttaaagcctgccatgacatcgtgcctgagggaaaaatcggcaatatgctgctcggcggcctgatgtatccgctgagctgcaaaccggacgatatttttgaaacgctgcagcagaaccgcagctggcagttctttggcgatgtccagtgccgcggcgcttatccgggctatatgctgcgctatttccgcgacaacggcattagccttgagatcaccgatgccgatcgcgaagccctgagagagaccgtcgattttatctcttttagctactatatgaccggctgcgtgaccgccgacgaagagctgaacaaaaaatcgcgcggcaatattctcagcatggtgccaaacccgcatctggcaagttcggagtggggctggcagattgacccgctcggtctgcgcacgctgctgaacgtgctgtgggatcgctatcagaagccgctgtttatcgtggaaaacggtctcggcgcgaaagataaagtggaagctgacggcagcatcaacgacgattaccggatcagctaccttaacgaccatctggtgcaggttcgtgaggcaattgaggacggcgttgaggtgatgggctacaccagctggggacctatcgacctggtgagtgcttcgaaagcggagatgtccaaacgctatggctttatctacgtcgatcgcgatgatgaaggcaacggcaccctggcgcgcagccgcaagaagagcttctggtggtataaagaggtgattgccactaacggcggcagcttaaaagagtaa

SEQ ID NO: 174791 - DNA, 1860 bp, Klebsiella oxytoca
atggaatataaagcactcgcgcaggatattcttagccgggtaggcggcaaagagaatattgtgagtctggttcactgcgcaacgcggctgcgttttaagcttaaagatagcaagaaggcggatgccgaaggactgaaggcgaatcctggcgtcatcatggtggtggaaagcggcggccagtttcaggtggtcatcggtaaccacgtacatgatgtctggctggcggtgcgcagcgaagccggcctgacggacgacagtgagccggttgcggtgaagggcgaaaaagtgtcgattatcggccagattatcgacgtggtttccggtattttcaccccgtttatcggcgtcctggcggcctcggggatcctcaaaggactgctggcgctggctgtcgtttgcggctggttaacgacgcaacaggcgacctataaaatctggtttgccgccagcgatgcgctgttcttctttttcccgttatttctcggctacaccgccggcaagaaatttggcggtaacgcctttattacgatggtgatcggcggcgcgttaactcatccgctgatgattcaatctttcgaagccagtatggcgcctgacgccgcggcggaatatttccttggcattccggtgacctttatcaattacagctcgtcggtcatcccgattatcctcgcctcgtgggtgagctgctggattgagcggcggagcaacgcaatactgccctcgtcgatgaagaacttctttaccccggcgatttgcctggccgtggttgtcccgctcacgtttctgattatcggcccggttgcgacctggctgagccagcagctggccaatggctatctgcttatctatcaggttgcgccctggcttgccggggcggcgatgggcgcgctgtggcaggtgtgcgtcatcttcggtttacactggggcctgataccgttgatgattaacaaccttaccgtgcttggccatgattcgatgatgccgatgctgttgccggcggtaatgggtcaggttggcgccgcgctggggattttcctgcgcactcgcgatgcccggcaaaaagtgctggcgggctcggcggtatccgccgggatcttcggcgtgaccgagccggcgatttatgggctgaatttgccgctccgccgtccctttatcttcggctgcgtcgctggcgctatcggcggcgcgattgtcggcttcagcgacagccacgtttattctttcggtttcggtaacattttcaccctggcgcagatgatcccgccgcagggcattgacgccacggtgtggggcggcgcgctgggaacgattagcgcattaatcatcgcctgcgtgctcacgttagtcgccgggctgccgcgcagcgccgccgaacaggcggccgttgtcgtggccccggcctcggaaaacgatattctggcgccgatgaccggcagcgtgctggcgctcgatcaggttccagatagcaccttcgccagcggtttacttggccagggtgtggcgattatcccttcagtaggcaaagttattgcgccgttctcgggggaagtcgcctcgattttccagacgaaacatgctatcggcctgctgagcgatagcggaattgaactgcttatccatgtgggtatcgacaccgtcaagctcgatggcgcgccgttcaccgcccatgttaaagagggcgacaaaattaaagcgggcgatctgctgctggagtttgaccgtcaggcgattctgaacgccggttacgatctggcgacgcccattattatcagcaacagcgacgattaccgtgctctcgacattgtttccgccagcgcggtggatgccggtcagccgctgttgtccgtaagccgttaa

SEQ ID NO: 174792 - DNA, 834 bp, Klebsiella oxytoca
atgcaaatcgccaaagtacttaataataatgtagtggtggttgtcgatgagcagcagcgcgaacaggtggtcatgggccgaggacttgccttccaaaaacgcgttggtgactctcttgatgaaagtaaaattgaaaaagtcttcgcgctgcagagcgatgaactgattggccgtttaggcgaattactcagtcagataccgttagaagtgatgaccacctgcgatcggattatcgatctggcgcgcggtcgtctcggtaagttacaggacagcttgtacattaccctgaccgatcactgccactttgcgatcgagcggcagaagaagggcctcgccattcgtaatgtgctgctgtgggaaataaaacggctgtatcctaaggagtttgagttagggcaggaagcgcgggcgattatcgccaaacggcttggcgttgaactggccgaagatgaggcgggttttattgccctgcatctggtgacggcgcagctcaacagcgaaatgccggaggtgatgcacgttacccgggtcatgcaggagattctgcagctggtgaaatatcagctgacccttaactacgacgaagagtcgctgagctaccagcgtttcgttacgcatcttaagtttttcgcccagcgtatgctgacgcgaacggtggtcgaagatgatgatgtgacgctgcacagcgcggtaaaggataactacccaaaagcgtggaagtgtgcggaaaccgtcgcccggcacctgcaaaagagctaccagcggccgctgacgacggaagaaattatgtttctcgccattcatattgaacgggtgagaaaagagggacgctaa

SEQ ID NO: 174793 - DNA, 939 bp, Klebsiella oxytoca
atgcgtgtactactggcgccgatggaaggcgtgctcgattcgctggtgcgcgagctgctgaccgaagtcaatgattacgatctctgcatcaccgagttcttgcgcgtggtggatcagctcctgccggtaaaatcgttctacaaactgtgcccggaactgcataacaacagcctgacgccctccggcacccgcgtgcgcgtgcagctgctcgggcagtatccgcagtggctggcggaaaacgccgctcgcgcggtcgaactcggttcctggggggttgacctgaactgcggctgcccgtcaaagctggtgaacggcagcggcggcggggcaacgctgctcaaagatcctgagcttatctatcgcggcgcgaaagcgatgcgcgaggcggttcccgacgaactaccggtcacggtaaaagttcggcttggctgggacagcggcgaacggcgatttgaaatagccgatgcggtccagcaggcgggggccagcgagctggtggttcacggccgcaccaaagaggatggctataaagcggagcgcattgactggcaggctattggcgaaatccgtcagcgcctgactatcccggtggtggccaacggtgaaatctgggactggcaaagcgctcaggattgcctggccgcgaccggctgcgactcggtaatgattggccgcggcgcgctgaacgtgccgaacttaagccgggtaataaaatataacgaaccgcgtatgccctggccccaggtcgtcgggctgctgcaaaaatatacccgtctggaaaagcagggcgataccggcctttatcacgtcgcgcgtatcaaacagtggttgagctatttgcgtaaagaatacctcgaagcttctgagctgttcagcgcggtgcgcactctacaggattcaaccagtattgcgcgcacgattaacgactggcgtagctaa

SEQ ID NO: 174794 - DNA, 1194 bp, Klebsiella oxytoca
atggcaaaagtgatgcgagcaatcattgtcggcggcggtattggcggggcagccacggcgctttcgctggcgcgccagggtatcaaggtgatgctgctggaaaaggcgcatgaaatcggcgaaattggcgccgggatccagcttggcccaaacgcgttctcggcgctggacagcctcggcgtcggcgaagtcgcccgccagcgggcggtctttaccgaccatatcaccatgatggatgcggtaaacggcgaagaggtcgtgcacattgagacaggacaggcgttccgcgaccattttggcgggccgtatgcggtgatccaccgggtggatatccacgccaccgtctgggaggcggcgctgacccatccggccgtcgagtatcgtacttcgacgcaggtagtggatatccgccagaccgccgatgacgtgacggtgtttgatgataaaggcaatagctggacggcggatattctgatcggctgcgacggcggtaagtcggtggtgcgccaaagcctgctgggcgattcgccgcgggtaaccggccacgtggtctatcgcgcggtcgtcgatgccgccgatatgccggacgatttacgcatcaatgcgccggtgctgtgggcgggtccgcactgccacctggtgcattatccgctgcgcggcggtaagcagtacaacctggtggtgacctttcatagtcggcagcaggaagagtggggcgtgcgcgacggcagtaaagaagaggtgctctcctactttaatggtatccacccgcgtccccggcagatgctcgataaaccgacctcctggcgccgctggtccaccgccgatcgcgagccggtagaaaaatggggcaacgatcgtattacgctggtcggcgatgccgcgcatccggtggcgcagtatatggcgcagggggcctgtatggcgctggaagatgcggtgaccctgggtaaagcgctggcccagtgcgacggcgacgccgcccgcgctttcgcgctgtatgaatcggtgcgtattccgcgtaccgcgcggatcgtctggtcgacgcgtgaaatggggcgggtctatcacgctgccggggttgagcgccaggtgcgcaatctgctgtggaaaggcaaaacccagagcgagttttatcgcggcattgagtggctgtacggctggaaagaggataactgtctgcaaccacgttaa

SEQ ID NO: 174795 - DNA, 645 bp, Klebsiella oxytoca
atgaagctgtacagtttttttaatagctctgcctcttaccgcgtgcgcatcgcgctggcgctgaaaggcatcgactaccagagcgtgggcgtcaatatccgcatcggccagcagaatgcgctggagtaccggcggctgaacccggtcggcctggtgccgacgctcattaccgacgaaggtgaatctctcggccagtcgctggcgatagcggactggctggatcggcactatccgcagccgctgctgctgcctgaggaagacagcgcgcgcatgcgggtgctggagatcgtatacgccatcgcctgcgatattcatcccattaataacatgcgcgttttacgctaccttggcgacgagcttaaggtgagtgaagaggagaaaaaacgctggtatgcgcactggatccagcaggggttcagcgccgttgaacagctattgcgccacgcgaaatccggcgatttttgcgtgggcgatgcccccaccctggcggactgctgtctggtgccgcagtgggccaacgcgctgaggatgggctgcgatctcagccactatccacgctgccaggcggtttatgacgcctgtacccggctgccggcgtttatcgccgccgcgccggaaaaccaacaagataagatcccggcttag

SEQ ID NO: 174796 - DNA, 699 bp, Klebsiella oxytoca
atgactcaatacgtttttgctccccaggccccaattagcgttccggttgtcggcagcgatgagcagtttccggtacgccgcgtttactgcgtgggccgcaactacgccgctcacgcgcgtgaaatgggctttgatccggatcgcgaaccaccgtttttcttctgcaagcctgccgatgcggtggtgcccgtcgctgcgggagagacgctgagcctgccgtatcccgcgcaaactgacaactatcactatgaaattgagctggtggtggcgattggcaagcggggaagcgatatcccgctggagcgggcccatgagtatatctggggctatgccaccggtctggatatgacccgccgcgatcgccagatggagatgcgccagatgggccgtccctgggaaatcggcaaagccttcgatctctccgcgccgatagcgccgctgcacaaagcggatacggttgacgtcaacgaggcgggaatttggctgcaggtgaatggggaagatcatcagcgcagcgatattcgccacctgatctggtcggttaatgaaactatcagctatctttccggcttctttgagctacagcccggtgacctgatttttaccgggactccagaaggcgttggagcggtggtgaaaggcgatgttatcaccggcaacgtagatggactgacgccaatcgccgtgcgcgtggtgtga

SEQ ID NO: 174797 - DNA, 1038 bp, Klebsiella oxytoca
atgtcccaatcttccatggaaatcaacaacgatcgtcagaactactatcagcatatttccgggcaaaacctgacgccgctttgggaatcgctgcaccatctggtcccgaaaacgccgaaccctacctgtgcgccggcttactggaactatcaggagattcgtccgctgctgctgaaaagcggcgagctgattggcgcgaaagaggcgatacgccgcgtactggtgctggagaacccggcgctgcgcggacagtcatcgattacttcatcgctgtatgccggtttacagctgatcatgcccggagaagtggcgccgagccaccgtcataaccagtcggcgctgcgctttgtggttgaaggtgaaggggcatttaccgccgtcgatggcgaacgcacgcaaatgcgggccggtgactttattctgacgccccagtggcgctggcacgaccacggcaaccagggcaatgagccggttgtctgggtggatggcctcgatctgccgctggtgaactatctgggctgcggtttcgcggaagactatccggaggatcagcagccggtgacccgcaaagagggggattatctgccgcgctacgccgccaatatgctgccgctgcgccatcaggtcggtaactcttcgcccatctttaactatcgctacgaccgcagccgcgaagcgctgcacgatctgacgcgtatgggcgatgccgacgagtgggacggctataagatgcgttacgtcaacccggtcaccggcggctacccgatgccatcgatgggcgcctttctccagctgctgccgaaagggtttacctcgcgagcggcaaaaaccaccgatagcaccatctatcacgtggtagagggcagcggccaggtgactatcggcgagcagacattttctttccaggcaaaggatatcttcgtggtgcccacctggcacgccgtctcttttatctccgccgaagataccgtgttattcagcttttcggaccgtcccgtgcaggaagcgctcggcctgttccgcgaagcgcgttattaa

SEQ ID NO: 174798 - DNA, 1359 bp, Klebsiella oxytoca
atgactcaacgactcgaactacagaaactgcttaatgccgcgccggtcggcgcccggcaatggcgcgtaattatctgctgtttcctggtggtcatgctcgacggtttcgatactgcggcaattggttttatcgccccggatattcgtcaccactggcaattaaccgcaggcgatctcgcgccgttatttggcgcaggattgctgggcttaaccgccggggcgctgctctgcggtccgctctccgaccgctttggccgtaaacgggtcatcgagttctgcgtcgcgctattcggcctgtttagcctgctttccgcgttttcccctgacctggagacgctggtgatcctgcgcttcctgacggggctgggattgggcggcgcgatgcctaacaccattacgatgacttcggaatatctgcctgcccggcggcgcggagcgctggtgaccctgatgttctgtggattcaccctcggctcggcattcggcggcgtggtcagcgcgcagctggtgccgctgattggctggcccggtatcctggtgttggggggcgtgctaccgctgatgctcgcggcggcgctaatcccgctgcttcccgaatctccgcgctggcagatccgtcgtcagttgccacaagcgatgattgccaaaaccgttggcgcgataaccggcgaacgctataccgatacccatttctggcttgatgagcctgccgccggcgcgaaaggcagcatccgccagctatttgccgggcgtcagctgcccatcaccttgatgttgtgggtcgtgttctttatgagcctgctgattatctatctcctctccagctggatgccgacgctgcttaaccatcgtggaattgatttacagcatgcttcctgggtgaccgcggccttccagattggcgggacctttggcgcactgctgctcggtgtgctgatggaccgtttcaaccctttccgggtgctggcgctgagttacgccctgggggcggtctgtatcgtcatgattggcctgagcgagaacggtctgtggctgatggcgctggcgattttcggcaccggtatcggcatcagcggctcgcaggtagggctaaatgctctgaccgcgacgctgtatcccacccaaagccgcgcgaccggcgtgagctggtcaaacgcgattggccgctgcggagccattgttggttcgctctccggcggcgtgatgatggcgatgaatttctcttttgacaccctgttttttgttatcgcagtaccggctgtggttagcgccgtgatgcttgtcctgctgacgcttgccgttcgcaacccaacatctgtacctgccgcgctgccttctgcgggcatcgtgaataaataa

SEQ ID NO: 174799 - DNA, 918 bp, Klebsiella oxytoca
atggcaggctggacgcagaaactgaagctgcaccatttacagatgctggtcgcgctgggggaacaaggcaacctcacgcaagtggctaaaatgatgaatattactcagccggcgctctccaaatggctgagccagtttgaagatgaagtcggcatgcccctgtttgaacgtcacagcaaaggcctgcgcccgacagaaggcggaaagctgctacttcaacacgcccagcggctgattaacgatatgtcgcgttcgcagtatgaaatcgagcgtttcaaacagggcggacaggtggggagtctgatgatcggctgttcaccggtggccaccgactgcgtttcgcaggcgatcctcgaactgcttaaagagatgccgaccctgcatcttaatatcgaagagaaagtcatgacgccgctgcttaacgatctgctcgccggggtgattgatgtcgtggtcgggcgagtcggtgggcgggcgctggagctgccgctgagctaccgggtgctctacaccgagccggtctgctttgtcgcccgccccgatcatcctctggcgcaaaaatcgcagttaagctgggctgacctctctccgtggcgctggattgtctggcccaccggcacaccgattcgcctgagcatcgacaacgcgctggtggataacggcgtcatgctgccggagaacaccattgagtccgcctcgatgaacgtcaccagcaacctgttacagagtagcgatatggtgtcgatactctcactgcgcctggcgcagcgctatgcggcccagcaccagctggcgattcttaatttgccgcgcattgaacaaaaaggtagcgttggggttttctggcgaaaaagtgaagcgccgtcgctggcgttgagccgattcctgcactgtctgtcgctgcaatcgacacactga

SEQ ID NO: 174800 - DNA, 399 bp, Klebsiella oxytoca
atgagtaaatcactgattattgtctggcggtatgtgcgcgctttcgtgctgatctacgcctgcttgtatgcgggcatttttctctcttcactcctgccgatcgccattcctggcagtattattggcatgctgattttgttctttctcctggcgctgcagatcctgccgccgcagtgggttaaccccggctgcaatatcctgattcgctatatggcgctgctatttgtgcctatcggcgtgggcgttatgcagtattgggatttactccgcgcgcagtttggcccggtagtggtttcctgcgcgataagcacgctggtggtttttttagtagtcagctggagctcacacctggttcacggcgagcgcaaagtggttggtcaaaaaggaagtgaaaaatga

SEQ ID NO: 174801 - DNA, 696 bp, Klebsiella oxytoca
atgatccatgaaatctggtggtcgctgccgctaacccttatcgtctttttcctcgcccgcatgctggcggcgcgattcaagtttccgctgcttaatccgttactggtggccatggtggtgctgatcccctttttgttgatcaccggcatctcctacgagcgctattttcagggcagcaaaattcttaacgatctgctgcagccggcggtggttgcgctggcctttcctttatatgagcagctacaccaaatccgcgctcgctggaaatcaatcatcactatctgctttatcggcagcgtggtggcgatggtcaccggtaccaccgttgccttactgatgggcgcaacgccgcagattgccgcctctattctgccgaaatcggtcacgaccccgattgcgatggcggtgagcagcagcattggcggcattccggcgatcagcgcggtatgcgttatttttgtcggcattctcggcgcggtcttcggccatacgctgttgaatgtgatgcgcattcgtaccaaagcttcgcgcggcttatcgatgggtaccgcctcacacgcactgggtaccgcccgttgcgctgaactcgactatcaggagggcgcgttcagttcgctggcgctggtactttgcgggattattacctcgctggttgccccgtttttgtttccgctgatcctggcaatagccggatag

SEQ ID NO: 174802 - DNA, 885 bp, Klebsiella oxytoca
atgcacccacgttttcaagctgttcttccccaactggcggcggacctgcaagcggccatcgccccgatgctggccgacccgcattttccggccctgctcaatgcagatcaggtcgctgcgctgcaaagcgcgacggggctggacgaagacgcgctggcctttgctctgctgccgctggcggcggcctgtgcgcgtaccgacctctcccactttaacgtcggcgccattgcccgcggcatcagcggtacctggtacttcggcggcaatatggaattcctcggcgccaccatgcagcagaccgtgcacgctgagcaaagcgccatcagccatgcctggctgcgcggcgaaaaatccctgctggcgattaccgtgaactacaccccctgcggccactgtcgtcagtttatgaacgaactgaacagcggactggcgctgcgcatccatcttccgggccgcgaagcccattcgctgcagcactatttaccggacgctttcggcccgaaagatctgaatatcaaaaccctgctgatggatgaacagaaccacggcttcccgctcagcggcgatgcgctggcccaggcggcgattcaggcagccaaccgctgccatatgccgtacagccattcgccctccggcgtcgcgctggagctgaaagacgggactattttcaccggtagctatgcagaaaacgccgcctataacccgacgctgccgccgctgcagggcgcgctgaatctgctgagcctcaatggttacgattacccggatatccagcgcgctgttcttgccgagaaggccgacgcggcgctcatccagtgggacgcaaccgccgcgacgctgaaggcgctgggctgtcataacatcgatcgcgtcctgttaggttag

SEQ ID NO: 174803 - DNA, 717 bp, Klebsiella oxytoca
atgttaaagcgtgcgttatacagcctgttagtcctgttcggcttgctgctgttaaccgtgctggggcttgaccgctggatgagctggaagacctctccttatatctacgatgagctacaggacctgccctatcgtcaggtcggcgtggtactcggcaccgctaagtactatcgtaccggcgtcatcaaccaatattatcgctaccgaattcagggcgcgctgaacgcctacaacagcggtaaggtgaactatctgctgctcagcggcgataacgcgctgcagagctataacgaaccgatgaccatgcgccgcgatttaattaaagctggcgtcgatccggcggatatcgtgctggactatgcgggtttccgtacccttgattcgattgttcgcacccgtaaagtcttcgacacgaatgattttattatcattacccaacgcttccactgcgagcgggcgctgtttattgccctgcatatgggtattcaggcgcagtgctacgcggtgccgtcgccgaaggatatgtggagcgtgcgcctgcgcgagtttggtgctcgtttcggcgcgctggccgatctctatatttttaaacgcgaaccgcgattcctgggtccgctcatcccgatccccgcgctgcaggaagtcccggacggcgcccagtcctacccggcggtcacgccgcagcagctgatggatctgcagaaaaaagagaagtga

SEQ ID NO: 174804 - DNA, 1011 bp, Klebsiella oxytoca
atgagtgcgttaaataaaaagagttttctcacctggttgaaagagggtgggatttacgtcgttcttttagtattgctggccatcattattttccaggacccgactttcttaagtttgctgaatttaagtaatattctgacccagtcctcggtgcgtattatcatcgcgctcggtgttgccgggcttatcgtcactcaggggaccgacctttcggccgggcgtcaggtcggcctggcggcggttatcgccgccacgatgctacaggcggtggacaacgccaacaaagtgttcccggacatggccacgatgccgattccgctggttatcctgctggtttgtgcgatcggcgcggtgattgggcttatcaacggtattattattgcctacctgaacgtgacgccatttatcaccaccctcggtacgatgatcatcgtttacggtattaactcgctgtattacgacttcgttggcgcgtcgccgatttccggctttgatagtcacttttcgcaatttgcccaggggttcgtagcgctgggctcgttccgtctgtcgtatatcactttctacgcgctgattgccgttttcttcgtgtggatcctgtggaacaaaacccgctttggtaaaaacatctttgctatcggcggcaacccggaagcagcgaaggtctccggggtgaacgtcgcgctgaacctgctgatgatttacgcgctctccggcgtgttctacgcgttcggcgggctgctggaggcggggcgcatcgggtcggcgaccaacaacctcggctttatgtatgaactggatgcgattgccgcgtgcgtggtcggcggagtctcgttcagcggcggcgtcggcaccgtgttcggcgtggtgaccggggtgattatcttcaccgtcattaactacggtctgacctatatcggcgtcaacccgtactggcagtacattatcaaaggggccattattattttcgccgtggcgctggattcactgaagtacgcgcgtaagaaataa

SEQ ID NO: 174805 - DNA, 1521 bp, Klebsiella oxytoca
atggtcagcaataatagcgaacggtcaggcgaatatttgttggaaatgaccaacatcaacaaatcgtttcctggcgtcaaggctctcgataatgtgaacctcaaggttcgtccccactctattcatgcattaatgggggagaacggtgcgggcaaatcaacattattaaaatgcctttttgggatctatcaaaaagattccggcagtattctttttcagggacaagagatcgatttccattcggcaaaagaagccctggaaaacggtatttcaatggttcatcaggaattaaacctggtattgcaacgttcggtgatggacaacatgtggctggggcgctatcccaccaaaggtatgtttgtcgatcaggacaaaatgtatggtgataccaaagcgatttttgacgagctggatattgatatcgacccacgcgctcgcgtcgggacgctatcggtatcgcaaatgcagatgattgaaattgcgaaggcattttcctataacgccaaaattgtgattatggatgagccgacgtcttcgttaaccgaaaaagaggtcaatcatctgtttaccattatccgcaagctgaaagagcgcggctgcggcattgtctacatttcccacaaaatggaagagatcttccagctatgcgatgaaattaccgttctgcgcgacggccagtggatcgccacccagccgctggaagggctggatatggataagattatcgcgatgatggtgggccgttccctcactcagcgcttcccgacccgggaaaataagccgggcgagataattcttgaggtgcgtaatttaacctcgctgcgtcagccgtcaatccgcgatgtctcgttcgacctgcacaaaggcgaaatcctcggtatcgccgggctggtaggggcgaaacgtaccgatatcgtcgagacgttatttggtattcgcgagaagtctggcgggacaatcaagctgcacggtaagaagattaataaccataacgccaatgaagccatcaaccatggttttgcgctggtgaccgaagagcgtcgctcgacggggatttatgcgtatctggatatcggttttaactcactgatctccaatattaagaagtacaaaaataaggtcggcttgctggataattcacgcatgaaaagcgatacccaatgggtcatcgattcaatgcgcgtgaaaactccggggcagcatacgcaaattggttcgttatccggtggtaaccagcaaaaagtgattattggtcgctggctattaactcagccggaaattctgatgctcgatgaaccgacgcgcggcattgacgttggcgccaagttcgaaatttatcagctgatcgccgaactggccaaaaaagataaaggcatcattattatctcctccgagatgccggagctgctgggtattaccgaccgtattctggtgatgagcaatggtcttgttgccggaattgttgagactaaaactaccacgcaaaacgaaattctccgtcttgcgtcgttgcacctttaa

SEQ ID NO: 174806 - DNA, 999 bp, Klebsiella oxytoca
atgaataagaaggtgttaaccctgtctgctgtaatggctagcatgttattcggcgccgccgctcacgccgcagatacgcgtatcggcgtgacgatttataaatacgacgacaactttatgtcggtagtgcgtaaggcaatcgaaaaagacggtaaatcagcgccggatgttcagctgctgatgaatgactcgcagaacgaccagtccaaacagaacgatcagattgacgtcctgctggcaaaaggggtgaaggcgctggcgattaacctggttgaccccgcagcggcgggtacggtaatcgataaagcccgtggccagaatgtgccggtggtattctttaacaaagaaccttcccgcaaggcgctggatagctacgataaagcatactacgtcgggactgattctaaagagtccggcgtaattcagggcgatctgattgccaagcactggaaagcgaacccgaactgggacctgaataaagatggccagattcagtttgtcctgctgaaaggcgagccgggccatccggatgccgaagcgcgcaccacctacgtgattaaagagctgaatgataaagggctgaaaacccagcagctggcgttagataccgccatgtgggataccgcgcaggcgaaggataagatggatgcctggctctccggcccgaacgcgaacaaaattgaagtcgttatcgccaataacgacgcgatggccatgggcgcggtagaagcgctgaaagcgcacaataagagcagcatcccggtattcggcgtcgatgctctgcctgaagccttagcgctggtgaaatccggcgccatggcgggaaccgtactgaacgatgctaacaaccaggcgaaagcgaccttcgatctggcgaaaaacctcgccgatggtaaagaaccggctgccggtactaactggaaaattgataataagattgtccgcgtaccgtacgtgggcgttgataaagataatctgagcgagtttatcggtaagtaa

SEQ ID NO: 174807 - DNA, 1023 bp, Klebsiella oxytoca
atgatcaccattcgtgatgtcgcccgtcaggcgggggtttccgtggctacggtttcgcgcgtgctgaataacagcgcgctggtgagcccggatacgcgagaagcggtaatgaaggcggtaacgctgctgggctatcggcccaacgccaacgcgcaggcgctggcgacccaggtcagcgataccatcggcgtggtcgtgatggacgtgtcggacgccttttttggcgcgctggtcaaagcggtagataccgtcgcccagcagcatcaaaaatatgtgcttatcggcaatagctatcatgaagcggaaaaagagcgtaacgccattgaagtactgattcgccagcgctgttcggcgctgatcgttcactccaaagcgttgagcgatgcggagctgggggattttatggagcacatgccgggaatggtgctgattaaccgcatcgtgccgggatacgcccaccgctgcgtcgggctggataacgtcagcggcgcgctgatggcgacccgcatgctgctccatcatggccaccagcgcatcggctacctctcttctaatcacggtattgaagatgatgatttacgtcgggaagggtggagcagggcgttacatgagcagggcattatcgctcccgacggctggataggctcaggttcgccggatatgcagggcggggaggcggcgatggtagagctgctggggcgtaacctcggcctgaccgcggtctttgcctataacgacagcatggcggccggggcgctaacgacgcttaaagataacggtattgccgtgccgcagcacctttcactgattggttttgatgatattcccatttcgcgctacaccgacccgcagttgaccacggtgcgctacccgatcatgtcgatggcaaaactggcgacagagctggcgctgcagggggctgccgggaagctggatcgcgaagccagccactgctttatgccgacgctggtgcgtcgacattcggtcgcgcagaggcaaattgtggggccgatcactaactaa

SEQ ID NO: 174808 - DNA, 1158 bp, Klebsiella oxytoca
atggagagaaatgtcacgctggacttcgtccgcggcgtcgccatcctcggtatcctgctactgaatatcagcgccttcggtttaccgaaggccgcctaccttaacccggcgtggtccgggagtatctccgatagcgacgcctggacctgggcgattctcgatctgctggcgcaggtcaaattcctgactctgttcgccctgttgtttggcgccgggcttcagcttttgctgccgcgcggcaagcgctggatccagtcgcgcctgacgctgctggcgctgctgggctttatccacggtctctttttctgggacggcgatattctgctggcctatgcgctggtagggctggtgggctggcggatgatacgcgacgctcacgatgttaaatcgctatttaataccggcgtggtgctgtatgtcatcggcgtggcggtactgctattgctgggattaatctccggcaattcgcctaatcgttcgtgggtgccggacgcggcgaatttacagtacgaacagtactggaagctgaaaggcggctttgaagcggtgagtaatcgtgcggatatgctgtcggataacctgctggcgctgggcgcgcaatacggctggcagctggccgggatgatgctgatgggggccgcgctgatgcgcagcggctggctgaaagggcagttcagtcttcgccactaccggcgcaccggcgcgctgctcatcgctggcggtatggcggttaatttaccctctattttcgcccagtggcatctcggttgggatcctcgctggtgcgcatttcttctacaggcgccgcgcgagctgggcgcgccgctgcagactatcggctacgcggcgctggcctggggcttctggccgcagctggcgaaatttcgtctggtgggggccattgcctgcgtcgggcgcacggcgttgagcaactatctgctgcaaaccctgatttgcaccactctgttttaccgcttcggcctgtttatgaagtacgaccgcctacagctgctgtccttcgtaccggccgtgtgggcgattaatcttctcttttcgtggctttggctacgtcatttccgtcagggtcccgttgagtggctatggcgtcaattaaccctgcgtgcgtcagggacatcattaaaagatacatccagataa

SEQ ID NO: 174809 - DNA, 669 bp, Klebsiella oxytoca
atgtcatcactgagtaaagaagccatactcgttcatgaagcgctggtcgctcgtgggctggagacgccgctgcgtccgccagtgcaagaaattgataatgaaactcgcaagcgtctgatcgccggacacatgaccgagattatgcagctgttaaaccttgatctaagtgatgacagcctgatggagactccgcatcgcatcgccaaaatgtacgtcgatgagattttctccggcctggactacgcccggttccctaaaatcaccgtcatcgaaaacaagatgcaggttgatgaaatggtcaccgtgcgtgatatcaccctgaccagcacctgcgaacaccactttgttacgattgatggtaaagcgacggtggcctatatcccgaaagattcggtgattggtctgtctaaaatcaaccgtatcgtgcagttcttctcccagcgcccgcaggtgcaggagcgactgacgcagcagatccttaccgcgctgcagaccctgctgggaaccagcaacgtcgcggtttccatcgatgcggttcactactgcgtaaaagcgcgcggtattcgcgatgcaaccagcgccaccaccaccacatcgctgggcggcctgtttaaatccagccagaatactcgccaggagttcctgcgcgccgtacgtcaccacaactaa

SEQ ID NO: 174810 - DNA, 837 bp, Klebsiella oxytoca
atggaactgctcgaagagcaccgctgttttgaaggtcggcagcaacgctggcggcacgactccgccacgctgaactgcgcaatgaccttcagcatctttctcccccccgagaccgcagacgcgccgccgccggttgtctactggctctccggcctgacctgcaacgatgaaaacttcaccaccaaagcgggcgctcagcgcgtcgccgccgagctcggcattgcgctggtgatgccggacaccagtccgcgcggtgataacgttgccgacgatagcgcttacgatctgggcaaaggcgcgggcttttatctcaatgccacccaggcgccgtggtcagcacatttccgcatgtacgattaccttcgcgacgagctgccgcagctgattgcccgcgagtttacgctcagcgatcgctgcgccatcagcgggcattccatgggcggccacggtgcgctggtgatggcgctgaaaaatccgggccgcttcgtcagcgtatccgcctttgcgcctatcgttaacccgacccaggttccctggggcaaaaaagcctttaccgcctatctgggagcgaatgaagcagactggcaggcctgggacagctgcgcgttaatgcaggccagcagcgagtcagatgcgatcccaaccttgatcgaccagggcgataacgatgcattcctcgccgaacagctgcagccggcggtgctggcggaaaccgcgcgtcagaaaagctggccgttaacgctacgtattcagcccgggtacgatcacagctactactttatcgcctcatttattgaggaccacctgcgtttccatgcccggcacctcttctcctga

SEQ ID NO: 174811 - DNA, 198 bp, Klebsiella oxytoca
atgttgtctaagcatgcagatagcctcgtgggtgattacattaccttcggggctttcttctttctgcctcagcacaacggtaaaactcaatcctgccctgaggcgaaagcctcaagcgccgccaaaaatcatacccccgacgacggaaaatacactatctctctgtatttattagtttttatgactattggatgctga

SEQ ID NO: 174812 - DNA, 1974 bp, Klebsiella oxytoca
atgttcaggctaaacccttttgtccgggccggattatgcgcgtccgtcgtatccttagcgtttccggcgctggccgacgttaatgaagaaacgctggtcgtcaccgctgcggcaactgaacagagcgtcaaagatgcgcccgccagtattagcgttatcacccaacaggatctgcagcgtagaccggtacaaaacctgaaggatgtactgcgggaagtgccgggcgtgcagctcaccaacgaaggggataaccgcaagggggtgagtattcgcggcctcagcagcggctatacgctgatcctcgttgatggcaaacgcgttaactcgcgcaacgccgttttccgccacaatgattttgaccttaactggatcccggttgatgccattgagcgtatcgaagtcgtgcgcgggccgatgtcttccctctatggttccgacgccctcggcggcgtagtgaatatcatcactaaaaaagtcggccagcagtggaccggcaccctcagcgcggacacgaccattcaggaacaccgcgatcgcggcgatacgtacaatggtcagttctttaccagcggcccgctgattgacggtgtgctcggaatgaaggcctacggcagcctggcaaagcgcgccaaggacgatcagcaggcttccagcaacgcagctggcgaaacgccgcgtattgaaggcttcaccagccgcgacggaaatgtcgaattcgcctggacgcccaatgataatcaggacattaccgcaggctacggttttgatcgccaggatcgtgattccgactctctcgaccgcaaccgccttgaacggcagaactactccctgagccacaacggccgctgggatgtcggcaatagcgagctgaaattctacggcgagaaagtggataataaaaatcccggacaggccggcaccatcacttctgagagtaacgcggtggatggcaaatacgttctgccgctgggaatgattaaccagctgctgaccttcggcggcgaatggcgccacgataagttgaaggatccggtcaacctgagcagcggcggtaaatccacttccgccagccagtatgcgctgttcctggaagatgaatggcggataatcgaacctctggccttaaccaccggcatccgtatggacgatcaccagacctatggcgatcactggagcccgcgtgcttatctggtctataacgctaccgataccgtgaccgtgaagggcggctgggcgacggcatttaaagcgccatcgctgctgcagctgaacccggactggaccaccaactcctgccgcggttcgtgcagcattatcggtaacccggatctgaagccggaaaccagcgaaagcttcgagctgggtttgtactatcgcggcgaagagggctggcttgaaggcgtggaaggaagcgtcaccaccttccagaacaacgttgacgatatgatcgatattctgcgtacctccagcgccagcgaagcgccgggctatccgaactttgtcggctggaaaacggtgaacgggaaacgcgtgccggtcttccgctacttcaacgtcaataaggcgcgaatcaaaggggtagaaacggaattgaaagtaccgtttggcgatgaatggaagctgacggtgaactacacctataatgatggtcgcgacctgagtaacggcggcgataaaccgctgcagacgctgccgttccatacggctaacggcacactcgactggaaaccgctggacgactggtccttctacgtcaccgccaactataccggcgaacagcgttcggtcagcacgacgggcaaaacgcccggcggctacaccatgtttgatatcggcgcggcctggaacgtcaccaaaaacgtcaagctgcgctccggggtgcttaacgtcggcgataaggatctgagccgcgacgactacagctatacagaagaaggtcgccgctactttatggccgtcgattaccgcttctaa

SEQ ID NO: 174813 - DNA, 1470 bp, Klebsiella oxytoca
atggtttcggatactaaaaccacagaagcgcccggtttacgtcgtgaactgaaggcgcgccacttgaccatgatcgctattggcggttccataggtacaggtctttttgttgcctctggcgcaacgatttctcaggcaggcccaggcggggcgctgctctcctatattctcatcggcctgatggtttatttcctgatgaccagcctcggcgagctggcggcgtttatgccggtctccggctcttttgctacctatgggcaaaattacgtcgaggaaggttttggcttcgcgctgggctggaactactggtacaactgggcggtgaccatcgccgttgacctcgttgccgctcagctggtgatgacctactggttcccggacgcgcccggctggatctggagcgcgctgttcctcgggatcatgttcctgctgaactggatttcggtaaaaggctttggcgaggcggaatactggttttcgctgatcaaagtcgccaccgtcattatcttcattattgtcggcgtgatgatgatcttcggcatcttcaaaggcgcacatcctgcgggctggagcaactgggttgtcgacgatgcgccgttcgcgggcggctttgcggcgatgattggcgtggcgatgattgtcggcttctcatttcagggaaccgagcttatcggcatcgcggccggcgaatcggaaaacccggagaagaacatcccgcgcgcggtgcgtcaggtgttctggcgtatcctgctgttctatgtgttcgccatcctgatcatcagtctgattattccttataccgacccgagcctgctgcgtaacgacgtgaaagatatttccgtcagtccgtttacgctggtattccagcacgcagggctgttgtcggcggcggcgattatgaacgcggttattctgactgcggtattgtcggcgggtaactccgggatgtatgcgtccacccgcatgctctataccctggcctgcgatggcaaagcgccgcgtattttctctaagctgtcaaaaggcggcgtgccgcgtaatgcgctgtatgccaccacggtgattgctgcgctgtgcttcctgagctcaatgttcggtaaccagaccgtttacctgtggctgctgaacacctcggggatgaccggctttattgcctggctggggattgccattagccactatcgcttccgtcgcggctacgtcatgcaggggaacgatctgaataacctgccgtaccgttcaggcttcttcccgctggggccgatcttcgcgttcgtcctgtgtctgatcattaccctggggcagaactacgaagcgttcctcaaagacaccatcgactggggcggcgttgcggcaacctatatcggcattccgctgttcctggtgatctggtttggctacaagctggcaaaaggaacgcgctttgtgcgctacagtgaaatgaagttcccggatcgcttcaaaggctaa

SEQ ID NO: 174814 - DNA, 483 bp, Klebsiella oxytoca
atgaaacgcaagaacaagcgcaaacgccgcaccatgtcgctcgctgagggagtctacgcagcttgcttttgcttcattctttttatcattggcttctatcaaagcatcaaaattattgaagagtggtacttccgtccggattatattgtcgacagcgccgactcgctcttctccggcatcctcttcctcggtctggcactgctgatggcgctgattgccgcctgcaccgccagcggcacgcctggcgagcgctacgccacgctcctgtttttgttctttattgcgatggggccggtgtggtctgtcagcctttatgtcctgcaatacgtcactattgagcactataaaagcccacaatttggcgtgtgtatcagcaaaggcggccatgggaccacgtatatgtacgtcaggaatagccgctggtgccagcattttggctacaccattatcaggccatcgcccgatgagcgaggaaacaattga

SEQ ID NO: 174815 - DNA, 489 bp, Klebsiella oxytoca
atgcgcaaagtgcaaccgccgcctcagtatgactggcctgtctgggtcggcgtttcgctgatttgccctctgcttgctttgtgctctctttacctggcaggcgactatttcacgctactcaggctgccacgggcgccggatttctgttcgcagaatattttaaaagcaaactttgtctgcctggggcctgcgctgctgatattgagcatagagggaaataaaaaactctttttcccccaggctgcgccgctaccttttgcaacccccatcgtcaggtcttgcctttacctgacgccgctattgctgctcaccgcaaatacgctgattctggttttacatttcaccctttttagccctgaccgctatattcgctgctgggaaccttatccatggggaacatggtattacgcgaaaacagcggatatttgcgttcaacacgggctggcgccggtgcaaaacctcgcgtatcaggttgcgatctcgcaatag

SEQ ID NO: 174816 - DNA, 873 bp, Klebsiella oxytoca
atgcatatcacgctacggcagctggaagtttttgctgaagttctgaaaagcgggtcgacgacccaggcctcgcaaatgctggcgctgtcgcagtcggcggtcagcgccgcgctgaccgatcttgaagggcagttgggagtgcagctgtttgaccgcgtcgggaaaaggctggtggtcaacgaacacggcaggctgctctatccgcgggcgctggcgctgctggagcgggcgctggagatagagcagctgtttcgcggcgacaacggcgcgattcgcgtctacgccagcagcaccatcggcaactatatcttgccggagatcattgcgcgctatcgacgcgacctgccggatttaccgctggagctgagcgtgggcaatagccaggacgtgatcaacgcggtggccgatctgcgggtggatatcgggttgattgaaggtccctgccacgcggcggatattatcgccgaaccctggctggaagatgaactggtggtctttgccgcgccagattcaccgctgctggaaggggaggtgacgctgcaacggctggcggaggcgccgtggattctacgcgagcacggctccgggacccgggaaattgtcgactatttattattatcgcatctaccggcatttcatcttggaatggaactgggtaattcggaagccatcaagcacgcggtgcgccatggtctgggcattagctgcctgtcgcgacgcgtggttgcggagcagcttgaagtgggatcgctggtggcgctgaagattccgctgccgcgcttaacccgcaccctgtggcgtattcatcaccgccagaagcatatttccaaggcattacagcgtttcctgagctattgcgagatcgcaacctga

SEQ ID NO: 174817 - DNA, 1050 bp, Klebsiella oxytoca
atgacagcactcactttaccgactaaacatcgcccattgcggcactttgcacctggactggcgctgaccgccctgctcaccggcgcagcgctgtgggccggtagttttccggcaatcgctggcgcgggcttcagcgcccttacgttggccattttgttcggcatggtcatcggtaacacggtttacccgaaaatctggcagccttgcgacggcggcgtactctttgccaaacagcacctgctgcgcctcggcatcattctatacggctttcgcctgacgttcgcccagattgccgacgttggcgtcagcggtatcgtgattgatgtgctgacgctttccagcaccttttttatcgcctgttttcttgggcaaaaggttttcggcctcgataaacataccagttggctgattggcgccggtagcagcatttgcggcgcggcagcggtcctggcgacggaaccggtcgtcaaagcggaagccagcaaagtgacggtcgccgtggccacggtggtgattttcggtaccattgctatcttcctgtacccggcggtttatcctttcctggcgcactggtttacgccggaggcctacggcatctatatgggttcgacgatgcatgaggttgcccaggttgtcgccgccggccacgccgtaagtccggatgcggaaaacgcggcggtgattgcaaaaatgctgcgcgtgatgatgctggctccgttcctgctgttccttgccgctcgcgtgaagcaattagccccggcaaacggcggcgagaaaagcaaaatcaccattccgtggtttgcgatcctgtttattctggtggcggtatttaactccttccacctgctgccgaaagcggtagttgatatgctggtgaccctggataccgtgctgctggcgatggcgatggctgccctcggcctgaccacccacgtcagcgcgctgaaaaaagccggcgctaaaccgctgctgatggcgctgatgctctttgtctggctgattgtcggcggcggcgcgattaaccttgctatccacagtctgatggcctga

SEQ ID NO: 174818 - DNA, 858 bp, Klebsiella oxytoca
atgaaatacattggagcgcacgtcagcgcctccggcggcgtagccaatgccgccattcgcgcagccgaaatcggcgcaaccgcatttgccctcttcaccaaaaaccagcgccagtggcgcgccgcgcctttgagcaacgacaccattgctgaatttaaagccgcctgcgagaagcatcatttcggcccgggacaaattctgccgcacgacagctatctgattaacctcggccacccggttgcggacgcgctggaaaaatcccgcgatgcctttattgatgaactctcccgttgccagcagctcggcctgacgctgctcaattttcatccgggtagtcatctgcagcaaattccagaagacgaatgcctggcgcgcattgccgagtccattaacatcgcgctggccaaaaccgaaggcgtgacggcggtcattgaaaacaccgccggccagggcagtaacctggggtttaagtttgaacacctggcggccatcatcgatggcgtggaagataaatcgcgcgtcggcgtgtgcattgatacctgccacgccttcgccgccggctacgacctgcgtagcgccgaagagtgtgaaaaaaccttcgctgattttgaacggattgtcggttttcagtatctgcgcggtatgcatctgaacgatgcgaaaagcacgttcggcagccgcgttgaccgccaccacagcctgggtgaaggcaatatcggccacgatgccttccgctggataatgcaggatagccgctttgacggtatcccgctaatcctggaaacgatcaatcctgatatctgggcggaagagatcgcctggctgcgggcgcagcagacggaagaggccgtggtctga

SEQ ID NO: 174819 - DNA, 1089 bp, Klebsiella oxytoca
atgaacgacagggaaaagcagatcctcaaaattttgcggcgcaatccgctgattcagcaacatgagattgccgatattctgcagattagccgctcccgcgtagccgcgcatattatggacctcacgcgtaagggggccatcaagggcaaaggctacatccttaccgagcaggagtattgcgtctcgctgggcgcggtgaatatggatatccgcggcattgccgatattcattatccccaaccggtctccaacccgggcaatatccagtgctccgccggcggagtggcgcggaacatcgcgcataatctggcgctgctgggccgcgatgtgcatctgatttccgccgtcggcagcgacttttacggcgaaacgttgcttgagcagacccgacaagccggggttaacgtgcaaagctgtatccgcctgcacggtcacaataccgccacctatctctccatcgccaatccgcaggaagagacggtgctggcgattaacgatacgcatatcttacagtcgctcaccccgcagctgctgaatcaatatcgggatctgctgacccatgccggcgtcatcctggtcgattgtaatttaacggagccgttgctggagtgggtatttacgctggccaacgctattccggtatttgttgataccgtgtcggagtttaaagcgcaccgcattcgcccgtggctgggaaagatccataccctcaagccgacgctgcgcgaactgcagatcctctggggagaacccattgaaaacgaggccgatcgcgatcgcgcgttagcctggctgcacgaaaggggaacgcggcgcgtggtaatttgctcggaagacgattccgttttctgtagcgaagccggcggtgaacgttttcagatgaagctaccgggccataccacgatagacagctttggcgccgacgatgcgctgatggccgggctgctttatagctatcttgacggcagcgatttcaaagagagcgtcgctttcgccatggcctgcaccgccattacccgcgccagcgacagcatcaacaacccttctttatccgttgataacgcgctcaatttacttcccagcctatag

SEQ ID NO: 174820 - DNA, 1251 bp, Klebsiella oxytoca
atggacatcatgagaagtcttttggggatggtggtattgctggccatcgcctttgcgctgtcagtaaataaaaaacgcatcagtatcagaaccgtaggggccgcactgctgctgcagatcgtgattggcggagtgatgctctatttcccgccgggcaagtggctggtggaacaggcggcgctcggggtacataaagtcatgtcctacagcgacgccggaagcgcgtttatttttggatcgcttgtcggtccgaaaatggatgtgctgtttgacggcgcgggttttatcttcgccttccgcgtgctgcccgccatcatttttgtcaccgcgctaataagcctgctttactacctcggcgtgatggggctgctgatccggattctcggcggtatcttccagaaagcgctgaatatcagcaagattgagtcctttgtcgccgtgaccaccatttttcttggccaaaatgagatcccggcgatcgtcaaaccctttatcgaccgtctcaaccgcaatgagctgtttaccgccatttgtagcgggatggcgtcgatcgccgggtcgatgatgatcggctatgccggcatgggcgtaccgatcgattatctgttagccgcttcactgatggctattcccggcgggattctgtttgctcgtatgctgagcccggcaaccgaagcctcccgggtcactttcgataatctctccttcaccgagacgccgccgaaaagcattatcgaggcggcagcatccggggcgatgaccgggctgaaaattgccgccggggtggcaacggtggtgatggcgtttgtggcgatcatcgcgttgctgaacggtattatcggcggcattggcggctggtttggctacggtcacgccacgctggagggtattttcggtttcctgctcgcgcctctggcgtggattatgggcgttgactggagcgatgcgacgctggcgggaagcctgattggccaaaagctggcgataaacgaattcgtcgcctacctcaacttttcgccttatctgcaaaccggcggtaccctggacgtgaaaaccgttgcgattatctcgtttgcgctgtgcggtttcgccaactttggctcaataggtgtggttgtcggggcattttcggctatttcaccgcagcgcgcgccggaaattgctcagcttgggctgcgcgctctggcggcggccacgctctctaacctgatgagcgccaccattgccgggttctttatcggtctggcataa

SEQ ID NO: 174821 - DNA, 936 bp, Klebsiella oxytoca
atgtctgaattaaatatttcctctgaattattacaggtttctgcggaagttcagcaggcattaaagaataaccaacccatagtcgcgctggagtcgactattatttctcacggaatgccgtttccagaaaatgcgcagaccgcgctggaagtcgaagaaacgattcgccgtcagggagcggttccggcaacaattgcgattattcatggcgttatgaaagttggcctgagccgcgaagaaattgaattgctcggtcgtgaaggacataacgttaccaaagtcagtcgccgtgatttacctttcgttgtcgccgcaggattaaatggcgcgaccaccgtggcttctaccatgattattgccgccatggccgggataaaagtcttcgcgaccggcggtattggcggtgtgcaccgcggagcagagcatacttttgatatttccgccgatttacaggagctggccaataccaatgttaccgtagtttgtgccggcgcaaaatctattctcgaccttggattaaccaccgaatatttagaaacgtttggcgttccgcttattggctatcaaacttcggcgctcccggcatttttctgtcgaaccagtccgtttgacgtcagtattcgcctgaatagcgctaaagaaatcgctaaagcgatggcggtgaaatggcagtcgggcctgaacggggggatggtggtggcgaacccgataccggaacagtttgcgatgccggaagcgaaaatcaacgccgccatcgaccaggcggtgaaggaagcggaagagcagggtgtggtgggtaaggagagtacgccgttcctgctggcccgcgttgcggagctgaccggcggggatagcctgaaatccaatattcagctggtcttcaataatgccgtgctggcctgcgagattgccaaagagtatcagcagatcgcctga

SEQ ID NO: 174822 - DNA, 936 bp, Klebsiella oxytoca
atgcctgaaaatgattacgttgtaattattggatcggcaaatatggatgttgctggttattcccatgtatcgttgaactatgctgattctaaccccggaaaaataaaatacactcccggtggagtggggcggaatattgcgcagaatattgctttattgaataaaccatcctggctactgtcggttgtcggagatgatttctatggccattccctattaaaacaaacggctcagtccggcgttcatgtcgataaatgtcagatcgtccacggcgaggggacatcgagctatttatcgctgctcgataataccggtgaaatgctggtggcgattaatgatatgagtatcaccgagcatattacgccagcctttttaagccagcaccgggattttattcgcagcgctgcggtcatcgtcgttgactgtaatatcagcgaatcggcgctggcctggttgatggaaaatagcggcccgacacccatttttgttgacccggtctctgcctggaagtgcgtgaaaatcagccagcatctggggcgtatccacactctgaaaccgaaccgaattgaagctgaaacgctgagcggaattgcgctttccggcactgatgacgtcgcgcgcgttgccgactggtttcaccagcgtggcctgcggcgcctggtgctgagcatggggggcgacggggtttacttcagcgagaaagacggcgagcgcggctggtcggcgccgttaaaaacccaggtagtcaacgtcaccggcgccggtgacgccatgatggccggtctggcctgctgctggctcgacggctgttcattttcgcaagcggtgaagtttgctcagggatgctcttctctggcgctctcatcggaattcaccaataaccctgaattatcttacgccaacgtaaaaaaggtagtggagaacgaacatgtctga

SEQ ID NO: 174823 - DNA, 1689 bp, Klebsiella oxytoca
atgaaaacgctgctgattattgatgccgggctcggacaggcccgcgcctatatggcgaagaccctgttaagcaccgcggcgcaaaaagcgcaacttgaactgattgataacccaaacgacgctgagctggcgattgtgctgggcgcgacgctgccagctgatagcgcgctgaacggcaaaaaggtttatctcggcgatattaatcgcgccgttgctcacccggaactattcctcggggaagccaggagccatgccacgccatatgccgctccggctgctacagctttaccggcggcaactcatggtccgaaacgcattgtggcggtcactgcctgcccgaccggcgtcgcgcacacctttatggcggcggaagcgattgaaaccgaagccaaaaaacgcggctggtgggtgaaagttgaaactcgcggctccgtgggggcgggtaatgccatcactcctgaagaggttgagcaggcggatctggtggttgtcgcggctgatatcgaagtggatctggcgaaatttgccggcaagccgatgtatcgcaccacaaccggtctggcgctgaagaaaaccgctcaggagctggataaagccgttgttgaagcgaaaccatatcagcctgcgggtaaatcccaggccgcggcagaaggcaaaaaagagtccgcgggcgcctatcgtcatctgctgactggcgtatcgtatatgctgccgatggtggtagcgggcggcctgtgtatcgcgctctccttcgcttttggtatcaaagcctttgaagtaaaagacactctggccgccgcgctgatgcaaatcggcgggggatcagccttcgcgctgatggtaccggtactggcgggctttattgccttctccatcgctgaccgccctggcctgacgccaggtcttatcggcggtatgctggcggttagcaccggatctggctttatcggcggtattatcgccggcttccttgccggttacgtggcgaaagcgatcagtaccaggctgaaactgccgcaaagtatggaagcgctgaaaccgatcctcatcattccgctggtttccagcctgatcgtgggtctggcaatgatttacctgattggtaaacccgttgccggaattctcgaaggcctgacccactggctacaaactatggggacggcgaacgcggttctgctcggtgcaattctcggcggtatgatgtgtaccgacatgggcggcccggtgaacaaagcagcttacgcctttggtgttggtcttctgagtacccaaacctatgccccgatggcggccattatggcggcaggtatggttccaccgctggcgctgggcctggcgacactgattgcgcgtaaaaagtttgataaagcgcagcaggaaggcggtaaagccgcactggttctcggcctgtgctttatcaccgaaggagcaattccttttgccgctcgcgatccgatgcgcgtcctgccttgctgtatcgttggcggcgcggtgaccggtgcgatgtccatgtgggttggcgcgaaactgatggcgccgcacggcggtctgttcgtcctgctgatccctggcgcgattaccccggtgctcggatatctgatggcgattgtggtcggtacgctggtcgcaggcctttcctacgcggtgctgaaacgtcctgaagttcaggtggaagaaaaagtcgcctga

SEQ ID NO: 174824 - DNA, 939 bp, Klebsiella oxytoca
atgagcagacgtgtcgcaacgattactttaaacccggcctatgacctggtgggttttaccccggaaattgaacgcggtgaggttaaccttgttcgcacgaccggcttgcacgccgcagggaaggggatcaacgttgcaaaagtgctgaaagatctcggtatcgacgtcaccgtgggcggttttctcggtaaagataatcaggatggctttcagcaactgttcagtgagctgggcatcgctaaccgttttcaggtcgttcagggccgtacccgtattaacgtcaagctgacagaaaaagatggcgaagtgaccgacttcaacttctccggctttgaagtcacgccgggtgactgggagcgttttgttaacgactccctgagctggctgggccagttcgatatggtctgcgtgagcggcagcttaccttccggcgtaagtccggaagcgttcaccgactggatgacccgcttgcgcagccagtgcccgtgcatcatttttgacagcagccgagaagcgctggttgccggtcttaaagcggcgccgtggctggttaaacctaaccgtcgtgagctggaaatctgggcgggtcgcaagttacctgaaatgaaggatgtgattgaggccgctcatgcgctgcgcgagcaggggattgcccacgtggtgatctcccttggcgaagaaggcgccctgtgggttaacgcctccggcgagtggattgccaagccaccttcagtggaagtggttagcaccgttggcgcgggcgattcaatggttggcggcctgatttacggactgctgatgcgtgagtccagcgagcatacgctgcgcctggcaacggccgtcgccgcgctggcggtgagtcagagcaatgtcggtattaccgatcgtacccagttggccgcaatgatggcgcgcgtcgacttacaaccctttaattaa

SEQ ID NO: 174825 - DNA, 1131 bp, Klebsiella oxytoca
atgttccagttatctgtgcaggatattcatcccggtcagcaggccggtaataaagaagaggctattcgtcaggttgcctccgcgctggttagcgcgggcaatgtggctgaagggtacatcaacgggatgctggctcgcgagcagcaaacctccactttccttggcaacggtattgcgattccgcatggcaccaccgacacgcgcgatcaggtgctgaaaaccggcgttcaggtttatcagtttcctcagggcgtgacctggggcgaagggcagaccgcctacgtcgctatcggtatcgccgccagttcagatgaacaccttgggctgctgcgtcagctgacccatgtgctgagcgacgactcggttgctgaacagctaaagtccgccaccaccgctgaagagctgcgcgccctgctgatgggtgaaaagcagagcgaagcgctgaagctggataacgaaacgctgaccctggacgtggccgccagcgatctgctgaccctgcaggcgctcaacgccgcgcggctgaaagaagcgggcgccgtcgatgcttcctttgttagccatgtgattaatgacaacccgctgaacctcggccagggcatctggctgaacgacagtccggaaggcaacctgcgtagcgccattgcggtgagccgcgcggccaacgcctttattcgcgatgagcagccggtttccctgctgatcaccgtggcgatggccgatgaccagccgacggcggtccttaatcgcctgagcaatttgctgctggacaaaaaagctgaccgtttgctgaagtccgatggcgcaacgctgctggcgctgctgaccagcgacgatgcgattgctgaagatgttctcagcgctgaatacgttatccgcaacgagcacgggctgcacgcgcgtcccggcacgatgctggtaaataccattaaacaattttccagcgacattacggtcactaacctcgatggttcgggcaagccggcaaacggccgcagcctgatgaaagtcgtggccctgggcgtgaaaaaaggtcaccgcttgcgcttcaccgcgcagggtgaagatgcgcagcaggcgctggatgcgattggcgaagcgatcgccgcaggccttggggagggcgcataa

SEQ ID NO: 174826 - DNA, 1194 bp, Klebsiella oxytoca
atgaaagccgacatgcaaaacagtagcgccgccctgccacgacgcgggttcgatttaacctcctccgccttcctgatcgtcgccttcctgacgggcattgccggggcgctacaaacgcctaccctgagcctgttcctgactgacgaagttcacgtacgaccggcgatggtcggcttcttttttaccggcagcgcggtgatcggcattctggtgagccagtttctcgccgggcgctcagatcgcaaaggcgaccgcaagcagctgatcgtcttctgctgcctgatgggcgtgctggcctgcgtgctcttcgcgtggaatcgtaactactttattttgctcttcgtcggcgttttcctcagcagctttggttccaccgcgaacccgcagatgtttgccctcgcccgcgaacatgcggacaaaacgggccgcgaggcggtcatgttcagctcgatcctgcgcgctcaggtttcgctggcatgggtcatcggcccgccgctggcctacgcgctggcgatgggtttcggctttacggtgatgtacctcagcgcggcgattgccttcgtggtctgcggcgcgatagtctggttttttctccccagcatgcgcaaagagccgaaggtggtgacgggacatcttgaagcgccgcgcaccaaccgccgcgacgcgctgctgctgtttatcatctgtacgctgatgtggggaattaacagcctgtacatcattaacatgccgctgttcattattaatgagctgcatttacctgaaaaactggcgggattaatgatgggcaccgccgccgggctggaaatcccgaccatgctgattgcgggttactacgccaaacgtttcggtaagcgtttcctgatgcagatctctgcggttgccggggtgctgttctatgtcggcatgctaaacgtacacaccccggcactactgctggccctgcaggtgctgaatgctatttttatcggcattctggccgggatcggtatgctctattttcaggacctgatgccaggccaggccggtgcggccacgaccctctataccaatactatccgcgttgggtggattattgccggttcgctggcgggggtcgttgcggaagtctggagctatcacgccgtattctggattgcgctggtgatgggcctcgccactcaggcctgcctgtggcgcattaaagacgtataa

SEQ ID NO: 174827 - DNA, 252 bp, Klebsiella oxytoca
atggaatgccgccctgaatgcggagcttgctgtatcgctccttctatctccagccctatcccgggtatgccgcagggcaaaccggcaaatacccgctgtatacagctttcggacaataacctgtgcgcgatttttggctcgccgttaaggcccaaagtgtgcgccagcctgaagccggaagcggagatgtgcgccacaaatcgcgaagaagccatgatctggcttcttcatcttgagctgagcacttcgtga

SEQ ID NO: 174828 - DNA, 573 bp, Klebsiella oxytoca
atgccaagagcgaatgaaattaagaaaggtatggtgctgaattacaacggcaaactgctgattgttaaaaatattgatattcagtcaccgagcgcccgcggcgcagcgacgctgtacaaaatgcgtttctccgatgtgcgcaccggcctgaaagtggaagagcgcttcaaaggcgacgacattgtcgataccgttaccctgacccgccgcttcgttgacttctcctatatcgatggcaatgaatacgtctttatggataaagaagattacaccccgtatatcttcaccaaagagcaaatcgaagaagagctgctgtttatgccggaaggcggcatgcctgacatgcaggttctgacctgggacggccaactgctggcgctggaactgccgcagaccgtggatctggaaattattgagacggcgccgggcatcaaaggcgcatccgccagcgcccgcaacaaaccggctaccctcagcaccggcctggtcgttcaggtgccggaatacctcagcgcgggcgagcgcattcgtattcatatcgaagagagccgctacatgggccgcgcggactaa

SEQ ID NO: 174829 - DNA, 1467 bp, Klebsiella oxytoca
atgactaccattgcgacggccacgctgccggaaggcgtacagctccctcattatgaccgcagccagctgcgctcgcgtattgtgcatttcggctttggcgcttttcatcgcgcgcatcaggcgctactcaccgatcgggtgcttaacgccagcggcggagactgggggatttgtgagattagcctgttcagcggcgatcggctgatgagccagcttcgccagcaaaaccacctgtttaccgtgctggaaaaaggcgctgagggcagccagccaattgttgtcggcgccgtgcatgaatgtctgaacgctaaactcgattcgctcgccgctattattgagaaattttgtgaaccgcaggtggcgattgtctctctgaccattaccgaaaaaggctactgcatcgaccccgccagcggcctgctggatatgacgcagccgcgtattattcacgatctgcaaaacccgactttgccgcaatcggttcctggaatactggttgaagcgctggcgcgccgccgtcagcgagggctgtcaccctttaccgtgctctcctgcgacaatatccctgataatggacatgtagtgaaaaacgccgtgctgggcatggctgaaaaacgcgatccgcagctggcacagtggattgctgagcacgtcagcttccccggcaccatggttgatcgcatcgtaccagccgccaccgaggagtcgctggcggaaatccgcgccgcgttgggcgtagaagatccctgcgctatcagctgcgaaccctttattcagtgggttattgaagataacttcgtggccggtcgcccggactgggaaacggcgggcgttcagatgaccgacgacgttttaccgtgggagcagatgaagctgcggatgctcaacggtagccactcgttcctcgcctggcttggctacctggcgggccatgcgcatattagcgactgcatgcaggatccgatttttcacagcgccgcataccggctgatggttgatgaacaggcgccgacgctatccattcagggcgttgacctgtcggcatacgctgacagcctgatcgaacgtttcagcaacccggcgctgaagcaccgcacctggcaaatcgccatggacggtagccagaagctgccgcaacgtatgcttgacggaattcgcgtccatcttgcgcaagagagccgctggccgctactggcgctgggcgtcgctggctggatgcgctatgttagcggcgtggatgacgccggagccgtcattgatattcgcgatccgctggccgataaaatccaccacctcgttgccaccagcgatgagcgacagcgcgtagcggcgctgcttacgcttgaggagatcttcggccgcgacctgccgcagaatccgcagttcgtcgctgatgtcaccgccgcgtggcatcagctcgccgcttttggcgcacgccaggccgtcgccgccgcgctgaatgattaa

SEQ ID NO: 174830 - DNA, 978 bp, Klebsiella oxytoca
gtgaccaaaaccaacttgatcacggggtttctcggcagcggtaagaccacttccattctgcacctgctggccaataagcccgcaaatgaaaaatgggccgtactggtcaacgagtttggcgaagtgggcattgacggcgcgctgctggcggaaagcggcgcgctgctgaaagagatccccggcggctgcatgtgctgcgttaacggcctgccgatgcaggttgggctcaacaccctgctgcgccagggcaaacctgaccgtctgctgatagaacccaccggactaggccatcctaaacagatcctcgatatgctgaccgccccggtctacgcgccgtggatcgatctgcgcgccaccctgtgcatattggatccgcgtcagctgctggacgaaaaagtcgtgagcaacgaaaactttcgcgaccagctggctgccgctgacgttattgtcagcaataaagccgaccgctcgacggaagagagccagcgcgcttttgtcgcctggcgtgaggcgtacgccggtgagcgtcgctgcgtcagcactagccaaggtaatatcgacccggcgctgcttgatttgccgcgccgcaatctggcgccgctacccgcaggggtcgggcatgcgcacgaccacgggcagaaaaaaggccttgccgcgcttagccttcccgcgcaccagcgctggcgtcgtagcctcaatagcgctcagggctatcacgcctgcggctggatttttgacgctgaaaccgtcttcgataccgtcgctctgcttgaatgggcgcgcctggcgccggttggacgagttaaaggcgtcatgcgtattgccgaagggctggttcgtatcaatcgccagcagctcgatctgcatattgagacgcaaaacgttgccccgcccgatagccgtattgagctgatagccgatacggaaacggactggaatgctcttcaggcctctttgttgaagattcgtttaacttag

SEQ ID NO: 174831 - DNA, 708 bp, Klebsiella oxytoca
atgattaaaaatcgaattcccctcatcctgctgttaaacgcggcaggtatagcgcttttctgttcatggtatcttccggttaaccatggtttctgggctccgctggacgcggcgattttctatttctttaaccacctggtcggcgtcaacaccgcttatacctggctgttggcggttatcaacaaccgcgcgtttgacgcctgttcgctgctggcgatgggcagcctgatgctgagcttctggtttaaagaacagagcgccggacgccgccgggtgattatcatcggcctggtgatgctgctggctgccgtcattatcaatcagctggcccagcacctgatgccggtgaagcgagccagcccttcgctctcgttcaccgatatcactaaagtcagcgatgtcatctcctttccgactaaagatgcgtctaaagacagcttcccgggcgatcacggcatgatgctgctgatttttgcctctttcatgtggcgctattttggccgtcgcgccttcgctattgcgctggttatctttgtggtgttcgctttcccgcgggtgatgatcggcgcgcactggtttaccgatattgccgtcggatcattaacggccgtgctcattggcgctccctgggtgttgatgaccccactgagcgataaagtgattactttatttgaacgttacctccccggcggaagaacgaaaatttaa

SEQ ID NO: 174832 - DNA, 570 bp, Klebsiella oxytoca
atggtcaaatctcagccgattttgagatatatcttgcgggtcgcccccgcgattgcagttgcggttctgctttccgcgtgtagttcaaatagtaccgccagaaatatgcattctgagacgcttgctgtgggtagtggcgatttatcatcactgcaagcctctcaggatgaatttgaaaccatggtccgcaacctggacgttaagtcccgtttgatggatcaatatgccagctggaagggcgtgcgttaccgcctcggcggcagcactcgcaaaggcattgattgttccgcctttgtgcagcgtactttccgtgaacagtttggcctggagctgccgcgttcgacttctgagcagcaggattccggaaaatccattagccgttcacagctgcgtaccggtgatttagtactgttccgtgcgggttcaacgggccgtcatgtaggcatctacatcggcaacaaccagtttgttcatgcttccaccagcagcggtgtgacgatttccagcatggatgagccgtactggaaaaagcgctataacgaagcgcgacgcgttctgagccgctcgtaa

SEQ ID NO: 174833 - DNA, 1563 bp, Klebsiella oxytoca
atgcctacccgtcacctctctccccggcgaaaaatctggctaaccagcatatgcgttggcatagccgtcgccctgctggccggtagcatccagtttatggtgatctatcacaaccgcgcggagcgtttcgacgttatcatcaacaatgttcatgcttatctgacgggctattttcacgatttagaccagacgattgcgggactacagccgctggtgagtcagccctgcgaaaatatcgattccggattaaccgcccatgcggcattcagcccaaacgtacgcgctttcctgctggttaaaaatggtattgcgttttgctcctccgccaccggtgcaatgaacacaccttttaaccagctcattccacagctggatatcactcaagcggtggatatggcgatccttcccggtacgcccatgatgccgaaaagcgcggcgctggcgatgtgggttcgtagcccgcacggcggtaaagacggcgtttttgtctcgatcaatgcgaatctgacaccctatatactctactcctcacggcagaatgatttcagcggcctggcgctgtccattaagcacaccgcgatctcgaccttcagcaacaagcttatcgacccgcagaccctgctctcgccgcctattcgccagacgcagattgagggtttaccgttgaaaatctatctctatgctaacagctggctggcggagaatacgcagtttgccctgctgctgggggtggtgtgcgggctgctggccggactgttaagctattacattctcacgataaaatcggacccgcgaaaggagctgctgctggcgatcaaaaacgatcagttttacctggtctatcagccggtggtgaaatcggagacgctgcagatcagcggcgttgaggtactgatgcgctggaaacatccggtggccggagagatcccccctgacgtctttattaatcttgcggaaacccagcagatcatcattccgcttactcgccacctcttaaaactgattgcgcacgatgcgcctgttttgcagacgctcctgcccgcagggatcaagcttgggatcaatatttccccccttcatctgcacgcagagagctttcagcaggaccttaagcacttcgccgccgccatgccagccgaccactttaagctggtactggagatcaccgagcgcgcgatgatcgataaaaatcgttcattagagaacttcgactggctacacgagcagggttttgaaatcgcgattgatgattttggtaccggccatagcgcgctcatctatctggagcgctttagctttgattacctgaagattgatcgcggcttcgtacaggctatcgggacggagaccgtgacctcgccggtgctcgatgccgtcatcactctaagccgccgcctgaagctcgctaccgttgccgaaggcgtggaaacgcaggaacaggcggaatggctgcgcgatcatggcgtaaactttttgcagggctactggttaagtcgcccgctgacgctggaagcgctgatcgccgcccacgcgcagccggcgaaatatttcccaacccgctaa

SEQ ID NO: 174834 - DNA, 1827 bp, Klebsiella oxytoca
ttggaggacgataccctggttatgtttgcccgcatcagcctgatactgctgaccttatttagcctgcacagccgggcgcaaactattctgacgagcgatacgttcgcgattatcggccaaccgaagtacgccgcgggctttgaccactacgattatgcgaatcccgccgcgcctaaaggcggcgcgattacccttgcggctatcggtacctttgataatttcaaccgctacgccctgcgcggtaatccgggtattcgaaccgaagcgctatacgatacgctgttcaccacctctgacgatgagcccggcagttactacccgctgattgccgagcatacgcgctatgccgatgatttttcgtggatggagattacgctcaatccacacgcccgctatcacgacggcagtcccatcaccgccagcgatgtcgcttttaccttccagaagtttatgaccgaaggggtgccgcagtttcgtctctattataaaggcactaccgttaaagctatcgccccgctaaccgttcgcattgagttagccaaaccaggcaaagagaacatgcttagcctgatgacgctaccggtgatgccggaaaaattctggaaaaaccataaactcagcgacccgctctccgctccaccgctggccagcggcccctaccgcattaccgcctggcgcatgggccagtacatcacctattcccgcgtgaaggactactgggccgccgatttaccggtcaaccgcgggcgctggaatttcgatacgctacgctacgattattaccttgatgacaatgtcgccttcgaagcctttaaggccggcgccgtcgatcgtcgggaagagaacgtcgccaaaaactgggcgacccgctacgtcgggcgcaactttagccacggctatatcgttaaagacgaatacaccaatacctcggcgcaaaatacccagtggctggcctttaatattcagcgcccgatatttgccgaccgtcggattcgcgaggccatcaccctcgcctttgattttgaatggatgaataaggcgctgttctatcactcctacagccgcgccaacagcttctttcagaataccgaatacgcggcgcgcgattatcctgatgccgacgagctcgccctgctgacgccgctgaaaaaagagatcccggccgaagtcttcacgcagatttaccgaccgccggtttccagcggcgatggttttgcacgggagaatttactcaaagcggatgccatcctcaaccaggcgggatggatagtgaaaaaccagcggcgggtaaacgcgcagagcggcaaaccgttacgctttgagctgctgctcccctccggcagcagcgatcgctgggtactgccatttcagcacaatcttcagcggctcggcatcgttatggacattcgccaggtcgataactcccagtacagtaaccgcaagcgcagccgggattacgacatgatgccaaacgtctggcgcgcgtcgccctggcccgacaccggcctgcaaatctcctgggattcggaatatattaattccagctataacgcctcaggggttcaaaacccggccgtcgaccagcttattgcgcagatcattcgctggcagggcaacaaggaaaaactgctgccgctgggccgggccctcgaccgcgtgctgacctggaactattacatgctgccgatgtggtatatggcgcaggatcgcaccgcctactgggataaattctccttcccgaagactcgcgcgatttactcatccggtttcgaaaactggtggtacgacgccaacaaagcggtcagacttcccgcggacagacgttaa

SEQ ID NO: 174835 - DNA, 1095 bp, Klebsiella oxytoca
atgggtgcatatctgctccgccgactactgctcatcgtccccaccctgtgggcgattatcaccattaactttttcattgtgcaaatcgctcccggcggcccggtcgatcaagcgattgcggcgatagagttcggcgatcgcggcggtctgcccggagccggagacggcgggatggccgccagccatgcgcgtaccggcgtcagcaacatcagcgacggccactatcgaggtgggcgcgggctggacccggaagtcatcgccgaaataacccaacgctacggctttgataagcctctccacgagcgctattttaaaatgctcggcgactacctgcgctttgattttggcgacagcctgtttcgcagctcatcggtcgtgcagctgatcggggacagcctgccggtctctatctcgctgggcttgtggagcacgctcatcatctatctggtgtcgatcccgctggggatccgcaaagcggtcagcaacggcagtcattttgacgtctggagcagtacgctgattattatcggctatgcgatcccggcctttctgttcgccattttgttgatcgttatctttgccggcggcagctatttcgatctctttccgctgcgcgggctggtgtcagccaacttcgacagcctgccgtggtatcaaaaaatcctcgactatctctggcatatcaccctaccggtgctggccacggtgatcggcggttttgccgccctcaccatgctcaccaaaaacagctttctcgacgaaattcgcaagcagtacgtcgtcactgctcgcgcaaagggcgttagcgaaaagcagatcctgtggggccacgtatttcgcaacgcgatgctgctggtgatcgccggtttcccggccacctttatcagcatgttttttaccggctcgctgctgattgaagtgatgttctcgctgaacggactggggctgctgggctatgaagctacggtatctcgtgattacccggtcatgttcggcacgctgtatatttttaccctgattggcctgctgctgaatatcatcagcgacatcagctatacgctggtcgatccgcgtatcgattttgagggccgctaa

SEQ ID NO: 174836 - DNA, 1026 bp, Klebsiella oxytoca
atgtcatttttcagtcccgtcaatcaggcccgctgggcgcgctttcgccacaaccgccgcggctactggtcgctctggttattcttagtcattttcgcctgcagcctgtgcgccgagctgattgctaacgataaaccgctgctggtgcagtaccgcggcagtctctacgtaccgttattaaaaaactatagcgagagcaccttcggcggccgctttgctactgccgccgactatcaggacccgtggctgcaaaaacggctggacgataacggctgggccctgtgggcgccggttcgcttcggcgcaacgaccattaatttcgccaccgaaacccccttcccttcgccgccgtcaaggctgaactggctgggcaccgatgccaacggcggcgacgtgctggcgcgtattctgtacggcacgcgcatttccattctctttggcctgctgctgaccttcttctccagcgtgctgggggtgatggccggcgccgttcagggatattacggcggaaagattgacctctggggacagcgctttatcgaggtctggtcggggatgccgaccctgtttctgattatcctgctttcgagcgtcgtgcaggccaatttctggtggctgctggccattaccgtgctgttcggctggatgacgctggtcggggtcgtccgcgccgagtttctgcgcacccgcaactatgattatatccgcgccgcgcaggcgctcggcgttagcgatcgcgccattattctgcgccatatgctgcctaacgctatggtcgccaccctgaccttcctgccgtttattctgtgcagttcgattacgactctgacctcgctggacttcctcggcttcggcctgccgctgggctctccttcgctgggcgagctgctgttgcagggtaaaaataatcttcaggcgccgtggctgggcatcgccgcctttctgtcggtagcgctcctgctgacgttattgatttttatcggtgaagcggttcgcgacgcttttgacccaagcaaggcggtgtag

SEQ ID NO: 174837 - DNA, 1590 bp, Klebsiella oxytoca
atgacgcaacctctgttagatatcgacaacctttccatcgcctttcgccagcagggggaaaccaccaccgtggtcagcgagctgtcgctccgcattgcggtcggtgaaaccctggcgctggtgggcgaatccggctccggtaagagcgtttccgcgctgtcgatactgcggctgctgccctcgccgccggtcagctaccccgcaggggatatccgctttcacggccagtcgctgctacacgccgatgaacatacgctgcgcggcgtgcgcggcaaccgcatcgcgatgatttttcaggagccgatggtttcactcaatccgctgcataccctcgaaaaacagctctacgaagtgctctctttgcatcgcgggatgcgtaaagaagcggcgcgcggagagatcctcgactgtctggatcgcgttgggatccgcaatgcgccgcggcgtctggccgactacccgcaccagctctccggcggcgaacgccagcgggtaatgatcgccatggcgctgttgactcgtccggagctgctcatcgccgacgaacccacgaccgcgctggatgtgtcggtacaggcgcaaatcctcgcgctgctgcgcgaactcaagcaagagttaaatatggggctgctgtttatcacccataacctgagcatcgttcgtcagcttgccgatcgcgtcgcggtgatgcagaacggccgctgcgtggagcaaaacggctgccgggcactattctccgctgccgaacacccttacacccgccgcctgctggacagcgagccgtcgggcgatcccgtgcccctcgcgccggatgcgccagaattactgcgggcggaaaacttaagtatcgcctttccgatccgcaaagggcttctccggcgggtggtcgatcataatcgcgtggttaacgccctcagctttcaattgcgcgcgggagaaacgctgggtctggtcggcgaatccggatcgggcaagagtactacagggctggcgctgctgcgcctgattcattctgaaggcgcaatcgtctttgacggcgagacgcttcaggggcgcagccgtcggcagatgctgccgctgcgtcgacgcatgcaggtagtctttcaggatcccaactcatcgctaaacccacggcttaacgttctgcaaattattgaagaaggattgcgcgtccatcagccaacgctcacgccggccgagcgagagcaggcggtgattcaggcgatgcaggaggtcggtctcgatccgcaatcccggcatcgctaccctgccgctttctccggcggacagcgccagcgcatcgctatcgccagggcgctggtcgtcaaaccgcagctaatcgtgctggatgagcccacctcttcgctggataaaaccgtgcaggcgcaaattctggcgctgctgaaggcgctacagcaaaagcatcagctggcctatattttcatcagccatgatttgcgcgtcgtgcgtgcgctttgtcatcaggtaatggtgctgcggcagggagaggtcgtcgagcagggtgagtgcgaacgcgtgtttaccgctccgcaacaggagtatacccgtcagctgctggcgttaagctga

SEQ ID NO: 174838 - DNA, 345 bp, Klebsiella oxytoca
gtgaatacactgcaactctctatcgtacaccgtctgccgcagagctatcgctggctggccggttttgcaggttcaagagttgaaccgattccgcaaaacggcgctcagagcgaaaatagccttgtggcgttgaaattacttagccccgatggcgataaggcctggccggttatgcataaactcagccaggcgctgagcgacatcgaagtcgacagctccgttgttgaatgcgagggcgaaccgtgcctgtttgttaatcgtcaggacgaattcgcggcaacctgccggctgaaaaatttcggcgtggcgattgcagaaccgttctccggcaacaacccattctga

SEQ ID NO: 174839 - DNA, 1197 bp, Klebsiella oxytoca
gtgacggcaaagcagaattcttcattagggattgtgtttattcttggcctgctggccatgttaatgccgctgtcgattgatatgtatcttccggcgctgccggtgattgcggcccagtttaatgtgccggacggcagcgcgcagatgacgctcagtacctatattctgggctttgcgctggggcagcttttatatggcccgatggcggatagtcttggccgtaaaccggtgatactaggcgggacgctcatttttgccgcggcggcggtggcctgcgcgctgtcgcagactatcgatatgctgattaccatgcgctttttccacggcctggcagccgcagcggcaagcgtggtgattaacgccctgatgcgcgatatctatcccaaggaagagttctcgcggatgatgtcgttcgtcatgctggtcaccaccgttgcgccgctggtggcgccgatggtcggcggagcggtgctggtatggtttagctggcatgcgatcttctggatcctcgcgctggcggccctgttagcgtcggcgatgatcgcatttttcattagcgaaaccctgccgccggaacggcgacagaaatttcatattcgcactacgcttggcaacttcgccaccctgtttcgccataagcgcgtgctgagctatatgctggcaagcggatttagctttgccgggatgttctcgtttctgagcgctggcccgtttgtctatatcaatatcaaccacgtttcaccgcagcactttggctactattttgcgctgaacgtggttttcctgtttgtcatgaccatgatcaacagccggtttgtgcggcgggttggggcgctgaatatgttccgcgcggggctgtggatccagtttgcgatggcggtatggatggtggtgtgcgcgctgtttgacgtcggcttctgggcgctggtgtttggcgtggcggctttcatcggctgcgtttcgatggtctcctccaacgcgatggcggttattctcgatgagtttccgcatatggccgggacggcctcctcgctggctgggacgttccgctttgggattggcgctattgtcggcgcgctgctgtcgatggcgacctttaccacggcctggccaatgctgatttccatcgccttctgcgccagcagctctattctgttctacctctatgccagtcggcggcgaaaagccgcacgataa

SEQ ID NO: 174840 - DNA, 720 bp, Klebsiella oxytoca
atgcgacttgataagtttatcgctcagcaacttggcgttagtcgggctattgccgggcgtgaaatccgcggcagccgcgttaccgtggacggcgaaattgtaaaagactcctccttcaagcttcagccggagcatgacgtcgagtatgacggcaatacgctggttcagcagaacggcccgcgctactttatgctcaacaagccgcagggttacgtttgttctaccgacgatccggatcatccgacggtactctatttcctcgatgagccggtagcgcacaagctgcatgctgccggtcgtctggatatcgacaccaccggtctggtgctgatgaccgacgatggtcagtggtcgcaccgcattacgtctccgcgccaccattgcgaaaaaacctatctggtgacgctggaaaatccggttgatgactccactgccgggcagtttgctaaaggcgttcagctgcataatgagaaagagctgaccaggcctgcagtgctggaagtggtgacaccaaccgaagtccgcctgaccattagcgaagggcgttaccatcaggttaagcggatgtttgccgccgtggggaatcatgtggttggcctgcatcgcgaacgcattggcgacattgcgctggatgcttcgctggcgccgggtgaatatcgtccgctgacggcagaagaagtcgccagcgtcggcggccaacatgcgcggagtaaaacgtga

SEQ ID NO: 174841 - DNA, 1758 bp, Klebsiella oxytoca
atgacatttacattacgtccctaccaaaaagaggcggtcgacgccacgctcgcctggtttcgccgccatcatgaacctgccgcgattgtcctgccaacaggcgcaggtaaaagcctggtcattgctgaactcgcacgcctggcgcgcggtcgcgtgctggtgctggcgcacgtaaaagagctggtggcgcagaaccacgccaagtattgcgcgctcggtctggaagcggatattttcgccgcgggccttaaacggaaagagagccacggtaaagtggtctttggcagcgtgcagtcggtagcccgtaaccttgaccagtttcagggggagttctcgctgctgatcgtcgacgagtgtcaccgcatcggcgacgataatgacagccagtatcagcagattatcagccaccttcagcaggtcaatccgcatctgcgcctgctggggctgaccgcaacgccgtttcgcctgggtaaaggttggatttatcagtttcactatcacggcatggtgcgcggtgatgaaaaagcgctgtttcgcgactgcatttatgaactgccgctgcgctatatgattaagaatggctacctgacgccgccggagcggctggacatgccggtggttcaatacgacttcagccgtttacaggcgcaaagtaacggcctgttcagcgaagccgatctgaatcacgagctgaaaaagcagcagcgcgtcacgccgcatatcgtcagccaaatcgttgaattcgccgaaacgcgcaaaggggtgatgattttcgccgccaccgttgaacacgcccgtgaagtgaccgggttgcttccgcagggcgaggcggctcttatcaccggtgaaacgccggggccggagcgcgatcgcatcatcgaagcgtttaaagcgcagcagtaccgctatctggttaacgtcgcggtgttgacgaccggctttgatgcgccgcatgtcgatctgatcgccatcctgcgcccgaccgagtcggtgagcctttaccaacagatcgtcggccgtggcctgcgcctggcgccgggtaaaactgactgcctgattctcgattacgccggcaatcctcacgacctttatgcccctgaagtgggaacgccgaaaggaaaaagcgacaacgttccggtccaggttttttgtccggcatgcggtttcgccaataccttctggggaaaaactaccgctgacggcacgctgattgaacactttggccgccgctgccagggctggtttgaggatgacgaaggccatcgtgaacagtgcgattttcgttttcgctttaaaaactgcccgcagtgtaacgcggaaaacgatatcgccgcccgccgctgccgcgagtgcgataccattctggtcgaccccgatgatatgctgaaagccgcgctgaagctcaaagatgcgctggtgctgcgctgtagcggtatggttcttcagcacggtgcggatgacaaaggcgcctggttaaaaatcacctattacgatgaagatggcgcggatgttagtgagcgcttccgcctgcatacgcccgcccagcgtaccgcctttgagcagctctttatccgaccgcatacccgaacgccgggcgtgccgctgcgctggataacgcctgccgatatcctcgcccagcaggcgcttctgcgccacccggactttgtcgttgcccgcatgaaggggcaatactggcaggtccgggagaaagtgtttgattatcaggggcgattccgccgggccaacgaactgcgctaa

SEQ ID NO: 174842 - DNA, 285 bp, Klebsiella oxytoca
atgtttactatcaacgcagaagtacgtaaagagcagggtaagggtgcgagccgccgcctgcgtgcagctaacaaattcccggccatcatctatggcggcgaagctgcgccagtagcaatcgaactggatcacgacaaagtgtggaacatgcagaccaatgcagagttctacaacgaagttctgaccatcgttgttgatggcaaagaagagaaagttaaagctcaggctgttcagcgtcacccgttcaagccgaagctgacccacatcgacttcgttcgcgcttaa

SEQ ID NO: 174843 - DNA, 594 bp, Klebsiella oxytoca
atgcacgctgacgcaccgcgcgttcgccatatccgcgaaacgctattatcggacaactggtacacgctcaagaaatatacctttgaactactgcgccgtgacgggcgctggcaggagcagagtcgggaagcttacgatcgcggcaacggcgcggtgatcctgctctacaatcgtgaaaagcaaacggtagtgctggtccgtcagtttcgctttccggtatggattaacggtcatgatgggtttttgatcgaagccgccgcaggactgctggatgacgcttctccggaagaacgcatcgttgccgaggccgaagaagagaccggttttcgcgtcacccggatcgagccggtatttaccgcttacatgagtcccggttcggtgacggagaagctttactttttcatcgctgaatactctgccgacgatcggcgcagcgacggtggcggcctggcgacggagggagaagatatcgaagtgctggagtggccgctggaaaaagcgctgcaggctattcgcgaaggagaaatcgtcgatgcgaaaacgattatgctgttgcagcatctcgcgctgaatgcctcaacgctactcgcctaa

SEQ ID NO: 174844 - DNA, 759 bp, Klebsiella oxytoca
atgcttgccagccagagaaaacagcagattttgcagatcctcgctgaggaaaaacaggtgatgtcaggcgatcttagccagcgcttcagcgtctcagaagactctattcgccgggatctgcgggagctggcagcggaaggcaaactgcagcgcgtgcacggcggggcgctgccggtatccgaagccatcgcgcctattgaaacaagaaagaacgtgcagatggcctcaaagctaactattgcccagcgcgcggttgagcttattcagcccggtcaggtggtgattatcgacggaggcacgactaccggagagatggtgcgcctgctgcccgataacctcgcgtgtaccgtggtcacccatagcccgggaattgccgtcgcgctggtggagaaaccgcttatcgaggtgattctgatcggcggccggttgtttaagcattcggtggtcagcgtcggggccgcggcccttgaaagcatttcccgcatcaatgccgatctgtttttcatgggcgttaccggcgtgcacccgcgggcgggattaaccaccggtgattatgaagaagcgggcatcaagcgcgcgcttgcggcacgggcagccgaaacggtggtgatggcgtcgcaagaaaagctgaactccgcttcggcctttgctatcggcgagctggggggcgtcagtacgctgatcgtggatacgactctcgacgaggcgctgcgacagcagctaaccctgaatggggtggaaatcctctacgcgctgtag

SEQ ID NO: 174845 - DNA, 1008 bp, Klebsiella oxytoca
atgagtctggatatcgaccagattgccctgcatcagttaatcaaacgtgatgaacaaaatctggaactggtgctgcgcgaatcgttgctggagccgacggcgacggttgttgagatgatggctgagctgcatcgtgtctacagcgcaaaaaataaagcctatggcctgtttactgaagagagcgagctggcgcaggcgctgcgcgggcagcgtaaaggcgaagaagagttcctgccgttcagccgcgccgctaccgggcgcctgcgtgacgaactggcaaaatacccttttgctgaaggcgggatcgtgctgttttgccagtatcgctatctggcggtggaatacctgatggtggcggtgctgaataacttaagcagcatgcgcgtcaacgaagagctggatatcagctctacccattatctggatatcaatcacgctgacatcgtggcgcgtattgatttaaccgaatgggaaaccaacccggagtcaacgcgctatttgaccttcctgaaggggcgggtagggcgcaaagtggcggatttcttcatggacttcctcggcgccagcgaagggctgaatgcgaaagcgcaaaatcgcggcctgctgcaggcgctggatgatttcgccgccgatgcgcagctggacaaatctgaacgtcagaacgtacgtcagcaggtatacagctactgcaacgaacagctgcaggccggtgaggaaatcgaactggaatcgctgtccaaagagctggctggcgtcagcgagaagaccttccaggaatttaccgccgagcaaggttacgagctggaagagagcttcccggcggatcgcagcactttgcgtcagttaaccaagtttgccggcagcggcggcgggttaaccatcaactttgacgctatgctgctgggcgagcgggtgttctgggatccggctacggataccttaaccattaaaggcacgccgccgaatctgcgcgatcagctccagcgccgaacttctggcggaaattaa

SEQ ID NO: 174846 - DNA, 264 bp, Klebsiella oxytoca
atgttgccctttcacgaacaaacagattttgagtttatgccgcaattatcccgctatagcgatgaacacgtcgaacagctgctcagcgagctgacgagcgttctggaaacacataaagcgcccgttgacctttcactgatggtattgggcaatatggtgactaacctgatcaacagtagcgtcgcgccggcgcagcgtcaggccatcgcccgttcttttgcccaggcgctgcagtcatctatcaacgacgatccagcgcactaa

SEQ ID NO: 174847 - DNA, 1761 bp, Klebsiella oxytoca
atggtgactcttcgtcagccctaccgagaaaaagtctcccagatggtcagctggggacactggttcgcccttttcaacatgttgttggctatggcgctcggcagtcgctatctgtttgtcgccgactggccaacgacgcttgccgggcgccttttttcgtacgtcagcctcgttggtcacttcagcttcctggtctttaccagctatgtgctgattcttttcccgctaacgtttatcgttgtctctcagcgcttaatgcgctttatctcggtggttctcgcgaccatcggcatgacgctgctgttgatcgacagcgaagtattcacccgtttccacctgcatcttaatccctttgtctgggaactggtcattaaccccgatcagaacgagatggcgcgcgactggcagttgatgtttatcagcgtcccgatcatcttccttctggaaatgctctttgcgacctggagctggcagaaactgcgcagcctgacgcgccgccgccactatgcccggcccgttgcgtggttcttctttatttcttttatcagtagccacctggtctatatctgggcggatgccaatttctatcgcccgataaccatgcagcgggccaatctgccgctttcctatccaatgacggcgcgccgttttctggaaaaacacggcctgctcgacgcgcaggactatcagcgccgtctggtagaacaaggcgcgccggaagccgtttcggtgcagtacccgcttagcgaactgcgttaccgcgatctcggtaccggttataacgtgctgctgattaccgtcgataatcttaactactcgcgctttgagcaaaacatgccagcgctgaccggcttcgcgaaagaaaacgttaactttacccagcatatgagctccggtaacactgccgacagcggcatgtttggcctgttctatggtatttcgccgagctatatggacggcgtcctgtcagcgcgtatccccgcagcgctgattacgtcgctgaatcagcagggctatcagttgggcctgttctcttctgacggttttagcagcccgctgtaccgccaggcgctgctgtccgatttctcgctgccggcggcgaaagcgcaaagcgacgagcagacggcaaaccagtggataaactggctggaccgctacgcccaggatgaaaaccgctggttctcatgggttgcgctcaacggcaccactcttgataacgggcagcagcaaaactttgtccggcgctacgccagcgccgctggcgcggtcgatacgcaaattggtcgcgtgctgaatgcgctgcgcgaagcgggcaagctggacaacacggtagttatcgtgacggcgggccacggtatgccgctgaacccacatcatgacgcgtttggctggtcgcgcgaagagcttcaggttccgttggtgatccattggcctggcaccccggcccaggagatcgctacgctgaccgataataaagacgtgatgacgacgctgatgcagcgcttacttcacgtctccacaccggcgaatgagtattcgcaaggtgaagacctgtttagcgccgcccgccgccgcgcctgggttaccgcagccaatagcgatacgctggccattaccacgccgaaggttaccgtcgtgctcaatcacaacggtacctacagaacatggaacagcgacggcgagaaaattaaagatcaaaaaccgcagctcagcttgctgctgcaggtgctgaccgatgaaaaacgctttatcgctaactga

SEQ ID NO: 174848 - DNA, 960 bp, Klebsiella oxytoca
gtgaatttctccaccttttgccgccgtaccctcctcgccagcggtctggcgattttaggaattagctcagcgctggcggcagactggccgcggcagataaccgacagccggggaacgcacacgctggaaagccagcccctgcgaattgtttccaccagcgtgacgctgaccggctcactactggcgattgacgcgccggtagtcgccagcggcgccacgacgccgaacaaccgcgtcgccgacggtcagggatttttacgtcagtggagcgatgtggcgaaagcgcggaagctgtcgcgcctctacattggcgaaccgagcgctgaggccgtcgctgcgcaaatgccggatctgattctgattagcgccaccggcggcgattcggcgttgacgctctacgaccagctttccaccatcgccccaacgcttgtcattaactacgatgacaaaagctggcaggccctgctgacccaactggggacgatcaccggccatgaaaaacaggcggcagagcgaattgcggaatttgatactaagctggcggcgctgaaagagaagatgaagctgccgccgcagccggtcaccgcgctggtctacaccgccgcggcccatagcgccaatatctggacgaaagagtccgctcaggggcagatgcttcaacagctgggctttacccttgccgatctgcccgccgggctgcatgccagccagagtcaggggaaacgtcatgatatcgtgcaactgggcggtgaaaatttagccgccggacttaacggtcagagcctgttcctgtttgctggcgaccaaaaagatgccgatgcgatttacgccaacccgctgctgtcgcatctgcccgcagtcgaaggtaaacgcgtttatccgctgggaacggaaaccttccgcctggattattacagcgccgtactggtgctgcagcgcttagccgcgctctttgcttaa

SEQ ID NO: 174849 - DNA, 1176 bp, Klebsiella oxytoca
atggaaacgtctttggctgaggaagtacgggagaaaaaaatgactctgccgccggaaagcttcttctttatgtcgccgtaccgcagtttcaccaccgctggctgctttagtcggttttctcatcctgccgccgatggcgaaaatctggatgggaaattccagcacaaaatggccgccgcctttacagcggcgcgggctgccgggatcgctaagccgataatggtcggcgccattccgtttgataccagcgagccgtccgagctgtttatacccacaagctgggaaaccttctcccgaccagaaaagcagcactctgcgcgctatgcgtcggggctgcagcccatggacgtgattcagcgccgggagatccccgaacaggacacctttatggcgatggtgacgcgcgcggcggccatgaccgcgacgccggaagtggacaaagtggtcctgtcgcgcctgattgatatcaccacccgtgagcgggttgatagcggtgcgctgctggagcgcctgattgcccagaaccccgccagctataacttccacgtgccgctttcggacggcggcgtgctgctgggcgccagcccggagctgctgttacgtaaagaaggggcgcatttttactctctgccgttggccggttcggcccgccgtcagccggacgatgtgctggaccgcgaagcggggcacaagctgctggcgtcggaaaaagaccgccatgaacatgagctggtgacccaggcgatgaaggccgtactggcaccgcgcagcagcgagctaagcctgccggattctccgcagctgatcaccacgccgaccctgtggcatctggcgacgcagattcagggcgccgcgctggcaaacgagaatgccatgtcgctggcctgtctgctgcatcccaccccggcgctgagcggcttcccgcatcaggcggcaaaacgcctgattaacgaactggagccgttcgatcgccagctgttcggcggtatcgtcggctggtgcgatgatgaaggcaacggcgagtgggtggtcaccatccgctgcgcgcgcctgcatcaacgcacgctgcggctgtttgcaggcgcagggatcgtcccggcctcttcgccgctaggcgagtggcgcgaaaccggcgtcaaactgaccaccatgctgaacgtattcggcttgcaataa

SEQ ID NO: 174850 - DNA, 1608 bp, Klebsiella oxytoca
atgatcgaatttacccgctggccggaagcgttcgcggcccgctatcggcaaaaaggttactggcaggatctgccgctgactaacctgattacccgtcatgccgaaaacgatgctcccgccattatcgacggcgacaaacgctacagttatcgtgagttcaaccgcctggttgataatctcgcctcctcgctgcagcgtcagggcctgaagcgcggcgaaacggcgctggtgcaactgggtaacgtcgcggaattttatctgacgtttttcgcgctgctgcggatcggcgtggcgccggtgaatgcgctgttcagccatcagcgtagcgagctcaacgcctacgccgcccagattgaacccgccttgctgattgccgatcgcgaacacgcgctgtttgccgatgacgaatttctgaatgattttgtcagccagcatccgtcgatacgcgtggctctgctgctcaacgacagcggcgaacggagcctgacggcagccattgagcggcctggcgataatttcattgccggaccaacgcctgccgacgaagtggcctttttccagctttccggcggcagcaccggtacgccgaagctcatcccgcgtacccataacgactacgactacagcattcgccgcagcaacgagctgtgcggcgtgagcgccgaaacgcgctacctgaacgcgcttcccgccgcccataactacgcgatgagttcgccaggttctttaggcgtcttcctcgccggcggtgtggtggtactggcgcacgatccgagcgccacactctgcttcccgctgattgaaaaacaccagattaacctgacctcgctggttccgcctgcggtcagcctgtggctgcaggagatccaggattccggcagcaatgcccgcctgcaatcgctgcggctgctgcaggttggcggggcgcgcctgtccgcgacgctcgcggcgcgtattccggcggaaatcggctgtcagcttcagcaggtcttcggcatggcggaggggctggtgaactatacccgcctcaacgatagccccgagcgcattatcaatactcagggttgcccaatgtgtccggacgatgaagtgtgggtggccgatgcgcagggcaatccgctgccgcggggcgaagtcggacggctgatgacccgtggtccttacaccttccgcggctattacaagagtccgcagcataatgccgaagcctttgatgccgacgggttctactgttctggcgatctgatctcgatcgatgaagatggctatatcaccgtgcagggacgggaaaaagatcagatcaaccgcggcggagagaagatcgcggcggaagagatcgaaaacctgctgctgcgccatccggcggtgatccacgtcgcgctggtcagtatggaagatagcctgctgggagaaaagagctgcgcatatctggtggtaaaagaacctctgcgcgcggtggcggtacgccgcttcctgcgggaacaaggggtcgcagaatttaaactgccggaccgcgtggagtgcgttgatgcgctgccgctgacgccggtgggcaaagtcgataaaaaacaattacgtcagtggctggctgaacgcaagctgggctga

SEQ ID NO: 174851 - DNA, 852 bp, Klebsiella oxytoca
atggcaatccctaaattacaggcttacgcgctgccggaagccagcgatatcccggcgaacaaagtgaactgggcatttgagccgtcccgtgccgcgctgctgatccatgatatgcaggagtatttccttaatttctggggcgaaaacagcgcgatgatggagaaagtggtggccaacatcgccgccctgcgcgagttctgcaaacagaataatattccggttttttacaccgcccagccgaaagagcagagcgatgaagaccgcgcgctgctgaacgacatgtgggggccgggtctgacccgttctcctgaacagcagcaggtcattgccgctcttgcgccggacgacaacgataccgtactggtgaagtggcgctacagcgcgtttcatcgctcgccgctggaggagatactgaaagaggcggggcgcgatcagctgattatcaccggcgtgtacgcccatatcggctgcatgaccaccgcaaccgacgcgtttatgcgcgatattaagccatttttcgttgccgatgcgctggctgatttcagccgcgaggagcatctgatggcgctcaactacgtggcgggtcgctccggtcgcgtggtgatgacggaagagctgctgccgctgccggcatcgaaagcggcgctgcgcgcgctggtgctgccactgctcgatgaatccgatgaaccgatggatgacgaaaacctgatcgactacggcctggattcggtacgcatgatggcgctcgccgcgcgctggcgtaaagtgcacggcgatattgacttcgtggtgctggcgaaaaaaccgaccatcgatgcctggtgggcgctgctttctcgtgaggtgaaataa

SEQ ID NO: 174852 - DNA, 756 bp, Klebsiella oxytoca
atgaacgggctagattttcacggccagaccgtgtggatcaccggcgcgggtaaggggatcggctacgctaccgcgctggcgttcgttgaggccggcgcgcaggtaaccggttttgatctggcgttcgacggtgaaagctatccgtttgccaccgagacgctgaacgtcgccgacgcgcagcaggtggcgcaggtatgcggccgcctgctggcagggatcgagcggctggatgtgttggttaatgcggccggtattttgcggatgggggcgaccgatgcgctgaaccttgaagactggcagcagacctttgccgtcaacgttggcggggcgtttaacctgttccagcagacgatggcgcagttccgccgccagaaaggcggggcgattgtgaccgtggcgtccgacgctgcgcataccccgcgcatcggcatgagcgcctacggcgcatcaaaggcggcgctaaagagcctggcgctgaccgtcggcctggagctggcgggcagcggcgtacgctgtaatctggtttctcctggttctaccgacaccgatatgcagcggacgctgtgggtgagcgatgatgcagagcagcagcgcattcgcggcttcggcgagcagtttaagctggggattccgctgggtaaaatcgcccgcccgcaggagattgccaataccattctgttcctcgcctccgctcacgccagccatatcacgctgcaggatatcgtggtggacggcggctcgacgctgggggcataa

SEQ ID NO: 174853 - DNA, 414 bp, Klebsiella oxytoca
atggcctggaaacgtcagctgacgctggatgagcttaacgccaccagcagcaatacgatggtggcccatctgggcatcgtctatacccggattgaggagggcgtgctggaagcggaaatgccggtcgacgcgcgaacccatcagccgttcgggctgctgcacggcggcgcctctgcggcgctggcggaaaccctcggctcgatggccgggtggctgatgaccgaagaggggcagtgcgtagtggggaccgagctcaacgccacccatcaccgggcggtctccagcggtaaagtccgcggcgaatgccgggcgctgcacctggggcgtcagggccagagctgggaaattgcgatattcgacgagcgaggacggcgctgctgcacctgccgtctgggcacggcggtcctcggctga

SEQ ID NO: 174854 - DNA, 2109 bp, Klebsiella oxytoca
atgatgaataattcagggaaatacctcatctggacactgctctccgttatcggagcctttgccctgggctatatcgcgctaaaccgaggtgagcagattaacgcgctatggattgtcgtcgcggcagtctgcgtctatctgatcgcctatcgcttctacggcctgtatatcgcaaaaaacgtgctggcggttgacccgacgcgcatgactccggcggtgcgtcacaacgacggccttgactacgttccgaccgataagaaagtgctgttcggccaccattttgccgctattgccggcgcagggccgctggttggcccggtgctggcggcgcaaatgggctatctgccgggaatgatctggatcctggcgggcgtggtgctggccggggcggtacaggactttatggtgctgttcgtctcaacccgtcgcgacggacgttcgctcggcgagctggtgaaagaggagatgggcccgaccgccggggtgctggcgctggtggcctgctttatgatcatggttattatccttgcggtgctggcgatgatcgtggtgaaagcgctgacccacagcccgtggggcacctacaccgtggccttcaccatcccgctggcgatattcatgggcatttatattcgctatctgcgccccgggcgcattggcgaagtgtcggtgattggtctggtgatgctggtgttcgccatcatctccggcggctgggtggcggaaagcccgacctgggcgccgtggtttgattacaccggcgtacagcttacctggattctggtgggctacgggtttatcgccgccgtactgccggtctggctgctgctggcgcctcgcgactacctctctactttcctgaaaatcggcaccatcgtcggtctggcgattgggattctgatcatgcgtccgacgctgacgatgccggcgctgaccaaatttatcgatggcaccgggccggtatggagcggcagcctgttcccgttcttgtttatcaccatcgcctgcggcgcggtttccggcttccatgccctgatcgcttccggcaccaccccgaaaatgctggccaacgaaggccaggcgtgttttatcggctacggcggcatgctgatggagtccttcgtagcgatcatggcgctggtggcggcctgtattatcgacccgggcgtctacttcgcgatgaacagcccaatggcggtgctggctccggcgggcgtgagcgatgtggtggcgtcggcggcgcaggtggtgagtagctggggctttaccgtcaccccggatacgctcaatcagatcgccaatgaggtaggggaacagtcgattatttcacgcgcgggcggcgcgccgacgctggcggtgggcatggcctatatcctccacggttcgctgggcggcctgatggacgtctctttctggtaccacttcgcgattctgtttgaggcgctgtttatcctgaccgcggtggatgccggcacgcgggcggcgcgctttatgctgcaggatctgcttggggtgatcagcccggggctcaagcaaaccagctccctgccggcgaaccttcttgcgaccgcgctctgcgtgctggcctggggctacttcctgcatcagggcgtagttgacccgcttggcggcatcaacaccctctggccgctgtttggtattgccaaccagatgctggcagggatggcgctgatgctctgcgcggtggtactgtttaagatgaagcgccagcgttatgcctgggtcgcactgctgccaacctcctggctgctgatctgtaccctgaccgcgggctggcagaagtcgttcagcaccgataccaaagtgggcttcctggcgattgccaacaagttccaggcgatgattgacagcggcaatattccaccgcagtacaccgagtcgcagctggcgcaactggtgtttaacaaccgtctggatgccgggctgaccatcttcttcatggtggtggtggtggttctggcgctgttctcaattaagaccgcgctggcggcgttgaaagaggacaaaccgacggcgaaagagaccccttaccaggcgatgccagctgatgctgaaagcctggtcactcaggcgaaacgcgcccattaa

SEQ ID NO: 174855 - DNA, 198 bp, Klebsiella oxytoca
atgtttgataccctttcgaaagcaggaaaatatctgggccaggcggcgaagatgatgatcggcgtcccggattacgacaactacgtggagcacatccgcgtgacccaccccgagcaaacgccgatgacctatgaagagtttttccgcgaacgtcaggacgcacgctacggcggtaaaggcggcgcgaagtgctgttaa

SEQ ID NO: 174856 - DNA, 405 bp, Klebsiella oxytoca
atggctgttcagataattaaggatgatgaagggaaagcgcagtacgcggtgatcccctacgacgaatacttccagatgtgtttgcagctagccgagctggatgatgaaacggaagccgatcttgaagatattccggtagaacacgatatctacgacaacgtgatgctgccgggtgacgtctgcgacatcatggataaagagaaagtcagcctgcaggcggcctggcgcattctgcgcggcctgtcgcagcaggaggtggccaataagctcgggattagccagtctgcggtttcccagctagaagctatcgactcccgcccgcaaaagcgcactcgcgaaaagctggcggccatttacggttgtacgcaggagcagatcagcctgtatctgccgaaagagggttaa

SEQ ID NO: 174857 - DNA, 294 bp, Klebsiella oxytoca
atgctcatctggtcaaaagtggcaaaaaaggaactggcaaatatcgattatcgctatcagcagagaatcaaaagcaggctagcggatttaggtgaccgtacggctcctcggcccgatgtcagaaagttatctaaaccagagaatcattaccgtcttcgggtaggggattatcggatcattttcacacgtcaggggctgacgctgaacgacctgtttatcgtatccgttaagcgcagaacctcaacaacctatttgcatgaggagaatatgccatatggctgttcagataattaa

SEQ ID NO: 174858 - DNA, 1089 bp, Klebsiella oxytoca
atgagtcatagcgatatccgcgtggtccccggccccgccaactactattcccatcccggcagccttgcgcggctgcaggatttttatagcgaagaacagctttcacgcgcggtgtgggtttacggcgagcgggctatcgcaggcgcccaggcttttctgccggcagcgtttaacgctcccggagccaaaaaaatcctctttaaaggccactgtagcgaaagcgatgtcagcgagctggcccgcgcgtccggcgacgatcggtcggtggtgattggcgtaggcggcggcgcgctgctggataccgcgaaggcgctggcccggcgcctcggcctgccggtggtggctatccccaccatcgccgccacctgcgcggcctggacgccgctgtcggtgtggtataacgatgccggtcaggcgctgcagtttgaaatcttcgacgatgccaactttctggtgctggtggagccgcgcattattcttaacgcgccggcggaatatctgctggcgggcatcggcgatacgctggcgaaatggtatgaagcggtagtgctggctccgcagccggagacgctgccgctcaccgtgcgccttggcatcaacggcgcgctggccatccgcgatgtactgctggaaagcagcgaaaccgcgctggccgaccagcaacgcggcgagctaacccaggctttccgcgacgtcgtggatgcgatcgtcgccggcggcggtatggtcggcgggctcggcgagcgctatacccgcgtcgccgccgcccatgcggtgcataacgggctgacggtgctgccgcagaccgagaagtatcttcacgggaccaaagtcgcctacggtattctggtccagagcgccctgctcggccaggacgacgtgctggcacagctggtgcaggcgtatcagcgctttaatctgccaaccaccctggcggcgctggaggtggatatcaataaccgcgaacagctggataaggtgattgcccataccctgcgcccggtggagtctatccattttctgccggttgaactgaacgccgaaaccctgcgcgcggcgtttgagaaggtcgaacgtttcgccggttaa

SEQ ID NO: 174859 - DNA, 1503 bp, Klebsiella oxytoca
atgaccggcaatcgccttgagatgcaaaatattagcctggccttttccggctttcgggcgctcagcaacgtggcttttaccctgcaagggggctcggtgcatgcgctgaccggcgctaacggcgcaggcaagtccacgctaatggcggtgctgtgcggcacccacgcccattacgaaggcgaggtggtgattaacaaccagccggtgagcattcgctcgccgcgcgatgctaaacagctggggattcatctggtgcagcaggaggtagacgtggcgctggttccgggcctgagcatcgcggaaaacatcatgctcgacaggctggcggaaccggggctcgccttccgctggggacggctgcgccagctggcgcgcgaggcgttggctcagcttgacgtcagcctcgacgtgcgccgctccatcgacagctgcacgctggcggaaaaacagcaaatcctgctggctcgcgccctgtcgcatcactgccgctttcttatcctcgatgagccaaccgcgccgctggaccaaaacgaaagcgagcgcctgtttgcggtggttcgccgcctgcaacagcagggccttggcattgtgtttatctcgcaccgcattcatgaattaaaagccgtttgcgacaccctgacggtgctgcgcgacggccgactgattgagagcgggccgatggccgatctcagcggcgaacagatcgtcgagagaatgctcggtcatgagctgagcgatatcttcccgccgaagcggccgccccatagcgatgaagtgctgctacaggtggaagggctgcacgacgaagggttattgcaggatatctccctgcgtttgcgtaagggagagattctggggatcgccggactggcaggctccggcaaaaccgaactgtgcaaggcgctgtttggcgccagcaaaagtcgtttgacgcgcggcgaactgaatagccagccgtggcgaccgcgcgacccggcggactcggtagcgcgcggcctggcgctggtgccggaagagcggcgcaaggagggcatttttatcgaggagccggtggcgatgaatctggcggtcagcgccgatagcagcttctcccgctggagcctgtttggccatcgtcaggcctggcgctgggcggaagaggtgattgcccgcgtaggcattcggacttcaggcccggcgcagagcctgcgccggctctccggcggtaatcagcaaaaggtagcgattggcaaatggctgcgcggcaacgccaacgtcctgattttcgatgagccgaccaaaggggtcgacgtcaaagccaaaacggatttattcaatgtgatcgacggcctggcgcgggaaggcaaaggggtgatttacgcctcgggcgaattcgccgagctggtcggcctgtgcgatcgcatctgcgtgctgtgggacggacgcatcgtggcggaaattgcgggcgcggaggcccgggaagaaaacattctttattactccaccggaggagcagcagcgtga

SEQ ID NO: 174860 - DNA, 999 bp, Klebsiella oxytoca
gtgagtaaagccctggcagttaacgcggcggtttctggccgtcagcgatttttcgattttctctacaaatggggcatgttgctgaccgtcgtcctgctgatcgccgtttttggtctggcatcggacaacttcctcgacccgtttaacatcatcaatatcctgcgatctatcgccatcgtgacggtgatcgctatcggcgtatcgatatccctgaccatcggcggcttcgatttgtccgtaggctccaccgcctcgctggccaatgcgctggtgatttcgctgtttgtctggcacggcttcggcaccaccgaggcaattcttgtcaccctcgcgctctgtaccttagtggggctgttcaacgcgtttctgattgtgatcctgcgtatacccgacatgctggcgacgcttgccagcctgttcgtgattcagggcgtggcgatgacttacagctacggcgggtcgatcaccgaaaatatggtgctgccgagcggcgatatggcggaaggcgcgattccggcggcgtttggttcgctcggacaggtgccgacgatagtcatcattatgctggtggtgaccgttgtcgcccagctggcgctctccttgaccactcacggccggcggatgtacgccatcggcggcaatccggaagcggcgcgcctctcgggtctgcggatcacccggtacaaagtcgccgcttacgtgatcgcctccctgctggcggggctcggcggcattctgctggcgtcgcgcatcggctcatcgcaggtgaacgccggcggcggctatctgatggatgcggtggcggcggcgtggattggcttctcgctggccggttccggtaagccgaacgcgctcggtacgctggtgggggcggtcattttaggcgtgctctccaatggactggtgatgctctcggttccctattacgcgatggacattattaaagggctggtgctggctggcgcgctcgcactgacctattttcagcgccgtacctaa

SEQ ID NO: 174861 - DNA, 1065 bp, Klebsiella oxytoca
atgaaaaagataacgctttcactcatcgcgctgggattgtttaacgcgacggcagcttttgctgaaaccccggcgccgcttccgacagcgatcgccgaccatagcgggccgattcgcattgcggtgatccgcaacctgggctccgacgataacaccacccagtttgtctccggagcggtccaggagggcaaaaagctcggctttaaaatcagcacctttctcagcaacggtgatgacgccaaattccaggacttcgttaaccaggcgattagccagaaatacgacggcattattctttctcagggacgcgatccctacgccaccgcgctggtgaaaaaagcggtggacgccgggatcaaagtctcggtcttcgataccgcggtaaacggtcagatcccgggcgtcaccgtcacccagcaggatgacgcttccctgaccgagctctcctttggccaactggtgaaagatttcaacggcaaagccaatatcgtcaaactgtgggtcgcgggtttcccgccgatggagcgtcgccaggcggcttatcagacgctgcttaaacaaaatcccggcatcaaagagctggaatcgatcggcgccgtctcatccgatgtgcagggcgatacggccaacaaggttggggcgatcttagcgaaatacccgaaaggtaaaattgatgctatctggggaacctgggacgcgttcagccagggcgcttataaagcgctgaaagagaacggtcgcagcgagatcaaactctacagcatcgatatttctaaccaggatctgcagctgatgcgcgaatccggcagtccgtggaaggtgagcgtagcggtggatccgaagcttatcggcgccactaacgtgcgtctgatcgccaataagattgccggcgaaccaacccctgcaacctacgactttaaagcggcggcgattccgcaggcgctgctggcggcgcagccgggagcggtcaacgtcgcttcgctgggtaaaattattccaggctggggccagactgaagactttatcgccccgtggtttgccactctcgaagcgaaaaacaaataa

SEQ ID NO: 174862 - DNA, 1242 bp, Klebsiella oxytoca
gtggctgaattaccgcgcccggaatacagccgcaatatgcggctgattggacatagcgatcagggaggacgcccggacggcgtccagctgatggtacatcggggttatgcctatattggccatatggtatcgcagggcttttccgtagtggacgtacgtgacgcgaaaaatccgcgaacggtcaattacatcgccgcgccacccggtacctggaacgtccatttacaggcgcacgacgatctgctgctggtgatcaacgcccgggatctgttcgccgatgcccgcttcgccgacgagaaggtttattacacccgttcggtgggcgagacagtcagcgacgtacgggagaagggctggagcgccgggctgcggatttttgatatctccaccccggataaaccgcaagagatcgcctttctgtcgcttaacggcatcggtattcaccgaatctggtacgtcggcgggcgctgggcctacgtttccgcgctgattgacggctttagcgactatattttcctgactatcgacctggccgacccgcgtaagccggaagttgccgggcgctggtggctgccggggatgaaccaggcggcgggggagaccgcgcagtggccggaaggtaagcgctatgccctgcatcacgcgattatcgccggcgacaccgcctacggcagctggcgcgacggcggcctgaccctgctcgatgtgcaggatcgctctcagccgaagctaatcagccaccgtaactggagcccgccgtttggcggcggtacccacaccgcgctgccgctcccggaccgggatctgctggtggtgcttgatgaggcggtactggataaccagcaggatggggagaagctgatctggctgttcgacattcgcgagccgacaaatccggtgagtatcgccactttcccgcagccggatgaagctgattacgtggcgaaaggtgcgcacttcggtccacataacctgcatgagaatcgccccggcagctttgtcagctcaacgctgattttcgccacttatcagaacgcgggcgttcgcgcttacgatatttccaacccttatcggccggtggaaaccggggcgctggtgcccgccgcgccggcgaaaatgatggatacccgccccggtcgtccgcgggtgatccagtcctgcgatgtgttcgtcgacgctcagggaataatctacagcaccgactataacggcgggctgtcggtgattgagtatctggggtag

SEQ ID NO: 174863 - DNA, 1200 bp, Klebsiella oxytoca
atgtcgcaataccatactttcacggccagcgatgcggtggcttacgcccaacaatttggcggtatcgataatccgacagaactggtgtccgcgcaggaagtgggcgatggcaacctcaacctggtgtttaaaatttttgataccgagggcgtgagccggattatcgttaagcaggcgctgccctacgtgcgctgcgtaggagagtcctggccgctgacccttgaccgcgcgcgccttgaggcgcaaaccctggtggctcaccatcagcactgcccgcagcacacggtgcggattgtgcatttcgatcccgagctggcggtgatggtgatggaagatctttccgatcaccgcatctggcgcggcgagctgattaacaacgtttactacccgcgcgccgccagccagctgggggaatacctggcccaggcgctgttccacaccagcgacttttatctgcatcctcacgagaaaaaggcccatgtggcgcaatttatcaaccccgagatgtgcgaaattaccgaggatctgttctttaacgatccgtatcaggttcatgagcgcaacagctatccatcagcgctggaaaccgacgtcgccgccctgcgagaagatacccagctgaagctggtggtggccgcgctgaagcaccggtttttctcccatgccgaagcgttactgcatggcgatattcatagcggctcaattttcgtcgccgaaggcagctttaaggccatcgacgccgagttcggttttttcggcccgattggcttcgatatcggcaccgccatcggcaacctgctgctcaactactgcggcctgcctgggcatctgggcattcgcgatgccgccgccgctcgcgaacagcgcctcaacgatatacagcagttctggaccacctttgccgagcgtttccaggcgctggcggcggagaaatcccgcgacgtggcgctggcctgccccggctatgcctccgcgtttctgaaaaaagtgtgggccgacgcggtcggcttctgcggcaccgagctgattcgccgcagcgtcgggctatcgcacgtggcggatatcgacgctatcccggacgaagccatgcgtcatgaatgcctgcgccacgccatcaccctgggtaaagcgctgattgtgattgccgatcgcatcgacagcgtggatgagctgattgcgcgaattcgccagtacggttga

SEQ ID NO: 174864 - DNA, 1029 bp, Klebsiella oxytoca
atgcagacactacagaccaccagcctgcgggtaagcgaaaatcagctctttattcttgaccagcaggccttaccgcaggaaaaacgctggctggcggcggataacgtcgaattgctggtggaccatattcacgccctgcgggtacgcggcgcgccgttgattggcctgtccgccagcctgctgctggcgctgctggcccggcgcggtctgacccgcgatgcgctatctgaggcgctggagacgctgcgcgccgcgcgtccaacggcggtgaacctgatgaataatctggatcgcatgaagctggcgctggcggaggagcactatccgcaggcgctggaagcggaagcgctgcgcctgatcgccgaggataaacagctttgcgccagcatcgccgaggcgggcagcgcgctggtgacgccgggtagccgcctgttgacccactgcaataccggcggcctggcgacggcgggcgtcggcaccgcgctgggagtgattgcgctggcgcatcagcaggggaaagtggcaaatgtctgggtggatgaaacgcgccctctgttgcagggcgggcgcctgaccgcctgggagctgggtgagctgggggtgccgtatcggctgattaccgattcgatggccgccagcctgatggcgcagggccaggtcgacgcggtttgggtgggcgctgaccgtattgccgccaacggcgacgtagccaataaaatcggcacctattcgctggcggttctggcaaaatatcaccagatcccgttttacgtagccgcgccgcaaactaccctggatcgccattgcccgaacggcgcggcgatcccgattgagcagcgggcagccgccgaagtcaccggcgtcgccggcagctttggcgcggtgcagtgggcgccgaaagaggctgcggtttacaatcccgcgttcgacgtcacgcccgcaacgttagtcagcggctgggtgctggatagcggcgtggtcaccccggagcaggtcgccgccggggcgttcaaaccagaaaaagcctga

SEQ ID NO: 174865 - DNA, 1269 bp, Klebsiella oxytoca
atgatgcctgtacgacatcaggttttgctacgcctgctgcttgcctgcgctctgccgctgctggccgcaccgggccatgccgccacgcagtatgcgctggaaaaagtggttgaactcagccgccacggcattcgtccgccgacggagggcaaccgggaggccattgaagccgcgacccagcgtccgtggacgcagtggaccacccacgacggcgagctgaccggccacggctatgccgccgtcgtcaataaggggcgcgatgagggcgcgcgctttcgccagctggggctattgacggcaggctgcccggcgagcggtgagatttatgttcgcgccagccccctgcagcgtacgcgggccaccgcccaggcgctggtggacggcgcctttcccggctgcggcgtaatgattcatcacgtcagcggcgacgcggatccactgtttcagaccgacaaatttgccgtcacgcaaaccgatcccgcccgccagctggcggaagtgaagaagaaggccggcgatctggcgcagcgtcggcaggcgctggctccggcaattcagctgctgaaaaacgcggtctgcgtacccgataagccctgcccggtgtttgatctaccgtggcaggtggagcagagcaaaagcggcaaaacctcgattagcgggctgagcgtgatggccaatatggttgagacgctgcgtctggggtggagcgagaacctgcctctcagccagctggcgtggggccatattacccgttccagccagataaccgccctgttgccgctgctgacggagaactacgatctgagcaacgatgtgttttataccgcgcaaaaacgcggctcgattctgctcaacgccatgcttgaaggggtaaaagagagcgccgcgccgaacgtgcgctggctgctgctggtggcgcacgatacgaatatcgccatggtgcggacgttaatggactttagctggcagctgccagggtacagccgcggcaatatcccgccgggcagcagcctggtgctggaacgctggcgcgatacccgcagcggtcagcgctacctgcgcgtctacttccaggcgcaaagtctggacgatttgcgccgcctgcaaacgccggatagccagcatccgctgctgcgccaggagtggcgtcaggcgggctgccagacgaccgatgtcgggacgctgtgcccttaccaggcggcgctgaccgcgctgggccgcaatatcgatccgcagtccgctccggcggtggagatggtgctgccataa

SEQ ID NO: 174866 - DNA, 1362 bp, Klebsiella oxytoca
atgtctggaagaattatcgcattttttcgcgcttcgccgcccaaagcgggcggagagttcgatgagcggcgctttcgcagcgtgcgctggcaaacctttattaccatgaccctggcgtacgtcacgttctacgtttgccggctatcgttcaccgtcgccaaaagcgcgctggtggaactcggcataaccccaacggagctgggcatgatcggctcaacgctatttttcagctacgccatcggcaagctggtcaacggctttattgccgatcatgccaacgtagtgcgctacatgagcctcgggctactgctaagcgccggaatgaacctgatgatggggatgaccagcaacgccatgctgctggcaatcttctgggggattaacggctgggcgcagtcgatgggcgttggcccgtgcgtggtatcgctggcgcgctggtacggctgtaaagaacgaggcactttttacgcgatctggtcaacggcgcataacatcggcgaagcgatgacctatatggtgatcgccgcggtgattgccggattcggctggcagatgggctacctgtcgaccgccgcgctcggtgccgccggggtggtgctgatgctgttgtttatgcgcgactcgccgcaaagctgcggcttcccgcccatcaacgtcattcgcgatgaaccgcaggaggagacggaagcccgcggctcggtatttaaaaaccagctgctggcgctgcgtaacccggccctgtggacgctggccctggcctcggcgtttatgtatatcgaccgttacgcggtgaactcgtgggggatcttctttctggaacaggataaagcctactctactctcgaagcgtccgggattatcggggtcaacgctatcgcgggtattgcaggaaccattatcgccgggatgctctccgaccgctttttcccgcgtaaccgcagcgtgatggccgggtttatcagcctgctcaacaccgccggcttcgcgctgatgctctggtcgccgcacggctactacaccgatattctggcgatgattatcttcggcgccaccatcggagcgttgacctgcttccttggcggactgatcgcggtcgatatttcatcgcgtaaagccgcgggcgccgcgctcggcactatcggtatcgccagctacgcgggggcgggactcggcgagtttctcaccggcatcatcatcgataaaacctcaatgatcgaaaacggcaaaacgctatatgacttcagtacgctgtcgctgttttgggtaggcaccggcctcgtgtccgcgctattctgttttaccaccgctgcgattgtcgccaggcgacacgcgatagaacgtcagacctcattctcgtcataa

SEQ ID NO: 174867 - DNA, 810 bp, Klebsiella oxytoca
atgaaatcactggaattacatgaactgcaggcccgctaccgcctggcctgcgagctggcgcaggccggcgcggaactggcgttcgaattctatcagcagcgcgaccggctggcggtggatcataaaggcgatgacctgcaggacgtggtcagcgtcgccgataaacaggtcgaagcgtttgtgaagcagcgcattatggacgccttcccgcaggacggctttctcggcgaagagagcggaacgcagatgccggacgcccgcgtcctgtgggttgtcgatcctatcgacggcaccagctgttttcttaacggcctgcatacctggtgcctgtcgctggctatcgtcgccgacggggaaccggttatcggcgtggtgtacgaccccaaccatcgcgagctgttccacgccctgaaaggccagggcgcatggcttaacgatgcgcctgtcgcgccgcatccgggtgcgacggtcaaagagggagtgatgggcgtcggcacctcgcaccgcgtgacgcctgcgctctttctgcccttcctcgatgcgctgctgagcgacggcgggatgtttatccgcaacggctccggagcgctgatgagcgcctgggcggcggcaggcaggcttatcggctactacgaaccgcatatgaacccctgggacgggctgccggggctggtgctgatgcgcgaagcgggcggccttagcaacgattatctggcaaacgacgggattcgtcacggcaacccgctgctgctggccagcaagacgctctacccacaattaaaaaacatgctttgtcacccattaccttaa

SEQ ID NO: 174868 - DNA, 1077 bp, Klebsiella oxytoca
gtggtaccttcttactactttttccgtgccgacgatgggctcctgcgtcggcgcgggctcactgaggacaacccgtaccctgatactatgagcgaaaaaaaatggattaaggcagaggacgttgcccggctcgctggcgtctcccgttccgcagtttcccgcacctttacccccggcgcgtcggtggcggaaaaaacccgccagaaggttctcgccgcggcggaaacgctgggctatcaggtgaatattatcgcccgcacgatgaacaccggcagcagcaactttatcggcatcgtcaccgccggatttgataacccgttccgcagtaagctgctgtcgccgctggtccaccagttggcgctcaacggttttatgccgctgctgatgaacgccgacgatccgcagcagctcgccccgtcgctcagacagttgctgagctatcacgtcgcaggcgtcattattacctccggggcgccgccgctgtcgctggcggaggagtatctggagcgaaaaatcccggtcacccttatcaaccgccacgccgacctggccggctgcgatcgcgtgtgcagcgacaacgcgcagggcgcgaagctggtcgccgacctgtgtactcagcgccagtggcgccaggccgggtttatcggcgaaagtctggataacttcagcacccgccagcgctacgaagcgtttgttgcccatagtcagggcatggagatcgccgcgcacttctgcgacagcagcggctatcaggcgggatttgccgccgccagagagctgcttgccgcgcatccgcagctgcaggcgctcttctgcgccaccgatatgctggcgctcggcgccctggacggtctgcgggcagacaacccccccgcttcgctacccgctattatcggcttcgatgatatcccgcaggcggactggcagccctatcagctgactaccgtgcagcaaaatactgccctgctcgcccaccatgcggtggatctgctggtcacgcggatcgccaaattcagtctgccgtcacgccatcgtgaagtgccggtgaaactgatcgttcgtcaaagtgcaaaatga

SEQ ID NO: 174869 - DNA, 1239 bp, Klebsiella oxytoca
atgaaaattatcaacgcgcgtctgcgccagcaagaagcgctttatacccttgagctagaggacggtctgtttaagagcatcaccgcgcagaccgccgtgcagacggctgacgccgacgatatcgacgcagagcaaaagctggcgatcccgccgttcgtcgagccgcatattcatctcgatgccaccctgacggcgggcgagccggagtggaatatgagcggtaccctgtttgagggcatcgcccgctggagccagcgtaaagcgagcgtcaccgtcgaagatacccgccagcgggcgctgaaaaccatcggcatgctgcgcgacaacggcgtgcagcacgtgcgtacccacattgatgttaccgacccttccctgaccgcccttgaggcaatgctgagggtgaaaaaggaggcggctcatcttatcgatctgcagatcgtcgccttcccgcaggagggcattgagtccttccccggcggacgcgagctgatgacccgcgccatcgaaatgggcgccgacgtggtgggcggtatcccgcactacgaaaacacccgcgataagggcgtcagctcgctggtttttctgatggacctggcccagcgccacggctgcctggtggacgtgcattgcgatgaaaccgacgatccgcagtcgcgctttctggaggtgctggcggaagaggcccgggtgcgcggcatgggcgcgcaggtcaccgccagccatacctgcgctatgggttcttacgataatgcctactgctcgaagctgttccgcctgctcaaagcgtcgggcatcaactttatctcctgcccgaccgaaagcattcacctgcaggggcgcttcgacagttggccgaaacgccgcggcgtgacgcgggtggcggagctggaccgcgccgggatcaacgtctgcttcgcccaggactccattcaggacccgtggtacccgctgggcaacggtaacatcatgcgcattctcgacgccgggctgcatatctgccatatgctgggatacgaagatttgcagcgctgcctcgatctgattaccgataacagcgcccgcacgctgtgcctcggcgataactacggtattgccgaagggcgcccggcgaacctgctgatcctcgatgcggaaaacgactatgacgcgctgcgccgccaggcaaaagtgctgacctccattcgtcacggcaaaatcattttgcagcgccaggcggagcagattcgctatccggcataa

SEQ ID NO: 174870 - DNA, 1236 bp, Klebsiella oxytoca
atgagcctgacggtgggcgaaatcctcgcccttgatgggctttccgccatgcgcctgcgcgccggtaagcaggggctacagctggcggtgcgctggtactacgtggcggaaaatgaaaatatcgccgaatggattatgggcggggagctggtgttcatcaccgggatcaaccatccccgcgatgaagacaacctgatccatttgctgatggagggcaagcagcgcgggattgccgggatggtgatcctcaccggcgatgcgtacattcaggcgatcccgccgcgcctgattgcgctggccgatgaactgggcataccgctgatcgaacagccctatctgctgaagatggtgatcgtgaccgaacgcatcggtaccgcgctggtgcgcagcgaaaacgccctgcaatcgcagcgcgatattctgctgcagctgttaaccggcgactttcccgacctgcaaattctgcatcagcgcgcgctccaccagcagctggactttacccggccgctacgggtagcggcgctgcggctggaaggtatccaacgcctgtttcgtcagtttccgccggagcaggccgaggcctggctgcagcaggcccgccgcaccgtacgccagcgcctgcagcagcagctcaatcagcagggcaatccctttccgctggtcgagcgcggcaatatgtttctcttcctgctgccggatgaagagggcgagttttatcagcagaaaacgtggctccagacgtggctgcatgcgctggcggagggcgacgacgggctatcgctgctgtgcggcctttcggcgccggtgcagcagctacaggaatatcagcgcgcgctgtcgcaggcccgtcaggcgctggacctcagcgatagcctgcgtccggcccagcgcatcagcgactaccagcaattgggctttatcaagctgctctccgccgtcggcgacccagggctactgagcgattttatgcacgataccctcggctgtctgatcgaacccgatcgcaaaagcccatggctgctgatggagacgctggaaacgctgcttcaggagagcggcaacgtggtccgggccgccgagcggctgggtatccaccgcaacacgctgcatcagcgtatccaacgcattgaaaagctgacccgctatccggtcagccacccgcagtttcatctcaacgcctcggtcgccttagcgatctggcgtatgtcgcaaaaccatttacgggaacaaccatga

SEQ ID NO: 174871 - DNA, 1263 bp, Klebsiella oxytoca
atgtcaaacagcaatgattttccactcgtcgaagcgcccgcttccgggcgcaagggcgtattttccatctcgatggttctgttcagctttacctttttcaccggcaccatgttcgcgggcggcaagctgggcgtctctttctccatcgttaacctgctgtggattgcggtaatcggtaactttctgctggctctgtacgccgcgtcgctcggctggattgccgcgcgcagcgggctaaataccgtgctgatggggcgtttttgcttcggggaaatcggcagcaagctcgccgattttatcctcggtttcgccgagctgggatggtacgcctggggtacggcgacggtcgccatctcgctggtcaaaatcctcgcccttcctgaggcgctgacgactccgctgatgatcctgttcggtatcctgttttgcgtcaccgcgctggtgggctacaaggggctggatgcgctgtcgcgcgtatcggtgccgctgatgtttattctgctggtggtgtcgatgtaccttgccgcccatcacgccggcggctggcaggcgatgacccaaatcgaacccggcgaaaccatgagctggtctgcggccatcaccatggtattcggcacctttgccagcggcgcgacccaggcgaccaactggacgcggctggccaactccagccgtaccgccatcgtcgccagcatgagtagcttcctgatcggcaacgggctaatgattatcgccggcgcctggtgcgccatcgtttaccagcaggctgatatcgtggaagtgctgattttgcaggggctgtcggtcgccgcggtggtgatgctgtgcctcaatctgctgaccattcaggggccgacgatttataacgtctcggcggcggcctgccatctgctgcgcagcgagcgtcgccgcaccctgaccgtagtcgccgccggggtcggcattctgctggccattggcggtatgtatgaaatgctgattcctttcctggtgctgctgggcagcatcattccccccatcggcggcgtgatcctcgccgactactggttttatcgcggcggccgctacccgctgctgcacaccacccgtttgccgcgttttaactggctggggcttagcgcctacgccgtgggcgcggtggtggcctacctctcgccgtggatcgccccgctggtcggtatcaccgtttccgcgctggtctatatcgcgctgactcgtctgagcaaacgccagcccgccgctgattccgtcgtggaacagtag

SEQ ID NO: 174872 - DNA, 612 bp, Klebsiella oxytoca
atgtggcaagaaagactcgcgcaactggtcaccacctgtcattggatcggtgcgaaaggttgggcgcccgctaccggcggcaatatgtcggtgcgtcaggatgagacctggtgctggctgagcgagtcggggcgcgataaaggtagcctgacgacggaggatttcctgcaggtggagatcgccagcaataaagcgccttccgggcgtaaaccctcagctgaaaccggcctgcataccctggtgtatcgcctgttcccggaagcgaatgtcgtactgcatgtgcataccgtcaacgcgaccgtgctgtcgcggattgaaaaaagtgccaccctggcgctacagggttatgagatgcagaaaaccctgaccggccagcacagccatcttgataccgtgccggtcgccatttttgataacgaccaggatatcgacgccctggcggcgcgcattgaagattatgcgcagacccacccgctgcgctacggcttcctgctgcgcggccacggcctgacctgctggggcaaagatattcccgaagcccgtcgccagctggaaggactggagtttcttttcgaatgcgagctgatgcgccgccgctacgagcgcgactaa

SEQ ID NO: 174873 - DNA, 1497 bp, Klebsiella oxytoca
atggatttttatctcggaattgatatcggcacttcgcgcgtgaaggcggtgctgtttgatcaacattttcaggcgtgcgccagcgcggcgcagaacaccggcccgcgcctgtcggccaacggtgaagccgaacaggatatggcccagctgtggcagtcggtggtggcgattttgcgcgatatcgcgcggcatccggcgctgcaaaacgggcgtttacgcgccattggcctcgccgggcagggggagggcgtctggctctgcgacgccgagggcgaaccggtcgggccgggtatcctgtggagcgacacccgcagccgggaactgatgaacgaactcctcagccgccccggttttgaccgccgtttctttgacgataccggtacccatcttcagccctgcaacaccagcatgcagctgtgctggctcaagcatcatcagccggagcggctggcggcggcccgctatctgttcttcgccaaggattggatccgctttcgcctcaccggcgtcgcggcgctggatctcaccgatgccagcacctctttgctgaatcagcagagcgggaagctatccgcggtggtgctcaacgagatggggctggcagatttacaacctctgtttccgccgctgctggcgccggacgcgcaggctggcgcgctgcgtgaagaggtcgcggcgctgaccgggcttcccgctgccacaccggtagcggccggcgcgctggatgtctgcagcgcggcgctgggctgcggcgcggtcaatgatggcgacatttatactattctcggcaccacctgctgcaccggcatcgtctgtcacggtcgccagacggtcaatgaggggacgcgctacgttacccacaccgaagcgggcagctttattaacctttttccgatgcaggccgggacgccgaacatcgactggctccagcagcagatttcgctggatccggatttacagcagctggaacagcatatcgccagcgtcgaaccgggcagcggcggcgtcttctggcagccctatctcaacggcgaacgcgcgccgttcttcagcccagaggcgcgggcaggctatttcggcattagccagcacactacccgcgcagagctgcagcgggcggtatttgaaggtctggcttacgctatcgtcgactcgcttcagggctacccgcagggcggcgaactgtacctgaccggcggcggcgcggcttcagcgacctggttgcaaattattgccgactgtaccggcagaacggtggtttccagtactttcaacgagcttagcgcgcgcggtgcggcgattctggcggcgcgcagcgttgatgccctcagccgctatccggcgctggagcagacccgctatcggcccaatccacaggcgcacagccgctacgtcgcgctctatccggtttatcgcctgctacgcgagcagatgctgccggtgtggcacgcccgccgcgaggcgcttcaacgtatttctcaggaacaacgcatatga

SEQ ID NO: 174874 - DNA, 1029 bp, Klebsiella oxytoca
atgaaaattgtttttaccgccgaacacgccggcgacctcagcgcttttcagcaactgggcgaactgcgggtggaaggctgggcgctgggcaagccaaagctgagcgcagaccaattgatcgagctggcccacgacgccgaggtgctggtgaccagctacgatgaggtgacggaagcggtgatcgccgcctgtccgcgtctgcaggtgatcgcctgcacgcgcgccaatccggtgaacatcgataccaaagccgccctggcgcgcggtatccgcgtgctctatacgccggggcgtaacgcggacgccgccgccgagctgacgctggggctgatgctgagcctggcgcggcatattccgcaatcgcacgcggcgctgaagcgcggcgaattcacccacgccgaaaacgcggcgcaggccacccagagcggactgcgccgcgatgtggtgtgggacgtcagtccgcaaagcccttatgaagtgtttaaaggcagcgagctgcgtaacaaaaccctggggctgattggctacggtaatattggccgccgcgtggcgcgcatcgctcgcgcctttggcatggcggtgctggtggtggacccgtttgtcgccgccgaagagattaacgagccggggctgcaaaaaacgacccttgagggactgttccgcgaggcggatatcgtaagtctgcatctgagcagcggcccgcacagcgatggcctggtgaacgcggcgttgttgaatagcatgaagccgggcgcgctgctgattaatacctcgcgcgcggcggtcgtggatgaagaggcgctgattcatgcgctgcgccacggcccgctgggcggcgcggcgctggatgtctaccatcgcgagccgctgtggcgcgatcatccgtttgtcaccgagttgaataacgtcattatcaccccgcatattgccggggcgacgcgggagagcatcgctaagcatacggcgatgattgccgccgaccttcagcgctatgtcgccggcgagccgctgctctatcagtggcgttaa

SEQ ID NO: 174875 - DNA, 945 bp, Klebsiella oxytoca
atggcagcttttgacgccgtctttgtcggcctgactattctggatatcgccggtcgcccggtgatcgacatcccgccgcgtggcggggtggcctttatcgaacaaattcgtctgaaccccgccggaaccgccgccggagccaatattaatgccgctaagctgggcattcgtaccgctgcggtggcctgcctcggcgaagatgaaaaggccgattttatactcgccagctatgcgcggctgggaatcgactgttcgctggtccagcgtaccgcgcagcaggaaacgtcggcgacgatcctccctatccgccccaacggcgagcgcccggcgctacactgtcggggcgcttccgatacgctttttatccgcgaagaggagtttgctgccgtcctcgactgccgcttcctgcaccacggcggcactggcctgctggcggcgatggatcgcgggcagagcgcccttctgctgcaagcggcgaaggctcgcggcgtcaccaccagcttcgatttgattgcccccaatgaacataccctggaactgctgcgcccgctgctgccgtcggtggactactttatgccctcccttgaagaagcggcgtatctctccggggagacccagccggaagcgatcgcccgcttcttttttgcccttggcgtcgggacctgtattttgaaggacggcgagaacggttcctggctgctgacccgcaacggcgccgttgaacatatcccggcgtaccgggtcgatgccgtggataccaccggctgcggcgacagctactgcggcggctttattgccgcgctggcccgcgggctaagcgtcagacaggcatgcgaggtggcttccgccgtcgccgcgctggtggcgaccgggatggggtcggatacaggggtggtggactggccgcatacccggcagtttatggcggcaaaccggcgcggttaa

SEQ ID NO: 174876 - DNA, 1002 bp, Klebsiella oxytoca
atgagccagatgacgctcaagacccccgctacgggacaaaccggcagcagcccgctggcgtggctatcacgggcagggttcggcatcattaccctgctggcgattgccctgttcggctgggcgaacccggtatttctgaccttcgacaactgggccaatttgctgcagggcagcgcgattctgctgatcgtggcgatggcgatgacccttatcgttagcgccggagcgattgacctctccgtcggcgtggcgctggatttcggcgccgcctttgcgctggtggcgctgaaaacctggcacctgccgtggcaggcggcggtgggctgcgcgctgctcggcggggtgattatcggcctgctgaacgccttcctgatccttgtctgccagattcgcccgttcctcgccaccctcggcacctggtttatcgccagcagcgccgagcgcatctataccgacggcggcggctctatctcctaccgccggatggcgccggagtatcacgatctggccgtcggcaccgtcgccggaattccgacgccggtggtgatagttctggcgctgtggttggcggcctggctgctgaccgaacgcacgctgttcggcaagtacgtgcgcgctatcggtcagaacggcgaagcggcgcgtatcgccgggatccgcgaccgccggaccatgctgtgggtgctggtagcggcctccgcgctgtgcgccgtcggcggcgtcattctctccgccaacctgcgccagtttacgccgctggccggccaggcctacctgatggatgccatcgctgcggtctttatcggcaccgcctttaaccggctgggccgggtcagcattgccggcaccctcggcggcgtgctgttcctcgccattattgataacggcctgaacctgatggggctgaactacctggtgaaagatgcgctggttggcgtaatcctggtggtggcgctggccctctccttctggcaggcgcgtttgcgccagacccaccgttaa

SEQ ID NO: 174877 - DNA, 987 bp, Klebsiella oxytoca
atgagtgcagatattcagcgccgtccccttccgggcatcacgacgcttatcgaaaaattccccctgattctcttttttgcgctgctggtctggctcagcctgcagtcgcctttctttttaagctggcagaatatcagcatgatgctggtgcagagcgtgccgctggcgatcctctgtttcggcctggtctgcgtgattgccgtcggcggcgatgacgtggtttccggcggtatcgatctgtcgctgcccgccatcgcggtgctcggcgtcgcgttactcagcctcggtatggcggagtggaacaccccttacctggcgctgattctgctgctggtcgccgtgagcctggcctgcggcgcggtcaacgccgtgctggtgctggcggcaggcctgccgccgctgctggcgaccctgtcgacctcggtagccttcaccggcctgaccgacctgctgaccggccagcgacgcatcgcggtaagcgatccgctgatggtggcctttcgcgataacgctctctttggcattccctggccgcttctctatctgctggcggtcttcgcgctgtttcagcttttgctccaccactcccgcttcggccagcatttacaggcggtgggcggtaaccgcgatatggcgcagatgagcgggctcaacgttcgccgtttaacccttctcgtctggctgctggcgggcctcgccgccggtctggcgattttaccgctgctcagccagggctcaggcagctcgagcggcacggcgacgccgctactgctggaaaccgtccttgccacttttatcggcgcggcgttctcgcggcgtcgcgtggtcaccatctggggagcgctgctcggcgcggtgctggtcaacgcgctctctaacgggctcggcctgctgggagtcaatattttctggatgggcgcgatcaaaggcggcctgatcctcgtggtgctggcggcgtcagcggtcagacataaaggaggcaactga

SEQ ID NO: 174878 - DNA, 1554 bp, Klebsiella oxytoca
gtgatcactcaatcctccggcggggcgaatcccgccgctggtctggcgatgaaccagatcggcaaaagctttgccaacgtgactgcattaaatgcggtcacgctgcttctgaatcccggtgaaattcacggtctgattggcgaaaacggcgcgggaaaatcgacgctgataaaaatcctcgccggggtctaccaggccgatagcggcagcgccacccttgacggcgcgccgctgccgcttggcaatccagcggcgattgaagcgctgggtatccgcgtcattcaccaggagctcaacctgatcccccactttacggtggcggaatcggtgtttctcggccaggagtaccgcacccgctggggcgcgctggaccggcggcggatgaatgccgccaccgaagcgtttttccgcgacagctggcagctggacatcaatccccgccgcctgattcgcgacctcagcctcgccgaacgcaagctggtgcagatcgccagggcgctgattgacggcgcggcaaagctggtggtctttgatgaacccaccgcgccgctggaagcgcaggaggccagcctggtttcctcagcgattttgcgcctgcgggagcaggggatcggcattctctatatttcccactacctcaacgagatcgccgccctctgcgatcgcggcacggtactgcgtaacggcgaggtcgttggctatcccgaccgggcgctgctgcaggacaccgacgcgctgattaaaatgatggtcggtcgcgacatcgaacagctctataccccgcgccagagcagcgctcaacgggtagatgccgccgcgccggttctttcggttcgccatctcagcgacggcgtccatctgaatgatattacctttgatattcagccgggcgagatcgtcggcgtcgccggcctgctgggcgccgggcgcgacgtactggtcgatctgctttatgggctgcgccgcgcgcgcagcggcacaataagcatcgacggccagccgaagcggctgcgcacgccgtatcaggccacccgtgcggggatggcgctggtgccgcgcgaccgccgccatcaggggctgattctccccttctccaccgccgacaatatcaatctggcctcgctagcggagaccgccactttcggctgggagcatcgcggccgggcgctggcaaaagcgcgcagctggattgagcagctctccatccgccctggccgtccggagctgccggtgcgctttatgagcggcggcaaccagcaaaaggcgatacttgcccgctggctcggcaccgatgcgcggctttttattcttgatgaacccactctcggggtggatatcggcgcgcgcagcgatatttatcagcgcacccgcgagctggcggatcgcggtcgcggcgtgctggtctcatccagcgatgcgccggagctgctcggcctttgcgaccgcatcctggtgatgtggcgcggcgagctggtggccaatctcccgacccgggggctgacgctggacgcgctgctggtgacgattaacggtggacaggaacaacaggtatga

SEQ ID NO: 174879 - DNA, 981 bp, Klebsiella oxytoca
atgtcgcagaaaaagaaattattgcccatcgcgctgggcctgctctcgcttgcctccgttaacgctctggcagcagaggctttatcgcttcagggaaaaaccatcggtattgccgtcgtcggcacgcagcacttctgggatcgcgaagcctataaaggcgccagcgaagaggttgagaaactgggcggtaaagcgatcggcgtcgacggcggacgcgataaccaggttcatgctaataaccacgatattttactgtcgcgtaaagttgatgcggtaattagcattctgggcgacagttccgttgagcctaaatttaaagcgctgcgcgatgccggcatcccggtatttaccgttgaccatgtctcaaaatactcggtcaataacaccacctccgataactacacgctggggtcaaccattggtcgctatatggccgatgaactgggcggcaaaggcaacgtggcggtatttaacgcattctccagttccctgcgtatttgcgggattcgttacgaccagtggaaatatgtccttaaggattacccggatattcatattattcagccagagctggccgaacagttcgccaactcgccggaagatgcgcggaagaaaaccctcgaactgctgagccagtatccgaaaggcaaactcgatgcgattcacgttgcctgctgggatcagccggctatcggtattgtccaggcgctggaagagaccggccgcgataaagacgtcaaggttaccgctattgatgctggcccggagacgctggagatcatggccgagccgggtagcccgcttgtcgccaacgtcgcccagcagccgcacctgatcggccagacttcagccgataacgtcgctcgctacttcgaaaaacagaagctgccgctgcaaacctttatcccggtggtcccggtgaaaggcccgcaggaggcgaaagcggtctacaaacagctgggatatggcgaactgcagtga

SEQ ID NO: 174880 - DNA, 2310 bp, Klebsiella oxytoca
atgagaaaacaacataatctgaccgtaatgcactggggaacctggcgagtacaggccggtgacggcaaaattgaggcggtgacgccggtgccctgggataaaaatccctcgcgcattggtcagtcgctccccgatgcggtcaccagcaagacgcgcattcgccgtccggcggtgcgcgccggctacctgcaaaatggcccggcttcccgcgacgggcgcggtaaagagccgtttgttgaggtgagctgggaagtggcgctcgatctgctggcccgcgagctgcagtcggtcaaagcgcgctgcggcaatgaggcgattttcggcggttcctatggctgggccagcgccggccgttttcaccacgcgcaaagccagctgcaccgtttcctcaaatgctttggcggttataccgccagcactaatacctacagcagcgcggcgggggagcgtatcctgccgcatattctcgggccgctgagcccgctgcaccgtcagcatacccatttttccgagctggcgcgggagtgccagctgttcgtcgcattcggcggcctgccgctgcgtaatgcgcaggtcaacggcggcggcgccaacgaccatatgctgaaatactggctggaaaagatgcaggcgcaggggacacgctttatcaatattagtccggtgcgcaacgatctgagcgccgtggagagcgccgagtggctcgccgtccgtcccggaaccgataccgcgctgctgctggcgctgtgctacgtgctgattaatgaatccctctacgacagcggttttatcgccagccataccgtgggtttcgcaccttaccgcgcctacctgatgggggagagcgatggcgtcgcaaaaacgccggagtgggcggcggcgataaccggtattgacgcgcagcggattgtcgcgctggcgcgtgagatggccagccagcgtacgatggtcaatatctcctggtcgattcagcgggcgcgccagggcgagcaggcctactgggcgacggtggcgctcaccgcgctgctggggcaaatcggtacgccgggcggcgggctgggatttggctatgcctgcaccaatctggcgggggcggggcgtaaggccttttccgggccgcgccttcccgccggggagaacgcggtgaaccaggtgattccggtggcgcgcctctccgatatgctgctgcatccgggcgaagcgtatgagtttgacggccagcatctgcgctatcccgacatccgcctcgtctactgggccggcggcaacgcgtttcatcatcatcaggatattaaccgcctgtgcgaagcctggcggcgaccagaaacggtggtggtgcacgaacagtactggaccgcgcaggctaaattttccgatatcgtcctgccggtcaccacgtcgctggagcgggaagatattggcagcggcggtcacgatggttttatgatcgccatgagcgcacagatcccgccggtgggcgacgcgcgtgatgattacgccatcttttgcgatcttgccgaacggctgggctgcggcaaacgttttagcgaggggcgcgatgccgggcagtggctgagggagatttacgaagcctcgcgaccgcgcgcgcaggaagaggggattacgctgccgtcatttgaggcgttctggcagcagggagtgctggagtacagcgcgcctgagcagccgcaggtttttctggcggattttcgcgccgacccgcagcgctatccgctctctacgccttccggcaagattgagctcttttcagaaaccattgccggctttggctatcgcgagtgcccgggccatccgtggtgggatgagcaggaagcggcctggcggcggcaggaagctgcgcgctggccgctgcatctgctctccagccagccgcgtacccgcctgcacagccagtacgatcacggaagcgtcagccgggcgacgaaaattcagggacgcgagccgctgtggatgcatccgcaggatgcacaggcgcgggacatcagcgaaggcagcgtggtcaaggtctttaacgcgcgcggagcgattctcgccggcgtccatctcagcgagcagattttgccgggagtggtgcagatgtcgaccggggcctggtacgatccgctggacccgaatgaaaaaggctcgctggataagcacggcaatcccaacgtgttaaccgaggatcgcggcagctcgcgcctggggcagggctgtagcgctcaaagctgctgggtggagatcgaaccgtggcgggacgcgctgccgccggtaaccgctttcgatccgccgaggtttattgagggttag

SEQ ID NO: 174881 - DNA, 543 bp, Klebsiella oxytoca
atgagcgcattaaccatattttccgtaaacgacccgcaaaactctctctggcacagtactaacgccgaagagatccagcagcagctcaacgctaaaggcgtgcgttttgagcgctggcaggccgaccgcgatttaggcgcggcgccaacgtctgaagcggtcattgccgcctatcagcacgcgattgataagctggttgcagaaaagggctatcagagctgggatgtgattagcctgcgcgccgataatccgcagaaagaggcgctgcgggagaagtttctcaatgagcatacccacggagaagacgaagtgcgtttcttcgtcgagggcgccggtctgttttgcctgcatattggcgacgaggtgttccaggttctgtgtgaaaagaacgacctgatttcggtcccggcgcacacgccgcactggtttgatatgggctcggaacccaacttcaccgccatccgtatcttcgataatccggaaggctggattgcccggtttaccggcgacgatattgccagcgcctacccgcggctggcgtaa

SEQ ID NO: 174882 - DNA, 690 bp, Klebsiella oxytoca
atgatccgcgctatcgtgaccgatattgaaggcaccaccagcgacatacgcttcgtccacaacgtcctgttcccgtacgcccgcgaacgtctggctggttttgtgaccgctcagcagtttggcgagccggtcaagaccattctcgataacctgcgccaggagatcgcccagccggcggctggcgccgaacagcttattgctaccctgttcacgtttatggatgaagaccgcaaatccaccgccctcaaggcgctccaggggattatctggcgcgaaggctacgtcaacggcgacttcaccggccatctctatccggacgttttgccggcactggaaaaatggaagtcacagggtattgatttatatgtatattcctcaggctctgtcgctgcgcagaaattgttatttggctacagcgatgaaggtgatattactcatctgttcaacggctattttgacaccctggtaggggccaagcgtgaagtacagtcctaccgcaatattgctgaacaactggggcagcctcctgccgccatcctgtttttgtccgatatccatcaggagctggatgccgctgaagaggccggtttccgtaccctgcagctggtacgcggcgaccgcgacccggccagccatcatccgcaggttcagcgtttcgacgatattcacccggagcagatcccagcatga

SEQ ID NO: 174883 - DNA, 1161 bp, Klebsiella oxytoca
atgagcaataagccactgattcctgagagtaaactcccttcactgggcaccactatctttagccagatgagcgccctggcccagcagcatcaggcgattaatctgtcgcagggttttccggatttcgatggcccgcgctatctgcaggagcgtctggcgtatcacgtcgcgcagggggccaatcagtacgcgccgatgaccggcgtcgccgcgctacgcgaagcgattgtcaataaaaccgaagagctgttcggctatcgccccgatgccaatagcgacgtaaccgtcaccgccggggcgacggaagcgctgtatgcggcgattaccgcgctggtccgttccggcgacgaagtcatttgctttgaccccagctacgatagctatgccccggcggttgagctgtcgggcggcgtgctgaagcgcattgctctacagccgccttattttcgcgttgactggcagcagttcgccgctaccctcagcgacaaaactcgtctggttattctcaatacgccgcacaacccgtcagcgacggtgtggcagcgtgaagattttgccgcgctgtggcaggcgattgccgatcgcgaaatctacgtacttagcgatgaagtttatgaacatatctgctttgctgccgaagggcatgccagcgtgctggcgcatccgcagctgcgcgagcgcgcggtggcggtctcttcattcggtaaaacgtttcatatgaccggctggaaggtggggtactgcgtggcgcctgccgctatcagcgctgagctgcgtaaagtgcatcagtatctgaccttcgccgtcaacacccccgctcagctggcgatcgccgatatgctgcgcagcgagccggagcattatcgccagctgccgacgttttaccgcgagcgtcgggacctgtttattgatgcgctgcgttccagccgtctggaaattttgccctgcgaagggacctacttcctgctggcggactacagcgcagtctccgatctggatgacgtcaacttctgccgctggctcaccaccgagatcggcgtcgcggcgatcccgctgtcggtgttttgtgccgatccgttctcgcataagctgatacgcctgtgcttcgccaaacagccagccacgctgctggctgctgcggaacgcctgtgccgtctgtag

SEQ ID NO: 174884 - DNA, 630 bp, Klebsiella oxytoca
atgcaacgacaattaatccaggaaatagaacgctatctgcaatcgctggaaaatgaagaagaaaagattactgcgcttaacgcctttcgccagattctgcatgaatatagccccttcaaatcccaaccggttgattgcgtactgtgggtaaaacaggaagccgtttcgcctaatgattacaacccaaataaccttgcaccaccggaaaaacgcctgttgttcacctcgctggagacggatggcttcacccagcctatcgtggtgctgaaacaggggcgggagcgctattcgattgtcgatggttttcatcgtcatgaactggccaacggcaaagcggcgctgaaaaaacggctgaaaggctatctccccgtcacctgtctggaaaggagcagcgccaggcgtgattcactgatggccgccaccatccgccataaccgggcgcgcgggcgtcaccagattcatgcgatgtcggaaatcgttcaggaactggcgcgtctcggctggaccgatgagaaaatcggcaaagagttagggatggacgccgacgaagtattacgcctgaagcaaatcaacggtctggtggagatgttcggcgaccgtcaattttctcaggcgtggaccgttaaataa

SEQ ID NO: 174885 - DNA, 1155 bp, Klebsiella oxytoca
atggaaaacttctcccgcgtttgcgtctctttttctggcggtaaagattcaacaaccatgctgcatctcacggcgcagcatgcccgccaggccggtaaaaagatttgcgtcctgtttattgactgggaagcgcagttctcctgcaccattgctcattgcgaaaagatgcgcgaggagtatcgcgacgttattgagcaatttttctgggtggcgctacctctcaccacccagaactcgctaacccagttcacgccggagtggcagtgctgggaacccggcgcgccctgggtgcgccagccgccggaggatgccatcaccgatcccgactatttctcgttttatcaacccggaatgagttttgaaaccttcgtccgcgaattcgccgattggttctcgcaaaatcgtccggccgcggtaatggtcggcatccgcgccgatgaatcgcttaaccggtttatcaccatctcctcgcagcgcaaactgcgctttgccgacgacaaaccctggaccacgtcggcgccgggcggacacgcctggtatatctatcccatctatgactggaaaaccgccgatatctggacctggttcggcaaaagcggtctttcctataacccgctctataacctgatgtatcaggcgggggtaccgctgcgttatatgcgcatctgcgaaccctttggcccggagcagcgccagggtctgtggctctaccacgtcctggagcctgaacgctgggccgccatgtgccagcgcgtcagcggcgttcactgcggcggggtttacgccggtcacgacaatcagttctacggccatcgaaagctggataaacccgaacatcatacgtggaaaagctacgccctgtttttactcgacagcatgccggagaaaacggcggagcattaccgcaataaaatcgccgtctatctccactggtatcaaaaaaagggcatgctggatattccggacacccagccggcggatattggctccaaagacgtcccgtcctggcggcgcatctgtaaggtgctgttaaacaatgattactggtgccgccagctctctttcagcccaaccaaagcgactcaatataaacgctatcgcgagcggatgaataaaaagcgccagcaatggggaatactatgcaacgacaattaa

SEQ ID NO: 174886 - DNA, 912 bp, Klebsiella oxytoca
atggctaatctttacgatctcaagaagttcgatctgaacctactcgttattttcgaatgtatttaccagcatttaagtatcagtaaggctgcagaaacgctatttattacgccgtctgcggtaagccagtcgcttcagcggctacgcaaccagctcaacgatccgctattcgtgcgttcaggtaaagggattaccccaactaccgtcggcgttaatttgcatcaccacctggaaaataaccttaatcagttagaacaaaccatcaatctcaccaatcgttctgaattaaggaaacgcctcgttgtctatgcgccgcagctttttataacgcccaaaaccaccagcctgattcatatgttattagatgattcaaatctgcaggttgaacatcatgatctgctcgcttcaggtgaatcgatagaaagtttgttatcctaccggaaggccgatctgatatttagcaccacggcgctgtcatcacgagcgaccgtctgtaaacgcatccaggagctggacatttcattagtgtgtaatgaaaaccatccgcgactggcgtcgctaacgacgacaaaagccataatgcaggagcgtttcacctattatatttgtaacgatcagggtacaaaatcctttcagagtcaaactgcaggtatgctttctgacagaaaaatctctttcagcagcgattcatacatagccattcttaatgttattcaacaaacggatataattggtttcgttccgacatgtattttagaacacattagctttcagaataaattcaggatcattgagactcccttcaaaattccatctatcaatatttatatgatttacaaccgggtgaatcttgacgaccccaacttcgcaaattttatcgaagagtgtgaaagaaataatattattgaatag

SEQ ID NO: 174887 - DNA, 747 bp, Klebsiella oxytoca
atgttaaaacgactgttctttctgagcttattacctttttactgctctgcagaggagcttcccgcccccgtaaaagcgatagaaaaacagggaattaccattattaaacccttcgaggcgcccggagggatgaaaggctggttagggaagtatcaggatatgggcgtcgccatctacctcacgccggacggcaaacacgccatctcgggctatatgtacgacgaaagcggtactaatcttagtgaacaactcttccagcaagagctctatacccccgcgggccaggagatgtggaaaaagctggaaagcgctcgctggctgcttgacggtaacgaaaacgcgccgacgattctgtacgtttttgccgatcccttctgcccctactgccaacagttctggcaacaggctcgtccgtgggtagaatcagggaaagttcagctgcgcaccctgctggttggcgtcataaaaccggaaagtcccgcagtcgcggcggccatcctggccagcaaagacccggcgaaaacctggcatcactatgagcagtctggtggcaaaacagcgctaaatattcccaccagtattcagccagagcaaatgaagatacttaatttcaaccaacagctgatggacgaactcggcgccagcgtcacccctgctatttattacatgaataaagaaaatatgctgcaacaagcgatcgggcttccagataaagaaaaactacagattatgatgggggcaagataa

SEQ ID NO: 174888 - DNA, 564 bp, Klebsiella oxytoca
atgtccttaattaataccaaaatcaaaccttttaaaaaccaggcattcaaaaacggtgaattcatcgaagtaaccgagaaagatactgaaggccgctggagcgtcttcttcttctacccggctgacttcaccttcgtttgcccgactgaactgggcgacgtggcagatcattatgaagaactgcagaagctgggcgtagacgtttactccgtctctaccgacacccacttcacccacaaagcgtggcacagcagctctgaaaccatcgctaaaatcaaatatgcgatgattggcgacccgactggcgccctgacccgtaacttcgacaacatgcgtgaagatgaaggtctggcagatcgtgcaaccttcgttgttgacccgcagggtatcatccaggctatcgaagttaccgctgaaggtatcggccgcgacgcgtctgacctgctgcgtaaaatcaaagcagctcagtacgtagcttctcacccaggcgaagtttgcccggctaaatggaaagaaggtgaagcgactctggctccgtctctggacctggtcggcaaaatctaa

SEQ ID NO: 174889 - DNA, 1566 bp, Klebsiella oxytoca
atgctcgacaccaacatgaaaacccagctcaaggcctatcttgagaagctgaccaaacctgttgagctgattgccacgctggatgacggcgctaaatcggcagaaatcagggaactgctggctgaaattgctgaactgtcagataaagtcaccttcaaagaagataacggcctggcggtgcgtaagccgtcattcctcattaccaacccaggctccagccaggggccgcgctttgccggctctccgctgggacatgaattcacctctttagttctggctctgctgtggaccggcggccatccgtcaaaagaagcccagagcctgctggagcagatccgcaatatcgacggtgattttgaatttgaaacctactattcactttcatgtcataactgcccggatgtggttcaggcgttgaacctgatggcggtactgaacccgcgtatcaagcacacggcgattgacggcggcacttatcagaatgaaatcaccgaacgcaacgtgatgggcgtaccggcggtattcatgaacggtaaagagtttggccagggtcgcatgacgctgactgaaattgtggccaaagtggataccggtgcggaaaaacgtgcggcggaagagctgaataaacgtgaatcctatgatgtcttaatcgtcggctcaggcccgtcaggcgcagcggctgccgtttactcagcgcgtaaaggcattcgtaccggtctgatgggtgaacgcttcggcggccaggtgctggatactgttgatatcgaaaactatatttcggtaccgaagaccgaaggtcagaaactggctggcgcattaaaagcgcacgtcagcgaatacgatgttgatgttattgattctcaaagcgcttccaggctgattcctgcgacggttgaaggcggattgcaccagattgaaaccgcctccggcgcggtgctgaaagcgcgtagcgttatcattgccaccggtgcgaaatggcgtaacatgaacgttccaggtgaagatcagtatcgcacgaagggcgtaacctactgtccgcactgcgacggcccgctgtttaaaggtaagcgcgtggcggttatcggcggcggtaactccggtgtggaagcggccatcgacctggcaggcgttgttgaacatgtaacgctgcttgaattcgcgccggaaatgaaggccgaccaggttctgcaggataaagtccgcagcctgaagaacgtcgatattatcctcaatgcccagaccacagaagtggtgggcgacggcagtaaagtgaccggcctgcagtatcgtgaccgcgtgagcggcgatgagcatcacgtcgcgctggcggggatctttgtacagattggcctgttgccgaataccaactggctggaaggggcgattgagcgcaaccgcatgggtgaaatcatcattgatgcgaaatgtgaaactaacgtgaagggcgtcttcgcggcgggggactgcacaaccgtaccgtacaagcagattattatcgccaccggcgaaggtgcaaaagcgtctctgagcgcgtttgattatctgatccgcactaaaacggcataa

SEQ ID NO: 174890 - DNA, 429 bp, Klebsiella oxytoca
atgtataaaacaatcattatgcccgttgatgtctttgaaatggagttaagcgataaagccgttcgccatgcggagtttttagcccagcaggacggggttatccatcttctccacgtactgcccggttcatcaagctttaccatgagccggtttaccgccgatctgcgccgctttgaagagcatttgcagcatgaagcagaaacgcgcctgaaaacaatggccgggcatttcagcattgacccgtcgcgaatcaaaatgcacgttcgctttggcaacgtgcgcgatatggtcaatgaactggccaatgaaattaaagccgacgtagtggtgataggctcgcgtaatccgtctatcagcacgcatctgctcggctccaatgcctcaagcgtgatccgccatgcgcatattccggtgatggtggtgagatag

SEQ ID NO: 174891 - DNA, 411 bp, Klebsiella oxytoca
atgaccagacccgcaatcatcattaatgaactggatgcagaacgcatcgacaggctgctggaacaaccggcattcgctaactcgccggtagcgggcgcactgaacgacgagcttgaccgcgcgcagatgctggctccggaagccatgccgcatgatgttgtcagcatgaatagccaggtgagattccgcgatttaaccaccggcgaagagcgcatccgcacgctggttttcccggctcaggtgaccgatagcgccacccagctctcggttatggcgccggttggcgcagcgttgctggggctcaaggtcggcagcgccattcactgggagttgcccggcggcacctcaacgcatcttgaagtgctggaactgctataccagccggaggccgcaggcgattttcaccgttaa

SEQ ID NO: 174892 - DNA, 795 bp, Klebsiella oxytoca
atgttcaggaaggatttcgtcgctctcgctcttttgctaagcgctcctcaggtcagcgccgatccgctgatcgcaacgcaatacggcgatttcgatcgctacgtgctggccctctcctggcaaacggggttttgccagagtatgcaggaccgaaaccgcagcgagccggaagagtgccgcctgcagcaggaaccagacaacaaagccgtttttctcaccgttcacggcttgtggccaggcctgcccaaatctatcgccgcgcgcggagtggacgaacgccgctggatgcgttttggctgcgcgacccgccctgttcccaatatgcctgaagcgaaagccgggcaaaaatgtcgggcggctgaaaccggcctttcgctggaaatggcgaataagcttaacggcgtgatgccgggatccggcggcaattcatgtcttgagcgttatgaatacgccaagcacggggtttgttttggtttcgatcctgacagttatttcggcaccatggtgcgcctgaacggcgagattaaacaaagcccccttggtcatttcctggccagtcactatgggcagaccgttagccgggatgatttcaacgccgcggtcgcagaggcctatggaaatcagaacgttaaggctttcaagttaacctgtaacggcaatcccgcctatctgaccgagatgcaaatttccatcaaagcggcggccatcaacgcgcctctcgcggtaaattcattcttacctcagcctcatcccgggaactgcggtaaacaatttctgctggataaagccggctaa

SEQ ID NO: 174893 - DNA, 1374 bp, Klebsiella oxytoca
atgcttacgctagtagagatcctgattgggattgtggtcattgtgggcgtcgcccgctatatcattaaaggttattccgccaccggagtgctgttcgtcggtggcttagtattactcatcgccagcgcgctaatggggcataagattttacctggcgacgcaaagagcaccggctactctgctaccgatatcgttgagtatattaagatactgctcatgagccgcggcggcgacctcggcatgatgatcatgatgctctgcggtttcgccacctatatgacgcatattggcgccaacgatatggtcgtcaaactggcctcaaaaccgctgcgctatattaactccccttatctacttatgatcgctgcttatttcgtggcctgcctgatgtcgctggctgtttcctcagccaccggcttgggcgtcctgctgatggccacgctgttcccggtcatggtcaacgttggtatcagccgcggcgccgccgccgcaatctgcgcctccccggcggcgattattctctcaccgacttccggcgacgtcgtgctggccgccaaagccgccgaaatgccgctgattgactttgcctttaaaaccacgctgcctatctctatcgtggcgattatcagcatggcgattgctcacttcttctggcagcgctatctggataagaaggaaaacgtcgcgcatgaaatgcttgatgtgaacgagatcaccaccaccgccccttctttctacgccatcctgccgtttacgccgataatcggggtgctgatttttgatggcaaatggggtccggagctgcacatcattaccatcctcgtactctgcatgctgctggcggcagttctggaattctgccgcggctttaatactaaaaatgtgtttaatgggctggaagcggcatatcgcgggatggccgacgcctttgccggtgtggtgatgctgctggtcgccgctggcgtctttgcgcaggggctgagcaccattggctttattaacggcctgatctccattgcaacttctttcggctccgccagtattattctgatgctggtactggtcattctgaccatgctggcggcgatgaccacaggctctggtaatgcccccttctatgctttcgttgagatgatcccgaagctggcgcactcgtccggcattaacccggcttatctttcgatcccgatgctgcaggcgtctaaccttggccgaaccatttctccggtctccggcgtcgtggtcgccgtggccggtatggcaaaaatttcgccgttcgaagtggtgaaacgcacctctgtcccggtactggttggtttattagtggttattatcgccaccgaagtcctcgttcccggtagcgcaatccgctaa

SEQ ID NO: 174894 - DNA, 570 bp, Klebsiella oxytoca
atgcatcgtcgatttataggtttttttcttgggtgcctggggctgctgctgtcgtctacttctgctaacgcttcgttcagctcgacgcttcgcgatggttacaacacgctgactgataacgttgcgcagacctggaatgagcctgagcactacgatctttatatccctgcggtgacctggcatgcgcgttttgcctatgacaaggagaaaaccgacaggtacaacgagcgcccctggggtgccggttttggcgtttcacgctgggatgataaagggaactggcatggcatctatctgatggcttttaaggattcttataataagtgggagcccatcggcggctatggctgggagaagacctggcgtcctttggcagatgataatttccatcttggcttaggctatacgctcggcgtcacggcgcgtgacaactggaaatatatcccgatcccggtagtgctgcctttggcttccatcggctacggcccggccaccttccagatgacctatattcccggcacctataacaacggaaacgtttacttcgcatgggcacgcattcagttttga

SEQ ID NO: 174895 - DNA, 210 bp, Klebsiella oxytoca
atgtctaagattaaaggtaacgttaagtggtttaatgagtccaaaggattcggtttcattactccggaagatggcagcaaagatgtattcgtacatttctctgcaatccagtccaacggtttcaaaactctggctgaaggtcagcgcgtagagttcgaaatcactaacggtgccaaaggcccttctgctgcaaacgtaatgcctatctaa

SEQ ID NO: 174896 - DNA, 384 bp, Klebsiella oxytoca
gtgttgcaactccttttggctgtatttcttggcggcggcaccggcagcgttttgcgctggtggctgggtatgaagtttaaccccatgcaccatgctatccccattggtactctcaccgctaacctgctaggggcatttattatcggggccggtctggcctggtttaatcgcctgacggacgtcgatccgatgtggaagctactcatcactaccggcttttgcggcgggttgaccaccttctccacattttccgctgaagtggtgtttttgctgcagcaggggcgcgttagctgggcgctgctgaacgttttcgtcaatctgttaggttcatttgccatgacggccgctgcgttctggctgttttcgcaagccgccagccgctag

SEQ ID NO: 174897 - DNA, 789 bp, Klebsiella oxytoca
atgcttgttgctgccggacaatttgccgtaacgccggactggacggtcaatgctcagacctgcgtgagcatgatgcgtcaggccggggagcgcggagcaacgcttctggtgctacccgaggcgttgctggcgcgaaacgacgccgatgcggatttatcagtcaagtccgcccagcagctggacggcggttttttacagcttctgctggcggaaagcgaaaacagtcccttgacgacggtgctgaccctgcacgtgccttctgcagaagggcgggcaacgaatacgctggtggcgttacgtcacgggaaaattattgcgcaatatcagaaactgcatttgtatgatgctttcaatattcaggaatcccggctggtcgatgccggtcagcaaattccgccgctcattgaggtcgacgggatgcgagtcgggttaatgacctgttacgatttacgctttcctgagctggcgctatccttagcgctcagcggcgcgcagcttattgtcctgcccgccgcgtgggtaaaagggccgctgaaagagcatcactgggcgactctgctggcggcacgggcgctggataccacctgctatattgtcgctgcgggggagtgcggaacgcgtaatattggtcagagtcgaattgtcgatcctttaggaacgacgattgccggggcaggggagcagccgcagctgattttcgcggagctttcaaccgattatattcagcaggtaagagagcgcctgccggtgctgcagaatcgtcgctttgcgccaccgcaattattatga

SEQ ID NO: 174898 - DNA, 204 bp, Klebsiella oxytoca
atgggtgagattagtattaccaaactgctggtagtcgcagcgctgattatcctggtgtttggtaccaaaaagttacgcacgctgggtggagacctgggctcggctatcaaaggcttcaaaaaagccatgagcgatgacgatgatagtgcgaaaaagaccagtgccgaagaggctccggcgcagaagctctctcataaagagtaa

SEQ ID NO: 174899 - DNA, 966 bp, Klebsiella oxytoca
atgagtaaacccattgtgatggaacgcggtgttaaataccgcgatgccgataaaatggcccttatcccggtgaaaaacgtggcaactgagcgtgaagctctgctcagaaaaccggaatggatgaaaatcaaacttccggctgactcgtcccgtatccaggggatcaaggcagcgatgcgtaagaacggcctgcactccgtgtgcgaagaagcctcttgccctaacctcgcggaatgttttaaccacggaacggcgacctttatgatcctgggcgccatctgcacccgccgttgcccgttctgcgatgttgcccacggacgcccgataacgccggacgccaatgagccgcaaaagctggcgcaaaccatcgccgatatggcgctgcgctatgtggttgtaacctccgtggaccgcgacgatctgcgcgatggcggcgctcagcattttgccgactgcatcagcgcgattcgtgaaaaaagcccgacgatcaaaattgaaactctggtgccggacttccgcggccgtatggatcgtgcgctggagatcctccaggccacgccgccggacgtgtttaaccataacctggaaaacgttccgcgcctctatcgtcaggttcgccctggcgccgactacaactggtccctgaagctgctggagcgctttaaagaagcgcacccggagatcccgacgaaatcgggactgatggtgggtttaggcgaaacgaatgctgaaatcattgaagtcatgcgcgatctgcgccgccacggcgtgacgatgctgactttaggccagtatctgcagccgagccgccaccacctgccggtacagcgctacgtgagcccggatgaattcgaagagatgaaagccgaagcgatggcgatgggctttacccacgccgcctgcggaccctttgttcgttcgtcctatcatgccgacctgcaggccaaaggtatggaagtgaagtaa

SEQ ID NO: 174900 - DNA, 954 bp, Klebsiella oxytoca
gtggacgacaataactctcaggcagaatcaggcgatcggcttgacgatcgccacggtcggcagatgtttcgcattctgcgtacgatagacctcaatttactcactatttttgaagcggtttacgtccataaaggcatcgttaacgcggcaaaggtactcaatatcacgccgtcggcgataagccagtcaatcaacaagctgcgcgcgctcttccctgacccgctatttattcgtaagggacagggcgtgacccccacggcctacgctacgcatttgcataagcatattagtcaggggatggaggcgtttctcaacgcgctggatctcaccggcaatacgcagcgggagcgggtgataacgattgccacttccccggctattggcgcgttaatcatgccggttatcacccaaaaactgcgggccgtctttccccagatactgctgcacaatatcgctatcaacgacgcagtcagtcagctaaaccagcgtcaggtggacctgcttatcgacagctatccccacagcgggcagacgattacgcaccatgtgctttaccaggacagcgtgcacatcttctgccgggcaggacatccggctctcgccttgcctgcaaccgcagataatcttagtcaatatgaattcgctctgctgcagccagaggggcagcgctacaccaccatcctgcgtcgcctgcaggaacacctcggcgaacgccgctgcggttttagtagctacaatctgttaactcaggcggcgctggtcagcgaaagcgatatgctggggctgataacttccgggatgttttctctggttgacagaatatggcctttgaaaatgatcgacttcgcccctctgcgcgaagaaaaaattgatattgcgttgcactataacaagctcagcgcgcaggaacccttgttgaaagagatcgtcgggacaattcgtcagactttctag

SEQ ID NO: 174901 - DNA, 645 bp, Klebsiella oxytoca
ttgcagcacaataaaattctcatccgccagctcggcctgcaaccttacgaacctgtctcgcaggcaatgcacgagtttaccgacacccgcgacgagactacgctggatgaaatctggctggtagagcaccatcccgtattcactcaggggcaggcaggcaaagccgaacatgttctcgttcccggcgaaatcccggtaattcagagcgatcgcggggggcaggtcacctatcacggtcccggccagcaggtgatgtacgttctgctgaacctgaaacgccgtaagctgggggtgcgcgagctggtcacgcttctggagcaaaccgtcgtgaacaccctggcggaatatgacatcgaatcacacccgcgcgccgatgctcccggcgtctacgtgggcgatcggaaaatctgctctctgggtctgcgcattcgtagaggttgctcattccacggcctggcgctaaatatcaacatggatctgtcgccgttcctgagaattaacccctgcggctatgccggaatggagatgacgcagatgcgtcagtggcagccagatgcccagccggaaaacgtatcgccacatttggtcgctcatctgctggcgctcctgaacgatccgccctcggaatacattttatcccgctag

SEQ ID NO: 174902 - DNA, 264 bp, Klebsiella oxytoca
atgaaaaccaaacttaacgaactgcttgaattccctaccccatttacttacaaagtaatgggacaggcgttgccggagctggttgaccaggtggttgaagtggtacagcgccatgcaccaggtgattactctccgacggtaaaacccagcagcaaaggcaactaccactctgtctctattaccatcaatgcaacccatattgagcaggtagaaaccctctacgaagagctgggcaatattgaaatcgttcggatggtgctgtaa

SEQ ID NO: 174903 - DNA, 1200 bp, Klebsiella oxytoca
atgaagacctcttttaccgctcgtttactcgttacggcgctctccgtggcagcgctgtcctccgctgcccgcgccgatgacctgaatatcaaaactatgatcccaggcgccccgcagattgacgccgaatcctggattcttatcgattacaactcaggcaaagtgctggcggaaaacaacgctgactcccgtcgcgacccggcaagcctgactaaaatgatgaccagctatgtcattggtcaggccatgaaagcgggcaaatttaaagagtccgacctggtcaccgtaggcaacgacgcgtgggcaaccggtaatccggtgttcaaaggttcttcgctgatgttcctcaaaccgggtatgcaggtgccggtatcccagctgatccgcggtatcaacctgcagtcgggcaacgatgcctgcgtggcgatggccgactacgtcgccggtagccaggacgccttcgtcagcctgatgaacaactacgttaacgcgctgggcctgaagaacacccatttccagaccgttcacggcctggatgccgatggtcagttcagctcagcgcgcgacatggcgctgattggccaggcgctgattcgcgatgttccaaacgaatacaccatctacaaagagaaagagtttaccttcaacggtattcgtcagctcaaccgcaacggcctgctgtgggataacagcctcaacgtcgacggcattaaaaccggccacacggataaagcgggctacaacctcgtggcatcggcaactgaaggccagatgcgcctcatctccgccgtgatgggcggtcgtacctataaaggacgcgagtccgaaagcaaaaagctgctgacctggggctttcgcttctttgaaaccgttaacccgattaaagccggtaaagaattcgcctctgaacctgcctggttcggcgatagcgatcgcgcctctctcggcgtggataaagacgtttatctgacgattcctcgcggtcggatgaaagatctgaaagccagctacgtgctgaataatgccgagctgcacgcgccgctgcagaaaaaccaggttgtgggcaccattaacttccagcttgatggcaaaaccatcgatcagcgtccgctggtggtcctgcaggaaatcccggaaggcaatttcttcggtaaaatcattgattacattaaattaatgttccatcactggtttggttaa

SEQ ID NO: 174904 - DNA, 1101 bp, Klebsiella oxytoca
atgcgtaagcaatggctggggatctgcatagcagcagggctgctggcggcatgttcgggtgaagacgttcaacagaaaacggtcagcactccacagccggccgtttgcaatggcccaacggtggagattagcggcgccgatccgcagtacgaaacgcctaacgccacggcgaatcaggattatgaacgcgacggcaaaagctacaaaatcgttcaggatccgtccaactttacccaggccggtttcgccgctatctacgacgccgagcccaacagcaatctgaccgcatcgggagaagcgttcgatcctacgcagctcaccgctgcccatcctacgctgccgatcccaagctacgcgcggatcaccaacctggcgaacggccgcatgatcgtcgtgcgcatcaacgatcgcgggccttacggtaacgatcgcgtgatctcactgtcgcgtgcctcagccgatcgtctgaatacatcaaataataccaaagtacgtatcgaccctatcatcgtcgcaccggacggctcgctttccgggccgggcatggcctgtacgacggtagccaaacagacctacgccctgccggcgcgcccgaatcttgacggcgacggcagcgcggcgatggggcaacccgcgccaactgacgtgcacgccatcagcaacgcaacgctgaagccggaagatagcaccggcgcaccggtcaacagcggcggttttctcggcgcgccgacgccgctgaataacggtgtgctggaaggcagcgagcccgtggtgcaaaccgcgccggttaccgcgccgggttctgttcagggaagcgtagcgcccgccgccgtcgcgaccgcagcagtgacgccagccgcagcggcaagcgccaacggcgatttcgtcgtacaggtcggcgccgtcagcgaccagtcccgtgcgcaacagtaccagcagcgtctgagtcagcaattttccgttccgggccgcgtcatgcaaaacggcgcggtatggcgtattcagcttggcccattcagcagcaaagcggaggccagcacgatccaacagcgcctgcaaagcgaagctcagctgcaatcatttataactcgcgccaactaa

SEQ ID NO: 174905 - DNA, 1113 bp, Klebsiella oxytoca
atgactgataatccgaacaaaaaatcgctatgggataaaatccacctcgatcccaccatgctgcttatcctgctggcgctgctgacctacagcgcgctggttatctggagcgccagcggtcaggatatgggcatgatggagcgtaaaatcggccagatcgctatggggattgttattatgatcgtcatggcgcaaatcccgccgcgggtctatgaaggctgggcgccctatctctatattttctgtattattctgctggtggcggttgatgccttcggcgccatttccaaaggggcgcagcgctggctggatctcggcatcgttcgcttccagccgtcggaaatcgctaaaatagccgtaccgctgatggtggcgcgctttatcaaccgcgacgtgtgtccgccatcgctgaaaaataccgccattgcgctggtgctgattttcctgcccacgctgctggtcgccgcgcagcctgacctcggaacctcgattctggtcgccctgtccggtctgtttgtcctgtttctctctggcctgagctggcgtctgattggtattgcggtggtgctggtcgccgcctttattccaatcctctggttcttcctgatgcatgactatcagcgccagcgcgtaatgatgctgctcgacccggaaaccgatccgctcggcgcgggttaccacattattcaatcaaagatcgctatcggctccggcgggttgcgcggtaaaggctggctgcacggtacccagtcgcagctggagtttctgccagaacgccataccgactttatctttgcggtactggcggaagaactggggctgattggcgtactgatcctgctggcgctgtatatactgcttatcatgcgcggactctggatcgccgcccaggcgcaaaccacctttggccgagtgatggccggtggtttaatgttgattttattcgtttatgtcttcgtaaatattggtatggtaagtggtattttaccggtggtgggggtacctttgccgctggtcagctacgggggctctgccctaatcgtattgatggccgggtttggtatcgtcatgtcgatccatactcacagaaaaatgttgtcgaaaagcgtgtaa

SEQ ID NO: 174906 - DNA, 1902 bp, Klebsiella oxytoca
atgaaattacagaattctttccgcgactattcggctgaatcctcgctgttcgtgcgccgggcgctggtcgcttttttggggattttgctgcttaccggcgtactgatcgccaacctttataacgtgcagattgtgcgttataccgactatcaaacgcgttcaaacgaaaaccgcattaaactggtcccgattccgccgagccgcggcattatctacgatcgcaacggcacgccgctggcgcttaaccgcacgatttaccagctggagatgatgccggagaaggtcgacaacgttcagcaaacgctggatgcgctgcgcgacgttatcgatctcaccgatgacgatgtggcgaactttaaaaaagagcgcgcccgctcgcatcgttttacctccattccggtcaaagttaacctcagcgaagtgcaggttgcccgtttcgcggtcaaccagtatcgctttcccggggtggaagttaaaggctataagcgccgctactatccctataactccgctctgacccacgttatcggctacgtctctaaaattaacgataaagacgtcgatcgcctggataaagagggcaagctggcaaattacgcctccacgcacgatatcggcaagctggggatcgagcgctactacgaagatgtcctgcacgggcaaaccggctatgaagaggttgaagtgaacaaccgcggccgcgtgattcgtcagctcaaagaggtgcccccgcaggccgggcgcgatatctatttaacgctcgaccttaagctccagcagtatattgaaaccctgctcgccggcagccgcgcggcggtcgtcgtcacggacccgcgaaccggcgctatcctcgcgctggtttcgacgccaagctacgaccctaatctgttcgttgacggtatttccagcaaggattactccggactcctcaacgatcctaatacgccgctggtcaaccgcgcgacccagggcgtttacccgccggcttcgacggttaagccatacgttgcggtctcagcgctcagcgccggggtcataacccgcaacaccagcctgtttgaccccggctggtggcagcttcccggctcggaaaaacgctaccgtgactggaaaaagtggggccacggccatctgaatgtcaccaaagcgctggaagagtccgccgatacctacttctatcaggttgcctatgatatgggcatcgaccgcctgtctgagtggatgggtaaatttggctacggccactataccggcgttgacctggcggaagagcgctccggtaatatgccgactcgcgaatggaaactcaagcgcttcaagaaaccgtggtaccagggcgataccattccagtcgggatcggtcagggctactggaccgcaacgcctattcagatgaacaaggcgctgatgatcctgattaacgacggagtagttaaagtaccgcatctgctgcaaagcacggtggaagacggtaaaccggttccctgggttcagccgcatgaaccgccggtcggagacattcactctggcttttgggaaatcgctaaagacgggatgtatggcgtagccaaccgaggcaacggtaccgcgcataaatactttgccagcgcaccttataaaatcgcggccaagtcgggtaccgcccaggtctttggcctgaaagccaatgagacctataacgcacacagaatcgccgaacgcctgcgtgaccataaactgatgacggcgtttgccccttacaacaacccccaggttgccgtagccattattcttgagaacggcggcgcaggtccggcagtcggtaccattatgcgtcagattctcgatcatataatgctgggcgataacaacaccaatctgccgactgaaaatccggcggtaacggctggggaggatcaataa

SEQ ID NO: 174907 - DNA, 468 bp, Klebsiella oxytoca
gtgaagctgcacctggtagccgttggcaccaaaatgccggactgggttcagaccggctttagtgaatatctgcgccgttttccaaaggatatgccgttcgaactggtggaaatccccgccggtaaacgcggcaaaaacgccgacatcaaacgcattcttgaaaaagagggcgaaatgatgctggcggcagcaggcaaaaaccgcatcgtcaccctggatattccggggaaaccgtgggatacgccgcagctggcgcgcgaactggaacgctggaaacaggatggccgcgacgtcagcctgcttatcggcggcccggaaggcctttcacccgcctgcaaagcggcggcggaacaaagttggtcgctctcaacgctcaccctacctcacccgctggttcgcgtactggtggccgagagtctgtatcgggcgtggagcattaccaccaaccacccttaccaccgtgagtaa

SEQ ID NO: 174908 - DNA, 318 bp, Klebsiella oxytoca
ttgcagggtaaagcactccaggattttgttatcgacaaaattgatgacctgaaaggtcaggacatcgttgccattgacgttcatggcaaatccagcattacagattgcatggtcatctgcacaggcacttccacgcgccatgttatgtccatcgctgaccacgtcgtgcaggagtctcgcgccgccgggatgctgccgctgggcgttgaaggcgaagccgccgcggactggatcgtggtcgatctcggcgacgttatggttcacgtcatgcaggaagagagccgtcgtctgtacgagctggaaaaactctggagttaa

SEQ ID NO: 174909 - DNA, 630 bp, Klebsiella oxytoca
atgaaattatggttagttcggcatggcgaaaccgaggccaacgtcgcaggcctctacagcgggcatgcccccactgagttaacggaacgtggaatcagacaggcccaaacgctcggacagcgtctgcatgccgttccgtttgagcgcgtgttttgtagtgagcttgagcgcacccagcgcacggccagcctgctgctgggggaacggagcatcccccgtcataccttcgctgagctcaatgaaatgttcttcggcgactgggaaatgcgccaccatcgcgatttgcagcaggaagatgctgaaaactacgccgcctggtgcgccgactggcagcatgcggcgcctaccaacggagagggctttcaggccttttccgagcgcgtttgccgctttactgccaccctctctcagtatcaggaacttaatcatctgctgatcgtcggtcaccagggggttctgagcctgttaatcgctcatcttctgcacatgccggcttcggcgatgtggcactttcccatcgagcatggcgcgtggagcctgatcgatctccagcctgaattcaccacgctgcgggtgctaaatagccgggccgtttggctggcggaagaagaattgcgcgcagaccattga

SEQ ID NO: 174910 - DNA, 651 bp, Klebsiella oxytoca
atggttgatatgactcagttacaggcgatgtacggcggcaccttcgatccggtgcattacggtcacctcaaaccggtggaaattctggccaaccaaatcggcctcaatcgcgtcaccattgtgcctaacaacgtgccaccgcatcgcccgcagcccgaagcgaccagcgaccagcgacggcatatgctggaactggctatcgccgataagccgctgtttatcctcgacgatcgtgaacttaggcgcgatacgccgtcctattctgcgcagaccctgcgcgagtggcgccaggagcaggggccgggacggccgctggcttttatcataggccaggattcgctgctgacttttacctcctggcacgactatgccagcatccttgataacgttcatttgatcgtctgccgacgccccggctacccgctgactatggcgtgcgagcaggatcagcagtggctggacaagcatctcacccatgacgtcgagcggctgcatagcgccccggcaggcgttatctacctggccgaaacgccgtggtttgatatctcagcaacccttattcgccagcgtctggaaacaggcgagtcctgcgcggacatgatgccggaaagcgtgcttgagtatatccaccagcaaaatctttactgctag

SEQ ID NO: 174911 - DNA, 1032 bp, Klebsiella oxytoca
atgattcggttgtacccggaacagctccgcgcgcagctcactgaagggctgcgcgcggcctatctgctgcttggcaacgacccgctgctgttgcaggaaagccaggacgccatccgcgaagccgctgccgcccagggctttatcgaacaccataccgccagcattgatgccagcaccgactggtctgcccttttctccctcagtcaggcgatgagcctgtttgccagccgccagacgctgctgctgatcctgccggagaacggccccaatgcggcaatcaacgaacagctcgccacgcttgtcagcatgctgcatgacgatcttctgctgatcgtgcgcggcaataagctgacgaaagcgcaggagaacgccgcgtggatcgccgctcttgccagccgtgccgttcaggttagctgtcagacgccggaatatgcccagctgccgcgctggcttgccgcgcgcgcaaagcagcatcatctgcagcttgatgacgcagccagccagctgctgtgctactgctatgaaggcaatctgctggcgctggcgcaggctctggagcgcctctcgctactgtggccggacggtaaactgacccttccgcgcgttgagcaggcagtcaacgacgccgcgcatttcacgccttatcattgggttgatgcgctgctggcgggtaaaagcaaacgcgtcctgcacgttttgcaacagctgcggctggaaggcagtgaaccggctatcctgctgcgcaccctacagcgtgaactgctgctgctggtcaacctgaagcggcaatcagcccatacgccgctgcgtaccctgtttgacaagcatcgggtgtggcaaaaccgacgccagctggtcagcgacgcgctggcccgcctgagcgccgaccagctgcgccaggccgtcacgttgttgacccgcgccgagctcacctttaagcaggattacgggcactccgtctggcccgagctggaaagtctctctttgttgctctgccataaagcgctggcagacgtttttattgatggttga

SEQ ID NO: 174912 - DNA, 582 bp, Klebsiella oxytoca
gtgcgatatctggcaacattgttgttaactctggcggtgttaatcaccgccggttgtggctggcacctgcgtagtactacgcaggttccgaccgcaatgaaaaccatgatcttccagtcgggcgatccaaatggtccattaagtcgcgctgtccgtaatcagctgcgcctgaacggcgtcgagctggttgatgccagtacgctgcgcaaggatatcccttccctgcgtctggagtcatcgtccattcagaaagacacggcatctattttccaggatggccgtactgctgaatatcagatggtgatgacggtgaatgccagcgtcctgatccctggtcatgatatctatcccatcacgaccaaagtctaccgttcgttcttcgataacccgcaggcggcgctagcgaaagatgccgagcaggacatgatcattcaggaaatgtacgacaaagcagccgaacagctgatccgtaagctgccgagcgtacacgttgcggatgtcgaagccaccaaagaggatgagaagccggtgaacgccgcttccacctccggcaatcgcgtctccaccacgctgggtaactga

SEQ ID NO: 174913 - DNA, 2583 bp, Klebsiella oxytoca
atgcaagagcaataccgcccggaagagatagaatcaaaagtccagcaacactgggacgagaagcgtacctttgaagttaccgaagacgagagtaaagagaagtattactgcctgtcgatgcttccctatccttctggtcgactacacatgggccacgtgcgcaactacaccattggcgacgtgatttcccgttaccagcgcatgttaggcaagaacgtgctgcagcctatcggctgggatgcgtttggcctgcctgcggaaggtgcggcggtgaaaaacaacacagctccggcaccgtggacctacgacaatatcgcctacatgaagaatcagctgaaaaagctgggctttggctatgactggagccgcgaagtggcgacctgcaccccggaatactaccgctgggagcagaagttcttcaccgagctgtataaaaaaggcctggtctacaaaaaaacctccgcggtgaactggtgcccgaacgaccagaccgttctggcaaacgagcaggttatcgacggctgctgctggcgctgcgataccaaagttgagcgtaaagagatcccgcagtggtttattaaaatcaccgcctacgctgacgagctgctgaacgatctggacaacctggatcactggccggataccgtgaagaccatgcagcgtaactggattggccgctccgaaggcgtcgaaatctccttcgatgttaacgactacgccgacaagctgaccgtctacaccacccgcccggacacctttatgggctgtacctatctggccgtggcggcgggtcacccgctggcgcagcaggcagcagccaataaccccgcgctagcgacgtttatcgacgaatgccgcaataccaaagttgccgaagccgaaatggcaactatggagaaaaaaggcgtcgataccggttataaagcgattcatccactgaccggtgaagcgatcccggtctgggcggcaaactttgtcctgatggagtacggcaccggcgcggtaatggccgttccgggtcacgatcagcgcgactacgagtttgccagtaaatacggtctgaagatcaagccggtcattctggccgccgacggttccgaaccggatctctccgaacaggcgctgaccgaaaaaggcgtgctgttcaactctggcgaattcgatggtctggatcacgaagctggctttaacgccatcgccgataagctggcttcacttggcgtcggcgaacgtaaagtgaactaccgcctgcgcgactggggcgtttcccgtcagcgctactggggcgcgccgattccaatggtgacgctggaagacggtaccgtaatgccgactccggaagatcagctgccggtaattctgccggaagatgtggtcatggacggcatcaccagccccattaaagccgatcctgagtgggcgaaaaccaccgtaaacggacagccggcgctgcgtgaaaccgatacctttgataccttcatggaatcctcctggtactacgcgcgctatacctgcccgcagtacgaccagggcatgctggacccggaagcggcgaactactggctgccggtggatatttatatcggcggtatcgaacacgccatcatgcacctgctgtacttccgcttcttccacaagctgatgcgcgacgcgggcatggttaactctgacgaaccggcaaaacagctgctttgccagggcatggtgctggcggatgccttctactacgttggcgcgaacggcgagcgtaactgggtctctccggttgatgcgatcgttgagcgcgatgagaaaggccgcatcgcgaaagcgagagatgctgaaggccatgaactggtctataccggcatgagcaagatgtccaagtcgaaaaacaacggcatcgacccgcaggtcatggttcaacgttacggtgccgacaccgtgcgtctgtttatgatgttcgcctcgccggctgacatgacgctggagtggcaggagtccggcgtggaaggggccaaccgcttcctgaaacgcgtctggaaactggtttacgagcataccacgcagggtgaagttgccgcgctggacgttgccagcctcagcgaagatcaaaaagcgctgcgccgcgacgtacacaaaacgatcgctaaagtgaccgatgatatcggccgccgtcagaccttcaataccgcgatcgcggcgattatggagctgatgaacaagctggcgaaagcgccgcaggaaagcgaacaggatcgcgcgctgatgcgtgaggctctgctggcggtcgttcgcatgctcaacccgttcaccccgcacgccagctttaccctgtggcaggagctgggcggcgaaggcgatattgacaacacgccgtggccggttgcggacgaaagcgctatggttgaagacaccacgctggttgtcgtccaggtaaatggtaaagttcgtggtaaaattaccgttgcggtagatgcaaccgaagagcaggtgcgcgagcgtgcggctcaggagcatctggtcgcgaaatatctcgacggtgtgaccgtgcgtaaagtgatctacgttccgggtaaactgctcaatctggtcgttggctaa

SEQ ID NO: 174914 - DNA, 483 bp, Klebsiella oxytoca
atgaacaaggtagctcagttttaccgagagctggtgtcgacgctcagcgagcggttacgcaatggagaacgcgatatcgatgcgctggtggagcaggccagggtaagaattagccagtccggcgagttaacgcagagtgaaatcgacaacgtcattcgcgccgtcagacgcgatctggaagagtttgcgctcagctatgaagagagccaggaggagctcaccgatagcgtctttatgcgcgtgattaaggagagtctgtggcaggagctggcggatatcactgacaaaacccagcttgagtggcgcgaagtcttccaggatctcagccaccacggcgtttatcacagcggcgaagtggttggactcggcaatctggtttgtgagaagtgtcattatcatctgccggtttatacgccggacgtgctgccgcgttgtccaaaatgcgggcacgatcagttccagcgtcgcccgttcgagccctga

SEQ ID NO: 174915 - DNA, 1779 bp, Klebsiella oxytoca
atgtttaaattcaaggtttcctatgttgcgctggcggcagcgctaagctcatccgttgtttatgccgacccgtcaagctatacgcataggtcaggggcaaatgttattgatattgaagcgcctaatgccgcaggcgtctcgcataacttatatcgcgaattcaacgtcggccctaacggcactattttaaacaacagcgccagcgacgtgaaccacagcactcacggtagtatcgctaagaataataatctgaccaacggcagcgcttccgttattttgaatgaagtcacctccaataaaatgagtaacctgcagggctttatcgaagttaacgggcaaaaagccgatgtcgtgatcgccaaccccaacggcatcacctgctccgggtgcagttttatcaacaccaacaacgcaatacttaccacaggccaggtcaacctgagcgataccggcgcaattgagagctatacggtcacgcaagggaaaatcaccatcggtgataaaggtatgaacgcatccactaactatgccgccctgcttgcggatgctattgcgattaacggcactgtgaccgccgccaatgcagccgtcggcgcgggcaattttacgtataataaccagaccggggaaatgaactccctgggtaaaacagcaacggttatgcagatgatctttccagaatacagcattgatatcagcaacctgggcggtatcaaggccaatagtattagcatggtgggtaataccttaggtcttggcgtgcgtaataaaggcactattaccgcaaatgccgcgctcgccatgaccagctatggttctctggttaatgaaggttccatcaacacgaacggccttatggctaaaatggcatctttgggcgatatgaaaaatacaggtacaattaatagtactgcttacgttacgcagctcagtagtgtgggcaccctgaccaatgaaggcacaattgccagtagtaaacagattgccatcagcgcgaccggcgatcttgttaacgccggcacgatgaagggaacgcaattgttatccgtagccagcgggggcaatctcaccacccgtaagggctcaaataccgtttccgatggtcagttagcggtttccgccaacaatattgacaacgcgggttcaatgcgcggcaatataacctacgtcgaattcagcggcgataaactcaaagtcaccggtgagctccggggtcattccactctgaccgtgcaatctaaaaaggatgacaaagtcaattcggggttaatttataacacaggaagtatttccggtaatgatgtaacgattatcactaacggaaatttggatcaggagggtaatattattggtcaaaactcgttatcgattaaaagtaatgttttagacaatgtttattatatttatgggaagtcactaaatattgaaagtaattatgttcgcaacagagcaacaatcgatggctataataacactattagcgcggccaacggcattcttaatgaagggcaaatctctgcgggcggagatttgactctgaagacgctaaatcacgctaatatcaccaactataataccatcaaagccaatggttctcttaccatgaccacagggactgttaaaaatggcggctaccgctgcggctttttaaatctggcaacctgcggtaaaggctctatttccgctaacaagctggtccttaactcttatcataactatgcctctgaaatgggcgggcaacagcagtataaatatgctgaaataaatactattcgttaa

SEQ ID NO: 174916 - DNA, 1671 bp, Klebsiella oxytoca
atgtggactaataccaacagcctggccattattttgtgtttaaatctgctcacctgttttactgcccgcgcgggtattgaggccgcaacggtaaaccaggttgaacaggataaagcccgtgaaagcgcattaatgccccatcagcagcaataccaatcctctcgtagccatgtaaaaacgcaaactttaatatttcccgaagaagcgacctgcagatatatcacgcaagttgatattgcctccgaggacaaagcaaaaaccaccgccctcctcggaaagatcgcctcccaggcgattggccattgtttaggtgtggaaggaattcgtctgctgacgaccgctttgcaaaatgagctgataacgcaagggtatatcacttccctgatcgatgttccgtcccagtcattagaaggcggcattctgaagataacgcttgtttatggcaaaacggggcatattgcttttgcgccgaatagcgccacgaccaacctgtggacctcgatgcccacgcataccggtaagatcctgcgccttagcgatcttgaacaagggatggctaacctgcagcgccagcctggcgccagcgcccatatgaaactgcggccgggggaacatatcggcgagagcgatattgaaatcgcccgcgtaacggataaacagtggcagattggcgcctggcttgatgatgccggtagccgcgccagcgggcgctatcagggcggcggcgcgctgtacctgtacgatttatcctcactgaacgatattctgtccatctcagcaggcggcgacgttgaattcaaccagcacaacgacggcaaccataacggcaacctttactactccgtaccttttggttactggtcattgagcatgtacggctcctacagccagtaccgccagctgtttaaaggaagatggtcaagcatcgactataaaagtaaaaaccgttattacagcgcgacccttagccgcctgctttcacacacccgacagcaaaaaacgaccgccgatctgcgcatagtgaaaagcagttcacactacttttttggcggcgatgagctttacgtcatgcgcaaacagaatccggtctgggaatttaccctgcgccaccagcgctattttaacaataaaattgtcgacgccagcgtgggtattcagcgcagcctgccgtggctcagctccgtgcctacgccagaggaaaaagccggtttatacagccgccattcgcgcgtcgtgcatgccgatattcaggcattaatgcagtttgccgcaaccggcgataaatttagctggatgccgcgtttccatgcccagttcagcccggatatattatcttcggacaaccagtttaatatcggcaatcgctggacgattcgcggttttgacggcgaaaatacgctatcggccaatcagggctggtactggcgtaacgactttagctggaatatacctactgccgaccggcagttatatcttggactcgatttcggcagaatcatcggcaacgagcgcgcgcggcaagggaaaagcctttctggcgcagtcggcgggatccgtggagaaatagtatcaacgcaatatgacttttttatcggcacgcctatcagtaaacctgatgactttcatagcgatgccatgaatatgggcttttcattacagtggaggtattag

SEQ ID NO: 174917 - DNA, 726 bp, Klebsiella oxytoca
atgattaccctgaaaaatgtttcaaaatggtatggtcactttcaggtgctgaccgattgctccacggaagtgaaaaaaggcgaagtggtggtggtctgtgggccttcgggttcgggtaaatcaacgctgattaaaaccgtcaacggcctggagcccatccagcaaggtcaaatcatcgtcgacggcaccaccgtcaacgataaaaagaccaatctcgccaaactgcgctcgcgggtcgggatggtattccagcatttcgagctgttcccgcacttatcgattattgataacctcaccctggcgcaggttaaggtgctcaatcgcgataaagcagcttcacgagcaaaagggctaaagctgctggaacgcgtggggctttccgcccatgctgaaaaattccccgctcagctctcgggcggccaacagcagcgcgtggccatcgcccgcgcgctgtgcatggaccccatcgccatgctgtttgatgaacccacttccgcgcttgaccctgagatgattaacgaagtgctggacgtcatggttgaactggcgaatgaagggatgaccatgatggtggttactcatgaaatgggctttgcgcgtaaggtcgccaaccgggtcatctttatggatgaaggtaaaatagtcgaagacgccgataaagaagcgttttttgctaacccgcaatcagaacgcgccaaagacttcctcgccaaaattctgcactag

SEQ ID NO: 174918 - DNA, 675 bp, Klebsiella oxytoca
atgtacgattttgactggagttctattatcccttccatgccatacctgctggctggactggtcatcacgttaaaaatcaccgtgaccgcgattgttatcgggattgtctgggggacgattctggccgtgatgcgcctgtcgagtttcctgccgctggcgtggtttgccaaaacttacgttaacgtcttccgttctattccgctggtaatggtactgctgtggttttatctgattgtcccgggtttcctgcagaacgtgcttggcctgtcgccgaaaaccgatatccggctgatttcggcgatgatcgccttttccatgtttgaagcggcttactactcggaaatcattcgtgccggtattcagagtatctcccgcggccagtccagcgctgcgctggcgctgggcatgacccactggcaatctatgaagctggtgatcctgccgcaggcgtttcgcgccatggtaccgctgctgctgactcagggcatcgtcctgttccaggatacctcgctggtttatgtcctgagcctggccgactttttccgcaccgcctcgacgattggcgaacgtgatggaacccaggtggagatggtgctgttcgcaggcgccgtatattttgttattagcctcagcgcatcgctgttggtcagctggttgaagaaaaggactgtgtaa

SEQ ID NO: 174919 - DNA, 741 bp, Klebsiella oxytoca
atgtcaatagactggaactgggggatattcctgcaacaggccccgttcggcaatactacctatttaggctggctatggagtggttttcaggtcaccgttacgctgtcggtcacggcctggattatcgccttcttcgtaggctcgctattcggtattctccgtaccgtccctaatcgtctactctcgactatcggtacctgttacgttgagctgttccgtaacgttccgcttatcgtgcagtttttcacctggtatctggtggtgcctgaactgctgccggaaaatatcggcatgtggtttaagtccgagctggaccctaatattcagtttttcgtttcttcgatgctgtgcctgggattatttaccgccgctcgcgtctgcgaacaggttcgttccggcatccagtccctgccgcgcggccagaaaaatgccgggctggcgatggggctgacgctcccgcaaacctatcgttacgtgctgctgcccaacgcctaccgcgttatcgtgccgccaatgacctctgaaatgatgaacctggtgaaaaactcggccatcgcttccaccattggacttgccgatatggccgcgcaggcgggtaagctgctggactactcggcccatgcctgggaatcgtttaccgccatcaccctcgcctacgtctttatcaacgccgtcatcatgctgatcatgtacgtggtcgaacgtaaggtccgcctgccgggcaatatggggggtaaataa

SEQ ID NO: 174920 - DNA, 912 bp, Klebsiella oxytoca
atgcaattacgtaaactggccgcagcaatgctggtcatgggactgaccgccggcgcggcgcaggcagaagacgcagcagcaaccaccggccagagcactctggataaaattgccaaaaacggcgtcatcgtcgttggtcaccgtgaatcatccgttccattttcttactatgacaacaagcagcaggtcgtaggctactcccaggactactcaaatgcgatcgttgatgccatcaagaaaaagctgaagaaaccggatctgcaggtgaagctgatcccggttacgtctcaaaaccgtatcccgctgctgcaaaacggtacctatgatttcgaatgcggttccaccaccaacaaccttgaacgtcagaaacaggcggccttctccgacaccattttcgttgtcggtacccgtctgctggtgaaaaaaggcggcgcgattaaggactttccggacctgaaggataaagccgtcgtcgtcacctccggaactacctccgaaattctgctgcataagctgaatgacgagaaaaaaatgaacatgcgcattatcagtgctaaagatcacggcgactctttccgtaccctggaaagcggacgcgcggtggcctttatgatggatgacgcgctgctggcgggcgaacgggcgaaggcgaagaagccggataattgggagatcgtcggcacggcgcaatctcaggaagcttacggctgtatgctgcgtaaagacgatccgcagttcaaaacgctggttgatgagacggtagcccaggcgcagacctccggtgaagccgaaaaatggttcgacaagtggtttaaaaatcctattccgccaaaaaacctgaatatgaattttgaactctctgacgaaatgaaagcgctgttcaaatcacctaacgacaaagctcttaactaa

SEQ ID NO: 174921 - DNA, 1539 bp, Klebsiella oxytoca
atggtatttgcctctctcattgaacgccagcgcgtacgcctgctgctggcgcttttattcggagccagcggaacgctggctttttcaccttatgacatctggccggcggcgattatttcattaatcggcctgcagggcttaaccctcaaccgccgtcctgtgcaaagcgccgcgatcggctatttctggggcttagggctgttcggctccggtattaactgggtctacgtgagtatcgcgcagttcggcggtatgcccgggccggtcaacgttttcctggtcgttctgcttgccgcctatctctctctgtacaccggattatttgccggtattctttcgcgcctgtggccaaaaaccagctgggttcgcgttgccatcgccgccccggtgatatggcaggttaccgagtttctgcgcggctgggtgctgaccggctttccgtggttacagtttggctacagccagatcgacggtccgctcaaagggctggcgcccgttatgggcgtcgaggcgattaacttcctgctgatgatcgtcagcggtttgctgatactggctatcgtgcagcgcagctggaagccgctggtcgctgccgtcgtgctgttcgccctgcccttcccgctgcgctatattcagtggtatcagctgctgccggagcgcgcgaccacggtttcgctggtacagggagatatcccccaggcgatgaaatgggaccaggatcagctactcaataccctgaaaacctatctggatctcacccagccgcatatgggcaaatcgcagctgatcgtctggccggagtcggcgataccggatctggaaattaatcagcagcgcttcctcagtatgatggatgacctgatgcggtcgaaaaacagctcgctgattaccggcatcgtcgacgcgcgcctgaacgcgcgtaatcgctacgatacttacaacaccattattacgctgggcaaagataacccgtacagctacgactcaaagaatcgctacaacaagaaccatctggtgccgtttggcgagtttgtgccgctggaatcgattctgcgtccgctggcgccattctttgatctgccaatgtcctctttcagccgcggtccgtacgtacagccgcagctggtggcgcataacatgcgactgacggcggctatctgctacgagatcatccttggcgagcaggtgcgggataacttccgcccggacacggattttctgctaaccatctctaacgacgcgtggttcggcaaatctatcggcccgtggcagcatttccagatggcgcgtatgcgcgcgctggagctggcccgtccgctactgcgtagcaccaataacggcataaccgcggtcatcggcccgcgcggtgaaattcaggcaatgatcccgcagttcacccgcgccgtgttaaccagcaaagtgaccccaacgacaggactgacgccgtacgctcgtacgggaaactggccgctgtgggcgttaaccatcctgttcggttttggcgccctgctgatgagtctgcgccagcgccgtcaataa

SEQ ID NO: 174922 - DNA, 945 bp, Klebsiella oxytoca
atgccgggcgctgagtatacgcgtgacgagcgactatttaaccaacatgagaacccatacgacgccatgagcgacgacaattcacacagtagcgacacagtaaacagcaaaaagggattcttctccctgttactcagccagctttttcacggggaaccaaaaaaccgtgatgaactgctggcgctgatccgtgattccgggcaaaacgaccttatcgacgaagatacgcgcgatatgctcgaaggggtaatggatatcgccgaccagcgcgtccgcgacatcatgatcccccgctcgcagatgattaccctgaaacgcaaccagacgctggacgagtgcctcgatgtgatcatcgaatccgcccactcgcgtttcccggtgatcagcgaagacaaagatcacatcgaagggattctgatggccaaagatctgctgccgtttatgcgcagcgatgctgaagccttcagcatggaaaaagtgttgcgcccggcggttgtcgtgcccgaaagcaagcgggttgaccgcatgctgaaggagttccgctcccagcgttatcatatggctatcgttatcgatgagtttggcggcgtctcgggtctggtgaccattgaagatatccttgagctgatcgtcggtgagatagaagacgaatatgacgaagaagaagatatcgatttccgccagctgagccgccatacgtggacggtacgcgcgctggcctcaatcgaagacttcaacgaagccttcagcacccacttcagcgatgaagaggttgataccatcggtggtctggtgatgcaggcctttggtcatctgcctgcccgcggcgagtctatcgacattgatggttaccaattcaaggtcgcaatggccgacagccgacgtattattcaggtacacgtaaagcttcctgatgatgccccgcagccgaagctggaagactaa

SEQ ID NO: 174923 - DNA, 468 bp, Klebsiella oxytoca
atgagtcaggtcattctcgatttacagctggcttgcgaagataacagcggaatgccggatgaagccctgtttcagcgctgggtcgatagcgttattccgcagttccaggaggagtcggaactcacgattcggctggttgatgaagcggaaagccacgagctgaacctgacctatcgtgggaaagataaaccgactaacgtgctctctttccccttcgaagcgccacccggcatcgaaatgccgctgcttggcgatctggtcatctgtcgtcaggtggtcgagcaggaagcgcaagagcaaggtaaaccgctggaggcgcactgggcgcatatggtcgtccacggtagcctgcatcttttgggctatgaccatattattgatgaagaagcggaagagatggaatccctcgaaacggagataatgcttgctctgggctatgaggatccgtacattgccgagaaggaataa

SEQ ID NO: 174924 - DNA, 1047 bp, Klebsiella oxytoca
ttgaatacagacactcgcgaaatcacccttgagcccgcggacaacgcccgtctgctgagcctgtgcggcccgtttgatgacaacattaaacagctggaacgccgtctcggcatcgagattaaccgtcgtgacaaccactttaaactgaccggccggccgatttgcgtcaccgcagcggcggatatcctgcgcagtctgtacgttgataccgcgccgatgcgcggcgaaattcaggatattgaaccggaacaaattcatctggcgatcaaagaagcccgcgtgctggagcagagcgccgaaagcgtgccggattacggcaaggccgtgaatatcaaaaccaagcgtggcgtgattaagccgcgtacgccgaatcaggcgcagtacatcgccaatattcttgaccatgatattaccttcggcgtcggccctgccgggaccgggaaaacctacctggcggtcgccgcagcggtagacgcgctggagcgccaggagatccgccgtattcttctgacccgtccggcggttgaggccggcgaaaaactgggcttcctgcccggcgatctgagccagaaagtggacccgtacctgcggccgctgtacgacgcgctgtttgagatgctcggcttcgagaaagttgaaaagctgattgagcgcaacgtgattgaagtcgcgccgctggcctatatgcgcggccgtacgctgaacgatgctttcatcattcttgatgaaagccagaacaccaccatcgaacagatgaaaatgttcctgactcgtatcggctttaactctaaggcggtcattaccggcgacgtcacacagattgacctgccgcgcagcaccaaatcgggcctgcgccacgcaattgaagtgctggcagaagtcgatgagattagcttcaacttcttccatagcgaagacgtggtgcgccatccggtggttgcccgtatcgttaacgcctatgaagcctgggaagaagcagaccagaaacgtaaagcagagctggccgccgagcgcaaacgcgaagcccaggaacaggagcataaatga

SEQ ID NO: 174925 - DNA, 1425 bp, Klebsiella oxytoca
atgacaaaaaaactccatattaaaacctggggctgtcagatgaacgaatacgattcatcaaagatggccgatctgctggatgccacccacgggtatcaactcaccgaagtggcggaagaagcggatgtgctgctgctcaatacctgctcaatccgtgagaaggctcaggaaaaagttttccatcagctaggacgctggaagctgttaaaagagaagaaccccaacctgatcattggcgttggcggctgcgtggcttctcaggaaggcgatcatattcgccagcgcgcccactatgtcgatattatttttgggccgcagaccctgcaccgtctgccggaaatgatcaactcggtacgaggcaaccgcagcccggtcgtcgatatcagcttcccggaaatcgaaaagttcgaccgcctgccggaaccgcgcgccgaaggcccaagcgcctttgtttccatcatggaaggctgcaataagtactgcacctactgcgtggtgccttacacccgcggtgaggaagtgagccgcccaagcgacgatatcctgtttgaaatcgcccagcttgcggctcagggcgtacgtgaagtcaacctgctcgggcagaacgtgaacgcctggcgcggggaaaactacgacggcaccaccggtagctttgccgatctcctgcgtctggttgcggcgatcgacggtatcgaccggatccgctttaccaccagtcaccccatcgagttcaccgacgatatcatcgaggtttaccgcgatacgccggagctggtcagcttcctgcacctgccggtacagagcggttccgaccgcgtgctgaacctgatgggcagaacccatacggcgctggaatataaagcgattatccgtaaactgcgcgcggcgcgtccggatattcagatcagctccgacttcatcgttggcttccctggcgaaaccacccaggatttcgagcagaccatgaagctgattgccgatgtgaatttcgacatgagctacagcttcatcttctccgcgcgtccgggaacgccggcggccgatatggtcgacgatgtacaggaagaggataagaagcagcgtctgtatattctgcaggagcgcatcaaccagcaggcgatggcctggagccgccgtatgctcggcaccgtgcagcgcattctggtggaaggtacctcacgcaagagcatcatggagctgtctggccgcaccgagaataaccgcgtggtgaacttcgaaggctcgcctgagatgatcggtaagtttgttgatgtcgagatcaccgacgtctggacaaactccctgcgcggtaaagtggtgcgcacagaggacgaaatgggtctgcgtatcgcggaaaccccggagtcggtgattgcccgtacccgtaaagaaaacgatttgggcgtcggtatctaccagccataa

SEQ ID NO: 174926 - DNA, 1176 bp, Klebsiella oxytoca
atgacaattcatgcaacagatgtcgttatcgttggcggcgggatggtcggcggcgccctggcgctaggcctggcgcagcagggttttacggtgacggtcattgaaaaaaacgcgccgccggcttttgacgcttcttccacgcctgacgtgcgtatttcggcgatcggcgcctcatcggtagggctgctgagaggcctgggcgtctgggatagcgtgcggtccatgcgcgcccatgcctatcgccagctcgagacctgggagtgggaaagcgcgcatgtggtgtttaacgccgcggagctgaagctgccggaactgggctatatggtagagaataacgtcctgcagcgtgccctatggcaggcgctggagacccacgagaacatctccctgcgggtgggcacatcgcttcaggagatgcgtcgcgcagagacgaacgcttcggtcacgctgaccgatggcagccagcttgatgcgcggctgttggtgggcgcggacggcgccagttcacaggtgcggcagctagcaggaatcggtatccatgcctggcagtaccaacaatcctgtatgttgatcagcgtgcagtgcgcggaggatcccggcgatagtacctggcagcagtttacccctgcggggccacgggcgtttttaccgctgttcgatcattgggcttcgctggtgtggtacgacacgccggcgaggattcgccagctgcagggcatgagcatggctcagctacagcaggaaattaatcaccacttcccggcgcggctgggagagatgacgccgctaagcgcgggcgcgtttccgttgacccgtcgccatgcattgcagtatgtcaaacctgggctggcgctggtgggcgatgctgcgcacaccattcatccgctggcggggcagggggtcaatctgggctatcgcgatgtcgatgcgctgctggatgtcctggccagggcaaaagcccacggcgaagagtgggccagcctaccggtgctcaagcgctaccagacgcgccgtcaggcggacaactttattatgcagtcggggatggatctgttttacgccggatttagcaacgatttgccaccggtgcggatactgagaaatattgggctgatggcggccgagcgcgctggcggactgaagcgtcaggcgttgaaatacgcgttggggttgtaa

SEQ ID NO: 174927 - DNA, 1662 bp, Klebsiella oxytoca
atgtgttcgatttttggcgtactggatattaaaactgacgcaggcgagctgcgtaaaaaggcactggaactctcccgcctgatgcgccaccgcggtccggactggtccggcgtctatgcctgcgataaagccattctggcgcatgaacgcctgtcaatcgttgacgtgaacgccggcgcacagccgctgtataatgccgcaaaaacgcacgcgctcgccgtcaacggggaaatctacaaccaccaggcgctgcgcgcggaatacggcgatcgctatgccttccagaccggttccgactgcgaagtcatcctcgcgctgtatcaggaaaaaggtccggacttcctcgacgatctgcagggaatgtttgctttcgcgctctacgacagtgaaaaagacgcgtacctgattggtcgcgaccacatcgggattatcccgctgtatatgggccatgacgaacacggcaacttctacgtcgcttcggaaatgaaagcgctggtaccggtctgccgcacgattaaagagttcccggcaggcagctacctgtggagcaaagatggcgaaattcgccagtactatcagcgcgactggttcgactatgacgcggtgaaagacaacgtcaccgacaaaaacgaactgcgtcaggcgctggaagagtcggtgaaaagccacctgatgtccgatgttccgtacggcgtactgctctccggcggcctggactcatcggtaatttccgctatcaccaagaaatttgccgcccgccgcgtcgaggatcaggaaaaatccgaagcctggtggccgcagctgcactccttcgccgttgggctggaaggcgcccccgacctgaaagccgcgcaggaagtggctaaccatctgggtaccgtgcatcacgagatccactttacggtacaggaagggctggacgcgattcgcgatgttatctatcacattgaaacttacgatgtcaccaccatccgcgcttcgacgccgatgtatctgatgtcgcgtaaaatcaaagcgatgggcatcaaaatggtgctctccggcgagggttctgatgaagtgttcggcggctatctctatttccataaagcgccaaacgccaaagagctgcatgaagagacggtacgcaaactgcaggcgctgcacatgttcgactgcgcccgtgcgaacaaggcgatgtccgcctggggcgttgaagcccgcgtgccgttcctcgataagaagttccttgatgtggcaatgcgtatcaacccgcaggataaaatgtgcggcaacggtaaaatggaaaaacatatcctgcgcgaatgttttgaatcttatctgccagcaagcgtcgcctggcggcagaaagagcagttctctgacggcgtcggttacagctggatcgacaccttaaaagaggtggccgctgaacaaatttccgatcagcagttggaaacggccagcttccgcttcccgtacaacacgccatcgtcgaaagaagcctatctgtatcgtgagatctttgaagagctcttcccggtaccgagcgccgcagaatgcgtgcctggcggcccgtccgtcgcctgctcctccgcaaaagcgatcgagtgggatgaatctttcaaaaaaatgaacgatccgtccggacgcgcggtgggcgtacaccagtcggcctactaa

SEQ ID NO: 174928 - DNA, 753 bp, Klebsiella oxytoca
atgaccattcaaaacgtaatttgtgatattgacggcgtgctgatgcacgacaatgtggccgtaccgggcgccgccgaattcatcaagcgcattctcgaaaaagagatgccgctggtgatgctgactaactacccttcgcagactggccaggacctggcgaaccgctttgcgaccgccggaattgatgtccctgataccgccttttatacctctgcgatggccacggcggattttctgcgccgtcaggaaggtaaaaaagcctatgtggtcggcgaaggcgcgctgattcacgaactgtacaaagccggctttaccatcactgacgtcaatcctgatttcgttatcgtcggtgagacccgctcctttaactgggagatgatgcataaagcggcgttttttgtcgccaacggcgcgcgctttatcgccactaacccggatacgcacggccgcggctactatccggcctgcggcgcgctgtgcgccggcatcgagaaaatctccgggcgtaagccgttctatgtcggtaaaccaagcccgtggatcatccgctccgcgctgaataaaatgcaggcgcattcggaacaaacggttatcgtcggcgataatctgcgcacggatattctggcgggcttccaggccggtctggaaactatcctggtgctttcgggcgttgccacgctcgatgatatcgacagcatgccgttccgcccctcatggatttacccttccgttgcggaaattgatattttctga

SEQ ID NO: 174929 - DNA, 1221 bp, Klebsiella oxytoca
atgacagcaggcggacaggctcaaattggtaacgtcgatctcgtaaaacagctgaacagcgcggccgtttatcggctcatcgatcagcacggccccatctcgcgtatccagattgcggaacaaagccagcttgcccctgccagcgtaacgaaaattacgcgtcagcttattgaacgcgggctgatcaaagaagtcgatcagcaggcctccaccgggggccgccgcgctatctccatcgttgcggaaacccgcagcttccacgccatcggcgtacgcctgggccgctatgacgccaccctgacgctctatgatttgagcagcaaaacgcttgaagaagagcactacccgctgccggaaagaacccaggaaaccctggaacacgcgctgctaaatatcattgccgcctttatggagcgctgccagcgtaaaatccgcgaactgatcgccatctcggtgatcctgccgggactggtcgatccggaaagcggcgtcattcgctacatgccgcacatccaggttgaaaactggggtctggtcgaagcgctggaaaaaaagtttaaggtcacctgttttgtcggtcacgatatccgtagcctcgcgctggcggagcactacttcggtgcgagccacgactgcgaagactccattctggtgcgcgtacaccgcggaaccggcgcggggatcatctccaacgggcggatttttattggccgtaacggtaacgtcggcgaaatcggccatattcaggtcgaccccttaggcgagcgctgccactgcggtaacttcggttgtctggagaccgtcgccgccaacgcggcaattgaacatcgcgttcgtcatctgctggaacagggttatcagagcaaaatctccctcgatgactgtacgatcaaaacaatctgtaaagccgcgaataaaggcgatgcgctggcctgcgaggtgatcgagcacgttggccgtcatctgggtaaaactatcgccatcgccattaacctgtttaatccgcaaaaagtggtgattgccggtgagatcgtcgaagcggaaaaagtgctgttgccggctattgaaggctgcattaacacccaggcgctgaaggcatttcgtaaaaatctgccggtggtccgttctacgctcgatcatcgttctgccatcggtgcttttgctctggtcaagcgcgcgatgcttaacgggatcctgctccagcgtttgctggaaagctaa

SEQ ID NO: 174930 - DNA, 1149 bp, Klebsiella oxytoca
atgtatgcattaacccaaggccggatttataccggtcatgaaattctggatgaccatgcgattgttatcgccaatggccttatcgaacgtatctgtcctcaaacagagctgccaaccggtatcgaacagcgctcggttgatggtgcaatccttgcccccggttttatcgacgtccagcttaacggctgcggcggcgtgcagtttaacgacacggcggacgcggtgaccgttgaaacgctggaaattatgcagaaagccaatgaacgctccggctgcaccagctatttgcccaccctgattaccgccagcgatgatctgatgaaacagggcgtgcgcgtgatgcgtgaatacctgcaaaaacatcctcaccaggccctgggtctgcatcttgaaggcccgtggctaaatattgttaaaaaaggcacccacaatccggactacgtacgtaagccggatgccgcgctggtcgatttcctgtgtcaaaacgcggatgtcatcaccaaaatcaccctggcgccggaacgcgtggaaccagaagtgatccgtaaactggtcgcggcaggcatcatcgtttccgccggtcactccaacgcgacgctcaaagaagcaaaagtcggcttccgctccggcatcactttcgctacccatctgtttaacgccatgccgtatatcaccggccgcgaaccgggtctcgccggcgcgattttcgacgagccggatgtctactgcggtattatcgtcgatggcatgcacgtcgattacgctaacgttcgcctcgctaaacgcctgaaaggcgataagctgtgtctcgttactgatgcaacggctccggcaggcgccaatattgagcagttcatttttgctggtaaaacaatatactaccggaacggcctgtgcgtagatgagaacggtaccctcagcgggtcttcattgaccatgattgaaggggtgcgtaacctcgttgagcattgcggcatcgcgctggacgaagcgttacgtatggcaacgctctacccttcccgtgcgattggcgtagacaaacagttgggctgcattgccccggggatggtcgctaacctgaccgcatttacccgcgactataaaatcaccaagaccatcgttaatggtaacgaggtcgtcactgagtaa

SEQ ID NO: 174931 - DNA, 801 bp, Klebsiella oxytoca
atgagactgatccccctggtaactgctgaacaagtcggtaaatgggctgcccggcatatcgttaaccgcatcaacgcgttcaaaccgactgcagaccgtccgtttgtcctcggtctgcctaccggcggtacgcctctgaccgcttataaagcgctggttgagatgcacaaagcaggccaggttagttttaagcatgttgtgaccttcaacatggatgagtacgttggtctgccgaaagatcacccggaaagctatcatagctttatgcaccgcaacttctttgatcacgttgatatcccggcggaaaatattaatctgctgaatggtaacgcgccggatattgatgcagaatgccgtcgttatgaagaaaaaattcgttcttacggtaaaatccacctgtttatgggcggcgtgggtaacgatggtcacatcgcttttaacgaaccagcctcttctctggcttcacgcacgcgtattaaaaccctgacccacgatactcgcgtagcgaactcccgcttcttcgacggcgacgttgatcaggtgccgaagtacgcgctgaccgttggcgtgggcaccctgctggacgcggaagaagtgatgattctggtactgggccatcagaaagcgctggcgctgcaggcggcggttgaaggcaacgttaaccatatgtggactattacctgtctgcagctgcatccgaaagccgttgtggtctgcgatgagccgtccaccatggaactaaaagttaagaccctgaaatatttcaacgaattagaagctgaaaacatcaaaggtctgtaa

SEQ ID NO: 174932 - DNA, 1953 bp, Klebsiella oxytoca
atgaatattttaggttttttccagcgactcggtagggcgttacagctccctatcgcagtgctgccggtcgcggcgctgctgctgcgattcgggcaacccgatctgcttaacatttcgtttatcgcgcaggcgggcggggcaatctttgataacctggcgctgattttcgctatcggtgttgcatccagctggtcgaaagacagcgccggtgccgcagcgctggcgggggcggtaggttacttcgtattgactaaagcgatggtcaccatcaacccggccatcaacatgggcgtcctggcaggtatcattaccggtctggtcggcggcgccgtgtataaccgctggtcgggcatcaaactgcctgacttcctgagcttcttcggcggcaaacgctttgtgccgatcgcaaccggcttcttctgtctggtactggcagccatcttcggctacgtctggccgccggtgcaaaacgccatccatgctggtggtgaatggattgtcggcgcgggcgcgctcggctccggtatctttggtttcatcaaccgtctgctgatcccgacgggtctgcaccaggtgctgaacaccatcgcctggttccagattggtgagttcactaacgctgctggcgcggtattccacggtgatatcaaccgcttctatgccggtgacggcaccgcggggatgtttatgtccggcttcttcccgatcatgatgttcggtctgccgggcgcggcgctggcgatgtacttcgcggcgcctaaagagcgtcgtcctatggtcggcggtatgctgctgtcggttgccatcaccgcattcctgaccggtgtgactgagccgctggaattcctgttcatgttcctggcgccgctgctgtatctcctgcacgctatcctgaccggcatcagcctgttcgttgcgacggcgctgggtatccatgcgggcttctctttctctgcaggcgctatcgactatgttctgatgtacagcctgccggcagccagcaagaacgtctggatgctgattgtgatgggtgttgtcttcttcgttatctacttcctgctgttcagcgcggtaatccgcatgttcaatctgaaaacgccgggtcgtgaagataaagtggatgatgtggtcactgaagaagccaacagcaataccgaagagggcttaacccagttggcgaccaactacattgcggcggttggcggtaccgataacctgaaagcgatcgatgcctgcattacccgcctgcgcctgaccgttgcggactccgcgctggtaaacgatgcggcctgtaagcgcctcggtgcttccggtgtggttaaactgaacaagcagaccatccaggttatcgtcggtgcgaaagccgaatccgtcggtgatgaaatgaagaaagtggttgcccgcggcccggttgccgcagcagcagcgacttcaaacagcgcgcccgcagccgctccggccgctaaaccgcaggccgtcgctaacgcgaaaaccgtcgaagcgctggtttcgccgattactggcgacattgtggccctggagcaggtgccggatgaagccttcgccagcaaagccgtcggcgacggcgtggcggtgaaaccgaccgataagattgttgttgcgccggcagcgggcaccgtagtgaagattttcaacactaaccatgctttctgtctggagacggaaaacggcgcggaaatcgtcgtccatatgggtatcgataccgttgcgcttaacggccagggctttaaacgcctggtggaagagggcgcggaagtgaaagcgggtcagccgattctggaactggatcttgagttcctgaacgctaacgcacgttcgatgattagcccggtcgtatgcagcaacagcgacgactacagcgcgctggttatccaggcaaccggcaaggttgtagcgggccagacgccgttgtacgaaattaaaggcaaataa

SEQ ID NO: 174933 - DNA, 1668 bp, Klebsiella oxytoca
atgagtgaggcagaagcccgcccgactaactttattcgtcagatcattgatgaagatctggctactggtaagcacaccaccgttcatacccgttttccaccggaaccgaacggctatctgcacattggccacgcaaaatctatttgcctgaactttggtatcgctcaggattaccagggccaatgcaacctgcgtttcgatgacaccaacccggtgaaagaagatatcgaatacgttgagtcgattaaaaacgacgtgcagtggttaggtttccactggtccggggatgtttgctactcgtctgattatttcgatcagctgcaccagtatgcggttgaattaatcaataaaggcctggcctacgttgatgaactgtcagcggatgagatccgtgagtaccgcggcaccctgaaagagccgggtaaaaatagcccgtatcgcgatcgcagcgtggaagagaacctggcgctgtttgaaaaaatgcgtagcggtggatttgccgagggtaaagcctgcctgcgcgcgaaaatcgatatggcttcgccgtttatcgtgatgcgcgatccggtactgtaccgtattaagtttgccgatcaccatcagaccggaagcaagtggtgcatctacccgatgtacgactttacccactgcatcagcgatgcgctggaaggaattacccactctctgtgtactctcgagtttcaggataaccgccgcctgtacgattgggtgctggataacatcagcattcccgtgcatccgcgtcagtatgaattctcgcgcctcaaccttgaatacaccgtgatgtccaagcgtaagttgaatcagctcgtgacggaaaaacacgtcgaaggctgggatgacccgcgtatgccgaccatttccggcctgcgccgtcgcggctataccgcagagtctatccgcgagttctgcaaacgcatcggcgtgaccaagcaggacaacactatcgaaatcgctgccctggaatcctgcatccgcgaagatttgaacgaaaatgctccgcgtgccatggccgttatcgacccggttaagctggtgatcgaaaactatccgcagggcggcagcgaaatcgtcactatgccgaatcatcccaataaaccggagatgggcagccgcgaggtgccgttcagcggcgaaatctggatcgatcgcgccgatttccgcgaggaagcgaacaagcagtacaagcgtctggtgctgggcaaagaagttcgcctgcgcaatgcttacgtcatcaaagcggagcgcgtggagaaagatgcggaaggcaatatcaccacgattttctgtacctatgatgccgacaccctgagcaaagatccggccgacggccgcaaggtgaagggcgtgattcactgggtgagcgcggcgcacgcgctgccggtcgaaatccgtctgtacgatcgcctgttcagcgtaccgaacccgggcgcggcggaggatttcctctcggtgatgaacccggaatcgctggttatcaaacagggttttgccgagccaagcctggcgcaggcgcagccggaaaaagcgtatcagttcgagcgcgaagggtatttctgcctggatagccgctatgcaaccgcaaccaatctggtgtttaaccgcaccgtcggtctgcgcgatacatgggcaaaagtcggcgcgtaa

SEQ ID NO: 174934 - DNA, 1404 bp, Klebsiella oxytoca
atgcgtacgtttagtggcaaacgtagtacgctggcgctggctattgccggtgtcacagccctgtcaggatttgcaatggtgccggatgcaaaagcagaagggttcattgatgattcaacgttaaccggcggcatctattactggcaacgtgaacgcgaccgtaaagatgtcaccgacggcgacaaatataaaactaacctgtcgcactctacctggaacgccaacctcgacttccagtccggctacgccgccgatatgttcggcattgacgttgctgcctttaccgccatcgaaatgggcgaaagcagcgagagcggtcacccgaacgaaatcgctttctcctcgcgcaataaaacctacgacgaagactattccggcgataagagcgggatcagcctgtataaagctgccgcaaaatttaaatttggtccggcgtgggcgcgcgcgggctatattcagccaaccggccaaacgctgctggctccgcactggagctttatgcccggcacctatcagggcgcggaagccggcgctaattttgactatggcgacgcgggcgcgctgagtttctcctatatgtggacgaacgagtataaagcgccgtggcatattgagatggatgagttttaccagaacgataagaaaaccaaggtggattaccttcactctctcggcgccaaatatgattttaaaaacgacctggtgctggaagcggcatttggtcaggcccagggttacatcgaccagtattttgccaaagccagctataaatttgatgttgcaggcacgccgttaaccaccagctatcagttctacggcacccgcgataaagtcagcaacggcggggctaacgatatttatgacggcaccgcgtggctgcaggcattgacctttggctataaggtggccgacgtgctggacctgcgtctggaaggaacctgggttaaagctgacggccagcagggctacttcctgcagcgtatgacgccaacctacgcctcttctaacggtcggctggatatctggtgggataaccgctcggacttcaacgccaacggtgaaaaagcggtgttcttcggcgcgatgtatgacatgaagaactggaacatgccgggctgggcctttggcgcatcctatgtctatgcctgggatgcgaagccgggcagaatgtcctcgcctgatgcctactacaacccggataaacgcctggaagagtccgcctatagcctggacgccatgtataccgttcaggaagggcgcgcgaagggcacgctgttcaaactccactttacgcaatacgacaaccactctgatatcccgagctggagcggcggttacggcaacatcttccaggatgagcgcgacgtgaagttcatggttatcgcaccgttcaccattttctga

SEQ ID NO: 174935 - DNA, 333 bp, Klebsiella oxytoca
atgaagaagttactgcttgtcgctattatggcaacaggcctggttgcctgtacgcagtcgccagcgccgaaagaagactcaaagttgagagacgcctacagcgcctgcattactagcgcggaggggaacccggataagcttgaagcctgtcagagcgtactgaacgtgcttaagcaagagaaacagcaccagcagttcgccacccaggaaagcgtgcgggtgctggactatcaacagtgtatccaggcgcgcaaaaccggtaacgatcaggccgtgcaggcgcgctgcgaccagctctggaaagagatccgcagcaacaatacgcctcgttaa

SEQ ID NO: 174936 - DNA, 1296 bp, Klebsiella oxytoca
atgacgcaatcatcatcgcgcgccggtaccttcggcgctattctccgcgtgaccagcggtaattttctcgagcaattcgacttttttctgttcggtttttacgccacctacatcgccagaacgttctttccggcggaaagtgagtttgcggcgttaatgctcaccttcgccgtgtttggttcgggcttcctgatgcgccctatcggggcgatagtgctgggggcctatatcgacagaatcgggcggcgtaaagggctgatggtgacgctggcgattatgggctgcgggacactgctgatagcactggtccccggctatcacgccatcggcgttctcgcccccattctggtattagtcggccgtctgctgcagggattctcggcgggcgtagagctcggcggcgtgtcggtctacctgtcggaaatcgccaccccggggaaaaaggggttctataccagctggcaatccgccagccagcaggtggctatcgtggtcgcggcgctgattggctacgcgctgaacgaaacgcttggccatgatgagatcgccgaatggggctggcgtatccccttctttattggttgtctgatcattccgctgatttttgtactgcggcgttcgctacaggaaaccgaagctttcctgcagcgtaaacatcgtcctgatacccgagaaatcctgagcacgattgtaaaaaactggcgcatcatctcggcgggcaccttactggtggcgatgaccacgaccactttttactttattaccgtttataccccaacctacgggagagccgtgctgcatctgagcgctcgcgatagcctgctggtcaccatgctggtcggcatctctaactttatctggttaccgattggcggggcaatttctgacagaataggccgtcgtccggtgctgatgggcatcaccctgctggcgctgtttaccacctggccggtgatgcactggctcaccgccgcgccggattttacccgtatgacgctggtcctgctctggttctcgtttttcttcggtatgtataacggcgcgatggtcgcggcgctgaccgaagtgatgccggtctacgtccgcaccgtgggcttttcgttagcctttagcctcgccaccgctatctttggcggcctgacgccggctatttccaccgcgctggtcgagatcaccggggataaaagctcgccgggctggtggctgatgtgcgctgcgctatgcggacttgccgcaactgccatgctctttactcgcctgagccgcagctatcagccagcagaaataccccgctaa

SEQ ID NO: 174937 - DNA, 1140 bp, Klebsiella oxytoca
atgaagtcgcttgaaaagttgattatcgacgcgcagatcatcaccgagccggaagcggaagttgaacgggtgatgcaggtctgtaacgcctgccgctattgcgaagggttttgcgccgtgtttccggccatgactcagcgcctggcttttggtaaagcggatattaactacctggccaacctgtgccacaactgcggcgcctgcctgcatgcctgccagtatgctccgccgcacgagtttgccattaatgtcccgaaagcgatggcggaagtccgcctggaaacctatcagcactatgcccagcccgcggctttcagcagcctttaccgtcgggccggcgtgaccacggtgctggcgttggtcgccggtttgatcctctttttgctattggcgatggggctcaatggctcgctgcttcatccgccgctggccggcgatttttaccggatatttccccataacctgctggcctggatgtttggctcggtcttcattctggccatagggttacttatgagcggggtgatccgcttctggcgcgagatttcaccgggtcagcctcaggctatcgacatcgctacagcctcgcataatgcgctcacgctgaagtatctcgacggcgggcacggtaaaggctgcaacgaggctgatgacgcgtttaccctgatgcgccgccgtttccatcactttaccttctacggttttctgctctgtttcgccgccaccgtggtggctacgggttatcactatatcgccggttgggaggccccctacccgttcttcagcgtaccggttgtactgggcacgctcggcggtatcggcctgctggtcggcccggcgggtttgctatggctaaacctgcgccgctcgccgctgcacggcgatgcgcggcaaaaaccgatggatcgcggctttattctgctgctgtttttaaccagcctgaccggactggccctgctggcagggcgcgatacctcgtggatgggcgtcctgctcgccattcatctcggcgttgtgatggcgctgtttttaaccctgccatacggaaaatttgcccacggattttatcggtgtgcggcgttactcaagtgggcaattgagaaacggcgcggaaaacaggcggcagtcgcaggcgactag

SEQ ID NO: 174938 - DNA, 1404 bp, Klebsiella oxytoca
atggtggatgtactggtgattggcggcggcaacgctgcgctatgcgccgccttgaccgcccgggaatccggcgcgtccgtgctgctgctggaggccgcaccgaaagaatggcgcggcggaaactctcagcacacgcggaaccttcgctgtatgcacgatgctccgcaggatgtgctggtcgacagctatccggaagaagagtactggcaggatctgctgcgcgtcaccgagggtaataccaacgaagcgctggcgcggctggtgatccgtacctcatcacagtgccgggactggatgcgccagcacggagttaactttcagccgccgctctccggcgcactgcacgtcgcccgcaccaacgcctttttcatgggcggcggcaaggctcttataaatgcttattaccgcagcgcggagcagatgggtgtacagatccgctacaacaccccggtccaggcgctcgaattatataacggcgaattcgtcgccgcgctggcgggtgaagaaaggattgccgcaaaaacctgcgtcctcgccgccggcggctttgagtctaaccgcgagtggctgcgcgaagcgtggggacagaacgatcgcggcgaatggccagccgataactttctcatccgcggaacccgctttaaccagggcgtgctgctgaaatatatgatcgacgccggggctgacgttatcggcgatccctcgcagtcacactgcgtcgccatagacgcccgggcaccgctctatgatggcgggatctgcacccgcgtggactgcgtatcgctgggcgtggtcgtaaaccgcgacgccgagcgcttttatgatgaaggggaagatttctggcccaaacgttatgccatctgggggcggctggtcgcccaccagccgggacaaatcggctattcaattatcgacagcaaagcgatcggtcactttatgccgccggtttttcccggcgcccaggccaatactatcgaagaactggctcgccagctggggctggacgcggcgcgtctggcgcaaaccatcgcgcactataacgccgcctgcgtgccgggccagttcgatcatacctgccttgataactgcgcaacatcaggcctgaccccaccgaaaacccactgggcgcggcccatcgattcgccgccttactacggttacgccttgcgcccggggatcactttcacctacctcggactgtacgtcaatgaacgcgccgccgtccattttgcgggcaaacccagccgtaacctgttcgttgctggcgaaatgatggccggcaacgtgttgggcaaaggctataccgccggcgtaggcatgtcgattggtacgacgttcggccgcattgccggccagcaggccgcccgtgcggcacagcaggagatacatcatgaagtcgcttga

SEQ ID NO: 174939 - DNA, 927 bp, Klebsiella oxytoca
atggagcttcgccagctacgctattttgtgcgcattattgaaaccggcagtatgggccgcgccgcgcttgacctgaatatcggcgtctccgcgcttagccaacaaatggcgcgcctggaaaatgaactcgccattcgcctgctacaacggacgtctcgcggcgtaatgcccaccagcgctggcctcgccttctattcacaggcgcagctggcgctgcgccacgctgatgatgcggttcttgctgcgcgcgaggcgcggctatctggccacgtcagcgtcggcatggcccccagcaccgcctctgtgctcggcgtaccctttattaacgcgatgcgcgaaagctatgccgacgtccgcctgcatctggtagaaagtctctccggcaaccttgaacgcatgatcaacacccgtcagctcgatttagcgatcgtgttccagaaggagaagcttgtgcgctggagcgccaggccgattcttgaagagcgtctgtttctgattggcacccataaggtactggctccccttcccgacgatagcatctcgccggaccagctctccgctgtcccgctgattatgccaagcctggggcatgggctgcgcggcaggctggaggcgatttgccaggagcatgcgcttaatgtcgatgtggtcgctgaaatcgacggtctggccctgctgatgcgcgccgtgcgcgacggcctcggcgccactttgcagccgggagcagcgatttctcatctcgatggcgaccccctgagagtgatcggcatcaacaatccgatactcagtcggcctaattttctcgtcagtctttccgatgatgaactgaccccatcgggtctcgccgcgcgagtcatactggcaaaagtcatgcgtcagctggtcgaatctggccgctggcctggcgccagcctttacgcacactaa

SEQ ID NO: 174940 - DNA, 453 bp, Klebsiella oxytoca
atgactgacaacaataccgcattaaagaaagctggcctgaaagtgacgcttccgagattaaaaatcctggaagtgctgcaaggaccggataaccatcatgtcagtgcggaagacttatacaaacgcctgattgatatgggtgaagagattggcctggccaccgtctaccgcgtactgaaccagtttgacgacgccggtatcgtcacccgtcataatttcgaaggcggtaaatccgtttttgaactgacgcagcagcaccatcacgatcacctgatttgcctggactgcggcaaagtgatcgagtttagcgatgattctatcgaagcgcgccagcgtgagattgccgccagacacggtattcgcctcaccaaccacagtctgtacctgtacggccactgtgcagaaggcgactgccgcgaagatgaacatgcccacgacgcggtagagaaataa

SEQ ID NO: 174941 - DNA, 531 bp, Klebsiella oxytoca
atggcaatcatcggcatcttttttggcagcgacaccggcaacaccgaaaatattgcaaaaatgattcaaaagcagcttggtaaagatgttgctgatgttcacgacattgccaaaagcagcaaagaggatctggaagctcacgatatcctgctgctcggcatcccaacctggtactatggtgaagcccagtgcgattgggacgatttcttcccgacgctggaagagatcgattttaatggcaaactggtagccctctttggctgcggcgaccaggaagactatgctgaatacttctgcgatgcgctgggcaccattcgcgatatcatcgaaccgcgcggcgcaactatcgttggccattggccgaccgctggctaccattttgaagcctctaaaggcctggccgatgacgatcattttgtcggtctggctatcgacgaagaccgtcagcctgaactgactaacgaacgcgtcgaaaaatgggtaaaacagatttccgaggagctgcacctcgaagaaatcaagaatgcctga

SEQ ID NO: 174942 - DNA, 294 bp, Klebsiella oxytoca
atggcaaaagaacaaacggaccgtacgacattagatttgttcgcaactgagcgtcggccgggaagaccgaaaacgaatccgctttcgcgcgatgaacagctgcgcatcaacaaacgcaatcagcttaaacgcgacaagagccgcggcctgaagcgcgtggagcttaagctcaatgccgatgcggtcgatgcgctcaatgagctggccgaagcccgtaacatgaaccgcagcgatctgatcgaagagatgctgatgacccagctggcagccctgcgcggccaggataaagcctaa

SEQ ID NO: 174943 - DNA, 774 bp, Klebsiella oxytoca
atgaaattaaatagccgagcgcaatctgcacagaatcagcacaataatccccctatcgtcctggtccacggcctttttggcagcctggacaaccttgggatcctcgcccgcgatctggttgtcgatcacgatacggtgcaggtcgacatgcgaaaccacggtctctccccgcgcgcgccggagatgacctacgccgcgatggctgaggatctgcttgatactctcaatgaatcgcagattgagaaagccacctttattggtcactctatgggcggcaaagcggtgatggcgctgagcgcgctggcaccagagcgcatcgcaggcctggtagctattgatatcgccccggtggattatcacgtccgccgccatgatgaaatttttgctgccatcaacgccgtcaccgatgcgggcgccgctacgcgtcagcaggcagcgacggtcatgcgtcaacatcttaatgaagagggcgtagttcagtttctgctgaaatcctttgtggatggccagtggcgttttaacgtaccggtgctgtgggagcagtacgacaacatcgtcggctggcaaaccgtcccggcatggccgcatccggcgcagtttatccccggcggcaactccccttacgtgaccgatgcctgtcgtgacgcgctgcttgcgcagtttcccgaagctcgggcgcacgttatcgccggcgccgggcattgggtgcacgctgaaaaaccggaggccgtgatccgcgccattcgccgttatttgacctctatcgccgcgtaa

SEQ ID NO: 174944 - DNA, 549 bp, Klebsiella oxytoca
atgaaaacaattgaagttgatgatgaactctatagctatattgccagccacaccaagcatattggcgagagtgcatccgacattttacggcgcatgttgaagttttccgccgtttcccagcctgccgcaccggtagcgaaagccgctccggcaccggcgccaacgcctgtcgttgacgtgaagcccgctaatcctctgaaggataaagttcgcgcgatgcgtgagctgctgttatctgatgagtatgccgaacaaaagcgcgcggtaaaccgattcatgctggttctgactaccctctacaccttagacagcaaagcgtttgccgaggccaccgagtctctgcacgggcgcacccgcgtctatttcgctgaagatgagcgcacgctgcagaaaaacggtaatcagactaagcctaagcaggtccccggtacgccgtggtgggttatcacaaataccaataccggtcgcaaatgcagcatgatcgaacacatcatgcagtccatgcagttccctgcggaattgatcgaaaaggtttgcggtacgatctag

SEQ ID NO: 174945 - DNA, 1641 bp, Klebsiella oxytoca
atggcaatcgataagcgcgcaggtcaacctgcgcaacagagtgatttgattaacgtcgcccaactgactgcccagtactatgtgctgaagccggaagtaggcaatgcggaacatgcggtgaagtttggcacctccggccatcgcggcagcgcggcgcgccataacttcaacgagcagcatattctggcgattgcccaggcaattgctgaagaccgcgcgaagaacgggatcaccggcccatgctacgtcgggaaggacacccacgcgctctccgaacctgcctttatttccgtactggaagtgctggcggcgaacggggttgacgttatcgtgcaggaaaacaacggtttcaccccgacgccggcgatttccaatgcgattctggtgcacaacaaaaagggcggcccgctggctgacggtattgttattacgccgtcccacaacccaccggaagacggcggtatcaaatacaacccgccgaacggcggcccggctgataccaacgtcaccaaagtggtcgaaaaccgcgccaacgaactgctggcggcgggtctgcagggcgtgaagcgtataacgcttgatgcggcgctggcctccggtcacgtcaaagagcaagatctggtgcagccgtttgttgagggattagcggatatcgtcgacatggcggcgatccagaaagccggactgacgctgggcgtcgatccgctgggcggctccggtatcgaatactggaagcgtatcgccgagcattacaacctaaacctgactatcgtgaatgaccacgtggatcagactttccgctttatgcacctcgataaagacggcgcaatccgcatggactgctcctccgagtgcgcgatggcgggcctgctggcgctgcgcgacaagtttgacctggctttcgccaacgacccggattacgaccgccacggtatcgtcacgccggccgggttaatgaacccgaaccactacctggcggtggcgattaactacctgttccagcatcgcccgcagtggggcaaagatgttgcggtgggtaaaaccctggtctcctcggcgatgattgaccgcgtagtcaacgatctgggccgcaagctggtggaagtaccggttggctttaagtggttcgttgatggcctgttcgacggtagcttcggcttcggcggcgaagagagcgcgggggcgtcgttcctgcgctttgacgggacgccgtggtccactgacaaagacggcatcatcatgtgcctgctggcggcggaaatcaccgcggtgaccgggaaaaacccgcagcagcactacgacgagctggcagagcgcttcggcgcgccaagctacaatcgtctgcaggcttccgcgacttcagcccagaaagcggcgctgtctaagctctctccggaaatggtgagcgccagcaccctggcaggcgatccgattaccgcgcgtctgactgcggctccgggcaacggggcggcgattggcggtctgaaagtgatgaccgacaacggctggttcgccgcgcgtccgtcaggtaccgaagatgcctacaaaatctactgtgaaagcttcctcggcgctgaacaccgtcagcagattgaaaaagaagcggtggagattgtcagcgaagtgctgaaaaacgcctaa

SEQ ID NO: 174946 - DNA, 420 bp, Klebsiella oxytoca
atgaaactaaaacgtaaacacgtcttccggttctggggcgggatggatctcttttatctcatccagtttctcggctggaatctttaccatcagcgcctgcctttctacgacgacatcctctcttatctccagcttgtacccacccttggccccgcggccgcctggctgttcccgctgaatgtgctgctgattgtcactattcccgtgtcgatggttctcctctggcggcagagccgctatgccctgcggttggcctgtgcgcaaacgcccctgcggctggcctttatgctgccctcactttcgctggtgctatggggcgcgcaggtcctgggagttaaaggcgcggctttctttatcgctctgctgctggtctctgaggcggcaaaattgatgacgttatggcgatggcgaaagatttaa

SEQ ID NO: 174947 - DNA, 798 bp, Klebsiella oxytoca
atgttacaagttaaacgtcactcattaattgtggaatatgtcgtagaaaaggggtgtgccagagttaatgagctgtcgcgattatttggcgtatctccggaaactattcgacgtgatttaactgcgctggccaggaataagaaaatagtgcgcagctttggcggcgcaatgatttccgaaaatacggcatcgtttttagctgccgatatgccggcaaataacggaaactttgtcgataaagccgaagcctttattaagcgcacgaaagaacagccagaacgtaagatgcgcatcgccaaaggtgcgctgcaatttattcatgagcatgagtgcatcattatggataatagcagctcctgctggtttttagcccgtcagctacctgacattgaattgaccgttattactaattctttgaatattattcaaaccttagcctgtcgcaaaaaaataagaattgtcagcgttggtggtgaatattctgagcgtcacggtgactttcacggtccggttgctgagttcattatcaacaattttaaggtcaataagctgtttttttcctgtcagggtctggactccggtctggaaattaaagacagtaatgaagtcaacgtccggctaaagcaagagatgctgaaagttgccgatcaaaaaattctgatggtcgatagcagtaaatttgaacgctattcgctttataaaatatgcgatctggcggatattgatatcttgatcactaatgagttacccggcgatatctatcgccagcatcaggtacatattgtagagaccaaataa

SEQ ID NO: 174948 - DNA, 1074 bp, Klebsiella oxytoca
atggaacaattacctgaagatatgaaagcggttgtctgccacggtccccaggattatcgctttgagaaaattcgccgcccgatcgccaaagaaaaggaagtggtcattaaggttgacggctgtggaatatgcgccggtgattgcaaggcccaggacggtgcgccgatgttctggggtgataatccgtgggtaaaaacgccggtagtgcccggccatgagttttacggtcgggttgctgaattaggcccgggttccgctgaaaaatataaattaaaaattggcgatcgcattctcgctgaacagattgttccctgccatgagtgccgtttctgtaaaaccggaaaatactggatgtgtgaaacccatgatatttacggcttccagaaagatgtcgccgatggcggtatggctgaatatatgcgtttctccgaacgcgcgattattcataaaattcctgaatcattaagtgaagaagatgcggcgctgatcgaacctatggcctgtgcaatccatacggtacgccgcggggatatcgaactggatgatgtggtcgttatcgccggcgccgggccgctggggctgtgcatggtgcaggtcgctcatcttaagacgccgaagaaactggtggtcatcgataccatggaagatcgcctggcgctggctaaagcgtttggcgccgacgtggtcatcaacgcggcgaaagaggacgccgtcgccattgttaaatccatgacggacggatacggctgcgacgtttatatcgaagcgaccggcgcgcctgttggcgtgactcagggactggagatgatacgcaaactggggcgcttcgttgaatttagcgtgtttgggaaagaaaccaccgccgactggtcgatcatcggcgaccgcaaagagctcgatattcgcggtgcgcatctcggcccctatagctatgaaatcgctatcgatctttttgagcgtggcctcttgaccgccaaaggcgtggtaacgcatttctattctatcgatgagtggaaagccgcttttgagatggccaaatcgctggattccatcaaggtcgttatcaagccataa

SEQ ID NO: 174949 - DNA, 915 bp, Klebsiella oxytoca
atgcctgttaaatttaataccaaagcattactctcaggacttctggctatgagcatggtcgcctgcgttaatgctaaacctttgactatcggcatgtccttccaggaattaaacaacgaatatttcgtgaccatgaaagagtcacttgaacagtcggcaaaagatattaacgccaccgtctatactgcggatgcggcgcatgatgtctccaagcagattagcgatgttgaggatatgctgcaaaagaaaattgatattttgctgattaacccggcagatagcgttggcgcggaaaccgccgtcctggccgccaaaaaagccggcgtggtggtggtggcgatagatgctcaggctaacggtccgattgattcttttgtgggttcaaaaaactatgatgcgggctttatcgccggagagcatttagccaaagcgctgggagataaaggcaacgtggcgattctcgacggaattccggtggtgcctattctggagcgtgtgcgcggctttgaagatgcgatgaaaaagcatcccaatattaaagtgcttaccaaactgaatggtaaacaagagcgcgatacctccatgagcgtgacggaaaatatgctgcaatccaacccgacgctcaacggtattttcagcgtcaatgatgttggctcactcggtgccctggcggctattcagtcatctggacgcgatgtcaagctggtcagcgtcgatggatctccggaagcggtggctgaaattgccaaaggtaatacgccgtttattgctaccgcagcacagttcccgcgcgatcagctgcgtattggcttaggtattgccctggcaaaacactggggggcgaatattcctaaagagattcctgttgatgtgaagcttatcgataaaaacaacgccaaagatttccactggtaa

SEQ ID NO: 174950 - DNA, 1485 bp, Klebsiella oxytoca
atgcccagcttactggaagtcaaaaacgtcagtaaaagcttccccggagtcaaggcgctggataatgttaatatcacccttgctcgtggagaagttcacgctttattaggtgaaaacggcgcgggtaaatcgacgctgatgaaaatcctgtgcgggatctatcaacctgacgccggtaatatttatattgatggtaagcagcagcattttcataactatcgcgatgcgattgcctgcggcgtagggattatctttcaggagttttctcttattccctatctgaacgcttatgagaatattttccttaatcgtgaaaaggtaaatcgttttggcctgttagatcgtaaagcgatgcgtcgggaggcgttacgcatttttaaagagcttggcgtcacgctcgatcccgacgagcaaatctgccatctcagcgtcgccgagcagcagttcgtggaaattgccaaagcgctgtcgctggatgcgcgaattctcattctggacgaacccaccgcgaccctgactcctggcgaggcggaacatcttttccgcgtgatgcgcgatttaaaggccaaaggcgtcggcatgttctttatctcgcatcatctggaggagatatatgaaatctgcgatagcctgagtattctgcgcgacggcaaatatatcggatcggcaaaggtcgacaatatcgatatcgcagagatgatccagatgatggtcggccgtgaggtagagaacatctatcccgagcggcggacgctggcgcatgatgaaatactgctggaggcggaaattcagctgaccgaaagtagtcaggttaatcggctgacgttgcgcaaaggggagatcttaggtcttgccgggctggtggggtcggggcgttccgaagcgattctggctctgaccggcgcggataaatgctacaaaaaacgcgtccgtctggccggaaaagaggtgacgataaattcaaccgatcgggctctgcgtctgggtatcggcctgttgccggaaagccgcaaaacgcagggactggtactgcctttttcggtcaaagacaatatctggcttaacaaacacgcctgccagttctcgctaatccgcgataacgaagagcgcctgaccgccgagcgtttaattagccacgttggtgtgaaaacgccagatgccgggaccgcggtggggacgttgagcggcggtaaccagcagaaagtcgttatttctcgttggttaaatcatgacgtcaatattcttatttttgacgagccgactcgcggtattgatgtcggagcaaaatcagaaatctaccagattatgcgcgacctcaccgcccaggggattgcgataattatgatttcatctgagcttccagaggtcataggcgtcagcgaccgggtgatggtttttcgcgacggtaatatcgttgcggagcttgagaccgaccaaattaattccaccgtcattatgctgcatgctgccggtaatattatttag

SEQ ID NO: 174951 - DNA, 987 bp, Klebsiella oxytoca
atgagtaatgaaaacgtatcattagcgccagccgtgtctcctgataaaaataaaaagatgctgcatagtttattaaaaatgcctgcattcctgccattcgttggtctggtactcctgttttcctgtatggccatttttaatgactacttcttaacggttgataacttatctaccgtcgcccgtcaggtctcgatcaatgccatcatcgccatcggaatgacctttgccatcctgaccggcgggatcgacctctccgtcggcgcggtcatggccctggccggtacgctgatggcgggattaatgaagtactatggtttagacccgtggttagccattcttatcggcctgggttccggcgtcgcctttggcgcgctaaacggctttttaaccgcctacggcaaaatgccgccgattatcgtaaccctcggcgcgatgattattgcgaaggggctggcactgatctataccggcggctatcccatctccggcttaccggattcattcgctttttggggccgtgaatatctgttcggtattcaggtacctattattctgatggtggttttatatttcatcttttatatcgtgctgaatcatatgccgtttggccgctatgtttattctcttggcggcaatgaagaagcggcgcgcctgagcggactgcgggttaaatattataaattgctggtttatgtgatcagcggttttaccgccagttttgccggtcttatttttacctcacgggtgatgagcggtcagcctaatgcgggcgtcggttttgaactggatgctattgccgccgtggtgctcggcggggcatcgattgccggtgggcgcggaatgattattggcacgctgatcggcgccatgatgctcggcgtactgaataatggattaaacctgttagggatctcaccttacgttcagtacgtggtgaaagggcttattatttggggcgccacctttattagctcagccagacgttaa

SEQ ID NO: 174952 - DNA, 1479 bp, Klebsiella oxytoca
atgaattttatcggagtggatatcggtggtacggtcaccaaagccgggatatatactgagtgcgggcaggagatccacgtggcttcgcaatatgctcaggtattatccgaacagccgggttttaccgagcggaacatgcatgagctatgggataccgtttgcagcgtaataaaaaaagcgctgtttgaaagccaggtgccagcgttaagtattggcgggatcggcttctcctcgcacggcaaagggctgtacgcgattgataaaaaaggcgagccggtgcgcaacggaattatctcatccgatacccgggcgctggcgttcgtcaaaaaatggtaccgcgaaggggtcgataaactggcctatcccaaagggctgcagcagttgtggaccgggcacccggtatcgctgctggcgtggttaaaagcacatgagcccgccaactacgacagaatcgacgccgttttaatggtgcacgactacattcgctttcgtctgaccggcgaggcgacggcggaaattaccaatatttccggcagcaatttttataaccagctttcctcccgctacgaccgcgacatgatggcgctgttcggcattgaggaagtggcggataagaccgcgccggtggtcaactcgacggactgcgtgggccacattaccctgcaggcctcgctggactgcggattatgtcccggaacgccggtattcggcggctttttcgacgtggtggcctccgccgtctcatcgggcattgaccgggcggataccctgagcgcagtggccggtacatggagtatcgccacctcggtggtggacagcattattgccagcgactatccctacatttggggaaaatactgcattccgggcaaatattttgttcatgagggcagccccacttcggcgagcaatctctcctggtttgtgaaacagtttttccctgacgatgaccgctgctacgaccatttcgaaagctggattgcgcaagagaccgacagcaacctgatttttttaccttatctgttcggttccaatctggcgatggatctgccgggtgcgctggtaggtctggcgggacatcatacgaaaaaggatattattgcggccatctaccgcgggatcgttttttctcacctgatacatcaggaccgcattattgaactcaatcggggtattgaaaaaattcgctttaccggcgggccgagccagtcgagaggctggacccagatgtacgccgacgctgccaatcttcctctggaagtcgtggacatcgaacaggcgggatgtcgagccgccgcgctgtgcgcagccgccggcagcggagcctacgccaacttcagcgaagcgatagcggccacgcagcccgaggtggtcagttatcaaccggacggcaagcggcatcagcagctgcgcgaaggttatgcccgttacgtagaggtcgcgcaaagcctctccagggcaacgggggcggcgcaatga

SEQ ID NO: 174953 - DNA, 900 bp, Klebsiella oxytoca
atgaaaccgagacttggtatctacgaaaaagcgcttcccgctgcgctggactggccgaaacgcttcgaaatggcggctggcctggagtttgattttatcgaaatctccgttgatgagagtcctgaacgtcaggccaggctgcgctggaaccgtggacagcggctggcatttgtggccgacaaaattaacagcggtatcgatgtgccgagcatgtgcctctccgcgcaccgcagccatccctttggtagcgtcaatcgcgagacccggctcaaggcgcgggaactgatgcttgatgcgctggattttgccagccacgtcggtattcgcaacatccagctggcaggctatgacgtctattacgaatcctcttcggcgcagacccgggaatactttattgagggcatcaactgggcggtagccgaagcggcgaaagcgcaggtgatgctgtcgatggagattatggataccgcctttatgagcaatatctcccgctggctggatctcgaaaggaaggtctgtagtccgtggttttgcgtctatccggacgtcggcaacttaagcgcatggcaaaacgatgttcccgaagagttgagtaagggaattcataaaatcaccgccattcatttgaaggatacgcagccggtgtcccacgcttcgctggggcagtttcgcgatgtgccattcggtaccggctgcgtcgatttcacggagatatttcgtacgctctcggcgctgaactatcgcggcgcctggctgattgagatgtgggccaaaaacgacgggctggatagcgagagaatcgccgacgctaaagcgtggctaacggataaataccagcagacatttcgtccaccgcactatgaaggcattgtgaattcaggagtgaagtatgttggataa

SEQ ID NO: 174954 - DNA, 696 bp, Klebsiella oxytoca
atgttggataacctcaagcaggcggttcttgatgccaatctggcgctgccgaaatttaatctcgtgacctttacctggggcaacgtcagcggcatcgatcgcgacgccgggctggtggtgatcaaaccctccggcgtggaatacgccgtgatgaccgctgacgatatggtggtggtggagctggcgaccggcagcgtggtggagggacgctataagccctcgtcggatacgccgacccatctcgagctgtataaggcattcagcggcgtgggcggaattgtgcatacccattcgcgccatgcgacgatttgggcgcagtcggggaggtcgctgctggcgatgggcaccacccatgccgactatttttatgggccgatcccgtgtacccgtccccttagcgatgatgaaatccgcagtgattatgaaaccaataccggtcacgtgattatcgaaacgctgggcgcgcagcataccgatccactcagcgtgcccgccgcgctggttcacggccacggcccatttgcatggggaaaagatccggcgaacgcggtgcataatgccgtggtgctggaagagattgcctatatgaatatgtggacccgccagttaagcgctgacgaacagccggtctctgcgaccctgctggataaacactatttgcgtaaacacggcgcgggggcctactacgggcagtaa

SEQ ID NO: 174955 - DNA, 678 bp, Klebsiella oxytoca
gtgattaacgttctgattatcgaagacgaaaacgctatccgccgctttctgcgcaccgcgctggaagccgacggcatgcgcgtatttgaagcagagacgctgcagcgcgggctgatcgaagccgcgacccgcaagccggatttagctattctcgatctgggtctgcccgatggcgacggcaacgcgtttattcgcgaggttcgccagtggagccagatgccgattatcgtgctgtcggcgcgcaccgaggagcaggacaaaatcgccgcccttgacgcaggagccgatgactatctcagtaaaccctttggcattggcgagctgcaggcgcgactgagggtggcgatgcgtcgccatgccggcgcccaggccgacgagccgcgggtgcgttttgccgatattgacgttgatatccccgcccgccgcatcgtgcgcggcgatgaagagatccacctgacgccgattgagtttcgcctgctggtggtcctgctcaacaaccctggcaaagtgctgacccagcgacagctgctcaaccaggtctgggggccaaatgcggtggagcacagccactacctgcggatttatatggggcacctgcggcaaaagctggaggccgacccggcccgtccgcagcacttgctgaccgaaacggggatcggctatcggtttatgccctag

SEQ ID NO: 174956 - DNA, 2688 bp, Klebsiella oxytoca
atgagtgatgagccgctgcgtccggaccctgatcgcctgctgcaacacgccgccgccccgcatcgcggtaagctaaagatatttttcggcgcctgcgccggggtcggtaaaacctgggcgatgctggcggaagcgcagcggctgcgcgcccaggggctggatatcctgattggcgtggcggaaacccacgggcgtaaagagacggcggcgatgcttgaggggctgagtaccctgccccagcgccgcctttcccaccgcgggcgctacgtgaaggagtttgaccttgacggcgccctggcccgccgcccggcgctgatcctggtcgatgagctggcgcacagcaacgcgcccggatcgcgtcatcctaaacgctggcaggacgtcgaagagctgctggaagccggcatcgatgtgtttaccaccgttaacgttcagcacctcgagagcctgaacgatgtcgtcagcggcatcaccggcgtgcaggttcgcgaaaccgtccccgatccgtttttcgacgccgccgacgatgtggtgctggttgacctgcctccggacgatctgcgtcagcggctcaatgaaggtaaagtctatatcggcggccaggctgagcgggccattgaaaacttctttcgcaagggcaatctcatcgccctgcgcgagctggcgctacgccgtactgccgatcgagtcgatgagcagatgcgcgcctggcgcgatcgccagggccaggaaaaagtctggcatacccgcgacgccattttgctctgcatcggccataacaccggcagcgaaaagctggtgcgcgccgccgcccggctggccgccagattgggcagcgtctggcatgcggtgtatgttgaaaccccgtcgctgcaccgcctgtcggaggcgaagcggcgggcgattctcgccgcgctcaggctggcgcaggagctgggagcggaaaccgccaccctctccgatccctccgaagagaaggccgttctgcactacgcccgcgaacataatctcggcaagatagtgattggccgccagcagaaaaggcgctggtgggatcgcggcggcttcgccgatcggctggcccgtcacgccccggatctcgatctggtggtgatcgcgctggatgaaaaagccgcctccctgccggctcgcgccagcgatagccggacggcgatggataaatggcgtctacagctccagggctgcgtcgtcgccatcgcgctgtgcgcggtgattaccgttgtcgccatgcagtggctgatggcctttgaggccgccaacctggtgatgctgtatctgcttggcgtggtgattatcgctctcgtatatggccgttggccgtcggtactggcgacggtgattaacgtggtcagcttcgatctgtttttcgttgcgccgcgcggtacgctggcggtttcagatgtacagtatttactcacctttggcgtgatgctgaccgtcgggctgcttatcggcaacctcaccgccggcgttcgctaccaggctcgggtggcgcgctatcgcgagcggcgcacccggcatctgtacgaaatgtccaaagcgctggcggtgggccgcagccgtgaagatatcgccgccaccagcgaacggtttatcgcctcgacgtttcaggcgcgcagtcagctactgctgcccgatgagatgaaccggctctctccattgactcaacccaccgcggccatcacctgggacgacgcgatcgcccgctggagcttcgataaggggctgcccgccggggcgggtaccgatacgttacccggcgtcccctaccaaatcctgccgctgaaaagcgccgcccgtacctgggggctggtggtggtggagccggctaacctgcgccagctgatgatccccgaacaacagcgcctgctggaaacctttaccctgctggtcgccagcgcgctggagagactgacgctcaccgccagcgaagagcaggcgcggctgaacagcgagcgggaaagcctgcgcaactcgctgctggcggcgctgtcccatgatttacgcaccccgctgacggtgctgttcggccaggcggagatcctgaccctcgatcttgccagcgaagggtcgaagcacgcgccgcaggccaatgagatacgccagcacgtactgaacaccacccggttggtgaataatctgctggatatggcgcggatccagtccggcggctttaatttgcataaagagtggttaaccctcgaagaggtggtcggcagcgcgctgcgcatgctggaaccggggctcggtgggcggcatattcagctcgatctgccggacccgctgctgctggtacacgtcgatggcccgctatttgaacgggtgctgattaatctgctggaaaacgcggtgaagtacaccgggccgcaggcgcaaatcggcatcgcggcgcatgtcgacccgcaccatttattgcttgaggtgtgggataacgggccgggtattcctccagggcaggaacaggctatctttgataaattcgcccgcggcaataaagagtcggcgatccccggcgtaggcctgggactggcgatttgtcaggccatcgttgaggtgcacggcggaacgattagcgccgagacgcgcccgcaaggcggcgcctgtttccgtgttacactgccgcgagaagcgccccctgaactggaagagttagccgaggaaatgtga

SEQ ID NO: 174957 - DNA, 576 bp, Klebsiella oxytoca
atgtcattcattcgtcctgcccttgtactgtttattctgttaacgctgctcaccggcggcgtctacccgctgttgaccaccgcgctgggacaatggtggttcccacagcaggccaacggctcgctggtgcggattgacggcgaagtgcgcggttcccgtctcatcgggcagaactttaccgcgccgggctatttccagggccgcccttccgccacggcggagatgccggataacccgctggcctccggcggcagcaacctggccgccagcaatccggcgctggacaacgccatcagcgaacgggtgcaggccctgcgcgccgccaatccggacgccagcgccacggttccggtggagctggtcaccgcctcggcgagcggactggattacagcctgacgcctgccgccgccctgtggcaggcgccgcgcgtcgcccaagcgcgacagctcagcgtggagcaggtcacgcaactggtgaacgaggcaacgcaaaaaccgttgctcagttttctcggccaacctgtggtaaatatactgcagctgaatatgtcgctggatgccctgaaggataagtaa

SEQ ID NO: 174958 - DNA, 2049 bp, Klebsiella oxytoca
atgagtcgcaaatcattagccctgctggagccgacgctggtgcgtcaggccctgctcgacgccgtgaaaaaactgagccctgccgtacagtggcgtaacccggtgatgtttatcgtctggatcggcagcctgctcaccaccctgctggccattgccatggcgagcgggcaaatcgccggcagcgccggatttaccgccgctattagtctctggctgtggttcaccgtcctgttcgccaacttcgccgaagcgatggcggaaggccgcagtaaagcgcaggccaacagcctcaaaggtgtcaaaaagaccgcctttgcccgtaagctgcgcgcgccgcagcacgatgcgcaaattgaccacgtccccgccgaagagctgcgtaaaggtgacgtggtgctggtagaagcgggagatattatcccctgtgatggcgaagttatcgaaggcggcgcgtcggtagatgagagcgccattaccggtgagtccgcgccggttatccgcgaatccggcggcgacttcgcctcggtgaccggcgggacgcgtattctctccgactggctggtgatccgctgtagcgttaacccgggcgaaaccttccttgaccggatgatcgccatggttgaaggcgctcagcgccgcaagacgccgaacgaaattgcgctaaccatcctgcttattgccctgacgctggtattcctgctggccaccgccactatctggcccttctccgcctggagcggtaatgcggtcagcgtaacggtactggtggcgctactggtatgcctgatccccaccactattgggggcctgctgtcggccatcggcgttgccgggatgagccgcatgctcggcgcgaacgtcatcgccaccagcggccgcgcggttgaggcggcgggcgatgtcgatgtcctgctgctggataaaaccggcaccattaccctcggtaaccgccaggcttcggcattcctgcctgcgcagggcgtggaagagaaaacccttgccgatgccgcccagctgtcgtcgctggccgatgaaacgccggaaggccgcagcatcgtcgtcctggccaaacagcgctttaacctgcgcgagcgcgatctccagtcgctgcatgccacctttgtgccgtttaccgcccagacccggatgagcggcatcaacatcgaccagcggatgatccgcaaaggttccgtagatgccatccgccgccacgttgaggccaacggcggccactttccggccgatgtcgataagcaggttgaagaagtggcgcgtcttggcgcgacgccgctggtggtcgccgaaggcgagcgggtgctggggattatctcgctgaaagatatcgttaaaggcggcatcaaagagcgttttgcccaactgcgtaaaatggggattaaaacggtgatgatcaccggcgataaccgactgaccgccgccgctatcgccgcggaagccggagtggacgactttctcgccgaagcgacgccggaggccaagctggcgttgatccgccagtatcaagcggaaggtcggctggtggcgatgaccggcgacggtaccaacgacgccccggcgctggcgcaggccgacgtggcggtcgcgatgaactccggtacccaggcggcgaaagaggcgggcaatatggtggatctcgactctaaccccaccaaactgatcgaggtcgtacatatcggtaaacagatgctgatgacccgcggatccctgaccaccttcagtatcgccaacgacgtggcgaagtactttgccatcattccggccgcctttgccgccgtctatccgccgctggcgatgctcaacgtgatgcatctgcactcgccctcttcggcgatcctgagcgcggtgatttttaatgcgctgattatcatcttcctgatcccgctggcgctgaagggcgtgagctataagccgctgacggcttcggcgatgctgcgccgcaacctgtgggtctacggcctgggcggactgctggtgccctttatcggtatcaaagctatcgacctgttattgaccctgaccgggctgctgtga

SEQ ID NO: 174959 - DNA, 1680 bp, Klebsiella oxytoca
atggccgctcaaggttttttactcatcgcgacttttattctgctgctaatgatcctcgctcgtccgctgggtacggcgctggcgacgatgatcaatgatatgccgctaccgggtctggcccggattgaacgcggtttatggcaggcagcggggattcgttcgcaggagatgaactggctccagtatttagtggcgattctgctgtttaacgcgctgggtctggcggcgctgttcgctctgctgatgtttcagggctctctgccgctcaacccgcagcatctgcccggtctgtcatgggatctggcgctgaatacggcggtgagctttgtcagcaacaccaactggcaggcctatgccggtgaagccaccatgagtagccttagccagatggccgggctggcggtgcaaaacttcctctccgccgctaccggcatcgcggtgatctttgccctcacccgcgcatacgcccggcagaaagtcaccactctgggcaacgcctgggtcgatctgacccgcattactctctgggtgctgctgccgatttcgctgctgattgcgctgttctttatccagcagggcgtgccgcaaagtttatcgccgaatcacgaatttacctcgcttgaaggggtacgccagatgctgccgttggggccggtggcttcgcaggaagcgataaaaatgctgggtaccaacggcggcggcttctttaacgccaactcggcgcatccctttgaaaaccccaccgcgctgaccaacctggtgcagatgctggcgatctttctcattccggcggcgctgtgcttcgctttcggtgaggcggtgggcgatcgccgtcagggtcgggcgattctgtgggcgatgacgctcatcttcatcgtctgcgtggcggtagtgatgtgggcagaaacccgcggcaaccttcacttgctgagccttggcgccgacagcagtagcaacatggaaggcaaagagagccggttcggtattctcgccagcagcctgtttgccgtggtcaccaccgccgcgtcctgcggagcagtcaacgccatgcacgactcctttaccgcgctgggcggaatggtccctatgtggctgatgcagataggcgaagtggtcttcggcggcgtcggctcgggtctgtacggcatgctgctgttcgtgatgctggccgtgtttatcgccgggctgatgattggccgcaccccggaatacctcgggaaaaaaatcgacgtccgcgaaatgaaaatgatcgcactggcgatcctcgttaccccgacgctggtgctcctcggcacggcgctggcgatgctgaccgaggccggtcgcgcgggcatgtttaaccccgggccgcatggcttcagcgaagtactgtatgccgtcacctcagcggcgaacaacaacggcagcgcctttggcggcctcagcgcggcaacaccgttctggaacctgctgctggcattctgcatgctggtcggccgcttcgcggtgattatcccggtgatggcgattgccggttcgctggtgacgaagaaaattcagcccgccggcagcggcacgctcgccacccatgacgcgctgtttatcggcctgctgatcggcaccgtgctgttggtcggcgccctgacctttattcccgcgctggcgctcggcccgctggcagaacacttttccttactttaa

SEQ ID NO: 174960 - DNA, 207 bp, Klebsiella oxytoca
atggcgttgtacaaaacttatcctgctcatatcatctttgcgcgtcgcgctttcgccgtggcggctggcgtactggcgctgccggtgatgctgttctggaaagatcgcgcccgtttttacagctggctgcaccgcgtgtgggcaaagaccagcgaacagccggtatggatggcgcaggccgaaaaagcctccgcagatttttattaa

SEQ ID NO: 174961 - DNA, 1443 bp, Klebsiella oxytoca
atggccacccatctggtctggtttcgcgcggatttgcgcatccacgataacctggcgctcgccgccgcctgccgcgatccgcatgccagggtgctgggattattcatcgccacgccagggcaatggcgtcagcacggtatggcgccgcgccaggcggcgtttatggtcagccatctgcacagcctgcaagcggcgctggccgaaaaggggatcccgctgcagattgaacatgctgaagatttcaccgccagcgtagagctactcgtcagcatttgccggcagcagcaggtgacgcatctgttttacaactaccagtatgaaatcaatgagcgccagcgcgatgcggcggtggagagaaccttagcagaggtgacctgtcaggggtttgatgacagcgtgctgctgccgcccggcagcgtgctgaccggcagccgcgaaatgtataaggtatttacgccgtttaaaaatgcttttattcggcgtttacaggaggcgctgccggagtgcgtcgccgcgccgaaagtccgtgcgggtgggcccatcacagcctcgtctgcagtaaaaatagattttccacagacgtcatttgatagcgaactgttcgccgcggatgaaaaaagcgctatcgcccggcttcgcggcttctgccagcaaaaggccgccgaatatgaacagcagcgcgattttccggccatcgaagggaccagccgtctgtcgccgtgcctggcggtgggcgctctctcgccgcgccagtgtctgcaccgcttactggtggagctgccgcgggcgctggatggcgaagccggagcggtatggctcaacgagcttatctggcgcgagttttatcgccacctgatggtttactacccggacttgtgtaaaggtcggccttttattggctggaccgataaggttgcctggctggacgataaaaccgcgcttcaggcctggcagcgtgggcaaaccggcttcccgattgtcgacgccgcgatgcgtcagcttaatgcgaccggctggatgcataaccgcctgcggatgattgtcgccagttttctggcgaaagatctgcgcatcgactggcggctgggggagcgctattttatcgaacagcttatagatggcgatttggcggcgaataatggcggctggcagtgggcggcttcgaccggcaccgatgccgcgccctattttcgtatttttaaccctacgacccagggagagcgcttcgacaaagcggggcagtttattcgtcaatggctaccggagctggccggggtgcctgagaaagcgctgcatcaaccgtggctgtgggcggagaaacagggcgtaacgctggattatccgcgcccgattgtcgatcacaaacaggcgcggctggagacgctggcggcctgggaagccgccagagaagttaagactccaccgccaggcggcgagccctga

SEQ ID NO: 174962 - DNA, 1482 bp, Klebsiella oxytoca
atgaacacacaatcttcacagccgcgggcgatttattacgtcgtcgcgctgcaaatctgggaatacttcagtttttacggcatgcgcgcgctgctcattctttatctcaccaatcagctcaagtatgacgataatcatgcctatgcgctgttcagcgcctactgttctttagtctacgtcacgccgattctcggcggcttcctggccgataagctgctgggcaaccgtatggcggtgatgctcggcgcgctgctgatggccatcggccatctggtgctcggcgccagcgaaatcgcccccacctttctctatctgtcgctggcgattattgtctgcggctacgggctgtttaaatccaacgtcagctgtctgctcggtgaactgtatgaacccacagacccgcgtcgcgatggcggtttttcgctgatgtacgcggcgggcaacgtcggatctatcgtcgcgccaatcgcctgcggctacgtacagcaagagtacagctgggcgatgggcttcgcgctggcggccgttggcatgattgccgggctggtgattttcctcagcggcaatcaccatttccgccacacccggggcgtgaatcgcgaagcgctgcgggcgcggagttttgtcttaccgaactggggctggctgctggttctgctgatcgccgcgccgctgctgatcaccgtgctgttctggcaggagtggtcggtgtacgcgctgattgtcgcgacggtgattggtctggcggtactggcgcggatctacctgcgggcagagaccgccaggcagcgtaaagagctgcgcctgattatggtgctcacctgcttcagcctgctgttctgggcctttgcgcagcagggcggcagctctatcagcctgtacatcgaccgttttgttaaccgtcattttatgggctatgagattccgaccgcgatgttccagtcggtcaatgcctttgcggtgatgctctgcggggtggttctggcgtggctggtgaaagaaaacatcaacggcaaccgtaccgtgcgcatctggggtaagttcgcgctgggccttggcctgatgagcgccgggttctgcatcctgacccttagcgcacgttggtcagccgcctatgggcactcctcaatgccgctgatggtgctgggcctggcggtgatggggtttgccgaactgtttatcgacccggtggcgatgtcgcagattacccgtatcgagatccccggcgtgaccggcgtgctgaccggcatatatatgctgctctccggcgctatcgccaactatctggctggggttattgccgatcaaacctcgcagggatcgttcgacgccgccggagccatcaactattcaattaatgcctacattgaggtgttcagccagataacctggggctcgctggcctgcgtcggcctggtgctggctatctggctgtatcactccgttaagatcagggctcgccgcctggcggtggagtcttaa

SEQ ID NO: 174963 - DNA, 744 bp, Klebsiella oxytoca
atgaaaaatagtgaactggaacaactgattaatgaaaaactcaatagcgcggccatcagtgattacgcacccaatgggctccaggtggaaggtcgcgagacggttcggaaaatcgtcaccggcgtaaccgccagccaggcgctgcttgatgaggccgtccgtcttgaggcggatgcggtcatcgtccaccacggctacttctggaaaggcgagtcgccgattattcgcggcatgaagcgtaatcgcctcaaaacgctgctggctaatgacatcaacctttacggctggcatctgccgcttgatgcccatccggagctgggcaataacgcccagctggcgtcgctgctcggcattaacgtgatgggcgaaattgaaccgctggtgccgtggggcgaactgtcgatggcggtctcgggcctggagctggcgtcgtggattgaagcgcggctggggcgcaaaccgctgtggtgcggcgacaccgggccggacaaagtggcccgcgtggcttggtgtaccggcggcggccagagctttatcgacagcgcagcccgctttggcgttgatgcatttattaccggcgaagtttcagagcaaaccatccattcggcgcgcgagcaggggctgcatttttacgccgccggacatcatgccaccgagcgtggcggaattcgcgcgttaagcgaatggctgacggaaaataccgagctggatgtcacctttattgatatcccgaacccggcctga

SEQ ID NO: 174964 - DNA, 657 bp, Klebsiella oxytoca
gtgcagcgagcgcgttgttatctattaggtgaaacggcagtcgtactggagcttgaacctccggtgacgctggagagtcagaagcggatctggcgattagcccaacggctggttggtcataccgaggtggtggaagccgttccgggtatgaacaacattaccgtgatactgcgaaatccccagcagacggcgtgggacgcgatcgagcgcctgcaaatctggtgggaggagtgcgatacgctcgaaccggaatcgcgggagattctggtgccggtcgtttacggcggcgaaggcggtccggatttgggggaagtggctcgccacagcggactgagcgaaaagcaggtggtggagctgcattcatcggtggagtacgtggtgtggttcctcggcttccagccggggttcccgtacttcggcggcctgccagagcgcctggcgatgccgcggcgggcggaaccgcgcctgctggtgccggcgggttcggtagggatcggcggagcgcagaccgggatttatccgctggcgacgccgggaggttggcagctgctgggccgaacgccgctggcgctatttgatccgaagcgcaaggaaccggtgctgctgcgctccggcgacagagtgcgtttcgtcccgcaaaaggagggcgtatgttaa

SEQ ID NO: 174965 - DNA, 933 bp, Klebsiella oxytoca
atgttaaaaatcatccgtgccgggatgtatacctcggtgcaggacggcgggcgtgaaggtctgcgtcaactgggcatcagccgctgcggtgcgatggataaaccggcgctggttaccgcgaatctgctggtgggcaacggggccaatgccgcggcgctggagatcacgctgggccaggtggatattcaatttgaacgcagcggctggttcgcactcaccggcgctgcctgtgaggcgaagcttgacggcgagccggtgtgggtgggctggcggacggcggtcaaggccgggcagcgtctggtgctcaagaatccacagcacggcgtgcgcagctatctggcagtggcgggcggtatcgcggtgccgaaggtgctgggctcgcgcagtaccgatctgaaagtgggtattggcggtctggaaggtcgacgtttgcaggatggagaccgactgaagctggggaaatcggataagcagttccgcgggccgcgcggggtgaagcaactgcccatcggcaaccgcatccgcgcgctgcccggccccgagtatcaggagtttgacagcgtgtcgcaggacaccttctggcgctcgccgtggcagcttagcccgcagagcaaccgcatgggctatcgtctgcaggggcaaccgctgaagcggacgaccgatcgcgagatgctttcgcacggtctgctgcctggcgtggtgcaggttccgcataacggtcaacctatcgtactgatgaacgatgcccagaccaccggcggttacccgcgcatcgcgacgattatcgaggccgatatgtatcagctggcgcaaatcccgctggggcagccgatccactttgttccctgctctctggaggaggcgctgaaggcgcgcgccgaccggcaacgttattttgaacaactggcatggagactgaacgatgaagattga

SEQ ID NO: 174966 - DNA, 747 bp, Klebsiella oxytoca
atgaagattgatttaaacgccgaccttggcgaaggctgcgccaacgatagcgcgctactgcagctggtctcttccgccaatatcgcctgcggtttccatgcgggcgatgcggtgatgatgctgcagtgcgtgcgcgaagcgctgaaatatggcgtcgcggtgggcgcgcaccccagctttcctgaccgggaaaattttggccgcacggcgatgcagctgccgccggagacggtttatgcgcaaacgctgtatcaggtgggcgcgctggcggcgctggtgcgcgcgcagggcggcgaactacagcacgtcaaaccgcacggcatgctctataaccaggcggcaaaagatccgcagcttgctgacgctatcgccaaagcggtatatgacgttgacgccggtctggtgctggtgggcctggcgggcagcgagctgattcgcgccgggcagcgttatcagctgaccacccgccaggaggtcttcgccgaccgcggctatctggcggacggtagcctggtgccgcgcacccagcctggggcattgatcgagagtgaagagcagtcgctggcgcaaacgctggaaatggtgcagcacagccgggtacgcagcatcaccggcgaatgggcgcacgtggtggcggaaaccgtttgtctgcacggcgacggcgagcatgcgctggattttgcgcgacgcctgcgcgcggcgttcgccggacgtaacattcaggtgagcgcggaagcagaagaataa

SEQ ID NO: 174967 - DNA, 726 bp, Klebsiella oxytoca
atgggagagtcattatctctctggccgctgatcggcattgccgcgatcgtggtcggatttgttctgcgttttaacccggtgctggtggttattgtttccgggatcatcacgggtctgacggcgcatatgccgatcgcgaccattctggagaagctgggtgaaggatttctcaatacccgcaatctgccgtttattcttctgttgccgctggcggtgattggcctgctggagcggcacggtctgaaagagcgcgcgcagacgtggatcgcgaaaatccgcagcgccaccgctggtcgtctgctaatcgtctatcttttcgtgcgtgaagtgaccgcggcgatgggccttaccagcctgggcggtcatccgcagatggtgcgcccgcttctggcgccgatggcggaaggggcggcggaaaaaaactttggcgccttgccgggaaatgtccgctatcgcctgcgcgcgatgtcggcggccaccgacaacgtgggcctgttcttcggcgaagatattttcgttgccttcggggcgattatctttatgcataactttatgctggagtcggggggcattcagactgagccgctgcatattgccctgtgggggatcccaacggcggtatgcgccttcctgatccactctgcccgcctgtggcgcctcgaccgtcatctccagcgcgagctggacaaggttaacgccggacaggcgaaaggcggtgccgcatga

SEQ ID NO: 174968 - DNA, 996 bp, Klebsiella oxytoca
atgaattttcagcaaacctggctgtactggctggcgggcgtcgttctgctggtggtggcggtgatgtcatggcgcgataaggctaatccgcgcaggctgacaaccggtctgttctggggtctgtacggcgtggtctttctgttcggcgactggacctatgcgctggtcggcgacaagcgcctcgtcaatatcggcgttggcgtggtggtcgtggtgctggcgctgatcgccggatttggcggcgtgcgtctcggtcgttatcaccagcgctcgcaggaagaacgcagcgccagcgccgcgcgcctcggcaatcggctgtttttcccggcgctggcgatcccggtagtgacggtgatcggcgtcctgctgtttaataatttgccctcgctgcaggtcgtcatttttggcccgggcaatcacgccacgctgattacgctgttttcaatgaccgcgggcacgttgattggtctggtgatggctatccgcatgacccatgaaacggcggttcagccgttacaggaagctcgccgtctgctggattctgtgggctgggcgtttattttgccgcaaattctggcggttcttgggctgctgtttaccgccgcgggcgtcggcaacagcatctcctggctgacgcagcactatctggcggtggacagccggtttatcgccgtcgccgtctatacccttggtatggcgctgctgacgatggtgatgggcaacgcgtttgccgctttccccatcgtgacggcaggggtcgggatcccgattctggtgctgcagcacggcggtaacccggcggtgatggcggcaattggcatgttctccggctactgtggaacgctgatgacgcctatggcggcgaacttcaatatcgtcccggccgcgctgctggagctgccggacaaaaacgcggtgatcaaagcccaggtgccgaccggcattatgttgcttatcgtgaacgtatttttgctctatttcctgatgttcctgtaa

SEQ ID NO: 174969 - DNA, 645 bp, Klebsiella oxytoca
atggctggcgtattgattaccggttttgaaccgttcggcggcgaagcggttaacccttcgtgggaagtggtaaagcagctggatggcgctatcattgccgggcaaccggtggtggcgcggcagctgccctgcgtcttcggcgatgccctgatggcgctgaacaccgcgctggatgagctgcagccgcgcctgatcctggcgattggccaggcgggcggtcgtgtcgacatcaccgttgaaagggtagcgatcaacgtcgatgatgcgcggatcccggacaataaaggtctgcagcccattgacgtaccgatcgtggctgacggtccggcggcgtactttagcacgctgccgatcaaagcgatcgttgccgcgctgcgcagcaaggggatcccggcgtcggtatcgcagacggcggggacgtttgtctgtaatcacgtgatgtacggtctgctgcatagcctgcataacagcagcggcgtgaagggcgggtttatccatattccgtatttgcctgagcaggccgcggctcaccccggggccgccagtatggcggtagagacggtgcgtgcggcgctggaaacggctatcgccgttgccctgcagcaggatggcgacgtaaaaatcggcggcggcgcaacgcattaa

SEQ ID NO: 174970 - DNA, 792 bp, Klebsiella oxytoca
atgccggaaggtccggaaattcgccgtgcggcggatagcctggaagcggcgattaaaggcgaacccctgactgaggcgtggttcgccttcccgcagttacaacattaccaatctcagcttgtcggccagcgagtgacgcgcattgaaacacgcggtaaggcgctgttgacccatttctccggcggattaacgctgtatagccacaatcagctgtatggcgtctggcgagtggtggatgtgggggcgcagccagaaaccacgcgcgtgttgcgcgttcggctgcagacggcgcgtagagcgattttgctctacagcgcctccgatattgaaatgctgacgcccgagcagctcgcccgacatccatttttgttgcgggtcggaccggatgtgctcgatatgagccttagcgttgaacaggttaaagagcggctgctgtcggcgaaattccgcaaccgccagttctccggactgctgctggatcaggcgtttcttgccggattgggcaactatctgcgcgtggagatcctctggcaggttgggctaaccggtcgtcacaaagcctctgaactggatgaaaagcagctcgatgcgctggcccatgcgctgctggagatcccgcgtttgtcctataacacgcgcggtctggtggacgacaataagcaccacggcgcgctgtttcgctttaaggtttttcatcgccagggtgaggtctgcgagcgctgcggcgggattatcgagaggaccatgctctcgtcgcggccgttttactggtgccccggatgccagcaataa

SEQ ID NO: 174971 - DNA, 1284 bp, Klebsiella oxytoca
atgtctgatgctaaagcaaaaatcaccctgggtggtgatactgctattgaactggatgtgctaaagggcactctcggtcaggatgttattgatattcgtagtcttggttcaaaaggcgtatttacttttgaccctggtttcacctcaaccgcatcctgcgaatctaaaatcacctttatcgacggtgatgaaggtatcctgctgcaccgcggtttcccgatcgatcagttagcaaccgactctaactatctggaagtatgctacatcctgttaaacggtgagaaaccgacccaggcacagtacgacgaatttaaaaccatcgtgacgcgccacaccatgattcacgagcagatcactcgtctgttccacgcgttccgccgcgattctcatccgatggccgtcatgtgcggtattaccggcgcgctggctgcgttctatcacgattcgctggatgtaaataacccacgccaccgcgatatcgccgcattccgtctgctctccaagatgccgacgatggcggcaatgtgttacaaatattccatcggccagcctttcgtttatccgcgcaacgacctctcctacgcgggtaacttcctgaatatgatgttctccacgccgtgtgaaaaatatgaagtgaacccgattctggaacgcgcaatggaccgtattctgatcctgcacgccgaccacgaacagaacgcttccacctccaccgtgcggactgccggctcttccggcgccaacccgttcgcctgcatcgctgcgggcattgcttccctgtgggggccggcacacggcggcgccaacgaagcggcgctgaagatgctcgaagagatcagctccgttgaacacattccggaattcgtccgtcgcgcgaaagacaaaaacgactctttccgcctgatgggctttggccaccgcgtgtacaaaaactatgacccgcgcgccaccgtgatgcgtgaaacctgtcatgaagtgctgaaagaactgggaacgaaggacgatctgctggaagtggccatggagcttgagcacattgcgctcaacgatccgtacttcatcgagaagaaactctacccgaacgtcgatttctattccggtatcatcctcaaagcgatgggcattccgtcttcgatgtttaccgttatcttcgcgatggcgcgtaccgtgggctggattgcgcactggaacgaaatgcacagcgatggcatgaaaatcgcccgtccgcgtcagctctataccggctacgaaaaacgcgacttcaagaacgatatcgctcgctaa

SEQ ID NO: 174972 - DNA, 405 bp, Klebsiella oxytoca
atgtgggcgttattcatggtaagaaatgtgaaaaaacaaagacctgtcaatctggatctgcaaacgatccggttcccaatcacggcgatagcgtccattctccatcgcgtatccggagtgatcaccttcgtggcgatcgggattctgctttggctgctgggcaccagcctttcctctcccgaaggtttcctcacagcggcatccattatggatagcttctttgtgaaattcatcatgtggggcatcctgaccgcgctggcgtatcacgcggtggtcggtatccgccatctgctgatggattttggctatcttgcagaaactctcgaatcagggacacgctccgccaaaatttcttttgttattactgtcgtgctttcacttctcgcaggagtcctcgtatggtaa

SEQ ID NO: 174973 - DNA, 348 bp, Klebsiella oxytoca
atggtaagcaacgcctcagcactaggacgcaacggcgtacatgactttattctggtccgtgctaccgctatcgttctgaccctctacatcatctatatggttggcttctttgccaccaccggtgaaatttcatgggaagtctggacgggctttttctcctccgcgttcactaaagtcttcaccctgctggctctcgtttccattctgatccacgcctggatcggcatgtggcaggtgttaacggactacgttaaaccactggccgtgcgcttaattctgcaactgctgatcgttgttgcgctggtggcttacgttctttatggatttgttgtggtgtggggtgtgtaa

SEQ ID NO: 174974 - DNA, 1767 bp, Klebsiella oxytoca
atgaaattgcctgtcagagaatttgatgcagttgtgattggtgccggtggcgcaggtatgcgcgcggcgctgcagatttcccagagcggccaaagctgtgcgctgctctccaaagttttcccgacccgttcccataccgtttccgcacagggcggtatcaccgtcgcgctcggtaatacccatgaagataactgggaatggcacatgtacgacaccgttaaggggtcggactacattggcgatcaggatgccatcgaatatatgtgtaaaaccggcccggaagcgattctggagctggaccatatgggtctgccgttctcgcgtctcgataacggcacgatttatcagcgcccgttcggcggccagtcgaaaaacttcggcggcgagcaggcggcacgtaccgctgcggcggctgaccgtaccggtcacgccctgctacatactctctatcagcagaacctgaaaaatcacaccacgattttctccgagtggtacgcgctggatctggtgaaaaacgccgatggcgcggtggtcggctgtaccgccctgtgcatcgagaccggtgaagtggtttacttcaaagcccgcgctaccgtgctggcgaccggcggcgccggccgtatttaccagtccaccaccaatgcgcatatcaataccggcgacggcgttggcatggcgatccgcgccggcgttccggtacaggatatggagatgtggcagttccacccaaccggtattgccggggcgggggttctggtgaccgaaggctgccgcggcgaaggcggctatctgctgaataaacacggcgagcgctttatggagcgttatgcgccgaacgcgaaagacctggcgggtcgcgacgtggtggcgcgttccatcatgatcgaaatccgtgaaggtcgcggctgcgacggtccgtggggcccgcacgccaagctgaaactcgatcacctcggtaaagaagtgcttgagtcccgcctgccgggtatcctggaactctcccgtacctttgcccacgtcgacccggtgaaagagccgattccggtcattccaacctgccactatatgatgggcggtattccgaccaaagtgagcggccaggcgctgaccgtcaacgagcagggcgaagacgtggtgattccggggctgtttgcggtaggcgaaatcgcctgcgtatcggtacacggcgcaaaccgtctgggcggcaactcgctgcttgacctggtggtctttggccgcgcggtaggtctgcatctgcaagagtctatcgccgagcagggcgtactgcgcgatgcgacggatgacgagatcgacgcttctctggaacgtctgaaccgctggaacggcaaccggaatggcgaagatccggtcgaaatccgcaaagcgctgcaagagtgtatgcagcataacttctcggtattccgcgaaggggatgcgatggcgaagggccttgagcagctgaaagccatccgcgagcgcctgaaaaacgcccgtctggatgatacttccagcgagttcaacacccagcgcgttgagtgcctggagctggataacctgatggaaaccgcttacgccaccgcaatgtctgcaaattatcgtaccgaaagccgcggcgcgcatagccgcttcgacttcccggatcgtgatgatgaaaactggctgtgccattccctgtatctgccagagtcggaatccatgacgcgtcgtagcgtcaatatggaaccgaaactgcgtccggcattcccgccgaagattcgtacttattaa

SEQ ID NO: 174975 - DNA, 717 bp, Klebsiella oxytoca
atgaaactcgagttttcagtttatcgttataacccggacgtagacgatgctccgcgtatgcaggattacaccctggaagcggaagagggtcgtgacatgatgctgctggatgcgttaatccagctgaaagagaaagatccgtcgctgtcgttccgtcgctcctgtcgtgaaggggtatgcggttccgacggtctgaacatgaatggtaaaaatggtctggcgtgcatcacgccgatctccgcgctgaatcagccgggtaagaaaattgttatccgtccgctgccaggattaccggttatccgtgatttggtggtagacatggggcaattctatgcacaatatgagaagattaagccttacttattgaataatgggcaaaatcctccggctcgtgagcatctgcagacgccagagcagcgtgagaaactcgatggtttgtacgagtgtattctctgcgcatgttgttcgacttcttgcccgtcgttctggtggaacccggacaagtttatcggcccggctggcctgctggccgcgtatcgcttcctgatcgacagccgcgataccgaaaccagcgatcgcctcgaagggctgagcgatgctttcagcgtattccgctgtcacagcattatgaactgcgtcagtgtgtgtcctaaggggctgaacccgacgcgcgccatcggccatattaagtcgatgctgctgcagcgcagtgcgtaa

SEQ ID NO: 174976 - DNA, 2808 bp, Klebsiella oxytoca
atgcagaacggcgcaatgaaagcctggctggactcttcttacctctctggttcgaaccagagctggatagaacagctctatgaagacttcttaaccgatcctgactctgttgacgccaactggcgttctatgttccagcagttacctggcaccggagtcaaaccggatcaatttcattccaaaacgcgtgattatttccgccgcctggcgaaggatgcctcgcgttacacttcttcgatttccgaccctgacaccaatgtgaagcaggttaaagtcctgcagctcatcaacgcataccgcttccgtggtcaccagcatgcgaatctcgatccgctgggactgtggcagcaagagagagtggcggatctcgatccggcttaccacgatctgaccgaggccgatttccaggagatctataacgtaggttctttcgccatcggcaaagatacgatgaagctgggcgatctgatctccgcccttaagcagacctactgcggctccatcggcgcggaatatatgcatattacctccaccgaagaaaaacgctggatccagcagcgcattgagtcggtagcaggcaaagcgaactttagcgccgaagagaaaaaacgcttcctcagcgaattgaccgcggcggaaggcctggagcgctacctcggcgcgaaattcccgggcgctaaacgcttctcgctggaaggcggcgacgcgctgatcccaatgctgaaagagattatccgccatgcgggtaagagcggcacccgcgaagtggtgctgggtatggcgcaccgcggacgtctgaacgtgctggtcaacgtgctgggtaaaaaaccgcaggacctgttcgacgagttcgccggtaaacataaagaacacctcggcaccggtgacgtgaagtaccacatgggcttctcttccgatatggaaaccgaaggcggcctggtgcacctggcgctggcgtttaacccgtcgcatctggaaatcgtcagcccggtggttatcggctccgtccgcgctcgtctcgatcgtctcgacgaaccgagcagcaacaaagttctgccgatcaccattcacggcgacgccgcggtaaccggccagggcgtggttcaggaaaccctgaacatgtccaaagcgcgcggttacgaagtcggcggtaccgtacgcatcgttatcaacaaccaggtgggtttcaccacttccaacccgctggatgcgcgttctaccccgtactgtaccgatattggtaaaatggtccaggcacctattttccacgtgaatgccgacgatccggaagcggtcgctttcgtgactcgcctggcgctggacttccgtaacacctttaaacgcgatgtcttcatcgacctggtgtgctaccgccgtcacggccacaacgaagccgacgagccgagcgcaacccagccgctgatgtatcagaaaatcaaaaagcatccgaccccgcgcaaaatctacgctgacaagctggaagcggataacgtcgcgacgctggaagacgccactgagcaggttaacctctaccgcgacgcgctggatgccggcgaatgcgtggtgaaggagtggcgtccgatgaatatgcactcctttacctggtctccgtacctcaaccacgagtgggatgagagctatccagacaaagttgaacctaagcgtctgcaggagctggcaaaacgcatcagtacggtgccggaagccgttgaaatgcagtcgcgcgtggcgaaaatctacggcgatcgtcagcttatggccgccggcgagaagatgtttgactggggcggcgcggaaaacctcgcctacgccacgctggtcgatgaaggcatttcggtgcgtctgtccggcgaagactccgggcgcggaaccttcttccaccgccatgcggtgattcacaaccagaaaaatggctcaacctatacgccgctgcagcacgtgcacaacggccagggccattttaaagtctgggactccgtgctgtcggaagaagcagtgctggcgtttgaatacggctacgccaccgctgagccgcgcaccctgaccatctgggaagcgcagttcggcgacttcgccaacggcgcgcaggtggtcatcgaccagttcatcagctccggcgagcagaaatggggccgtatgtgcggcctggtgatgctgctgccgcacggctacgaaggccagggtccggagcactcctccgcgcgtctggagcgctatctgcagctctgcgctgagcagaatatgcaggtttgcgtaccgtccaccccggcgcaggtttaccatatgcttcgtcgccaggcgctgcgcggtatgcgtcgtccgctgatcgtgatgtcgccgaaatcgctgctgcgtcacccgctggcggtatcaagcatggacgaactggctaacggcactttccagccggcgatcggtgaaatcgaccagctcgatccgaaagcagtgaagcgggttgtgctgtgctctggtaaggtttactacgacctgctggaacagcgtcgtaaaaacgagcaaaaagatgtcgctatcgttcgcatagagcagctctatccgttcccgcatcaggcggtacaggaagcgctgaagccttatgcgcacgtgcatgattttgtctggtgccaggaagaaccgctcaaccagggcgcgtggtactgcagccagcatcacttccgtgaagtgattccgtttggggcctctctgcgttatgcaggccgcccggcctccgcctctccggcggtaggatacctgtccgttcaccagaaacagcaacaagatctggtcaatgacgcgctgaacgtcgattaa

SEQ ID NO: 174977 - DNA, 1221 bp, Klebsiella oxytoca
atgagtagcgtagatattctggttcccgacctgcctgagtccgtagctgacgcaacggttgccacctggcataaaaaaccgggcgatgcggttgttcgtgacgaagtgctggtagaaatcgaaactgacaaagtggtactggaagtaccggcttcagcggatggcattctggacgcggtgattgaagacgaaggcgccaccgtgctttcccgtcagatcctcggccgcctgcgcgaaggtaacagcgcgggcaaagagtccggtgcgaaagctgatgctaaagagtcgactccggcccagcgtcagcaggcttctctggaagagcaaaataacgatgcgctgagcccggcaatccgccgtctgctggcggaacacagtctcgacgcggcagccattaaaggcaccggcgttggcggccgtctgacccgcgaagacgttgagaaacacctggcgaaagcgccagcgaaggcggaggccccggccgcagcgccagccgctgctccggctccacagctgggcaatcgctctgaaaaacgcgtgccgatgacccgtctgcgcaagcgcgttgccgagcgtctgctggaagcgaaaaattctaccgccatgctgacgactttcaacgaagtcaacatgaagccgattatggatctgcgtaagcagtacggcgaagcgtttgaaaaacgtcacggtatccgtctgggctttatgtccttctacgtgaaggcggtagtggaagcgctgaagcgctacccggaagtgaacgcctctatcgatggcgatgacgtggtgtaccacaactacttcgacgtcagcatggcggtctctacgccgcgcggcctggtaacgccggttctgcgcgatgtcgacctgctgggcatggcggatatcgagaagaaaattaaagagctggcagtaaaaggccgcgacggcaagctgaccgtagacgatctgaccggcggtaacttcaccattaccaacggcggcgtattcggttcactgatgtccacgccgatcatcaacccgccgcagagcgcgattctgggtatgcatgccattaaagatcgcccgatggcggtgaatggtaaggtagaaattctgccgatgatgtacctggcgctctcctacgaccaccgtctgatcgacggacgtgaatcggtaggctacctggtagcgattaaagagctgctggaagacccgactcgtctgctgctggacgtgtag

SEQ ID NO: 174978 - DNA, 1167 bp, Klebsiella oxytoca
atgaacttacatgaatatcaggcaaaacaactttttgcccgctatggcttaccggcgccggtgggttatgcctgtactactccgcgtgaagcagaagaagccgcttctaaaatcggcgcgggtccgtgggtagtgaaatgtcaggttcacgctggtggccgcggtaaagcgggcggtgtgaaggtagtaaaaagcaaagaagacattcgcgcatttgctgagcactggctgggcaagcgcctcgtcacctatcaaacagatgcgaacggccagccggttaaccagattctggttgaagccgcgaccgatatcgataaagagctatacctgggcgcggtagttgaccgcagctcccgtcgcgtggtcttcatggcctccaccgaaggcggcgtggaaatcgaaaaagtggcggaagagactccgcatctgatccacaagatcgccctcgatccgctggcgggcccgatgccttaccagggtcgtgaactggcgtttaaactgggtctggaaggtaaacaggttcagcagttcactaaaattttcatgggcctggcgaccattttccttgagcgcgacctggcgctgatcgagatcaacccgctggttatcaccaaacagggcgatctgatctgcctcgacggcaagctgggcgctgacggcaacgcgctgttccgccagccggatctgcgcgaaatgcgcgaccagtcgcaggaagatccgcgcgaagcgcaggctgcgcagtgggaactgaactacgtcgcgctggacggcaacattggttgcatggttaacggcgcgggcctggcgatgggcaccatggacatcgttaagctgcacggcggcgaaccggctaacttccttgacgttggcggcggcgcaaccaaagagcgcgtcactgaagcgttcaaaatcatcctctctgatgacaacgtaaaagcggttctggttaacatcttcggcggtattgtacgctgcgacctgattgccgacggcatcatcggcgcggttgccgaagtgggcgttaacgtaccggtagtcgtacgtctggaaggtaacaacgccgaactgggcgcgaagaaactggctgacagcggcctgaatattattgcagcgaaaagtctgacggatgcagctcagcaggttgttgccgcagtggaggggaaataa

SEQ ID NO: 174979 - DNA, 870 bp, Klebsiella oxytoca
atgtccgttttaattaataaagacaccaaggttatctgccagggtttcaccggtagccagggcacattccactctgaacaagccatcgcttacggtacgcaaatggtcggcggcgtcaccccgggcaaaggcggcaccacgcatctgggcctgccggtattcaataccgttcgcgaagcggtcgaagccaccggcgcaaccgcatccgtcatctacgttccggcgccgttctgcaaagattctattctggaagctatcgatgctggcattaagctgattatcaccatcaccgaaggtatcccgacgctggatatgctgaccgtgaaagtgaagctcgacgaagcgggcgtgcgcatgatcgggccgaactgcccgggcgtgatcactccgggcgaatgcaaaatcggcatcatgccgggccacattcaccagccgggtaaagtgggcatcgtttcccgttccggtaccctgacctatgaagcggttaagcagaccaccgactacggctttggtcagtccacctgcgtgggcatcggcggcgacccgattccgggatccaacttcatcgatatcctgaaactgttccaggaagatccgcagaccgaagcgattgtgatgatcggtgagatcggcggtagcgcggaagaagaagcggccgcttacatcaaagatcacgtgaccaaaccggttgtcggctacatcgccggcgtgaccgcgccgaaaggcaaacgtatggggcacgcgggtgccatcattgcgggtggtaaagggacggcggatgaaaaattcgccgctctggaagccgctggcgtgaaaaccgttcgcagcctggccgatatcggcgaagcgctgaaaaccgtcattaagtaa

SEQ ID NO: 174980 - DNA, 654 bp, Klebsiella oxytoca
atgaaaaagatcgctatgctgcacaccagttcagcgacgctcgcgatgatgcagcagctgattgccgatatcatgccggaagtggaagtcatgcatctggtggaagaatccatgatcaagcaggtaatgaaggccggaggggtaacgccgaatattgccgcccgcattgccgactacgtgcatattgccgaaaaagcggactgcgatattttcattaccgcctgctcttctattggcacggcggtggaacagtgccagtttctcacgccgcttcagctcgcccgtattgacagggcgatggtcgaagaagcgattgaaaaaggcgagcgtatcgccgtgctggcaaccgtagcgaccacgctaaagccgacgctggattacgtccagcgcaaagtacaggagagcggtaagccgcgcgccattacccccatattaatggaagaggcattccacgcgctgctggcaggcgatatggatacccatgaccgaatcgtcagtgaagggctacaaagcgcgtttagccaggcggatgtagtgatgctggcgcaagcctcgatggcccgggtattgcagcagctccctgccccgccggtaccggtcatgacctcaccagaaagcgggattcgctggctgaaagcgctggcggagagctga

SEQ ID NO: 174981 - DNA, 420 bp, Klebsiella oxytoca
atgacgactctcactctggaacaggctttacgcgccgtagcgttcgcgcttgacctcgctgactcctgctatgcaaagcgcccgctaagcgtagcggtgtgcgacgccagcggggagctgctcagcttcgcgcggatggacaatgccaaattgttaaccattgaacttacccagcgcaaggcgcataccagcagtcgcctcggctgtaccacgcaggcatttttacagcgcctgcaaaaagagcagctggacatcagttactttgccgatccgcattttaccgccctgcccggcggggtcccgcttctgtacgacggtaaatgtctcggcgccgtcgcggtaggcgggctatcggcacaggaagatcacgacgcggcgctggccgtcgcagaaaatttgcttaaggagatagcccaatga

SEQ ID NO: 174982 - DNA, 1344 bp, Klebsiella oxytoca
atgactatgaccactgttattcacaaaaccggtctcggcgtcagcatcgccggcgccgccctggcggcggttggcgcgctgatgcattcacccgcgctctggcagcctgggctggtgatgttcaccgccggttttgcggcgggagcaggatactggccggggttacgcagctatcagtttaccttgtggatcatcgccggtttcgttgccgcgatgacctggtctacggatctgatcgtctggggcggctttaacatcacccataaatggatcgttttcctggtcatccaggccactatgttcagcatgggcaccaagctgacgatccaggattttatcgatgtcgccaaaatgccgtgggcggtgtttatcggtaccttctgccattttgtcattatgcccctgctcggcctgaccattaccctggtcttcaactttccgccggaagtcgcggtgggcatcctgctgattggcgcgtgtcccagcggcctctcttcgacggtgatggtttacatcgccaacgctaacctggcgctggcggtatcgatagcggcagtatcaaccctggcggccacggtgatgacgccgctgtgggttaacctgctggcgggctcgatgatcgatattcagctgaccgcaatggtgatggacgtggtgaaaatcgtgctcatcccgatcggcgcggcgatcttacacgactacctgaaaacctacgccagtatacgcggccgccgtattgtgcagggactggccgggctcggcgccctgtggctgctgtatatgagcgccggaggctggaacacgctgttcgccagcgccggcgccgaagcgcaaatgtacgccgtggttgtcaacttcgtggctggcggtctcgtctgggcgctgttttacaactggctgtacggtcgcgttgaaggtattaagaaaatcatgccgactatctcgatgatagggattattttcttcacgaccaccgccgccgctgcgggacgcgacaacctggtgcaggtcggcttcctgctctgtttcgccatgctgatgcataacctcggcggtttcctgattggttatctgatgagtcgctggatctttcgcatggacgtacagtccgcccgtaccgtggcctttgaagtcggactgcaaaacggcggaatggcgtcggggcttgccgccgcgatgggcaagctggcaacagtgggccttgcttccgcggtgatgactccgcttggcaacgtcagcggctcgctgctggcgaactactggcgcaaaaaggacgcccgacaggcgcaggccgccgcgaacaaccccgctcaaaccgtttctgaacatctttcaaaaggataa

SEQ ID NO: 174983 - DNA, 837 bp, Klebsiella oxytoca
atgtcggataccgttattatctcgctggcgcccgttgccgcggattgccctcgagtcatacccgaagaactggcgcaggaaatactcgccagcgtagaatatggcgcggcgattgttcatctgcacgtccgtgataagcaggggcgtctgacgccggacaccgtcgattttcaggccacaatcgaccctgtgatgcgccattcaaacctgataattcaggcctctaccggcggcgtctcttcgctgtccatcgccgaacgctgcgcgcccctggcctgctcaggagtggagatggcgtcgcttaacgtcggctccgttaaccttggcgatgccgtttactttaatcccggcccggacgtcgaatattgtgcaagacaaatcatcgcgcataacataattcccgaatttgaagttttcgaaattggcatgattaataacatcctggctctgcaggaaaatataaaattcaaaaccccgatgctgtttaatattgtactggggcatcgcggcagtacccccgccacgattgatacattaattgccatgcgcagcatgctcccccgcgaggccttatggggaataacgcattttggcagaaagaatttcgatattatcgctgccgcggtcgccatgggcgccagcgaggttcgaattggctttgaggatagctattatttaagcgcagaagaaaaagcccagaataactatcagcaggtcgccaaactcgccaccctgattcgcagcatggataagaaagtcgccacgcccgacattgcgcggcaaatgttatctattccccccggcagcaataacaacagaaaggacatttcgctatga

SEQ ID NO: 174984 - DNA, 777 bp, Klebsiella oxytoca
atgctgaagctcgcggctaacctcgactggctatttaccgatttaccgatagcggcccgtttccaggcggcaaaagcggccggttttcacggtattgaagggctatttctctggcaacacccgctggaacagctgcaggcggcacagcggcaaacgtctctaccgctggtgctgatgaacgctccggcaggcaactggtctcagggtgaacgcgggctggcagcgctacccgggcgcgaagaggagtttcaccgcagtctggagcgggctcgtcattatgccacggcgctgggctgccgccgggttcacgttatggcgggcttgcgctgcgatgctctgacgcatcaggcccagcttgagctcttgcgcaacaggctgcgtatcgcctgcgatgtgctggctgttgcgggaatagacgtgctgattgaaccattaaactcgcaggatatgcccggctattttattgatagctttccgctggccgcagcaatcattgaccaggtcgccaggaacaatatcggtttacagtttgatatttatcactgccagaaaattcacggcaacgtcgccaaaaatattgaacgctactttacgcttatcaaacatattcaaattgcttccgttccttatcgccatgaacctgggaccggcgaattaaatgaagcatggttattcgattttattaaaaaaatgaactacaagggctggattggttgtgaatatcaaccctcaacatcaggccccgaatcattacgctggataacgccttacctgtaa

SEQ ID NO: 174985 - DNA, 807 bp, Klebsiella oxytoca
atgatcccggaacaacggcgcgactttatttaccgctacgtgcatgaaaaaaacgccgcctccttcaatgaactggcggagctgatgagcgtgtcgcatatgacggtacgccgcgacattcagctgctggaagaagaaggcaaggttatcgccattaacggcggcgtgaagctcaataacctgcttaaatccgagctgccgtggcgagagaaagcggagttgcatcatgaagtaaaacgcaaaatgggccagctggcggcgatgctcatcgagccgggtcaaacgctctacctcgatgccggcacctcgttgtttgaagtggcgaaagcggtggccgccagccgctgttttaacctgacggtcgtcaccaacgacttttccatcagccactacctgatggatatgccgcatatcacgctctatcacaccggcggcctggtggaccagcgcaaccgctcaagcattggtaaaagcgccgccagctttcttcgcaccattaatattgacgtggcgtttctgagctcctcttcgtgggataccgaacgcgggatgtcaacgccgagcgaagggaaagcctcggtcaaggaggcggtgctcaccgtttcccggcgtcgggtactggtctgcgatagcagtaaatttggcaaatacggcatgttccatatctgcgggctggagcaattgaccgatattgtttctgataaccggctaccggaggatgcgcaacacactattgccagccagggggtgaaactgcatctggtagatagccgggagggagcgcatcatgctgaagctcgcggctaa

SEQ ID NO: 174986 - DNA, 645 bp, Klebsiella oxytoca
atgaatccggtgagtgaacaccaactccgcgaacagctggtccactatgggcgctcgctgtttatgcgcggctacagcagcggcggttccggcaatctcagcgtgaagctgccggacggcggctatctggtgaccccaaccaattcctgtctgggtgaactgcaggccgccaccctgagtcgactggatgccgatggcgtgcatctcagcggcgataagccatcaaaagaggtccctatgcatctggcgtggtaccgccaccggccttcctgcggggccgtagtacatctgcactctccgtggctgaccgcgctctcctgtctaccgtgcgccacgccggaaaactgcctgccgccgctaacgccgtactacgtgatgcgcgtcggacggctgccgctgctgccctatttcaaacccggacacgagggcattgccagcgcgctcagtgacatcgccgcagaccatacggcggcgctactggccaaccacgggccggtagtgagcggtcgctcgctgcgcgaggcggtgtttaacgccgaagaactggaagacagcgcccgtatctggctgaccttaaaaccgctcggctatgtcccgctctcagaagcagcagtggccgaactcgaacaatcccgaccggcctga

SEQ ID NO: 174987 - DNA, 1257 bp, Klebsiella oxytoca
atggccgtcactacaggcgttatcgccgacgattttaccggcgcaacggatatagcaagctttatggctgaacagggctggcgagtcgcgctgctgcccggcatgcccgatatcactcagtgctggaacgaagaggttgacgctatcgtcatctcgttgaagagccgcgctttaccggcagaacaggccgtcgcccagtccctggcctgcgcccgctggctaagacaaaacgccggcgtccgccagctctatttcaagtattgctcaacctttgactccacgccggcgggcaacatcggcccggtaagcgatgcgctgatgaacgacattcaggccccgctaatcgttcactgccccgctctgccgcaaaatgggcgcacggtggtccacggccatctgtttgtgaacggggtgctgcttaacgaatccggtatggaaaaacatccgctaaatccgatgaccgatgccagcgtaccgcgcctgctggccgcgcagacggccagcccggttgggcacattgctctcaatacgattcgcagcggtgtggaagcggtcacttgcgccttagaacgctatcagattgaaggaacgcgccatgtgattgtcgatacgctggacgacaccgatctccataccctggctcaggcgctgcaggagtatccgctgctggccggaggttccggtctcggcggcgcgctggccgctaacgctggtggtcatcctgttgcgtcgccgcaccgctttccctctcccgccagagcagtcgtgttctccggcagctgttcgacgatgagcaaccgccaggtcaaccgctataaagcccaggcggcatcctgtttgcttgacgttgcccgctgcctgtcggataccgaaagctacagcgacgagctgtctacctgggcgatggcgcatatcaacgacccgctcgcgccgctactttatgccacccagccgccagaggcgctacagcgcattcagcaggaatacggcgaacaggccgccagtcgggcaatcgaacgcactttcgcccggctgagcgccaaacttctggccgcaggcgtcaacacctttattgtcgctggcggagaaacctccggcaccgtcgtggaagcgctacaggtgaagcgcctggccgtcggcagagcgatcgcgccgggcgtaccctgggtcttctcctccggcctggcgctggccctgaagtcaggcaactttggcgacgaagatttcttttttacggcccaggagtatccatcatga

SEQ ID NO: 174988 - DNA, 693 bp, Klebsiella oxytoca
atggcggaaaataaaagggataatggcatcgttttttttagttcgttaacagatgttttttcgcgggcaacggggctgacggcgacggttattaaggtaaccgacggtcgcttgcccgattgctatgcgggggcagagttcttttccctaccgctggttcaaagcaataaaatatgcgggtatattatttttgaccatcgagcagcaaccgataataatcatcgctcggcggcgataaggcttctgcatttcatcgttagtcattactcagcgatggaagaagcagaggaggaaggtgcgagacaggcgcgacaaaagagcactttttattatgcgcaaaaatcgccgcatgaaataaaactggcggctgcgctgcgctatattgatgaacatttatatgatgagctgtctctggaatctgttgccgcccatgtttgtctcagcgctaactacttcagccgtttttttaaaaagcgtcagggcgtaaattttaaggtgtgggtcaatcagaagaaaatgcagcgtgccggagagctgctcggggacccggctaattccatagacagcgtggcgcgtaagcttcagtttgcgcaaaccagctacttttgtcgggtgttccgcgctgctcaccgcacgaccccccagtcgttccgcgaacggaacctctggagatcttcacctcgcatcggttag

SEQ ID NO: 174989 - DNA, 903 bp, Klebsiella oxytoca
atgagaggaaaaataccgaaaactgaattactggtgacttttgaggttgtggctcgccatgaaagttatacccgggcagcggaagagttggctttaacacaaagcgccgtgttccgacaggtcacggcgctggaggatttcctccatacgtcattatttaatcatgctaaaaaaaggatttttttaaatgaggccggcaagcattatttgtctatcgttaaagaaacgttgaacaaactggagcgtgataccaattcgattatgacctggcaaccgacggtgcaggttcttgaactggccgttaatcccacctttagcacccactggctgatccccaacctgcgcgagtttaataaattaaatcctgacatcatcgttaatattcattcgctggccagcatgagtgattttctgagccgcgagtacgatgccgccattatgcgcgaggatttttgctcgccgtggtctgaagtggagtatctgtttgaagaggaaattttgccggtgtgcggctgcggactgctgtcggaacccgggcaaaagctggcggtggaggagctgctgggcgaatttccgctgctgcatcaaagcacgcggattcacggctggcaggagtggtttgcgctgtcgaatatcaccagcccgcagatcaacatcggtccacgtttcgatctgctctcgatgctgattgcggcagtgcgttcaaatctgggagtcgcgctactgccgcgttttgccattcagcatgacctggatagcggtgagatggtgatcccctgcgatgtgccgattcgtaccggtaaccgttttattatgacgtggcaggaggataaaacggaatcccgtcatttgcaggtatttcgcgactggctgctgcaaaaatcggtggtgtcggctgcctga

SEQ ID NO: 174990 - DNA, 603 bp, Klebsiella oxytoca
atgcacgcgcgaggcaatcctgaccgccatcgtcagcgccagcagaagctgaaaacgcaggttgatacccgcgtggcggcggcaacggagcaaaaaggcatcttgatcgtcttcaccggcaacggtaagggcaaatctactgccgcctttggtacggcaacgcgagccgtcggacatggtaagcgcgtcggcgttgcccagttcattaaaggccagtgggataatggagagtacaatacgctgcatcctctgggcgttgagtttcacattatgggcaccggctttacctgggaaacgcaaaaccgggaaacggatattgaggcggcatcggtcgtatggcgagagagtaagcgcatgctggccgatccgagctacgatctggtggtgctggatgagctcacgtatatgctggcgtatcgctacctggatccacaggaagtgattgccgctattgtcaatcgtccgccgcagcagaacgtgattgttaccggccgcggctgccatgcccgcctgctggagcttgccgatacggtcagcgaactgcgcccggtgaagcacgcctttgacggtggtattcaggcgcaggcaggaatcgactggtag

SEQ ID NO: 174991 - DNA, 1653 bp, Klebsiella oxytoca
atgtctaaaccctttgtctggcaggaactctttgtgcagagtaaagataatacggaatatgaactactcagtaatcaacatgttaaggtgacagagttagatggtgaagaggtcatcaaggttgcgcccgaagcgttaacgttgctggctcagcaggcattttatgaggcttcatttttcctgcgcgccggacatttaaaacagatcgccagtatcctgcacgatccgcaggccagtagtaacgataaatacgttgcgctgcagctgctgcgcaacgccgaagtctcggcaaaaggcgtgctgccaaactgccaggataccgggaccgcaaccatcgtggcgaacaaaggccagaacgtctggaccggcggcaacgatgctgaagccctgagtcagggcgtctacaacaccttccaggaaaataatttacgctattcgcaaaatgcccccctcgatatgtacaccgaggtcaacacggagaccaacctgccggcgcagatcgacatcagcgccgtgccgggtagcgaataccgcttcctgttcgtcaacaaaggcggcggctcggcgaacaaagcagcgctgtttcaggaaacaaaatccatcctgcagccggaaaaactcaccgccttcctgatagaaaaaatgaaagcgctgggcaccgccgcctgtccgccgtaccacatcgcctttgtggtgggcggcctctcggcggatcaggcattgaaagtggcgaagctggcttcgaccaaatattatgacaatctgcccaccagcggaaatgcgctgggccaggcgtttcgcgatactgcgctggaggcaacgttgcttaacgccagccgcgagttcggcatcggcgcgcagtttggcggcaaatatttcgctcacgatattcgcgtgatccgcctgccgcggcacggcggctcctgccctatcgctatggccctctcctgctccgccgatcgaaacattaaagccaaaatcaacaagcacggcatctggctggagaagctggaacataacccgggcaagttcattcctgattctcagcggatagaaaacggggcgcagaccgtccagctcgacctgaatcggccgctgcgcgatatccttcgcgatatgtcagccctgccggtcggtacccggctgtcgctgagcggtccaattgtcgtcgcccgcgatattgcccatgccaaaattaaagagcggctggataatggcgaaccgatgccggcttacatgcgcaatcatatcgtctactacgccggaccggcgaaaacgccagacaatcttgcctgcggctcgctgggtcccaccaccggcggacggatggacgggtatgttgatgctttccaggccgcgggcgggagtctgatcatgctctcaaaaggcaaccgcagcccgcaggtgaccgaagcctgcctgaaacacggcggctttaatctcggcagcatcggcggtgcggcggccctgctggcgcagcagtacgtgaaaagtttacgctgccttgagtatccggaactgggcatggaagcggtatggatgatggaagtcgaaaacctgcccgcgtttgtgctggttgacgacaaaggcaacaacttctttagccagttcgagcagcagcaccgctgcgccacctgtccggcagggcactaa

SEQ ID NO: 174992 - DNA, 1002 bp, Klebsiella oxytoca
atgaacgttaaatttctcggcacctgcctgttcaccgccagcttattgtttagcggcgccgccgcagctcagggcgcaccggactacgccagcattatcgagcaggcgcatcagaaatataaaaataaccacgagggtaaagtcgccgactacatccccgctctggcgacctatagcccggataatttcgccattacgctcgcgacggtagaaggcaaaatttaccagaccggcgacgtaaaaaaagcgttcccgatggagtccctgagcaaagtgttcaccctggcgctggcaatggagcaacgcggaccgcaggaagtgttggataaactcggcgccaacgccaccggcctgcccttcaattccggattagccgtcgaactcacccaaggcgcgccggagaatccgttagtcaacgccggcgccatgagcaccgtgagcctgattgcggcgcaggacaaaaccgaccgctggaataaaatcctcaacaatctcagcgcctgggccgacagtacgctgagcgtgaacgagccggtatttcaatccgaaatggcaaccaaccagcataaccaggcgctggccatgttgatgcattcctaccgcagcttttatggcgatccgcaggaagccgtcgaaatctacacccgtcaatgttcggtggatatcaccgttgagcagctcgccaaaatgggagccgtgctggccaacggcggtaaatcgccgttcaacggcaggcaactgcttaacgccagctatgtgccgcaggtactggcggaaatggcgatagccgggctgtacgacggcagcggcagatggctgtatagcgtcggtattccggcgaaatccggcgttgccggcgggatgatcgccgtggtgccggggcggtacgccatcgccgtctactcccctccgctggatgcagccggtaacagcgttcgcgcccagcaaaccatcgagtacgtcgctaaagcgacgcaggccaatctctttttcacgaaatag

SEQ ID NO: 174993 - DNA, 1308 bp, Klebsiella oxytoca
atgaaaaaaataagtttaaccaaaatgatcatattaggcctgatactcggcatgattgccggggtggcaattaataatatggcatcggctgatacagcaaaatcatacgcgcaggatatttctattttcaccaccatatttttacgcatggtaaaaatgattatcgctccgctggtaatatccacgctggtagttggcatcgccaaaatgggcgatgctaaaacgctcgggcggatattctcgaaaacttttttcctgtttatttgcgcctcgctgctgtcgattgcgctggggctggtgatcgttaatctgttccagccgggggcggggattaatttcgtcgcccacgatgccggagcggtcgcggccgttcaatctgagcccttcacactgaaggtatttatctctcacgcggtgccgaccagcatcgttgatgcgatggcgcgcaacgaaatcctgcaaatcgtggtgttctccattttcctcggctgtagcctggcggctatcggcgaaaaagccgaacccattgtgaaagtgctcgattcgctggtccacgtaatgttgaagctgacgggctacgtcatgctcttcgcgccgctaaccgtctttgccgctatctccgggctgatcgccgagcgcggactgggcgtaatggtcagcgccggtatctttatgggtgagttctacctgacgcttggcatgctgtgggcgatgctgattggcctgtcggcggtcattgttggtccgtgcattggccgtctgaccaaagcgatccttgagcccgccctgctggccttcaccacgtccagctctgaagccgccttcccgggcaccctcgataagctggaaaaatttggcgtctcttccaaaatcgccagcttcgttctgcccattggctactcctttaacctggttggctccatggcctactgctcgttcgccacggtgtttatcgcccaggcctgcaacgtgcacctcggcatgggcgagcagatcaccatgctgctgattctgatgctgacctcaaaagggatggcgggcgtaccgcgcgcctcaatggtagttattgccgcgacgctgaaccagttcaacattccggaagcgggcctgatcctgttgatgggtgtcgatccgttcctcgatatgggtcgctccgccaccaacgtaatgagtaacgccatgggcgccgccatcgttggccgctgggaaggcgagcactatggagaaggctgccgcggcaccgccccggtcaaaaaacccgagcaggagcgtcctgccagcgaaacgtccgaagtggcgatgtcctga

SEQ ID NO: 174994 - DNA, 318 bp, Klebsiella oxytoca
atgaaacaatctctatgctcactggcgcaggtgatccgctccaaaaacgccgggccgtatgaattagttttagatattttatttaaaacccgggaggattatcagcgggtaaaacgatctgagcaattaactccgcagcttattgccagcttatataacgtgagacctgattttattcatcgcattgtctggtttgacccggctaacgcggtaaaaattgtcatgccgcgggatattatttccggcaacgttggcgacaatgatgtttatggcgctcagcaacatgcgccgttattaagtattgagttcgatttctaa

SEQ ID NO: 174995 - DNA, 1371 bp, Klebsiella oxytoca
atggctcgtacctttaagatcttatcgccgaccgcgattctgggttatggctttccggaagagagctttcttaaagccatggcggagtctcctgatctgattgccgttgacgccggttcatccgatcccggcccccattatctgggagcaggtaaaccctttaccgacagagccggagtgaaacgcgatctgcgctatatgatcgtcgccggcgtaaaaaacagtattccggtggtgatcggcacggccggcggctccggcgcggccccgcacctggagtggtgccggcaaatcatccatgagattgcgcaggaagagcaactgtcgttttccatggcgctgatcccgtctgacgtcgagaaatccatcgtgcatcaggcgctggataacggcaaaatcaccgccctcgactttgtgcccgagctgacccacgaagctattgaagagagcacctatatcgtcgcccagatgggtatcgaaccgttccaacgagcgctggccgctggcgcccaggtggtgctgggcggacgggcgtacgatccagcctgcttcgcggcgctgccgattatgcagggcttcgatgagggactggccctgcactgcggcaagatccttgaatgcgcggccattgcggcgaccccagggtccggctccgactgcgcgatggggatcatcgacgacaacggttttacgctgaaaaccttcaatccacagcgcaaattcaccgaaacgtccgccgcggcgcacacgttatacgagaagtccgatccgtacttcctgccggggcccggcggcgtgctgaacctcaaaggatgcagcttcaaagcggtcaacgaaggcgaggtgtacgttagcggctctcgccacgaagagacgccctacgcgctgaagctggaaggcgcgcgtcgggtcggctttcgctgcctgaccattgccggaacccgcgacccgatcatgatcgccgggatcgacacgattcttgcagaggtacaggccagcgtggcgcgcaacctctcgctgagtgacgacagcatccgcatgactttccatctgtacggaaagaacggcgtgatgggcaatcacgaaccgatgaaaaccgccgggcacgagctggggattttactggacgtcgtcgccccgactcaggataccgccaacagcgtctgctcgctggtgcgctctaccctgctgcactacggttatgaaaaccgcattgcgaccgcgggcaacctcgccttcccgttctcgccttccgatatccagagtggcccggtgtatgagttttcaatctatcacctgattgaagcctgcgacgcgctgcgctttgacttccatatcgagcaggtcacgccagaaggagttcaggcatga

SEQ ID NO: 174996 - DNA, 1242 bp, Klebsiella oxytoca
atgaaaattaaacaggcccttttcaccgctggctactcctcattctactttgatgaccagcaggcgattaaaaacggcgcgggtcacgatggattcatctataccggcgcgccggttacccccggatttacctccgtgcgccaggcaggtgaatgcgtttccgtgcagctaattctggaaaacggcgcggtagcggtcggtgactgtgccgccgtacagtattccggcgccggcggccgcgacccgctgttcctcgcggaaaattttattcccttcctcaacgatcatattaaaccgctgctggaaggccgggatgtcgatacgttcctgccgaacgcccgcttcttcgacaagctgcgcatcgacggccaactgctgcataccgccgtccgctatggtctttcccaggcgctactcgatgccacggcgctggccagcggccgtctgaaggcggaggtggtttgcgacgaatggcagctgccctgcatcccggaagcgattcctttatttggtcagagcggagacgaccgctatatcgccgtggacaagatgatcctcaaaggcgtcgatgttctgccgcatgcgctgattaacaacgttgaagagaagctgggtctgaaaggggagaaactgcgcgagtatatccgctggctgtccgaccgcatcttaagcctgcgcaccagcccccgctaccgcccgacgctgcatatcgatgtttacggcaccatcggcctgattttcgatatggacccgcttcgctgcgccgaatatatcgccagcctggagaaagaggcccagggcctgccgctctatatagaaggcccggtggatgccggcaacaaaccggatcagatccgcatgctgaccgccatcaccaaagagctgacccgcctgggttccggggtgaaaatcgtcgccgacgaatggtgtaacacctatcaggatatcgttgacttcaccgatgccggcagctgccacatggtacagattaaaaccccggacctcggcggcgtccataacattgtggacgcggtgctgtactgcaacaaacatgcgatggaagcctatcagggcgggacctgtaacgaaaccgagatcagcgcccgcacctgcgttcacgtcgcgctggccgcgcgtcctgtacgcatgctgatcaagccaggcatgggcttcgacgaaggtcttaacatcgtgtttaacgaaatgaaccgcaccatcgcgctgttgcagactaaggattaa

SEQ ID NO: 174997 - DNA, 1446 bp, Klebsiella oxytoca
atggaacttcgaaataaaaaattaacccatgacgaattcatgaccgagcggcatcaggtattgcagacctggcataccggcaaggacgttgagcacttcgaagatggcgtgaagtaccagcaaactattccagagaaaaaacgcttttctcacgccctgcttaaggccgaccaggaaggtaaaacgttgagccagccgcgcgcgggcgtagcgctgatggatgaacacattgcgctactcaagacgctgcaggaagagtgcgatctactgcccagtaccatcgatgcctacacccgccttaaccgttacgaagaagcggcggtcggcattcagaagtctatcgaagcgggtacctccaaactcaacggtttaccggtggttaaccacggcgtcgctgcctgccgccggatgaccgaagcgctggaaaaaccggtgcaggtacgtcacggtacgccggacgcgcgtctgctggcggaaatttccatggccagcggctttaccagctacgaaggcggcggtatctcctacaacattccctacgccaagcgcgtgaccctggagaagtcgattcgcgactggcagtactgcgaccgtctgatgggcctttatgaagagcacggcattcgaattaaccgcgaacctttcggcccgctaaccggcactctgatcccgccgtttatgtcccacgcggtggcgattatcgaagggctgctggcgctggaacagggcgtcaaatcaattaccgtcggctacggccaggtgggcagcctgacccaggacattgcagcgattaagtcgcttcgcgaactttctcacgaatattttggcaattacggtttcgacgattatgagctgagtaccgtcttccaccagtggatgggcggctttccggaagatgaatcgaaagcattcgccattatctcctggggcgcggcggtggccggcatgtccggcgccaccaaagtgatcaccaagagcccgcatgaagcgttcggtattccaaccgcagcggccaacgcgcagggcctgagggcctcccgccagatgctcaatatggtcagcgatcagaagttcccgccgtgcgccgcggtagatcaggaagtggagctgataaaaagcgaggtacgcgcggtactgaagaaagtcttcgaactgggtaacggcgatatcgcccgcggtacggtgctggcctttgaagcgggcgtgctggacgtgccttttgctccggcatcctgcaacgcgggcaaaattctgccggttcgcgacaattccggcgctattcgcgtgcttgaagctggcgcggttccgctgccgaaggacatcctcgccctgcaccacgattacgtcgcagaacgtgcgcattttgaaggtcgcaagccctcattccagatggttgttgatgacatcaacgcggtatcccacagtcaattaataggaagaccataa

SEQ ID NO: 174998 - DNA, 1389 bp, Klebsiella oxytoca
atgcaaaccgtctcagtcgatatcggctcgacgtggaccaaggcggccctcttcacccaggagggggatgagctgacgctggtaaaccacgttctgaccccgacaaccacccatcacctggcggaaggcttttttgccagcctgaaccaggtgcttaacgttgccgatgcgcgcccgctgctgaaccgcggtgacgtcacgctgaaatactcctcatcggccaaaggcggtcttgccgtcgccgcgatggggctggtgccgtccatcaccctggagtcagcaaaagtcaccgcccactcggcgggggccaaaatcgcccaatactactcttataaactgaatcgccacgacattcaggcgctggaagcctcgccgccggacattctgctgtttaccggcgggaccgacggcggtgaaacgagctacggcctggctaacgcccacgcgctggcggagtcaacgctcgactgcgccattatctatgccggcaaccgcgacattcaggacgagattcagaccatcctcggccataaagatctgaccacggtagacaatattctgcccgatcttgatcacccgaatccgtacgcggcccgcaaggcaatatgcgatgttttcttatcccggatcgtcaaaggtaaaggactggacgttatcgtcgcagaaaccggcgaagagccgatgccaacgccgtggaccgtctacgagctggtgaaaaccatcagtcattacgacagtacgtggaaagagttcatgctgatcgacatgggcggcgcgactaccgatgtctactccgccagcgccaacacgctctcgccggataccgttctacacggcgttccggagccatatgtaaaacgcacggtggaaggcgatctcggcatgcgcgtctcggcgatggttgtcggtgaaagcgcccgggagctggtgaacgtggtctttgcccaccagccgcagcgtcaggaggctttttaccgctatctgcgccatcttgtcgctcagccggattatctgccggccagtgaagaagaaaagtatttcgacaccgttctcgccgggctctgcgtgggctacgccagcgaacgccacgcgggaaccaaaaaacaggtctgcacctgcgtgggcaacgtcgacctgcagatggggcgcgacctgaccccggtgcgcaaagtcgtcggatccggtggatggctctcccgcgccagccgctttgacatccaccgctggctgaaataccgcgaactggatgacgacggcagacgcattctcttaccgacccagtttgactattaccgcgatgcaaaaggcctgcttccgctgctggcaaacgttgccaggctttatcccgaactcgccgctcgcaccagcattcactgtttaaccctataa

SEQ ID NO: 174999 - DNA, 450 bp, Klebsiella oxytoca
atgaagaaatcaacactcgttattggcgtcattggtgctgactgccatgcagtaggcaataaagtcctggaccgcgtttttactgcccatgattttcgcgtaatcaatctgggcgtgatggtcagccaggatgaatatattgatgccgccatcgaaactggtgcggatgccatcgtcgtgtcgtcgatttacggccacggcgatatcgattgcctgggactgcgcgagcgctgcatcgaacgcggtatcggcgacattctcctttacgtcggcggcaatctggtggtcggaaagcatgactttgccgacgttgaagcgaagttcaaagagatggggttcaaccgcgtttttgcccccagccacgatctggaagacgtctgccaactgatggcaaacgacatcaaccagcgccatggcgttaaacacccgtgtctggaagaggccatctga

SEQ ID NO: 175000 - DNA, 132 bp, Klebsiella oxytoca
atgagccctcgtgagcggcttaaatgccgacctcaactgataatgttgcgtagttcacagattttttttatcaagttactatcgtttatttttttactgattatatttatcattgcatttacctttaattaa

SEQ ID NO: 175001 - DNA, 1569 bp, Klebsiella oxytoca
atgttagatatagtcgaactgtcgcgcttacagtttgccttgaccgcgatgtaccacttcctgtttgtgccgctgacgcttggtatggcgttcctgctggccatcatggaaacggtctacgtcctttccggcaaacagatttataaagatatgaccaagttctggggcaagttgtttggtatcaacttcgctctgggtgtggcaaccggtttgaccatggagttccagttcgggacaaactggtcttactactctcactacgtgggcgatatcttcggtgcgccgctggccattgaaggtttaatggccttcttcctcgaatctacctttgtaggtctgttcttcttcggttgggatcgtctgggtaaagtgcagcacatggccgtgacctggctggtagcgctcggctccaacctgtcggcgctgtggattcttgtcgctaacggctggatgcagaacccgattgcgtcggacttcaactttgaaaccatgcgtatggagatggtcagcttctctgagctggttctgaacccggtggctcaggttaagttcgtgcataccgtggcttccggctacgtgaccggcgcgatgttcattcttgctatcagctcctggtatatgctcaaagggcgcgactttgcttttgccaagcgctcctttgctatcgcagcaagcttcggcatggcggcaatcctctccgttatcgttctcggtgatgaatccggttacgaaatgggcgacgtgcagaaaaccaagctggcggctatcgaagcagaatgggaaactcagcctgctccggcggcctttaccctgtttggtattcctgaccagaaagcagaggagaaccgcttcgcgattcagattccttacgcgctgggcatcattgcgactcgctccgtcgataaacaggttaccggcctgaaggatctgatggttcagcacgaagagcgtatccgtaacgggatgaaggcttacgcgctgctggaacagctgcgtgcaggttcaactgaccaggccgttcgcgatcggtttaacgacgtgaagaaagatcttggttatggtctgctgctgaaacgctataccgacaacgtctccgacgcgacggaagcgcagattgcgcaggcgaccaaggactccattcctgccgtggcgccgctctattttgccttccgtatcatggtggcgtgcggcgtgctgatgctgctgattattggcgcctccttctggaccgtgattcgtaaccgcattggcgagaaaaaatggctgctgcgcgctgcgttctatggcctgccgctgccgtggattgccgtagaagctggctggtttgttgctgagtatggccgtcagccctgggctatcggtgaagtgctaccaacggctgtagcgaactcgtcgctgactgcgggcgacctgatcttctctatggtgctgatttgtggcctgtacacgctgttcctggtggctgaactgttcctcatgttcaagtttgcccgcaaaggaccaagcagcctgaaaaccggtcgctatcactttgaacagtcctctgcggctattcagtcggcacgctaa

SEQ ID NO: 175002 - DNA, 1140 bp, Klebsiella oxytoca
atgatcgattatgaagtattgcgttttatctggtggctgctgattggcattctgctcattggttttgccgtcgccgatggcttcgacatgggggtgggcatgctcacccgtttcctcggtcgtaacgacaccgagcgtcgaattatgattaactccattgctccgcactgggacggaaaccaggtgtggctgatcaccgcaggcggcgcgctctttgccgcctggccgatggtctacgccgccgcgttttccggcttctacgtggcaatgatcctggtgctggcatctttattcttccgtccggttggtttcgactaccgctcgaagattgaggatacccgctggcgtaatatgtgggactggggcatcttcgtcggcagcttcgtaccgccgctggtgattggcgtggcgttcggtaacctgctgcagggcgttccgttccacgttgatgaatatctgcgtctgtactacaccggcaacttcttccagctgctgaatccgtttggactgctggccggtattgttagcgtggcgatgatcctgacgcagggcgcgacctatctgcagatgcgtaccgtgggcgaactgcacctgcgtacccgcaccgtctcaacggtagcggcgctggtgacgctggtctgcttcgcgctggcaggcgtttgggtctactatggcatcgacggttacgtagtgaaatccgtcatggatcataccggcccgtctaacccgctgaccaaagaagtggctcgtgaggccggcgcgtggatggtgaactttaataatatgccggcgctatgggcgattcctgctctgggcgtggcgctgccgctgctgaccgtcatttcgaccaaagcagataaaggcgcctgggcatttctgttctcctcgctgacgctggcgtgcatcattctgactgccggtatcgccatgttcccgttcattatgccttcaagcacggcgatgaacgcgagcctgaccatgtgggatgccacctccagccagctgacgctgaacctgatgacttacgtggcgattgtcttcgtaccgattattctggcctacaccacctggtgttactggaaaatgttcggtcgcatcactcgcgaagacatcgaaaagaacacccactcgctgtactaa

SEQ ID NO: 175003 - DNA, 291 bp, Klebsiella oxytoca
atgagtattatcgcgactctttacgcgataatggacaagcgcccgttaagggcgctttccttattgatggcgctggcgctagcgggctgcatcttctgggacccgtcgcgctttgcggccaaaaccagtgagctggaaatctggcacggcttcctgctgatgtgggcggtgtgtaccggcgttatccacggcgtgggctttcgcccgcgcgccatccactggcagggaattttttgtccgcttatcgctgatattgtgctcgttttgggcctgttctttttcttcttttga

SEQ ID NO: 175004 - DNA, 405 bp, Klebsiella oxytoca
gtgaatacaacgctgtttcgatggccggttcgggtctactacgaagacaccgacgccggtggtgtggtttaccacgccagctacgtcgctttctatgaaagagcacgcacagagatgctgcgccatcatcacttcagccaacaggttttgctggctgaacgagttgcctttgtggttcgcaaaatgacgctggagtattttgcgcccgccagactcgacgacatgctcgaaatccagacggagataacctcaatgcgaggggcgaccctggttttcacgcagcgaatcgtcaacgccgagaacgtggttttgaatgaagctgaagttctgatcgtgtgcgttgatccactcttaatgaagcctcgtgcgcttcccaagtctattgtcgcggagtttaagcagtga

SEQ ID NO: 175005 - DNA, 693 bp, Klebsiella oxytoca
gtgactgagatgaatatccttgatttgttcctgaaggcaagccttctggttaaacttatcatgttgattttagtttgtttttctatcgcctcctgggccattattatccagagaacgcgcattcttaactcggcgtcgcgtgaagccgaagcgtttgaagataagttctggtcaggtattgagctttctcgtctgtatcaggaaagccagggccgtcgcgataatctgaccggttcggaacaaatcttctacagcggttttaaagagtttgctcgtctgcatcgcgccaacagccatgcgccggaagcaattgttgaaggggcatcgcgcgcgatgcgtatctcgatgaatcgcgagctggaatccctggagacgcacatcccgttcctcggtacggtaggttctatcagcccgtatatcggtctgtttggtaccgtatgggggatcatgcacgcctttatcgcgctgggcgcggtaaaacaggcgacgctgcaaatggtggcaccgggtattgcagaggcgctcattgcgaccgcaattggtctctttgccgctatcccggcggttatggcttataaccgtctgaaccagcgcgtgaacaaacttgagctgaactacgacaactttatggaagagttcaccgctattctgcaccgtcaggcgtttaccagcagcgaaagcaataaggggtaa

SEQ ID NO: 175006 - DNA, 429 bp, Klebsiella oxytoca
atggccagagcacgtggacgcgggcgtcgcgaactgaagtccgagatcaacatcgttccgctgctggatgtcctgctggtgctgttgctgatctttatggcgacagcgccgatcattacgcagagcgtagaggtcgacctgccggacgcaacggaatcgcaggcggtaaaaagcaacgatgaaccgccggtgatcgttgaggtttccggagtcgggcagtacaacgtgaaaattggcccggaaacgctatcgcagctgccgcctgaacaggttattgccgaagccaggcgtcgacttgaggcgaatgagaaaacggtgttcctgatcggcggtgcgaaagaggtgccatacgatgagattattaaagcgcttaacctgttgcatagcgcaggggttaaatcggttggcttgatgactaagccgatctaa

SEQ ID NO: 175007 - DNA, 1401 bp, Klebsiella oxytoca
atggcgacggtgggacaaacgtgtcccgcggccgacgtcatcgaacgggaacaggcgaacagtttttgggaaccgatagtgtcaaaggcaaccgaacaaaacgacaagcttaaacgagcgatcatagtttcagtcgcgctgcacatcgtcttgatagcgctgctgatctggagttcgtttgacgagcatctggatgcttctgccggcggcggcgggggctcttctatagatgcggttatggtcgatccgggggcggttgtgaagaattatgaccgtcaacagcagcagcaggccagcgcccgccgcgccgccgagcagcgtgaaaagcaggctcagcagcaggcggaagagttgcgcgaaaagcaggccgccgagcaggaacggctaaaacagctggaacaggagcgtctgcaggcgcaggaagcggctaaagaggcgaaagagcagcagaaacaggcggaagaagccgcggcgaaagccgccgcagcggccaaagcgaaagcggacgctcaggtgaaagaggcgcaggaagctgccgccaaagccgccgctgatgcaaaagcgaaggccgatgctcaggcgaaagcagccgaagccgctgcggcgaaagcggcggcggatgcgaagaaacaggcagaagcagaagccgcgaaagcggccgcggacgcgcagaagaaagccgaagcggatgcagcgaagaaagctcagcaggaagccgagaagaaagcgcagcagcaggcagagaaaaaagcgcagcaagaagcggcgaaacaggctgcggctgaaaaggctgctgccgaaaaagcggcagaaaaagccgccgcgcagaaagccgctgctgagaaagcagcagccgagaaagccgccgcagcggaaaaagccgccgctgagaaagctgcggcagccaaagccgcagcagcagagaaggccgccgcagacaaagcagcgaaagccgcagccgctaaggcagcagccgcgaagaaagccgctgcggccaaagaggccaacggcgtggacgatctgctcggcgacctgagctccggtaagaatgcgcctaaaactggcggtggggcgaaagggagcaatgcatctgctgccgggagtggtaatactaaaaataatggcgcatcaggagctgatatcagcaattatgccgggcagatcaaatctgccattgaaagtaagttttacgacgcagcgtcttactcaggcaagacctgtaccttgcgtattaaacttgctccggatggcatgttgctaaatatacagtctgaaggtggggatcctgcgctttgtcaggccgctcttgcagcagcccgacaggctaagttcccaaaaccgcctagtcaggcggtatatgaagtattcaaaaatgcgccgttggacttcaaacctcagtga

SEQ ID NO: 175008 - DNA, 1293 bp, Klebsiella oxytoca
atgaagcaggcattacgagtagcatttggttttttaatgctgtgggcggcagtgctgcacgcagaagtacgcatcgagattacccaaggggttgactcggcacgcccaatcggcgtagtgccgttccagtgggcggggcagggtgctgcacctgaagatgtgggcggtatcgtggcggctgacctgcgcaacagcggcaagtttaatccgctcgatcgctctcgcctgcctcagcagccgggtagcgctcaggaagtacagcctgcggcatggtctgcgctgggtattgacgccgttgtggtgggtcaggtgacgcaaaaccctgacggctcctataacgtggcctaccagctggttgataccggcggcgcgccgggtaccgtgcttgcacagaactcatttaaagtaactaagcagtatctgcgctatgccgcgcacgctgccagcgacgcggtatttgaaaagctgaccggcatcaagggcgccttccgtacccgtatcgcttacgtggtgcagaagaacggcggccagttcccgtacgaactgcgcgtatccgactacgatggttataaccagttcctcgttcaccgttccacccagccgctgatgtctccggcctggtctccggatggtacgaaactggcctacgtaacctttgaaagcggtcgttctgcgctggtggtgcagactctggctaacggctccgttcgtcagattgcttcgttcccgcagcacaacggcgccccggcgttttcgccggacggcagcaaactggccttcgctctgtcgaaaaccggtagcctgaacctgtacgtgatggacctcggatccggtcagattcgccaggtgaccaatggtcgtagcaataacaccgaaccaagctggttcccggatagccagaatctggcctttacttccgaccaggcgggacgtccgcaggtatataaagtcaatattaatggcggcacgccgcagcgtattacctgggaaggttcacaaaaccaggatgctgacgtgagcgctgatggtaaaactatggtaatggtaagctcggccggtggtcagcagcacattgccaaacaagatctggaagcgggtggtgtgcaggttctgtcatcaacgtttttagatgaaacgccaagtctggcacctaacggcactatggtaatctacagctcttctcaggggatgggatccgtgctgaatctggtttctacagatgggcgtttcaaagcgcgtcttccggcaactgatggacaggtaaaatcgcctgcctggtcgccgtatctgtga

SEQ ID NO: 175009 - DNA, 525 bp, Klebsiella oxytoca
atgcaactgaacaaagtgctgaaagggctgttgatcgctctgccggttatggcaatcgcggcgtgttcttctaacaagaacgccagcaacgaccagagcggtgaaggcatgctgggtgccggcactggtatggacggtaacgctaacggcggcaacatgtcttccgaagagcaggctcgtctgcagatgcaacagctgcagcagaacaatatcgtttacttcgatctggacaaatacgatatccgttctgacttcgctgcaatgctggacgcgcacgctaacttcctgcgtagcaacccgtcttacaaagtgaccgtagaaggtcatgcggatgagcgcggtacgccggaatacaacatcgctctgggtgagcgtcgtgctaacgccgttaagatgtatctgcagggcaaaggtgtttctgctgaccagatctccatcgtttcttacggtaaagaaaaacctgcagtactgggccacgacgaagcggcttacgccaaaaaccgtcgcgccgtactggtttactaa

SEQ ID NO: 175010 - DNA, 786 bp, Klebsiella oxytoca
atgagcagtaacttcagacatcatctattgagtctgtcgttactggttggcatagcggccccctgggccgcttttgctcaggcgccaatcagtagtgtcggctcaggctcggtcgaagaccgcgtcactcaactcgagcgtatttccaatgcgcacagccagcttttaacccagctccagcaacaactctccgataatcagtccgatattgattccctgcgcggccaaattcaggaaagccagtatcagctgaatcaggttgttgaacgccagaagcagatcctgctgcagatcgacggtctgagcagcggtggcggcgcgacgggcgcgcaaagcccgtcgtcagccagtgagcaaggcgctgcggcaagcgcgccagcggcttcatcaggcgctccggcgtcgaccggcgatgcaaacaccgattacaacgcggctatcgcgctggtgaaggatgcttcccgccaggacgacgcgatggcggctttccagaacttcgtcaaaaagtaccccgattcaacttatcagccgaacgccaactactggctcggtcaactgaattacaataagggtaaaaaggacgatgcggcgtactatttcgcttccgtggtgaaaaactaccctaaatctccgaaagcgcccgatgcgatgtttaaagtcggcgtaatcatgcaggacaaaggcgataccgcaaaagccaaagcggtttatcagcaggtggtcagtaaatttcctggcaccgacggagccaaacaagcgcaaaaacgccttaacgccctcggatga

SEQ ID NO: 175011 - DNA, 282 bp, Klebsiella oxytoca
atggccactgagtatgttgactacctgatcctcggcgacgagcatcacggcgaaatccatcgggatattaaaagccactctctgcgggtccgttcgaaatacgccgccggttccggcaggggggacgcttctgctgcgcagccgaaaatggcgaactacaaagtacatgaatatccggcgcaggatggacgattttatctggtggcgaccaactattcgctggccgattttgacgttgaggaagcgctaataaagtcgagaatacatccgctgagaagctag

SEQ ID NO: 175012 - DNA, 1047 bp, Klebsiella oxytoca
atgaaaaaatggtcacgccacctgctcgctgcgggcgctctggcaatcgggatgagcgccgcgcacgcggacgatagcaaaacgctctatttctacaactggaccgaatatgtcccgccggggctactggagcaattcaccaaagagaccggcatcaaggtgatctattcaacctacgagtcgaacgaaaccatgtatgccaagctcaaaacctataaagacggcgcttatgacctggtggtaccttccacctacttcgtcgacaaaatgcgtaaagagggcatgctgcagaagatcgataagagcaagctgagcaacttcggcaatctcgatcctgaaatgctcaataaaccgttcgacccgaataacgattactctattccgtacatctggggcgcgacggccatcggaatcaatagcgatgagatcgatccgaaaaccgttaccagctgggcggatctatggaagccagagtataagagcagcctgctgctgaccgacgacgcgcgcgaagtgttccaggtcgcgctgcgtaaactgggctactccggcaatactaccgatccgaaagagattgaagcggcctataacgagctgaaaaaactaatgccgaacgtcgcggcgttcaactccgataacccggcgaacccgtatatggaaggcgaggtaaatctcggcatggtgtggaatggctccgcgtgggttgcgcgtcaggccggtacgccgctggaagtcgtgtggccaaaagaaggcggcatcttctggatggatagcctgtcgattccggccaatgccaaaaacgtcgacggcgcgctgaagctgatcaacttcctgctgcgcccggaagtggccaaacaggttgcagaaactatcggttacccgacgccaaacctggccgcgcgtaaaatgctgagcccggaggtcgccaatgataaatcactctatccggacgccgcgacgattcagaaaggcgaatggcagaacgatgtcggcagcgccagcacgctttatgaagagtattatcagaagctaaaagcgggtcgttaa

SEQ ID NO: 175013 - DNA, 786 bp, Klebsiella oxytoca
atgatcggtcgactgctgcgcggcggctttatgaccgctatttacgcgtatctctacattcccattattatcctgatcgttaactcgtttaacagttcgcgcttcggcattaactggcagggttttaccaccaactggtatagcctgctgatgaataacgacagtctgctgcaggcagcacagcactcactgaccatggcggtgctgtcggcgactttcgctacgcttatcggatcgctgaccgccgtcgcgctgtaccgctatcgctttcgcggcaagccgttcgtcagcggaatgctgtttgtagtgatgatgtccccggatatcgtgatggcgatttcgctgctggtgctgtttatgctgatcggtattcagctgggattctggtcgctgctgttttcccacatcaccttttgcctgcccttcgtggtggtcacggtgttttcgcgcctgaaaggttttgacgtgcggatgctggaagcagcgaaagatctcggcgccagcgaaatgacgattctgcgaaagatcattttgccgctggcgctgcccgcggtggctgcagggtggctgctgagcttcaccctgtcgatggatgatgtggtggtctcttcatttgtaaccgggccgggctatgagatcctgccgctgaagatctattcgatggtcaaagttggggtatcgccagaggtcaatgcgctggcgacgattctgttggttctgtcgctggtgatggtcattgccagccagataattgcacgtgataaaactcaggggacgttaaaatga

SEQ ID NO: 175014 - DNA, 858 bp, Klebsiella oxytoca
atgaagaacaccagtaaattccagaatgtggtgattgccaccatagtgggttggcttgtgctgtttgtctttctgcccaacctgatgattatcgccaccagctttctgacccgcgacgataccaacttcgtcaagctggtctttacgctggataactacgcgcgcctgctcgatccgctctactacgacgtgctgctgcattcgttgaatatggcgttcatggcgaccctggcctgtctggcgcttggctaccctttcgcctggtttctggcaaggctgccggagaagatacgcccgctgatgctgtttctgctgattgtgccgttctggaccaattcgctgattcgtatctacggactgaaaattttcctcagcaccaagggctatctgaacgaatttttactatggctgggcgtcatcgatacgccgctgcgcatcatgtatacgccatcggcggtcattatcggcctggtctatattctgctgccgtttatggtgatgccgctctactccagcatcgaaaagctcgatcgtccgctgctggaagcggcgaaagatctcggcgccaataaactacaaacctttatccgcatcatcattccgctgaccatgccgggcattattgccggctgcctgctggtgatgcttccggcaatggggctgttctacgtgtctgacctgatgggcggcgcgaaaaacctactgattggtaacgtcattaagagccagttcctcaacatccgcgactggccgttcggtgcggcgaccagcattacgctaacgctggtgatgggcctgatgctgctgatttactggcgcgcagcgcgtttactgaataaaaaggtggagctggaatga

SEQ ID NO: 175015 - DNA, 1137 bp, Klebsiella oxytoca
atgggacagagtcaaaaattgaatatacaaccgcgttcgcgttctccgctggttcagctgacggaaattcgcaaaagctttgatggtaaaacggtaatctccggcctcaatctgatcatcaacaacggtgagtttctcaccctgcttggcccctctggctgcggtaaaacaaccgttcttcgtcttatcgccggactggaaaccgtcgatagcggccgaatccatctcgaagatcaagatatcacccatatcccggcggaaaaccgccacgtgaacaccgtctttcaaagctatgcgctctttccgcacatgacggtgtttgagaacgtcgccttcggcctgcggatgcagaaaaccccgccggcggaaatcgctccccgcgtccacgacgccctgcgaatggtgcagcttgaagagttcgcccagcgcaaaccgcatcagctttccggcggacagcagcagcgcgtggccattgcccgcgcggtggttaacaaaccgcgcctgctgctgctggatgaatccctctcagcgctcgattataaactgcgtaaacagatgcagaacgagctgaaggcgctgcagcgtaaactcggcatcaccttcgtcttcgtcacccacgatcaggaagaggcgctgaccatgtccgaccgtatcgtggtgatgcgcgatggcaaaatcgagcaggacggcacgccgcgcgaaatctatgaagagccgaaaaacctgtttgtcgccagctttattggcgaaatcaacatcttcaacgccacggtcatcgagcggattgacgagcagcgggtgcgtgccagcgtagaaggccgcgaatgcaatatttacgtcaacttcgccgttgaaaaaggccagcggcttaacgtgctgctgcgcccggaagacctgcgcgttgatgagatccaccacagtaatgaagccgatggcctgataggctatatccgcgaacgcaactataaaggaatgacgctggaatcggtggtcgaactggaaaacggcaaaatggtcatggtcagcgaattcttcaatgaagacgaccctgattttgaccactctctcgaccagaaaatggccattaactgggtagaaagctgggaggttgtgctggccgatgaagaacaccagtaa

SEQ ID NO: 175016 - DNA, 1230 bp, Klebsiella oxytoca
atggataaattgcttgagcgttttttgcagtacgtttctttggacacgcagtcgaagcctggcgtgcggcaggtaccgagcacggaaggacagtggaagctgttacggctgcttcaggcgcagcttgaagaaatgggactcgtgaacgtgacgctgagtgaaaaagggacggtcatgggcaccctgccagctaacgttgcgggcgatattccggcgattggctttatttcccacgtcgacacgtcgcctgacttcagcggcaagaacgtcaatccgcagatcgtagaaaactatcgcggcggtgatatcgcactcggtattggcgatgaggtgctttcgccggtgatgttcccggtactgcaccagctgctggggcagacgctgattaccaccgatggtaaaacgctgctcggcgccgatgataaagccggtatcgcggagatcatgaccgcgctggcgacgttgaaggcgaaggagattccccacggcgatatccgcgtggcctttacgccagacgaagaggtgggcaaaggggcgaagcatttcgatgtcgccgcgtttgatgcccgctgggcctataccgtcgacggcggcggcgtgggcgaactggagtttgagaattttaacgccgcgtcggttacgattaagatcgtgggcaataatgtgcatcccggcaccgcgaaaggagtgatggtcaacgccctgtcgctggcggcgcgtatccatgccgaggtgcctgctgacgaagcgccggaaaccaccgaaggctatgagggcttctatcatctggccagtatcaaaggcacggtggatcgcgccgacatgcactacatcatccgcgactttgaccgtaagcagtttgaagcccgcaagcgcaaaatgatggagatcgccaaaaaggtcggcaaagggctgcatccggattgttatattgagctggtcatcgaagacagctattacaatatgcatgagaaggtgatggcgcatccgcacgtggtggagattgcccgtcaggcgatggtggattgccaaatcgatccgcagatgaagccgattcgcggcggtaccgacggcgcccagctctcctttatgggtctgccgtgcccgaacctgtttaccggcggctataactaccacggcaagcatgagtttgtgacgctcgaaggcatggagaaggcggtgcaggtgattgtgcgtatcgccgagctaacggcaaaacgaggcgcgtaa

SEQ ID NO: 175017 - DNA, 1122 bp, Klebsiella oxytoca
atggattatcaattaacgcttaactggcccgactttatcgaacgctactggcaaaaacgcccggtagtgctgaaacggggctttgctaatttcgtcgatccgttaagcccggacgagctggccggactggcgatggagagcgaagtcgacagtcgcctggtcagtcatcaggacggtaaatggcaggtcagccacggtccgtttgagagctacgaccatctgagcgaaaataactggtcgctgctggtacaggcggtcaataactggcaccagccgacggcggcgctgatgcacccgttccgcgcccttcccgactggcgcattgacgatctgatgatctcgttttccgttccgggaggcggcgtcggcccgcatctcgaccaatacgacgtgtttatcattcagggtaccggtcgccgccgctggcgcgtgggcgaaaaggtgccgatgaagcaacattgtccgcacccggacctgctgcaggtcgacccgttcgaagccataatcgatgaagagatggagcccggcgatattctgtatatcccgccggggttcccgcacgaaggctactcgctggaaaactcgctcaactattcggtcggctatcgcgcgcctaacgcccgcgagctgttcagcggctttgccgattatattctgcagcgtgaactgggtagccagcgctacgccgacccggacgtgccgtcgcgcgagcatcctgcggatattctgcccgtcgagctggaccgcctgcgcgatatgatgctgggtttaattaatcagccagagcactttaagcagtggtttggcgaatttattactcagtcccgccacgagctggacgtggcgccgccggagccgccgtaccagccggatgagatttacgatgccctgcagcagggggataagctgacacgtctcggcggcctgcgcgtgctgcgaattgatggtgaggtgttcgtcaatggcgagaaaattaactctccgcaccgcccggcgctggacgcgctggcaacccacctgacgctcaatgcagagcatcttggcgatgcgctggaagatccctccttcctcgccctgctggccgcgctggtcaacagcggctactggttctttgaggactaa

SEQ ID NO: 175018 - DNA, 1467 bp, Klebsiella oxytoca
atgaaagggctgttgcggcatattttaccgctatcgttacgcgtccgctttctgctggcgacggccgccgtggtgctgatcctgtcgctgtcttatggcatggtcgcgctggtcggctatagcgtaagctttgataaaaccaccttccgcctgctgcgcggcgagagcaacctgttctatatgctggcaaagtgggaaaacaacgccatcgacgttgatattcccgacaacctcaatatgcaaagtccgacggtgacgctgatttacgacgctcacggtcggttattatgggcgcagcgcgatgttccctggctggtgaagcgtatccaaccggaatggctcaaaaacaacggctttcatgaaattgaggccgacgtggacagcagcagcatgctgcagcacaacaatcatgagatccaacagcagctgaatgccattcgggaagaggacgacagctccgaaatgacccactcggtggcgatcaatatctatccggccaccagcaccatgccgcagctcagcatcgtggttgtcgacaccataccggtggagctcaagcgctcgtatatggtatggagttggtttatctacgtactggcggccaacctgctgctggtgatcccgcttttgtgggtggcggcatggtggagtttgcgccctattgaatcgctggccaaagaggtgcgcgaactggaggagcatcaccgtgaactgctcaatcccaacaccacccgggagcttacgcggctggtcagcaacctcaaccgcttgctgaaaagcgaacgcgagcgttatgacaaataccgcactaccctgaccgacctgacccatagcctgaaaacgcctctcgcagtgatgcagagcaccttacgctccatgcgcggcgagaagctcagcgtcaacgaagcagagccggtaatgctggagcagattagccgtatctcgcagcagatcggctactacctgcaccgtgccagcatgcgcagcggcgggtcgctgctaagtcgcgagctgcatcccatcgctccgctgctcgatagcctgacctcggcgctgaataaagtttaccagcgcaaaggcgtgaatattagcctggatatttcgccggaaatcagttttgtcggcgaaaagaatgattttatggaagtgatgggcaacgtgcttgataacgcctgcaaatactgtctggagtttgtcgaagtctccgtccgtcagaccaacgacaaccatttacacatcctcgtagaggatgatggtcccgggatcccccacacgatgcgcagcgctgtattcgatcgcggccagcgcgccgacacgctgcgtcccggccagggcgtggggctctccgtcgcgcgagatatcgttgcccagtacgatggtcgaattctcgccgaagagagcctgctcggcggcgcctgcatggaagttatttttggccgccaggccctggaagataaagagagctaa

SEQ ID NO: 175019 - DNA, 675 bp, Klebsiella oxytoca
atgcgcgtactcgtggttgaggataacgctctgctgcgccatcacctgaaagttcagctacaggagcttggccatcaggtagatgcggcggaagacgcaaaggaagcggattactatctgggtgaacacgttccggacatcgccattgtcgatcttggcctgccggatgaagacggcctctcgctgattcgccgctggcgcagccacgacgtatcggtaccggttctggtcctcaccgcgcgcgaaggctggcaagataaagtcgaggtgctgagcgccggagcggatgactacgtcaccaagccgtttcacatcgaagaggtcgccgcgcgtatgcaggcgcttctgcggcgcaacagcggcctcgcatcgcaggtgatctcaataccgccattccaggtagatttatcgcgtcgcgagctgtcggttaatgaccagcccatcaagcttacggcgtttgaatacaccattatggaaaccctgatccgtaaccggggcaaagtagtcagcaaagattcattgatgctgcagctctatcccgacgccgagctgcgcgaaagccataccatcgatgtgctgatgggacgattgcgtaaaaaaatccaggctgagtatccgcaggatgtgattaccaccgtgcgcggccagggctatctgttcgaactgcgcggatga

SEQ ID NO: 175020 - DNA, 447 bp, Klebsiella oxytoca
gtgtcctcatcagaaaacagggaaaacacaacctgccccgtcgcccgaagtgtggatattatcggcgaccgctggtcgctgttgattgtgcgcgatgcctttgatggcaccagtcgcttcagcgatttccagcgaagccttggtatagcgcgtaatattctctccgaccgtctgcacaaattgctaaactcgggtattctcactacccaatccgcctcagacggcacggcctatcaggaatacgtactgacggaaaaaggccagcgcttgttccctgtcgtcgttgcgctacgccagtggggagagcagcatctctttgccgatggcgaacgccactcggtactgatcgataaacgtacgcagcgcccggttcccgtgatgacgccgatggccgaggacggattaccgttgaattttcatgaggctaaggtacaaaaaattaaataa

SEQ ID NO: 175021 - DNA, 1215 bp, Klebsiella oxytoca
atgaaagcgacattattatcgccatcgccagaggggccgccaacggtcatgccgcgtagtctggtgctgctgtttgctatcgccagcggcctgagcgtggcaaatgtttattacgcacaaccgctccttgatgccctggcgcacgattttgcgatcggccacgccgcgatcggtggcgcgatcgcggcaactcagcttggctgcgcgctggctttgttattgctggtaccgctgggagacaggctgaatcgccgccgcctgatggcgacgcaggtgatattactgatcgctgcgctatttgccgtcagtctggcaacatcgacagtaatgctgttagccagcatgcttgccgttggtctgctgggtaccgccatgacgcaggggttgattgcttatgccgcaagcgcggccgccccctctgaacagggcagggtagtgggcgcagcgcaaagcggggtctttattggattgctgctggcgcgggtattttcgggaagcatcagcgatctgttcggctggcgtggggtatatatctttgccgctttgctaatgttgggcatcgcgcttcccctgtggcgtcgtctgccggtactggcggttgcatcgcgcccactgagctatccccagcttctgatatccatgctggcgctgctgcgtcaggagaaaaacctgcaggtgcgaggcatgctggcattactgatgtttgccgcgttcaatatcttctggagcgcgttagttttgccgttaagcgcgccaccctttagcttttctcataccgagattggcgccctcggcctggtgggcgcgatcggcgcactggcggcaggtcgcgctggtcaatgggccgaccgcggatatgcccagcgcaccagcgccgcggccctggtgatattgctgatggcgtggtggcctttatcactgatggcatggtcgccagcggcactgctgattggcattgtcatgctggatctcggcggccaggcgctgcacgtcactaatcagagcatgattttccgtcgccgtcctgaggcgcacagcagactggtcggtttgtatatgctgttttatgccctcggcagcgcgctgggagcgataagtacgactgcggtatatgccagcgcaggatggcaaggcgtctgcctgctgggagcatcagttagcctgctggcgctgctattctggttaataacccgggggatgacgacgagcagatga

SEQ ID NO: 175022 - DNA, 1371 bp, Klebsiella oxytoca
atggaattatcctcactgaccgccgtttccccagtcgacggccgctacggcgacaaagtcagcgcgctgcgcggtatcttcagcgaattcggtttgctgaaattccgcgttcaggtagaagtgcgttggttgcaaaaactggccgcgcacgcagcgatcaaggaagttcctgcttttgctgcccacgcaaacggttaccttgataaaatcgtcgccgattttagcgtagaagatgcagagcgcatcaaaactatcgagcgcaccaccaaccacgacgtcaaagcggttgagtatttcctcaaggaaaaagtcgccgacgtggctgaactgcacgcggtctccgagtttatccactttgcctgcacctccgaggacatcaacaatctgtcccacgcgctgatgctgaaaaccgctcgcgacgaagtgatcctgccatactggcgcaagctcatcgacgcggtgaaagagctggcggtacagtatcgcgatatcccactgctttcccgtactcacggtcagccggctacgccgtccaccatgggtaaagagatggccaacgtcgcttaccgtatggagcgtcagtatcgtcagctgaaccagatcgaaatccttggcaaaatcaacggcgcggtgggtaactataacgcccatatcgctgcctatccggaagttgactggcatcagtttagcgaagagttcgtgacttctctgggcatccagtggaacccgtacaccacccagattgagccgcacgactatatcgccgagctgttcgactgcgtcgcccgcttcaataccatcctgattgatttcgaccgtgacgtgtggggctacatcgcgctcaaccatttcaagcagaaaaccattgctggcgaaatcggctcctcaaccatgccgcataaagtcaacccgatcgacttcgagaactccgaaggcaacctcggtctggccaacgcggttatgcagcatctggcaagtaaactgccggtttcccgctggcagcgtgatctgaccgactccaccgtgctgcgcaacctcggcgtgggcatcggctacgcgctgatcgcctaccagtcaaccctgaaaggcgtgagcaagctggagctgaatcaagaccgtctgctggatgagctggaccacaactgggaagttctggccgagccgatccagaccgtcatgcgtcgctacggcatcgagaagccgtacgagaagctgaaagagctgacccgcggcaagcgcgtcgatgccgaaggcatgcagcagtttattgacagcctggcgctgccggaagatgaaaaagttcgcctcaaagccatgaccccggctaactacatcggccgcgcgaccacgatggttgacgaactgaagtaa

SEQ ID NO: 175023 - DNA, 642 bp, Klebsiella oxytoca
gtggcgaagaattattatgacattacgctggcgctggccggcgtttgccaggccgcgcgtctggttcaggaactggcgcaccaggggcactgcgatagcgacgccctgcatgtgtcgctgaacagcatcatcgatctcgacccggagtctacgctggcggtgttcggtggtagtgaagccaatcttcgcctcgggctggaaaccctcatcggcgtgctgaataccagcagtcgccaggggctgaacgccgaactcacccgctatactttaagcctgatggtgctggaacgtaagcttgccgccagcaaaggagccatggataccctcggcaaccgtatcggcggtctgcgccgtcagcttgaacatttcgatctgcaatccgagacgctgcttagcgcaatggcgggcatctatgtggatgttattagcccgctgggcccgcgtattcaggtcaccggctctccagccgtgctgcaaagccctcaggttcaggcaaaggttcgctctgccctgctggcgggtattcgctctgcggtgctctggcaccaggtcggcggcggccgtctgcagctaatgttttctcgtaatcgtctggttaaccaggccaaacaaattcttgctcatttaaccccggagttgtga

SEQ ID NO: 175024 - DNA, 1152 bp, Klebsiella oxytoca
gtgctagaatacgccgcctcgaagttcaatgtagtgagtaatccaatgtcagaaagccagaaaaaagtgatcgtcggcatgtccggcggggttgattcctcagtttccgcctacctgctgctccagcaagggtataaggtggaaggcctgttcatgaagaactgggaagaagacgacggcgaggaatactgcaccgcagcggcggatcttgccgacgcgcaggccgtttgcgataagctcgggattgaacttcacaccgtcaactttgccgcagaatactgggacaacgtgtttgaattgttccttgcagagtataaagccggacgcacgcccaacccggatattctgtgcaataaagaaattaaatttaaagccttcctcgaatttgccgcagaagatctcggcgctgattacatcgccaccggccactacgtgcgccgggccgacgtcaacggcaagagccagctgctgcgcggcctcgacggtaataaagaccagagctacttcctctataccttgagccacgaacagatcgcgcaaagcctgttcccggtgggggagctggaaaagccgcaggtgcgtaaaatcgccgaagagctggatctcatcaccgcgaagaaaaaagactcgaccggtatctgtttcatcggcgaacgcaaattccgcgaattcctgggccgctacctgcctgctcagccgggtaaaattatcagcgttgacggcgacgaagttggcgagcatcagggtctgatgtaccacacgctggggcagcgtaaaggtctgggcatcggcggtatcaaagacggcggcgaagacccgtggtatgtggtcgacaaagatgtcgaaaacaatattttgattgtcgctcagggccatgaccatccgcgcctgatgtccgtggggttgattgctcaacagctgcactgggttgaccgcgagccgctcacgggcacgctgcgctgcacggtaaaaacccgttaccgtcagaccgacatctcctgcaccgtgaaagcgctggatgatgaccgcattgaagtgatctttaatgagcctgtagccgccgtcacgccgggccagtctgcggtcttctacaacggcgaagtatgcctcggcggcgggattatcgaacagcgcttgccgctgcaggcctga

SEQ ID NO: 175025 - DNA, 477 bp, Klebsiella oxytoca
atgtttaagccgcacgtcaccgtcgcctgcgtggttcacgctaaaggcaaattcctggttgttgaagagacgatcaacggtaaagcgttatggaaccagccggcaggccatctcgaagccgatgaaaccctggttcaggccgcagaacgcgagctttgggaagagaccggcattcgcgcgacgccgcagcactttctccgcctgcatcagtggatagccccggatcgcacgccatttttgcgtttcctctttaccatcgagcttaacgatacgtgcgccaccgagccccacgatagcgatatcgaccgctgcctgtggctcagcgctgaggaaattcttagcgcgagcaacctgcgttcgcagctggttgccgagagcattcgcagctatcagcaggatccgcgctacccgctggcgctcatcggcgaatttaactggccgtttacagggggtgcctcaacggaggacgcgtgctag

SEQ ID NO: 175026 - DNA, 651 bp, Klebsiella oxytoca
atgcggcaattgatagagtctgaaaataccatgcaaaaaacttcatttagaaaacatcgcgttgagcgattcagcacgcaacaagtcaccagacaacgtaaagaacgccagccaaaaactgtgatcttgttcaataaaccatacgatgtattgccgcaatttaccgatgaagccgggcgcagcacgctaaaagattttattccggttgccggcgtctatgccgccggtcgactggaccgcgatagcgaaggcctgctggtgctgaccaacgacggcgcgctgcaggcggctctcacccaaccgggtaagcgcaccggtaaagtttattacgttcaggtggaaggtgaacccacggcggatgcgctgaccgcgctccgcgacggcgtcacgcttaatgacggccccactctgccagcgggagtggagcgtgtagcggagccagagtggctctggccgcgtcatcccccgatccgcgagcgtaaatccattcctaccagctggctcaaaattaccctctatgaagggcgcaatcgccaggtgcggcggatgaccgcccacgtcggctttcccacgctgcgcctgattcgctatgcgatgggaggctatacgctggatggtctggccaacggcgaatggcgtaaaattgattaa

SEQ ID NO: 175027 - DNA, 1251 bp, Klebsiella oxytoca
atggaaagcaaagtagtagttccggcggaaggtcaaaaaatcaccctgcaaaacggcaagctgaacgtccctaataacccgattatcccgttcatcgaaggcgatggtatcggtgttgacgtcactccggcgatgctgaaagtggttgatgctgccgttgagaaagcctataagggcgagcgtaaaatttcctggatggaagtttacaccggtgaaaaatcgacccaggtttatggccaggatgtctggctgcctgccgaaactcttgatctgattcgtgaatatcgtgttgctatcaaaggccctctgactacgccagtcggcggcggcattcgttctctgaacgttgccctgcgtcaggaactggatctctacgtttgcctgcgtccggttcgatactaccaggggacaccgagcccggttaagcatcctgaactgaccgatatggttatcttccgcgaaaactccgaagacatctacgccggtatcgagtggaaagcagactctgctgaagcggataaagtcatcaaattcctgcgtgatgaaatgggcgtgaagaaaattcgcttcccggaacattgcggcatcggcatcaagccgtgctctgaagaaggcaccaaacgcctggttcgcgccgccatcgaatacgctatcaccaacgatcgcgattctctgaccctggtgcacaaaggcaacatcatgaaattcaccgagggcgcgtttaaagactggggctaccagctggcacgcgaagagttcggcggtgagctgattgacggcggcccgtggatgaagatcaaaaatccgaacaccgggaaagagattgtcgttaaagacgttatcgccgacgccttcctgcagcagatcctgctgcgtccggcggagtacgatgtcatcgcctgtatgaacctgaacggtgactatatttctgacgccctggcggcgcaggttggcggtatcggtattgccccgggtgcaaacatcggtgacgagtgcgcgctgtttgaagcgacccacggtactgcgccgaaatatgccggccaggataaagtgaacccaggttccatcatcctgtccgccgaaatgatgctgcgccacatgcagtggttcgaagccgcagacttaatcgttaaaggcactgaaggcgcaatcgccgccaagaccgtgacctatgactttgaacgtctgatggaaggcgctaagctgctgaaatgttcagagtttggcgacgcgattatcgccaacatgtaa

SEQ ID NO: 175028 - DNA, 339 bp, Klebsiella oxytoca
atgtttttaaggtttacgctgttctacctactttttatccccttgcagacttttgcgcttaattactcttcaacctttttaaggctcaattgcccgcagagaggcctcgtggaggtcattttgcatgtttacgatcatacccaggaaaaatggcagaataattttgagaccggcgcagggcacaaacgctcaggcgatatggaactgatcccctttgccaacggggatattctcttccactcggtgtcaacagatgcatttagctatctctacagcggcgaagagaagctttaccgctgtttaaaattggatgaaagaccgctatacccttccttttaa

SEQ ID NO: 175029 - DNA, 1770 bp, Klebsiella oxytoca
atgactaattgggcttacgggatcaccgtcgccctgaccctcgcctcaggcatggcaatgctgatggcctcaagtgcggataatgctgaacgccgcgccgtcgaacaacgtcaggtgttcgaccagctgagtgaagaagtcgaaagcggcgcctgggagctttccgatctggcgcggctctatatcatccaaaaaaaccaggatgtgctacgcgaataccggcagcaggcgcagaccattgccgccattgaacaccggcttgttaaactcaaagataatggcgcaaccgctgaagaactggcgctgctgcgggagggtttacagattgccgatgaactccaggatgagcagcaggcggcgctggcgcaggttgcccggggggaagaaaaagcggcggtaagcctgctttacggcgcggcctacgaacaggagcttgagcgggtacaaacgcagcttgaccactttcgcctgctgctcgaaggccgggtgaataaaatcatcgctcaggccacggagaaatcacgtatctggcgtacgctctctgaagtcatggttggcctcaccgccctgatgtttctgtttgtgctgggatttatccttaagcggcgggtgctctatcccgtcgtccgtctgagcgatgtggtacagcggctggcatcgcaggattatgcggtcgagacgccgcagttcacccagatagatgaaattggcgatatggcccaggcgatacgtatctttcgcgagaacgggctggcgcggcagcggctggaacaagagcgcgatgccgactgggccgtccgcgagctgctggcgcggatgacccagcgtctgcagggctgcgaatcattcgaggatgtgatcaaggtggccgagcgctttgcccccagcatcgccccgcagatccccggccgactctatatcctcgacaccgatccctggcagatgcgctgcgttgcgcagtggctttctccgccgcaggaaacggatgtctttcatcccgataactgctgggccgttcggcgcgggctgagtcatcctccggttaacggcgagccggatatcgcctgttaccacctgactgaaccacaggccaatcagtcgctatgcgtgccgctgattgcgcaaggagaagcgattggcctgctctccttcagcaacgtcaccgacgcaaccgcgccttcccgcgcctatcttgaactgatggccgaagcgctgggtctggcgctggcgaatcaacgtttacgcaacgcgctgctggaaaaggcgctgttcgattcattaaccggcctgcgcaaccgtcaccatctggatgatgctctgcatactcaaatgaatctggcggttcgcaacggtacgccgctgagctgcctgatgatcgatatcgatcacttcaaggcaattaacgataattacggccacgaagcgggcgatctggtcattaaaaacgtcgccgcaattatacagcgtgcggtgcgtgatatcgggatggccttccgctacggaggcgaagagttcctggtgctgctgggcggaacccatgaagaggcggcaatggcctgcgcgaccgagatctatcacagcgttcagcgtctgactttgcgctatggccttgctgagattggtcagatcaacgtctccatcggcatcgccagctacccgcagcacacgcatagcgacagcctgctgcgcgcggcagacgctgcgctctaccgggcaaaagagttgggccggtcaagaattgtgagctttgggatgttgaaggcggattga

SEQ ID NO: 175030 - DNA, 1188 bp, Klebsiella oxytoca
atgcgtatcgccttaaaatcagcattgatgctaacaacccgcgttatacaaatcattaatcctgaactgcagctgcatatgcagcgaacggcgctgatcgcactggagctggcgcaggcatcagggctttcgcgcccgcagcagcaaacggtcttttgcgccgcgctgctgcacgatattggcgttctgggtgacaaaagggccttctcctccctgaacgctatcgataatctcaatgacccccatcagcatcggggagcagaaatgctggccggattaaccaccctggccccaatcctgccgattattcgcgatcatcattttagtccacaccacaggggcagcctcgaacagcatatcgtctattttgccgatgtttttgagcgcctgctggccggtaataaaggcggttcggcttatcaacccgatattattattacgcaatttcgtacgctctatcaggcgatcgacccgtcgctgtgtcaaaccttgtgccagctcgcacaaaaagagcatttctggctgcatcttaatcctggacatattcagcgaatgctggaaattatcggcccaattaacgatgtctatatgggtattgatggcctgaaagatatctgtctgttaatcgccaacattgtcgatacctacagtagctttaccgccagccatagcctgaaggttggacaaatttcgcgcgcccttgccgcctggatgaatcagccggagctggagtgccggaagattgaaattgccggctatttgcacgatatcggtaaagtctacataccgctggccatcctcgagaaacagggcgagctcaatgacaaagagctgctgcaggttcgggaacacagctatatgaccggcgaaattcttagcgcatttagcgaactcggcgatatcgtgaactgggcggccaatcatcatgaaaaactggatggcagcggttatcctctgcatctgagtggcgattacctgcagctggcagatcgcatcatcgccatcgcggatattttcaccgcccttaccgaagaccgcccttatcgccccggaatgagccgtcagcaagcgctacggctgattgagggtgatgtgacaaacggcgcgctggataaagacgtttaccgcgttttacatcagcatgccgaagcgctgcacgctattattactcacacgcttccctcttaa

SEQ ID NO: 175031 - DNA, 1044 bp, Klebsiella oxytoca
atgaattttagagcattactgaccattgcgttactgtcgataagtgctttcgcgttcagcgacacgcgtctgccgcatattgtgatcctggcaaccggaggaaccattgccggttcggcggccagcaacacccagacaaccgggtataaagccggcgcgattggcgtacagacgctgattaacgccgtacctgaaatgagtaaagtcgcccgcgttgacggcgagcaggttgccaatatcggtagcgaaaatatgaccagcgatattattctcaagctggccaaacgcgtcaatgaactgctggcccgcgaggatgtcgacggtgtagtcattacccacggtaccgataccctcgacgagacgccttatttcctcaacctgacggtaaaaagcaataagccggtggtcttcacggcggcaatgcgcccggcaacggccatcagcgccgacggcccgatgaatctgctggaagcggtgaccgtggcggctgacccggaagcgaaaggccgcggggtgatggtggtccttaacgatcgcatcggggcagcgcgtttcgtcactaaaaccaacgccacgacgctggataccttccgggcgccggaagagggctacctcggcgtgatcgtcagcggtaagccgcagttcgaaacccgcgtggaaaaaattcacaccgtgcgttcggttttcgacgtccgtaacctgaacgcgctgccgaaagtggtcattatttatggctaccaggatgaccctgaatatatgtatgacgcggcgatcgctcaccatgctgacgggattatttacgcaggtaccggcgcggggtcggtctccgtacgcagtgcggcaggaattgaaaaagcggaaaaagccggcatcgtggtggttcgcgcctcgcgtaccggcagcggcgttgtgccggtagatggcggccagccgggactggtggccgattctctcaatccggcaaaagcgcgcattttgctgatgaccgcgctgacgcaaacgaaaaatccgcaggtgattcagcaatatttccacacttactga

SEQ ID NO: 175032 - DNA, 357 bp, Klebsiella oxytoca
atgaaaccgttccggcacgctttttttatctggggatggccgctgctggcacaggataacccgctggtgctacttgatgaaccaacaacctggctggatattaattatcaggtggagctgatgaagctgatgcgcgagctacagacgatgggcaaaaccgtgttcaccgtactgcacgatctgaatcaggccagccgctactgcgaccatctggtggtgcttgaagggggacaggtgcaggctcagggcctggcggaaacggtactgacgccggagatgctgcgggagatttttcacctggaagcggagattcacccggagccggtgtcccagcgcccaatgtgcgtggtgaaataa

SEQ ID NO: 175033 - DNA, 372 bp, Klebsiella oxytoca
gtgcattttagcccgctgtttgccgccaccgtacaggatgagcgcggtcgctttacgcttgataaaacgccgcagcgcatcgtggtgcttgaactctcctttgttgacgcgctggcggcggtcgacgttagcccaacaggcatggccgatgacaacgatccgtcgcgtattctggcggacgtacgcgcacgtctgaagccctggcagtcggtgggcacccgtgcccagccctcgctcgaggccatccgcgcgctgcatcccgatccgatcgtcgccgatagcggtcgccatgccggaatctacgccgccgagcgtattgccagcgacatggttaaaatcgtccatcaccgggcggtagatatcacgccatga

SEQ ID NO: 175034 - DNA, 2331 bp, Klebsiella oxytoca
atgacgcctttacgcgttttacgcacaccgatgcctctggtaatagcaatccgtttaacgctgctgccgctagcagggctggctgccgcgccgatatacgccgccgtgcagtatgacatcgccgccgggggattagacaacgccctgaaccaatatgccgcccgcagcggtatcacgctttccgccgacgccagcctgacgcgcggcaagcatagcccgggcctgcacggcagcttcgaaaccgaagaggggttacgcaggctgctgaacggcagcggattacggctaaagccgctgggcaagaatgcctggaccctggagcccgctcctgacagttcagactccaccctcaccgtcgtcggggactggcttggcgacgcgcgcgagaatgatgtctttgaacacgccggcgcccgcgacgttatccgtcgggaggatttcgccaaaaccggagccgccacgatacgcgaagtgctgaaccggatccccggcgtcaacgcgccggaaaataccggtaccggcagtcacgatctggcaatgaacttcggtattcgtggcctcaacccgcggcttgccagccgttccacggtgctgatggacggtatcccggttccctttgccccctacggccagccgcagctttcgctggcgccggtctcggtcggcaatatggacgccatcgatgtcgtgcgcggcggcggcgcggtgcgctacgggccgcagagcgtcggcggcgtggtgaacttcgtcacccgcgcaatccccgaggattttggcattcagggcggcatggaagggcagctcagccccacctcttcacaaaacaacccgaaagagacgcataacctcgcgatcggcggcacggcggacaacggtttcggctccgccctgctttactcaggcacccggggcagcgactggcgcgaacacagcgccacgcggattgatgatgtgatgctgaaaagcaaatacgcgcctaacgaagtccatacctttaacagcctgctgcaatactatgacggagaagccgatatgcccggcggcctctcccgcgccgactacaacgccgaccgctggcagtccacgcgtccttatgaccgtttttgggggcgccgccagctcgccagcctcggctaccagtaccagccggatgcgcagcataaatttaatattcaggggttctatacccataccctgcgcagcggctacctggaacagggtaagcgcattaccctctccccgcgcgaatattgggtccgcggcatcgaaccgcgctacagccaaagctttatgatcggcccatccgcccacgaggtcggcgtcggctatcgctacgtcaacgaatcgacccacgagatgcgttactacaccgcaaccaccagcggcgagctgcccagcaccgccagcccctacgatcgcgatacccgttccggtaccgaagcccacgcctggtatatcgacgatcgcgtggatattggcaactggacgattacgccaggaatgcgctttgagcacatggagtcttatcaggacaataatctgctgggcacccgcgaacgggtcagctataacgctccgctcccggcgctgaatgttctttatcacctcaccgacagctggaatctttatgccaacacagaaggctcattcggcaccgtacagtacagccagattggcaaggctgtacaaagcggcaatgtggaaccagaaaaagcgcgtacctgggaagtcggcacccgctacgacgacggcgcgctgaccgccgaaatggggctgttcctgattaacttcaacaatcagtacgattccaaccagaccaatgacacggttaccgcccgcggtaaaacgcgtcatagcggcctggaagcgcaaacccgttacgccctcggcgaactctcacccgcgcttgataatctctcggtctacgccagctatgcgtacgttaatgctgaaatccgcgagaaaggcgacacctacggaaaccaggttcccttctcgccgaagcacaaaggcacccttggcgtcgattacagccccggcagctggacgtttaatcttaacggcgacttccagtccagccagtttgccgataacgccaataccgttgccgaaagcgccgatggcagcaccggtcgtattcccggctatatgctgtggggcgcccgcgtggcctatgactttggcccacaaatggccaatctcaacctcgcgctgggggtgaaaaacatcttcgaccatgcgtattacacccgctcatacgacgataacaacaaagggctttacgtcggtcagccgcgcacgctgtacctgcaaggatcaatgaagttctga

SEQ ID NO: 175035 - DNA, 948 bp, Klebsiella oxytoca
gtgaaaccgacgctgagcgaatctcgtcgtcaggcgctgcgctccgcctcgcactggtacgcggtgctcagcgatggatgcgtgagtccgcagcaggaggcccgctggcagcagtggtatgagcaaaacaaagaaaatcagtgggcctggcagcaggtagaaaacctgcgacagcagatggggcaactgccgggcggcctggccagccgtgcccttaacgatagccgactggcgcgtcgccacgtactgaagggtctgatgcttttgctggtcatcggaggcagctggcggctctgggattccgaactggcggagggcctgggcgccgactatcgtacggcgaaagaaatacctcgccagcagcagcttgccgacggttcgctcctaacgctgaatagcgaaagtgccgccgacgtccgttttgacagacgacagcgcatggttcatttacgctacggcgaaatcgccatcaggaccgctcacgacagcctgcagcgtcctttccgcgtgcaaacgcgggaaggcacgctcaccgcgctcggtaccgaattcaccgtccgtcagtttgccggcggcacccggctggcggtacagcagcatgccgtggaggtggttttaccatccggcagcgtccaaatcgtcaacgccggggaaagcctgtggtttacccgcaatcgcttcttcgccctggttaagttcaacgacggcgaggatagctggatcagaggcgtgctgaccttccgcgacgccccgctaagcgaggtggtcgaaaccctcgcccgctatcgctccggggtgttgcgctgcgatcccgcggtggccgaattacgcctgagcggcacctttccgctggaggatcctgacgccattctgaaggttattgcgcaaacgctgccgatttcattacggtttgtcactcgctactgggtgacgctcgttccagcctga

SEQ ID NO: 175036 - DNA, 522 bp, Klebsiella oxytoca
atgccctcttcttccgccatcgcctctccgctaacgcttgcctcgctctatagcgatcatcatggttggctgaaaaaatggcttacctgtaagctgcaatccgcttatgacgccgacgacgtagcgcaggatacctttgtccgaattatggccaacgagtcgctgctgacgattcgcgatccaaaatcctttctctgcacgattgctaaacgggtgatgatcgacctgttccgccgtaacgccctggagcgtgcatggttagacatgctttcgcagcttcccccagagctctctccctcaccggagctacggcagagccagctcgaactgttacagcagattgatgccatgttggacgggcttaacgcaaaagtccgggaagcgtttttgctctcgcagcttgaagggctgacctatgccgaaatcgccagccgcctggcggtttccgtaagctcggttaagaaatatatcgcgaaagccaccgagcactgtctactgtttcgactggagaatggcctgtga

SEQ ID NO: 175037 - DNA, 789 bp, Klebsiella oxytoca
atgaacgctagcgaaaaagccggacatacttttttggcaagtttggggaaaacccgcttacgtcccggcggcattgaggccactgagtggctatttaagcaggcagggtttagcgccgacaataaagtcctggaggtggcctgtaatatggggacaacctctattgagctggcgcagcgttttcactgtaccgtttacgccatcgatatggataaaggcgcgctggcgaaagcccggcaaaatatcgttcgcgaaggtgtggatcatcgggtgatagtgatggaggcgaatgcgggtcggctgccatttgccgacgagacgtttgatgtggtgataaatgaagcgatgctcaccatgtatgcggataaagccaaagaaaaactggtggcagaatattttcgcgttctcaagcccggtggccgtttgctgacgcacgatatcatgtatacgcatgatacgctgggagaggacgcccggcgacagctgcagggggtcgtgaaatccaacgtcagcccgctgagcgctgccgcctggcggacccttttccaacggagcggctttgatgccgtaagcattcatcatggaccgatgtcgctgatgtcgccgcgagggttaatgaaagatgaaggttttatacaggcgctaaaaattgtctgcaatggcttgctaaagcgcgagaatcgtccgagatttttatcaatgctgcgcttttttcaacgtcataaaaagcatttaaactttattgcctgctgctcggttaaagcaattcaggtaaaaagtccgaaataa

SEQ ID NO: 175038 - DNA, 915 bp, Klebsiella oxytoca
atgtcttacgcttttaataaaagtcttcttcaccctcgtaattggggtacctggtttggcctgggcgtactctggctgattgtccagcttccttatcccgttttgcatcttatcggcaccagcgcgggacgcgcctcccggcgcttccttaaacgtcgtgagcatatcgccagacgtaatctcgaactctgcttccccacaatgtcgccagcggcgcgcgaaaagctgatcgagcaaaatttcatgtctctgggaatggggctgattgaaaccggtatggcatggttctggagcgatgagcgagtgaaaaaatggtttgacgtcgaggggatggtcaacctcaacaatgcgctgagcgaagggaaaggcgtgatggttgtcggcgtccactttatgtctcttgaactgggtggccgcacgatggggctgtgtcgccccatgatggcaacctaccgtccgcataacagtccgttgatggagtgggtgcagacgcgcggtcgcctgcgctcgaacaaggcgatgatcgaccgccgaaatttatccggactcgtgcatgcattaaagtcgggcgaagcggtgtggttcgcgccggatcaggactacggcccgaaggggagcgtatttgccccgttcttctcggtccagcaagcggcgacgaccaacggcacctacgtgctttctcgtttgtcaggcgcaaaaatgctgacgatcagcatggtgcgtaaagcggaccgcaaaggttatagcctgcatatcagcgatgtgatgcgcgactatcctggagaagataaacaggatgcggcgagctatatcaacaagattatcgagaaagagatcctgcgcgcccctgagcaatatctgtgggttcatcgccgttttaaaacccgtccgctgggcgaaacttcgctctattaa

SEQ ID NO: 175039 - DNA, 639 bp, Klebsiella oxytoca
gtgttcgctgagtttggtgtactgaattacctgacctatctggttggggctatctttatcattctggtgcccggtcccaataccttttttgtcctcaagacgggcgtcgctcacggcgtgaaaaaaggctatctggcggcagcgggcgtgtttatcggtgatgccattctgatgtttctggcgtttgccggggtcgcgaccctcatcaagaccacgccggtattattcaatatcgtccgctacctgggggcgatttatctactgtggatgggcgggaagatgctctacgcggtgttgacgcagcgcgatgggcattcgtcttctgattccgagccggggagcgcgattcttaagcgttcgctgaccctcagcctgacgaatccgaaagcgattcttttttatgtctcattcttcgtgcagtttattgacgtcaatgccaaaactcccgggctggcgttctttattctggcgctgaccctggagataattagctttatttacatgagcttccttatcgtctccggctctttcgtcacgcgctacgtaaaaacgaaaaagaaactggcgaaaatcggtaatagcctgattggcctcgtgtttgtcggttttgccgctcggctggcaacgctacagtcgtaa

SEQ ID NO: 175040 - DNA, 264 bp, Klebsiella oxytoca
atgattctgcagaaactcaccagcaataaaaacagcaagaagttctttatgtcgatagcggcgatatttgccatcgcgcttttcgtggtagggcgtgcaacctttggcggcgtggtgagagagtacaatatgccgtactcagagtggacgacttcaatgtttttcctgcaaggggcgatggtgacggtttatagcatcgtgtttactctgctgttctccattccgctgggattcctttttttgggctccgaccgccgggactaa

SEQ ID NO: 175041 - DNA, 1014 bp, Klebsiella oxytoca
atgtccgattttctcctcgctcgcgtttcgcaaacgctcgccaatgaacacaccctggaaacattggtgcgacagctgcttgagatgctggagcttgttacccgaatggaatctacctacctgactcgtatcgacttcgaggcgcagcgccagcagattatgtacgcgcacaatagcagcgaaatgcagatccctgaaggtttctccgttccctggaatgactccctgtgtaaacgtgcgctggacgaccgctgcatattcagcaacgatgtcgccgagcgctggcgttcgtgtatcgccgcccaggatttgggtatcgcaacctttttcagcatccccgtgcgcctgaccgatggctcattattcggcacgctctgcgccaccagccgggaaagacaaccctataacattgagggtgagcaggtgatgaatctgtttgccaacctcatttcgcactatgttgagaaagagaccctggtgcagcagcttcgggctgcaaacgtcgcgctggagatgcactcgtacaccgatgaactcaccggtttgccgaatcgccgctcgttgttcaagcatcttgccgcacagtttgcgcaggccagagaacgccagcgcagcgtactgctcatttttatcgatctcgatgatttcaaggcaatcaacgaccgattcggtcacccctgcggtgacagctttctcattcaggttggagaacgtctgttggcccgcgtccgctgcggcgatattgttggccgcctgggcggcgatgaatttttgctggttggcctatgttccgaagcggaggaacaacaggagtatattgccgctttacgtaaagagctaacggggatctatttccttggcgcgtaccgaattaactatcccggcgccagctttggcgtgattgaagccgacccacaggcaatggacgttgagcaagcgctacgaagcgccgacgacgcgatgtatcaggataaaaagtcacgtcgccagggaacattttttcatattgactaa

SEQ ID NO: 175042 - DNA, 240 bp, Klebsiella oxytoca
atgaagtggatgatagctatgttgcctctggcgatggccggatgtacgcagactcagccgacgcaacctgcgcatccggtggggatggctaacccggcttcggtttactgtcagcagctcggcggcacgcaggttcccatccaaagcccgcagggcgtacgcactgaatgtaagctgcccagcggggaaacgttagatgaatgggcgctctggcggcgcgatcacccgaataagccgtag

SEQ ID NO: 175043 - DNA, 348 bp, Klebsiella oxytoca
atgattcagtgtaaacgcgtttatgacccgcaggaaacgagcgacggctaccggatactggtagaccgtctgtggccgcgcgggataaaaaaagaaacgctgaactacgatgagtggtgtaaaacgctgacgccatcagcagatttacgcaaggcttttcacagcgagaccatcgatttcgcccactttagccaactctatcgccaggagcttgaggctcaacgggaggaaggcaaacgcctggcggccctagccagtcaacagccgctgacgttactctatgcggcgaaaaacacccggcaaaaccatgcgcaggtgctggctgactggctaaaatcgctacaataa

SEQ ID NO: 175044 - DNA, 510 bp, Klebsiella oxytoca
atgaagagcaaaattctggttagcgcctgcctgatgggctttcaggttcgctataacggcagccacaaggcccgcttgactgacgcattgactcgctggcagcgtgagggacggttggtcacccactgcccggagctggcggccggattgcctgtaccgcgactaccggctgagatcctcaacgtccagggcgcagaggtgatgcaaaatcgcgggcaaattgttgaaagcgacggcaaggatgtcactgcgcaataccagttggccgcctggctggcgctaaaagcggcgcaagaagaagggtgcgctgcggctctgcttaccgatggtagccccacctgcggcagccagtttatctatgatggtacctttaaaggccagcgcaaacccggtgctggtgttgccgccgccctgcttcgtgagcacggcattaaggtattttctgagcagcagctcccgcagctgctggcgtggatggaacaaagggagggcaatgatgattcagtgtaa

SEQ ID NO: 175045 - DNA, 693 bp, Klebsiella oxytoca
atgaactcccccctgcgtattgccctggttggtgattacaaccccgatgttgtcgcccacaaagcgattcccctggcaatagatgatgctgcagccgtcctcgagctttcgttgcgctatgactggctggcaaccagtgagataaactctactgaggatcttgctgactacgatgctatttgggtggtacccgccagcccctataaaaacgccgcaggcgcatttatcgccattcgccacgcccgtgaaaacagcataccgttcctcggtacctgcggtgggtttcagcacgccattattgagtatgcgcgcaacgttatgggctggcaggatgccgcgcatgcggaaaccgataccgaaggccggatggtcatcgcgccgctaagctgctcgctggttgaaaagacggataatattgagctgcgcgccaatacgcttatcgcgcgcgcttacggtcgcgatagcattcaggagggataccactgtaattatgggattgccgacgatttcgctcgggaactggagcagggcgatctgcgggtgaccggctgggacgatgacggtgagattcgtgcggtcgagctgattacgcatccattctttgtcgccacgctgttccagcacgagcgcaatgcgctggaggggcggcccgcgccgctggttcacgcgtttttacacgccgcgagccgttaa

SEQ ID NO: 175046 - DNA, 1185 bp, Klebsiella oxytoca
atgaattctgttttaccttctgccggccgccgtcctcttttgttgattgccggtattctgcttatcgccacgaccttacgcgtggcatttaccggcgccgcgccgctgctcgacgccattcgcagcgaatatggcctcactaccgcacaaaccgggctgttaacgacgctgccgctgctggccttcggcctggtgtcaccgctggctgcgggagtcgctcgccgcttcggcattgaacgcagcctgctgctggcgatgatactgatttgcctcggaattggtctgcgctccctgcccttcgtctcgctactgtttatcggcaccgcggtgatcggctgcggtatcgcgctggggaacgtactgctgccggggttaatcaaacgcgacttttcgcagcacgtcgccaaaatgaccggcgcttactctctcaccatgggtggcgcggcggcattgggctcggccatggtggtaccgctggcgcttgccggacttggctggcgcggcgcgctattgacgctgatggtttttccactgctggcgctgtttgtctggctgccgcagtcgcgcagacaggctaccgcgccgctgaccggttcgggagccatccataaccgcggtatctggcgttctgcgttagcctggcaggtgacgctgtttcttggcattaactcgctggtctattacgttatcatcggctggctgccggccattttgcaaagtattggctacagcgaagcgcaggcgggttccctgcacgggttgctgcagctggcgaccgccgcgccgggactggcgattcccttaatccttcatcggttaaaagatcagcgcggtattgcggtgctggttgccatgatgtgcgcggtcagcgcgctcggattatggtttctcccgggccaggcggtaatgtggacgcttatcttcggctttggctccggcgcgaccatgattctggggctgacctttatcggactgcgcgccagctcagcccatcaggccgctgcgctgtcgggaatggcgcaggcggtgggctatctgctggccgcctgcgggccgccggtgatgggtaaaattcatgacgcctcgggcgactggcatattccgctgatcgccgtggcgctaatttctgtcgtgatggcggtcttcggcgcgctggctggccgcgatcgggaaattcacggctag

SEQ ID NO: 175047 - DNA, 792 bp, Klebsiella oxytoca
atgatcggactcggcctggacggctacgacccggacagcggccacgaggcggcgctggcttttcgtattcaggttgttgcggatgaacagtacattccgcgccatcagcatcgtaaagggcaactcatacttgcccttcacggggcgctaacctgtgaagtcgagaacgccatgtggatggtgccgccgcagtacgcggtatgggtgcccgggcaggtaccgcacagtaatcgcgcgacgccggaggcgcaaatctgcttcttatttattgaacccgatgcggcgccgatgccggatttctgctgtacgttaaagatttcgccgctggtgcgcgagctgatcctcgcgatggcccagcgcggcagggcctggctcggtaaaccggagatggaccggctggtgcaggtgctgtttgatgagctaccgcagcagccgcaggagcatctgcagctaccggtctccggacatgccaaaattcgtcaaatggcggaaatgatggccgtcgacccggcccgctggcaaaccctggcgcagtgggcggcggagtttgccatgagtgaacgcaatctggcgcggctggtggtgcgcgagacggggctgagctttcggcgctggcggcatcagctgcagcttattctctccctgcagatgctgattcgcgggcaaacggtacagcagacggcgcagagcctgggctacgactccaccaccgcttttattactatgtttaaaaagggccttgggcagacgccgggacgctatcttgccagcctggctacgacttcccgttaa

SEQ ID NO: 175048 - DNA, 447 bp, Klebsiella oxytoca
atgctcgacaccaccctgttaatactgctgggcctggcggcgctcggctttgttagccataacacaaccgtggctatttctatcctggtgttaattatcgttcgcgtcaccccgcttaacgctttctttccgtggatagaaaagcaggggctgaccatcggtataattattctcaccattggcgtgatggcgccaatcgccagcggtacgctcccgccttcaacgctgctgcattccttcgttaactggaaatcgctgctggccatcgcggtaggcgtttttgtttcctggcttggcgggcgcggcgtagcgctgatgggctcgcagccgcagctggttgccgggctgctggtcggcaccgtgctcggcgtcgccctcttccgcggcgtaccggtcggcccgttgatcgccgccgggataatttcgctgtttaacgggaagtcgtag

SEQ ID NO: 175049 - DNA, 501 bp, Klebsiella oxytoca
atgaacgcgtctgcaggactcagcattcatcagcagctgatcgcgctgcttaaccgctcccatgcccgctaccgggttgtggaacatgaagccgtcgggaaatgtgaagcggtatcgaagatccgcggtaccgcgctgggtcagggagccaaagcgctggtatgcaaaattaaaggtcatggcgtaaatcagcacgttctggcgattcttgccgccgacctgcaggcggacttagcccgtctggccgagtatatcggcggcagtaaagcctccctcgccagcccggcggaagtggactccctgaccgcctgcgtgtttggcgcgattcccccctttagtttccacccggcgttgcggctggttgccgatccggtcctgttcgagcgtttcccggaaatcgcctttaacgccgggcagcttgataaatcgatcatcctggataccgccgactatctgcgcattgctcggccggaattggcggcttttcatcgccagccctga

SEQ ID NO: 175050 - DNA, 1497 bp, Klebsiella oxytoca
atgaaattaaagaataaattacttcgtcatttgatttcggctggggtagtggtcctgacctcttcattcctggtctatgagttagtcgtcagccatcgggatatgtcggaatatatgcactatattgtcgaaaaaggcgagtacgcttttctctacgataaatatcaaaatcagctggttatctcccagatcgcccgcaagttagataccctaccttctgctgaagttgctcaacaggcatgcgacagcgtacaaacaaaaggcagcgttagcggtctgaatattacggagtacacctttcccctgcttagcggcacgctcagtgcgaatcagtcttcctgcctggcgtgggttaacgatctgcccgcgctgcaggcctttgataccattatcgaccataacagaacccaccatggccaggaaaccggtccttataaatccgacaacaaattacgttacttcattgattttaaaaataaatatgtgtatttccatactcaagtcgagattaaaaaccgcgcactggacaactggaactttctccacgacggcaaattaggtattacccagactaaccttaacagcttactgcgcggccgcacgttgatgtccagcatctacgtggacgcggtgaccgggcaaaatattctctcgtttttgtccccggtgtatcaccacgaagggcttaaaggggtcgtcatggtcgatgtcagccgtaaagatatcgaagagctcctgtataccgctgaccgcccgctggtgtggcgttatctcgacatcacattaacggattcggactcaacctcagaaatcattgttcaccgcagcaaaacgcatctttttagctatgcccattatcaacatgcggtagccacaaacctgcagatctcgctgtcgctggacgtgatgtatttcctgctcagctcctggaagctcttcctgttttacctgatatctaccggcgtgctgcttcatcttgttcgcatgcattttcgtttgtatatcgatgtttttaaagaaaatattagtgattcattaaccggtctttacaaccgtaaaattctctcctcgttgctggaatcgcgcatgcaaaagctgacggaacagggggtgaatattgtgtttatggcgctggactgcgaccggcttaaattcattaatgatacctttgggcataacgaaggcgaccgcgcaattgtgatgcttgctcagtccatatccgccgccatacgcaaaagcgattacggtatccggttgggcggcgatgagttctttctgatactgattgattacgccgaagaagacgccaaaaatattaccgagcgtatccgccagcatctgcgaacgattgacgtcaacaagcgcgttaacttctcatggggcgcctgtagcatggcgccgggagatagcctggccgataccatgcaaatcgccgatgcccggctgtacgaaaataaaaaacaaaaaaagcacgtccatccagggcgagaggattaa

SEQ ID NO: 175051 - DNA, 1158 bp, Klebsiella oxytoca
atgatggaaaacgcagcggtgcaggtagctccccggaagtttaaaaaaataagagagctcaaccggcgccgcaattatttttttaagaaattacgcaatattctgcgggtttatatcgcaaaagcgttgtgggatagtcgcgcgcgtcgcgaagcagatttaacgtccgccaaaacggtactgcttatgcgcaacgaaggcgcgataggcgacgttgtcgttgattctgcgctggttaaatgcctccataaggcaggtatgaccgttgattttctgttaacgaaatcgaacagccaggtcatgcgtgataatccacatattcgccatatttatgaagctgagaatgtcgactcggcggcttatctgcgtaagtttacccacaacgttcctcagtccgttattaatgagcttgcgaataataagtatgatattgttattgacccctcgctgtttgatattccggtgcaccggatgctgctgttacggcagataaaagcgcgctcggtgctggggtttaataaatggccttctattaatcactatacccgctcttttgattttgactgtgcaaactggcacgtcagcaagacctttacgctcattgccgattatctccagctggacaaaaaatacctgcagtcctatgacttgcatattcccgagaatgtcgagcacgaggtgcgtgattatctggcggctaaaagtggacgaaatctggtcattaatatttttgccggccatcaggaccgcagcatgtcgcaggagcagctggccacgcttctcacccgactgcgcgaagagtatcctgctatcaatattatattgctcgaccaccgcaatgaaattcgtctttctctgccggagaaggtcagcgtgaatccgtttaaaacgctgcaccactgcatggcgctgattgcgcaggccgatttggttatctcgccggatacctcggtggtacatatggcggctgcgtggaaaaaaccgctggtcgcagtgtataaggatgtgcgcatgaataatcggctgtgggcgccgggatatgatagggcccggcagatcatcgttaagtgcggtaaggtgcaccagttggagagcttgcccgacctgataatggcggagattgaccctggcactctacagcagaaccgggccggataa

SEQ ID NO: 175052 - DNA, 1284 bp, Klebsiella oxytoca
atgacctggttcatagaccgacgcctgaacgggaaaaataaaagcgccgtcaaccggcagcgctttctgcgccgctacaaagcgcagataaagcagtcgatctccgaggccataaacaagcgctcggtgaccgatattcagagcggagagtccgtctccatcccaacggacgatatcaacgaaccgatgtttcatcaggggcgcggcggcctgcgcaatcgcgttcatcccggtaacgatcacttcgtgcagaatgaccgtattgaacgtcctcagggcggcggaggcggtggaggaagcggtcaggggcaagccagcgccgatggcgaaggccaggatgagtttgtttttcagatctcgaaagatgagtatctggatctgttattcgaagatcttgccctgccgaatctgaagagaaatcagcatcggcagctgacggaattcaaaacccatcgcgcaggctacaccgctaacggggttcccgccaacatcagcgtcgttcgctcgctgcaaaactcgctggcgcggcgcacggcgatgaccgccggtaagcgccgggagctgcatgctctggaagaagatctggagagtattagcaaaagcgaaccggcgcagctgctggaggaggagcggctgcgcaaagagattgccgagctacgggcgaaaatcgaccgcgtgccgtttatcgatactttcgatctgcgctacaagaactacgaaaagcggccagagccctcaagtcaggcggtgatgttttgcctgatggacgtctccggctcgatggatcaggcgacaaaggatatggcaaaacgtttttacatcctgctgtatctgttcctcagccggacctataaaaacgttgatgtggtttatatccgccaccatacgcaggcaaaagaggtcgacgaacacgaattcttttattcgcaggagaccggcggcaccattgtctccagcgctctgaagctgatggacgaagtcgttaaagagcgctatgacccggcgcagtggaatatctacgccgctcaggcatcggacggcgataactgggcggacgattcaccgctgtgtcacgagctgctggcgaagaaaatcctgcccgtggtccgctactacagctatatcgagataacccgtcgtgcgcaccagacgctgtggcgggagtatgaacacctgcagtcgacctttgaaaactttgccatgcagcatattcgcgacccggaagatatttatccggtgttccgggaactgtttcacaagcaaacctcaaaagcggacggttaa

SEQ ID NO: 175053 - DNA, 1935 bp, Klebsiella oxytoca
atgaatatattcgatcactatcgccagcgctatgaagctgccaaggacgaagagttcacactgcaggagtttcttaccatctgtcggcaagatcgcagtgcttatgctaacgcagcagaaagattgctgatggccatcggtgagccggtcatggtcgatacggccctggaacccaggctatcccgtctcttttcaaaccgggtcgttgcgcgctatccggcatttgaagagttttacggtatggaagatgccatcgagcaaattgtttcttacttaaagcacgccgctcaggggcttgaagagaagaaacagattctgtatctgctgggccccgtgggcggcggtaaatcatcgcttgccgaacgccttaagtccttaatgcagcgcgtgcctatctatgtgcttagcgcaaacggagagcgtagcccggtcaacgaccatccgctatgtctgtttaacccgcaagaggatgcgcaaatcctcgaaaaagagtacggcattccaaaccgctatctgggaacaattatgtcgccgtgggcggccaagcgtctgcaggaattcggcggcgacattactaagttccgcgtggtgaaagtgtggccgtcaatcctggcgcagattgccatcgccaaaaccgagcccggcgatgagaataaccaggatatctcggcgctggtgggtaaagtggatatccgtaaactggaacactatgcgcagaacgatccggatgcctacggatattccggcgccctgtgccgcgccaaccaggggctgatggaatttgtagagatgtttaaagcgcctattaaggtgctgcatccgctgctgaccgcgacgcaggaaggaaactataacggcactgaagggatctccgccctgccgtttaacgggattatcctcgcccactccaacgaatcggaatgggttaccttccgcaataacaagaacaatgaggccttcctcgaccgcgtgtacatcgtcaaggtgccttattgcctgcgcatctcggaagagatccgcatctatgaaaaactgctcaataatagcgaactgactcacgcgccctgcgcgccgggaaccctggaaacgctgtcgcgcttctcgattctgtcgcgcctgaaagagccggaaaactcgagcatctactcgaaaatgcgcgtctatgacggtgaaagcctgaaagataccgacccgaaagcgaaatcctatcaggagtatcgcgattatgccggcgttgatgaagggatgaacggcttgtctacccgcttcgcgttcaaaattctgtcgcgggtatttaactttgatcacgccgaagtcgccgcgaacccggtgcatctgttctatgtcctggagcagcaaattgagcgtgaacagttcccgcaggagcagtccgaacgttacctggagttcctcaaaggttatctgatcccgaaatacgccgagtttatcgggaaagagatccagaccgcctaccttgagtcctactcggaatacgggcagaacatttttgaccgttatgtgacctacgccgatttctggattcaggatcaggagtatcgcgacccggataccggccagctgtttgatcgcgagtcgctgaatgcggagctggaaaaaatcgagaagccggccgggatcagtaatccgaaagacttccgcaacgagattgtcaacttcgtgctgcgcgccagagcgcacaacagcggacgcaatccaaactggaccagctacgagaaactgcgcacggttattgagaagaaaatgttctccaataccgaagagctgttgccggtgatctcgttcaacaccaaaacgtcaaccgatgagcagaaaaaacacgatgactttgtcgaccgcatgatggagaaaggctatacccgcaagcaggttcgcctgctgtgcgaatggtatctgcgggtacgtaaatcatcctga

SEQ ID NO: 175054 - DNA, 747 bp, Klebsiella oxytoca
gtgactaaaatcaaacttctggcacttggtgtgttgattgcgacttcagcatccgccgtacacgctgaagggaagttcactttaggggcgggtgtaggcgtcgttgaacatccgtacaagcagtatgatgctgatgtttacccggtgccggtgattaattacgagagcgataacttctggtttcgtggtttaggcggtggtctttacctgtggaatgataccaacgataagctttccgtgaccgcctactggtcgccgatgtactttaagccaggcgacagcgatagcgagcagatgcgccgtctggataaacgtaaatccacggtgatggcaggacttgcgtacgaacactatacgcagtacggtttcctgcgcaccgcgctgtcaggggacaccctggataacagcaacggtatcgtatgggatctggcctggctatatcgctacaccaacggcaatctgacgcttacgccgggtattggcgttgaatggaatagcgataatcagaacgagtactactatggtgtttcgaagcatgagtcgaatcgcagcggcatgcgcagctacgatccggacagcagctggaacccgtacctcgagctgtcggcaaactatcgtttcctcggcgactggagcgtatacggcgtggcccgctacactcgcttgtctgacgaaatcaccgatagtccgatggtggacaaatcctggagcggtctgatttcaaccgggatcacttactccttctga

SEQ ID NO: 175055 - DNA, 855 bp, Klebsiella oxytoca
atggcacaaaggacaatcagttttggtgagcatccagcggtttccgtcatagggcaggggacctggtacatgggcgaaaacccggcgctgcgcgttcaggagtctgctgcactacgcgcgggcatcgatcttgggctcacggtgatcgatacggcggaaatgtatgctgacggcggcgccgaagaggttgtcggcgaagccattcgcggccagcgcgagcgcgtggtgctggtgtctaaagtgtatccgtggaacgctggcggtcgcaaaatagccagcgcctgcgaagccagcctgcgccgtctgaagaccgactatctcgatctctaccttctgcactggcgcggcgactacgcattgcaggagacggtggcaggtatggaagcgctcgttgcgcagggcaaaattcgtcgctggggcgtatcgaatcttgattacgctgatatgcaagaactctggcaggttgacggcggcgagcagtgcgcaactgaccaggtactctatcacctggcttctcgcggtattgaacatgatttgttgccatggtgccagcagcagcggctgccggtgatggcctactgtccgctggcccaggccggccgtctacgcaatggacttttaaatcataccgttgtgaaaaatattgcgcaggcccggggcgtaaccgccgcgcaggtgcttctggcatgggttatcagccatcagggggtactggcgatcccgaaagcatcgagtatcgaacatgttgagcaaaatgctgcggcgctggacatcgagctaaccgctgaagagagggcgctgctggaaaaagcttacccggcaccgggaagaaaaacaccgctggatatggtctga

SEQ ID NO: 175056 - DNA, 885 bp, Klebsiella oxytoca
atgattaataaaatttttgccctcccggctatccaacagcttacccctgtcctttcccgtcgccagcttgatgacctggaactgatcgtggttgatcatccgcaggttaaagcttccgtggctttccagggcgctcacctgctctcctggaagcccgcaggcgaagaagaggtcctgtggctcagcggcaataccccattcaaaaatggcgttgccctgcgcggcggcgtgccgatttgctggccatggtttggcccatcagctcagcagggtctgccgtcgcacggctttgcccgcaatctgccgtgggccctgaaaggccacgatgaagacgataacggcgtggtgctgacctttgaactaaaaagcagcgatgccactcgccagtactggccgcatgagttcaccctgttagcgcgtttcaaactgggtaaaacctgcgaaattgagctggaagcgcacggcgaatttgaaaccacttccgcccttcacacctatttcaacgtcggtgacattgcggcagtgaaggtcagcggtctgggcgaccgttatattgataaagtgaaaaatgccgaagaaggcgtattaagcaacggcactgaaaccttcccggatcgtaccgaccgcgtctatctgaatgcagaaacctgcagcgtcattcacgatgatgcgctcagccgcaacatcgatgtcgtccatcatcacaacagcaacgtggttggctggaacccgggaccggccctttccgtcagcatgggcgatatgcccgatgatggctacaaaaccttcgtttgcgtagaaacttgctgcgtaaccgaatcgcagaaggccagcgaagagaaaccttcgcgcctggcgcaaaccattcgcgtggtgaaacgctaa

SEQ ID NO: 175057 - DNA, 996 bp, Klebsiella oxytoca
atgactatcaaagtaggtatcaacggttttggccgtatcggtcgcattgttttccgtgctgctcaggaacgttctgacatcgagatcgttgcaatcaacgacctgttagacgctgactacatggcttacatgctgaagtatgactccactcacggccgtttcaacggtaccgttgaagtgaaagacggtcatctgatcgttaacggtaaaaaaatccgtgttaccgctgagcgtgacccggctaacctgaagtgggacgaagtgggtgttgacgttgttgctgaagcaaccggtatcttcctgaccgacgaaaccgctcgtaagcacatcaccgctggcgcgaaaaaagtcgttctgactggcccgtccaaagacaacactccgatgtttgttaaaggtgctaactttgacaaatacgaaggccaggacatcgtttccaacgcttcctgcaccaccaactgcctggctccgctggcaaaagttatcaacgacaacttcggcatcatcgaaggtctgatgactactgttcacgccactaccgctactcagaaaaccgttgatggcccgtctcataaagactggcgcggcggccgcggcgcagctcagaacatcatcccgtcctctaccggcgctgctaaagctgtaggtaaagtactgccagaactgaatggcaaactgaccggtatggcgttccgcgttccgactccgaacgtatccgttgttgacctgaccgttcgtctggaaaaagctgcttcttatgaagaaattaagaaagcaatcaaagctgcttccgaaggcgcaatgaaaggcgttctgggctacaccgaagacgacgttgtctctaccgatttcaacggcgaagtttgcacttccgtattcgatgctaaagcgggtatcgctctgaacgacaactttgtgaaactggtttcctggtacgataacgaaactggttactccaacaaggttctggacctgattgctcacatctccaaataa

SEQ ID NO: 175058 - DNA, 414 bp, Klebsiella oxytoca
atgtcgaataaaccctcttcggacgagctcaaaaaaaatttgagcgagatgcagttttacgtgacgcagaatcacggtactgaaccgccgttcaccgggcggctactccacaacaaacgcgatggcgtctaccactgcctggtatgcgacgcgccgctgtttaactcgcaatccaagtatgattcaggctgcggttggccgagcttttatgagccggtaagcgatgatgctattcgctatcttaacgattactcccacggtatgcagcgcacggaaattcgctgcggaaactgcgatgctcaccttggacacgtcttcccggatggcccgcagcctaccggtgagcgtttttgtgttaattcggcctctttaagcttcaccaatgatgaaaatggtgagcaaaccaagggttga

SEQ ID NO: 175059 - DNA, 276 bp, Klebsiella oxytoca
atggaaattgaacggattatcgacggcatgacgccggaagtgtatcagcgtctggcgacggcggtggagctgggaaaatggcccgacggcgtggcgttaacagccgagcagaaagagaactgtctgcagctggtgatgctctggcaggcccgatataacgttgacgcgcagcatatgaccatcgacaccaacggacagatggtgatgaagagtaaacagcagttgaaagtggactttggtatttcgccgcaacctatcgcgacgtttaaatcctga

SEQ ID NO: 175060 - DNA, 345 bp, Klebsiella oxytoca
atggcttatatcccgaaaaactacgcccgtctggaagtcggatatcgcgaaaaagcgctgaagctcttcccctgggtctgcggacgctgctcgcgtgagtttgtctattcgaatctgcgtgaactgacggtacatcatatcgaccacgaccactccaataacccggaagatggtagcaactgggagatgctgtgcctctactgccacgatcatgaacactcaaaatacaccgaggccgatcagtatggttcaacggtggtggccggcgaagatgcgcagaaaagcgtcggcgaagcgaaatataaccctttcgccgatctaaaagcgatgatgaacaagaaataa

SEQ ID NO: 175061 - DNA, 1254 bp, Klebsiella oxytoca
atgaaacttttgcctttactggcagctttacccctgctcttcgcgagcgtcgtttctgctaataccctgatgtccgtcggctactttaacggcggcggcgacgtcactgccggacctggcggcaatatcgataaacttgacgtccggcagattacccatctcaactactcgtttggtctgatctataacgacgaaaaaggtgaaaccaacgcggccctgaaagaccccggcaggctgcatcaaatctggctgtcgccgaaagtgcaggctgatttacagaaaatcccgcatctgcgccagcagaatccgaacctgaaagttttgctttccgtcggcggctggggagcgcgcggattctccggcgcggcggcgacaaaagaaacccgagcgctgtttattcagtcggcgcaggagatcattgaaaaatatggtcttgatggtatcgatctggactgggagtatccggtcaacggcgcatggggactggtcgacagccaaccggccgatcgcgataattttaccgtcctgctgaaagagctgcgcgcggcggtgggcaataaaaaactggtgaccatcgccgtgggcgctaacgcggagagtccgaagagctgggtggatgtcaaagcgatagccccctcgctcgactacatcaacctgatgacctacgacatggcttacggcacccagtacttcaattccaacctgtacgactcctctcaatggccgacggtcgcagaagccgataagtacagcgctgatttcgtggtcaacaactatcttgcggcgggtttgaagcccagccagatgaacctggggattggtttctatgggcgggtaccgaaacgcgccgtcgagccgggcattgactggagcaaaccggatgcgcagaaaaatccggcaacgcagccttattttgagccgcagcaggtcgagctgttcaaaacgttgggcgtcgatctgtcaaaagatacctacgtgaaatataacgatatcgtggcgaagttcatcaacgatccgcagaagcgctttactcagcattgggatgatgaagcgaaagtgccgtggctgtcggtaacttcctccgacggtaaagcgctctttgccctctcctatgagaacccgcgttcggtggcgatcaaagccgactatatcaagagcaaaggactgggaggcgcgatgttttgggagtacggcgccgatgatcaaaaccagctagcgaaacagctggccgaatccctggggatcaaacgctga

SEQ ID NO: 175062 - DNA, 1077 bp, Klebsiella oxytoca
atgaaagcactggcaagatttggtaaggcctttggcggctataagatgattgatgttccggaaccggtctgcggtccggatgatgtggtgattgaaatcaaggcggcagccatttgcggcgcggatatgaagcactacaacgtcgatagcggatccgaccaattcaactccattcgcggccacgaatttgccggtgaaatcgtccgggtcggcgaaaaggttaaggactggaaagtgggccagcgggtggtttctgataatagcgggcacgtctgcggcgtgtgtccggcctgcgaacaaggtgattttctgtgttgtacagaaaaagttaatttaggtcttgataacaatacctggggcggcgggttttcgaaatactgcctggtgccgggggagatcctcaaaattcatcgccacgcgctgtgggaaatcccgccgggcgttgattacgaagaagcggcggtgctggatcctatctgtaacgcctataaatctatcgctcaacaatccaaatttctccccggtcaggacgtggtggttttcggtaccggtccgctaggcctctttgccgtacagatggcgcgcatcatgggggccgtcaatatcgtgatggtcgggctggaagaggacgtcgcggtgcgtttccccatcgctaaagcgttgggcgcgacggcggtggtcaacggttcgagcgaagatgtggttgcgcgctgtcaggaaatttgcggcaaagataatctcggtctggttatcgaatgttcaggcgccaacattgccctcaaacagtctatcgaaatgctgcgccccaacggtgaagtggtccgcgtggggatgggcttcaaaccgctggacttctccatcaacgacatcactgcctggaacaaaagcatcatcggccatatggcttacgactccacctcctggcgcaacgccattcgcctgctcgccagcggcgcgatcaaagtcaaaccaatgattactcatcgcattggcctgtcgcagtggcgcgaaggttttgatgccatggtcgataaaaccgcgattaaggtcatcatgacttacgactttgatgaataa

SEQ ID NO: 175063 - DNA, 1380 bp, Klebsiella oxytoca
atggaacagatagcaaaaccgcactgcggcgccaggctcgatcgcctgcccgactgccgctggcacgcttcaatgtttgccatggtcgctttcggattacttgtctgctggagtaatgccgtaggcgggttaatactcgcgcagctaaaagacctgggctggaccgataattccacgaccgctacgttttctgccattaccacggcgggaatgtttcttggcgcgctcggcggcggcattatcggcgataagatcgggcgtaaaaatgcgttcatcctgtatgaagcgattcatattattgccatggtcattggggcgttttcgccgaatatgatctttctgattgcctgtcgttttatcatgggggtagggttaggcgcgctgctggtgaccttatttgccggattcaccgaatatatgcccggcagaaatcgcggcacctggtccagtcgggtctcgtttatcggcaactggtcttatccgctctgttcgctgattgcgatgggattaacgccgttaatcagcgcggaatggaactggcgcgtacagctgctgatcccggcgctgctgtcgctaattgctaccgttattgcctggcgcagtttccctgaatcgccccgctggctggagtctcgtggacgttacgcggaagcggaaaaggtgatgcgggccattgaagagagggtcgtgcagcaaaccggtaaaccattgccgccagtggtaatagaagatgatggtaaagcgccgcgcgcggttccttattcagccttattaaccggcgtattactcaagcgggttattttaggctccttcgtcctgattgccatgaatgtcgtccagtatactttaattaactggctgccgacgatatttatgacccagggcattaatctgaaagactccattgttttaaacaccatgagtatgttcggcgcgccgtttggcattttcatcgccatgctggtaatggataaaataccgcgaaaaactatgggtgtgggcttattagtattaatcgccgtgctgggatatatctattctctgcaaaccagtatgctgctcattacgttaattggcttcttcctgattacgtttgtctatatgtacgtttgctacgcctcagcggtctatgtgccggaaatatggccgaccgaagcgaagcttcgtggttcaggcctggctaacgcggtggggcgcatcagcggtatcgccgcaccctatgcggtggcggtattacttaacggctatggcgtaaccggggtatttgtgctactgggggccgtctccattattgttgcagtcgctatcgccacaatcggaattgaaactaaaggcgtctctgtcgaaagtctcggtattgatgccgttaccagcaaataa

SEQ ID NO: 175064 - DNA, 1044 bp, Klebsiella oxytoca
atgaataattcaaaagcgattttaaaaaagccgggtaccatgaaaatcatcgctgccgatattccggtacccaaagaacatgaagtgctgatcaaaattgaatacgttggtatttgcggttcagatgttcacggtttcgaatcaggtccctttattccgccgaaagatcccaatcaggaaattggtttggggcacgaatgcgccggtacggtggtcgcggtgggaaatcgcgtgagcaaatttaaacccggcgaccgggtgaatattgaacccggggtgccgtgcggccactgccgctactgtctggaggggaaatacaatatctgtcctgacgttgatttcatggccacgcagccaaattatcgcggcgcgttaacccactacctgtgccatccggagagcttcacctataagctgcccgacaatatggacacgatggaaggcgcgctggtggagcctgcggcggtcggcatgcatgccgcaatgctggcggacgtcaagcctggcaagaaaatcgtcattcttggcgcaggctgtattggtttaatgaccctgcaggcatgcctttgcctgggggctactgatatcacggtggttgatgtgctggaaaaacgcctggccatggccgaacagctcggggccaaagtcgttatcaacggcgcaaaagaggacaccgtcgcgcgctgccagcagttatccggcgacatgggggctgatatcgtattcgaaaccgccggttcggccatcaccgttaagcaggcaccgtatctggtcatgcgtggagggaaaatcatgatcgtcggtacggtccccggggattcggcaattaacttcctgaaaattaaccgcgaagtatcgattcagaccgttttccgctatgccaaccgctacccggtgactattgaagctatctcctccggccgtttcgatgtgaagtcgatggtgacgcacatttacgactacgaggatgttcagcgcgcgtttgaggaatctgttaataacaaacgcgagatgattaaaggcgttattagagttaaccattaa

SEQ ID NO: 175065 - DNA, 837 bp, Klebsiella oxytoca
atgctggctgatattaaatattgggaaaatgatgcgcaaaataaacattatgccattgcccactttaacgtgtggaatgccgaaatgctgatgggcgttatcgatgccgcggaagagtcaacatcgccggtgattatctctttcggcaccggatttgtgggcaatacctcgtttgaagatttttcgcatatgatggtttcaatggccaaaaaggcctcggtaccggtgattgcgcactgggaccacggacgcagcatggaaattatccacaatgcgtgggcccatggcatgaactccctgatgcgcgacgcttccgcctttgatttcgaagagaatattcgtctgaccaaagaagcggtggacttcttccatccgctgggcattccgatcgaagcggagctgggacacgtgggcaatgaaacggtctacgaagaagcgctggcgggctatcactataccgatccggatcaagcggcggaattcgtcgagcgcaccggctgcgattccctggcggtagcgattggtaaccagcacggggtctatacctcagagccgaaactcaactttgaggtggtgaaacgcgtgcgcgaggcggtatccgttccgctggtactgcacggcgcatccggcattagcgacgcggatattaagcaggctatttcgctgggtatttccaaaattaacattcataccgaactgtgccaggcggcgatggcggcagtgcaggagaaccagaatcaaccgttcctgcacgttgagcgcgaagtacgcaaagcggtcaaaacgcgcgcgctggagaaaatcaaactgtttggctctgacggtaaagcggaatga

SEQ ID NO: 175066 - DNA, 948 bp, Klebsiella oxytoca
atggataatatcgaggttatttgtataggcgcggccattgttgatattcccctgcagccggtgagcaaaaatatctttgatgttgactcatatcccttagaacgcatcgccatgaccaccgggggggacgcaattaacgaggcaaccattatttcccgactcggtcatcgaacggcattaatgagtcgggtaggggacgacgcggcgggacattttattcttgcacactgtcgccgggagaatattgatatccacagcctgaagcaggatggcgaaatcgatacctccattaatgtgggtctggtcaccgccgatggcgagcgtacttttgtgactaaccgcaatggtagtctgtggaagctgaatattaacgatgtggactttagccgcttttctcaggcaaagctgctgtcgctggcgagcatttttaatagcccgctgctcgatggtaaagcgttaacggagatattcactcaggccaaagcgcacggattaattatttgcgccgatatgattaagccgcggcttaacgaaactctgaacgatattcgccaggcgctgagctacgtcgattatctgtttcccaattatgccgaggcaaaactgctcaccggcaaagagacgctggatgagatcgccgatagcttcctgaactgcggggtgaaaacggtggttattaagaccggcaagcgaggctgctttattaagcgtgccgatatgaagctggaagtgccggcggtttcaggcattaccgccatcgacaccattggcgcaggggataattttgcctcgggatttatcaccgcgctgcttgaaggcaaaccgctgcgcgagtgcgcgttgtttgctaacgccacggcggcgatctcggtgctgagcgtaggcgccacgacgggtgtgaagaacagaacgctggttgaacaacttctcgacgaatatgaaggataa

SEQ ID NO: 175067 - DNA, 984 bp, Klebsiella oxytoca
atgaaaatgatttctttaggcagtacggatatcacgctttcccgaatgggattaggcacatgggccattggcggcggcccggcgtggaacggcgatctcgatctgcagatatgtatcgacaccattgttgaggcgcatcgctgcgggatcaatctgattgataccgcgccaggctacaactttggcaacagcgaagtgattgttggccaggcgcttaaacagctgccgcgccgcgaagtcgttgtcgaaaccaaatgcggtatcgtctgggagcgcacgggcagcctgtttaataaggtgggcgatcgccagctgtataaaaacctgacgcccgagtcgattcgcgaagaggtggaggccagcctgcaaaggctgggcatcgatactattgatatctatatgacccactggcagtcggtagagccctgctttacgccaattgcggagaccgtagccacgctgaacgcgcttaagaaagaggggaaaattcgctctatcggcgcggcgaacgtagatgccgggcatatcagagagtacctcaagcacggcgagctggatatcgtgcaggccaagtacagcattcttgaccgggcgctggaggccgagctactgccgctctgtcaacagaacggcattgtagtgcaggtctactcgccgcttgagcaggggctactgaccgggactatcggccgtgattatgttcccggcggtgcgcgggccaataaggtctggttccagcgggaaaatatgctgcgcgtgattgatatgcttgagcaatggcagccgctatgcgaaaaatatcgctgtaccatccccgcgctggcgctggcgtggatattaaagcaaagcgatctcattacccttctgagcggcgctacggcgcccgagcaggtgcgcgagaatgtcgatgcgctgaacatcgctctgaccgatgatgattcattattgatgaggcgaatggcggaagcgctggatcctaaataa

SEQ ID NO: 175068 - DNA, 759 bp, Klebsiella oxytoca
gtggcggcaaaagacaggattcaggccataaagcaaatggtggctaatgataagaaagtagcggtttctaatttaagcgcaatttttcaggtcactgaggaaaccatccgtcgcgatctggaaaagctcgaagatgaaggttatttgacccgcacgtacggcggcgctgtattaaataccaatgctttagctgacaatattcatttttataaacgcgctaaatcttttttagaagagaagcagatcattgcccgcaatgcattaccgtttataaagaataaaaccaccatggctgccgactccagcagtaccgcgatggagttattaaagctgttgaaagagagaaacgatctcacgctgttaaccaactcggcggaagcctttcatgagctggcacagtctgaaatcaacgtggtatctaccggcggcgagctcaataagaatacgctgtcgctgcagggaaggatcactaaggaaattattagccgctatcatgttgatattatggtgatgagctgcaaagggctggatatgcagagcggggcgctggactctaacgaagcggaagcggaaattaagaaaaccatgatccgccaggcgaccgaagtcgctttgctggtcgatcattcaaaattcgatcgcaaagcattcgtccagctcgtggattttagccatattaattaccttatcaccaataaggcgccgggtgcacagtggattgcattttgtaaagaaaataatattcaacttgtttattaa

SEQ ID NO: 175069 - DNA, 1359 bp, Klebsiella oxytoca
atggaacaatgtgaccctatcggcgcaagattagaccgcttacctttatcgcgatttcattttcgtatttttggcattattagttttagtttattaatcaccggttttctcagctattccggcaacgtggtgctggcaaagttagtcagcaatggctggtcaaataactatctcaacgccgcatttacctcggcgctgatgtttggctactttattggttcgttgaccggaggttttataggcgattatctcgggcgacgtaaagcatttcgcctgaatttactgatcgtcggggtctctgcctgtgcggcaacctttgtgcccaacatgtactggcttatcttttttcgctgtctgatgggctgcggaatgggggcgctgattatggtgggctatgcctcctttaccgaatttattccgcccgcggtacgtggaaaatggtccgcccggctctcctttgtcggcaactggtcgcctatgctatcggcggcaattggcgtcgtggtgattgcttttttaagctggcggatgatgtttctgttcggcggaggagccatgctgctggcctggtatctgtcgggaagatactttattgaatctccccgctggctggccggaaaagggcagcgcagcgccgctgaaaagcatctccagcaggtagagtcgcaaatcgagagagagaaaaatattaccttaccggcctggcaaagcgcggatcaaacggcggatgtgtgtgtggaaagcggctctttctggctgctgtttaaaggccagatgctgcggcgcacgctggtggcaatcacggtgctaatcgccatgaatatttcgctctataccattacggtgtggatcccgacaattttcgtcaattcgggcatcgacgtgacgaagtcaatcttgatgaccgcgattattatgattggcgcgccggtgggaatatttatcgccgcgctgattatcgaccgttttccgcggcggttatttggctcattgctgctgattattattgcggtgctcggctacttctattcgattcaaaccgcagagtgggccatcttaagctatggcctggtgatgatctttttcctgtatatgtacgtctgctttgcctcggcggtgtacgtgccggagctgtggccaacgcatctccggctgcgcggttcaggctttgtcaacgcggtagggcgaattgtcgccgtctttactccctacggcgtcgctgtcctgctgacccgctacggcgcgattacggtttttatggtgctcggggtgatgctggtactctgtgcgctgatcctgttctgctttggcatcgaaacgcgcaagatatcgctggaggagatttcaacgctggcctga

SEQ ID NO: 175070 - DNA, 642 bp, Klebsiella oxytoca
atgacccagcgcgcgctgcttctggtcgatttacaaaatgatttctgcgccggtggcgcacttgcggtcccgcagggcgatagtacggttgacgtcgccaaccggcttatcgactggagcctgacgcggggcgaaacggtggtagccagccaggactggcatccggcgaatcacggcagctttgccagccagcatcaggttgaaccctatacccagggcgagctcgacggcctggcgcaaactttctggccggatcactgcgtgcaaaacagcgaaggcgcggctctgcatccgctgctcaaacagcagcatatcgccgccgtcttccacaaaggcgaaaatccggccatagatagctacagcgccttttttgacaacggccaccgacaaaaaacgcagcttgatgcgtggctgcgcgagcgcgatattcgcgaactcacggtgctgggtctggccaccgactactgcgtcaagtttaccgtgctcgacgctctcaatctgggctataacgtcaacgtcattaccgacggctgccgcggggtgaatattcagccgcacgacagcaatcaggcatttatggagatggccgccgcgggcgccaccctctataccctggacgactggttggaaacccacgcataa

SEQ ID NO: 175071 - DNA, 1017 bp, Klebsiella oxytoca
atgcagaagaaatctatctacgttgcctatactggcggcaccattggtatgcagcgttctgaacacggctacattcccgtttccggccatctccagcgccagctggctttaatgcccgagtttcaccgtccggagatgccggacttcaccattcatgaatatgctccgctgatggactcctccgatatgacgccggaagactggcagcatatcgccgaggatattcgcgatcgttatgaccagtacgacggtttcgtgatcctgcacggtacggataccatggcgtttaccgcttcggcgctctccttcatgctggagaatctggggaaaccggtcattgttacagggtcacaaattccgctcgctgagctacgctctgacgggcagattaatctcctcaatgccctgtacgtcgccgccaactatccgattaacgaagtgtcgttgttcttcaacaaccgtctctaccgcggcaaccgtacaacaaaggcccacgctgacggatttaacgccttcgcttcgccaaacctggcgccgctgctggaagcagggatccatattcgccgtctcggcacccctcccgcaccgcacggcaacggtgagctggtggttcaccctatcacgccgcagccgattggcgtggtgaccatttatcccggcatttccgccgacgtcgtgcgcaatttcctgcgccagccggtcaaagcgctgatcctgcgttcatatggcgtcggtaacgcgccgcagaacggcgaatttattcaggtcctggccgaagccagccagcgcggtatcgtggtgattaacctgacccagtgtatgtccggcaaggtgaatatgggcggttacgccaccggtaacgcgctggctcaggccggggtgattagcggttttgatatgaccgtcgaagccacgctgaccaagctacactatttattgagtcaggatctggacgttgcggctatccgtcgcgcaatgcaggagaacctgcgcggcgaactgacccccgatgagtaa

SEQ ID NO: 175072 - DNA, 1854 bp, Klebsiella oxytoca
atgcgaactctttggcgactgctcgccggaatctttaaatggacatggcgagtgctcaacttcattcgccagctcgcactgaacgtggttttccttgtgctggtgctggcctgcgtcggtatctgggcccagttcagcagtaacacaacagagcataccactcgcggcgcgctgctgatggatatcaccggcgtggtggtcgataaaccttcggccagcagcaaacttggggtcattggccgtcaactgtttggcgccagctcggatcgcctacaggaaaactcgctgtttgatattgtgcagacaattcgccaggcgaaagacgaccgcaatatcaccggcatcgtgctggatctgaaaaactttgccggcggcgatcagccatcgatgcagtacatcggtaaagcgctgcgcgaattccgcgatagcggcaaaccggtctacgccattggcagcagctacagccaggggcagtattatctggccagcttcgccaataaaatctggctttcgccgcagggcgaagtggatctgcatggtttcgcgaccaacggcctgtactacaaatcgctgctcgacaaactcaaagtatcgacccacgttttccgcgtcggcacttataaatcagcggtagagccgtttatccgcgatgatatgtccccggcagcgcgcgaggcggatagccgttggattggcgaactgtggcaaaactacctcagcaccatcgccgccaaccgccagatctccgcacagcagctgttccctggcgctcagggggtcctcgacggtctgcgtaaagttgatggcgacaccgccaggtacgcgctggataacaagctggttgacgagcttggcacctctaccgaagtggagaaagcgctgactaagcagtttggctggagcaaagcggataataactacagcgcgatcagctactacgactacaccgtgaaaacgcctgccgataaaggctccgcgatagcggttatctttgctaacggcgcgattatggatggcgaggaaacgccgggtaacgtcggcggcgacactaccgctgcgcagatccgcgacgcccgcctcgatccgaaagtgaaagctatcgtactgcgggtaaacagccctggcggcagcgtcagcgcctcggaggtgattcgcgaagagctggcggcggcaaaagcggccggcaaaccggtggtggtatcgatgggcggcatggcggcctccggcggctactggatctccaccccggcggattatatcgtcgcgaaccccagcaccctgaccggttctatcggtatctttggggtaattaacaccgtcgaaaatacgctcggctcgattggcgttcataccgatggcgtggccacctctccgctggccgatgtctccaccactaaagcgcttccgccggaagtacaacagctgatgcagctcagcatcgaaaacggctataagcgctttatcaccctggtggcgaacgcgcgtaagagcacgccggaaaaaatcgaccaaatcgcccagggccacgtctggaccggtgaagatgcgaaagcaaacggtctggtcgacagcctcggcgactttgacgacgcggtggcaaaagccgccgagctggcgaagctgaaagagtggcatatcaattattatcaggaagagccgaccttcttctcgatggtggtcgatagcctgaccggttcggttcgcgcggcgctgccggcggcggttcaggcttatttgcctgcgccggtggccgctgcggctaatgcagtgaaaaacgaaagcgacaagctggcggcctttaatgatccgcagaatcgctacgccttctgcttgacctgcggcaatattcgttaa

SEQ ID NO: 175073 - DNA, 552 bp, Klebsiella oxytoca
atggatgctctcgaactactggttaatcgccgcagcgcttcacgtttgaccgatccggcgccggctggcgaacagctggaaaacatccttcgcgcggggctgcgcgcgccggaccacggaacgctacagccgtggcgcttcttcattattgccgatgatgggcgcgagcgcttcagccagctgctggaaaaaggcgccgtggcggcaggcggagatgaaaaggcgattgaaaaagcgcgcagcgcgccgttccgcgcgccgctgattattgcggtggtggcgcgctgtgaagatcatcctaaggtccccaggtgggaacaagagatgtcggcgggctgcgcggtgatggccatgcagatggcggccgtggcgcagggctttaacggcatctggcgcagcggtgcactaaccgagagtccggtcgtccgtgaagggtttgcctgccgcgagcaggataaaatcgtgggctttctttatctgggaacgccgcagctcaaagcttcaaccaccatcactttgccggataccgcgccgttcgtgacgcgcttctga

SEQ ID NO: 175074 - DNA, 747 bp, Klebsiella oxytoca
atgaaaaagcgtgttctcgccctttgcctggccagtttcttctccatcaacgctttcgccctggttcccgccggtaacgacgtcaccaccaaaccggatctctactacctgaccaatgcgcaggctatcgacagtctcgcgctgctaccgccgccgccggaggtgggcagtatcgcgtttttaaacgatcaggccatgtatgagaaaggacgcctgctgcgcggcaccgagcgcggcaaactggcggcggaagacgcaaacctgagcggcggcggcgtcgccaacgccttctcgggtgccttcggctcgcccattaccgccaaagatgcgccggagctgcacaagctgctcaccaatatgattgaagatgccggcgacctggccacgcgaggggcgaaggagaaatacatgcgcattcgcccctttgcgttttacggagtcgccacctgtaacaccaaggaacaggatacgctatcgaaaaacggctcctacccctccggccacacctctatcggctgggccaccgcgctggtgctggctgagattaatccgcagcggcaaaatgaaattcttaagcgcggctttgagctgggtgaaagccgggtgatctgcggctatcactggcagagcgacgtcgacgcggcgcggattgtcggttcggcggtggttgccacgctgcataccaacccggccttccagcagcagcttcagaaagcgaaagacgaattcgccaaacggcagaagtaa

SEQ ID NO: 175075 - DNA, 1044 bp, Klebsiella oxytoca
atgagcgagcaagccattcgtttaacgcaatacagccacggagccggttgcggatgtaaaatttcccctaaagtgctggaaaccatcctgcagagcgaccaggccaaatttattgacccgaatctgctggtggggaatgaaaccagcgatgatgccgcggtctacgatctcggcaacggtacctcgattgtcagtactaccgacttttttatgccgatcgtcgataatccgttcgactttgggcgcattgccgcgacaaacgccatcagcgatattttcgctatgggcggcaagccgataatggccatcgctatcctcggctggcccatcaatacgctggcgccggaaattgcccgtcaggtagttgatggcgggcgttttgcctgccagcaggcggggatcgcgctggccgggggccactcgattgatgcgcctgaacccatcttcggtcttgcggtgaccggcgtggttccgaccgagcgggtgaagaaaaacagtaccgctcaggccggatgcaaactctacctcacgaaaccgctgggtatcggcgtgctgaccactgccgagaaaaagtcgctgctgaagccggaacatcaggggctggcgacggaaaccatgtgccagatgaacctcgtcggctcggcgttcgccaacattgacggcgtgaaggcgatgaccgacgtcaccggcttcggactgctggggcatctgagcgaagtgtgccgcggcgcgggcgtacaggcgcaactcacctatgccagtatcccgaaactaccgggcgtggaagagtatattgcggccggtgcggtgccgggcggaaccgggcgaaactttgccagctacgggcatctgatgggcgaaatgccgcctgagtggcgcgatctgctgtgcgatccgcaaacctccggcggcctgctgctggcggtaacgccggaagccgaggacgaggtgctggcagcagccgctgaatatggcatcacgctgaccgctatcggcgagctggtgaccgcccgcggcggacgccctatgatcgagattcgttga

SEQ ID NO: 175076 - DNA, 1956 bp, Klebsiella oxytoca
atgcggctgtttattgcagaaaagccgagtctcggccgcgccattgccgatgtgctgccaaaaccgcatcgcaaaggcgacggctatattgaatgcggcaacggacaggtggtcacctggtgtatcggccacctgctggagcaggctcagccggacgtctatgatgagcgctatgcgcgctggaatctgctcgacctgcctatcgttccggaaaagtggcagctccagcccaagccctcggtgaccaaacagcttaacgtgattaagcgtttgcttggcgatgcgcaggaagtgatccacgcgggtgacccggacagagaaggtcaactgctggtggacgaggtgctcgactacctgcagctggcgccggaaaagcgccagcaggtgcagcgctgcctgattaacgatctcaacccgcaggcggtggagcgggcgattaaccgcctgcgcgccaatagcgagttcgttccgctgtgcgtctcggcgctggctcgcgcccgcgccgactggttatatgggatcaatatgacccgcgcctacaccatccttgggcgtaacgcgggttatcaaggggtgctatcggtcggacgcgtgcaaacgccggtgcttggcctggttgtacgccgcgatgaagagattgaaaacttcgtcgccaaagacttcttcgatgtgaaggcgcatatcgtcaccccgaaggaggagcgttttgtcgccacctggatccccagcgaggcctgtgaaccctaccaggatgaagagggacggctgctgcatcgttcgcttgccgaacatgtggtcaagcgcattgagggccagccggcgacggtgaccgcttataacgacaagcgggactccgagccagcgccgctgccgttttccctctcggcgctgcagattgaagccgcgaagcgcttcggatttagcgcgcagaacgtgctggatatttgccagaagctgtatgaaacccataagctgattacctatccgcgttcggacagccgctatctgccggaagagcattttgccggaagacatgcggtgctgaacgccatcagcgtacatgcgcctgacctgctgccgcagccggtggtggacccggagatccgcaaccgctgctgggacgataaaaaggtcgatgcccaccacgccattatccccaccgcgcgcagttcgcaggtgaagctcagcgacaacgaagaaaaggtttacaccctgattgcccgccagtatctgatgcagttctgcccggatgcggtgttcagaaagtgtcagatcgatcttgatatcgccaacggtaagtttgtggccaaggcgcgttttctggcagaagcgggctggcgaaccctgttaggcaataaagagcgcgatgaagaaaacgacggcatgccgctgccggtggtcgctaaagatgatgagctcctgtgcgaaaaaggggaagtggtggagcgccagacccagccgccgcgtcactttaccgacgccacgctgctgtcggcgatgaccggtattgcccgctttgtgcaggataaagacctgaagaaaattttgcgcgccacggacggtctcggtacggaggcgacccgcgccggaattatcgagctattgttcaaacgcggttttctgaccaagaaagggcgctatatccactctaccgatgccggcaaggcgcttttccattcgttgccggagatggcgacgcgtccggacatgactgcccactgggagtcgattctgacgcaaatcagcgagaaacagtgccgttatcaggatttcatgcagccgctggtcgggacgctgttccagcttattgaccaggcccgtagcacgccggtacgccgcttccgcggaattgcggcgccgggggaggggaagaaaagctttagcaaggggaaaggcagagccaaagcgaaagataaaaaaagcgctgccggccctgcggcggaaaacccgcagtaa

SEQ ID NO: 175077 - DNA, 1344 bp, Klebsiella oxytoca
atggatcagacgtgcactctggaaggttttctcgcccgcgttcaacagcgcgatccaaatcaaactgaatttgctcaggccgtccgcgaggtgatgaccaccctgtggcccttccttgaggaaaatccgcgctatcgccagatgaatttgctggaacgtctggttgaaccggagcgtgctatccagttccgcgtcgtttgggttgatgaccgtaaccaggttcaggttaaccgcgcatggcgcgtgcagttcaactccgccatcggcccgtacaagggcggtatgcgttttcacccctccgtaaacctgtcgattctgaaattccttggctttgaacaaaccttcaaaaacgccctgaccaccctgcctatgggcggcggtaaaggcggcagcgatttcgatcctaaaggcaagagcgacggcgaagtcatgcgtttctgccaggcgctgatgaccgaactgtatcgtcatctggggccggataccgacgtgcctgccggtgatatcggcgtaggcggtcgtgaagtcggctttatggccgggatgatgcgtaagctctctaacaacagcgcctgcgtatttaccggcaaaggtctctccttcggcggcagcctgattcgtccggaagccaccggctatggcctgatttacttcaccgaagcgatgcttaagcgccacggtttgggctttgaaggcgctcgcgtggcggtttccggctctggcaacgtggcgcagtacgccatcgagaaagcgatggagcttggcgcgcgggtgattacagcgtccgactctaacggcaccgtcgtcgacgaggcaggcttcaccaaagaaaaactggcgcgcctgatcgacattaaagagcgttgccatggccgcgtagcggattacgcgcgcgagtttggcctgacctatctggaaggcaaacagccgtggtccgtaccggtggatatcgcgctgccgtgcgcgacgcagaacgagctggacgtcgatgccgcccgtcagttgatcgctaacggcgtgaaggccgtagcggaaggcgccaatatgccaaccaccatcgccgccaccgatctgttccttgaagcgggcgtactgttcgcgccgggtaaagccgcgaacgccggcggcgtcgccacctccggcctggaaatggcgcagaacgccgcgcgcatgggctggaaagcggaaaaagtggatgcgcgtctgcaccacatcatgctggatattcaccacgcctgcgtgcagtacggcggcgaagcgaagcagaccaactacgtgcgcggcgccaatatcgccggtttcgtgaaggttgctgacgctatgctggcgcagggtgtgatttaa

SEQ ID NO: 175078 - DNA, 411 bp, Klebsiella oxytoca
atgctaaaaacttttgatgttgttgccgccattatcgaacgcaacgggcaaattttgctggcgcagcgccctccccacgcggatcagccggggatgtgggaatttgccggcggtaaagtcgaacccggcgaaacccaggccgaggcgctggcccgcgagctccgggaagagctggagatcgacgccagcccgggatgctatatcgccagccatcggcgcgaaatttccgctcgcctgattcatcttcacgcctggtgggtccctcattttagcggcgaacccatcgcccgctatcacagtcagctgcgctggtgttccccgcaggaggcctttagcttcaaccttgcgccagcggacatccccctgctggaagcctttatcgcccagcgcgccgatctcctctcccgctaa

SEQ ID NO: 175079 - DNA, 618 bp, Klebsiella oxytoca
gtgcttgatcgttatctgcatccgcgtttgaaacctgccctcaacgccaccgccgctctgctggatcgtccagccgtttctcccgacggtctgaccctgcttggctttgcaattggcgtactggcgctgccgtttttagccctgggctggtatcaggcggcgctggcggcgatagtgcttaaccgcctgctggacggcctcgacggcgcactggcccggcgacgcggattgaccgatgcgggcggttttctcgatatttccctcgattttctgttttacgccctggtgccgtttggctttattctggccgacccggcgagcaacgcgctggcgggcggctggctgctgttcgcgtttatcggtaccggcagcagctttctcgcctttgccgcgctggcgacaaagcatcagatcgccaatccgggctacgcccacaaatcgttttactatcttggcggattgacggaagggacggaaaccatcgcgctgtttgtgctgagctgtctgttcccggcatggtttgcctggctggcgtggatttttggcgcgctgtgctggctgacgacctttacgcgggtgtggagcggatacctgaccctgaaacaggtaaaagagtga

SEQ ID NO: 175080 - DNA, 222 bp, Klebsiella oxytoca
ttgaccattaataccgagtatatcgaaaatcttattctgacatttatggtgggtttgcccatcgtggctactgtcgccgttgcatggcaaacctggcataaacacaaatccgatcccgatactttcggcaaacactggcgcgtatggcgcaatgcgatcctgacactaattctcagcgctggggtgggttttggcctggttctggccagccttacaaactaa

SEQ ID NO: 175081 - DNA, 1296 bp, Klebsiella oxytoca
atgaaacgtgtttctcaattgaccgcactcgccctcctgatggggcttgctgcttccacctccgccgctgaatccatgccaacgctaacgctctccacgctgcaacagcagaacggcgtcgctattgatacgcgtctcagcgctttctataacggctggccgcaaagcgctaacgggcctcagggtcatgaaccgcaggcgcttaacctgtcagccagctggcttggcgcgatgaacgacgaacagctgagcgcctgggctaagctgcacaatctgcagacctctacgccaattgcgctatacggcaacgccgaagacaacgcgaaagtcgcggcgcgccttcaggctgctggtttcactcatctcagctccctcggcgatgccctgagccaggcaggtcgcctgcaaaagctgccgcattttgaacagctggtatatccgcagtggctgcacgacctccagcgcggcgagccggttaccgccgcgcctgccggtgaatggaaagtttttgaagccgcctggggcgcgccgaagttttatctgctgagccatattccgggcgccggttatatcgacactaacgaggtggagagcgaaccgctatggaataaagtgtccgacgcgcagctaaaagcgatgctggcaaaacacggcattcgccatgacaccacggtaattttgtacggtcgcgacgtgtatgccgccgcccgcgtggcgcagattatgctctacgccggcgtgaaggatgtgcgcctgctcgacggcggctggaagacctggtccgatgccggtctgccggttgagcgcggaacgccgccagaacagaaacctgaaccggattttggcgcccccatcccgggccagccgcagctgatgctcaataccgagcaggctcgcgccctgctgcatcgtcaggatgcttcgctggtcagcatccgttcctggccggagtttatcggtaccaccagcggctacagctatatcaagccgaagggcgaaattgccggggctcgctggggtcatgccggaagcgattccacccatatggaggatttccataatccggacggcaccatgcgtagcgctgatgatatcgccgcgatgtggaaatcatggaatattctgccgagccagcaggtctctttttactgcggcaccggatggcgcgcctcagaaacgtttatgtacgccagggcgatgggctggaacaacgtctcggtctacgacggcggctggtacgagtggagcagcgatccgaaaaatccgattgcgactggcgatcgcaagccggagtga

SEQ ID NO: 175082 - DNA, 633 bp, Klebsiella oxytoca
atgttgatcgtcaaaaacctgactctcagactcaacgggcagccgctgctgcgcgacgtcgatttttcggtcgcagcgggcgagatattgacgttgatgggcccctccggcagcggcaaatcgacgttgttcgcctggatggtgggcgcgctggcggaagatttccgcgccgcaggggagctgtggctggataaccagcgctgcgacagtttacccaccgagcggcggcgtatcggcatcctgttccaggacgcgctgctgtttgaccacttcagcgtcggacaaaatctgcggctggcgctgcccgctgacgtccagcgttcccagcgcaaaccgcaggtagaacaggcgctggagcgcgccggtctggagggtttctacagccgcgatccggccaccctttccggcggccagcgggcgcgggtcagcctgatgcgcgccctgctggcccgaccgcgggcgctgctgcttgatgagccctttaatcgcctcgacattgagctgcgcgccgattttcgccgctgggtattcgacgaactggcgcggctggccattccggcgctgctggtgacgcacgatcgccaggactctcccgtcggcgggcgctgtttacatatgagccagtggcaatga

SEQ ID NO: 175083 - DNA, 1536 bp, Klebsiella oxytoca
atggctgcgccgctacggcacgcactaaggctgctggcctgggccgccgtcgcgctgatctatctcccgctgctgccggccgtttctctgatgacgcttccggcgctgcgcctgacgctttggcagtcgctggttgccgatccgcagttctggcaggcgctggcggcgactctcgtctcaaccctgctctcggttggcggcgcgctgatcatcacgctctcggttgttgccgcactctggccatcaagcggttggcgccggctggcagccaggctgccgctgctgctggcggtaccccatgtcgccttcgctaccgccgccctgctgctatttgctgaaggcggctggctctctcgcctgctgccctttttcattccgccagttgaccgctacggcattggcctgggtctgacgatggcggtcaaagagagcgcatttctgttgtgggtggtttacggcctgttaggtgagaaacggctggcgggacaggcaacggtattaaaaagcctcggctacggccgctggcagtgcctgaagtggcttgtgctacccgccctgctgccagcgctggcgatcgcgctgctggcgaccgccgcctggagcctttcggcggttgatgtcgcgctggtaattgggccgggcaacccgccgacgctggcggtgctggcctggcaatggttgagccagggcgatgaacaacagcaggccaaaggggcccttgccagcctggtattactgctgacgctcgtcatgatggcgctgctggcatggggagcctggcgcgtctggcggcggcggatcccaccggttcaggggatccgccgcccgcagccgcgggcgctcgtcgggaaaagcttcgcgattctcctgccgctgtgtggcgtgctctgcgcgctgctgctggcggcgacggcgcagagtcgtgctccgctcggcgatagtatcggcaacagtctgtggctcggtctctgctctgcgcttctcggcgcggtcgtttgcctgctgtggctggagcttggcccttcccgcttcggcggctggatctggctgccgctaattttaccggcgctgccgctggtggacgggcaatatcagctggcgctgtatacgtggcaggacggcgagtggcttaccgttttatggggccatctgctatgggtggtaccatggatgctgtttattctgcatcccgcgcgtcgcgcggccgatccgcgcgcggagttggttgcccgaaccctcggctggcatcaggggcgtatcttctggctggtcaccttacctgccctgacgcgtccgctgctgacggcgctggcggtgggcttttcggtaagcattgcgcaatatctaccgacgttatggctgggaggcgggcggatcccaacgctgaccagcgaagccgtggcgctgagcagcggcggcgatatcgccaccctcgccgcgcaggcgctgtggcagttgctgctaccggcggtattctttgctctcaccgctctgctggcctggccgattggccgctatcgacaaggattacgctaa

SEQ ID NO: 175084 - DNA, 1161 bp, Klebsiella oxytoca
atgcgtagtttgttggtcttcgctttgctgttgctttctccgctgtccgccagcgccaactggcaatccacgcaacaagaggctcgcggccagacggtgtggtttaacgcctggggcggcgatccggcggttaaccgctatctcgactgggtcagcgaagaggtgaagcgcgactatgccatcgatctgcgcatcgtgcatatcgccgatgccgccgacgcggtaaagcgcattcaaagcgaagcccgcgccggacgcagttctggcggttctatcgacctgctgtgggttaacggcgagaatttccgcaccctgaaaagcgcaaatctgctgcaaacccagtgggcggaaaccctgcccaactggcgctttgtcgatacgcaaaagccggtgcgcgaagatttctccattcctaccgacggggcggagtcgccgtggggcggcgcgcagctcacttttatcgcccgccgttcgcaaacgcccgacgcgcccaacgatccgcaggcgctgctggctttcgccgccgcgcaccccggtagcgttacctatccgcggccgccggattttaccggtaccgcctttctcgaacagctgctgctgacgctgaccccaaatcctgacgccctgcgtcagccgccgcaagaggccaacttcgccgccgcgaccgcgccgctgtggcaataccttgaccagcttcaccctctgctatggcgcgagggccgcgacttcccggcttcgcccgcccgtatggataccatgctgacgaacggtgtcctcaggctgtcaatcaccttcaacccgctgcacgcgcagcaaaaagcggccagcggcgagctgccgaaagacagctacggcttcggttttagccaggggatgctcggcaacgtccactttgtggcgatcccggttaacgcccgcgcgacggcaggggcgaaagttgtcgccaatttcctgctctcaccgcaggcgcagctgcgcaaggccgacccggcggtgtggggcgaccccagcgtgctggatccggcgaagttaacggcagatgagcgccagtccttcaacgccgttgtgccgcaggatttgccgccaatgctgggagaaccgcactcggcctgggtagaagcgctggagcaggaatggctgcgccgctacggcacgcactaa

SEQ ID NO: 175085 - DNA, 552 bp, Klebsiella oxytoca
atgagcttaccccccctgaagtcaattcccctgattctgcgcccgcaggcctggctgcatcgccgccactacggcgaggtgctgagccctattcgctggtggggtcgcattccgctggtcttttatctggtgtcgatgttcgtcggttatctggaacgcaaacgctcgcccctcgagccggtgctgcgttcgctggtcagcgcccgcatcgcgcagctgtgtttgtgcgagttttgtattgatatcaccagcatgaagctggcggagcgcagcggcggcagcgataaactcctggctgtagccggatggcgagatagcgcgctattcagcgaacgcgagcggctggcgctggagtatgccgaagcggccagcatgacgcctccggccgtcgacgacgcgctgcgcgataagctggcgggacagtttgatgctcaagcgctgaccgaactcacggcgctgatcgggttacaaaacctgtcagcgcgctttaattcggcgatggcgatccccgcccaggggttatgccagcttcccaccgattcgaaaccataa

SEQ ID NO: 175086 - DNA, 744 bp, Klebsiella oxytoca
atgcccgctatcggcggatcgacacgcaacggtggcgaatcaacgatgaaaaatagccaggcgatctaccggataatcattggcgctacgctgctggcggggctgctggcatggtggctgatccccggcgttaatgggtttatgcagcgcagcctcgccgcctttgccacgctcgatcagctggctattgagcgttttatcgactcctgggggccgcaggcggccctggtctcctttgcgctgatgattctgcaggcgattatcgccccgcttcccgcttttctcatcaccttcgctaacgcttccctgttcggcgccttctggggcggcgcgctatcgtgggtgagcgccatggccggggcggcgctgtgttttttcatcgccagagtatttggccgcgaagcggtggaaaagctgaccggcaaaagcgtattgcagagtatggatggcttttttacccgctacggtaaacacaccatcctggtttgccgcctgctgccctttgtaccttttgatccggtaagttacgcggccggactgacctcaatacgctttcgccattttatgctggctaccggtctgggccagttgcccgccacgatagtctactcgtggaccggcagcctgctgacgggcggtacattctggctggtaaccggtttatcgatcctgtttgcgctggcgatcctggtggtcgtcgcgaaagcactctatcttgaacaacaaaagaggcgttcacgatga

SEQ ID NO: 175087 - DNA, 663 bp, Klebsiella oxytoca
gtggtcatcctgagcattttcgcctgtattatccagcagtcgggttttgccgagctggtcactcatttccaccatctgcgcgaaatgatccgccaaagcggtggcttcgggtatgcgctctatatcttgctgtttattatcgctaccctgtttttgattccgggcagtgcgctggtcattgccggcggtgtactttttggccctctgacgggaaccttgctatcgctgctggcggcgtcggtcgcctcctccctgtcgttcctgctcgcccgttggctgggccgcgagctgctgcttaaatacttcggagagacggcgatattccaggcaattgaaagaggcattgaacgtagcggctgcgactttttaattctgacccggttagtcccgctgtttccctataatattcagaattacgcctatggcctcacggctatttcattctggtcgtttacctttatttccgccataaccaccttgcccggcatatttatttatacgctgatggccagcgaacttatccgcgacggtatcacttccctttttgtgctaaagctaacgcttgccgggctggtgttatttgtcctgattcaggcagccaaaagatatgcccgctatcggcggatcgacacgcaacggtggcgaatcaacgatgaaaaatag

SEQ ID NO: 175088 - DNA, 807 bp, Klebsiella oxytoca
atgaaatttgtctcttttaatatcaacggcctgcgtgcccgcccgcatcagctggccgccatcatcgacaaacaccagcccgacgtcatcggcctccaggaaaccaaagttcacgacgatatgtttcctctcgaagaggtagcaaagctgggctataacgtcttttatcacgggcagaaaggccattacggcgtcgcgctgctaaccaaagagacaccgatctcagtgcgccgcggcttccccaacgatggtgaagaggcccagcgccgcattatcatggcggaaatcccgtctccgtttggcaacgtgacggtaatcaacggctatttcccgcagggcgaaagccgggatcatgaaaccaaattcccggcgaaagcggccttttatcagaatctgcagaactaccttgataccgaactgaataaagagaatccggtgctgattatgggcgatatgaacatcagccctaccgatcttgatatcggcatcggcgaagagaatcgcaagcgctggctgcgtaccggcaaatgttcattcctgccggaagagcgcgaatggatggagcgtctgctgggctggggcctggtggatacgtaccgccatgcgaacccgcaggacaacgaacatttctcatggttcgactatcgctctaagggctttgacgataaccgcgggctgcgtatcgacctgctgctggccagccacccgctggcgcagcgctgtatcgagaccggcatcgactacgaaattcgcggcatggaaaaaccctccgaccatgccccggtatgggccacctttaaagtctga

SEQ ID NO: 175089 - DNA, 1221 bp, Klebsiella oxytoca
atgtctcagtcaattacgcgtagcaactttgatgaatggatgatgcctgtatacgcgccagcggcttttattccggtacgcggcgaagggtcacgcctgtgggatcagcaggggaaggagtatatcgattttgccggcggcattgcggttaatgccctcggccatgcgcacccgcagctggttaaggcgctgaccgaacaggcggagaaattctggcataccggcaacggctataccaatgagccggtactacgtctggctaagcagctcattgacgccacttttgccgaccgggtctttttctgtaactcgggggctgaagccaacgaagcggcgctaaaactggcgcgcaaatatgcccacgatcgtttcggcagtgagaaaagcggcatcgtggcattcaagaatgccttccatggccgcacgctgtttaccgtttctgcgggcggtcagccggcctattcacaggattttgcgccgctgccgccgcagattcagcacgctatctttaacgacctcgactcggcaaaggcgctgatcgacgacaatacctgcgcggtgatcgttgaaccgatgcagggggaaggcggcgtcgtaccagcggatgtggaattcctgcgcggcctgcgtgagctgtgcgatgcgcacaatgcgctgctgattttcgatgaagtccagaccggcgtcggccgtaccggggagctgtacgcctatatgcactatggcgtgacgccggacgtgctttccaccgcgaaagcgctgggcggcggtttcccgatcggcgcgctgctggcaacggaacgctgcgccagcgtaatgaccgtgggtactcatggcaccacctacggcggcaacccgctggcctgcgcggtggcgggggaagtctttgccatcgtcaacacgcgtgaggttctcaacggcgttaagcagcgccatcagtggtttagcgaacggctcaacgccatcaacgcccggtacggcctgtttaaagaggttcgcggtctggggctgcttattggctgcgtgctgaaagatgaatatgccggcaaggcgaaaaacatcagcaacctggcggcggaggacgggctaatgatgctgattgccggcgccaacgtgttgcgcttcgcaccggcactgattatcagcgaagacgaagtcaatagcggcctggatcgcttcgagctggcctgcaaacgctttctctcgggggtctcatcatga

SEQ ID NO: 175090 - DNA, 1035 bp, Klebsiella oxytoca
atgatggtgatccgtccagtcgaaaaaggtgacctgccggggttaatgacgctggcaggcgaaaccggcggcggcctgacatcgctgccggccgatgaggccacgctggccgcgcgcattgaacgttcacagatgacctggcgcggcgagctgccgaaaagcgaacaggggtatgtattcgttctggaggattgcaccagcggcgcggtggcgggaatttgcgccattgaggtggccgtagggcttaacgacccctggtacaactatcgcgttggtacgcaggtccacgcatcgaaagagctaaacgtctataacgccctgccgacgctgtttctcagtaacgaccataccggcagcagcgaactgtgtaccctgttccttgatccaaaatggcgaaaagagggcaacggctatctgctgtcgaagtcgcgttttctgtttatggccgcctttcgtgaacgcttcaacgataaggtcgtggcggaaatgcgcggcgtaattgatgagcacggctactcgccattctgggagagcctcgggaaacgcttcttcgcgatggagttttcccgcgccgactatctgtgcggcaccgggcaaaaagcgtttatcgccgcgctgatgccgaagcacccgctgtatatcgacttcttaagcgatgaagcgcgggcggttatcggcgaggttcatccgcaaaccgccccggcccgcgcggtgctggaaaaagagggattccgctatctcaactacgtcgatattttcgacggcggtccgacgctggaatgcgaaattgacagggtgcgggccatccgcaaaagtcggctggttaccgtcgttgaaggcgaacccgaggcgggagagtggccgccatgcctgatcgccaatgaacagtaccatcactttcgcgccatgctcgttcacgcggacccggatagcgaccgcctggtgctaagcgcgcgtgagctggatgccctgaaatgccattccggtgaacaaattcgcctggttcgcctgtgccctgaggagaaaaaatcatga

SEQ ID NO: 175091 - DNA, 1479 bp, Klebsiella oxytoca
atgagtttatggatcaatggcgactggcaaagcggtcgcggcccggcccgacaaaaacataacccggtaagccaggcgctactgtggcagggacaggatgccgatgctgagcaggttgcgctggcggtcagcgcggcgcggcgggcattccccgcgtgggcgcgccagccgtttgccgcccgcaaagcgatagcagaaaagtttgctgctttacttgacgcgaacaaagctgaattaaccgccattattgctcaggagaccggcaaaccgcgctgggaagcggcgacggaaatcaccgcgatgatcaacaaaatcgcgatttcagtaaacgcttaccatagtcgtacgggggaagcgcaaaccgcactggccgacggcgcagccactctgcgtcaccggccgcacggcgtactggcggtgtttggtccctacaattttcccggacatttaccaaacggacatattgttccggcgctgctggcgggcaataccgtggtgttcaaacccagcgagctgaccccacagagcggcgaagcggtggtaaggctttgggcagaagccggcctgccgcccggggtgcttaacctgcttcagggcggtcgcgagaccggcgaagcgctgagcggtcagtcagatatcgacggtctgctgtttaccggcagctctgccaccggctttcagctccatcgccagcttgccggccagccggaaaaaatactcgctcttgagatgggcggcaacaatccgctgatcgtcgatgagccgcaagatatcgatgccgccgttcatctcaccattcagtcggcatttattactgcaggccagcgctgtacctgcgcgcgtcggctgttggtgaagcgcggtgaggctggcgatgcgtttcttcgtcgtctggtgacagtgtcacaaaaattgatccctgacgcctgggatgcagagccgcagcctttcctcgggggactgatttcagcacaggcggcgcagaaagtgcatcaggcctggctgacacacgtctccaacggcggccaaacgctgctggagccgcgtctgctacaggccgaaacgtcgctgctgacgccgggtattatcgacatgagcgaggtcgcgcaggtggccgatgaagaggtttttggcccactgctctgcgtctggcgttacgaccatttcgatgaggcgattgcgcttgctaactcgacccgcttcgggctttcctgcgggctgatctccgctgaacgcgagaagttcgaccagctgctgctggaggcgcgcgccggtatcgtgaactggaataaaccgctcaccggcgccgccagcaccgcgccgtttggcgggaccggtgcttccggtaaccatcggccgggggcctggtacgccgcggattattgcgcctggccgatggccagcctggaatcgccggagctgtcgctcccggtcgcgctcagcccgggtctggattttggccaggagagctcacaatga

SEQ ID NO: 175092 - DNA, 1326 bp, Klebsiella oxytoca
atgaacgcctgggaagtgaactttgacgggctgccgggcctgacccatcactatgcgggattatctttcggcaacgaggcttcgaccaaacaccgctatcgggtgtcaaatccgcagctggcggcaaagcaggggctgaaaaaaatgaaagccctggcggatgcgggctatccgcaggggatcatcccgccgcaggagcggccaaacatccccctgttgcgccagattggctttagcggtagcgatgagcaggtgctggaaaaagcgtcgcgtcaggcgccggagctcctctcggcggccagttcagcctcatcaatgtgggtggccaacgccgctacggtctcgccatcagcggattcgctggacggccgggtgcatctgaccgtcgccaacctcaatgataaattccaccgcgccagcgaagcgcctaccaccgaggctttgctgaaggcgattttccccgatgagcagcggtttgccgtacacggcgcgctgccccaggcctcgctgttcggtgatgaaggggcggcaaaccataaccgtctcggcggcgactacggcgcccctggcgtgcagctgtttatttacggtcgtcagcagggtggggaagagagcccgcagcgctacccggcgcggcagacgctggaggccagccaggccgttgcccgcctcaacctggtcaacccccggcaagtgattttcgcccgtcaaaacccggcggtgattgataagggcgtatttcataacgatgtgattgcggtaagcaatcagcaggtgctgttttgtcatgagcaggcgtttgtcgatcagccgcagctcctgcagcaactgacggagcgggttgctggttttacgccgcttgtggtgccgacgggtcaggtatcggtagaagaggcggtggcgacctatctgttcaacagccagctgctgagcaaacgcgagggcggaatgcggctgattctgccgctggaagcgcaggagcatccgggcgtctggcgttatctgaaccgactggtggagggcgataacccgattgatgagcttcaggtttacgacctgcgcgagagcatggccaacggcggcggcccggcctgcctgcgtcttcgggtggtgctgactgagaacgagcgacgagcggtgaatccggcggtcatgatcgacgacgcgctgttcgccactttgaatgattgggtagaccgctactatcgcgatcgcctgacccaggccgaccttgcggatccgcagctgctgcgcgaaggtcgcgaagcgctcgaccgcctgacgcaaatcctgcgcctcggctccgtatatccgtttcagcaataa

SEQ ID NO: 175093 - DNA, 963 bp, Klebsiella oxytoca
gtggacgactttctggcattaacgctggctgggcgtttgccccaccattttcatggccaaacggcgcacttccgctggcactggattgactgcggtatactgcagctcattccccatgagccctgcgagcgctcgctggtattgtccgccgggatccacggtaacgaaaccgcgccggtcgaaatcacggatttactgctgcgtcagttgttcagcggggagttgccgttacgctggcggttgctggtggtcttcggcaatccttcggcgctgagggccaataaacgctatctgcacagcgatattaatcggatgtttggtgagcgctggcgggctttcagcgtcagcgatgaaaccgctcgcgcccggcaactggagcatgcgctggcgcgcttttatgcgccgggtagcggtgagcgctggcacctggatttacataccgctattcgcggatcgctgcatacgcgctttggcgtcctgccagcgcgcgataagccgtgggatgaagcattcctgggctggttggggtcggctggcctggaagcgctggtctttcatcagcagccgggcggcacctttacccatttcagtagcgaacgtttcggcgcactctcctgcacgctggaactgggaaaagcgcttccttttggcgacaacgatctcagcctgtttgccgcgacgcagcgcgcgctggcgcgtctgctggccggcgagagggcgttggctgccggtgattcgccgctgcgctacagagtggtgcagcaaattacccgcagcagcgacaaatttcagctgcatatgtcggcgcagacgctaaacttcacccccttttctgccgggacgctgctggctgaagatggcgaaacccgctatgtcgcggctaaggagccagaatatgtgctgtttcccaaccccgacgtagcttttggccagcgagccgggctgatgctcgaacgcttctga

SEQ ID NO: 175094 - DNA, 483 bp, Klebsiella oxytoca
atgaaaaagattacagctctgtttgttgcctctactctggctcttggcgcggctaacctggctcacgcggctgatactacggcaacctcaggcgagaccgcgccgatgatgcatcataagcgcggcccggcgggcccacatgaaatgatgtttaaaggtctgaacctgaccgacgcgcagaaaacgcaaattcgcgacatcatgaagagccagcgcgacaatatgaagcgtccgtccctggatgagcgccgcgcgatgcatgaactggttgccagcgataccttcgataaggcaaaagcggaagcgcagattgataaaatggaagcccagcataaagaaatggcgctggctcgactggaaactcagaacaagatttacaacattctgaccccggaacagaaaaaacagttcaatgctaattttgagaagcatctgacagatcgtaaagcgccggaaggtaaaatgcctgcaccagctgaataa

SEQ ID NO: 175095 - DNA, 543 bp, Klebsiella oxytoca
atggaaatgtatatcggcctcgccgtcctcgttgtcgtcctcgtctgggttatcatgacctataaccgctttatctccctgcgtcgtttcaaagacgaggcctggagcggtgtcgctgtgcagcttaagcgccgccacgatctggcgcccaatctactgagtctggtgaaacgctatgcgctgcacgaaaaggaattgctggaagaactgggccgccagcgtagcgtactggtcggcagcaccaaacagatagccgacagcgaacgccactattccgctacgctgggacgtattttcgcgctcggcgaagcctggccggaactcaaagccagcgacaacttcctctcattacagcaatcgcttaatgaaatagaagagcagctgcagatggctcgccgctacttcaacggtacggtgcgcgatttgaatattctggtcgagtctttccccagcctgctgctggcgcgactatttaaatttaaagcagaagctttctttgaactggactcaccggaagaagctcaatctccacggatggagtga

SEQ ID NO: 175096 - DNA, 2043 bp, Klebsiella oxytoca
atgctctgtataactctgcgggtagtgcgcgcgttcgtattgttgttgctgttgcctgccagcgcagcattctccgcaaacaacccgattattattaaagatgcttctcaactccccgctggcgctatcctggcgtatgaacatatcctctcttttgattcccgggcgcgctttagcccgaacggcagcatggcgattgaggagaatatcaaggtacttgccctggggaaggagattcggcgagggattttgcgcacgcttcccctcacgtggaaccgccaggatggcaaaatcttccgtgttgactatacgatcgaatcggtgtcgcgcgatggcatctctgagccatttagccttgatgaggcagcaaaaagcctgacggtacgtatcggcagcggcgaaaagatattaaaaccagggatctatcactatcggattcgctatcaaatcagcaaccatttcagccgatttcccctgtgggatgaactgtactggaacgtgacgggcaatgactgggcctggccaattagcaaggccagctttagcctgacgctaccggatagcgccgcaaatctcaacgctgacgccaaagatgccaggctgcgctcaattgatgtttataccgggatcgctggcgccaaagagcacaacgcaacgattctgcccgacggtagcgtgcgcactctgcgtccgctggcaaagggggaggggctgacggttgtttatacctggccgcgggagatacttgcccgcgctccggcgccggaggccgcttcgccgctggtgcatttacttttccccaacctgaaaacctgggtgatatggctgccgctgctgttcatgctcgtttattatctgctctggtggcggaagaacgtcacccaggccgggttgagaatgccgcctgttgtgccgctcttttcgctgcctgcctccatgtcgccaggccacctgcgttttattacccggcgtaaatatgacgatgtggcttttagcagcgatttatttgcgctggtcgcgaaacgcgggatgacgctgacgagcgacaaaaatccatcccgcagcccgtggcgattaaattccggcatcaaacaacggctgacccgcctccccgttgagggaaacagacggttaaacagagacgatctccagctattaagcaccctatttaaaggcaaacagaaaaatatcgatctcagtaaggcccatcagcggtcagtgcagagtgcgcgtaaacgtcaggagacgcgttgtgaagaacagcgggctaaactctttcgtaaatgggggcaaccgctgcggcgctgcatctacattgcgctgcttgttccggtagcgtgcggtctttgggttaatgcggaggccgcgctgctgacgataccggccgcagtttttatgctgatcggcggttcgctgctggcttttttcttgcggtttctttgtcatcctcgggagatgtggcgcgactggggccccgccccggtactgttttgtgcctcttttggtattttagcgatgctcggcggaagcaattttctgttgggaatgttgcccataacccaacttcccgccggatatattggcgcgctgctgatggcgttcgccctgtgcgtttttgttggctggaaaacgcctcgttatacgcagcgcgggttggatgagctggccgtcgccaaaggactgaagctgtatcttggcaccgctgaaaagaaccgctatcagattatttacccgcctgcgcagatgatctcccattttgaagaactactgcccgtagcgttggcgcttggcgtggggaaaacctgggcgaacacctttgcccactatctgagtagtactggcgctctgtcggaagcgtttgccggtgctggctgggaaagcgtgcatcatttcagcgagtcctgtcgaacctcctctatatcctcgccgaccagcggttcagggggcggttcatcatcgggttcaggctatagcggttccggctcttccggtggcggttcatccggcggcggctcaggcggaggcggcggcggaggctggtaa

SEQ ID NO: 175097 - DNA, 861 bp, Klebsiella oxytoca
gtggcaagaaggcaatccgccccgcgtctcgaatttgaagcggcggcaatctatgagtatcccgaacatctgcgtccgtggcttgaggctctgcccaggcagccgggggtatatctgtttcacggcgaaagcgataccctgccgctctatatcggcaaaagcgttaatatccgcagccgggtattgtcgcatctgcgcacccccgacgaagcggctatgctgcgccagtcacgacgcatcacctggcaacggacggcgggcgagctcggcgcactcctgttagaagcgcagctcattaaggaacagcagcctctgtttaataaacgtctgcggcaaaaccggcagctgtgctcattgcgcctggctgacgcccgaccgcaggtggtttacgccagcgagctggatttctcgcgacaaagcgatctctatggcctttttgccaatcgccgcgccgcgctgcaggcgctgcaaaaaattgccgacgagcatcgcctttgttatggattaatgggactcgagccgctcaaccgcgggcgcgcctgctttcgttcggcgctgggccgctgcgcaggagcctgctgcgggaaggagagcgttgaagcgcaccagcagcgtttggtggaaaatatgcaaaaaatgcagctggtatgctggccatgggccggggcgatcgcgctggaagagcgcagcgaggatatgacgcagtaccatattattcaaaactggctatggctgggcgccgtagaatccctgtcgcaggcctcatcgctcacgcgtctggcggcaaaatttgaccatgatggttataaaatactgtgtaaaccgctgcttagcggccgctataagctgcatccgctgtaa

SEQ ID NO: 175098 - DNA, 828 bp, Klebsiella oxytoca
atgacgctacaacaagagattattcaggcgctgggcgctaaaccccagatcgatgtcgaagccgaaatacgctgcagcgtagactttttgaagtcctatctgcagaaatacccttttattaaatcgctggtcctcggcatcagcggcggccaggactccacgcttgccggtaagctctgccagcaggcaatcaatgagctacgcgccgaaaccggtgacgacagcctgcagtttatcgccgttcgcttgccgtacggcgtgcaggcagacgagcaggactgtcaggacgccatcgcttttattcagccggaccgtgtattaacggtcaatattaagggtgctgtgctggccagtgaacaggcgctgcgcgaagccggcattgagcttagcgactttgttcgcggcaacgaaaaagcccgcgaacgcatgaaagcgcagtacagcatcgccgggatgacccacggcgtggtggtaggtaccgatcatgcggcggaggctattactggttttttcactaaatacggcgacggcggcacggacatcaaccctcttttccgcctcaacaaacgtcagggcaaacagcttttggcccatctggggtgtccggagcacctgtataaaaaactgccgactgccgatcttgaggacgaccgcccctccctgccggacgaagtggcgctgggcgtgacctacgagaacatcgacgactatctggaaggtaaaacgctggacgagaaagtcgctaaaacgatcgaaggctggtatctgaaaaccgagcacaaacgccgcccgccaatcaccgtcttcgacgatttctggaaaaaataa

SEQ ID NO: 175099 - DNA, 339 bp, Klebsiella oxytoca
atgaacaagcattttgcaggatttctgggcgcagcagctgtattaaccatgctggcagggtgtacggcctatgaccgtactaaagatcagttcacccagccggtggttaaagacgttaaaaaaggcatgacccgcgcgcaggttgcgcaaattgctggtaaaccttcatcagaagtgacgatgatccacgcacgcggtacctgtcagacatacatcctgggtcaacgcgatggtaaaattgaaacctacttcgtcgcgctggatgaaaccggccgtgtgatgaattctggttatcagacctgcgctgaatacgataccgacccgcgcaacagtaagtaa

SEQ ID NO: 175100 - DNA, 321 bp, Klebsiella oxytoca
atggaaaagaaacatatctacctgttctgttctgctgggatgtctacatcactgctggtctcgaaaatgcgtgctcaggccgagaagtatgaagtgccggttattattgaagcatttcccgagactctggccggtgaaaaaggacctgatgctgatgtcgtattattaggcccacagatttcctatatgctgccggacattcaacgtttactaccaaataaacccgtagaagttattgattccgtgctgtacggtaagatcgatggtttaggtgttctgaaagcggccgttgcggccattaagaaagctgctgcgcaataa

SEQ ID NO: 175101 - DNA, 1359 bp, Klebsiella oxytoca
atgagtaaagtgattgattcgcttgaaaaggtactccttccgtttgcggtcagaataggaaggcaacctcacgtcaatgcaattaaaaacggctttattaagttaatgccattgacgttagccggggccatgtttgttttaattaataacgtatttttgagctttggcgacggttcattcttttattcaatgggcatccgtctggatgcctcgacaatcgaaacactgaacggttttaaagctatcggcggcaacgtttataacggtacgctaggtattatgtcgctgatggcgcctttctttattggttcggctttagccgaagagcgtaaagttgacccaatggcggccgggttgctggcggttgcggcatttatgaccgttacgccttatagcgtcggggaagcctacgccgttggcgcgaattggttaggcggtgccaatattatttctggtatcgtaatcggtctggtcgttgccgagatgctcacctttatcgttcatcgcaactgggtgattacgctgccgtccagcgtgccggcttcggtctcccgttcattctcagcggttatcccggcctttattatcctgtctattatggggattatctcctgggcgctgacccactggggaacgaacttccaccagatcatcatggacactatctccacgccgctggcctcaatgggtgccgtggtaggctgggcatacgttattttcacctcgctgctgtggttcttcggcgtacacgggtcgctggcgctgtcggcgctcgatagcggcattatgacgccatgggcgctggaaaacatcgcaacctatcagcagtacggctccgttgaagccgcgctggcggcgggtaagagcttccatatgtgggccaagccgatgcttgattcctacattttcctcggcggtaccggcgcgacgctgggcttgatcatcgccatctttatcgcttcccgccgcgaggatcatcgtcaggtggcgaaactggcgctgccgtccggcatcttccagattaacgagcctatccttttcggtctgccgattatcatgaacccggtgatgtttattccgttcattctgattcagcctctgctggcggccatcaccatgacggcgtataccctgggcatcatcccgccgattaccaacatcgcgccgtggactatgccgaccggtttaggcgccttctttaacactaacggaagcgtcgcagctctgctgctggccctgttcaaccttgctgtatcgaccctggtctacctgccgtttgtggttatttccaacaaagcgcagggcgtgattgagcaggaagagagcgaagaagatatcgctaacgcactgaaattctaa

SEQ ID NO: 175102 - DNA, 348 bp, Klebsiella oxytoca
atgtttgatctggataacatcgcagcagaagagaccgcggtaaacgacctcgaagaggtggtgatggggctgattatcaactccggacaagcgcgtagtctggcttatgccgcgctgaagcaggcaaagcagggagattttgcggcggctaaaaccatgatggaacagtcgcgcatggcgctgagcgaagcgcatctggtgcagacccagctgattgagagcgatgagggagaaggcaaaatgaaggtgagcctggtgctggtgcatgcgcaggatcatctgatgacctcaatgctggcacgtgagctggttgccgaattgattgagctgcacgagaaggtacaatag

SEQ ID NO: 175103 - DNA, 825 bp, Klebsiella oxytoca
atgatgaccactgaaatcagtaccgcccgggagcaacaactctttaacggcaaaaactttcatgtggtcatctataacaaaacggagagcgtaagcgggcttcaccagcatgattattacgagtacaccatcgttttaaccgggcgctattatcaggttattaatggcaagcgggtgctgctggagcgcggggatttcgtttttatcccaatggggtcgcaccaccaaagcttttatgaatttggcgcgacgcgcattctgaacgtcggtatcagcaaaagtttctttgaaaaacactatctgccgctgctgccgtttggtctggttgcttctcaggtctatgccgttaaaagtacttttctcagttatattgagtcggttattgcatcactgaattttcgcgaaactgaatttgacgaatttatcgagctggtctccttttatactctgaatcggctccggcattatcgtgaagagcctgcggaagacgtcattccgcaatggctgaaaaataccgtggaggggatgcacgataagcttaagtttggcgagggggcgctggagaatatggttgaactttccgggaaaacccaggagtacttaactcgggcaacccagcgttattacgccaaaacgccgatgcagatgattaacgatattcgcatcaacttcgctaaaaaacagttagagataaccaactactcggtgaccgatattgcctatgagtcggggtacagtagcccaagtttgtttattaaaacattcaagaagctgacttcttttacccccagcagctatcggaaacacctcaccagtattaattaa

SEQ ID NO: 175104 - DNA, 1347 bp, Klebsiella oxytoca
atgagccagaaattgaaggtagtgactatcggcggcggcagcagctataccccggaattactggaaggattcctgaagcgttatcatgaattgccgattagcgaactgtggctggtggacgtcgcggaagggcaggaaaagctcgatattatccatgcgctgtgccagcgtatggtggaaaaagccggcgtgccgatgaaagtctacaagaccctcgatcgccgcgcggcgctggaaggcgcagatttcgtaacgacccagctacgcgttggtcagctcaaggcccgcgagaaggacgagcgtatcccgctgagccacggctatttaggccaggaaaccaacggcgcgggcgggctgtttaaaggtttgcgcactattccggtcatttttgacattgtgaaagatgtgcaggaagtctgtccgaatgcctgggtcattaactttaccaatccggcggggatggtcaccgaagcggtttatcgtcataccggcttcaagcgttttatcggcgtgtgcaatattccgattggcatgaagatgtttatcaccgacgttctgcagctgagcccgagcgatgagctcaatatcgatctgtttggcctgaaccatctggtatttgtgcgcgatgtactggttaacggcgtttcacgctttgacgagctgctggacggcgtggcatcgggtcgattgagcgctaactcggtgaaaaatatttttgatttaccctttagcgaaggactgcttcgttcgctgcgactgatcccttgttcctatctgctctactactttaagccaaaagagatgctggcgattgaaatgggcgaatactacaaaggcggcgcgcgcgcgcaggtggtgcagaaggttgagaaacagctatttgagctgtacaaagatccggatctgaacgttaagccgaaagaactggaacagcgcggtggggcgtattattccgacgcggcctgtgaagtgattaacgccatttataatgacaagcaggccgagcattacgtgaacgtgccgcatcatggtcacgttgataacatcccggcagactgggcggtcgagatgacctgtacgctgggccgcgacggcgcgaaaccaacgccgcgcatcacgcatttcgatgagaaagtgttggggctgatttacaccattaaaggttttgaagttgcggccagcgaagcggctatcagcggtaaactggacgatgtgctgctggcgcttaatctgagcccgctgatccactccgatcgcgatgctgaaaagctggcgcgggagatgatcctcgcgcacgagcagtggctgccaaactttgcggcgactatcgaaaaactgaaacagtaa

SEQ ID NO: 175105 - DNA, 759 bp, Klebsiella oxytoca
atggaacgcgtgttaatcgtcaatgccgatgattttggcctcagcagggggcaaaactacggcattatcgaagcttgcaagaacggtgtggttacctccacgacggcgctggtcaacggcgcggcgattagccacgctgcccagcttagccgctgcgtcccggagctggcggttgggatgcactttgtcctgacgctgggcgagccgctggcggcgatgccggggctaacccgcgaagggcgctttggaaagtggatttggcagatggcggaagagggcagcctgccgctggacgacatcgcccacgaactggagcgtcagtatcagcgttttatcgagctgtttggccatgaaccgacgcatatcgacagccatcatcatgtccatatgatcgcgcagatctaccccatcgtcgcggcgtttgcccgcgagaagggcgtggcgctgcggatcgaccgccagctagcgacgctgtcaggcctggcgcaggatgccgcgcgcagtagtgatggatttgccagcgagttctacggggaaggggtttcggaagcgctgtttctgcaaaccctggatgcctctgtccagcgtgaggaaaaatcgctggaggtgatgtgtcacccggcgttcgtggataacacgataatgggcagcgcctactgctatccgcgactgaccgaactggatgtgctgaccgccgggtcgctgaagtatgcgattgccgagcgcggctaccggctcggaacctaccgcgatgtataa

SEQ ID NO: 175106 - DNA, 2259 bp, Klebsiella oxytoca
atgtctgataaaccccataacccgaaatcccatcaatcaccggtgcatgatgaccgggcggcaaaacctggcctgggcgcattagcgccagaagatcaggattggcagcccacgccgcacccgaccgcgccgggcgaagagccgacggcgccgggtagcatgaaggccccggatacgaccagcgaaaagctcgatgccctcgagaaacagcgtaaaggcggtgagaatgctgcgcttacaaccaatcagggtctacgcatcgctgacgaccagaactcgctgcgcgcgggtcaacgcggccccacgctgctggaagattttatcctgcgtgaaaaaataacccattttgaccatgaacgtattcccgagcgcatcgttcatgcccgcggctccgctgcgcacggctatttccaggcgtacagcgatttaagcgacatcaccaaagcggctttcctctgcgacccgcagaaaaaaacgccggtattcgtccgtttttccaccgttcagggcggcgctggctccgccgatacggtgcgcgacatccgtggttttgccaccaagttttataccgacgagggcatctttgacctggtcggcaacaacacgccgatcttttttatccaggatgcgatcaagtttcccgattttgtccatgcggtgaaaccggaaccgcactgggccgtcccgcaggggcaaagcgcgcacgataccttctgggattacgtctcgctgcagcctgaaacgctgcataacgtcatgtgggcgatgtcggaccgcgggctaccccgcagctaccgtaccatggaagggtttggcatccacaccttccgcctgattaacgcggaaggtaaagcgaccttcgtacgcttccactggaagccggtcgcgggtaaggcctctctggtgtgggatgagtcgcaaaagctgaccggccgcgaccccgatttccatcgtcgtgacttatgggaatcgattgaagccggagattatcctgagtacgagctgggattacagctgatcccggaagaggatgaatttgcttttgatttcgatctgctggatcccaccaagctcatcccggaagcgttggttccggtgcagcgcgtcggtaagatggtccttaatcgcaacccggataacttctttgccgaaaacgaacaggcggccttccatcccgggcatatcgttccaggaatagacttcagcaacgacccgctgctgcagggccgactcttctcctataccgatacgcagattagccgcctcggcgggccgaatttccatgaaattccgattaataaacccacctgcccgtatcataatttccagcgcgacggcatgcaccggatggatattgataccaacccggcaaactatgaacctaactccatcaataacaactggccgcgggagacgccgccggccgctaaacgcggcggcttcgaatcctatgccgagcggattgacggagaaaaaattcgccagcgtagcccttcctttggcgagtattactctcaacccctgctattctggcgtagccagacgccaattgagcagcagcatattatcgacggattcagcttcgagctgagcaaggttgtcagagagtggatccgcgagcgggtggtcgatcagctggcgcatatcgacctgcagctggctcaggccgtaggtaaaaacctgggtattgagctcacggacgaacagcgcagcattacgccgccgccggatgtcaacggcctgaaaaaggatccgacgctaagcctgtacgccattcccagcggcgacgtgaaaggccgggtggtggcggtactgcttaacgatcgtccggttgccaaagagctgctgactttgctcaagtcgctgaaagcgcacggggtacatgccaaattactctattcacgaatggggaaagtgcaggccgatgatggcaccgagctcccggtagccggaacctttgccgggtcgccatcgctgaccgtggatgcagtcatcgttcccggcggcgatctgcaaagtctgagcagcaacggtgatttcaactattacctgctggaagcctacaaacacctgaagccgattctgctggcaggcgatgcacggcagtgcaaagcgccgctgcaggttgccgctcagggcgaagaaggcattgttgagaccgatgccattgatagccaatcaatggatgaactgatcaccctgatggcggcgcatcgggtgtggtcgagaagcgccaaaatcgccgcgatcccggcgtaa

SEQ ID NO: 175107 - DNA, 339 bp, Klebsiella oxytoca
ttgctactaaaggaccgcaagcagggggcgacgaaagcgggcgttttcggctatgataggggtttctgtttaccgccgtatttagtgaatttatttgtcatgaaaccacttcgccaacaaaatcgtcaggtcattagctacgtgcctcgagtggagcctgcgccgccggaacacgccgtcaaaatggatggttttcgcgacgtttgggttctgcggggtaaatacgtcgcctttgtgctgatcgacgaacgtttccgtcgctccccgccgtttaacgtgccggaagcggcgcagcgctgggcgacgcaaatgaggcaggaaggtgaaatcgacgcctga

SEQ ID NO: 175108 - DNA, 1392 bp, Klebsiella oxytoca
atgaactttccattaatagcgaacgtagttgtgttcgcggttttactgttggcgctggcccaaacccgccataaacagtggagcctcgctaaaaaagtgctggtcggtctggttatcggcgttatttttggcctggcgttacagctagtctatggctccgacagcccggtgctgaaggactctatccagtggtttaatatcgtcggtaacggctacgttcagctgctgcaaatgatcgtcatgccgctggttttcgcctcgattttgagcgcggtggcccgcctgcataacgcttcgcagctgggtaaaatcagcttcctcagtatcggtaccctgctgtttactacgctgattgcggcgctggtcggggtgctggtgactaacatgtttggcctgacagccgaaggcctggtccagggcagcgcggaaaccgcccgcctcaacgccattcagagtaattatgccggtaaagtcgccgacctgagcgtcccgcagctgatcctctcctttgtgccgaaaaatccgttcgccgatctgaccggcgcgaacccgacgtcgattatcagcgtggtaatcttcgctgcattcctcggcgtcgcggcgctgaagctgctgaaagacgatgtcgccaaaggccagcgcgtgctgaccgctatcgatacgctgcagagctgggtgatgaagctggtgcgtctggtcatgcagttaacgccgtacggcgtactggcgctgatgaccaaagtggttgcgggctctaacctgcaggacattatcaagctcggcagcttcgttatcgcctcctatattggtctgggcatcatgttcgtggtgcacggcctgctgctggcggtcaacggcgtgagccctctgaaatacttccgcaaagtctggccggttctgaccttcgccttcaccagccgctccagcgcggcgtctattccgctgaacatggaagcgcaaacccgtcgtctgggcgtgccggaatccattgccagcttctcagcatcgttcggcgctaccatcggacagaacggctgtgcgggactctatccggcgatgctggcggtgatggtcgcaccgacggtcggtattaacccgctcgatccgctgtggattgctaccctggttggcatcgtcaccgtcagttccgccggcgtcgcaggcgtgggcggaggcgcgacgtttgccgcgctgatcgtcttaccggcgatggggctgccggtcacgctggtggcgctgttaatctcggttgaaccgctgattgatatgggccgtacggcgctgaacgttagcggctcaatgaccgccggtaccctgaccagccagtggctgcgccaaaccgataaagctattctcgatagcgatgacgatgcggagctggcacaccgctaa

SEQ ID NO: 175109 - DNA, 591 bp, Klebsiella oxytoca
atgacggcggaaggccacctcctcttttctattgcctgtgcggtatttgcgaaaaatgcggaattaacccccgtgctggcccagggtgactggtggcatatcgttccgtccgccatcctgacctgtctgctgccggatatcgatcaccccaagtcgtttctcgggcaacgattaagctggatatcaaaaccgattgcccgcgccttcggccatcgcggcttcactcatagcctgctggtggtctttggcgcggtggcgattttctcgttgaaggttccggatagctggatcgtcccggcggatgcggttcagggcctggtgctgggctacctcagccatattcttgccgacatgcttacccctgccggggttccgctgctctggccctgccgctggcgctttcgcttccctattcttgcgccgcgcaaaggtaatcaactggagcgcgcgctgtgcatggcactgttcatctacgccgtgtggatgccgcaaaacgttgccgaaaacagcgccgttcgctggtcatcggagatgataaattcgctgcaaactacctttcatcgctttattagtcaccagactggacgataa

SEQ ID NO: 175110 - DNA, 762 bp, Klebsiella oxytoca
atggtactgaacgcctttgaccttacgggcaaggtcgctatcgtgacgggttgtgataccggactgggccagggaatgacgttgggccttgcgcaggccgggtgcgatatcgtcggcgtgaatcgccggatcccccacgaaaccgcagagaaggttcaggcgctgggccgacgctttaccgctattcaggccgatctgagccgtcaggatcagatcgcagccattgttactcaggccgtggccgccatgggccgggttgacattctggtgaataatgccggaaccatacgccgcgccgatgcgctaacctttagcgaaaaggactgggacgacgtgcttaacctgaatctgaaatccgttttctttctgtctcaggcggtcgccagacagttcatcgcgcagggcgacggcggaaaaattattaatatcgcctcaatgctctcatttcagggcggtattcgggtcccgtcatacaccgcctccaaaagcggcgtgctgggcattacccgcctgatggccaacgaatgggcggaacatcgtattaacgttaacgccatcgcgccgggctatatggctaccaataatacccagcagctgcgcgacgatgccgaacgcagcaaagagatcctcgaccgtatcccggccgcacgctggggtgttccggaagacctgcaggggccggtggtctttcttgcttcccaggcggcggattacattaacggctataccctggcggtggacggcggctggctggcacgctga

SEQ ID NO: 175111 - DNA, 669 bp, Klebsiella oxytoca
atgtcagccaggcgccagattcacgccgcgatttttgatatggatggattactgattgactccgagccgctatgggacaaagcagagctggaggtaatggccagccttggggtggatattcgtcgccgcaatgaaatgccggatattctcgggctgcgcatcgatttagtcgtcgacctgtggtttgcccaacagccgtggcagggcccggaccgcgcggaggtcaccgcgcggatcatcaatcgcgctatccaactggtggaagaggcgcgtccgctgctgccgggggcgcgggaagcggtagcgatgtgtaaagcacagggactgaaaattggcctggcgtcggcatcgccgctgcgaatgctggaaaaagtcctcgccatgtttgaactacgcgaccagtttgacgccctcgcttccgccgaaatgctgccctacagcaaaccgcacccgcaggtctatctgaactgcgccgccagtctcggcgtcagcccgatgaactgcgtggcgctggaagactcggtcaacgggatgattgccagcaaagcggcgcggatgcgctctgtcgtcgtaccggaagcggaaaatagccatgacccgcgcttcgtgctggccgacgtcaagcttgccacccttgaagctttgaccctgagcgacctgctcggctaa

SEQ ID NO: 175112 - DNA, 537 bp, Klebsiella oxytoca
atgacgtatcaacaagctggacgcattgcagtacttaaacgacttctgggatgggtggtatttatcccggcggttatctcgacgctgatctccgtgctgaagtttatgtacgagcacagcgagaaaaaaccgggcatcgacgcggtgatgatggactttgctcatgtgatgatcgagatgatgcgctttaacacgccgttcctcaatttcttctggtacaactcgccgctgccggattttaagcacggcatgaatatcggtttctggatcatctatattctggtgttcgtcggcatggcgctacaggcttccggggcgcggatggggcgccaggcgaagtttctgcgcgaaggcgttgaggatcagctgattctggaacaggctaaaggaacggaagggctgacgcgcgaacaaatttccgcacgcgttgtggtgccgcgccacaccatcctggtgcagtattttccgctgtacgtcctgccggtaattattattgtgctgggctacttcttcttttctttactcggttttctgtaa

SEQ ID NO: 175113 - DNA, 399 bp, Klebsiella oxytoca
atgacaacaacagatcttgcgccgaagggcgaattggttttacgcaccctggcgatgccggcggacaccaacgcaaacggcgatattttcggcggctggctgatgtcgcaaatggatattggcggggccattatggccaaagaaattgcccacggtcgcgtcgtgaccgtgcgcgtcgacggcatgacctttttgcgcccggtggcggtcggtgacgtcgtgtgctgctacgccaactgcgtgaagcgcggcaatacgtcgataactatcaatatggaagtgtgggtcaagaaagtgtcgtctgagcccatcggccagcgctacaaagccaccgaagcgctgtttatctacgtcgcggtggataatcagggaaaaccgcgcgctctgccgactctgtga

SEQ ID NO: 175114 - DNA, 2181 bp, Klebsiella oxytoca
atgagaacgcagaaaaatcacatagcaacgcccctggccctggccattgcaggcttactcagcccaggggtcttcgccgaagaggtggaacaggatacggagaccatggtggttcacggaaccgccgaagaggcgctgaagcagcagccgggcgtctcgatcattaccgctgaagatattgctaaggaccctccggttaacgatctgtcagaaatcatccgtaaaatgcccggggtaaacctgaccggcaacagcgccagcggcagccgcggcaacaaccgtcagatcgacattcgcgggatgggaccggaaaacacgttgattcttattgacggcgtgcccgtcacttcccgcaactccgtacgctatagctggcgcggcgagcgtgatacccgaggcgacagcaattgggtaccgccggaaatggtggaacgcattgaagttctgcgcggacccgccgctgcgcgctacggctctggcgctgcgggtggggtcgtcaatattatcaccaaacgccccaccaacgactggcacggatcgctctcgctctataccaatcagccggaaaataacaaagaaggcgccactaaccgggctaacttcagcctcaacggaccgctggccggggatgccctgaccatgcgtttgtacggcaacattaacaaaacggaacccgatgcatgggatattaaccgcgcgcaaaatggctcttatgcggcgggccgcgaaggcgtgcgcaacaaagatattaacgccctgctgtcgtggaaagtcaccccgcagcagatcttcgacttcagctacgcctacagccgtcagggcaatatctatgccggcgatacgcaatacagcaacagtaatatgagcccaaatggcctggtggatacgctgtacggtcaggaaaccaaccggctataccggcagacctggggcctgacctacaacgggatctgggactggggccagtcgaaagcgggcgtctactacgaaaaaaccaacaatacccgtctgcaggagggcaccaccggtcgcgtagaagggatgatcaatagcgatgtctacgacaccagccgcctggagtcttggcgctcaaccgctgaagtgaatcttccctttaactggctcgcagaacagaccctgactgtggggatggagtggaaccgcgatgaactgaacgatccggcttcgatgcaggccaccacaacgacggacacgctgccagggatgtccggcgatccttcgcaacgcagccctaaaaacagcgccacgctgaccggtatttatctggaagacaatatcgaagcgatgccgggaaccaatattatccccggcctgcgtttcgactatcataacgacttcggcagtaactggagcccgagcctgaatctgtcacaggatctgggcgatatgtttaaggttaaggcgggcattgcccgcgtattcaaggcgccgaacctgtatcagtcaagcgaaggctacctgctctctacgcgcggaaacggctgcccgataagtattgcggaaggcaattgctatcttttaggtaacccggatctcgacccggaaatcagcgtcaacaaagagctcggccttgagtttaacctcaacggttataacgccggcatcacctggttccgcaacgactacaaaaacaagatcgtctccggcaccgaggtgctgggtaataccgccagcggagcgaatatcctgcagtgggagaacggcgggaaagcggtcgtcgaaggccttgaaggcacgctgctggttccgctcattgccgatacgctcagctggcgcaccaacgccacttatatgatcaaatcggaaaacaaagataccggcaacccgctgtccgttattccgaaatacaccatcaataccctgctcgactggcaggtgaccagcaagttctctgctaacgtcaactggaccctgtacggtcgacagaaaccgcgcgaatacgcggaaattcgtaacgaaaacggggtgctggccaccaacgaagtcggcgcgtattctgtcgtcggcgtcggcggcaactatcagctaaccaaagacctgcggctgaatgccgggatcagtaacctcttcgataagcaaatttatcgggaaaacgaaggcgcttcgacctataacgaaccgggtcgcgcctattacgctggcgtcacgctctctttctaa

SEQ ID NO: 175115 - DNA, 1317 bp, Klebsiella oxytoca
atgcgcgcataccgcttttcatcactctctttgcttttattcctcgggaaatggctgctcctcgcttttatcattgcggtgctggcgggcacggcctcggcattttttcttttctcactggagtgggctacggcaacgcgggaagctcaccgctggcttatctggctcctgccgtttgccggatttgccgtcggctggatctatctgcgctacggtacctgcgtggaggccggcaacaacctgattctggaagagatccatggccctaagtgcgtcattcccctacggatggcgccgctggtatttttcggcaccgttgtttctcatctgtttggcgcctccgtcgggcgtgaaggcacggcggtacagatgggggcctcgatcgccgatcgcttcacggccattttccgtcttaaccacgatgcacggtcaatggtgctgatggccgggatcagcgccggtttctcttcggttttcggtaccccgctcgccggagcgctcttcgggctcgaagttctggctatcggacggataaactacaacgccattcttccttgcctgtttgccgcaattattgccgatcgagtcggcatcatgtggggcgtgcagcatacgcactactttattaccggctttcccacgctaacgctctggacgctgctggcaatcattatcgccggctgctgctttggcctcgcggcgcgcatttttgccgacagcacgcaggcaatcggcgcgttgatgaaaaaatggattcactacgcgccgctgcggccgtttattggcggactggcgattgcctgcgcggtctggttgctgcacggagagcgctatattggcctgggcataccggtgatagtggacgctttccagcaaccgctggcgccgtgggatagcttcggcaaactgctcttcaccgccgtctctttaggtagcggatttaaaggtggtgaagtcactccgctgttttatgtcggtgcgacgctgggcaatgcgctggcgccgctgctgcatatgccgctcggctttctggccggaataggttttgtcgccgtctttgccggggcggcgaatacgcctgttgcctcaacgctgatggcgattgagctgtttggttctgaaatcggtatttacgccgcgctggcctgcgtggtggcctggctggtctcaggctatagcggtatttatcgttcgcagcgtatagcctgccgaaaacagagcgatgtgccaactggcatcaagctgtcagaattcccggagtggtaccagtcacaaaaaagccgacaaaaggccgacaaagagacgcccgcctcctga

SEQ ID NO: 175116 - DNA, 540 bp, Klebsiella oxytoca
atgaagcagtttctggattttttaccgctggtagtcttcttcgcattctacaagctttatgatatctacgccgcgacgaccgcgctgattatcgccaccgctatcgtgctgatttacagctgggtacgctatcgcaaagtcgaaaaaatggcgttaattaccttcgtgctggtcgctgtattcggcggcttaaccatctttttccacaacgacgaatttattaagtggaaagtgacggttatctacgtcctgttcgccagcgccctgctgttcagccagtgggtgatgaagaagccattgatccagcgtatgctgggtaaagagctgacgctgccgcagcaggtgtggtcacgtctcaatctggcctgggcggtgtttttcatcctttgcgggctggcaaatatctatatcgctttctggctgccgcagaacatctgggtcaacttcaaggtcttcggcctgaccgctctgacgctggtattcaccctgctgagcggtgtgtatatttatcgccatatgccgcaggacgacaaccattaa

SEQ ID NO: 175117 - DNA, 744 bp, Klebsiella oxytoca
atgtctatcacggcgaagtccgtctaccgtgacaccgggaactttttccgcaatcagttcgttactatcctgctgattgcgctgttatgcgcgttcattacggtagtacttggccatgccttttcacccagtgaagagcaactgtcgattctgagtcagggcgatagcctggcgggcagcggcgggctgttcgaactggttcagagcatgacgccggagcagcagcaaattctgctgcgcgcgtccgcagcctcgaccttctccgggctggttggtaacgccattcttgccggcggcgttctgctgatgatccaggtggtctccgccggccagagagtcagcgccctgcgtgcgatcggcgcttccgcgccggtgctgccaaagctgctgctgctgatcctgctgacgacgtttgttgtgcagatggggatgatgctggtggtggtgccgggcgtcctgcttgccattgtgctctctttcgcgccgatcatgctggtacaggataaagttggtattttcagcgccatgcgtagcagtatgcgcctggcctgggccaacgtacgcctggtggcgccggcaattatcggctggctgctggcgaaaacgctgcttctgctgtttgcatccagcttcgcggtcctgacgccaaacgttggcgcggtggtaataaataccctcagcaatctgatctccgcattgttgctgatctatttattccgcttgtatatgctcattcgtaactaa

SEQ ID NO: 175118 - DNA, 639 bp, Klebsiella oxytoca
atgaaaaagttagcagcggcggttgttattctgggcacgctttccaccggtagcgtctgggcgcatgaagctggggaattctttatccgtgcgggttcggctacggtcagaccatcagaaggcgcgggcggaacgttaggcagtctggggggctttaacgttagcaataatactcaactgggcctgacgttcacctatatggcgacggacaacatcggcgtagagctgctggccgccacgccgttccgccacaaagtcggaacggcggcaaccggcaatattgcgaccgttcatcatttaccaccgacgctaatggcacagtggtactttggcgacgccagcagcaagctgcgtccgtatattggcgcaggtatcaactacacgactttctttgacgaaagcgtgaacgatacgggtaaaaagacgggcatttctgacctgagcctgaaagactcctggggagccgcggggcaggtggggatggactatctgattaaccgcgactggctgattaacatgtcggtgtggtacatggatatcgacaccaccgccaactataagctggcgggcgcgcagcagcacgacagtattcgtctggatccgtgggtgtttatgttctctgcgggataccggttctaa

SEQ ID NO: 175119 - DNA, 246 bp, Klebsiella oxytoca
atgcacgaagaagtaccactgaaattttacgacattgcggatgagtattcgacggagtccgccgagcccgtcagcgagtcagaacgtgagcccctggcgcgctattttcaactgctgattacgcggctgatgaataacgaggaaatcagcgaggaggcgcagggagagatggccatacaggcggggattgatgaacagcggatcgatgatatcgcggtattcctgaataaatggggtaatgagtag

SEQ ID NO: 175120 - DNA, 621 bp, Klebsiella oxytoca
atgcttaatattttgatcaataccaaaaacgtctactcaaaacacgctataaaacaaatggttatggagtccatcaccacagacgaaaacgttatctttgaagataagtacactcaaagcaacattgcacaagcacatatcatattcaccgaaatggaacctggagagatctttttgtgccatgatgagttgaaatataaaaaagaaaaaagcttgctatttattcttcaagagaaaaaaagcgtatcctccaaaagtgaaattcctaactgcacaaaagattgtttatttttatacaaatccgattcaattcctgtgattacggggaaaatatacattcatataaatttatttttattaagaggatatgaagatattgcaccaaaggtaaatctttgtatcaactgcccatgtaaatcaataacccatgcgcagtcaaaagtaatacatgctctcagtcttggattgaaccaaatgcaaatagcccgtgagttaaaagtcaactataaaaccgtgtactcgcataaaaaaaacgttatgcatgattttaaaataaaaggcactcaggatcttaataaattcatgcatgtattgaataaaagaaaacaatttatttcttag

SEQ ID NO: 175121 - DNA, 855 bp, Klebsiella oxytoca
atgaaagaaaatgtttttaatgaaatagttgaatggattgagtctcgcctgacaataaatccatcggtcgaagatatcgcccgtggcgtgggatattcgcggcgttcagtttataatatattccatgaatatgccggactgcctgtcggcaagtatatcagaatgcgccgcatgacgcttgctgccggtaaactcaggctgactcaccaacctatttcatctatagcctgctcactgcattttgactctcatcaaaccttttcccgcgagtttaaaaaagcctttggtcgctgccccagccagtatcgacattcagcatactgggatatgtcggcgctctatcagaaggtggggccgcagggcgacagactgcctgtaccctggctttgttttctcgaagagcaaaccttttctggatacggcttcacctatacgctctccctggccgagggtatctgcgccaggaaaaatgtcaccaggcggaaaatcgcggcggaaatgccgggcggcgagcgagacatctatatcctctctgaattctcacctgccgccgataatctctataaagtgaccatcggcagttttattggtgcaccagtaagctcacgggaacgccctttccgcgagataagggtcgctaagcggggtttatacctgggcatggaatttagcggtagctgggaggattatgttttactgtcaaataatgtttatatgaaacatcttcctgagctcgggctgtatcgccgcgagggctacgatatcgaacgttttgttcagccgcaaaacgtgacgtcaggaaacgatcggccttattacaccatccagtattttgtcccggtggcctatctttag

SEQ ID NO: 175122 - DNA, 810 bp, Klebsiella oxytoca
atggaacgttatgagacgctgtttgcacaactgaaagctcgccgggaaggcgcgtttgttcccttcgtcaccctcggcgaccctaatcctgagctgtcgctgaaaattatcgatacgctgattgaagccggtgccgacgcgctggagctgggcattcctttctccgacccgctggcggatggcccgacgatccaggacgccaccctgcgcgcttttgccgccggggtgacgcccgcgcaatgcttcgagatgctgacggcgattcgccagaagcacccgacgattccagtcgggctgctgatgtacgccaacctggtgttcagccccggtatcgatgaattctacgccgcgtgcgaacgcgctggcgtcgattcagtgctggtggccgatgtgccggttgaagagtccgcgccgttccgccaggccgcgctgcgccacaacatcgcgccgattttcatctgcccgccgaatgccgatgacgacctgctgcgccagatcgcctcttacgggcgcggctatacctacctgctgtcgcgggcgggcgtaaccggtgcggaaaaccgcgccgcgctgccgctgcatcatctgattgaaaagctggccgagtacaacgccgccccgccgctgcaaggatttggcatctcggcgccggagcaggttaccgccgcgattgacgcaggcgcggccggggcgatttccggctctgccatcgtcaaaattatcgagcgcaacgtgaacgacccgcaggccatgctggcagaattaaagaccttcgcccgcagtctgaaagccgccactaaagccgcctga

SEQ ID NO: 175123 - DNA, 1194 bp, Klebsiella oxytoca
atgagtactttactgaatccctatttcggcgaattcggcgggatgtacgttccgcagatcctgatgcctgccctgcgccagctggaagaagccttcgtcagcgcgcagaaagatccggcattccaggccgaatttagcgacctgcttaaaaactacgccggtcgcccgacggcgctgacccaatgccgtaacctcaccgaaggtacgcgcacgaccctgtatctgaagcgggaagatctgctgcacggcggcgcacacaaaactaaccaggtgctcggccaggcgctgctggcaaaacgcatgggcaaaacggaaattatcgccgaaaccggcgccggtcagcacggcgttgcctcagcccttgccagcgccctgctcggcctgaagtgccgcatctatatgggcgccaaagatatcgaacgccagtcgccgaacgtcttccgcatgcgcctgatgggtgcggaagtgatcccggtacatagcggctcatccaccctgaaagatgcctgtaacgaggctttgcgcgactggtcaggcagctatgaaaaagcccactacatgcttggcaccgccgctggcccgcatccgttcccgaccatcgtgcgtgaattccagcggatgattggcgaagagactaaagcgcagatcctggagaaagaaggacgcctgccggatgcggttatcgcctgcgttggcggcggctccaacgctatcggcatgttcgctgactttatcgacgacaccgccgttggcctgattggcgtggagcccgccggacatgggatcgaaaccggcgaacacggggcgccgcttaagcacggccgcgtgggcatctacttcggtatgaaatcgccgatgatgcagaccgatgaggggcagattgaggagtcctactccctctccgccggtctggatttcccgtccgttggcccgcagcatgcttatttaaacagcattggtcgcgccgattacgtatcgattaccgatgatgaagcgctggatgcttttaaagcgctctcccgccatgaagggattattccggcgctggaatcctcccatgccctggcgcacgcgcttaaaatgatgcgcgaaaacccggaaaaagagcagctgctggtggttaacctctccggccgcggcgataaagacatcttcaccgtacacgatattttaaaagcgcgaggggaaatctga

SEQ ID NO: 175124 - DNA, 1359 bp, Klebsiella oxytoca
atgcagaccgttttagcaaagatcgtggccgacaaagcgatttgggtagaagcccgcaaacaacaacaaccgttagccagttttcaaaatgaagtggtaccgacgcagcgcaatttttacgatgccctcgccggcacccgcaccgcatttattcttgagtgcaaaaaggcctcgccatcaaaaggcctgattcgcgaagattttgacccggcggccattgccggcgtctacaagcactatgcctcggctatctcagtgctttgcgatgagaagtatttccagggtagcttcgattttctgccgatggtcagcaaggtcgcgccgcagccgattctgtgtaaggactttactatcgatccttatcaaatctacctggcgcgctactaccaggctgatgcctgtctgctgatgctttcggtgctggacgatgagcagtatcgtcagctctccgccgtcgcgcatagcctgaacatgggcgtgttgaccgaagtgagcaatgaagaggaactggagcgcgcaattgcgctgaaggctaaagtggtcggcatcaacaatcgcgatctgcgcgatatgtcgattgacctcaaccgtacccgaaccctggcaccccgcctcggtcatggcgtcacggtcatcagcgagtccggcatccatacttatgctgaagtgcgcgaattaagccactttgccaacggcttcctgattggttctgccctgatggagcatgacgatctgaacgccgccgtaaaacgcgtgctgctcggtgagaataaggtctgcggcctgacccgcccccaggatgcccaggtggcatatgaatccggcgcgatctatggcggattgattttcgttccgacgtcgccgcgagcggtgaacgaggctcaggcgcaagcggtcattgccagcgcgcctctgagctatgtcggcgtgttccgcaattcgccagtggcggaagtgattgcccgcgcgaaaaatctgagcttagccgccgtgcaactccacggtagtgaagaccagacctatatcgacgccctgcgcgccgaattaccgggcaaggtacaaatctggaaagccctcagcgttggcgaaacgctaccgccgcgcaatctgaatcatgtcgacaaatacgttctcgacaatggtcagggcggcaccggccagcgtttcgactggtctctgctgcaaggccaggatctgcgtaacgttctgttggctggcggcctcggcgccgataactgtgttgaagccgcgaaaagcggctgtgccggactcgattttaattcaggcgtagagtcacagccgggtattaaagatgccagcaagctggcctcggtgtttcaaacgctgcgcgcatattaa

SEQ ID NO: 175125 - DNA, 1596 bp, Klebsiella oxytoca
atggccgacattctgctgctcgataatatcgattctttcacctataacctggcagaccagctgcgttcgaacggccataacgtggtgatttatcgcaattccgtcccggcgcaggcgctgattgagcgcatcggcaccatggacaatccagtattgatgctctccccgggcccgggaaccccgagcgaagcgggctgtatgccggagctgctgacccgcatgcgcggtaagctgccgattatcggcatctgcctcggtcaccaggcgattgttgaagcctacggcggctacgtcggccaggccggtgaaatccttcacggcaaggcttcaagcattgaacacgacggccaggcgatgtttgccggtctgagtaatcctctgccggtcgcccgctaccactcgctggtgggcagcaatatcccggccggactaacgatcaacgcccactttaacggcatggtcatggcggtgcgtcacgacgcggatcgcgtctgcggcttccagttccatcctgaatcgattctgaccacccaaggggcgcgtctgctggaacagactctggcctgggcgctgcagaagctggaacagactaataccctccagccgattctggaaaaactgtatcaggcagaaaccctgagccagcaggagagccaccagctgttttccgcagtggtgcgcggcgaagtgaagcctgagcagctggccgccgcgctggtcagcatgaaggtacgcggcgagcatccgcaggagatcgccggcgccgctaccgcgctgctggaaaacgccgcgccgttcccgcgtccggattatccgtttgccgatatcgtcggtaccggcggcgacggcagcaacagtatcaatatttcaaccgccagcgcgtttgtggctgccgcctgcggcctgaaggtcgccaaacacggcaaccgcagcgtgtcgagcaagtccggttcttccgacctgctggcagcattcggtatcaatctcgatatgaatgccgataaatctcgccaggcgctggatgaactgggcgtttgcttcctgtttgcgccgaaataccacaccggcttccgtcacgcgatgccggtacgccagcagctcaaaacccgtaccctgttcaacgtgctcgggccgctgatcaacccggcgcatccgccgctggcgctgattggcgtctacagtccggaactggtgctgccgattgcggaaaccctgcgcgtgctgggctaccagcgagccgccgtggtacatagcggcggtatggatgaagtatcgctgcacgcgccgacggtggtcgcggagctcagcaacggtgagatcaagagctaccagttgaccgccgccgacttcggcctgacgccgtatcatcaggagcagctggcaggcggcacgccggaagaaaaccgtgacattcttacgcgcttactacaaggtaaaggtgaagccgctcacgaagccgccgttgccgccaacgtcgccatgttgatgcgtttacatggacacgaagacctgaaggccaacgcgcagcaagtcatcgatgtgctgcacagcggagcggcctatgacagagtgaccgcattagcggcaagagggtaa

SEQ ID NO: 175126 - DNA, 1563 bp, Klebsiella oxytoca
atgcaaacatcaaaaccggcactcgagcttctcaccagcgacgccatctatcgggaaaacccgacggcgctattccaccagctatgcggcgcgcgtcccgccaccctgctgctggaatctgcggatatcgacagtaaggatgatttgaaaagcctgctgctggtggatagcgcgctgcgtattaccgcactaggtgacactgtcactattcacgcactttccgctaacggcacggcgctgctggagctgttggacagcgctctgccttcaggcattaataaccagcgtcagccaaacggtcgggtattaactttcccgccggtcagcgcgctgttagatgaagatgcccgtctgtgttcactgtcggtattcgacgcctttcgcctgctgcaggaactgattaccgtaccgcaggacgaacgcgaagccatgttcttcggcggtctgttcgcctatgacctcgtcgccggctttgaaaacctaccgccgctggaaagtgacaccgcctgcccggattactgcttctacctggcggaaacgctgctggttatcgaccatcagactaaaaacacacgcattcaggcgagcctgttcaccccgctggaaagcgaaaagcagcgtctgctgcagcgcatcgctcagcttcgtcaacagctgaacgagccgccggcgccgctgccggtgacgacggtagccgagatgcgctgcgattgcgaccagagcgacgaagagtacggcgccgtggtgcgtaaaatgcagcgcgccatccgcgcgggcgagattttccaggtggtaccttcgcgccgcttctcgctgccctgcccgtcgccgctggccgcttatgatgtgctgaaaaagagcaaccccagtccgtacatgttctttatgcaggacaacgacttcaccctgttcggcgcttcgccggagagctcgcttaagtacgatgccaccaaccgtcagattgagatctacccgattgccggtactcgtccgcgcggccgccgtgcagacggttcgttggatcgcgatcttgatagccgcattgagctggagatgcgcaccgaccataaagagctctccgagcatctgatgctggttgaccttgcgcgtaacgacctcgcgcgcatctgcacgccgggaagccgctacgttgccgacttaaccaaagtcgaccgttactccttcgtgatgcaccttgtctcccgcgtggttggcgagctgcgcagcgatctcgacgttctgcatgcttatcgcgcctgtatgaatatgggcaccctcagcggagcgccgaaagtgcgcgccatgcagctcattgccgctgccgaaggcaagcgccggggcagctacggcggcgcggtgggctacttcaccgcccatggcgacctcgatacctgcatcgtcattcgttctgcctacgtgcaggatggcatcgccacggtgcaggccggcgccggtatcgtgctcgactctgttccccagtcagaagcggatgaaacccgcaataaagctcgcgcggtgctgcgcgctatcgcccaggcccaccacgcgaaggagattttctaa

SEQ ID NO: 175127 - DNA, 870 bp, Klebsiella oxytoca
ttgagcaacaccaactacgcagtaatttacgacctgcacagccataccatcgcctctgacgggcgactgactccagaagaacttgtccaccgcgcgcatcagatgcgcgtcggcaccctggcgataaccgatcacgataccgtggcggcgatccccgcggcccgggcggagattgaacgcgccggtttacccttgacgctgatatccggagtggaaatctccacgctgtgggaaaaccatgaaatccatattgtcgggctgaatattgatatcgcccatccggcgatgaccgcgctgctcgatgagcagaaagcgcgccgccagatgcggggacagcagattgcagagcggctggaaaaagcgcggatccctggcgcctgggaaggggcgctgaagctggctgacggcggcgcggtaacccgcggccacttcgcccgctttctggtggaggccggctatgccaacaatatggctgacgtttttaagaagtatctggcgcgcgggaaaaccggttacgttccgcctcagtggtgtacaataaaacaagcgattgatgtcattcatcattccggcggtaaagcggtcattgcccatcccggacgctacgacctctctgccaagtggctgaaacgactgttggcccactttagcgagcagggaggcgatgcgatggaagtcgcccagtgtcagcaggcgccgcacgagcgggctcagcttgccgcttacgccgtgcagtatggccttcatgcctcgcaggggtctgattttcatcagccctgtccgtggatcgagctgggccgcaaactttggctacccgctggcgtagaagggatctggcgcagttgggaagtggccgtagaacaaaattga

SEQ ID NO: 175128 - DNA, 621 bp, Klebsiella oxytoca
atgagccagtttttttatatccatccggaaaacccacaggcgcggttgattaaccaggccgtggacatcgtgcgtaaaggcggggtgatcgtctatccgaccgactccggctacgccttaggctgcaaaattgaagataaaggcgcgatggagcggatttgccgaattcgtaatctgccaaacggccacaactttaccctgatgtgccgcgatctgtccgagctgtcgacctattcattcgtcgataacgtcgccttccgtctgattaaaaataatacgccgggtaattacacctttatccttaagggcaccaaagaggtcccgcgtcgtctgctgcaggataagcgtaaaaccatcggtatgcgcgtaccgtcaaatccgattgcccagatgctgctggaaacgctcggcgagccgatgctttccacctcgttgatgctgccgggcagtgattttaccgaatccgacccggaagagatcaaggatcgtctggagaagcaggtagacctgattattcacggcggctatctgggacaacagccgaccacggttatcgatcttactgaagacgtaccggtggtggtgcgtgaaggcgtgggtgacgttacgccgttcctgtaa

SEQ ID NO: 175129 - DNA, 888 bp, Klebsiella oxytoca
atgagcgagaaattacaaaaagtgctggcccgcgctggccacggctcccgccgtgaaatcgaagccaaaatcgaagctggccgcgtcagcgtcgatggcaaaatcgccacccttggcgatcgcgttgaaattgtcccgggtttaaaaattcgcatcgacggtcacctgatttcggtgaaagagtctgcggaacagatttgtcgcgttctggcttactataagccggaaggcgaactctgtacccgtaatgacccggaaggacgtccgacggtgttcgatcgcctgccaaagctgcgcggcgcgcgctggattgccgtcggccgactggacgttaatacctgcggtctgctgctgtttaccaccgacggtgagctggcgaatcgcctgatgcacccgagccgcgaagtggaacgtgagtacgcggtgcgcgtgttcgggcagatcgatgatgacaagctgcgccagctggctcgcggcgtgcagcttgaagacggcccggcggcgtttaaaactatcaagtttaccggcggcgaggggatcaaccagtggtacaacgtcacccttacggaaggccgtaatcgcgaagttcgccgcctgtgggaagccgttggtgtgcaggtcagccgcctgatccgcgtgcgctatggcgatattctgctgccgaaaggcctgccgcgcggcggctataccgagctggacctggcgcagaccaactacctgcgcgagctggtcgaacttgcgccggaaaccagctctaaggttgcggttgaaaaagaccgtcgccgtatgaaagcgaaccagattcgccgtgcggttaagcgccacagtcagatgggcaataataataacaaccgtcgctccagcagccgtaataacggtaacggttaa

SEQ ID NO: 175130 - DNA, 1362 bp, Klebsiella oxytoca
atggatacagcaggaaaactatcggcaagctatgtggttatcggcgttaaagaaaaaataggttatggctttggtgattttgcctctaatttatcgttcggttttgtttctctgttcttactctttttctataccaacatttacggcattagcgccgtacaggcgagcctgatttttgttattgcgcgcgttgttgatgccgcttttaatattctgattggctttgccatcgataaaacccacagccgttacggtaaactacgcccgtggttgttatatggctcaattccgctcggctttttaacggtgctctgctttgtgccattcggcggtgaggcaaaattctattttgcgctgatctcctataccatttattgcctggcgtatacggcggtgaatacgccttattcggcgctgactaatcgtctgacccagcatgaagcctcccgctcatcgctatcggtataccggtttgtgctggcgattgttggctatctgattgtttccactactgccgatatgctgatttccccgtttagtgataagcaactgggctacgtctttgcggtctcttgctttgcgctgctggcgacctttttgttccttgcctgtttcggaatgaccaaagagcgcgttggcgaggaagaggaaactcccgcgccgacgctgcgggaaatgttgaaggcggtggcaggcaatgcgccgcttattaacctctcgatgtttaccgtctttttttatattgcctataccgtgtggatggcgattgctatttacttcattaaatacattattggcagcgaaggttttacgtcgaccttctttatgattcagtccgcagcgtatattgtcggcaccgttatttcggaaaaaatcattgcgctgataggtaaaaagaaaatgactctggtggcgctgttgatcggcattgtcggcgtacttatgcaatattttatcgccggcgacaatatctggctgattatgaccggggtatgcttgtacagcattacgctggggatgggctttgtttccatgtggtcaatgattgccgataccgtggaatatgccgagtggcaccatggggtgcgtaccgaaggcgccatctacggcttctttaatttcatcaccaaaatagcaatggctatcggcggcggctgtgcgggatggatgctggactattatcactatgacgcgggtaacattaccgccagcgcaattaacggtattaacgtactgatgacgctattccccggcgcgatgtttgctctcagcgccatatttgtcgcgtgctattcgctggatgaaaaaacctatcgcgatattgtgcaaaaaatcagcctgcgtaaacagaacgcgctttaa

SEQ ID NO: 175131 - DNA, 2349 bp, Klebsiella oxytoca
atgaataacgattttaataccaccctcgccgcgatgagcatcgaagataaagtggcgctactgaccggcagcggcctgtggcgtaccgcgtcgctgccgcagcacggtatcgaagatatcattatgaccgacggtacctatggcgttcgctacagcagcgcgcagattgatggccgggaaaagtggagcatggatgattttatttcgatcatcacccaaacagcagaccaggccagcgcggaagaacctaccgcgaaagggggaagcgaggcgctcttcagtacgtcgctcccggcgacctgctttcctaacggttccagcctggcgtgcagttgggacgtggaactggtgcatcagatggggcaggcgctgggaagagagtgccagcatatgggggttgggattctgctcgggccgggcattaacatccgccgtacgccgctggctggtcgaggctatgaatattatgccgaagacccggtggtcagcggcgacattgctgctgcgctgatcaacggtctgcagcaggagggcgtcggcgccagcctgaaacactttgcggcgaacaactccgagtaccgccgtacggaaatggattcgattattgaagaacgggcgctgcgggaaatctacctggcgggtttccagcgggcgattacaaaatcccagccgtggacggtcatgtcttcgtacaatcgtcttaacggcgtacaaacttcgcaggatccgtttttactcactcaggtattgcgcgatgagtggggatatgacggcctggtcatgtccgactggtacggtattaaagatcgcccggcatcgctgatggcgggtaacgatctggcgatgccggaaacccgccgcgataaacaaactctgctggcggctattgaatccgcagaggtgccgatggcggtggtagaccgcgcctgtctacgcatgctgaaactgctcgacaaggttcagcgccatcgccgcccggaaacgcgagccgatttcccggcgcaccacgcgctggcgcagcgcctggccggcgaatccattgtcttgctgaaaaacgaagatagtctgctgccgctgcatccggagaaaacaccgcgtattgcggtgctgggtaaaccagcccaggagccggtgatccaggggtccggatgcgcgacaacggtgccgtatctgctcgaccgcccgctggatgaaattttcgatctcgccggggacgattttagcgtctcatgggccgtaggcgcgccggacgatctgcgcagcgatgaacaggcgcttgcgcaggcctgccgggtcgctcaggaagccgacgtggcggtgattttcgtcagtaccgccgtgggtgaagatggtgaaaatggcgatcgtcaggatctgaatattctgccggtgcatgaacggttgattcgcgaagtggcggcagtccagccgaatatcgtagtggtgctggcaaatagcgatgcggtggtgatgccgtggcttggcgagtgcaaggcgctgctggaaacgttttttgccggacaaggaatggggcgcgcggttgcggaaatcctcttcggccagcgcaacccttgcggtaaattgacggtgacggtgcccaatacgctggaggaaacgccggcctggctgcactatccgggcgaaaacctgcgccatcattacggagaagggctttttgtcggctatcgctattacgacaagcgttgtctgacgccgcagtttcccttcggttttggcttaagctatacccggtttgcttacgataatattgcgctctcagcctcccgtgtaggcgcaagcgagacgcttaccgtttcgttcgatctgaccaactgcggagagtatgcaggcaaggagatagttcagctgtacgtgagcgcgcctcagggagagctgattcgcgaagtgcagtcattaaaagccttcagtaaagtggcgctggccgcaggggagtgccgccgggtcagcctgcagctgcccatcggcgacctggcctgctatcatcctggcctcggcgactgggtcgtgacgccggggctctggcagatccgagtcggcggctcatcgcgggatctgccgctgacggcggaaatcgaagtggactgcccgcagcggtacgtcccgcttcgcgatgataattcgctgcagcagctgattcagcagccggaagcttttgcccgggtagtcaagttgattgccgataagagccagatgcctgcggaacaggtccgtgaaaaactgatccgcctggcgccggatttgttctgcgggctgctgattgcgctgaccgagtttctggcgctggatattgagcgcgacgaacttaacgccgtgctgacagggcgctga

SEQ ID NO: 175132 - DNA, 975 bp, Klebsiella oxytoca
atgtttcctttttcagtgactcaccccggttcgctcacgcagagcggacgacagacggcgaacagcggctacgagctgattgccttcgatgccgagaagctgaacgtgtttgccgcggaggttcgctactgcgagccgcactggcatccggctcctgagctgattaccgtactggcagggcggtttacgctcgccgtcggccagcagagcctggagctggcgcagggggacatgctgtacatcaatgcggaagaggttcattccctcaacgcggaggcggcgggcagccaactggtcaccgttcagttttcgcccggcctgtttgacgaacttcacccctcgccgcagctggaatggagtacctgcggacgatcttacactgcggcggacagtgaagtacatcagcggctggcggggttactgaaacagctgatcgacaaccctgcgccgtttcagcgtatcgccgccatttatctgttactggatgcgttagtctccgctggcaagccgacgcagcgcggcgaaagttcgctgcgcgacgaggcgatgatcaaaaaaggcatagattttatcaatcaacactttgaccagccgctgacgctgagcgaggtcgcctgccatagcgggatgagctactcctggttttcgcggctgtttaaaaaggtgagtcgctataattttaaagagtatctgacgctggtgcggctaaacaaagcccgcacgctgttgcgcgatacccgtacgccgattaccgagattagccacagctgcggatttcaggagcataaatacctgattgccgcctttaataaatactgcggcgttacgccgaccgaatatcgcaagcgcttcgtttcacggcaaaatattgtcgaaagcgaactggcgccgggggaggattgcctgtgtctgccgctcaaccatgcgctgcttgagcggctggtggctagtagtcgatccccatctgcgctttga

SEQ ID NO: 175133 - DNA, 591 bp, Klebsiella oxytoca
atgagtgatgaacgccaccgcgaacgccagcagcgggtaaaagacaaagttgacgctcgcgtcgccgccgcgcaggaagagcgcggtatcgtgatcgtttttaccggcaacggtaagggtaaaacgactgccgccttcggtaccgtcacccgcgccgtcgggcacggtaagaaagctggcgtcgtgcagtttattaaaggcacctggccgaacggcgagcgcaatctgctcgaaccccacggcgtcgagtttcaggtgatggcgaccggttttacctggaatacgcaggatcgcgaaagcgataccgccgcctgcctcgcggtctgggagcacgggcgccgcatgctggccgatgaaagcctcgatctcgttttactggacgagctcacctatatggtggcctacgactatctgccgctggaagaggtgcttaccgcgttacgcaaccgtccggcgcagcagacggtgattattaccggacgcggctgccaccgtgaaattaccgaactggccgataccgtcagcgaactacgtccggtgaaacacgcgtttgatgccggtatcaaagcgcagatggggatcgactactag

SEQ ID NO: 175134 - DNA, 762 bp, Klebsiella oxytoca
gtgcactatcaaccgcaacgtcacctgttacaggaccgcatcatcctggttaccggcgccagcgacggcattggccgtgaagccgccctgacctattcccgctatagcgccagcgttattctggtcggacgcaatgaagagaaactgcgcggcgtcgcgcaagagattgagcaggctggcggcattcccgcccgctggtttactctcgacctgttaacctgcacgccgcaggagtgccagcagctggcgcagaaaatagccatccactacccgcgcctcgacggagtgctacataacgcgggtctgctgggcgacgtttgcccgatggatcaacaaaagccggaagtgtggcagcaggtgatgcaggtgaacgtgaacggcacctttatgctcacccaggcgctgcttcctttattactcaaatccgaatcgggttcgctggtctttacctcttccagcgtcggccgccagggacgcgcgaactggggcgcttacgccgcgtcgaaatttgctaccgaaggcatgatgcaggtgctggccgaggagtatcagaaccgccatctgcgggtcaactgcattaacccaggcggcacccgcaccaaaatgcgcgccaatgcgttcccgacggaagatccgcaaaaattgaaaacccccgctgatatcatgccggtatacctgtggctgatgggcgacgacagtcgtcgtaagacgggaatgacttttgacgcccagccgggccgcaaaccaggaatcgcacaatga

SEQ ID NO: 175135 - DNA, 1092 bp, Klebsiella oxytoca
atgtacactgtgcgccaacgtcagtggtttacacaaggtgaaaacgtggaattagttgctcaatatggcctgtttttggccaaaatcgcgaccatcgttgtcgcaattgcggttatcgtcgccattattgttaacctgactcagcgcaaaaaacagcgcggcgagctgcgggtaaccaatcttagcgagcaatataaagagatgaaggaagagctggcggtttcgttgctcgatgcgccgcagcagaagctgtggcataaagcgcaaaagaaaaagcttaagcaggaagctaaggcgtctaaggcgcgggcgaagctggggacgcctgagccggacgccaaaccgcgcgtctgggtgatcgattttaaaggcagtatggatgcgcatgaagtcagcagtctgcgcgaagagatcaccgcggtcctggcggcggcaaaggcgcgcgatcaggtggtcattcgcctcgaaagccccggcggcgtggttcacggctatggtcttgccgcttcacagctgcagcgtctgcgtgacaaacagatcccgctaacggtggcggtagataaagtcgcggccagcggcggttatatgatggcctgcgtggcgaacagaatcgtctgtgcgccgtttgctatccttggctctattggcgtcgtcgcgcaaatcccgaaccttcatcgcttcctgaagaataaagatatcgatattgagctgcatacggcaggccagtacaaacgtaccctgacgatgctgggcgaaaataccgaagaagggcgtcagaagttccgcgaagacctcaacgatacccatcgactgttcaaagattttgttcaccagatgcgtcccgaactcgatattgaacaggtagccactggcgaacattggtacggcgttcaggcgctggagaaggggcttgtggatgcggtggaaaccagcgatgagctactgttgggtctgatggataaacacgaggtgatcggcgtgcgctatcagcagcgtaagaaaatgctcgatcgttttaccggtagcgccgcggaaagcgctgataaactcctgctgcgctggtggcagcgcgggcaaaaaccgctgatgtaa

SEQ ID NO: 175136 - DNA, 252 bp, Klebsiella oxytoca
atgcaaggtacaacccaacccatcgatcgccagacgcttctggaaaaagccaacaaactcattcgcgaacataaagatacgttagccgggatcgaggccaccgacgtcgtgcagcgtaacggcgtgctggtgttcagcggcgagttttatcttgatgagcaaggactgcccacggcgaaaagtacggcggtatttaatatgtttaaatacctcgcgcacgaactgtctgataagtatcacctggcggattaa

SEQ ID NO: 175137 - DNA, 2598 bp, Klebsiella oxytoca
atgggtaaagctctcgttatcgttgagtccccggcaaaagccaaaacgatcaataagtatctgggtaatgactacgtggttaagtccagcgtcggtcatatccgcgatttgccgaccagtggctcagcatctaaaaagagcgccgactctacctccaccaaaggggctaaaaagcctaagaaggatgaacgcggcgctctggtcaaccgtatgggcgtggacccatggcatgactggaatgcgcactatgaaatactcccgggtaaagaaaaggtcgtttctgaactcaaacagttggcggaaaaagccgaccacatctatctcgcaaccgaccttgaccgcgaaggggaggccattgcatggcacctgcgggaagttatcggtggtgatgaacagcgctatagccgcgtggtgttcaacgagattaccaagaatgctatccgtcaggctttcgaaaagccgggcgaactgaatattgaccgtgttaacgctcagcaggcgcgtcgctttatggaccgcgtggtgggctatatggtttctccgctgctgtggaaaaaaattgcccgcggtctgtccgcaggccgcgtccagtcggttgcggtacgtctggtggtcgagcgcgagcgcgaaattaaagcgttcgttccggaagagtactgggaagttgacgccagcaccaccaccccaggcggcgatgcattgccgctgcaggtaacgcacaacggcgataagccattccgtccggtaagccgtgatgaaaccatggcggccgtcgcgctgcttgaaaaagccagctacagcgtgctggagcgtgaagacaaaccgaccagcagcaagccgggcgcgccgtttatcacttccacgctgcagcaggccgccagcacgcgtcttggcttcggcgtgaagaaaaccatgatgatggcccagcgactctatgaagcgggacacattacctatatgcgtaccgactcgacgaacctgagccaggatgcgctgagcatggtgcgcggctacattggcgataacttcggcaagaagtatctgccggagagcgcgaatcagtacgccagcaaagaaaactcgcaggaggcgcacgaagctattcgtccttccgacgtcaacgtgctggccgaaaccttaaaagatatggaatctgatgcgcagaaactgtatcagctgatctggcgccagtttgtcgcctgtcagatgactcctgcgcagtacgactccaccacgctgacggtaaaagccggcgatttcaaactgaaagcccgcggccgtacgctgcgctttgacggttggactaaggtgatgccagccctgcgtaaaggcgatgaagatcgtactttaccgctggtcaataagggcgacagcctgagcctggtcgaactgacgccagcgcagcactttaccaagccgccggcgcgttttagcgaagcctcgctggttaaagagctcgaaaaacgcggcatcggccgtccgtctacctacgcgtcaatcatttcgaccattcaggatcgcggctacgtacgagtggaaaaccgccgtttctatgcggaaaaaatgggcgaaatcgtcaccgatcgactggaagagaacttccgcgatctgatgaactacgacttcaccgcgcagatggaagaccgtcttgaccaggtggcgaaccatcaggccgagtggaagcaggtgctcgacagcttcttcggggacttcacttcgcagctgcaaacggcagagaaagatccggaagagggcggcatgcagccgaaccctatggtgctgaccagcattgactgcccaacctgcgggcgcaagatggggatcaggaccgccagcaccggcgtgttccttggctgctcgggctatgcgctgtcgccgaaagagcgctgcaaaaccaccattaacctggtgccggaaaacgaagtcctcaacgtgctggaaggcgatgacgccgaaaccaatgcattgcgggccaaacgtcgctgtaaaaaatgcggcacggcaatggacagctaccttatcgatccgaagcgcaagctgcacgtctgcggtaataacccgacctgcgatggttacgagattgaagagggcgaattccgcatcaagggctatgacggtccgatcgttgagtgtgagaaatgtggctccgaaatgcacctgaaaatggggcgttttggtaagtacatggcctgcaccaacgacgagtgtaaaaacacccgtaagatcctgcgtaatggggaagtggctccgccgaaagaagatccggttccgctgccggaactgccgtgcgagaagtcagacgcctatttcgtcctgcgcgatggcgcggcgggcgtattccttgccgccaatactttcccgaaatcccgcgaaactcgcgcgccgcttgtggaagagctgttccgcttccgcgatcgtctgcctgagaagctgcgctatctggccgatgcgccgcagcaggatccggaaggcaacaaaacgctggtgcgctttagccgcaaaactaaacagcagtacgttgcttctgagaaagagggtaaagcgaccggctggtcagccttctatatcgacggtaaatggaccgaagcgaagaaataa

SEQ ID NO: 175138 - DNA, 975 bp, Klebsiella oxytoca
atgaaactacagcagctccgctatatcgttgaggttgttaaccataatctgaacgtctcctctactgccgaaggtctgtatacctcacagccgggcatcagcaagcaggttcgcatgctggaagatgagctgggaattcagattttcgcccgcagcggcaaacatctgacccaggttactcctgcgggccaggagatcatccgcatcgctcgcgaagtactgtcgaaggtggatgcgattaaatcggtggccggagagcacacctggcctgacaaaggttcgctgtacgtggcgaccacgcatacccaggcgcgctacgcgctgccgggggttatcaaaggttttatcgaacgctatccccgcgtctcgctgcacatgcatcagggctcgccaacgcaaatcgccgaggcggtgtcgaaaggcaatgccgacttcgctatcgctacggaagcgcttcatctctatgatgatttggtcatgctgccgtgctatcactggaaccgttccgtggtcgtgacgcctgaacatccgctggcgtcgcgagagtcggtatcgattgaagagctggcgcagtacccattggtgacctacaccttcggtttcaccggtcgttctgaactggataccgcctttaatcgcgccggtttaaccccgcgcatcgtgtttaccgcgactgacgccgatgtgattaaaacctatgtccgcctggggcttggggtaggggtaatagccagtatggcggtcgacccggtttccgatccggacctggtcaagctggacgccaacgatatattcagccacagcaccaccaaaataggcttccggcgcagcaccttcttacgaagctatatgtatgattttattcaacgatttgcaccgcatctgacccgagacgtggtcgataccgcggtcgctctgcgctcaaatgaagatattgaggccatgttcaaagatattaagttaccggaaaaataa

SEQ ID NO: 175139 - DNA, 168 bp, Klebsiella oxytoca
atgattagtgatatcgattatatgaagtttacgatgtcacaggaacgtgacaagactgagatagatccggttttgagaagtaaggcctggagcgccgttatccttgggcttgcgatgttctggagcgtcattgctctggttatctgcaacgtttggtttctaagctag

SEQ ID NO: 175140 - DNA, 2673 bp, Klebsiella oxytoca
atgtcgtcaaccctacgagcagccagcaaggatacgcttcaggttaaagataaaacctggcattactacagcttaccgctggccgccaaagaactgggcgatctctcgcgcttgcccaaatcacttaaagtgctactggaaaacctgctgcgctggcaggacggtgattccgtcaccgccgaagatattcatgcccttgccggatggctggagcatgcccatgccgaccgggaaattgcctaccgtccagcgcgcgttctgatgcaggacttcaccggtgttcccgccgtcgtcgatctggcggcgatgcgcgaagcggtaaaacgcctgggaggcgacaccgccaaagtgaacccgctttctcctgtcgacctggtcattgaccattcggttacggtagaccgtttcggtgatgatgatgcctttgaagaaaacgtccggcttgagatggagcgtaaccatgagcgctatgtcttcttacgctggggacaacaggctttcagccgcttcagcgtggtgccgccgggcaccgggatttgccaccaggttaacctggaatatctcggtcgggcggtatggggcgaacagcaaaacggcgagtgggtagccttcccggacacgctggtcggtaccgattcacataccacaatgattaacggtttaggcgtactcggctggggcgtgggcggtatcgaagcggaagccgccatgcttggacagccggtatccatgctgataccggacgtcgtcggctttaagctgaccggcaagctacgtgaaggtatcaccgcgacggacctggtcctgacggtcactcagatgctgcgtaaacatggcgtagtaggtaagtttgttgaattctacggcgatggcctcgattccctgccgctggcggaccgtgcgactatcgctaatatgtcgccggagtatggcgcaacctgcggcttcttcccgattgatgcggtcacgcttgactatatgcgcctgaccgggcgcagtgaagagcaggtggcgctggtggaagcctatgcgaaagcccaggggatgtggcgtcagcccggagatgaaccggtcttcaccagcacgctggcgctggatatgggtagcgtcgaagccagtctggcagggccgaagcgtccccaggaccgcgtggctctcggcgatgtgcctcatgcctttgctgccagcaccgaactggaggtgaaccacgcgcagaaagataagcgaccaatcgactataccttaaacgggcagcagtactcgctaccggacggggcggtggtgattgctgcgatcacctcctgtacgaatacttccaaccccagcgtgctgatggccgctggcttgctggcgaggaaagctgtcgagctgggcctcaaaccgcagccgtgggttaaagcatcgctggcgccgggatcgaaggtggtttccgactatctggcccatgcaaagctgacgccctatctggatgagctgggatttaacctggtcggttacggctgtaccacctgtatcggtaactctgggccgctgccggatcccattgagcgggcaatcaagcagggcgatctgaccgtcggggccgtgctttccggcaaccgcaactttgaaggacgtattcatccgctggtaaaaactaactggctggcttcaccgccgctggtggtcgcctacgctctggcgggtaatatgaatcttgacctgacgcgtgaaccattagggaccggtaaagagggtcagccggtgtatctgaaagatatctggccgagcggcagcgaagtggcccaggcggttgagcaggtctcaacggagatgttccgcaaagagtacgctgaagtatttgaagggaccgccgagtggaaggcgattaaagtggatcgctctgatacctacgactggcaggatgattcgacctatattcgtctgtcgcccttctttgatgaaatgggcgttgaacctgaaccggtggaggatattcatggcgcgcgcattctggccatgctgggcgactcggttaccaccgaccacatctcaccggcgggcagcattaaagccgacagtcctgcggggcgttatctgcagaatcacggcgtcgaacgcatcgactttaactcctacggctcacgtcgcggcaaccatgaggtgatgatgcgcggcacctttgccaacatccgtatacgtaacgaaatggtgcccggcgtggaagggggaatgacccgccatcttccggatagccagcctattgctatctacgatgctgcaatgctctataaagcggagggcacgccgctggcggtcattgccggcaaagagtacggttccggctccagccgcgactgggcggctaaaggcccgcgtttgctgggcgtcagggtggtgattgccgagtcattcgagcgtatccaccgctccaacctgattggtatggggattctgccgctggagtttccgcaaggggtaacgcgcaaaacgctggggctgaacggcgaggagcggattgatatcagcaacctgcaggctctacagccaggtatgacggtaccggtcaagctcacccgcgcggacggtagtcaggaggtcattgagtgccgctgccgtatcgataccgcgactgagctgacctactatcagaacgacggtattttgcactatgtgatccgcaatatgctctaa

SEQ ID NO: 175141 - DNA, 591 bp, Klebsiella oxytoca
atgcagcttaaacgtgtggcagaagccaaactgccaaccccatggggcgattttctcatggtgggttttgaagaactggcaaccgggcaggatcacgtcgcgctggttttcggcgatatttcggggcaatccccggtgctggcccgcgtacactctgagtgtctcacgggcgatgccctttttagcctgcgctgtgattgcggatttcagctggaagcggcgctgtcgcatattgccgaagaggggcgcggtatcctgctgtatcaccggcaggaagggcgcaatatcggcctgctgaataaaattcgcgcttacgctttacaggatcaaggctatgacaccgtcgaggctaatcatcagctgggctttgccgccgatgagcgtgattttaccctgtgcgcggatatgtttaagctgctcaacgttgaacaggtgcgtctgttgaccaacaatccgaagaaggttgagatccttaccgaagccggaatcaacattgtcgaacgcgtgccgctgatcgtgggccgcaacccgaaaaatgcccactatctcgataccaaggcggcgaaaatgggccacctgctgagtaaataa

SEQ ID NO: 175142 - DNA, 768 bp, Klebsiella oxytoca
atgctgttgattgccagacgaaccgccgttggcgcggccctgctattgatcatgcctgctgtggtgtggatttccggctggaaatggcatccggaactgtcggcaggcatgatgaagctgctgtactgggtgaccgagacggtgacgcaaccctggggcatcatcacgcacgttattttatgcgcctggttcctgtggtgtctgcgatttcgtctgcgcgccgcggtagtcctgttcctgattctgggcgccgcgatcctgctgggccagggtatgaagtcgtggattaaagaccgcgttcaggagcctcgcccctttgtcatctggctggaacaggcccggcaggtgccggtcacccaattctacaccttgaaacgcaaagaacgcgctaaactggtgcatgagcagctggcccaggagcagcaaattccgcactttttgcgtaagcactggcaaaaagagaccggcttcgctttcccttctggtcacaccatgtttgctgccagctgggcgctgcttggcgtaggtctgctgtggccccggcgtcgttgggtaaccatggcgctgctgctgacgtgggccgtagcggtgatggggagccgcctggcgctgggcatgcactggccgcaggacctgatcgtcgcgacgctcatttcctggctgctggtgaccctggcgacctggcttgcccagcggttctgcggtccgctatcgccgccgggtgaagaggcgcaggatattaaaaaaagggcggcagcgccggaatag

SEQ ID NO: 175143 - DNA, 309 bp, Klebsiella oxytoca
gtgaaatattttctaattttcttattggtgttagcaatcttcgtcatttcagtgacgctgggagcgcagaatgaccaggtggtcacgttcaactatttgctcgcgcagggtgaattccgtatctcaacgctgctggccgtgctttttgctgccggttttgccatcggttggttgatttgcggccttttctggctgcgcgtccgcgtctctctggcgcgtgccgagcgcaaaattaagcgtctggagcatcagattgcgccagccggcgctgcgcccgctgaagccggtgttcctgcggtgaaggaataa

SEQ ID NO: 175144 - DNA, 1170 bp, Klebsiella oxytoca
atgctggagttgttgtttctgcttttgcccgttgccgcagcatatggctggtatatggggcgcagaagtgcacaacagtccaaacaggacgatgcgagccgtctgtcgcgtgactacgttacaggggttaacttcctgctgagcaatcagcaggataaagccgtcgatctgttcctcgatatgctgaaagaggataccggcaccgtcgaagcccaccttacgctgggcaatctgtttcgctcgcgcggcgaagttgaccgcgctatccgcattcaccagagcttaatggaaagcgcctcgttaacttacgatcagcgcctgctggcggttcagcagctggggcgcgattatatggcagccgggctgtatgaccgggcggaggggatgtttaaacagctggtggatgaaacggattttcgccttggtgcattacagcagctgctgcagatttatcagtcaaccagcgactggcagtcggcgattgaagtggcggaacgcctggttaagctcggtaaagagaagcaccgcggcgaaatcgccaacttctggtgcgagctggcgctgcagcaaatggcgggcaatgacctggataaggccatggggctactgaaaaaaggggccgctgcggacaagaacagcgctcgcgtctccatcatgatgggccgggtgtggatggagaagggcgactacgctaaagccgtcgagagcctggagcgggtaattgagcaagacaaagaactggtcggtgaaaccctggagatgctgcaaacctgttaccagcagctggggaaaatcgacgagtgggaagcgtttttacgccgctgcgcggatgaaaacaccggggcgacggccgacctcatgctggcacaaatccttgagcagcgagaaggaattgagtccgcgcaaaactatgtgacgcgccagctggagcgccacccgacgatgcgcgtattccataagctgatcgattaccatattaatgaagccgaagaggggcgtgcgaagcagagcctgggtgttctgcgccagatggtgggcgaacaggtccgcagcaagccgcgttaccgctgtcaaaaatgtggtttcaccgcgcatacgctgtactggcactgcccgtcgtgccgctcgtggtccaccattaagccaattcgcggcctggatgggcagtaa

SEQ ID NO: 175145 - DNA, 738 bp, Klebsiella oxytoca
atgacgtctactgctacatcttcttcccgcgttgtcacatcctctcccgtcgtcgttgctcttgattatgataaccgtgataaagcgctggcgtttgtcgaccgtatcgacccgcgcgactgtcgcctgaaggtgggtaaagagatgtttactctactggggccgcagtttgttcgcgacctgcatcagcgcggtttcgaagtttttctcgatctaaaatttcacgatattccgaataccaccgcccgcgcggtcgccgcagcggctgagctcggcgtctggatggtcaacgttcacgcttccgggggggcgcgtatgatgaccgccgcacgtgaagccctacaacctttcggcaaagacgccccgctgttaattgccgtcaccgtgctaaccagcatggaagccagcgatctacaggatctggggattacgctttctccagccgactacgccgcgaagctggcggagctgacccagcgctgcggtctggatggcgtggtatgctcggcgcaggaagcggttcgctttaaacaagaacggggccaggcgttcagactggtgacgccgggcattcgtccacaaggcagcgacgccggcgaccagcggcgaattatgacgccggagcaggcgcaggcagctggcgtggattatatggtcattggtcgcccggtcacgcagtctgccgatcctgccgctacgctgcgcagcatcaacgcatcgttgaataaggaggcatga

SEQ ID NO: 175146 - DNA, 327 bp, Klebsiella oxytoca
atgagcgattccaatagccgactggtgtactcaacggacagcggtcgtattgatgaacccaaaccggtacaagcgcgcccgaaaggggacggtatcgtgcgcatccagcggcagacaagcggtcgtaagggtaagggcgtctgcctgattagtgggattgatgaaaatgatgaagcgctggctaaacttgccgccgagctgaaaaagaaatgcggctgcggtgggtcggtaaaggacggtgtgattgagattcagggcgataagcgcgagctgctaaaaacgcttcttgaagccaaagggatgaaggttaagctggctggcggttaa

SEQ ID NO: 175147 - DNA, 222 bp, Klebsiella oxytoca
atgatgacttcaatgaacaaaaaaatggccgctgtggttctggccgtcactgttgcaatgtctctgagcgcttgttcgaactggtctaaacgcgatcgtaataccgctatcggcgcaggcgccggtgcgctcggtggcgcggtgcttaccgacggcagcaccctgggtaccctgggcggcgcggcagtcggcggtattattggccaccaggtaggtaaataa

SEQ ID NO: 175148 - DNA, 750 bp, Klebsiella oxytoca
atgaacgcccgacaacaaagtattttgcaaatggtcatcgataaaggccgtatgagcgtggccgatctcgcgaaaatgaccggtgtctctgaagtcaccattcgccaggatttaaactcattagaaaagcagagctacctgcgacgtacccacggcttcgccgttccgctggacagcgaagatgtggaaacccgcatgatgacccatttcgccattaagcgagagctggctgcgcgggccgctacgctcgtctcctccggggaaacggtatttatcgaaaacggcagctgcaacgccctgctcgcccgtacgctcgccgagcgcggcgatatcactatcatcaccgtcagcagctatatcgctcacctactgaaagagacgcccggagaagtgatcctgctgggtggaatctaccagaagcgcagcgaaagcatggttggtcctctcacgcggcagtttattcagcaggttcacttcagcaaggcctttatcggcatcgacggctggcaggccgaaaccggatttaccggacgagatatgatgcgcgccgatgtggtgaacgcggtgcttgaaaagggctgtgaggcgattgtgctgagcgatagctcgaagttcaacgttgtgcacccatatccgctcgggccgatcggccgattcaaccgcattattaccgacgacaatctaaacgatgccgtgcataaccagttaacgcagtgcggcttaaccgtaaatatcgttaaccatccctga

SEQ ID NO: 175149 - DNA, 183 bp, Klebsiella oxytoca
atgtcagatctgaatgctcgcctgctcgcccaacgtatcgataccgtgctggatattctggttgccggggattatcactccgcgatccataacctcgaaattctgaaagctgaacttcaggcgctttcgaacgacgaacaggaaaacaaacccggccagcctaaggccccgtgggaaatttga

SEQ ID NO: 175150 - DNA, 1935 bp, Klebsiella oxytoca
atgtttcaggacaacccgctgctagcgcagcttaaacagcaactgcattcccagactccgcgcgttgaaggggtcgttaaagggacggaaaaagggtttggcttcctcgaagtcgactctcagaaaagctatttcattccgccgccgcaaatgaaaaaagtcatgcatggcgatcgtattattgccgtggtcaatactgaaaaagaacgcgaaagcgctgagccggaagaactggttgagccgttcctgacgcgttttgtcggcaaagttcataagaaagacgaccgtctttccatcgttcctgaccatccgctgctgaaagatgccattccctgccgcgctgctcgcggcgtagagcatgattttaaagagggtgactgggccgttgccgaaatgcgccgtcatccgctgaaaggtgaccgcggtttctacgctgagctcacccagtacattaccttcggcgacgatcatttcgcaccatggtgggtcaccctggcgcgccataatctggaaaaagaagcgccgaatggggtagcgaccgagatgcttgatgagggtctggaacgccacgatttaacggcgctgactttcgtgaccatcgacagcgccagcaccgaagatatggacgatgcgctgtacgccgagctggccgctgacggtaagctgcacctgactgtcgccatcgccgatccaaccgcctggattgccgaaggcagcaagctggacaatacggcaaaaattcgcgcctttaccaactatctgccgggcttcaacattccgatgctgccgcgcgaactctctgatgacctctgctccctgcgccccaacgaagttcgtccggttctggcctgccgtatgatcctggctgctgacggggccatcgaagacaatattcagttcttcgcggcgaccatcgaatcgaaagcgaagctggcctacgatgatgtgtccgactggctggaaaataacggcggctggcagccggagagcgagataatcgcgcagcaaattaacctgctgcacgatgcctgcctgcgccgtagcgaatggcgcaaaaaccacgcgctggtgttcaaggaccgtccggattatcgctttgtgctgggcgaaaaaggcgaagtgctggatatcgttgccgaaccgcgtcgtatcgctaatcgcatcgttgaagagtcgatgattgccgccaacatctgcgccgcccgcgtgctgcgcgataagctcggtttcggcgtgtataacgtccataccggattcgatccggccaataccgagcagctcgcggccttgctgaaaacccacgatgttcacgttgatccggtggaagtactgacgctggagggcttctgcaagctgcgtcgcgaactggacgcgcagccgtccggtttcctcgacagccgtattcgccgtttccagtcctttgccgaaatcagcaccgagccgggcccgcactttggcctgggtctggaagcctatgcaacctggacctccccgatccgtaagtacggcgatatgatcaatcatcgtctgctgaaagcgattatcaaaggggaaaccatctctcgtccgcaggatgacgttgcggtgcaaatggcggaacgtcgccgcctcaaccgcatggcggagcgcgacgtcggcgactggctgtacgcccgttatctgaagccgcaggccggcactaatactcgctttgctgctgaaattatcgatgtcagccgcggcggtatgcgtgtgcgactggttgataacggcgcagttgcctttatcccggccccattcctccacgccgtacgcgatgagctggtttgcagccaggaaagcggtaccgtgcaaattaaaggcgaggtcgtgtataaggtgacggatgttatcgatgtcacgattgccgaagtccgcatggaaacccgtagcgtgattgcgcgccctgccgcctga

SEQ ID NO: 175151 - DNA, 1149 bp, Klebsiella oxytoca
atggagcaacgccgcgtttacggcaaaaaccactggtatcatgagacccagtcaacaatctgcccggtggatgtattgccgctcgtccctgaagccgcccatgtcgaagatcgttttctcctcgatctcacgctacctgaagatctgcttaaggcgcatgcgcgctggctggcacccgccagacggctggctgatgccctgtttcctgcttctgtgagcgtaaatcgtctacagacatttagcgcctatgaccggcttagcacggcgctgaccgtcgcccaggtttatggcgttcagcggctatgcaatcactacgcagcccgcctggcgccgcttcccggcccggactcctcgcgtgaaagcaatcgacgcctggcgcaaattacccaatacgcccgccagctggcgagctctccttcactgatcaacgcgctctcccgcagccagcttgacgaagtcggcctgaccagtcgcgacattattcttatcaatcagattattggctttatcggcttccaggcgcgcgctatcgccgcctttcacgccgcgctgggttacccggtgcgctggatccccgggatgccgcagcaggaagatgcgccagaggcgcttttcattgcccgagagagcgactggcggcccggactcgacgactcagatttacgctatgccgatgatgagcgtcagtcgctgctggcaaaatggcaaaagtatcccggcctgtttgaactggcgccgctgctggcgacccaggaaccgccgctggatctgcaggaactgctcctgagccacctcagcgatcagccgccgttcgccgctcaggtggcgctgatcgcagcgcggattaacggcagcatcagctgcttcaatgcctgggcctcgcgatgtccggattttgccgatgctttacgcggtatcgttcctgacgcgcagtcgcgcagagaagagcatgtcatcgagcaccggcttttacagtccatacagcttttaacccgctcccctgaccgttttagcgccgcccacctaagcccattgacggaatgcgggctttcccgcaccgccgccatcgatcttctcgcctggtgcgggctatgcggttggatgaatcgtctgaaaatcgccctcggcaatggatgtcagcagacgtaa

SEQ ID NO: 175152 - DNA, 789 bp, Klebsiella oxytoca
atgggttttctttccggtaagcgcattctgttgactggccttgccagcaaactgtccatcgcctggggcatcgcacaagcaatgcaccgtgaaggggctgaactggcgttcacctatcagaacgaaaaactgaaaggtcgtgtggaagaatttgccgccgcgctgggttctaacattgtcctgccgtgcgatgtggcggaagacgagagcatcgagtctctgttcaccgagctggcaaaagtatggcctaagtttgacggtttcgtacactctatcggctatgctccggcagatcagctggacggcgactacgttaatgcggttacccgcgacggtttcaaaatcgctcacgatatcagcgcctacagctttgtggcgatggcgaaagcctgccgcggtatgctgaacccgggctccgccctgctgacgctctcctacctgggcgcagagcgcgccatcccgaactacaacgtgatgggtctggcgaaagcctccctcgaagctaacgtccgctacatggctaacgccatgggtccggaaggcgtgcgcgttaacgccatctctgccggtccaatccgtaccctggcggcttccggtatcaaagatttccgtaaaatgctggcgcactgcgaagcggtcactccgatccgtcgcaccgtcaccactgaagacgtgggtaacagcgcagcattcctgtgctccgacctgtctgccggcatctccggcgaagtcgttcacgttgacggcggcttcaacatcgccgccatgaacgagctggaaatcaaataa

SEQ ID NO: 175153 - DNA, 543 bp, Klebsiella oxytoca
atgattgttccggttcagttttctaccctgccggtcacgccgtggaaaaacggcggtggggaaacgcgtgaaattgtcagcgttgcttcgccagatgcgccctttctctggcgcgccagtatcgctacgctggaaaaggatggcccgttttctccttttcccggcgttgaccgggtcatcacccttcttgagggccagccgctgtggctacggggcgacaatattgctcagcgcctgatgctctggcagccatgggcttttgccggcgaatggtctcttgccagcgaaggcattagcggatgcggtctcgatttcaatattatgacccagcgcgcgcgtgccgcctcgcgggttagcgtcgtcgctgagccgcagcggcccggcgcggagggtatcgcatgggttctgcggggacactggcggatggcggatacgatttaccaggccggctcggggatctggtggcagaatcaatcgcctggcgagctgatcccgcactctgaggacgcccggcttttactggcggaaatcgagcgccgctaa

SEQ ID NO: 175154 - DNA, 810 bp, Klebsiella oxytoca
atggtcgaaacattgcttgaagtacgcaatctgagtaagacctttcgctaccgcaccggctggtttcaccggcaaacggtagaggcggttaagccgttaagctttaccctgcgcgagcgccagactctggcgattatcggcgaaaacggctccggcaaatcgacgctggcgaaaatgctcgccgggatggtcgaacccagcacaggcgaactgctgattgatgaccatccgctggcgtttggcgatttctctttccgcagccagaagattcgcatgatttttcaggatccgtcgacctcgctcaatccacggcagcgaatttcgcaaatcctcgatttccctctgcgtctcaataccgacctcgaacccgaggcgcggcagaagcagattatcgaaacgttacgcatggttggtctgctgcctgaccacgtcagctattatccgcatatgctggcaccgggccaaaaacagcgtctgggcctggcgcgggcgctgatcctgcgcccgaaagtaatcgtctgcgatgaagcgctggcgtcgctggatatgtcaatgcgttcccaactgattaacctgatgctggagctgcaggaaaaacagggtatctcctacatttacgttacccagcatttgggcatgatgaagcacatcagcgatcaggtgctggtgatgcaccagggtgaagtggtcgaacgcggcagcaccgccgacgtactggcctctccgctgcacgatctgacaaaacgtctgattgccggccatttcggcgaggcgctgaccgccgatgcctggcgtaaagacggtaaataa

SEQ ID NO: 175155 - DNA, 993 bp, Klebsiella oxytoca
atgccgttactcgatatccgaaatttaaccattgaattcaaaaccaacgaaggttgggtgaaagccgtcgatcgcgtcagcctgaccctcgctgagggggaaattcgcggcctggtcggagaatccggctcgggtaaaagcttaattgccaaagcgatttgcggcgtcaccaaagacaactggcgggtgaccgccgaccgtatgcgtttcgacgatatcgatctgctgcgtctctcagtgcgcgaacggcgtaaactggtgggccacaacgtctcgatgatttttcaggagccgcaatcctgtctcgatccttccgaacgtatcggcgaacaactcacgcagaatatccccggctggacctttaaaggccgctggtggcaacgttttggctggcgcaagcggcgcgccattgagctcttgcaccgcgtggggattaaagaccataaagatgcgatgcgcagcttcccctacgagctgacggatggtgagtgtcagaaggtcatgatcgccatcgcgctggctaaccagccgcggctgctgatcgccgatgaaccgactaacgccatggagccgacaacacaggcgcaaatcatccgcctgctgacgcggctgaaccaaaacaacaacaccacgattttgttgatcagtcacgatatgcagatgctcagtaaatgggcggacaaaattaacgttatgtactgcgggcagacggtggaaaccgcgccgagcgaggagctggtgacgattcctcatcatccctatacccaggcgctgattcgggcgattcccgatttcggcagcgccatgccgcacaaaagtcggctcaataccttgccgggcgctattccgctgctcgaacagctgcctatcggctgccggctcgggccgcgctgcccttacgcccagcgtgaatgtatcgaaacgccccggctggtgggcgcgcgcaaccacctctatgcctgtcacttcccgctgaacatggagaaagagtga

SEQ ID NO: 175156 - DNA, 891 bp, Klebsiella oxytoca
atgccctacgatagcgtctatctggagaagcgcccgccgggtgcgctgcgcaccgtttggcgaaaattctatggcgatactaccgctatgatcggcctgtacggctgcgcggcgctggtgctactgtgcgttttcggcagctggttcgcgccttacggtatcgatcagcagttccttggctatcaactgctgccgccgtcatggtcgcgctacggcgaagtctcgttcttccttggtaccgacgatctgggccgcgacgttcttagccgcctgctgagcggcgcggcgccaacggtcggcggcgcgtttgtggtgacgctgggcgctaccctactgggtctggtgcttggtgtgattgccggtgcgacccacggcctgcgctcggcggtaatgaaccatattcttgataccctgctgtcgatcccgtcactgctgctggccatcatcgtggtcgccttcgccggacctcacctcagccacgcgatgttcgccgtctggctggcgcttctgccgcgcatggtacgctcggtttacagcatggtgcacgacgagctggaaaaagagtatgttatcgccgcccgccttgacggagcgtcaaccctgaatattttatggttcgcggtgttgccaaatattacctctgggctggttacggagatcacccgagcgctctcgatggcgattctggatatcgccgcgctgggtttcctcgacctcggcgctcagctaccttccccggagtggggagcgatgctcggcgacgcgctggagctgatttacgttgcgccgtggacggtgatgctgccgggcgcggccattatgattagcgtcctgctggttaacctgctgggcgacgggatccgccgcgcaattatcgccggggtggaataa

SEQ ID NO: 175157 - DNA, 1188 bp, Klebsiella oxytoca
ttgcttaccgacacaaaattaagaaaagctcttggcaaaaagagagaccagatcgaggtcatatcggacgcccatggtctgaatgtccggttgtctacttccggcagtataacattcttttaccgctacagatggaacgggaaagccgctcagctaacgattggcgattatcccaccacctccttatctcaagctcgcgaacgtagacagcagttcagggcctggttgacagaaggactcgatccgagacggcaaacagttctggagaaacagaaaaaagtcgaagcgctcaccgttaaagaggctttcgattactgggaaaagtattactgcatccccgaaggtcttgtgaaaatcaaggttaaccgacgggacttcaataaccatatagcgcctgtgctggggaacatgattgttgatcagaccactaaagtgcactggcttaacctttttgatggcatggggcgaagagttgtcactggtcagatgcttgggctgatgcagcgtacgttccgtttttgctccaatcgaggggtaattaatgtgaacccaattgagagccttaggcgctctgacgtaggtctcacagcatccgtcaaagatcgcagattgagtgatgaggaaatcaaaacagtttggaatatccttcctgaattgaagtacagacaacagctgataatgaagtttctcatcatgactggctgccggagtacggagatcaggacagcaagatgggagtggttcgattttcatgagcaaacgtggaccattccggcaagcgattataaaaccgggaaatcggtcagaagggcacttcccgaggcagtagtaagaatgatgttagcagagaaggaaacgtcagtttcaaaacacgttgtgacactgtcacgctacagagggccagaagatgacagaccgccactacaaccaaacgtcgctctgttttctgctcagattatagctaaaacaggcatgaagccctggtctctccatgacctcaggcgaacagtggcgacacgcctttctgaattaggtgcgccgccacatgttgtggaaaaactgcttggccatcatatggcaggtgtcatggcacgttataacctacatgattatctggatgatcagcgtcactggcttgctgtttggcaggatcaccttgagaagctggttggtcagcctctggtttga

SEQ ID NO: 175158 - DNA, 1110 bp, Klebsiella oxytoca
atggaaaacactaacattgttacagccgaacagcaggcaccaaacaccatttcagctagcaacgcgatctttaacgttcaggctctcggtcagttaactgctttcgcaaaccttatggctgattcacaagtgacagtgccagctcaccttgcaggtaagccagccgattgcatggccatcgttatgcaggctatgcagtggggcatgaatccctatgcagtcgcgcaaaaaacgcatctggtaaacggcgtgctcggatatgaagcccagctcgtcaacgcggtaatcgccagttccagcgctattaacggtcgatttcattatcgctacggcggcgactgggaacgttgcacaaggacgcaggaaattaccagggaaaaacacggtaaaaatgggaaatacagcgttacagaacgggtgcgcggctggactgatgaagacgaaatcgggttattcgtccaggtcggcgcgattctgcgcggtgaatcagaaatcacctggggggagccactttatctctctggagtcgtcacacgtaattctcctttgtgggtttctaacccgaaacagcagatcgcttatctgggcgtcaaatactgggcacggctgtattgcccggaagtcatcttgggtgtttacagcccggatgaagttgaacaaaggaccgagcgagaaataaacccggcgccggcgcaaagaatgtctgtcgcagagatcaccagcggaacagacatcaccaccagcgcgcaggattcagctctcaatattgattccctggcagatgatttccgtgaccgcattgagcgcgccgaatcggtcgatgcagcaaaagccatcagggcggatctggataaagagaaagctgtgttgggcactgttcttttcaccgaactgaaaggtaaagccgtgcagcgttatttcatggtagacgcccgaaacaaagttgaggccgcgatcaactctctacctaatcccggagaaccggaagccgtcgaactgttcgctaaagctgaaggcattctcaacggcgcgaaacgccacctcggtgatgaactgtatgaccagttccgcatcgccctagacgacatgaaaccggaatacgtgggttaa

SEQ ID NO: 175159 - DNA, 3057 bp, Klebsiella oxytoca
atggaatatttttatctgataaaagcgactcaaaaatcgggtaaagctgatgccataatctggcgtactaataaatcagaagctcgcgcccttctgcagctggacgtcgatctggaagacgctgggatcgaaacaggccgcggcaaagactatcaaaaaccaattcgcaccgatttcccggtattcaatgaccttccggcggaaggtgttctcgattactcatggtgcgaacgctaccagctcggcgatgatggtcgcacctgggctctgaagccaggtcaggcgcctgcggagcatcacatcaatgatgccgaagtatccgctgagcccgtggaaactttcggtagcgatgaataccaggacgattcgagcgcgctttttaacgtggcagaactcccctttcgcgctcagttgctggcgcagtacatggctgaagaacgtcacgtttatcatatcagcatgcctcaccggcaggagctgtcagctcttgaaatggacactgataatgcggccatccaggacctgatcctggccgccgagaatgtccctgaaatcaaaaaatacgatatgccggccctctggaaattcaccagcgccaataaaaaagtcttcccggaagggaaacgacatgagctcggcaaacgtatccagtttgcaaaactgtggttcgccacgaacgcgatcgaccgcggcattctcaccagggaatgggctgccggtaactgcatttcttcggttttgaaaatcgatgcaggtacgaatgctggcggcggtaataaaaccgatcgcaaccctgactacacccatacccttgatacgctcgatgtagaaatagctctggccacaatgccaatggatttcgatttctacaatttcccggcatcaattcaccgccgggccaaagagatcgtccagaagaaagaaagtccgttcaaggaatggtctgcagcgctgcgcaaggttgcaggcatcctggattattcccgcgccgccatttttgcccttattcgtggcgccaccagcgacattcatcatttcccggtaagtctgcagacctatatcaatgcgaacctgaccgagcataagcatgacgccccttctactgagacgcttgaaaaagctggtcatgtttcatctgccgccgtcactctggacgctgtgaaaaaggctatcgatggagatgaaggtgtgcctgacctggaaactctcccaactgactttcaggtaattggcaccgaacaggtgaaagaagctcaaaagaaacgccctgacgctaatcaggttctggccgccgaacgcggcgaatatgtcgaaggtatcagtgaccccacggatccgaagtggataaccgaagacctgaccaaacccaaacagcctgaagtttcaaacatgggcaatggtgttttttcgattgatggtctgatggatagccagccagcaccagcaccagcaccagcaccagcactttctatcgtggaccaggcgcgccagcgcgctgcagaggaaaaattacatccagctaattccggggaaaccaccagcgatgtgcagatggaaacggctcagccggtcgaagacgaaaatgataatgcggtatcagcaggcgaaggcgctgatgagcctcctgcgcaaacaattgccgtgaacatgagcaaaatactggctgaacgctgcccggatcttaccgccgaagtgctgaaaaaccaggtttccgagagtgctcatagcgatgaagaggaagaggctgaacaagcagcaccagcatggccggagtatttcgagcctggtcgatatgaaggcgtgccaaatgaggtctaccacgccgctaacggcatcagctccacgatggttaaagatgcccgggtatcgctgatgtatttcgaggcgcgccacgtatccaaaaccatccagaaggtgcgctctcctgttttggatatgggcaatctggtgcatgcactggcgctgcagcctgatcagctggaaaaagaattcagtatcgagccggaaattccggaaggcgccttcaccacgacggcgacgatccgcgcatttatcgatgaatacaacaacgggcttccggttttgctcagcgcagaggacatcaagagattcctggaggaatacaacgcgaacctgcccgcccaggttcccttgggtacatcagttgaagaaaccggccagggttatatgtctttacctgctgagttccagcgcattgaagacggtcagaagcaaaccgccgccgcaatgaaggcctgcatcaaagaatacaacgccaccctgcccgcccaggtgaaaactagcggtggccgcgatgtcttactggaacagctggcgcttattaatcctgacatggttgctcaggaagcacagaaggcgcagcccctgaaagtctctggcacaaaggccgatctgattcaagccgtgaaatcggtaaaaccggatgccgtgtttgccgacgagctgctggatgcatggcgcgagaacccggaaggaaaagtgctggttacccgccagcagctggctacggcactggccattcagaaagcactgttgaatcaccctaccgccggcaagttgttgacgcacccgagccgtgccgtcgaggtgagctatttcggcattgatgaggaaaccgggctggaagttcgcgtgcgccctgaccttgaaatagacatgggcggcctgcgcattggtgcggacctgaaaaccatcagtatgtggaacattaagcaggaaggccttcgcgcgaagctgcaccgggaaatcatcgagcgcgattaccacctgagcgcggctatgtactgcgaaaccgcagcccttgaccagttcttctggatattcgtcaacaaagacgagaactaccactggatcgccatcatcgaggcatccgaagaactgctggaactcggcatgctggaatatcgcaaagcaatgcgtgccatcgcgaacggtttcgacactggcgaatggccggcgccgattaccgaagactacaccgaagaacttaacgattttgatatgcgccgtctcgaagcgctgcgcgtacaggcataa

SEQ ID NO: 175160 - DNA, 156 bp, Klebsiella oxytoca
atgcagaaaaaatgcggttactgccgtaaagcaatcgaggaaaaaccagtagtaagcacgctgttatatctccaggggaaccaactcgcacggaaagaaaaagagtactgctctgaacgctgcgcctcttacgaccagatggcgcacgagggctaa

SEQ ID NO: 175161 - DNA, 192 bp, Klebsiella oxytoca
atgagcacgatgtttgccctggttctcaccgtcagcatgctgacgggcggtaatcaggatgtcctgctcggcgtttacgacactgagaatgactgcaaggcagctgcagaagagcaacacgtgaaagctgaatgttatccgctgaaaggcgtacttgacgagcatccggccgggttcacggtgcaaatgtag

SEQ ID NO: 175162 - DNA, 222 bp, Klebsiella oxytoca
atgccgccagacgaagatggtgagaatgtttcatcgcagacagaacctgaagcgcctggccggaacgaactggatgacaaagagaaagcccttttagctctctttaaccagatgccggaagccgagaagaacaggctaatagtccacgcaaaagccactttaaaagaactagacctcctcaaggatgacgttctcagcatcatcaaagatattaacgattaa

SEQ ID NO: 175163 - DNA, 228 bp, Klebsiella oxytoca
atgaatacgaatctaaaaaccattatctgctcaatcatgagccagaccgagctggctaaacgactcggcacaacccctcaaacagttagcctttggctgaatagcgagacccccgctcatcgcgtaattccagtttgtgaggctctcggatggaaggttacccctcatcagatgcgtggtgacatttacccaaaccccactgacggcctgccgaaacaggaaggctga

SEQ ID NO: 175164 - DNA, 537 bp, Klebsiella oxytoca
atgcaaacactttcctttcaacaaaataccggattcaacaccggcgccctgataaagcgaaatcagctgagagagtcagatcacgacgctattcgctctgctgttcgcgcctgggctgcagctgagggccaggatgttgtgtcggcacatatcatcgatgagtggcgccagcagggcggcgaggagatcgcgttccctgatgatatcagccgtgcccgacagaagctttttcgctacctggacaacccggccgagtctgagcgctatcgcgagtacgttcgccttcttaccccggcaatcatggccgttcttccgctggagttccgacatcgtctgatgcctcaggacgatattttgtcgcgcctgtcttcggccatgaaggaatgcgctgaagcaaagcaggcggtgatgctgaacgcgccagagcaccagaaactgaaggaggtgagcgagggaatagcgtcgcttttcaggctaatgcctgagcagacaggagcactgatgacgatcgtgagctcaatgctcggcgtgatgtaa

SEQ ID NO: 175165 - DNA, 861 bp, Klebsiella oxytoca
atggccgacctggctaacgggtataccaagatcgcaaacgagatacagaagctcaagccgcgtctgcggatgtcaggtcgtgagtggcagtgtcttgaggctgttatctggcttacctatggatggaacaagaagcaggaccgagtaacaaacacggtgattgctgagctgacagacctcggagagtcgcatatttccgacacaatcaaatctctcgcggagcggaaaattatcttcgctcataagcagggagtgatgaaaattgtcggtataaatactgagctatctgagtggattttagacaaaccgaaaacgggaaaactcttcccggaatcgggaaaagtgttaccgaaaacgggaaaacctttcccggaaacgggagacacccaatacaagaacaagaacaatagtaaaagatcttcttcgtctcggaattctaaagaatcccgaaacgaggaaaccttgaagtttctctctcgtcatccagaagcggccgatgggatttatacccctgcgggtaaatcctggggaacagctgacgacctcaaagccgcgcgatggattttcgataaagccctgaccgtgaatgcctccctctctgagccgaactgggttgaatgggcgaacaccatccgcctgatgcgcctgcaggacaagcgcactcactatgagatctgcgaactgttcaagtgggcaaatgaggacggtttctggcaggaaaacatcctttgcccctcaaaactacgtaagaaatgggatcagctcacaactaaacgcctgcgcagccatggtccatcaagaaactcatcaggcgccagtgcgctggacaacacagactggatcgacggggtactcgaatga

SEQ ID NO: 175166 - DNA, 744 bp, Klebsiella oxytoca
atgaaatctatcgcagaaagcatgcacaacttcgaccgtgaaaacttccagcgagtggctgccgggcttccggaaatgcaggacgagcaggcagtaaagcgccaggcggccaagactgcggagatcttcaacgagctgttccgccagttgcttgccgtcttcccggtgctggccaacaaatcagtggaagacctcaacgagatgcggcgccagtggttgttggcgttcaaagagaacgggatcaccacggttgagcaaattaacgcaggaatgcgggttgcgcgcaaacaggaaaaaccattcatgccatcaccgggacagttcgtcgcctggtgtcgttctgaggaggcggtaactgtaggcctgccagatgcgagtgagctggttgaaatggtttaccagtattgccggactcgcggccagtatccagacgctgagtcgtacccatggcctgagcacaaaatcgaaccgttaacgcttaaacacaaagcctgctactggatggttactggcttgtacgcagacatgcgcgcaaacggcctcagcgacactgagctgcgacgtaagacgcaggatgagcttctgcgtatggttcgtcgcatcaagaccggtgaagctatccccgagccggttaaacagatcccaaagcttggcggacgtccgctgagtaacgagcagggcttaaacaaaatcgctgaaatccgcgcgaaattcggtttaggcagagggcggaatcatggctag

SEQ ID NO: 175167 - DNA, 369 bp, Klebsiella oxytoca
atggctagagcattatcagcatttgagcgcagagagtacgtccgcgcagtgattcggatcaccaggcatcaggggcgccttacgaccaccgaggcaatgaaaaaactggggctgagccgcgctactgtccagcggtatttttccgaagcagaagcgactggcgaggttgtccggcatggtcgtttgggattgttccgagatcagcgcgccgtcatcgattttgacatgaaacggttagggatggtgccaaaggctgcgtcagggatgaattacagcctgcttggttgtcctgtattccagcgtttcctcgatattcaggaaatgatttttacctgtacgccggcatcatcatcacgggaggccttatga

SEQ ID NO: 175168 - DNA, 204 bp, Klebsiella oxytoca
atgacaattgtgaaaacccataccggcatcgtgatcaccaaagacggtccgcaggcaaaaaaactgcaccagacagagcggatgtgggtcgttggcaaaaacgagttttaccacaaagaaaccgggcgccgtcactttgcagaaaatacgcgccgccggctgctgctggacaccatcaagcctatcggtgtgaagcatgtttaa

SEQ ID NO: 175169 - DNA, 264 bp, Klebsiella oxytoca
atgtttaaacagaacgaaaaatgtattgctcagattgctgagtatatcccgcgcgcctgccggggtatgcagctgcaggaggccaaagcgcgcctggagaaaaaaattgcgctctatatcgatgacggctgtgatgctgccgttcttaatgcggcctttgcgccagctcttaacagccatacgagggagtctttttttcgtgcatcgcagcgcagctgcattagggggccaaatgagcaactcactgcaaattctctgcattaa

SEQ ID NO: 175170 - DNA, 186 bp, Klebsiella oxytoca
atgagcaactcactgcaaattctctgcattaaagataccgagggatactggactgtaaatgagagatatccggcccgccagttctgtcgggcttttgctcatcttatgaaaatgcatgaaaaccactacacgcggcgtgaagacgtggcgaagatacgagcacgctattggatagactatggatag

SEQ ID NO: 175171 - DNA, 1080 bp, Klebsiella oxytoca
atgtttgatacgttaatactagagaactataaaagttataaaaaattagagttgaatgatttaaaaagaattaatttaattgctgggatgaataatacgggtaagacctctatacttgaagcaattttcatgcagcatgatagattggctggtgatgtatttttgcgtcctttgtttcggcgtggggtgcagcaggttgaagttaagcctgaatatatatttcacccttattttcatgactttaacatagataagccatttgttattacaactaaaggaggtggttttaaagatgtagctacatatactatggtttcagccaagagtaagactatggctgttaatcagaataatttaccaatgaattctgttttatcttcagcctcaacatttaaaaatgccgttgaaataacatacttaagcaataatgataaaaaaggaatggcgacgcttcaaatagttaataatcaactagaaatgaatcttgaatcggtgtcgcctgcatttcggacggcagtatttgttccggcctcagcaagagggaatagtttaagtgatgctgatttcatcagtcaattagatatggctaatggactagatgaatttgttaaatatctgaaaatgattgatagcaagttaaggggggtatcattattatcattaggtggtcagccaacattgtatgttgacgttggtctaaaaagaaaaatacctatggtacaaatgggtgaagggattagtaaattaacttcaatcctaaccgcaattttatcaaatcaaaatgctgtcattcttatagatgaaattgaaaatggaatccattattcattaatgccgaagatatggaaaataattttctcagcagctacgcgacaaaaaagccaagtttttatcactacccatagtcaagatgttataaacggtgtgtctgagtgttttaaagaaaatcccgatgataaatatgaggatgttttttcatatataagattagataagaatgataatggagaaattattcctaagcattatggcgcagcatctttagttgcttctgttgaacgtgattgggatataagataa

SEQ ID NO: 175172 - DNA, 630 bp, Klebsiella oxytoca
atgtcttcaaaaatcgagaggcaaaaattattgttggtcgaaggccgtgatgagattaatttctttagtgcatttctaaatgctgaaaaaatagatgatattcaaattatcgaatctaagggtaaagatcagttcccaactgagctagagttaattttaaatgatccagaatttcaaaaagttatatccatggggattgtaagggatgctgatgaaagtcaacaggctgccgtagaaagtataagttattacttaagaaaaaattcccttcctgttcctcaagggcataacagttttaaaagtgatggtaaaatgaatgttggtattttcattgcgcctggatttactgataaagggatgcttgaaagtttgatattagaggcgttaggcgatcatccagtaaaagtcgcctctaaaagatacatagatgatttgagggctgttttggctcctcttaatcaagactgtccatatgtattcccaaataatattcataaggcatacatgtacgcttttttggctggtatggagaagtttataccaagtgctggaatggctgctttaaaaggatattttgatttgacatcccctgtttttaatgatgttagagtttttttgaaaagtttataa

SEQ ID NO: 175173 - DNA, 234 bp, Klebsiella oxytoca
atgaaagttgaagtcacaattgataaacataaaaaactccctgatggcgccatacctgcgcttgagcaagaattgctgcgccgcttgtcccagtcttatgatgactgcaaattaaccattcgacgcacaagcaacgatggccttagcgttttgggcggcgctgatggcgataaaaaacgcgttgagcaaattctgcaagagacatgggaaagcgcagacgactggttttattag

SEQ ID NO: 175174 - DNA, 597 bp, Klebsiella oxytoca
atggcgcagcttcacttaataaaacaatctcaaggcatcctgatccccgcgacgccggagaccagtgattttctgcaatcaaaatgcaagctcggatccgttctggaagccgattataagcttgtccgcaatccggcgtttcaccgccgttactttgctttactcaatctcggctttgaatattgggaacctaccggcggggcgatttcgtctaacgagcgcaggcttatcacaggttacgccaaataccttgctgcatatggcgggagtgaatcggcgttgcttgatgccgccgggcaatatctcgaccggatagctgagaagcgatccggctatatcagtatttgcaaatccttcgatgcttaccgggcgtgggtcatcgttgaagccggccactatgacgccatacagctgccggacggcacgctgaaaaaacaccctcgcagcatttctttcgcaagcatggacgaatgcgagttccaggaactgtacaaagcatcgctggatgttctctggcggtggatcctctctcgttcattcaacagcctgcaggaagctgagaacgccgccaaccagcttttaagcttcgcggggtga

SEQ ID NO: 175175 - DNA, 303 bp, Klebsiella oxytoca
gtgagtatggcgaaccttcgcaaagcggcccgaggtcgcgaatgtacagtgcggatccctgattactgcaacggcaacccggaaaccagcgtgttggcgcattaccgcctggcgggtacgtgcggcacaggatgcaagcctgacgatactcaggcggcgatcgcctgcaacgggtgccatgacgtaattgacggcagaaccaaaaccaccgatttcacctacgacgaattgcgcctgatgcacgcagagggggtaatgcgcaccctggaaatctggcggaaagagggactcatcaaatcatga

SEQ ID NO: 175176 - DNA, 357 bp, Klebsiella oxytoca
atgaaaatctacgatatcacgcccatcggcaaacccaggatgaccagagctgataaatggaagcagcgtccggaagtaatacgttaccgggcgttctgtgatgaagctcgtctgcgcaaaattcacctgccagattccggcgctcacgtcacgttcgtcatgcctatgccgcaaagctggagtcagaaaaagagagcgcaatacgcaggacgtccacatcagtcaaagcccgactgcgacaatatgctgaaagccctaatggacgccctctatgaggatgattcacacgtctgggattgccgcatcaccaaaatatggggcgagaaagggcagatcatcattggggaatctctatga

SEQ ID NO: 175177 - DNA, 123 bp, Klebsiella oxytoca
atgaccctcgatcacttcatgcagtaccaaaccgagagcgttaagcgcgccagtatgccgccagtagcaaagcacaacctgaaccagaccaaaccaaaacagccaaagagggccgcagcgtga

SEQ ID NO: 175178 - DNA, 822 bp, Klebsiella oxytoca
gtgaatcttgaaaacacagtgaaataccacttcgcaaaatccacgctgattagcgattctccgcgtgctaccgcctctgattcactgaccggcaccgacatcatggcagcaatgggcatgacccaggaacgtgccgctatggggtatagcgctttcctgggcaagatgggcataagcaacaatgaccgggatcgggctatcggactattggctgagtacgcgctgacaaaatgcgataaggttgctgcgttgcgaaagctctcgccaagcgtaaaaccccgggttatacggctcctcgcagagtacgcctttgaggattactcccgcagtgcttccagtaaaaaaacctgcgactgctgcaatgggtctggattcatcgacgcagtggcgttcaccaacaaagtaacgtatccggacggcaaaccgccgaagtgggtcaaagttacaaaggggatctatccatcatactgggaggaggtgaagtcggtccgggagcaggtccgggtgctttgccaaaagtgcaagggaaaagggactgttagcgccgcctgtaacgactgccacggtcgggggaaggtagtgaaccaggatgagacggagaagcagggagtgcctgtgatgggtaactgtaaacgttgtggcggtcgcgggtatgagcgaatcctctccactgctgtacatagggccatttgccagataacggacgccatcactctggacacctggaaaaagtcggttaaaccgttctttgacgtgctgatcactaaattcgatatagaggaggcgtgggcagaggcccaactcaaacaaataacgcggtga

SEQ ID NO: 175179 - DNA, 312 bp, Klebsiella oxytoca
atggcaaagcatatgcaagacaaagaaagcatggccggaatcacctggctggctctgctgatcattgctggctggggcggccttgtccgattcctgatggatgtgaagcagggcaaagcgaaatggagctggataaatgcttttgcgcagattgtggtttcggcttttaccggggtcattggtgggctcatcagcattgaaggtggcctgagtatttacatgatactggccactgccggtatcagtggtgccatgggttccgtagcgctcacgtatttctgggaacgaatcaccggagtgaaagcacaatga

SEQ ID NO: 175180 - DNA, 540 bp, Klebsiella oxytoca
atgacagcagaccagattatcgaggggatcctcggaaaagagggtggttatgtcgatcacccctctgataaaggcgggccaacccgctggggcatcacgcagaccatagctcgcgcacatggctacaccggagatatgcgagagctgcccagggaaacagcaaagcaaatcctgctgagcgattactggaccggaccccggtttgaccaggtggcagctctatctacgttactggcggatgagctttgcgacactggcgtgaacatggggcccagcgtcgccagtaagttctttcagcgctggctgacggcaatgaatatgcgtgggaagctttatcccgaccttatcccggatggcgtgattggaccccgaactatcaccgctctgaaggggtatctttctgcccgagggaaagaaggcgagcaggtgctgctgagagcactgaactgcagccagggcgctagatacctcgaactggcggagggccgcgaagccaacgaggattttctctacggctgggttaaggagcgtgtcctgtga

SEQ ID NO: 175181 - DNA, 348 bp, Klebsiella oxytoca
gtgaagatgatcattttcgctttgctcgtgctggtggctgtgctcgttctgttacttctgcgcaaatatacccggctggagttcgtagggcatgccagcctgctgctgaaaacgtggtctgtaaagctgggagctatcggcgcgctggttggcatgtgggcgcagtcgttcccggatgctgcgctgcacgcctgggcgatgctgccgccggatatcaaaaacatcctgccgccaaacatcgttgcactgattagcccggcgctggtggtgctggccgtgctatcgcaatacgtacgccagccagcattgaaagaaaaggccgacgaactgaaggagccgcagcaatga

SEQ ID NO: 175182 - DNA, 276 bp, Klebsiella oxytoca
atgagctttgaaattattgctgggctggtggtcgtcatcctgggcgctatcgctggcgcgttcggcatcggccatgctcgcggggccagtaaggcagaagccaaagccgatcagcagcgtaccgaagagaacgccgccgccaccgtcgccgcggcagaacgtaaggcggaagttgtgaaagaggcaagcgatgtacaggaagacgttaagcgtatgggcgatgacgatgttgatcgcgagctgcgcgaaagatttacccgccccggtagtcgttga

SEQ ID NO: 175183 - DNA, 198 bp, Klebsiella oxytoca
atgacgatgttgatcgcgagctgcgcgaaagatttacccgccccggtagtcgttgatacggcctgcagctgggtacggatcatctaccttactgaccatgatatcgacgtgctggataagcagaccaagcgcgacattctggcgcacaacaaagcagtgcaggccaattgctcgaacattacccccactaagggataa

SEQ ID NO: 175184 - DNA, 246 bp, Klebsiella oxytoca
atggcagagatcacacctgcagaacagattcgactgaatctgctttccaccctgaactacgacacagcagccgcaaaagaggcgattgcattcgtccaggatagccaactcaaatatcagctgttcatccagcagtacagtcgcgtgacaactgaatccgaagtggtggcgcggaccatcaaagcagttcaggagtcgaccgaagcgctggcgctgtttgataccagcgcagagcaggcgagctaa

SEQ ID NO: 175185 - DNA, 450 bp, Klebsiella oxytoca
atgccgtgctcaattgcggtactgttgtttcccctgttaatctgtcccaaacaaaccgatggggatagggacgtgaaaaagttactttttgcagcattaattggtgtttcagctttaacaattaccgcatgtgcgccaacagtccagaaagtagattacaaccagagatcaatgcttttatctcttggaatgaataaaaacgacgtcatgcagatcatggggtcgccacgcaggactgatgtgaaccaggaacgcgaacgctggatatactggaataaggctctctatggttacacaatcattgataacgaacaattggctaacgatcgactggttataacgttcgttaatggtaaggtcaccaagtggggtcagcaaacgctgactgatgacataatggagtcatcacaaaagagtgcacaggcttatgctgaggcattcaagaaatag

SEQ ID NO: 175186 - DNA, 831 bp, Klebsiella oxytoca
atgactttttccgggctcgctaaaggcgcaaaatcactcaagtttacaggcggatatcgcccgctgacggtcaacaacgatgataaccagggaaataaaatgaaaaaagcgcttaccgtcctgctgctggctacgcttgccacaggaacagcatcggcaacaacgctacattttggaacaacgacggccaacccgccgtttgaaaccgtcagtggcaaaaaccaacccacgggttttgatatcgatttggccaacgcgttgtgcaagcagatgcaggtcgaatgcaaatttactccccagggcttcgatactctcatcccggcactgcgctttaagaaattcgacgccgtgattgccggtattgaagtgattccaatgcgagaaaagcaggttgcattcagccatccctatcgccaggagctctccggtgcaatagtcacagcgaaagacgctgcccatacctttgccgatctcaaagataaaaaactcggcgtcgtaaagggcaccattcatcagcactacctgcgtgataaacaaaaagccgtgcacgtgctgccttatgacagcgatgaaagcgccctgaacgcgctgaaagaaggtgtgattagcggagtgatgggcgatcaggagaccttaacgaaatggctcgaggataatcccgaatacgcgattatggacgagcgcgccacggatcccagctactacggtaagcagtacgccattgcggtgcgtaaagatgatcctgaactgctgaataatatcaatgccgctctggatgtcgtcaaagcctcgccggaattccaggcgatggaacagaagtggtttaaatag

SEQ ID NO: 175187 - DNA, 546 bp, Klebsiella oxytoca
atgagtgcagatgaaaacaacctgatttggatcgatcttgaaatgacggggctggatccggagcgcgatcgcatcatcgaaatcgccaccctggtgactgacgcgaatctgaacattctggcggaagggccgacgattgccgtgcatcagtcagacgcgcagctggcattaatggatgagtggaacgtgcgtacccataccggtagcggactggtggagcgggtgaaggcgagtacccagggcgatcgtgaggcagaactggcgactatcgaatttctcaaaaagtgggtgccggcgggtaagtcaccgatctgcggcaatagcatcggccaggatcgccgattcttgtttaaatatatgcctgagctggaagcctatttccactatcgctaccttgacgtcagtacgcttaaagagctggctcgtcgctggaagccggaaattctcgacggctttaaaaaacaaggaacgcatcaggcgatggatgatattcgcgaatcggtagcggaactggcttactaccgcgagcacttcatcaagctctaa

SEQ ID NO: 175188 - DNA, 1062 bp, Klebsiella oxytoca
ttgagtaaaaataaactctccaaaggccaacagcgccgcgtgaaggccaaccaccagcgccgcctgaaaacgacttcggagaaggccgattttgatgacaacctgttcggtgaaaaatccgaagggaccgttattagccgctttggcatgcatgccgatgtcgaatccgccgacggtagcgtccaccgttgcaatatacgccgcactatccgttcgctggtcaccggcgatcgtgtggtctggcggccaggcaaaagcgaagctgacggcgtcaacgtcaaaggcatcgtcgaggccgtgcatgaacggacctccgtactgacgcgcccggatttctatgacggcgtcaaacctatcgccgccaatatcaatcagattgtcatcgtttccgccatcttgcctgagctttctccgaatattatcgaccgctatctggtggcctgcgaaacgctgaacgtcgagccgctgatcgtgctcaataagatcgatctcctggatcaggagagcatggacttcgtcaacgagcaaatggacatttatcgccatattggttaccgcgtactgatggtctccagccgcacgcaggatggcctgaagccgcttgaagaggcgcttaccgatcgtatcagtatctttgccgggcagtctggggtaggcaaatccagcctgctgaacgcgctgctgggcctgcaggatgaccaaatccttaccaatgacgtttcggatgtctccggactggggcagcacaccactacggccgcgcgcctgtaccacttcccgcacggcggcgatgtgattgactcgccgggggtacgcgagttcggcctgtggcatctcgacgcggaacaaatcacccacggctttgtcgaattccatgattatttaggccgatgcaaataccgcgactgcaaacacgataccgatccgggctgcgccattcgcgaagcggtggagaagggcgaaatcgctgaaagccggtttgaaaactaccatcgcattctggaaagcatggcgcaggtgcaggtaaaaacgcgtaaaagcttttcatcaaccgatgactga

SEQ ID NO: 175189 - DNA, 963 bp, Klebsiella oxytoca
ttgttaaacgatcttaaactttcactgcaatacattctgcctaaactgtggctcacccgcctcgcaggctggggtgcacgcaagcgggcaggctggctgacaaaactggtcatcgatctgttcgtgaaatattacaaggtcgatatgaaagaggcgcaaaagcctgatactgccagctaccggacctttaacgacttttttgttcgcccgctgcgcgatgacgttcgtccattaaatactgacccgaacgttctggtgatgcccgccgatggcgtcatcagccagctcggcgctattgaagacgataaaattttgcaggccaaaggccacaactacagtctggaagcgctgctggccggcaactaccagatggcggatctgttccgaaacggcagctttgtcactacctatctttccccgcgcgattaccaccgcgtgcacatgccgtgcaacggtattctgcgcgaaatgatctacgtaccgggagatctgttctccgtaaatcatctgaccgcgcaaaacgtgccgaatctgtttgcccgcaacgagcgcgtcatctgcctgttcgatactgagtttggccccatggcgcagatcctggtcggcgccaccatcgtcggcagcatcgaaaccgtgtggtccggtaccgtcacgccgccgcgtgaaggcatcattaagcgctggacctggcctgcgggcgagagcgaaggttccgtcgccctgcttaaaggccaggagatgggccgctttaaactgggttccacggtgattaacctgtttgctccgggtcaggtgaagctggttgagcagttacaaagcctgtcggtaaccaaaataggccagccgttggcgatcgcgcctgaagccgtgacgccggtcgagcccgctccgctggcagtcgaagaagtccgcgctgaacacgccgccagtccgctggttgacgataaacaagacgaaggttaa

SEQ ID NO: 175190 - DNA, 3327 bp, Klebsiella oxytoca
gtgcgcctgatatacactttcctgttggcctggtgcctcagtttcggggcgtacgcagcgacagccccggatgctaaacagatagcccaggagctggaacaggcgaaggcggcaaagcccgcccagcctgaaaccgtcgaagtcctgcagtctgccctgaatgcgcttgaggagcgtaatgcctcccttgagcgcgcccgtcagtatcaggacgttattgataacttccccaaactgtcgcaaaccctgcgcgcgcagctcaacaatctcagcgatgagccgcgccaggtctccactaccctctcctccgatgccctgaaccaggagattctccaggtcagcagccaactgctggaagccagtcgtaaagctcagcaggagcaggaccgcgcccgcgatatcgccgactcgctcaaccagctgccgcagcaacagagcgatgcccgccgccagctgaatgaggtcgagcgccggatcggcgcgcaaagcagcaatacgccgctggcgcaggcgcaaaatctaggtttacaggcggagtccgcgcggctgaaagcgctggtcgatgaactggatctggcgcagctttccgccaataaccgccaggagctatcacggttgcgatccgagctggcgcagaaagagagtgagcagctcgacgcctggctacaggcattaagaaatcagctcaataaccaacggcagcgcgaggcggagaaagcgctggaaagcaccgagctgctggcggaaaacagcgaaaacctgccgccggatatcgtggcgcagttcaaagtgaaccgcgagctgtcgcaagcgctaaaccagcaggcgcagcggatggatttgatcgcctctcagcagcgccaggcgaccaatcaaaccctgcaggtgcgtcaggctttaaacacgctccgcgagcagtcccaatggttaggttcttccaatctgcttggcgaagccctgcgcgcgcaggtggcgcgtctgccggaaatcccgcgaccgcagcagctggataccgaaatggcgcagctgcgcgtgcagcgcctgcgttatgaggatcagctcggcaagcagccgcagctaagacaaattcgtcaggccaacggtgaacccctcaccagcgagcagaaccgcattcttcaggctcagatgcgcacgcagacagagctgctcaactccctgctgcgcggcggcgatacgcttatgctcgaactaaccaagctgaaagtcgccaacggccagctggaggatgcgctcaaagagatcaacgaagcgacccaccgctatctgttctggacctccgacgtcagcccaatcggcttctcctggccactggagattgttcaggatttacgccgtctgatctcgctcgataccatgagccagctcggtaaggccagcatgatgatgctgaccagcaaagagaccctgctgccgctcttcgtcgcgctcattctggtagggttcagcgtcagctcgcggcgccatttcaccagcttcctggagcgttccagcgcgcgcgtcggcaaggttacgcaggatcacttctggctcaccctgcgaacggtgttctggtctatactggtggcctcgccgctgccggtactgtggatgacgctgggctacggtctgcagtctgcctggcctttcccgctggccgtggcgattggcgatagcgtcaccgcaacggtgccgctgctgtgggtggtaatgatttgcgccacttttgcccgcccgaacggtctgttcatcgcccactttggctggccgcgcagtcgggttagcaaggcgatgcgctactatctgatgagcatcgggctcattgtgccgcttattatggcgctgattacttttgataatctcaacgatcgcgagttctccgcctcgctgggtcgcctctgctttatgctgatttgcggcgcgctggcgatggtgaccctgagcctgaaacgcgccggcatcccgctgtatctcgataaagaaggcagcggcgacaatatgcttaaccggctgctgtggaatatgctgctcggcgcgccgctggtggcaatgctggcggcggcaatcggctatctcgctacatcgcaggcgctgctcgccaggctcgaaacgtcggtcgccatctggttcctgctgctggtggtttatcacatcattcgccgctggatgttgattcagcgccgtcgcctggcgttcgatcgcgctaagcaccgtcgggcggagatccttgcccagcgcgcgcgtggcgaagaggacgtccagcataccagcagcccggaaggttcaatggaagccgaggtcagcgaggtcgatctggatgctatcagtacccagtccctgcgtctggtgcgctccctgctgatgctgatcgcgctggtgtcggttatcgtgctatggtcagaaatccactccgcatttggcttcctggagaatatctcgctgtgggacgtgacctccacggtgcagggcgttgagagcctggagccgatcaccctcggcgcggtgctgattgctattctggtgctgattattaccacccagctggtgcgcaacctgcccgctctgctggaactggccatcctccagcacctggaactgacgccgggcaccggctacgccatcaccaccatcaccaagtatctgctgatgctgattggtggtctggtcggtttctcgatgattgggattgagtggtcgaaactgcagtggcttattgccgcgctcggtgtaggtctcggttttggtttgcaggagatcttcgccaacttcatctccggcctgattattctgtttgaaaaaccgatacgcattggcgatacggtcaccattcgcgatctcaccggtagcgtgacgcgcattaatacccgcgccaccaccatcagcgactgggaccgtaaagagattatcgtgccgaacaaggcgttcatcaccgaacagttcatcaactggtcgttgtcggattctgtaacccgcgtggtgttaacggtgcctgccccggtggatgccaataccgaagaggtggcgcagatcctgctaaatgccgcgcaccgctgttcgttggttatcgataccccggcgccggaagcgtttcttgttgacctgcagcaggggatccagattttcgagctgcgtatctacgccgccgaaatgggtcaccgtatgccgctacgccatgagatgcatcagctgattctggccggattccgcgagcacggtatcgatatgccgttcccgccgttccagatgcgcctggagagtatcgatggcagaaaaagcagcagggcgctgacctcggcagggaaaaccagtcgcgcgcccggcagtctgtaa

SEQ ID NO: 175191 - DNA, 978 bp, Klebsiella oxytoca
atgagcgaaacggcaacctggcagccgagcgcatccattccaaacctgttaaaacgtgcagcggtgatggcggaaattcgtcgtttctttaccgaccgcggcgtgctggaggtggagacgccctgcatgagtcaggcgacggtgacggatatccatatggtcccgtttgaaacgcgtttcgtaggaccgggtcattctcaggggctgaatctgtatctgatgaccagcccggagtatcacatgaagcgcctgctggcggccggttgcggcccggtttttcagctatgccgtagcttccgcaatgaagagatggggcgccaccataatccggaattcaccatgctggagtggtatcgtccgtgctatgacatgtaccggctaatcaacgaagtagacgatctgctacagcaggtactcgactgccagccggccgaaagcctctcttatcagcaagccttcctgcgtcatctggaaatcgacccgctgtcggcagataaaacgcagctgcgcgaagtggcggctaagctcgatttgagcaatattgccgatacggaagaggatcgggacacgctgcttcagctactttttgtcatgggcgtcgagccgcatattggtaaggatcgtccgacgtttatctatcatttcccggccagccaggcgtcactggcgcaaatcagcaccgaagatcatcgcgtagcggaacgtttcgaggtctattacaaaggccttgagctggctaatggttttcatgagctcaccgacgcccgagaacagcggcagcgttttgagcaggataaccgcaagcgtgcggctcgcggactgccgcagcagccaatcgatcatcatctgctggccgctctggaagccgggctgccggattgttccggcgtagcgctgggcgttgaccgggtggtgatgctggcgctgggcgcagaaagcatcggcgacgttatctcgtttaccgtcgaccgcgcctga

SEQ ID NO: 175192 - DNA, 1791 bp, Klebsiella oxytoca
gtgcaaacttttcaagccgatcttgccgttattggcgcaggcggagcaggtcttcgtgctgcaattgccgccgcgcaagctaatccaaatgctaaaatcgctctaatttcaaaagtctatcctatgcgcagccataccgttgctgctgaagggggttccgctgccgtcgcgcaggatcatgatagctttgagtaccatttccacgatactgttgcaggcggcgactggctatgcgaacaggatgtcgtcgactacttcgttcatcactgcccgacggaaatgacccagcttgagcagtggggttgtccgtggagccgccgccctgacggcagcgtcaacgtccggcgcttcggcggtatgaagatcgagcgaacctggttcgcagccgataaaaccggctttcatatgcttcacaccctgttccagacctcgcttcagttcccccaaatccaacgcttcgacgaacactttgtcctcgatatcctggtcgatgaaggtcaggcgcgcggtctggtcgcgatgaatatgatggagggtacgctggtacagatccgcgccaacgcggtagttctggcgaccggcggcgcaggacgcgtatatcgctacaataccaacggcgggatcgtcaccggcgatggtatgggtatggcgctcagccacggcgtaccgctgcgcgatatggagttcgtgcaatatcacccaaccggcctgccgggttccggtattctgatgacggaaggctgccgcggtgaaggcggtattctggtcaacaagaatggctaccgctatctgcaggattacggcatgggcccggaaactccgctgggcgagccaaaaaacaaatatatggagctgggtccgcgcgacaaagtctcccaggctttctggcacgaatggcgtaaaggcaacacgatcccaacgccgcgaggcgacgtggtctacctcgatctgcgtcatttgggcgagaaaaagctgcttgaacgtctgccgtttatctgtgaactctcaaaagcctacgtgggcgtcgatccggtgaaagatcccattccggtacgtccaaccgcgcactacaccatgggcggtatcgaaaccgaccagcagtgtgaaacccgtattaaagggctgtttgccgttggcgaatgctcttctgtcggtttgcacggcgctaaccgtctcggctccaactcgctggcggagctggtggtgtttggtcgtctggccggcgaacaggccatgcagcgcgccaccgaagcgggcgaagccaatagcgccgcgctggacgcgcaggtcgtcgatatcgagaagcgcctgaaggacctggtgaatcaggaaggtaacgaaagctgggcgaagatccgtgatgaaatgggtctgtcgatggaagaaggctgcggcatctaccgtacgccggagctcatgcagaaaacggttgataagctggccgagctgcaggagcgcttcaagcgcgtgcgtatcaccgacacctccagcgtgttcaataccgacctgctgtataccatcgaactgggtcatggtctgaacgtcgccgaatgtatggcgcattccgccatcgcgcgtaaagagtcccgcggcgcgcatcagcgtctggatgaaggctgcaccgagcgtgacgacgtcaacttcctcaagcataccctcgccttccgcgacgccaacggtaataccactctggagtacagtgatgtgaaaatcaccactctgccgccggcaaaacgcgtgtacggggcggaagcggaagcagccgagaagaaggagacgacgaatggctga

SEQ ID NO: 175193 - DNA, 735 bp, Klebsiella oxytoca
atggctgagatgaaaaacatgaaagtcgaagtggtgcgctataacccggaagtggatatcgcaccgcacagcgctttctatgaagttccctacgacgagcaaacctcgctgctggatgcgctgggctatatcaaagataacctcgcgccggatcttagctaccgctggtcctgccgcatggcgatttgcggttcctgcggcatgatggtgaacaaagtaccaaagctggcctgtaaaaccttcctgcgcgaatacaccaaaggcattaaggttgaagcgctggctaacttcccgattgaacgcgatctggtggtcgatatgacccactttattgaaagtctggaagccattaagccgtacatcatcggcaacccgcgcacgcccgatcagggaccaaacaagcaaacgccggcgcagatggcgaaataccatcagttctccggctgcattaactgcggcctgtgctacgcggcctgcccgcagtttggtcttaatccggagtttatcggcccggcggcgatcaccctcgcccatcgctataacgaagacagccgcgaccacggtaaaaaggaacgtatggcgcagcttaacggccagaatggcgtatggacatgtactttcgtgggctactgctccgaagtctgcccgaaacacgtcgacccggcggccgcgatccagcagggtaaggtagaaagctcgaaagactttcttatcgccaccctgaaaccacgctaa

SEQ ID NO: 175194 - DNA, 396 bp, Klebsiella oxytoca
atgacgactaaacgcaaaccctacgtgcggccgatgccgtccacctggtggaaaaagctgccgttttatcgcttctatatgctgcgtgaaggaacagcggtccccacggtctggttcagtatcgtgctgatctacgggctattcgcgctgaagcacggtgctgagagctgggccgggtatatcggttttctgcaaaatccgattgtcgtgattctgaacctgatcacgcttgcggccgcgctgctgcataccaagacctggtttgagctggcaccgaaagctgccaatattatcctcaaaggcgaaaaaatggggccagagccagtgattaaagggctttggatcgtcaccgcggtcgtcaccgtagtgattctgtttgtcgccctgttctggtaa

SEQ ID NO: 175195 - DNA, 360 bp, Klebsiella oxytoca
atgatcaatcctaaaccaaaacgttctgatgagcccgtattctgggggctgtttggcgctggcggcatgtggggagcaattgtcgctcctgtcatcgtactgctggtaggtattatgctgccgctgggccttgcgcccgcagatgccttcagctacgaacgcgtgctgggctttgcccacagcttcattggccgtgcgtttatttttctgatgattgtgctgccgctatggtgcggacttcatcgtattcaccatgcgatgcacgatttaaaaattcatgtacccaacggtaagtgggtcttctacggcctcgcggcgattctgaccgtcgtcacgctggtcggaatattgttcatctaa

SEQ ID NO: 175196 - DNA, 531 bp, Klebsiella oxytoca
atgcgtctgctccccgtcatggcggttgttgccgcttcatttctgcttatcgcctgtagcacgccgacgccgcctaccggcgtcaccgtggtcagcccattcgacacgcaacgctatctcggtacctggtatgaaatcgcccgtttcgatcacaattttgagagtggcttagaaaaggtcaccgcaacgtatagcctgcgcgatgatggtgggctgaacgtggtaaacaagggatataaccccgaccggggtatgtggcagaaaaccgacggcgtcgcttactttaccggcgatcccacgcgcgccgcgctgaaggtctcatttttcggccctttctatggcggctataacgtcatttcactggataaggattatcgctatgcgctggtttgtgggccagatcgcgactatctctggctactggcgcgtgcgccgaaaatcccgccggaagtgaagcagcagatgctggatatcgccagccggcagggatttgacgtgagcaagctcatctgggtcaatcaacgctattaa

SEQ ID NO: 175197 - DNA, 318 bp, Klebsiella oxytoca
atgtcctggttaattctgtttatcgcggggctgctggaagttgtctgggcagtcggtctgaagtatacccatggttttagtcggcttgtgccgagcgtaattacgattgccgccatggttatcagtatggcgcttttatcatgggcgatgaaaacgctgcccgtgggaacggcttacgccgtctggaccggtattggcgcggttggcgcagcggtcacggggattatcctgctaggagaatccgccagcccgatgcgcattgccagcctggcatgtattgtcattggcatcattggcctgaaaatgagcgctcattaa

SEQ ID NO: 175198 - DNA, 147 bp, Klebsiella oxytoca
atggtaaaaaaagcgattgcagcggtctttacggttttggtcctctcctcagcattgaccggatgtaacaccacgcgcggtgtcggtcaggatatttcagatggcggcgatgcgatttccggcgccgcaaccaaagctcagcaatag

SEQ ID NO: 175199 - DNA, 567 bp, Klebsiella oxytoca
atggcgacttactatagcaacgattttcgtgccggtcttaaaatcatgatggacggcgaaccttatgcagttgaagccagtgaattcgttaaaccgggcaaaggccaggcttttgcgcgcgttaagctgcgccgcctgctgaccggtacccgcgtagagaaaaccttcaagtctacagattctgctgaaggcgcagacgttgtcgatatgaacctgacttatctgtacaacgacggtgagttctggcacttcatgaacaactcgacgtttgaacagctggccgcagattctaaagccgttggtgataatgctaaatggctgctggatcaggctgaatgcatcgttactctgtggaacggtcagccgatctccgttaccccgccgaacttcgttgagctggaaatcgttgaaaccgatccaggtctgaaaggcgatactgctggcaccggcggtaaaccggctaccctgtccactggcgcagtggttaaagttcctctgttcgttcagattggcgaagtcatcaaagtggatactcgctctggcgaatacgtatcccgcgtgaagtaa

SEQ ID NO: 175200 - DNA, 1029 bp, Klebsiella oxytoca
atggcgcatattgtaaccctaaataccccatccagagaagattggttaacgcaacttgccgatgttgtgaccagtcccgatgaactgctgcagcttttaaatgtagacgctgatgcgaatctattggcaggacgcgacgctaagcgcctgttcgcactgcgtgtcccacgggcatttattgctcgtatggaaccaggaaatccaaacgatcctcttctccgtcaggtacttacctcccaggaggagtttattcatgctccaggatactccaccgatccgctggaagaacagcatagcgttgtgccaggtctgctgcataaatacagcaaccgcgctttactgttggtgaaaggcggctgcgcggtaaattgtcgatattgtttccgtcggcacttcccgtacgcggaaaaccagggcacgaagcgcaactggcagaaggctatggaatacatcgcggctcatccagagctggatgaaattattttttccggcggtgacccgttgatggcgaaggaccatgaactggactggctgcttacccagttggaatccattccacatattaaacgcctgcgcatccacagccggttacccattgtgatccctgcgcggattaccgataccctggttgcgcgcatctctgcatcttcgttgcaggtgctgctggtgaaccatattaaccatgccaacgagatcgataccgcgtttcgtagggcaatgaagagcctgcgtatggctggcgtcaccttactcaatcaaagcgtactgttacgcggtgtgaacgataatgcgcgcacgctcgccgatctgagcaatgcgttattcgatgccggggttatgccttattacctgcacgttctggacagagtgcagggagcagcgcatttcatggtcagtgacgaagaggcccgggtaatcatgcgcgaactactcacgctggtctccggttatttagtccctaaacttgcacgggaaatcggcggagaaccaagcaagacccccctggacttaggattgaagcaacgatag

SEQ ID NO: 175201 - DNA, 567 bp, Klebsiella oxytoca
atgatattcaatgaatatatcattaacaatgaagttatttttaatgtaaatatgaatgagctgcagccggtgggggacaatggtgagagcgtgacgctgaacgcgccgactgcacgctgcctgcaacttttactggaaagcaatgggaaaattatatcccgagaagagtttctggatagtgtctggaaaaccagaggggttgtcgtttcgcagaatactttttatcaaaacatatcattgttaagaaagtcgttagtgaaagcaggattatcgcaagatattattgttacagtcaggcagcgcgggtttgttctcgcggcaggctcaaatattgcctcattcttacgctcggaagaaaaggcaccggaaaactctgaaaatgtgcaggttaccgcaagcacctcttcgcctccgattgagaaaaatgtgatgaataattccgctgtccgcgaagatgcgcaaaaaatttccacagacgataaagcaacagtatttaaattacccgggtggattttgcctctgttattggtgatgaccgccgcaaacattctttctctttttttgtaa

SEQ ID NO: 175202 - DNA, 561 bp, Klebsiella oxytoca
atgaaaaaaacaattgtagctgtaatggttgctgcttcagcagttctgagtgctcaggctttcgcggcagggaacagttcttctctgactattctgggtaacgttaccgacaccggcgaatcctgtaacgtaacgccgtccgctatgatttccggcggttctttaactctggacgatgttaaagcatctgtactggacgcaatggcagttaatactccgtatatgtcaactgcaaaagacattgagtacaaagtcgaagattgccagaaaggtgcaactaattacaccggtaacatcaacgtgaccgtaaccggcgactatatcagcggccaggacaacgtgctgaccaacactgctgccagcccggcgactaacgctgcggttaccgtagtgaacaccgacggcactcgcgtaagcttcaccggtacgactcctcaagttgttgcttataccgcaggtactccgtcttacctgcgttataaagctgcatacgttaaaaccgcaaatggcgttaccgatggtgcagttaaaggtgtagccacctttactattagctactaa

SEQ ID NO: 175203 - DNA, 693 bp, Klebsiella oxytoca
atgctgaagtcattattaagattagctgcaatttcttttatttctgtcagctttgtagcccagagcggagtcgtggttgattcaacccgccatctttataaagaaggttcgcgagaaatcagtacgaacattgaaaacaaagatgacacgccttatttaattaaatcctgggtagaagcgtctgaaggaatgaaagacagcttttttatggtgactcccccgcttttccgcctggagggcaagcaaaccaacacggtacgtatttttcctaacgcgtatatctctaaagcccctcaggatcgtgaaactgtctacttctttaacgtaatgtctattccgccaaccagcgacagtgaagctgacaaaaacaagctgcagctggcggtgcgccatagaatgcgtcttatctatcgccctcgcgccattcaggatatgaatattaataccgaagctaaaaatctgcagtggcataaatccggtaataagataacgctaaagaatccgacaccttttttcatttattttaagtcgataaaaataaacggcagagatattagcagctcagtcaataacattgatgctttttccagcaaagaatttactttgcctgccggtataaatggttcagaaatcgagtggaaggtcgccactgataacggaggctcgggttctgcccacacatcatcgatttaa

SEQ ID NO: 175204 - DNA, 2544 bp, Klebsiella oxytoca
atgtctatttcaataaaaaaaaggggaggcgcgctatccggaacctcccacacatttttcgttcttgttcctgcgctagctctcggtttatgcgccaatgctttagctcgtgatttttttgatcccgcatttataaaatcagtcggtcagagcgacccctcttcaataccggacttatccctctacgccacccgcgatgcccaggctccgggggagtatcgcattgacgttattttaaataacagtctgcaagaaacggctgatatccggtttgtggaaaaaaaagatccaacaacagatacgttgaaattagttccctgtttaagcattgctaaattaaccagctatggtttgcgtgctgacgcttttcctggcttaaaagaagatgcgaatggctgcgcagatactcatgttattcctgatttcaccaccgattttaacttcaatactcaacagctgctggtatccataccgcaggcggcgctgtccactatcgcgcagggtttcgtttccccagatgagtttgacgacggtattaatgccttactgaccaactatcagtttagttcaggcaaagactatgaagccaataatgagtattacaatcttaacttacaatccggcctgaacctcgggccatggcgcctgcgcaatctgagtacatggaataagtcagcgggggcaaagagcgactgggattccgtatatctctatgcgcagcggagcattgtcccgttaaaaagtactttagtcatgggcgaaagcagctcgctgtcgagcatctttgacagcgtgccgttcaccgggattcagctggcaaccgacacggacatgattcctgaaagcctgcgtggattcgcgcccatcgttcgcggtattgcccgaaccaatgcgcgtatcgtcatcaagcagaatggctaccaaatttaccaggcttttgtcgctccgggcgctttcgaaattaccgacctctactcaaccggcggcaacggtgacctttacgtcaccgtcgaggagtccgatggctcccgacaaaacttcgtggtgccctacgcttctctgccattaatgctccgggaaggccaaatggagtatgagattaccagcgggaaatatcgtccctacgatggcaacgttgacgagaaaccctttacgcaagcaacgatcagctacggcgtattaagcaataccactctctatacgggcgtacaggcggcggccaattaccaggcgctcgctttcggcgccgggcaaaacctcggcgatattggcgcggtttccgccgatgtaacggcggcatggtctaaaaagaaagatgaagagaaaacgtccggccagtcatggcgcattcgctacggtaaaaatatccttgaaaccggcaccaatattaccgtagccggctaccgctattcgacctccgggtacaatacgctaactgatgtgatgaatacctataacaacagctacggcggatatacgccacactcgctgcgtaacagaaccaatattaccgtgagccagagcctgggttcggggctaggtaacctttctgtatccggcatttttgaggattattgggatagcaatcgccgcaataactcgctgaatattggctataacggcgggttccgccgctttaactattacgctggctatagctatagccgctatagctggggaaataatggttccagccgtcacgttgaggatgaccatgttgtttcatttaatatctccattcctttaagcgattggttacctaatgcctatgcgacctataacgtgaccaacagcagtccgggttcaaccgatcagtatgtttctctgagcggcgtcgcgctggagaaccataacctggactggaacgtccagcagggctacagcaatcgtgaagatgccagcggcggcgtctacggcaactatcgtggttccatgggttcggctaacgccggctacagctatgccaaaaatagtcagttaattaactacggcctgagcggcggcgtgctggttcatgctgacggaataacattaggtcaggaaatgtctgaaaccgccgtattggttaaggcgcccggcctgaaaaacgtccgtctggaaaacgacgcgacgatcgaaacggactaccgcggctatgcgattattccttacgttacgccataccatcgaaccagcgtgaccttagatagcacgactttgggagataatatggaattgccaaatacgacgcagaaagtggtgccaacccgtgcagccgtggtacgggcaaacttcgcgggcaatattggccgccgcgcgttccttattctcaagagagcgtcgggtgaaaacgttccttatggcgccacggtaacgttgaccacggataaaaacgcccaggctagcatcgtttctgatggcggtatggtctatttgtccggcctgaaagataacggtgaagtctatgctcagtggggttcaaagagcgggcagcagtgtaaagcgccttatagcctggctgcggtaaatgaaggtattgctcaggccactgcggtttgccagtaa

SEQ ID NO: 175205 - DNA, 1026 bp, Klebsiella oxytoca
atgaaaaaaatactcctttttattagtttacttttacttaatcagacagtaatggctgactgtaattacaacggaactgatgctgcattcaatgttacattcagcccagctaaaattttatccgattcaagcctggcgcccggtagcgtactggcagtaagaacggtaggcggagcgattgccaatgcaaaaactttttataactgcaaggcaaatgatatttacgccattatcgccacgcccagcgtcaatctggcggcaggcgtgaccggtgtgctcggtggaccggtttatgaaacagggataccgggtattggttttgaaatttcggaagcaattgccggcgccaacggccgccccgttccggctacgttaggtactgtttctgcctatggccttagcgatcccggcgtgaaacaactcaccgtctggctgataaaaaccagggacaatattgatacgagcttctcaggaaaaaaagagatttcggtgtcctatcgggcgggaagcgtcaatcaggtcaatgctaattcatcaattgcccgacttgcccaagccaacatcaaactcggccctttcacttacagggaaacaacctgcaatataaatccacgaggtgggagcacggtcaatctatctaatatagaagcatcgcagcttaaagctctcactcagggcggggtaactggcaagcaaaaagactttacgcttgacattacctgccctgactcatccgttggaaccaaatatacctactggtttaaccctataaccgagaactcagcatcaaaagatggcgtactgctaaactccatccctgatactatcggaggagccaaagatgttggtttcataattaaacagggttccagccctatcaccttttttgattataaaaactactctattgccagtatgaaaaagagccagtctcttaccttcactgcggactattacaagctatctaacaccataacaccaggtagcgttcgagctatatttgaaattattctccaggaagaataa

SEQ ID NO: 175206 - DNA, 366 bp, Klebsiella oxytoca
atgaagcaactaactgtttttgaaatggaagctatttctggtggctattcttgggatatgtcttctattggtggcattctcacctctttggtaagtaatgctgccgaattagcaacttctgcaacactaggggcatcagttggcggaatttacggttctatcatcggaggtcgttggggcggtgctggcggcggtattcttgggtttggcgcaatcggtcagggcgtcggtatggtttggggcctggttgtaggtgccattggatgcggtgttgcagcctctgttgtaggatgggacaagacttacgaattagcgatgggggcgattgctggctctattgacggaaccttgaccccctggaattaa

SEQ ID NO: 175207 - DNA, 1287 bp, Klebsiella oxytoca
atgttaaaaaacatatatcgcaaggaagcgattgagtacaaaaaaatccactggaaaggaaaagcattattattagcaggcattccagcgtggttagtcactcttctggcatttatttttcttattgccattgtactttcactcatattttgcacctttacccagcgtattgatgtacgcggagaggtcattacgctccctcactccgttaacgtctttgccccacagcagggttttgttgtgaatctgcatgtaaaggtgggagacattgtcaaaaaaggccaaccgctttatgaacttgacgtttcacgtaatacgatcggtggcaacgttagcgcggctcagattgaagttatcaatgaaaaaattgctaacgcagaagatattataagcaaactgacgcgtaataaggctgaaacgctcgcggctcttgaaaaacagattaagactaccagcgcctcgttaacggaaaccaaccgtatgctggctaatactcaggtaggcttaaacaaaatgcataccaacctggccagctatgataaatacttaaaggatggtctgataactaaagatcagtataactatcagcactcgctatattttcaacagcaaagcgcctatcaatccctggtgactcaaaagatgcagctggaatctcagctcacgcaaaccagcagcgataaaatcaccaaagcagcagactttgataatcagatttcaagccagcataaccaaatcaatgattataaaaatcagctggtagaatcgaacgctaacggtaatctgattattaaagcaacgaccaacggtaagattgaatcgctggccgtgactaaagggcagatggtagagaacggcagcagcctggcgcagatcaaacctaccggtgatattgagtattatctgatcctctggttacccaataataccatcccctacgtgaaacccggggacaccattaatattcgctatgatgctttccctgccgataaatttggccaatttccaggtaaggttgtttctatttcctcggtaccggcgtcacgtcaggagatggcagaatataccaatgtcagcaacggaactaatcagcaggaattagcgctctataaagcaattataaaaatcaaggacaagacctttagctacaatggaaaaacgctcacgctctctaacggtctgaaggctcaggcggtagttttccttgaagaacgcccgctttacatgtggatgtttactcctttctataagatgacgcaaagcgtgagtggcccgatcgatgaataa

SEQ ID NO: 175208 - DNA, 2124 bp, Klebsiella oxytoca
atgaataaagaactgtttaaaaccattaccgataagcttaatttctcattccgtcataaaacgccggttattttacagtcggaagccgccgaatgcggtatcgcctgtctggcaatggtttgcggcttttacgggcttaatatcgacctgttcaacttccgccatcgttacggtagcccttctcagggcgttacgctcatgtcgctgagcaaaacggcggaacatgccggtctgaaaagccgggccctctctctggatctggatgaaatcaagcagctgaagctaccctgtattatccactggggaatgaatcattacgtcgtgctcactaaggtacgtaaaaacagctttattgttcacgatccggcgctgggtaagcgggttattggtatccaggaaatgtccaataactttaccggcgttgcgctggaactatggccggaccaaaactttcagcaagaacaggcaaaatcacgcctgcgtctattagacctgatgcgcaatattgtgggacttaaatcggtcctgctaaaaatctttgccttttcggtagtggttgaagctatcggcctgctattacctatcggtacgcagctggtgactgaccatgtcatcatggcgcacgaccagagcctgctttcggttatctgtatcggcctggtcttcttcacgcttttccgcacctttattagtatgctgcgagcgtggacctcattaacgctaaatacgctgacgaacatccaatggaaaaccacgctgttcgatcatctgacaagcctgccgttatccttttttgaaaaacgtcatttaggggatattcagtctcgtttttcgtcgctggatactatccgttccaccttcaccaatagcattgttaccggcattatcgactcaatcatgacgattggcctgctggttatgttaacgctgtacggcggctggctggtttgggtcgtgattggattcaccttatgctatgccatcatgcgttttgccacctacagcttctaccgtcgcgttgccgaagagcaggttatcaagggcgcacgctccagctcgcactttatggagtccctatacggtatttccaccattaaagcgctgaacttaaaagagcgtcgttctcagcactggttaaatatcaacattgacgcctgcaatgccggtatcaaacagactcgcttcgatatgatgtttggcggtattaatacttttattacctccatcgatcaggtcgccgtactctggctgggcgcgatcatggtcattgataacaatatgaccctcggtatgtttatggcttttaacgcctatcgtgggcaattctcccagcgcgcatcaagcttgatcgacctggtcatgcagctgcgaatgctgtcgttacataatgagcgtctttcagaaattgtatttagcgagccggaaaaagagctgcctgcacgccgggtttttgcagaaaatactggcgtgaaattagaagtgaagaatctcagctatcagtacgatccgttctcacaacctattttttctaatttaaatattaccgttgagcccggagaatccatcgcgctggttggcccttccggcgtcggtaagaccacgctgctgaaagtcatgtgcggtctgttagcgcccaccagcggtgacgtgatagcggataaccttgatattcaaaaaattggcatcaataactttcgtctcggaacggcctgcgtccttcaggaggaccgccttttctcaggctcgcttatcgataatatcagcggctttgaagataatgccgatatggactttatcgttgagtgcgcacgcagatgtaatatccatgatgaaatcatgaaaatgccgatggggtacgaaacgattgtcggcgagcttggcttaggtatctcaggtggacaaaaacagagaattttaatcgctcgcgcgctctatcgaaaacccagcattctgtttatggatgaagccaccagccatctcgacctgaaaaatgaatcggtcattaaccagtctatctctggtttaagcattacccgaatcattgttgcccatcggccatccaccattgcctcagccgatcgcatcattgatatgtcacagctccatatgcaggcaccagcgtaa

SEQ ID NO: 175209 - DNA, 867 bp, Klebsiella oxytoca
atgcaaggaacatttattggttttaataccgcatctattaaatatgatgacaaatttttggctttaatgctcaaagtcaaactgagtaatcaactctgtcagtcttattatcttcaggcgccgattcttgcggatctcctgttagttctgcagcacagaatggccatcgtcctgcagcgcttaaatgctgaaggtgaaagttataagaatgaactggtggcctttaatgaacgccttatagaaaatacaccggcgatcgatatacctgaagtacagcaccctaatccggaaagacgtattatgtcgataacgttaaaacccggcgacacctggtcaacgctcattctggtgctgcaaaatgagcaaattgctacgctgcgtattgatgatatgcaagttgaagcgctgctggtgggcattcagcagtctcttaaacacacgggagatagcgatctgattaattatttaacttcctcgctggaaggcctgatgctttatgcggtggatttaacgaataccagcaacgttgattatcagcagtatcttcaggatgaatggaagctcaatctgttttcccattatctcggcgtgttgtactgttgtgacacggaggaagggcgaaaaatcatctccggcgcagtgattaaaaccaatgccgctcatccatcagaacaggaaaatatcgttgtaatgcgcttaattgagagaagcccaaagctgaaagaagtgcatacccagcgccagcccagccagatttttagccaaatcatcccttctcagccaggaagaatgatgacgctggaggagtgtctgcgtcctttgcatgcgttctaccagcaaactcaggcgcaactcagcaagcaataa

SEQ ID NO: 175210 - DNA, 354 bp, Klebsiella oxytoca
atgcaggtaaaatatttagcagggattgtcggcgcagcattgttgttagcaggttgcagctccagcaacgaattgacctctggtggccagaacgtacgctttgttgaagataaaccaggttctgaatgccagctgttaggtaccgcaagcggcacgcagagcaactggctgtccggacagaatggtgacgaaggcggctccatgcgcggcgcggcaaacgccctgcgtaacaaggccgcagagatgggtggcaacgtcatttacggcgtcagcagcccgacgcagaatctgctgtccagctttgtgccgaccgatagccaaatgaacggccaggtttataagtgcccgaactga

SEQ ID NO: 175211 - DNA, 1647 bp, Klebsiella oxytoca
atggcagctaaagacgtaaaattcggtaacgacgctcgtgtgaaaatgctgcgcggcgtaaacgtactggcagacgcagttaaagtaaccctgggcccgaaaggccgtaacgtggttctggacaaatccttcggtgcgccgactatcactaaagacggcgtttccgtagcgcgtgaaatcgagctggaagacaagttcgagaacatgggcgcgcagatggtgaaagaagttgcctctaaagcgaacgacgctgcaggcgacggtaccaccaccgcaaccgtactggctcaggctatcatcgctgaaggcctgaaagccgttgctgcgggtatgaacccgatggatctgaaacgtggtatcgacaaagctgtcgtagccgctgttgaagaactgaaagcgctgtccgtaccgtgctctgactctaaagccattgctcaggttggtaccatctccgctaactccgacgaaaccgtaggtaaactgatcgctgaagcgatggacaaagtcggtaaagaaggcgtgatcaccgttgaagacggtactggtctggaagacgaactggacgtggttgaaggtatgcagtttgaccgcggctacctgtctccgtacttcatcaacaagccggaaaccggcgctgttgaactggaaagcccgttcatcctgctggctgacaaaaaaatctccaacatccgcgaaatgctgccggttctggaagccgtagcaaaagcgggcaaaccgctggttatcatcgctgaagacgtagaaggcgaagcgctggcgaccctggtagtgaacaccatgcgcggcatcgttaaagtcgctgcggttaaagcaccgggcttcggcgaccgtcgtaaagctatgctgcaggacatcgcaactctgaccggcggtaccgttatctctgaagagatcggtatggagctggaaaaagcgactctggaagatctgggtcaggcgaaacgcgttgttatcaacaaagacaccaccactatcatcgatggcgtgggcgaagaagctgcgatccagggccgcgttgctcagatccgtaagcagattgaagaagcaacttctgactacgaccgtgaaaaactgcaggagcgcgtggctaaactggcaggcggcgttgcagtaatcaaagtgggcgcggctaccgaagttgaaatgaaagagaagaaagcacgcgttgacgatgccctgcacgcgacccgtgctgcggttgaagaaggcgtggttgccggtggtggcgtagcgctggttcgcgttgccgctaaactggctggcctgaccgctcagaacgaagatcagaacgtcggtatcaaagttgcgctgcgcgcaatggaagctccgctgcgtcagatcgtttccaacgccggtgaagaaccgtctgttgtggcgaacactgtgaaaggtggtgaaggtaactacggttacaacgctgcaaccgaagagtatggcaacatgatcgacttcggtattctggacccaactaaagtgactcgttctgctctgcagtacgcagcatccgttgctggtctgatgatcaccaccgagtgcatggtcaccgacctgccgaaaagcgacgcgcctgacttaggtgctgctggcggcatgggtggcatgggcggtatgggcggcatgatgtaa

SEQ ID NO: 175212 - DNA, 294 bp, Klebsiella oxytoca
atgagtattcgtccgttacatgatcgtgtgatcgtcaaacgtaaagaagttgaaacgaaatctgctggcggcatcgttctgaccggttctgcggcagcaaaatcaactcgtggcgaaatcatcgctgtcggtaagggccgcatcctggaaaacggaaccgtgcagcctctggacgttaaagttggtgacatcgtaattttcaacgatggctacggcgtgaaatccgagaagatcgacaatgaagaagtgttgatcatgtccgaaagcgacattctggcaattgttgaagcttaa

SEQ ID NO: 175213 - DNA, 1260 bp, Klebsiella oxytoca
atgagtggtttaaaacaggagttggggcttgcccaaggagtggggttactctccacatcattactgggaaccggcgtcttcgccgttccggcgctggccgcgttggtcgctggcgacaacagcctgtgggcctggccggcgctgattttactggtgtttcccatcgctatcgtcttcgccacgctgggtcggcactttcccagcgccggcggcgtggcccattttgtggatatggcttttggaccgcgtctggcgcgcgtcaccggctggctctttttatcggtgatcccggtcggattacccgcggccctgcatatcgccaccggcttcggtcaggcactttttggctggcacgatagccagctgctgctggctgaactgggcacgctggcgattatctggtgggtcggctctcgcggagccagctccagcgccaatctacaaacgctggttgccgtactcattgtcgccctgatcgtcgctatctggtggcgcggcgggatcaaccccacgcagatccccttcccggcgcccgctgaaatcgatagttcgcagcttttctccgcgctttcggtgatgttctggtgttttgtcggtctggaggctttcgctcatctggcctctgagtttaagcagccggagcgcgattttccccgcgcgctgatgatcggcttattgctggcgggttcggtctactgggcctgtaccgtgctggtcctgcactttcatgcctttggtgaggagatggccgccgccgcgtcgctgcccaatatcgtcgtacgcctgttcggcgttcaggcgctgtggattgcctgcgttatcggctatctcgcctgcttcgccagcctcaatatctatatccagagctttgcccgcctggtgtggtcgcaggcgcagcataagcctgcgagctatctggcccgcctgtcgccgcgacaaattccgcgcaatgcgctgaacgcggtactcggctgctgcgtgattagcgccttgtgcatttacgcgctcaatatcaacctggacgccctgatcgtctacgccaacggcatttttattatgatctatctgctgtgtatgctggcgggctgccgtttgctgcatgggcgttatcgcgtgttagcggcgtttggcagcgtgctgtgcctgctgctgctggcgatggtgggctggaagagcctgtacgcgtttatcatgctggcggtactgtggctgtttttaccaaagcgcaggctcgcggagagagtcaccaggccggagtga

SEQ ID NO: 175214 - DNA, 477 bp, Klebsiella oxytoca
gtgcgttggattccgttaattgccgtttttttatacgtttacattgagatatcgatctttatccaggtcgcccacgtgcttggcgtcctgctgacgctgattctggtgatctttagctcggtcgtggggatatcgctggtaaaaaaccagggctttaaaaacctcatgctgatgcagcagaagatggcggcgggagagagcccggccgctgaaatgatcaaaagcgtgtcgctgatcatcgccggtttgctgttgcttctgccggggttctttaccgatttcctggggctgctgctgctgttacctccggtacagaaacatctgaccttaaaactgatgccgcatctgcgctttagtcggatgccgggcggcgggtttagcgccggaaccggtggcggcgatacctttgaaggtgaatatcagcgcaaagatgacgagcgcgaccgcctcgaacataaagacgatcgtcgtgattaa

SEQ ID NO: 175215 - DNA, 1437 bp, Klebsiella oxytoca
atgttaaacaacattcgtatcgaagaagatctgttgggcaccagggaagttccagctgacgcttactacggcgtccatactctgagagcgattgaaaacttctacatcagcaacaacaaaatcagcgacattcctgaatttgtccgcggaatggtgatggtgaagaaggccgctgcgcaggctaacaaagagctgcaaactatccctaaaagcatcgccaacgccattattgccgcctgcgatgaggtgttgaataacggcaaatgcatggaccagttcccggttgatgtgttccagggcggggcaggcacctccgttaacatgaacaccaacgaagtcctggcgaacatcggccttgagctgatgggccatcagaaaggcgaatatcagtatctcaaccccaacgaccacgttaacaaatgtcagtccactaacgatgcttacccgaccggtttccgcatcgcggtctacgcctccattctcaaactgatcgatgcaatcaaccagcttggcgaaggtttccagcaaaaggccgttgagttccaggacattctgaaaatgggtcgtacccagctgcaggacgcggtgccgatgaccctggggcaggagttccacgcgtttaacgttctgcttaacgaagagaccaaatgcattctgcgcaccgctgagctgctgctggaggtaaacctcggcgcgaccgctatcggcacccgcctgaacactccggatggttatcagcagctggcagttcaaaaactggcggaagtcagcaacctgccggttgtgccagccgaagacctgatcgaagccacctccgactgcggcgcctacgtgatggtccacagttccctgaagcggctggcggtaaaactgtccaaaatctgtaacgacctgcgcctgctctcttccggcccgcgcgccggcctgaacgaaattaacctgcccgaactgcaggcgggctcttcgattatgccagccaaggtaaacccggtggtccccgaggtcgtcaatcaggtgtgcttcaaagtgattggtaacgatacaaccgtcaccatggcttccgaagcggggcagttgcagctgaacgtgatggagccggtgattggccaggcgatgtttgaatctatccatattctgactaacgcctgctacaacctgctggaaaaatgcgtgagcggcatcaccgccaacaaagcggtatgcgaaagctacgtctacaactccattggcatcgtcacctacctcaacccgtatatcggccaccacaatggcgatatcgtcggcaagatttgcgccgagacgggcaagagcgtcagagacgtggtgcttgagcgcggactgctgaccgcggcggagctggacgatatcttctccgcgcaaaacctgatgcatccggcctataaagcgaagcggtatactgatgaaagcgaacagtaa

SEQ ID NO: 175216 - DNA, 1302 bp, Klebsiella oxytoca
atgtttggtgcagaactcgttattgtcctgctggctatttatctgggagccagactcgggggtatcggcatcggtttcgccggtggcctgggcgtcctcgtcctgaccctcttttttcaaattaaacccggcgcgatccccttcgacgtcatcgaaatcattatggcggttatcgccgctattgccgccatgcaggtcgccggagggatggactacctggtcagtctcgccgaacgtatgctgcgacgtcaccccaaatacatcacctttctcgccccgctggtcacctggtttatgaccatactggccggaaccggacacactgctttctctacgcttccggtgatcaccgaagtagcgaaagagcagggtattcgcccctcgcgccctctttccatcgccgtggtcgcctcacagattgcgatcaccgcctcgccgatttccgctgcggtggtcttttttgccggcatccttgaaccgctgggcgtcagctacctgactctgctggcaatctgtattccggttaccctgattgccgtgatgctcaccgccatcgtctgtaacttcctcggctgtgagctaaaagacgatccgatttatcaggagcggctggcgaaaggggaagtcaagctgcgcggcagccaggttttcgagcttaagccgcacgccagacgctctgtgctgctgttcctgattggtatcgtcgcggtaatgttttacgccaccgccatcagcgacaccgtcggcctgattaaagatccggttctgccgcgcaacgaagcgatcgtggtatttatgctgactatcgcgacattgatcagcatcacctgcaaaatagacaccggtgaagtactcaacgccagcacgtttaaatccggcatgagcgcctgcgtttgcgttctcggcgtcgcatggctgggggatactttcgttaaagcccacatcagcgatatccagacggtagcaggcgacctgctgcacaactatccgtggctgctggcggtcgtgctattcttcgccgcaaccctgctctattcccaggcagccaccaccaaggcgctgatgcccgccgcgctgatgctgggcgtaagccctctcaccgccatcgcctcatttgccgccgtctctgcgctgttcgttctgccaacctacccaaccctgctggcggcggtcgaaatggatgacaccggctccacccgcatcggtaaatacgtcttcaaccacgccttcctgatccccggcgtcatcgccattacgctatgcgtgatcctcgggtttatttttggcggcatcatgctgtaa

SEQ ID NO: 175217 - DNA, 324 bp, Klebsiella oxytoca
atgactacgcctgatgctgttgttgtactctgtaccgcgccggatgaagcgaccgcccaggacctggcggccaaagcattggcggaaaaactcgccgcctgcgccacgctcctgccgggagcgacgtcgctctattactgggaaggaaaactggagcaggagtatgaagtgcaaatgctgctgaaaaccgaccttgcccatcagcaggcgctgctggactgtctgaagtcccatcacccgtatcaaacccctgaacttttggttctgcccgttattcacggagacaatgattacctctcatggctcaacgcatcattacgctga

SEQ ID NO: 175218 - DNA, 1761 bp, Klebsiella oxytoca
atggctcaacgcatcattacgctgatcctgctgctttgcagcacatcggccattgccggcctgttcgacgcccccggtcgttcgaactttgttcctgctgaccaggcttttgccttcgattttcagcagaatcaacacgatctcaatctgacctggcaaatcaaggagggttactatctttaccgcaaacagatcaagctgacctccgccgatgcgacgtttatcgaaccctcgctgccgtcaggcgaatggcatgaggacgagttttacggtaaaagtgaaatttaccgccagcgcctgaccgtcccggtcactctgacgcacgccgccgctggcgcaacccttaccgtcacctggcagggctgcgcggatgcgggtttttgctatccgccagaaaccaaaatcgtgccgcttggcaaagcgctggcgcgctccagtaacgatgcgcacgccgggcaacccaggctgaacccgccgctgccgctggaaacgcgcccggcgctgccggtcgagtcgcccgaccttccttctcccgtcgcggacaaccacagcgccgatctcccctttagcgcgctttgggcgctattaattggtatcggcatcgcctttaccccctgcgttctgccgatgtatccgctgatttccggcatcgtgctgggcggtcaaaaacgcctctccaccgcccgcgcgctgctgctggcctttatctacgttcagggaatggcgttaacctacaccgcgctgggtctggtcgtcgccgctgcgggcctgcagttccaggcagcgctgcagcacccttatgtgctgatcggcctgtcggtcgtgtttatcctgctggcgctgtcgatgtttggtctgtttacgctccagctgccttcatcgctgcaaacgcgtctgacgctgatgagcaataaacgccagggcggttcacccggcggcgtattcgccatgggggcgattgccggattaatctgctcgccctgcaccaccgcgccgctgagcgccattctgctgtatatcgcccagagcggtaatctgtggctgggcggtggaaccctgtacctctacgcgctcggaatggggctgccgctgatcctggtgaccgtatttggcaaccgcctcctgccgaaaagcggcccgtggatggctcatgtgaaaaccgcctttggcttcgtgatcctcgcgctgccggtatttttactggaacgcatcctgggagacctgtggggcctgcggctttggtcgctacttggcgtcgccttttttagctgggcgtttatcacctcgctgggcggcacgcgcccctggctgcgtctcgtacaaatcgccatgctcggcgccgcgctggtcagcgcccgtccgctgcaggactgggctttcgatgcaccggtcgtgcaacggcaatcccatctccagtttacccgtatccatagcgtcgatgagctcaatcaggcgctggcgcaggcgaaaggcaaaccggtgatgctcgatctttacgccgactggtgcgtggcctgcaaagagttcgagaaatacacctttacctcacctgaggttcaacaggccctgaaagataccgttctgctacaagtggatgtcacgaaaaatagcgcacaagacgcggcgctgctgaagcacctcagggtgcttggcctccccacgattctgttcttcaacgaacagggcgaggagcagcccgcgcagcgtgtcaccgggtttatggatgccgcggcattcagcgcccatttgcgcgatcgataa

SEQ ID NO: 175219 - DNA, 591 bp, Klebsiella oxytoca
atggaggagaagaccgtgcaacgtgaagaagtcctgggtgaagccatccaaatcctcgaaatcgagggtatcgctaacaccacgctggaaatggtcgccgagcgcgtggcttacccgctcaatgacctcaaacgtttctggcccgatcgcgaggcgctgctgtatgacgcgcttcgccatcttagccatcaggtcgatgcctggcgccgtcagcttttactcgacgagtcgctaagcgcagagcagaaactgctggcccgctacgccgcgctgaccacctgcgttagcaaccatcgttatcccggctgcctgtttatcgccgcctgtactttttacccggacgctcagcacccgatccatcagttggccgagcagcagaagcaggcttctctggcctatactcacgaactgcttagccagctggaggttgacgatccggcgatggtcgcgaagcagatggagctgatcatcgaaggttgcctgagccgcctgctgatcaaacgtagccagactgacgtcgataccgcacgtcgcctggcagaagatattttgcgttttgcccagtgccggatgggcggtgcgctgacctga

SEQ ID NO: 175220 - DNA, 2091 bp, Klebsiella oxytoca
atgcgctctcttctttgggctgccattatggggctgtgttcgacaccgcttctggcagcctctccgcaaggtttctctttcgcgcataaagactgggagctcgcctgcgacaacaccggcacctgccgggccgcaggctatggcgtcaccatgggcgaagtcagcgttctgctgacccgcaatgcgggcgcggcgcagcacgtcgtcgccgttgcgaccttcgcgcaaaccgaacgcgatattccgcccgacgccacggtcactctgttcatcgacgatcgcgacaacggcgccctcgaagccgtcgacgagagccattttcgctttgatgatagccagacgtcggccctgattcaggccctggagcataacggcaaaattgagctggcgattaacggcgagcgcaaggtgctgtccagcgcaggcagcagcgccgcatttctgaaaatggatgagttccagcagcgcctgggcaccgccgatgcgctgatgcgtcaaggagatgccggcgatgacaacgttttgccggcggcgcccgcgccggaaatcatcgcggcgccggtcattaacaatgccgctgccgcgacgctgacggcaaaacagcggcagaagcttcttccgcagctaacccccgtgcttaacagccattgcgacgactggcaaaacgccgacatcccggcctccgagcgtcagctcaccgccaccccgctggataaaaaccacaccttgattcaggccctttgctggcgcgcggcctacaacgacggctacgccatatgggtggtcgacaaagcatttatgactcagcctcagctgatcgctaccgacgcctccagctatggcgatggcgtgcttacctttttcaacaagggccgcggtattgccgactgtatcagcggagaagagcgcgtgtgggacggccggacctttgttcagagcctgaaatacaccaccggcgactgccgggaaatcgcccccggcggcgcatggatgttgcccactttcgtcagtcaggttatccccagacagcaaaaagaagccgataataatgcgctgaaagcgctgtataacgccgtgttaaaagagcagaaggtcaaccctgaactggatctgaataagatcgccgaacagtttcccctcggtggcaaggtcagccattttacgctgacctacgcggacgactctctggtctcgacgagcaaaccttccgccgatatcagcgatgatgagtggcaggcgtttctccagtccgatatcagcgccgactccgaaaacggcaaagtcagcttcaccctggtggatctcgacggtgacggcagacgcgatttaattatcgatagctacgtcggcggcaccggactctttagctataccggagtcttaaaacgcaacgacgacgctttcgaaacggtcaacagcgacgatagcggcaacggcgatgattttgacgcaggggttcccggcgcgcttttttcccttaacggccgcggcgccaaccagtggagccagtgggtacgcattaatggccaggtttatgccctctggtacaacggtcagtttggcgaagataatctctatttattgcgcccgtttgccccctcgggcagtagcgcgcctgcggtgacgatccgctatcgctacactctcaatgacatccgctcgccggaaaaaggccagccgctgacgcccgcgttaagcgacggggaaaaaacggatctgctgaagtcgctggaggtgatgcagagcagcctgcttaaggataagccgcagagcgacggcgaagcgccaatctgccctattcccccgggcacgtcggccgacgatgcggaaagttactatagcggcgtggcgtctaactatatttatgaaaccgtcgcctatattccggtctggctgaatgataaatgttttatcggcaccatctttagccaccacggcgcatatcgtcacggcgtcgacgcggaaattaccatcagctcgccgcgcgatgacgaagacgtcgtcggcgactacgcgatctccggacttcgccgcgcgatctcagtgaccagcggctggaagaaccgcgaaggcgataacggcatgatgtaa

SEQ ID NO: 175221 - DNA, 588 bp, Klebsiella oxytoca
atgcatgcattaatcgtggtttctcatcctcttaatacttctctgactcacagcgtagcgacggctattgcgcaagggattgccgaatccggccagcagcacactgctgaaatagcagatttaacgcaggaaggctttaacccggtgtttactgagccggatatcgccgcatttctgcaaaccggctccacgccgcccgatgtggttgctgagcaggccagactcgatcgagccgacgcactggtgctggtctttcccgtttactggtggtcgatgcctgcgctgctgaagggctggatcgaccgcgtgtttgccaacggctgggcctatgaggaaaccgccgggggcgaggtggtgaagaagctcgggcgcctgcgagtgcacctggttgcgttaggcgcagccaatcagaaaacgtatgataagcatgggtttaccgctgcttttcatgcgcagatcgcccacggcatttttgattactgcggggcgacggtggccagttcgcagctgctgctgttaccggagctggaaacggcgaaagcgcatcttgaggcggggtatcagctagggaagacgatatttaactga

SEQ ID NO: 175222 - DNA, 621 bp, Klebsiella oxytoca
atgtctcaacccctcgtacggcagcgtttaacgcgagaagagcggcgcacgcagctgatggacgtcgcctggcatattattcgcgaggaaggaaccgacgccctgacgctgggctatctggcgacccaggcgggggtgactaaaccggtggtttacgatcattttgacagccgttcgggacttttcgcggcgctgtatgcggaatacgaccagcgccagagcgtaaagatggatgaaattctgcgcaacaccgaacccagggcggagacactggcttcggcgatcgctaatgcctacattgagtgcgtcctgctccagggccgcgaaatgcccagcgtgatggccgcgctggccgggacgcctgagctggagaaaatcaagcaggagtgcataaccgcatttaccgcgaaatgccggcaatatttttcgccgctttgcgagagtgaaaacctcagcgaagcagccattctcgccatgcttggatccgccgacgggctatcggctgcggtagtaaacggcgtcatcacggagcagcaggcgaaagatgagctatttcaggtgattatgtcgatgctgcagcgctgctgccgtggcgaagaagcgctacccggtagcggctag

SEQ ID NO: 175223 - DNA, 783 bp, Klebsiella oxytoca
atgcccggccataagaatttactgacactcgcctttattggcgccgcactgcttccggtgatggcaactgccgctgatgcacccaccttcacgcccgaacaggaagcccgtatcggcaaaattgccgcggactatttagtcgcgcatccggaagtgctgctgcaggccagccagaagctgcagcaaattcaggaacagcagcaggccagcgccgcgacgcaggcggtactgaagaacgcggctgcgctgacgcaggataaaaacaccccaacctatggcccgaaagagggcaaagtgaccgttattgaattctttgattatcaatgcgtttactgcagccgtctggctccggtcatggagcaggttattaaagagaacccgcagacccgctttgctttcaaagagtggccaatttttggcagccgttgggaaacctcgctggaggcggcgaaaactgggctgcagatttatcagcagaagggcgcagaggcctatttgacctaccataacggcatctattccaccgggcataacgaaggcaagctaaccgccgctgacgtgcagcagcaggcgaagaaggtcaatttcgatgcgaagaaagcggcggacgttgagtcggtactggaaagtaccaaccagctggcgcaggagatcggtttaagcggtacgcccggcgttatcgtaatgccgacgaccggcgccacggaggcgacgatcaccgtattccctgggctggcggataaagcctcgctggatgcggcgattaagaaagcgggcggctga

SEQ ID NO: 175224 - DNA, 684 bp, Klebsiella oxytoca
atgaatgagtttttcagtcagtgggacgtagcggttatcctgctgcaaattatcgctatcgacctgttattaggcggcgacaacgcggtggtgatcgcgatggcctgccgtaagctgccgccgcatcagcggaccaaagcgattattatcggcacctttggtgcgatagcggcgcgcgtgctgctcctggccgtggctatttatttgctctcattgccgtggttgaaagtggttggcgctctgatgctgttgtggatcggtatcaagctggtcaccaatcaggaagaagagaatgaaatcagcagctccagcagcctgtggcgtactgcggtcaccattaccgttgccgatgtcattatgtcgctggacaacgtactggccgtcgccgccgccggaaaaggccatctgctgctggtcgcgctgggggtgctgatcagcatcccgattattgtcgcgggcagtaaactggtattggcgatccttaaccgcttcccgtcggtggtgatgctgggcggcgcgcttatcggctggatagccggctcaatgatggtgagcgatgtcaccatcgttcatctgttccccaacgcgccagccgcccttccgttgatcggcggcgccattggcgctgccctggtgctgctggaagggctgcgcaggaaccgcagcaggccttctgccgaatag

SEQ ID NO: 175225 - DNA, 918 bp, Klebsiella oxytoca
atggaattaaaggattattatgccattttaggggttcagccaacggacgatctgaaaaccatcaagaccgcctatcgccgtctggcacgcaaatatcaccccgatgtcagtaaagaaaacgatgccgaagccaggttcaaagatctcgccgaagcctgggaagtgcttaaagatgaccagcgccgcgctgaatacgaccaactgtggcagcaccgcaacgatccgcactttggccgtcagcagcactcccatgagcagagctacagccagcaggactttgacgacatcttctcctccatgtttggccagcaggcgcatcatagccgccgccagcagggcgtgcgcggccatgatttagagatagaagtcgcggttttccttgaagagactttagccgagcagacgcgcactatcagctataagctgccggtgtataacgtctttggcatggttgaaagcgaaacgccgaaaactctgaacgtaaaaattcccgcaggcgtcgtcgacggccagcgcatccgcctgaaaggccagggcacccccggcgagaatggcggcccgaacggcgacctgtggctggtgatacatatcgccccgcatccgctgtttgatatcgtcggacataaccttgaaattgtcctgccgctggcgccatgggaagcggcattaggcaccaaagtcactatcccgacgctcaaagagagcattctgttgaccatcccgccgggcagccaggccggacagcgcctgcgcgtcaagggcaaagggctggccagcaaaaccaccactggcgatctgtacgccgtgattaaaatcgttatgccgccaaaaccggatgagaagagccgcgagctctggcagcagctggccgatgcgcaatccagcttcgagccgcgtaagacatgggggaaagcctga

SEQ ID NO: 175226 - DNA, 306 bp, Klebsiella oxytoca
atggctaagataacagtgacgtttacgattaccgagttttgtctccacaccggcctttccgaggaggaactgaacgaaattgtcggcctcggcatgatcgagccgcgccagccgcagcgggaaaaatggctgtttgacgatagtgcggtgacaattgttcaccgcgcagtacgcttacgcaaagagctggagctggactggccggggatcgccgtcgccttgacgctgcttgacgagaacgcgcgcctgagccgtgaaaatcaaattctgcagcagcggctggcgcgctttctgacgcatggttaa

SEQ ID NO: 175227 - DNA, 1347 bp, Klebsiella oxytoca
atgtctgcccccaaaattacctttatcggcgccggttcgacggtattcgtcaaaaatatactcggcgatgtgtttcagcgcccggcgctaaagtccgcgcatatcgccctgatggatatcgatgcgactcgcctggaggagtcgcatattgtggtgcgcaaactgatggactctctgggcgcggagggggaaatcagctgccatcgcgaccagaaagcggcgctgcaggacgcggattttgtggtggtggccttccagattggcggctatcagccctgtacggtcaccgattttgaagtctgtaagctgcatggcgtggagcaaactattgccgatacgcttggcccgggcggaattatgcgcgcgctgcgcaccattccgcacctgtggcgcatctgcgacgatatgaccgaagtttgcccgaacgccactatgcttaactacgtcaatccgatggcgatgaatacctgggcgatgtacgcccgctatccgcatattaagcaggtcggactgtgtcattcggtgcaggggacggcggaggaactggcccacgatctggatctcgacccggcggatttacgctaccgctgcgccggtatcaatcatatggccttttacctgtcgctggagaaaaagctcagcgacggcagctatgtcagtatttacccggagatgctgcaggcatttgccgaaggacgcgcgccgaagcatcgcgaagattcgcgctgccagaacatcgtccgctatgagatgtttaaaaagttgggctattttgtcacggagtcgaccgagcacttcgcggaatacactccctggtttatcaagccggggcgtgaggatctgattgcgcgctatcaggtgccgctggatgagtatccgaaacgctgcgtagagcaggtggcgaactggcacaaagagctggaacggtataaaaccagcgagcgcattgaggtcaaaccctcgcgcgagtacgccagcaccattatgaacgccatctggacaggcgagccgagcgtgatctacggcaacgtgcgtaacgataatcttatcgataacctgccgcagggctgctgtgtggaggtggcctgtctggtggacgctaacggcattcaaccgaccaaagcgggcaagctgcctgcccatctggcggcaatgatgcaaaccaatatcaacgttcagaccctgctgacggaggcgatactcacggaaaatcgcgactatatctactatgcgacgatgatggacccgcatacggcggcggtgctgggcattgaggagatctatgcgctggtggacgatctgatcgacagccacggcgactggctgccggcgtgggtgcatggctaa

SEQ ID NO: 175228 - DNA, 942 bp, Klebsiella oxytoca
atgatcgataaaccccgcgcagcgcatcccgccgacgcgtatatgagcagcagcgacgatcgactgccccgcagcccgctggcgctctactctgaataccagcggatggatatcgagctgcgtactccttatgccatgaccgccagccactggcacggtcaggtggaggtgaacgtccccttcgacggcgatgtcgagtatctgatcaacgatgaagcggtacgtatcgagcagggctatatcaccctgttctgggcctgtacgccccatcgccttacccgaccaggggcctgcaggcagatggctatcttcaacctgccgatgcatctgtttttatcctggccgctggatcgggagcttattaaccacgtcacccacggtatggtggtgaaatcgctggctgcccagcagctcagcgtatttgaagtccagcgctggcagcaggagctgaacagcgaaaatgagcaaatccgccagttagcgatcgatgaaatcgctctgatgctcaagcgcctgagcctctccggctggcagccgattctggtgaacaagacttcacgcacgcataagaacagcgtttcgcgccacgcccagttttacgtcagccagatgctggaatatattgccatccactacgatcgggcgctcaccgtcaacgatgtcgccgagcatgtgaagctgaatgccaactacgcgatggggatttttcagcgggtgatgcagcaaaccatgaagcagtacattaccgcgatgcgcattaatcacgttcgggcgctgctcagcgacaccgataagaccatcctcgatatcgccctgaccgccggtttcggctccagcagccgcttttacagcacttttaataaatatgtcggcatgccgccgcagcagtatcgcaggctgagccagcagcgtcgccataatctggcgcccgccggggcataa

SEQ ID NO: 175229 - DNA, 1503 bp, Klebsiella oxytoca
atgcttaaaaggaaaaaagtaaaacccatcacgcttcgggatgtgaccatcattgatgatagcaaactgaagaaagcgattaccgcagcctcgctgggtaacgcgatggagtggttcgattttggggtatatggttttgttgcgtatgctcttggtaaggtctttttccccgatgccaaccccagcgtgcagatgattgccgcgctcggtactttctcggttcccttcttaattcgtccattaggcggcctgttcttcgggatgctgggcgataaatatggtcgacaaaaaattctggcgataaccatcgtcattatgtcgataagtacattctgtatcggtcttattccgtcgtatgccaccattggtatctgggcgccgattctgctgctgctgtgtaaaatggcgcagggattctcggtgggcggagaatataccggggcatcgatctttgtggcggaatactcgcctgaccgtaaacgcggctttatgggcagctggctggacttcggttcgatagcgggcttcgtgatgggcgcgggcgtggtggtactcatttccagcatggtaggcgaagagaacttcctcgactggggctggcgtattccgttcttcctcgcgctgccgttaggcattattggtctttatctgcgccatgcgctggaagagacgccggcgttccagcagcacgttgataaaatggagcagggcgaccgcgagggcctgcaggacgggccgaaagtctcctttaaagagatcgcgactaaacactggcgtagcctgctgacctgtatcggtctggtgatttccaccaacgtgacctactacatgctgctgacctacatgccgagctacctgtcgcataacctgcactattcagaagaccacggggtgctgatcatcatcgccatcatggtcgggatgctgttcgttcagccggttatcggtatgctcagcgaccgttttggccgtcgcccgttcattctgattggtagcgtggcgctgttcgcgctgtcgattccggcattcatcatgattaacagtaacgttctcggcctgattttcgccggtctgctggtgctggcggttgtgctgaactgctttatcggagtgatggcttcgtcgctgccggcgatgttcccgacccacattcgttttagcgccctggccagcgccttcaacatctcggtgctgattgccggtctgacgccaaccctggcggcgtggctggtagaaagcacgcagaacctgatgatgccggcttactatctgatggtaattgcagttatcggtctgattaccggcctgtcgatgaaagagaccgccaatcgtccgctgaaaggggcgacgccagcggcttcggatattcaggaagcgaaagaaattctcggcgagcactacgataacatcgagcataaaatcgaagatatcgatcaggagatcgccgatctgcaggaaaaacgctctcgtctggtgcagcagcatccgcgcatcaacgactaa

SEQ ID NO: 175230 - DNA, 336 bp, Klebsiella oxytoca
atgcaactgccacactgcccgaaatgccattctgaatacacttatgaagatggcggcatgtttatctgcccggaatgcgcccatgaatggaacaatgccgagcctgcggatgataacgacgcgctggtggtcaaagatgccaacggtaatttactcaccgacggcgacagcgtcaccgtagtaaaagatcttaaggttaaaggcagttcttcaatgctaaaaatcggtactaaagtgaagaatatccgcctggttgaaggcgatcataatattgactgcaaaattgatggttttggcccgatgaagctaaaatccgaatttgttaaaaagaactga

SEQ ID NO: 175231 - DNA, 435 bp, Klebsiella oxytoca
atgcccctgagtccctatatcgcttttagcggcaactgcgcggccgccatcgcgttctaccagcaggcgctgggcgctgaactgctccataaaattacctggggcgaaatgccgcaggatattcatgacgcagaggatggctgcccctccggccagcatctggccgccgacggcatcgcccacgccagtctgcgcatcgccgacagcatcctgatgctcagcgacagcccctccagtaaaatggagcgctacgccgggtttactatcgtgcttgatccgcaagatgttatcgagggtaaacgctggtttgacggcctcgccgatggcgggcagatagagatggtctggcaggagacattctgggcgcacggcttcggtaaagtgatcgaccgctttggcgtcccgtggatggtcaacgtggtgaaagaaccttaa

SEQ ID NO: 175232 - DNA, 726 bp, Klebsiella oxytoca
atgtacttatccagacatccgaccagttaccccacgcgatatcaggaaattgccgccaaactggagcaagagctttgccatcattaccgctgcggcgactatctgcccgccgagcagcagctggcgtcccgctttgaggttaaccgccataccctgcgccgggccatcgatcagcttgtcgagcgcggctgggtccagcgccgtcagggcgtcggcgtgctggtactgatgcgcccgatagattacccgctcagcgcccaggcgcgctttagccagaatcttctcgaacagggcagccacccgaccagcgaaaagctgctgtcggtgctgcgtccggccagtagccaagttgccgacgcgtttgccatcagtgaaggcgataacgtcattcacctgcgcaccctgcgccgcgtgaacggcgtcgccctgtgtctgatagaccactactttgccgacctgcagctatggccggttctgcaaacctttacccacggctcgctccacgatctgttgcgcaatcgtcttgatatcgaactgacccgcgtacgcaccaaaatcagcgcccgccgcgcgcaggccaaagagagccgcattctcggcattcccaatatggcgccgctgctgtgcgtgcgcaccctgaatcatcgccagggcgagcagagcgcgacggagtactccgtcagcctgacccgcgccgacatgattgaattcaccatggagcactga

SEQ ID NO: 175233 - DNA, 453 bp, Klebsiella oxytoca
atgcactttgataccgctacccgccagcgctggatgtccgtgctggcccacagtgacccacaagaactggcggcgcggatgcaaacgctgcagctcgcgccgcagtatgaactgattcgcgccccggaaaccgggctggtccagctgcaggcgcgcatgggcggcatcggcgatcgatttttcgccggagacgccaccttaacccgcgccgctatccgcctggccgacggcacgctcggctatagctggattttaggccgcgatcgtccgcacgctgaacgttgcgcggccatcgatgccctgatgcagtcgccacaccattttcacaccctgatggaaaccctgataaccccgctggaagaacaacgtagcgcgcgcattgaagcccgacgcgccgaagtcaacgccagccgggtcgacttctttactctggttcgcggagataacgcatga

SEQ ID NO: 175234 - DNA, 585 bp, Klebsiella oxytoca
atgaccttacaacccgcttttaccctggctgtgcaggatgcccagcacagtttccgccgcctgctgaaagcgatgagcgagccgggcgtgattgtctccctgcagcagcttcagcacggctggcagccgctgaacgtcgccaccaccagcctgctgctgacgctggtggatcacgagacgccggtctggctcgctccgacgctgcataacgatctggtcggccagaatttacgctttcataccggcgcgccgctggttgagcagccgcagcaggcaaccttcgccgtcgccagtgacagcatcagcgccgaacagctcaacgtgctctccgccggtaccgtcgtcgccccggagaccggcgttacgctgattgttcagctcgccagcctcagcggcggccggatgctgcgcctgaccggcgccgggatcgccgaggagcggatgatcgccccgcagctgccggaatgtattattgcagagttaaccgagcgcccgcatccgttcccgctgggtatcgatctgattctcacctgcggcgaacgcctgctggcgattccgcgcaccactcacgtcgaggtctgctaa

SEQ ID NO: 175235 - DNA, 1065 bp, Klebsiella oxytoca
atgtacgtagccgtcaaaggcggcgagaaggcgatcgtcgccgctcacgccctacaggaacagcaacgccgaggcgatggacggcttcctgaaatcagcgttgaccagattagccaacagctcaatctggcggtggatcgggtcatgaccgaaggcggtatcgccgaccgggagctggcggcgctggcgctgaagcaggccagcggcgatagcgtcgaagcgatttttctgctgcgcgcttaccgcaccacgctgcaaagactggcggtcagcgagcctgtcgacaccgccgctatgcgccttgagcgccggatctcggcggtctataaagatatccccggcggccagatgctcggcccgacctacgattacacccaccgtctgctcgattttaccctactggccaacggcgaaacgccgccgctggcgaccgatagcgcgccgcaggaagccacgccgcacgtttttaatctgctcgtccagcagggactggcgaaggcggagcaggatactgacgcgcagcccgacgacatcacccgccatccgccggtttatccctgttcgcgctcgtcgcgcctgcagcaactggtgcgcggcgacgagggctacctgctggcgctggcctactccacccagcgcggctacgggcgcaaccatccgtttgccggggaaattcgcagcggctacgtcgcggtggagatcgtcccggaagagctgggcttcaccgtcactattggcgaactgttgatgaccgaatgcgaaatggtcaacggctttgtcgaccctcaggatgaaccgccgcacttcacccgcggctacggcctgacgtttggcatgagcgagcgcaaagcgatggcgatggcgctggttgaccgcgcgctccaggcgccggagtacggcgaagaggcggcgggtccggcccaggacgaagagtttgtgctggctcatgccgataacgtcgaggcggccggtttcgtttcgcacttaaaacttccccactatgtcgatttccaggccgaactggcgctacttaaacgcctgcaacgggagaatcaacgtggctaa

SEQ ID NO: 175236 - DNA, 849 bp, Klebsiella oxytoca
gtggctaacgcactgaccggctacaactttgcctacctcgacgagcaaaccaaacgcatgatccgccgcgccatcctgaaagcggtggccatccccggctaccaggtacccttcggcggtcgcgagatgccgatgccctacggctggggaaccggcggtattcagcttactgccagcattatcggcgaaaatgatgtgctgaaggtgatcgatcagggcgccgacgacaccaccaacgcggtatcgattcgtcagtttttcaaacgcgtaaccggcgtcgcaaccaccgaacgtaccgaggacgccacgctgatccagacccgccaccggatcccggaaacgccgctaaccgaagatcagatcctcatcttccaggtgccgatcccggaaccgctgcgctttatcgagccgcgcgaaaccgaaacccgcaccatgcatgcgctggaggagtacggcgtaatgcaggtgaagctgtacgaagatatcgcccgcttcggccatatcgccaccacctacgcctacccggtgaaggtcaacggccgctacgtcatggacccatcgccgattccgaaatttgataatccgaagatgcatatgatgcctgcgctacagctgttcggcgccgggcgcgaaaaacgcatctatgcggtgccgccttataccccggtggagagcctcgatttcgacgatcatccgtttaccgttcaggagtgggatgaaccctgtgcgatctgcggctcacgccacagctatcttgatgaagtggtgctcgacgacagcggcaagcggatgtttgtctgctccgataccgactattgccgccaacagtgcgaggagcagaaaaaatga

SEQ ID NO: 175237 - DNA, 759 bp, Klebsiella oxytoca
atgagctatccgttactggcggtgaataacctgacccacctctatgcgccgggtaaaggcttcagcgacgtatcgttcgagctgtggccgggagaagtgctgggtatcgttggcgagtccggttccggtaaaaccacccttctacaggcgatttccgcccgcctgacgccgcagcagggtgaagtgcggtaccagaatcgttcgctgtacgcgatgagcgaagcggatcgccgtcgcctgctgcgcaccgagtggggcgtggtgcatcagcatccgatggacgggctgcgtcgccaggtgtcggccggcggcaatatcggcgagcgcctgatggcgatcggcgcccgtcactacggccacattcgcaccaccgccgggcagtggttacaggaggtggagatcccgccttcgcgcattgacgacctgcccaccaccttttccggcggcatgcagcagcgtctgcaaatcgcccgcaatctggtgacgcagccgaagctggtgtttatggatgaacctaccggcgggctggacgtgtcggtgcaggcgcgcctgctcgatctgctgcgcggcctggtcgtggagctcaatctggcggtagtcattgtgacccacgacctcggcgttgcccgcctgctggctaaccgtctgctggtgatgaaacaggggcaggtggtggaaagcggcttaaccgaccgggtgctcgacgatccccatcatccttacacccagctgctggtgtcgtcggtattgcagaactga

SEQ ID NO: 175238 - DNA, 687 bp, Klebsiella oxytoca
atgaacgccattcgcgtggaaaacatccataaaacctttgttctgcaccagcagaacggcgtgcgtctgccggtactcgccgacgcctcgctgagcgtaaacgtcggcgaatgcgtggtgctgcacggccactccggcagcggaaaatcgaccctgctgcgttcgctgtacgccaactatctccccgatagcggccacatctatatccgccacggcgatgaatgggtggatctggtcaccgccacgccgcgccaagtcctggaagtgcgtaaaaccaccatcggctgggttagccagtttctgcgagtgatcccgcgcatctccgccctcgacgtcgtcatgcagccgctgctcgagctgggcatcccgcgcgaagagagcgccggtaaagccgcccgcctgctgacgcgcctgaacgtgcccgaacgtctgtggcacctcgccccctcgaccttttccggcggcgaacagcagcgggtcaatatcgcccgcggcttcgcggtagactacccgatcttgcttctcgacgaacccaccgcctcgctggacgacaaaaaccgcgccgccgtggtggaactgatccaggaagccaaagcccgcggcgcgtcgatcgtcggcattttccacgacgaggccacgcgtaaacaggtcgccgaccgcctgcaccccatggggatttcagcatga

SEQ ID NO: 175239 - DNA, 1137 bp, Klebsiella oxytoca
atgattatcaacaacgtaaagctggtcctcgaagacgaggtggttaacggttcgctggaggtgcgggacggcagaatttcagcctttgccgaaagccagagccggctggcggaggccattgacggcgacggcggctggctgctgccggggcttatcgagctgcataccgacaacctggacaagtttttcaccccgcgaccgaaggtggactggcccgcccactcggcgatgagcagccacgacgcgctgatggtcgccagcggcatcaccaccgtgctggatgccgtggctattggcgatgtccgcgacggcggcgatcgtctggagaacctggaaaagatgatcaatgccgtggaggagacgcaaaagcggggcctcaaccgcgccgaacaccggctgcatctgcgctgcgaactgccgcatcacaccactctgccgctgttcaagaagctggttggccgcgaaccggtgagcatggtctccctgatggatcactcccctggccagcgccagtacgccgaccgcagcaaataccgcgactactaccagggcaaataccatctgaccaacgaacagatggacgccttcgaagaggagcagatggcgctggcggctgcctggtcacagcccaaccggcagcgcatcgccgcgatctgccgcgagcggaatatcgcgctggccagccacgatgacgctacctgcgaacatgtgctcgagtcacgccagcttggcagcgttatcgccgaatttcccaccactatcgccgcagcgcaggcctcgcgccagcatgggatgagcgtcctgatgggcgcaccgaatatcgtgcgcggcggctcgcactccgggaacgtcgccgcccatcatctggcggccagcggactgctggatattctctcctccgactattatcccgccagcctgctggatgccgctttccgcatcgctgacgacgagggcaacgcttttaccctcgcgcaggctattcgtctggtaagtcaaaacccggcgcaggcgctggggctgcacgaccgcggggcgattgccgaaggtaagcgggcggacctggtgctggcgcgccgtcacggcgagcatatccatatcgatcacgtctggcggcaaggtaagagggtcttctga

SEQ ID NO: 175240 - DNA, 564 bp, Klebsiella oxytoca
atggcaggaaaactgatttggctggtcggtgcctccggctccggtaaagacagcctgctggcggcgctgcgccagcgtgagcatccgcagctgctggtagcgcaccgctacattactcgttcgcccaatgcgggcggtgaaaaccatatcgccctcagcgagcgagagttttttacccgcgccgagcagcatctgtttgccctcagctggcatgcaaaccaccattactacggtattggcatcgagattgacctgtggctgcacgccgggttcgacgtggtcgctaacggttcacgcgcgcaccttgcgcaagcgcaggcgcgctatgctgacgccctcctgcctatctgtttgcaggtttcaccggaggtgctcagacaacgcctggcgcggcgcgggcgggagaacgaaacagaaatcgcccagcgcatggcgcgcgcggcgcgctatacgccgagcgcgtgtctcacgctaaataacgatggtcgccttagccagtcggtggacgctctggtttcgctgattcgcattcacggcaaccgacgcgaacggcagccagcctga

SEQ ID NO: 175241 - DNA, 759 bp, Klebsiella oxytoca
atgagcctgagtatccgcttaaccggcaccggcggcgcgcagctggtgccggtttttggctgcgattgccccgcctgtcgccgcgcccgcgccgacgaagcacatcgtcgtcgcccctgtagcgcgatagttaaattcaatagcgcggtgacgctgctcgatgccgggctgccggatctgatgacgcagtggcccgccggcagctttcagcagtttctgctcacccattatcatatggatcacgtacaggggctgttccccttgcgctggggcgtgggcgaatccattgcggtatacggccccccggatgatcagggctgcgatgacctgtttaagcatccgggcctgctggatttcagccacaccgtcgaaccatttgtgcggtttgaacttcagggattgcgcgtcacgccgctgccgttgaatcactcaaggctcacgtttggctatctgctggagtcggcccatagccgggtcgcctggctctccgataccgccgcgctgccggaaaaaacgctgaagttcctgctgaataatcagccgcagcttatcatcatcgactgtagccacgagccgcgcccgcagccgccgcgcaaccactgcgacctgaacaccgtgcaggccattaaccaggccatcggctgcccgcgagtgatcctcactcatattagccaccgcttcgacgcgtggatgatggagcactctctgccggcggggtttgaagcgggatttgacggcatggagattatgctgccttaa

SEQ ID NO: 175242 - DNA, 468 bp, Klebsiella oxytoca
atgaccacaacacgacacacgcttcgccatgcctgctggtatgcattcattggcccctatattggcctgctgtgggccatcgtcgccatcgtcatacagtcgcgccgttcggtgggtagtttctttgaatttgtcttttctgaactgccgtattttctcatcgtcccctgggctgctggcgccatcccggcgctactgaccgggatcgccgtcgcttttttgcccacgggcattcatgcgattcattaccggcgtatcctcgccagcgcgaccattggcctggccatatgcgcggcaataccgctaaccggcgtgctgcttttctccgataccgatctgacaacctttattctgcgtggtcatgggttccgggtaatcgcaggttctggcctgttctccggactgattatgggatggctgatagcctatctgccgggcagggagcagagaaaaacgccaaatgaataa

SEQ ID NO: 175243 - DNA, 225 bp, Klebsiella oxytoca
atggaaacaacccgtagccggggctggcgcatggcgcaaaagcagcgcaataagtctcgcgatgttcacaccgccctcttacgttttcgtcgcgagaaaaactggaagcatctctatttgcgttcagaaaaattgctacgcgccgcgcagctgggaatggaatatccccgtaaaactcgtcgccagctggcgcatcagggaatggaagagctgttatcgaattga

SEQ ID NO: 175244 - DNA, 330 bp, Klebsiella oxytoca
ttgatcaacgtgctgtttgtttgtagccgcaatcaatggcgaagcccgacggcggaacaggtgttccgccgttatcctggcatgaacgtgcgctctgcgggcacgagccggaacgccagaaaaccccttactcctgaactgattaactgggcggatattatctgcgtgatggagcagaaacataaaaatcgactggtcgctgaatatcgtcgcctggtcgaaaataaaccgctttacgtgctggatatccccgacgactaccgctatatggaccccgaacttgtcgccctgctgaaagagctggtccccgccctgcccgaactgagctaa

SEQ ID NO: 175245 - DNA, 408 bp, Klebsiella oxytoca
gtgacaggacgaatgattcatcatgcaggctggttcgtggcccttgggccgttaataccgctaccgctcattctctttttacccagggtcatctcagttgatgagctcctcaatcatcttccggaagtattatccctcacctggggtattggctttttacccgcattgttaaccggcattttcatggctatcctgacgggccacgctgattgcgcctggtactatcgaatgctggcaggcgggattgccgggcctctgataacggccatttgctgcggcatcatcggcgcttttattccgatgtttttctatttaatcccgctgttgcttatctcggcgctgccgtccggcatcgttatgggactgctgattccctggctcccgccgcggatcgcccggcatcagtaa

SEQ ID NO: 175246 - DNA, 333 bp, Klebsiella oxytoca
atgaaacgttatactaccgctttgcttttttgcaccctatccctcgccggccagctggcgcacgccgatgtgatcgacgacgctatcggcaatattcagcaggctattaacgatgcttaccacccgggcgatagccgttccgacgacgatgactatgatgatgggcgctatcagggcagccgtcagcaaagcgccgatcgccagcggcagtatgaagacagacgacgacagcttgaagatcgccgccgccagcttgacgagcgtcagcgccagctggacagcgatcggcgacagttagaaaacgactggcgtcgtctggatgatgattactga

SEQ ID NO: 175247 - DNA, 450 bp, Klebsiella oxytoca
atgaaaaggattgcatttggctgcgatcatgtcggttttatcctgaaagacgatatcgttgcgcatctgcgccagcgcgggattgacgtcgtggataaaggcgcatggtctacggaacgtaccgattatccgcgctatgccagcgccgtcgctgagtccgttgccgctggtgaggtcgacggcgggatcctgatctgcggcaccggcgtcggcatctctatcgctgccaataagcatcccggtattcgggcggtggtgtgcagcgagccctactcggcgcagctttcacggcagcataataacaccaatattctggcctttggcgcgcgggtgatcggccttgaactggcaaaaatgatcgtcgatgcctggctggatgccgaattcgagggcgggcgccaccaggggcgggtagacgcgatcggcgcgattgagcagcagcggatttga

SEQ ID NO: 175248 - DNA, 906 bp, Klebsiella oxytoca
atggacaaagagaaagcgatgagtcagtcagaatccagttcgctccctaacggtatcggccttgccccctggcttcgcatgaagcaggaaggcatgaccgaaaacgagagccgtatcgtcgaatggttgcttacccccggcaatctcagcgatgcgccggccattaaagacgtcgcggaagcgctgtcggtatcagaagccatgatcgttaaggtttctaagctgctcgggtttagcggttttcgtaaccttcgcagcgcgctggaggcctacttttcgcaatctgagcaggtgctaccgaccgagctctcctttgatgaagcgccgcaggatgtggtgaacaaggtgtttaacatcactctgcgcaccattatggaaggccagtcgatcgttaacgtcgacgagattcaccgcgcggcgcgctttttcgctcaggctaaccagcgcgatctttacggcgcgggcggctccaacgccatctgcgccgacgtgcagcataaatttttacgtatcggcgtgcgctgccaggcctacccggacgcgcatatcatgatgatgtccgcctcgttgctaaaagaaggcgatgtggtgctggtggtttcacactccgggcgcaccagcgatattaaatccgcggtggagctggctaaaaagaacggggcaaaaattatttgcatcacccacagctatcattcgccgattgccaaattagctgattttattatttgttcgccagcaccagagacgcctttattaggccgaaacgcctcagcgcgtatattacaactgacattattagatgcattctttgtttccgttgcccagcttaatattgaacaagcgaatttaaacatgcaaaaaaccggcgcaattgttaatttcttttctccaggcgcgctgaagtaa

SEQ ID NO: 175249 - DNA, 936 bp, Klebsiella oxytoca
atgaataaatatctgaaacttttcagcggcgcggctatgggcgtaatgttatccaccagcgcctttgccgccgccgattatgccgtggtcttaaaaaccttatccaatccattctgggtggatatgaaaaagggtattgaagacgaagccaaaaccctgggcgtgagcgtcgatatttttgcctcaccttctgaaggggattttcagtcgcagctgcagctgtttgaagacctgagcaataaaaactacaaaggtatcgcctttgcgcccctctcatcggtaaacctggtgatgccggtggctaaagcctggaaaaagggcatctatctggtcaacctcgatgaaaaaatcgatatggataacctgaagaaagccggcggcaacgtagaaggttttgtcaccaccgataacgtggcggtcggggcgaaaggcgcagagtttatcatcgacaaactgggtgctgaaggcggcgaagtcgctattatcgaaggcaaagccggtaacgcgtccggtgaggcccgccgcaatggcgccaccgaagccttcaaaaaagcgagtcaaatcaagctggttgccagtcagcctgccgactgggaccgcatcaaggcgctggacgtcgccaccaacgtgctgcagcgtaacccgaacgttaaagcgatctactgcgccaacgacaccatggcaatgggcgtcgcccaggccgtcgctaatgccggcaaaaccggcaaggtactggtagtcggtaccgacggcattcctgaagcgcgcaaaatggtcgaagccggacagatgaccgccacagtcgcccagaacccggcggatattggcgctacgggtcttaagctgatggtcgatgctgagaagagcggcaaagtcatccctctggataaagccccgcagtttaagctggtggactccattctggtgacgaaataa

SEQ ID NO: 175250 - DNA, 1533 bp, Klebsiella oxytoca
atgctcacgccatatatttcaatggcggggatcggcaaatcctttggcccggttcacgcattaaaatcggttgatttaactatttacccccatgaaatacatgcgttattaggggaaaatggtgccggtaaatcaacgctgatgaaagttctgtcgggaatacatgaaccgaccaaaggcaccattacgattaataacgttaactacgacaagcttgatcataaattagcggcccagctcggcattggaattatttatcaggagctcagcgtcattgatgaattaacggtgctggagaatttatatattggccgccatctgacgaaaaaagtctgcggcgtcaacgtgatcgactggaaagaaatgcgcgtgcgggcggcgatgatgctgctgcgcgtcgggctgaagatcgacttagacgaaaaggtggcaaacctctccatcagccacaagcagatgctggaaatcgccaagacgctgatgcttgatgccaaagtcctgatcatggatgaaccgacctcctcgctgaccaataaagaggtggactatctgtttctgatcatgaatcagctgcggaaagagggcaccgccattgtctatatctcgcacaagctggcggaaatacgccgcatctgcgaccgctacacggtcatgaaagacggcagcagcgtctgcagcgggatggtcagcgaagtgaataacgatgacatcgttcgtctgatggttggccgcgaactgcaaaaccgcttcaacgccatgaaagagagcaccggcaatatcgcccgcgagacggtgtttgaagtgaaaaacgtcaccagccatgacaagaaaaaggtacgcgatatctcgtttagcgtgaatcgcggcgaaattctcggttttgccggactggtcggttccgggcgcaccgaactgatggactgcctgtttggggttgataaacgtagcagcggtgagatttacctcaatggcaaagcgatctccccccgctcgccgctggacgctttaaagaaaggcatgggctacatcaccgaaagccgccgggaaaacggctttttccccaatttttctatcgcccagaatatggcagtcagccagagcctgaagcgcggcggctacaaaggggccatggggttgttccgcgaaggcgacgaacgcaaaacggcggaagagcagcgcaagctgctggcgctgaagtgccattcggtcgatcagaacattaccgagctatccggcggtaaccagcagaaggtgctgatatcgaaatggctatgctgcagccccgaagtgatcatttttgacgagccgacgcgcggtatcgacgtgggcgcaaaagccgaaatttataaagtgatgcgccagctggccgatgacggaaaagtcatcctgatggtgtcatccgaactacctgaaattatcgccgtctgcgaccgcattgccgtgttctgcgaagggcgactgacgcaaatcctgaccaatcgcgacgatatgagcgaagaggagattatggcatgggcactaccacaagagtaa

SEQ ID NO: 175251 - DNA, 981 bp, Klebsiella oxytoca
atgggcactaccacaagagtaaaaggcgatatggacgagaaaaaaccgtttaacttcgcgctgttctgggataaatacggcaccttttttatcctcgctatcatcgtcgccatcttcggcaccctttcgtcggagtacttcctgacgaccaacaacattacgcagatctttgtccagagttcggtcaccgtgctgatcggcatgggcgagttcttcgcgatcctcgtcgccgggatcgacctgtcggtcggggcgatcctcgcgctctccgggatggtcaccgccaagctgatgctggcgggcgttgacccgttccttgcggcgctgatcggcggcgtgctggtcggcggcgcgctgggcgccatcaacggctgtctggtcaactggaccgggctgcatccgttcattattaccctcggcaccaacgccatcttccgcggtatcacgctggttatctctgatgccaactcggtgtacggcttttcatttgatttcgttaacttctttgccgccacgccgctgggcatcccggtaccggtgatcttctcgctgattgtggcgctgatcctgtggttcctgaccacccgtatgcgcgtcggccgcaatatctacgcgctgggcggcaacaaaaactccgctttctactccggtatcgacgtcaagtttcacatgctgctggtgttcatcatttccggtatttgcgccggactggcgggcgtggtctccaccgcgcgtctcggcgcagcagagccgctggccggtatgggttttgaaacctacgccatcgccagcgccatcatcggcggtaccagcttcttcggcggcaaaggacgcatcttctcggtggtcatcggcggcctgattatcggcaccatcaataacggactgaacattctgcaagtacaaacctactaccagctggtggtaatgggcggattaatcatcgcggctgtcgccctcgaccgtcttatcagtaagtaa

SEQ ID NO: 175252 - DNA, 696 bp, Klebsiella oxytoca
atgaaaattgctccctctttaatgtgtatggatctgctgaaatttaaagaacagatcgagtttatcgaccagcatgcagactattttcacatcgatatcatggacggtcattttgtgccgaacctgaccctttcgccgtttttcgtcggccaggtcaaaaagctggccagcaaaccgctggattgccatctgatggtcactcgcccgcaggattacattagccagctggcgcaggcgggggcggattttatcaccctgcatccggaaaccatcaacggccaggccttccgcctgatcgaagaaattcgacgccacggcatgaaagtcgggctgatccttaacccggaaaccccggttgagaccatgaagtactacattcataaagccgacaaaatcacggtaatgaccgtcgatccgggctttgccggacagccatttatcccggaaatgctggagaaaatcgctgaacttaaagcctggcgcgagcgcgaagggctgaactacgagatcgaaatcgatggctcctgcaataaagccacctatgaaaaactgatggcggcgggcgcggacgtctttatcgtcggcacttcgggcctctttaatcacgccgagaagattgaagaggcgtggcagatcatggtcgagcaaattctggcggcaaaaaacgaggtacagcctcatgcaaaaacagcgtaa

SEQ ID NO: 175253 - DNA, 912 bp, Klebsiella oxytoca
atgcaaaaacagcgtaacgtcgtcgcgggcgtggatatgggagcgactcatatccgtttttgcctgcaaacggcgcagggcgaagcgctgcactgcgaaaagctgcgtaccgcggaggtgattaacgccgacggcctggttaacggcattaaaaacctgctacagcagcagctaaaccaacatgatgcccgctgctgcgggctggtgatggggtttccggcgctggtggcaaaagacaagcggacgattatctccacccccaacctgcctctggccactgacgatctgtataacctggcggaccggctggaagcggcgctgggctgcccggtggagttttcccgcgatgtgaatctgcagctctcttttgatgtgcagcagaacggcctgcaggagcaggaggtgctggcggcctatcttggcaccggtatgggcttcgcggtctggctaaacggcgggccgtggaccggcgcccacggcgtggcgggcgagctggggcatatcccccagggcgatgacgccctcacctgcgcctgcggcaaccccgcctgtctggaaaccgtctgctccggcattgcgctaaagcgctggtatgaacagcagccgcgcgcgtacgaactgggcgagctgttcgttcatgccgcacaggagccgtttgtgcagcagttgctgaatcatgccgcccgcgccatcgccaccagtattaacctgttcgaccccgatgcggtgatcctcggcggcggagtaatggatatgcccgctttcccgcgcgacgccctaatcaccagggttaaaacctacgttcgccgtccgctaccgtatcaggccgtacgctttatcgccgcttcctcctcggcgtttaacggcgcccggggcgcggcggcgctggcgagaagccgttatttgacctag

SEQ ID NO: 175254 - DNA, 420 bp, Klebsiella oxytoca
atgaaaaaagtcgtcacggtttgtccgtattgcgcatcaggttgcaaaatcaacctggtggtcgataacggcaaaatcgttcgggcggaagcggcacaggggaaaaccaaccagggaaccctgtgtctgaaaggctattacggctgggacttcattaacgatacccagatccttaccccgcgcctgaaaacccctatgatccgtcgccagcgcggcggcaagctggaatccgtctcctgggatgaggcgctcgattacgtcgccactcgcctcagcgctattaaagagaaatatggcccggacgcgattcagactaccggctcgtcccgcggaacgggtaacgaaaccaactatgtgatgcaaaaattcgcgcgcgccgttattggtaccaataacgtcgactgctgcgctcgcgtctga

SEQ ID NO: 175255 - DNA, 1680 bp, Klebsiella oxytoca
atgagtaatgccatcaccgagatcgacaataccgatctcgtgtttatcttcgggtataacccggcagattcacaccctattgtggcgaatcacgtgattaacgccaaacgcaacggggcaaaaatcatcgtctgcgatccgcgtaaaattgaaaccgcgcgcattgccgatatgcacattgcgctgaagaacggctcgaatatcgcgctgctcaacgctatcgggcacgtgattatcgaagaagacctctacgataaatccttcgtcgccagccgttctgagggcttcgaagagtatcgcaaaatcgtcgaaggctacacgccagagtcggtggaagagatcaccggcgtgagcgcccaggagatccgcgcctgcgcccgtatgtatgccagcgcgaaatccgccgcgatcctgtggggcatgggcgtgacccagttctaccagggcgtggaaaccgtacgttcgctgaccagcctggcgatcctcaccggcaacctcggcaagccgagcgtcggcgtcaacccggtgcgcggccagaacaacgttcagggcgcctgcgacatgggcgcgctgccggatacctatccgggctatcaatacgttaagttcccggagaaccgcgagaagttcgccaaagcctggggcgtcgatagcctgccggcgcacaccggctaccgcatcagcgagctgccgcaccgcgcggcgcatggcgaagtgcgggcggcgtatattatgggggaagatccgctccagaccgacgccgagctgtccgcagtgcgtaaggcattcgacgatctggaactggttatcgtccaggatattttcatgaccaaaaccgcctcagcggccgacgttatcctgccgtccacctcgtggggcgagcacgaaggcgtctataccgcagcggaccgcggcttccagcgcttctttaaagcggtagagccgaaatgggacctgaaaaccgactggcagattatcagcgaaatcgctacccggatgggctacaagatgcactacaacaacacccaggagatctgggacgagttgcggcatctgtgtccggatttctacggcgccacctacgagaaaatgggcgagctaggctacgtcatgtggccgtgccgcgatgagtccgacgccgatcaggggacctcttatttgtttaaagagaagttcgataccccgaacggtctggcgcagttcttcacctgcgactgggtcgcgccgattgacaaactcaccgaagagtacccgatggtgctgtcgacggtgcgcgaagtcggccactactcgtgccgttcgatgaccggtaactgtgcggcgctggccgcgctggcggatgaacctggctatgcgcaaatcaacaccgccgatgccgaacgtttgggcattgaggatgaggcgctggtgtgggtgaactcgcgtaagggccgtattatcacccgcgcgcaggtcagcgatcgtccgaataaaggggcggtctatatgacctaccagtggtggattggcgcctgtaacgagctggtttccgagaacctgagcccgataaccaaaacgccggagtacaagtactgcgccgtcaacgttgagccgattgccgaccagcgtgccgctgagcagtacgtcattgatgagtacaacaagctgaaagcccgcctgcgcgaaagcgcgctgggttaa

SEQ ID NO: 175256 - DNA, 684 bp, Klebsiella oxytoca
atgaaatacctctatttactgctggtgatagcaagcttcacctcaggcgccatggaaccaggtagccagtatagacagcaggccgaagccggcgatccacgtgcacaatattacctggcggatacttacgtcagcttcggcgattttccccaagccgaattctgggcgcagaaagccgcagacaacggcgatggcgacgcgctggcgctgctggcccagctcaaaatccgcaatcctcagcaggccgactaccaccaggctaaagtgctggcggaaaagtccgtacaaacaggcagcaaggcgggggaaattgttctcgcccgggtgctggtgaaccagcaggccggtacgccgaactacccccacgccatcactctgttacagcacgccgcgcaggatccggaaagcgattcagccgttgacgctcagatgctgctggggctgatttacgccagcggcgttcatcttccggaagatgatgtcaaagcgacgcagtactttaaagagagctctgccctctcccgtaccggctacgccgaatactgggccgggatgcttttcctgcagggggaaaaaggctttatcgaaccgaaccggcagaaagcgctgcactggctcaacgttagctgtcaggaggggtttgataccggctgtgaagagttcgacaggataagtaaaagataa

SEQ ID NO: 175257 - DNA, 1314 bp, Klebsiella oxytoca
gtgaagaaaaaaacaaaagtcagcctggcctggcaaattttgctggctctggtgctgggcatacttctgggcagttacctgcattaccacgccgaaagccgtgactggttaatctcgaacctgctgaccccggcgggcgatatctttatccatctgattaaaatgatcgtcgtaccgatcgtcatctcgaccctggtggtcggcattgccggcgtaggcgatgcgaagcagctgggccgtatcggcgcgaaaaccattatctattttgaagtgatcaccacggtggccatcgtgctggggattaccctggctaacgtctttcagccaggaagcggcattgatatgtcgcagctggcggcggtggatatttcgaaatatcaaaacaccacggcagaagtacagagccacgcgcatggcctgatgggcaccatcctctcgctggtaccgaccaatatcgtggcttcgatggcgaagggcgacatgctgccgatcatcttcttctcggtgctatttggtctcggcctttcctcgctgcccgctacccatcgtgaaccgctggtcacggtgttccgctctatctctgaaaccatgtttaaagtgacgcatatggtgatgcgctacgcgccggtgggcgtgttcgcgctgatctcggtgaccgtggcgaccttcggcttcgcttcactgtggccgctggcgaagctggtgattctggtttatttcgccattctgttcttcgcgctggtggtgcttggcatcgtggcgcgggtatgcggactgagcatctggaccctgatccgcattctgaaggatgagctgattctggcctactctaccgccagctccgagagcgtgctgccgcgtattatcgagaagatggaagcctacggcgcgccagcgtcgatcaccagcttcgtggtgccgaccggctactcctttaacctcgacggctcgacgctgtatcagagtattgcggctatcttcatcgcccagctgtacggtattgatctgtccatctggcaggaaattaccctcgtgctgacgctgatggtgacgtcgaaagggattgccggcgtaccgggcgtctccttcgtggtgctgctggcgacgctgggcagcgtgggcattccgctggaaggtctggcgtttatcgccggcgttgaccgtatcctcgatatggcgcgtaccgcgctgaacgtggtgggcaacgcgctggcggtgctggttatcgccaagtgggaacacaaatttgaccgcaaaaaagcgctggcgtatgagcgtgaagtgctgggcaaatttgataaaacggcgcaataa

SEQ ID NO: 175258 - DNA, 1959 bp, Klebsiella oxytoca
atgagccaaatacataaacactctattcccgctaatattgcggaacgctgcctgattaacccggaacagtacgaggcgcagtatcagcagtccgtcaccgacccagatgccttctggggcgaacagggcaaaattctcgactggatcaagccctacacgcgcgtgaaaaacacctcgttcgcgccgggtaatatctccatcaaatggtacgaagacggcacccttaacctggccgctaactgtctcgatcgccatctggcggagcgcggcgaccagacggccatcatctgggaaggcgacgacgccagccagagcaaaaatatcacttatcgcgaactccaccgcgatgtctgccgctttgccaatgtcctgctcgacctcggcattaaaaagggcgatgtcgtggctatctatatgccgatggtgccggaagccgcggtggccatgctggcctgcgcccgcatcggcgctatccattcggtgattttcggcggcttctcaccggaagcagtcgccggacgtatcatagattccaactcccgcctggtgatcacctctgatgaaggcctgcgcgccggtcgcgcgatcccgctgaagaagaacgtcgacgacgcgctgaaaaacccgcacgtgaagagcatcgaaaacgtggtggtgtttaaacgtaccggcggcaaaatcgactggcaggaaggccgcgacctgtggtggagcgatctgattgagaaagccagcgcggaacaccagcctgaagagatgaacgctgaagatccgctgtttatcctttatacctccggctcgaccggtaagccaaagggcgtactgcatactaccggcggttacctggtctatgcggcctcaacgtttaaatacgtttttgactaccatccgggcgacatctactggtgcaccgccgacgtcggctgggtcaccggccacagctacctcctgtacggtccgctggcctgcggcgcgacgacgctgatgttcgagggcgtaccgaactggccaaccccggcgcgcatgtgccaggtggtcgacaagcatcaggtcaacattctttataccgcccccacggcgatccgcgcgctgatggcggaaggcgataaggctattgaaggcaccgaccgctcttccctgcgcattctcggctccgtcggcgaaccaattaacccggaagcctgggagtggtactggaagaagatcggcaacgagaagtgcccggtgatggacacctggtggcaaaccgaaaccggcggctttatgatcaccccgctgcccggcgccattgagctgaaggccggttccgcgacgcgtcccttcttcggcgttcagccggtgctggtggataacgaaggcacgccgctggaaggcgccaccgaaggtaacctggcgatcgccgactcctggccgggccaggcgcgtacgctgtttggcgaccacgaacgcttcgaacagacctacttttcgacctttaaaaatatgtacttcagcggcgacggcgcgcgccgtgacgaagatggctactactggatcaccggtcgcgtcgatgacgtgctgaacgtttccggccaccgtctcggaaccgccgaaatcgaatcggcgctggtgtcgcatccgaaaatcgccgaagcggcggtggtcggcattccgcataacatcaaaggccaggccatttacgcttacgtcactctcaaccatggcgaagaaccgacgccggagctctacgccgaggtgcgcaactgggtccgtaaggagattggcccgctggcgacgccggacgtgctgcactggaccgattcgttaccgaaaacccgttcgggcaaaatcatgcgccgtatactgcgcaaaattgccgcgggcgataccagtaatctcggcgatacctcaacgcttgccgatcctggcgtggtggaaaaactgctcgaagagaagcaggccatcgctatgccatcataa

SEQ ID NO: 175259 - DNA, 318 bp, Klebsiella oxytoca
atgatgaacgatcagatttgtcagcggatagaaaatagtgcgcattttaaggagcttgttgcagcccggcaaaggtttgccgccatcctgtcactgattatgctggtgatttatgtgggttttattctgcttatcgcctttgcccccggctggctgggcacgccgctgcatgcgggaaccagcgtcacccggggtattccgattggtatcggcgtgatcgttatctctttcgtattaaccggaatatacgtctggcgggcaaatggtgaatttgatcggctgacaaaaagcattctcagcgaggttaaagcatcatga

SEQ ID NO: 175260 - DNA, 1650 bp, Klebsiella oxytoca
atgaagaaagtcctgacggcgctcgccgccacgctccctttgaccgtcaatgccgcagatgccctcaccggcgcggtacagcgccagccgaccaactggcaggcgatcatcatgttcctgatttttgtcgccctgacgctgtatatcacttactgggcgtcaaaacgcgtacggtcacgcagcgactactacaccgctggcggcaacattaccggtttccagaacggtctggcgattgccggcgactttatgtcggcggcctcgtttctcggtatttccgcactggtttacacctccggctacgacgggctgatctactcgctcggtttcctcgtcggctggccgattattctgttcctgatcgccgaacgcctgcgtaacctcggccgctacacgtttgccgacgtggcctcctatcgtctcaaacaggggccgattcgcaccctttccgcctgcggttcgctggtggtagtggcgctctacctcatcgcccagatggtcggcgcgggtaagctgattcaactgctgttcggcctcaactaccacgtcgcggtagtgcttgtcggcgtgctgatggtgctctacgtcctgtttggcggcatgctcgccaccacctgggtgcagattattaaagcggtcctgctgctgttcggcgccagctttatggcctttatggtgatgaagcacgtcggcttcagcttcaataatctgttcaccgaagcaatggcggtgcacccgaaaggctcggcgattatgagccccggcggactggtaaaagatccgatatcggcgctctcgctcggcctcgggctgatgttcggcaccgcgggtctgccgcatattctgatgcgtttcttcaccgtgagcgatgccaaagaagcgcgtaagagcgtgttctatgccaccggctttatgggttacttctatattctgacctttatcatcggcttcggcgccatcatgctggtgggggcgaatccggcgttcaaagacgcggccgggcagcttatcggcggcaacaatatggcggcagtgcatctggcggatgcggtcggcggcaacctgttccttggctttatctcagcggtcgccttcgccacgattctggcggtggttgctggcttgacgctggcgggcgcatcggcggtgtctcacgacctgtatgctaacgtgttccgcaaaggcgcgaccgagcgtcaggaactcaaggtgtcgaaaattaccgtactgatcctcggcgtggtggcgattctgctgggtatcctgttcgagaatcagaacatcgcctttatggtcggcctggcattctccatcgccgccagctgtaacttcccgattatcctgttgtcgatgtactggtcgaagctgaccacgcgcggggcgatgattggcggctggctgggtctgctgaccgcggtgattttgatgatcctcggtccgactatctgggtgcagatcctcggtcacgaaaaggcgatattcccatatgaatatccggcgctgttctctatcgccgtggcctttatcggtatctggttcttctctgctaccgatagctccgcggaaggcgcgcgcgagcgtgaactgttccgcgcccagtttattcgttctcagaccgggatcggtattgagaaaggtcaggcgcattaa

SEQ ID NO: 175261 - DNA, 1098 bp, Klebsiella oxytoca
atgaataaatattttttattactattgatgttggttttccctatttatggttggtcctgtagctcgggggccaattatggtgatgtgacgatggcgaatctacccgaacaaatattaattaatgcggggagttattctgccggaacggtcctttatgactccgggagaataacgcgttcgaatactcaggtctggaactgtgaggggaagatgtatgcccgttttgaatggtcttcagcaaatgcaggcgcacttactggcgatcatatctatacgacatccgtaccgggtattggtttaagagtgaaagtctggctgaatattaccggtgaatatgatggcgatactgacgattttctccctgattacactgagcattatattggcgactcagagttttatcttggaaaaccaggggggtttttagatatctatgccacaacaaactattcacccgcctaccagctacagctggtggccacgggaggcgcaatcgccagcaacagctctctgtcgataaaggaccctatctcatcggtttcgcttaaagatagcactggcacgatggttatttcccaactgcacatcagcggtacgacgcaaatcaagctgacgccgatgggctgtacggcaggtacgaccgcgctgaatttccctatgggctccgtgaaaacgagtgagtttactctttcctcgacagccggctccgcccagcaaacgctgatgctttcctgcgaacccggaaccaatatatcaatgcgtgtgacggcgactgaagccgaaggcgataatccgaacaggagcgttattgcgttaacggcgggggaaaacgtagcaaccggtgtgggtgtgcagttaagcctcaacgggaaggtcataccgttaaacaccagtttttatttaagtacatccagcagaagtgtaacgttgaatgccggagctgaggccagctacgcaaccttcacctacccgaataatcccggcggcgctgctgcatcgaactcgctcatcttttcaactaactattacaaaaccggggctgaagtgacgcctggaacggccaacgccagcggaacgataacatttacctataactag

SEQ ID NO: 175262 - DNA, 609 bp, Klebsiella oxytoca
atgaacaatctcaatatattgtgttttgagcacaccactaaaatgatagcgatgcggatacaccatgctcaatcgccattgcggctagcgatagctgcaatagcagggctactggccagtgcttcatctgcctgggcctatgacgctacgagtaccgtcaattttaatgtcaccggcaatattgaagaacctgtctgtgaggtttttgtaaaaccgtccaatgctatcagcctggggacggtttcttctcagcgtctgaccggtaaaccgggggccagtagcgataccacaaccgtttccctggcatttgataactgctcaaccggtacgtcttcagtgacgataacgtttagcggcgctccgtttgatcgtacttatcccgcaatttatgtcagtgagctgattgatggggcaaaggatgttggcttacagcttgtgagtgccgcggatgggaaaacgctgggtccaaacgagagttatacctatgcatttacggcctcccctggcgggcacgcctttgatatggcggccagaatgtatacgccatacggcaaagtaacgccaggaaacgttgcctatacggtcactttcaacgtgtcatacaaatga

SEQ ID NO: 175263 - DNA, 2592 bp, Klebsiella oxytoca
atgattatggaatgcctggaccgaaatataccgccatcattcaataacgttggaaagcgttatacctttttattgaccagcggctatgccgccttcattttcagctttgccacaatacctctcccggcgatggcaggtgagtacttcaatccccacctgctggaggtaaacgaaaccggtacctccgccgttgacttaacctatatttctgaagagacgattccgccaggtgactacaacctggatgtctatattaaccatacgtttgtggcttctgagtccgtcatttttacgcgacaggatcaaaataacgccgcttcatcccggccatgtctttccgtcgcgcgcctgaaagagtggtcgattaaaaccgaagattatcctgagcttaccgtggcgggttcggagtgcgcaaaactgtctgcgatccccggatgggagacggcggtacagctctcgcaacagcgaatcgactttaccttaccccaggtggctttagtgcatcgtccgcgggggtatgtcccggaaagccgatggcagcagggcattaccgccgggctattgaattacaacatttccgggcaaaaaaccgatccgcgagatggaggcgtttccacctccagccagtttgtcagcctgcagccggggttgaacgttgggccgtggcgtttacgtaattacagcaccctcaatcataatgacgatggcagtcagtgggactccgtctatagctatatttcacgcgatatccacgccctgaaaggtcagctgatagtggggcaaacctatacttcttcggcggtgtttgacagcatcagcttcaccggcctgcagctgaactctgataaagagatgctcccggacagcctgaacggcttcgcaccggtcataaaaggcatcgcgcgctcgaccgcagacgtgacggtttatcaaaacggatacagcatttataaaacaacggtctctcccggcgcctttgagataaacgatctttatcccacgggaagcgcgggcgatctctacgtgacggtgaaagaatcagacggtagtgagcagagctttgtggtgccgtttgcttcactggcaatattacaacgtgaagggcaggttgattacgctttcagcggcggcaagacgcgctcgggaagcgcgggcggaaaggagtatcagcttctgcaatccaacgttgcctggggagcgttgagcaacgtcacgctgtacggcggctttcagcaattagaggataaatacagtaatctcctgctgggggccgggtttaatttgggttcagtcggggcgctctcttttgatgcttctcagtcctgggctgacataaaagaaaattcctcatcggataacgcctcatccagcgaagggcagtcataccgcgtgcgctttagtaaagattttccacagacggggacaaacttttccgttgccgggtaccgttactcaacgcatggttattattctctgcagaactttatcgatcgggcggactctcatcgcgcctgctgttcgtcatccggtcggactaaagaccgctttgacgcttcagcgtcgcagattttctccggattcggttcactctccctttcgctggtcagtgagtcttactgggataactcgcggatggagtcgctgggcgtgagttatagcaatacgtttagccggatgtcctacttcattaactacgcctataaccgcaatgtgcagagcagcggccagaatgaaaatagctcgccttccagcgacagcattatttcgctaaccgtgagtattcctttcggcgccgatatatcagccagctacaatatgaacagcagccgggtgggagacaccactcacagtcttggtttaaatggctccgctttcgccgatcgttctctgaactggaacgtgcaggagggatataacgccagcgataaaagcacctcagggaacatcaacctcaactaccagggctcaaaaggtgaagtcaccgccggatacggttatgacagcaacagcgcccactataattattcgctacgcggtgggatgctcgcccattccggcgggataacgctgtcacgctatctgggcgagagcgttgcgctgattgaagcgcctggcgtcagggatatcgcggtacgcgggcagactaacgtcatgaccgattctgccgggtatgccgtagtgcctttcgttcgcccttatcatgaaaacaatctctcccttgatgaacagcaggtctcgggagcggaaatagataatatcgtcagaacggtggtcccgacgcgcaatgcgatcgtaaaagttaaatatgatacctggattggctataaggccatgatgaccttgcaatttcatcataaagatgtgccgtttggcgcggtgattacgctagaggatgaaagtcaggagtataaacaaaaacgcagcgctattgtcggtgattccgggcaggcctatttgaccgggctgccagaaaaaggccgcttatttgtgaagtggggcgatgctttaactagccagtgttatgtcaattatgatttatcatctaacaaatcaattgacgatattgttttttatacggcggattgccgatga

SEQ ID NO: 175264 - DNA, 687 bp, Klebsiella oxytoca
atgaacagattattctactttatttgtttttatttgtgtgcgtttgcggcgcaggcaagcgtagtcgtgggcggcacgcgggtgatattcgatggcacacaaaagtcgacgacggtatctgttcaaaataaggataatgtgaccaatatcgttcagtcctggatctccgttgtcgatgcggcctcgccagcgaaagattcattcatcacaacgcctccgctatttcgcctgaagtccggagagcaaggatttgtacgcattctacgttcgggtaaacctttggcggaggatcgggaatccatgttctggttgaatattaaggggattcccgccatggagaacgcgccggacaaaaatatggttcagtttgcgattaattccaggataaagcttatttttcgacccgccgcattgaaaagcgccataccagaaaattttgccgaaaagctgcagtggtctgctgaagggcgagatataaaagtgaaaaatgtttctcctctatatatgaatttctctgaagttttggtgaacggcaaagcagtacctgaagcgtggtttgttgcccccttttcaacaataaaaataccggtagcaaatgcctcttctgcgggcaaaaagaaaatcacatggagcgtgatcaatgattatggaatgcctggaccgaaatataccgccatcattcaataa

SEQ ID NO: 175265 - DNA, 540 bp, Klebsiella oxytoca
atgaaaatgaatgcaataactctggctaaaatagtcgccttctcggcgggctgctcactggtgacaatggcgcaggcggataacaccattacttttaccggcacggtctctgatactacctgtacagccactatcgataacggcgtctcatccattgagatggggacttcctccgtcgcggatctgaaggcgaatacttatggcgcggccaagaatttttctttcaccctgaccggttgcccgaaagtggctgatggcggtaacgctaaggccagagtcacctttggcggtgaagccgatgaaactaacagcgattactttaagaaccaggcttccgcatcgcctgcgacgggcgttgccgtggctatttttgataaccagggtgcgctgcttaaaaataatactgaaggcgccgatgtggatatttcctccggcgctgcgaccattcctttcaccgtaaaaatggcgaaagcaggcagtgctgaaccgactaaaggcgccgttcagacaacggtaacctacaacgttacgtactattaa

SEQ ID NO: 175266 - DNA, 690 bp, Klebsiella oxytoca
atgagtgatttccagctgagcgtcctgtgtcttcttgtcacgctggggctctattttgccaataaacggctttatcgccgcttccataaactgcccctgatgccgctggttttcaccccgatcctgctggtgatgatgctggtattcggccatatctcttatcaaagctatatgggggaggcccactggctgctatggctgctgggcccggcgactatcgctttcgccgtgccggtgtatgacaatctggcgattattaaacgccactggatgtcgctgacggccggagtaacgaccgcgtcggttgttgcggtgaccagttcggtgtggctggcgcgactgtttaccttgcccgatgagatccagcgtagcctggcggtacgttcggtgaccacgccctttgccctggcggcagctaaaccgctgggcggtcagcctgatttagtcgccctgtttgtcgtggtcaccggggtattcggcatggcggtgggggatgtgctgtttctgcgtctttcgattcgcgaagggatggctaaaggagcgggtttcggcgcggcatcccacggcgccggtaccgcgcgatcttatgaactggggccgcaggagggcgtcgtcgccagcctggtgatgatgctttccggcgttgtgatggtattggccgcgccgctggtgcgctgggcaatgttctga

SEQ ID NO: 175267 - DNA, 411 bp, Klebsiella oxytoca
atggcctttgcgccagctcgcgtgacgcccttcgttatgcaacgtcttcaggtacctgttcaggtactgatctacgccggactgttcgtctgcgctgactattttgttaactggctgcacctgccgcttccggcgaaccttgtcggcatgctgatgatgttgacgctgatagtctgccgggtgatccctttaaactgggtacgcgccggcgcccgctggctgctggccgagatgctgctgttcttcgtgccggcggtagtggcggtcgtcaactacgcgcaactgctgatggtggagggctggcgcatctttctggtgattggcttaagtaccatgatggtgttgggcgcgacggcatgggtggttgataaagtgtatcgctatgaagtcagcaggatgaaacatgagtga

SEQ ID NO: 175268 - DNA, 882 bp, Klebsiella oxytoca
atggatatccgaacgctgcgctattttgtcgaagtggtgcgccagcaaagctttacccgcgcagcggagaagttgttcgtcacgcagccgaccatcagtaagatgctcaagaatctggaagatgagctgaactgcacgctgctgatccgcgacggtcgtcggctgctgctgaccgataccggtcgggtagttttcgagcgcggacaggccatccttggtgaatttcatcagctggagtcggagctaagcgatattaatcatctgcataagggcgtactgcgtctcggcattccgccgatggtcgggatgttaatggccgaaccgattagccgctttcgccagcgctatgcgggggtggaattgaaaatctccgaattcggcgggctgaccgtgcagcaggcggtaagcaacggtgaactggatttagccatgaccgcgcttcccgttgatgaggccagcggcttaaccacgctctcgctgttcagccatccgctctgcgtgctgacgccgagaacggcgcagtgggaaggcatcagttcgttgtcgccggaagcgctcgccgcgcatccgctggtgatctacaacgaggatttcgccctcagccagcagctgatgcggctatttactcagcatgaagttaagccgcgtatcgccgcgcgcagcggacagtgggattttctggccgcgatggtacaggccggaattggcgtcgcgattttaccggagccgatttgccagcgcctcgacccgcagagcttttgctggataccgttacaaagcgatctacgctgggaactgggaatgatttggcgggaaggcgtgtacatgtcgcacagcgcgcgggcgtggctggagtgcagtaaggcgttctggctgaagtaa

SEQ ID NO: 175269 - DNA, 1647 bp, Klebsiella oxytoca
atggaaatattctttaccatactcatcatgaccctcgtggtctctctctccggggtggttacacgcgtactgccctttcaggttccactacctttaatccaaatcgccatcggcgcgctgttggcctggcctaccttcggattgcatgttgaattcgatcctgaactctttctggttctgttcatcccgccgctgctatttgccgatggctggaagacgccgacccgcgagtttattgagcatgggcgagaaatcttcggtctggcgctggcgttagtggtggtgacggtggtcggtattggctatctcatctactggatcgttcccggtatcccgctgattccggcttttgccctcgcggccgtcctgtcgccaacggatgccgtcgcgctgtccggcatcgtcggcgaagggcgtattccgaaaaaaattatgggaattttgcagggcgaagcgctgatgaacgatgcgtccggcctggtctccctgaagtttgccgttgcggtggcgatgggcacgatggtctttaccgtcggcggcgcgacggtggagttcttcaaggtggcggtcggcggtattctcgcgggctttgtggtcagctggctgtacggacgttcaatgcgcttccttagccgctggggcggcgatgaaccggcaacgcaaattgtgctgctgttcctgctgccgttcgcctcttacctgatcgctgaacacatcggcttttccggcatcctggcggcagtcgcggcggggatgaccatcacccgttccggcgtgatgcgcagcgcgccgctggcgatgcgcctgcgcgccaacagcacctgggcgatgctggagttcgtgtttaacggcatggtgttcctgctgttgggcctgcagctgccggatattctctccagctcgctggtggccgcagaggcggatcccaacgtcgaaacctggatgttgtttaccgatatcatcctgatttatgccgccctgatgctggtgcgttttggctggctgtggacgatgcgcaagctgagccagcgtttcctgaaaaagaaaccgatggagttcggctcctggaccacgcgcgagctgctcatctcctcggtcgccggcgttcgcggggccattacccttgccggtgtgctgtcgattcctctgctgctgccggacggcaacgtcttcccggcgcgctatgagctggtattccttgccgccggggtgattctgttctctctgtttgtcggcgtgattgtgctgccgattctgctgcgccatatcgagtcgaccgaccatgtacagcagcgcaaagaggagcgcctggcgcgggcggcaacggcggatgtggcgattgtcgcgattcagaaaatggaagagcgtctggcggcggataccaaagaaaacatcgataatcagctgctgactgaggtcagctcgcgggtaattggtaacctgcgccgtcgcgttgatgggcgtaacgatgtggaaacctcgatgctggaagagagcctcgagcgccggttccgtctggcggcgctgcgttctgaacgcggggagctgtaccatctgcgcgccacccggcagatcagtaacgagacgctgcagaagctgctgcacgatctcgacctgctggaagcgctgcttatcgaggatcagtaa

SEQ ID NO: 175270 - DNA, 1350 bp, Klebsiella oxytoca
atgtctacgccttcagcgcgtaccggcggttcattagacgcctggtttaaaatttctgctcgcggcagtaccgtgcgtcaggaaatcgttgccggtcttaccaccttcctggcgatggtctactccgtcatcgtggtgccggggatgctcggcaaagcgggttttccgccagctgcggtatttgtttccacctgtctggttgccggcgtcggctcgctggtgatggggctgtgggcgaacctgccgctggcgattggctgcgccatctcgctgaccgcttttaccgcttttagcctggtgctgggccaacagatcagcattccggtcgcgctgggcgcggtcttcctgatgggcgtactgtttaccgtcatctccgcaaccggcattcgtagctggatcctgcgtaacttgccgcagggcgttgcgcacggcacggggattggtatcggtctgttcctgctgctgattgccgccaacggcgttggtctggtgatcaaaaacccgctggacggtctgccggtggcgctgggtaattttgacagtttcccggtgattatgtcgctggtcgggctggcagtgattattggcctcgaaaaactgaaagtgccgggcggtatcctgctgacgattatcggcgtttcgattatcggcctgatcttcgatcctaacgttcacttctccggtatcttcgccatgccgtcgctgagcgacgataaaggcaactcgctgatcggcagcctggatatcgtgggcgcgctcaacccggtcgtgctgccaagcgtgcttgcgctggtgatgaccgcggtgtttgacgccaccggcacgatccgcgcggtggccggtcaggcgaacctgctggataaagacgggcagattatcaacggcggcaaagcgctgaccaccgactccctgagcagcgtcttctccggcctggtcggggcggcgccggcggcagtgtatatcgagtctgctgccggtacggcggcgggcggtaaaaccggcctgaccgcagtgaccgtcggcgtgctgttcctgctgatcctgttcctctctccgctctcctatctggttccggcttatgctaccgcgccggcgctgatgtacgtcggcctgctgatgctgagcaacgtggcgaaaatcgatttcaacgactttgttgatgcgatggcggggctcatcaccgcggtctttatcgtgctgacctgtaacatcgttaccggcatcatgattggttttgcggcgctggtgattggccgtctggtatccggcgaatggcgtaagctgaacctggggacggtgattatcgccgcggcgctggtcatcttctatgctggcggttgggcgatttaa

SEQ ID NO: 175271 - DNA, 669 bp, Klebsiella oxytoca
atgttaacggtacatcatctcaatcagtcacgatcgcagcgcgtattatgggcgctggaagagttgcagctgccttatcaggttgtctcttatcagcggggaaaggatatgctcgcgccagcggagttaaaaagcgttcatccgttggggaaatcgccggtcgttgaagataacggccatattctggcggagtccggcgccattctggagtatttacaggaaacctatgatagcgccaggcgcttaaagcctgagtcggtggaagataaactgcaataccgcttttggctgcactatgccgagggttcgctgatgcccctgctgctgatgaagctggtgttttccagcctgggcaagcccccggtgccgtttggcatacgcacgctgggcaatgcattaggcaaaggggtacaaaaggcctggcttaaccgacaggttgagacccatgcccgctttattgaatcgcacctttctcgccagcgctggtttgccggcgctgagctgagtatggctgatattcagatgagctttccggcaatggcgctgctggcgcgcggcggggtgggggatttaccgcatctgacgcagtgggttcagcgggttgagcagcgtccggcatggcagaaggcgattgagcgtggcggcccatttaccttacccggcgaatga

SEQ ID NO: 175272 - DNA, 459 bp, Klebsiella oxytoca
atggaaaagaaatctccccgcatcaaaatgctgctgactcccggcgaagtggcaaaacgaaccggcgtggccgtctccgcgctgcacttttatgaaagcaaagggctgatccacagccagcgcaacgcgggcaatcagcggcgctaccggcgcgacgtcctgcgtgcggtggcgatcattaagattgcgcaacgcattggtattccgctggccactatcggtgatgcatttggcgtactgccggaagggcataacctcagcgccaaagagtggaagatgctgtcgtcccagtggcgggaggagctggaccgacggattcacaccctgaccgcgctgcgcgatcagcttgatggctgcatcggctgcggctgcctgtcgcgccgcgactgtccgttacgcaacccgggcgataagctgggagaagaggggaccggcgcacggctgctggaagaggattaa

SEQ ID NO: 175273 - DNA, 330 bp, Klebsiella oxytoca
atgtcccatcaggatattatccaaacgcttattgaatggattgatgaacatatcgatcaaccacttaacattgatgtagtcgccagaaaatcgggatactcaaaatggtatctccagcggatgttccgctccgtgatgcatcaaacgctaggtgattacattcgccagcgccgtctgctgctcgctgcggaagcgctaagaaccacccagcgccctatttttgatatcgcgatggatctcggctacgtatcgcagcagactttctcacgggtgttccgccgcgaattcgaccgtacacctaccgactatcgccatcagatttccgcctga

SEQ ID NO: 175274 - DNA, 1605 bp, Klebsiella oxytoca
atgagtcgtagcgcgccacacaaggcgttgagaattgttggcattgtgctggtcattctgctaccggtggtgctggcattgtggtttgcgcaaatccgcgccaaagcggaaaccgccgatcagctgcggctgttttctcggctggcgctacaaaaaacggagttggttattcgagaagctgacgaagcgcgcgataaggcccgtttgtatcagggagaagtgtgttcgccgtatcatcagcaatatctgctcggcattgtgcgcggtctgctctatatcgacgacttaatctacgccaacggcagccattttttctgctccactgcggtacgccgcgagatggggtggcaaattccggccgcaacctataccaaaaagccggatatcgcgatttactactaccgcgaaacgcctttctaccctggctatgcgatgaactatctgcagcgcggccactatgtggtggtgattaatccgctctcgttcagcgcgctgatatccagtgacagcaatctcgcctggggcgtgtttgataccaaaacgaaccattttttttccgtcagcaagaacgccgaccctgaggaattacgtcatctgattcgcgctgaagaggcgctctttcagcaggatggccgcgtttatgccatcgcccattccaccgttcgcccgattgccgtcatcatgtccacctcgcgcgtcagctattaccagaatttttataatcaggtgacgctgactctgccgctggggctgatttgcagcgtgttgctgttactggtgtggtcgcgcacgcggcagcagtaccactctccgcgtaatatgctgcagcgcgcgttaagccgtcgccagctgtgcctgcactatcaaccgattatcgatattaaaaatcaccgctgcgttggtaccgaagcgttattgcgctggccggggtttgatggcccggtgatgagtccggcggagtttattccgctggcggaaaacgaagggatgatcgcccaggttaccgactatgtcatcgatgaggtattttccgatctcggcgaatttctggcgcggcatccgcacctgtacgtagcgattaatctctcggctgctgattttcaatccgcgcgcttgattgagcatatcaatgagaaggtccggcgctacgccatcaaggcggaacaaataaaaatcgaagtgaccgaacgcgggtttattgacgtcccgaaaacgacgccggtgattcaggcttttcgcgacgcgggatatgaaatcgctatcgatgacttcggcaccggctactccaatctgaacaatctccatgcgctcaacgtcgatatcctcaagattgataaatcttttgtcgatacgctgtcaaacaacaccaccagccacctgattgccgaacatatcatccagatggcgaacagcctgcatttaaagatcgtcgctgaaggcgtggaaacggcagagcaggtcgcctggctacaaaagcggggcgtgcaatattgccagggctggctctttgcgaaagcgatgccgccgcaggagtatatgcagtggctggctaacgaccgcaccagcctctgcccctggcaacaacgttatcaggcggaaatctga

SEQ ID NO: 175275 - DNA, 282 bp, Klebsiella oxytoca
atggcttccattactaccagtgtcgtacttttgcgctggccgctcgtgagcgcagtgctgatgtttctggccagctcgttgaacattcagctgcgtaaaagtgattatgccggtttagcggtaatctgtagctgtattggcctggccgcggcctgctggtttgccaccggtctgttgggcattacgctgctggacgtggcgaaaatctggggcaatatcaaggacgtgatgattgaagtcatgagccagactccgcctgaatggccgatgatgatgacctga

SEQ ID NO: 175276 - DNA, 390 bp, Klebsiella oxytoca
atgaaatggactattcataatactcttgtctgcccgcattccggggtagctttttcctcaatttccagcctgcggtttttaaagtttattctgtggtatgaggccgacattttattactgccgggagagtcgataaaactctactcatcgagcgtgttaatcaacgagcaatatcatgcggtaaaagtttataacatcacgcgatacgatgaagcgcagtgggagaagctgcgggagcggccttcctgtccttatcattctaccgccacgacggcagactcctgccgttaccaggcgctctgtgccataaaacgctgcccgaacgactttccacgtgcagtaccggggctgccgtcggggcagcacgatctgggccagcagatacggtaa

SEQ ID NO: 175277 - DNA, 2424 bp, Klebsiella oxytoca
atgctaaaaaaaacgagtatcatcgccggtctattgatttcccctttaacgctctatgcatcaacttcatatacggttgatgacattcatttcgaggggctacagcgcgttaccgtcggcgccgcgctactgagcatgcctgttcatacaggagaagaggtttctaatgaggatatcagcgactcggtccgcgccctgtatgccagcggcaattttgacaacgtacagatcctgcgcgatggcagcacgctggtagtacaggtaaaagagcggcctaccatcgctaaaatcagtttttccggcaataaatccgttaaggatgatgccctgaaagagaacctggccgccagcggcattgaagaaggcagcgcgctggatcgcaatacccttacggaaatagaaaaaggattacaggatttctattacagtacaggaaaatacagcgctcaggttcatgccgtcgtcaccccgctgccgcgtaaccgcgttgatttaaagtttgtctttcaggagggggtctcggcgaaaattgcgcaaataaatattattggcaaccaggcttttagtgaagaaacattattggatcagctgcagctacgtgacagcgttccgtggtggaacgtgattggcgataagaaatatcaaaagcaaaagatggcggcggatcttgaaacccttcgtagctattatctcgatcgcggctatgcgcgttttagcataaattcaagccaggtgagtattacgccggataaaaaatcgctatatatcaccattaatattgccgaaggtgctcgttataaagtcgccagtacgatggtgaccggcgatatggcgcagcataatcaggaaattgaggcgctggtgaagcctttaacggggaaatggtatagcggtgcggaaatcacggcagtcgagaacagtattaagacgctgctgggaaaatacggctatgcctggccgcaggtgaacaccacatcggatattaatgatgcggaaaaaagcgtcattttgcatatcagtgtcgatgccggacgccgttattcggtacgccagattcgctttcagggtaacgatacttcccgtgatgcggtgctgcgtcgcgaaatgcgccagatggaaggtgcgtggctgaatgatgagaaggtcgagcagggaaaaacgcggctggatcgtacaggatttttcgaaactgtcgacaagcagattgttccggtaagcggtagccaggatcaggtggacgtggtctataaggtgaaggagcgcaataccggctcctttaacgtgggtctgggcttcggcaccgatagcggcgtgagctaccagctcggcgtcacccaggataactggctgggaaccggtaatagcgtcagcttcaacggcacgcgcaacagttaccagtcctatcttgagctgggagcgacaaacccttacttcaccgtggatggcgttagcctcggcggtaaaatcttctacaacagctacgacgcctcggatgccgattccgggagttacaaccagcaaagctacggcgtcggcagtacgctgggattcccgattagcgagaataacgctcttaacctgggcctggactatgtccataaccgcctgaccaatatggacccggagctcaccacctggagctatcttaactcgcggggcatctatcctgacgttgtcaccaaagatggcgatagcggtgcgacctatagcgccaatgactattttgccagcgttggctggagctataacaatctggatcgcggtttcttcccccgggcggggaataaaagcagcctgaccgccaaggttaccgtacccggttcggataacagctattacaaagtgactttcgataccacccagtatatgccgctgaccgagaacaaaagctgggtgtggatggagcacctgcgtgcgggctatgccgatgggctgaacggcaaatcggtgccgttttacgataacttttatgccggtggatcgtcgtcggttcgcggattttcgtccaatacgattggcccaaaagcagcgtattatcgttgtaatggttctgaaagcagctacagcacctgtccgctggattcttcatccgatgcggttggcggtaacgcgatggcggtcctgaacagcgaatttattgtgccgacgccgtttgtgaatgacaaatatgccgacagcctgcgaacgtcgctattcctcgatgccggtacggtatggagtaccacctggcaaaataccggtcagacgctggcggcagggatcccggactatggcgacccttcgcatatccgtatgtctgccgggattgcggtgcagtggatgtcgccgttaggcccgctggtgttttcctgggctgagccatttaaaaaatacgatggagataaagctgagcagttccagtttaatattggtaaaacctggtga

SEQ ID NO: 175278 - DNA, 366 bp, Klebsiella oxytoca
atgaaatgggtagacattatgccgcgaaatgaaattcagcgttcagtgcttaacgaactggtgcaatggataaaaaacaatcttgcaaagaagctcacgatgcaggcgctaagccgcttttccggctactccgagtggcatctctttcgcctgtttcgccactattttaacatgtcgccgatggcgtatatccgccagcagcgaatgcaactatcccttaatttattgcagatcaacccgcctttccgcatcgttgatatttgtctgatggctggttatgaagatatcagcgcctttaaccgaacctttaaaaggtattatacgatgacaccaacacagtttcgcagaagcctgaacctgacctga

SEQ ID NO: 175279 - DNA, 2262 bp, Klebsiella oxytoca
atgaaacacagttcacactactcgctggccgcgctgatcccgatggccatctggggagggatgctgccagcgcaggccgctgatggcacgactccagacgatacgaagaaatctgaaacgactgcggtaaatgacgatgaaaccatggtggtcaccgcggcggcgcaaacgctgcaagcccccggagtatccaccatcaccgccgaagaaatccgtaaacatccgcccgcgcgcgatgtctccgagctgattcgtacccagcccggcgtcaacctcaccggtaactctaccagcgggcagcgcggcaataaccgccaggtcgatatccgcggcatggggccggagaacaccctgattctggtggatggtaaaccggtgaccagccgtaattccgtgcgctatggctggcgcggcgaccgcgatacccgcggtgataccagctgggtgccggcggaaatgatcgaccatatcgacgtcattcgcggccctgctgcggcccgctacggtaacggcgcgatgggcggagtggtcaatatcgtcactaaaccggccaccagcgagtggcatggttcatggaatacctatatgaacgcgcctcagcaccgtaaagagggcgcgacgaaacggacaaactttagcctcaacggcccgctatcggatgaggtcagctttaatttatggggaaatctgagcaaaacgcaggccgatgcccaggatattaattccggtcatgaagcagcgcgaaccggtagctatgcgggatcgtatcctgcaggacgcgaaggggtagtgaataaagatattcacggcaagctgcgctgggagtttgcgccaatgcaggcgctggagtttgaaaccggctacagccgccagggcaacctgtatgcaggggatacccagaatactaacaccagcacgttggtgaaaagtatgtacggtaaagagactaaccgtctctatcgtcagacttacggcgtgacgtggaccggcggctgggataacggcgtgaccagcaatacctgggcgcagtatgagcacacccgtaactcgcgcatgaacgaggggctggcgggcggaacggaagggatcttctccagcagcgaattctccgatatcgacctgtcggatgtgctgctgcacagcgaggtcaatattccgtttaccctgggatttgagcagaatctgacgctgggtaccgagtggaaccagcagcggatgaaggatggcgtgtcgactacccagtcactctcttatggctccgttgacggcgtttcggcaaccggccgtagtccttattccagcgccgagatcttctcgctgtttaccgaagacaatatcgcgctgaccgatagcactatgctgacgcccgctctgcgcttcgatcatcacagcatcgtcggtaataactggagcccatcgctgaatctctcgcaggggctggcggatgactggacgctgaagctggggatcgcccgcgcctataaagcgccgaacctttatcagcttaacccgaactatatcctctacagcaacggccagggttgctatgccagtagctcagcctgttacctgatggggaatagcgatctgaaggcggaaaccagcgtcaataaagagattggccttgagtataagcacaatggctatcaggccgggctgacttacttccgtaacgattaccataacaagattgaatcgggctactcggcggtggggacggccagcaacggcaccaccaatatttaccaatgggaaaacgtaccgaaggcgctggttgaagggctggagggctcgctgaatctcccggtaagcgaaacggtcaactggagcaacaacctgacgtggatgctgcagagtaagaataagaccaccggcgatcgcctgtcggtgatcccgcagtttacgctgaactctaccctgagctggcaggcacgcgacgatctttcgctgcagagcacgttcacctggtatggccgccagaaacctaaacgcttcaattataaaggcgagtctgtttccggcagcgagctgaacgaagtgagcccgtacagcattgtcggtcttagcgcgacctgggatgtgaataaaaacctgagcctgaccagcggagtggacaacctgttcgatattcgccactaccgtgctggtaacgcgcagacgacgggaaattcgacgaccggcgcttatctgtatggtgcaggtgcgcaaacttataatgaatcggggcggacgttttatgtcagcgtgaatacgcatttctga

SEQ ID NO: 175280 - DNA, 1596 bp, Klebsiella oxytoca
atgaacacttcgtcgttctatcgataccttgtcggctggctggcatgctttgccgcgctactgtgcctcacatccggttacgcggctacagagaacaaacgatcagaaccagcggaacgcgacgccctggaagtcaacgttgacgatatgctacagccatggaggggagatttaccgggtatgctcgaccggcgaaccattcgcgtattaacccccttcagcaaaacttttttctttatcaataaaggcacccagcgcggcgcgactcacgatatatttatggagtttgaacgcagtctcaatcaaagcctggcgaaagagaaaaagctcaagcatcgtcaccttaaagtgcggatcatctttgttccggtggcccgtgaccagctcatcagcgcgcttaacgcaggaaaaggggatattattgccgccaacctgacgatcacgcctgagcgtcagcaggagatgacctttactgcaccgctctattctcacgttcaggagctgcttctttctggtcccggctctcccaaagtggacaatctacagcagctttccggtaaaacggtcttcgtccgcacctcatccagctattacacgagcctggtcgcgctcaacgcacgctttgcgcagcaatcgctgccccccatcaccatcgaaccggcgcccgaagcgctggaagatgaggatctgatagagatgctcagcgcgggcctgatcccattgatcgtggtcgaccgccacaaggccctgttctggaaacaggtcttccccaggattcaggttcatcagaacattgttctgcgcgacgaaggtaatatcggctgggcggtacgtaacaatagcccgcagctgctggccctgcttaatgcgttcatcaataagaatcgccagggcagcaggctgggtaatacgatactgctgcgctacctgaaggatgccagctacgttaaaaacgcggcggggcaaaaagaacggcgtaaatttctggccatggtggagatctttcgcaaatatggcgatcgctacgatgttgactggctgctgatggccgctcaggggtatcaggaatcgcggcttaatcagtcggtgcgtagccacgtcggcgccattggcgttatgcaggtcatgccgagcaccggtaaggagctcaacgtcggcgatattaagcagctcgaccccaatattcatgcgggggtgaaatacatgcgctggatgatagaccgctactatggcgatgaaccgatgacccagcttgataaggcgctattctcgttcgcctcttataacgcgggccccgggcgcattgcccggctacgggcggatactaaaaggcgcggttttgacccgaacgtgtggtttggcaacgttgagtatctggccgccgagaaaatcggctccgagaccgtaagctatgtcagcaatatctataagtactacattgcttatcggctgatcgtggatgaaatggcgcgtaagcagcaggcgacggcggcttctaaaaatcaggtcgcgtcggcagtaaatccgacagccacacctgccacacctgccacacctgccacacctgccacacctgccacacctgccacacagtga

SEQ ID NO: 175281 - DNA, 528 bp, Klebsiella oxytoca
atggccagcagaggcgtaaacaaggtgattctcgtcggtaatctgggccaggacccggaagtacgctacatgccgagtggtggcgcagttgccaacattacgctggctacttccgaatcctggcgtgataaagcgaccggtgagatgaaagagcagactgaatggcaccgcgttgtgctgttcggcaaactggcggaagtggccggcgaatatctgcgcaaaggttctcaggtctatattgaaggccagctgcgcacccgtaaatggactgaccaatccggtcaggaaaaatacaccaccgaggttgtagtcaacgttggcggcacgatgcaaatgctcggcggtcgtcagcagggcgcgggcgccccggcaggcggtggtcagcagcagggcggttggggacagcctcagcagccgcagggcggaaaccagttcagcggcggcgcgcagtcgcgtccgcagcagcaggctccggcagcgccttccaatgagccgccgatggactttgacgacgatattccgttctaa

SEQ ID NO: 175282 - DNA, 2826 bp, Klebsiella oxytoca
atggataagatcgaagttcggggcgcccgcacccataatctcaaaaatatcaacctcgtcatcccgcgcgacaaactcattgtcgtcaccgggctttcgggttcaggcaaatcctcactggctttcgacacgttgtatgccgaagggcagcgtcgctacgttgaatcgctctccgcctacgcgcggcagttcctgtcgctgatggagaagcccgacgtcgaccatattgaagggctgtcgccggcgatttccattgaacagaaatcaacgtcccacaacccccgctctacggtaggcaccattaccgaaattcacgactatctgcgcctgctgtacgcgcgcgtcggcgagccccgctgcccggatcacgatgtgccgctggcggcgcaaaccgtgagccagatggtggataatgttctctcccagcctgaaggtcagcgcctgatgctgctggcgccgatcattaaagagcgcaaaggcgaacataacaaaacgctggaaaacctcgccgggcagggctatatccgcgcgaggatcgacggcgaagtctgcgatctctccgatccgccgaagctggagctgcaaaagaaacataccatcgaagtcgtgatcgaccgctttaaggtccgcgacgatctcagcacgcgtctggccgagtcctttgagaccgcgctggagctgtcgggcggcaccgccatcgtcgccaatatggacgatccgaaagccgaagagctgctgttttccgccaacttcgcctgcccgatttgcggctacagcatgcgcgaactggaaccgcgcctgttctccttcaacaacccggcaggcgcttgcccgacctgcgacggcctcggcgtccagcagtatttcgatccggagcgcgtgattcagaaccctgagctgtcgctggcgggcggagcgattcgcggctgggatcggcgcaatttttactacttccagatgctgaagtcgctggcggaacattatgaattcgacgttgaagcgccctggggcacgctcaataccagcgtacaaaaggtcgtgctgtacggttcaggcaaagagaatattgaattcaaatatatgaacgatcgcggcgatacctccgtacgccgccatccgtttgaaggcgtgctgcataatatggagcgccgttataaagagacggaatccagcgcagtacgcgaagagttagctaaattcattagcaatcgtccctgcgccagctgtgaagggacgcgccttaagcgcgaagcgcgacacgtgtttgtggaaaatacgccgctgccgaccatctcagacatgagcatcggtcacgcgatggacttcttcaacaacctgaagctctccggccagcgcgcgcaaattgccgaaaaagtactgaaagagattggcgatcgtctgaaattcctcgtcaatgtcggcctgaactacctgacgctctcccgttcggcggagaccctctccggcggcgaagcgcagcgtatccgcctcgccagccagatcggcgcaggcctggtcggcgtgatgtacgtattggatgagccctctatcggtctgcaccagcgcgataacgaacgcctgctgggaacccttatccacctgcgtaatctcggcaacacggtgattgtcgttgagcacgatgaagacgctattcgcgccgctgaccacgttatcgatatcggccctggcgccggcgtgcacggcggtcaggtcgttgccgagggtaagctggaagatatcatggcggtgccggaatcactgaccggccagttcatgagcggcaagcgtaaaattgaggtgccgaaacagcgcgtacccgcgaatccagagaaagtgctgaagctgtccggcgcgcgcggtaacaacctgaaagacgtaacgctgacgctgccggtggggctcttcacctgtattaccggcgtttcagggtcgggtaaatccacgctgatcaatgacacgctgttcccgattgcccagcgccagctcaacggtgccaccattgcggaaccggcgccgtaccgcgatgtacagggtctggaacatttcgataaagtgatcgacatcgaccagagcccaatcggtcgtacgccgcgctccaacccggccacctataccggcgtctttactccggtccgtgaactgtttgccggcgtacctgaatcacgttcgcgtggctacacgccgggccgcttcagctttaacgtgcgcggcggccgctgtgaagcctgccagggcgacggcgtaatcaaagtcgagatgcacttcctgccggatatctacgtaccgtgcgaccagtgcaaaggcaaacgctataaccgcgaaacgctggagattaagtacaaaggcaaaacgattcatgaagtgctggatatgaccattgaagaagcccgtgagttcttcgatgcggttccggcgctggcgcgtaagctgcaaacgctgatggacgtcgggctgacctatattcgccttggccagtcggcgactacgctctccggcggcgaggcccagcgcgtcaagctggcgcgcgagctgtccaaacgcggtaccgggcagacgctgtatatccttgatgaaccgaccaccggtctgcactttgccgatattcagcagctgctggaagtactgcatcagctgcgcgatcagggtaataccatcgtggtgattgagcataacctggatgtcatcaaaacggctgactggatcgttgaccttgggccggaaggcggaagcggcggcggagagatcctcgtttccggaaccccggaaacggtcgccgaatgcgaggcttcatataccgctcgcttcctcaagcccatgctgaagtaa

SEQ ID NO: 175283 - DNA, 411 bp, Klebsiella oxytoca
atgtctttcaaacacggattttatcaattcactcttatcgcggcgctattggtgacgaccgcctgcagctgggtagacggctacagcaatacggcccaccagcagctattgatgctggaacagcttcatctgcagttcatcagcgatgcggcgacagcgccggtcgaccaacgcttattaagacaagaggatcgccagattcgtcagctatttagcctggcattaagcgacggtgatgcgctgcggcagaataatctgcgcgtgctggagaagaattatcagcggctttacacgcatgtttcccgccaggatgcagcgctgacgcccttcacggccggagctctggcgcaacaaacggaatatctttatcagcaggccatcagcggcgaacagctgcgctcagggagataa

SEQ ID NO: 175284 - DNA, 315 bp, Klebsiella oxytoca
atgtccatcattaaagaagtcagcgcccaggtgaccggcgcaggcgtgaatacggcagaatggctacagcttatggaggcgatagtaaatgatgaagacagcggcattcgcgacgccggaatgctcacgcttcaggcattacaggagaaagcgcgcggctggttaagtcaggacgacctcattctgctcctcgaagggcagcgcgatattgccagcattcgcgccagcaatgaacagatcgccatgcagacgcacctgcactccacgctgcttcgcctgtttgatgtgaccctgctggcgctggggaggatttaa

SEQ ID NO: 175285 - DNA, 354 bp, Klebsiella oxytoca
atgacaatttcggatttattgcagtactgcatggcaaagccgggcgctgaacaaagcgtacatagcgactggaaagcgacgcagatcaaagcggcggacgtcctgtttgcgatggtaaaagaggtggaggacaatcggcctgcggtatcgttaaaaaccagccccgagcttgcggaactgctaaggcagcagcatcgcgacgttcgccccagcaaacatctcaataaagcacactggagtacggtgtttctggatggctccctgcctgattcgcaaatttactacctggtggatgcttcataccatcaggcgcttgattctctttccgaggctaagcgtaaactattgccatag

SEQ ID NO: 175286 - DNA, 417 bp, Klebsiella oxytoca
atgtggcatcagcaaactctggccttaggcccgaaatcacggggctttcatctggtcactgatgaggttttaagccagattccccagctttcgggagttaaaactggcctgctgcatttgctgctccagcatacatctgcttccctgacgctaaatgaaaactgcgatccgaccgtccgctacgatatggaacaacattttctgcatgccgtaccggataatgcgccgtatgaacacgattatgaaggtcctgatgatatgccctcgcacattaaatcttcgatgctgggcgtatcgctgatgctgcccgttcaggacggacgcgtcaggctggggacctggcagggtatctggctaggggagcatcgtattcacggcggatcgcgccatatcatcgcgacgctaatgggggaataa

SEQ ID NO: 175287 - DNA, 714 bp, Klebsiella oxytoca
atgcgcaagatcaccctggcctttggggccgtctgcttactgttcacgctaaatagctccgtcgttgctcgcgcttccacaccgcagccgctgtggacgggcaccaatatggcgaaactcgccgaacaggcgccgatccattgggtttccgtggcccagattgaaaatagcctgttggggcgccagccgatggccgtcgggtttgatattgatgataccgtcctgttttccagcccgggcttctggcgcgggcagaaaacctattcccccggcagcgatgattacctgaaaaatccggagttctgggaaaaaatgaacaacggctgggatgaattcagcatgccgaaagaggtggcgcgccagctgattgcgatgcacgtgaagcgcggcgatagcatctattttgtgaccggacgtagccagaccaaaaccgaaacggtaacgaaaaccctacaggatgattttctcatcccggcagcgaatatgaacccggttatttttgctggcgataagcccggtcagaacaccaaaacgcagtggctacaggagaaagggatcaaagtcttctacggcgattcggataacgatatctccgccgcccgagaggtaggcgcgcgtgggatccgtatattgcgagcctcgaattcctcctataaacctctgccgatggcgggcgctcagggcgaagaggtcattgtgaattcagaatattaa

SEQ ID NO: 175288 - DNA, 1194 bp, Klebsiella oxytoca
gtgtttcagaaagttgacgcctacgctggcgatcccattctctccctgatggagcgttttaaagacgatccacgtagtgacaaagtaaacctcagcatcggtctttattacaacgaagacggcattattccgcagctgcaggcggttgccgaagcggaggcgcgccttaatgctcagccgcacggcgcctcaatctatttgcctatggaaggactgaacgcctaccgtcacgctatcgcgccgctgttgttcggtgccgatcatccggtactggcgcaacatcgcgtggcctccattcagacgttgggcggctccggcgccctgaaagtcggcgctgatttcctgaaacgctacttctcgggctcgcaggtgtgggttagcgatccgacgtgggaaaaccatatcgcgatattcgaaggggctggattcgaagtaagtacttacccatggtttgatgataaaaccaatggcgtgcgttttgaggcgttcctggaaaaactcaaatcgctaccggagcgcgatatcgtgctactgcatccgtgctgccataacccaacgggagccgatctcagcaatgcgcagtgggacgacgtcgttgaggtgctgaaagcgcgtcatttaattcctttcctcgatattgcctatcagggctttggcgccggcatggaagaggatgcctacgctatccgcgccattgcgcgcgccgggatcccgctgctggtgagcaactccttctcgaaaatcttctccctgtatggtgaacgcgtgggcggactgtcgatcgtctgtgaagatgcagaaaccgcgggtcgtgtactggggcaattgaaagcgaccgtacggcgcaactactccagcccgccgaactttggcgcgcaggtcgtggcggcggtactgggcgacagcgagctgaaagcctcatggctggcggaagtggaagagatgcgtacccgtattctggccatgcgtcacgagctggtgaatgtgctgaaagagacggtgccgggcggtgattttgattacctgcttaagcagcgcggcatgtttagctataccggtttcagcccagcccaggttgaccgcctgcgcgatgagttcggtgtctacctgatcgccagcggccgtatgtgcgtagccgggctgaattcaggcaacgtgcggcgcgtcgcgcaggcatttgctgctgtaatataa

SEQ ID NO: 175289 - DNA, 729 bp, Klebsiella oxytoca
ttgaccttctttattccctatagcataaagcctcataaactggagcagcacgacgtaaaaaaggataaggaatttatggatagccccccgattgcggacgttgattttacaatgctctggaaggaaagcggttatacgataaaaaattacgttaaacccgcctctgataatcgatttataacgccgcagacaaggacaaacgccatgactcccgagatattactattgcgtgggaaaatcaatcaactttctgaaattactgaatatattgagttagaactcacagataaccctcaatgggaagcgccgtctgataccagctatttaaatgaaaaagattgggctgatcccgatattgttgacaacgtcagggcgatgcaggccaccaataaacttatcagttggtttggtgaggataatgaggggtacgtgggactatggcgtggtccggataatattcctctggagcaggcacaggtggtacgtctggattcagaagggcaatatgaactggtagcagacaccatcgcaaactatctggcaatcagttgtgacgaagacgaattcccacatatccgccagttactcacaaccgccgggtttagcgtggcgaattctatcgatgagatttggcaacgcattgatgactcaattgttcaacctaatgattatcgcaaccggctttataacgacgcacgaatcctacgcggagaagacccagtagaatga

SEQ ID NO: 175290 - DNA, 1080 bp, Klebsiella oxytoca
atgcaagcggcaactgtagtcattaaccgccgcgctctgcgacacaacctgcaacgattacgtgaactggcgcctgccagcaaactggttgcggtggtgaaagcgaacgcctacggacacggtcttcttgagaccgcgcgaacgctcccggacgccgatgcttttggcgtcgcccgtcttgaagaagccctgcgcctgcgcgcgggcggtatcgcccagccgatactgctgctggaggggttctttgaggccgctgacctggcgattatttccgcccagcgtctgcatactgcggtacacagcccggaacagctggcggcgctggaagatgccgacttacccgaaccgatcaccgtatggatgaagctggataccggaatgcaccgattaggcgttctgcccgaacaggccgaagccttctatcagcgcctgagccagtgtaaaaacgtccgtcagccggtaaatatcgtcagccattttgcccgtgcggatgagccagagtgcggcgcgaccgaacgtcagctggatatctttaccaccttcgcggaagggaaaccggggctgcgttctatcgccgcatccggcggtatattgctgtggccgcagtcgcacttcgactgggcgcgtccggggattattctctacggcgtgtcgccgctcgacggtggatccaccggcgcggattttggctgccagccggtgatgtccctgacctccagcctgattgcggtccgcgagcataaagccggcgagccggtgggctacggcggaacctggatcagcgagcgcgatacgcgtttaggcgttgtggcgatgggctatggcgatggctatccgcgcgccgcgccgtccggaacgccggtgctggttaacgggcgtgaggtgccgattgtcggacgcgtggcgatggatatgatttgcgtcgatcttgggcctgaagcgcaggataaggctggcgatgcggtcgtgctgtggggcgaaggtttacccgtcgaacgtattgccgaaatcacaaaagtaagtgcttacgaacttattacgcgcctgacttcacgggtgtcgatgaagtacgtggattaa

SEQ ID NO: 175291 - DNA, 1416 bp, Klebsiella oxytoca
atggcaggaaataaacccttcaacaaaccacagactgaaccccgcgagcgagattatcagctcgatgggttaaaggtcccgccgcactcgattgaagcggaacagtcggtgttgggcggtttaatgctggataacgaacgctgggacgacgttgccgagcgcgttgtttcggaagatttctatactcgcccgcatcgccatattttcaccgaaatggcgcgcctgcaggagtcgggcagcccgatcgacctgattacgctcgccgaatcgctggagcgtcaggggcagctggacagcgtcggcggattcgcctacctggcggaattatcgaaaaatacgccaagcgcggcgaacatcagcgcttatgccgatatcgtccgcgagcgcgcggtggtacgcgagatgatctcggtggcgaatgaaatcgccgaagccggtttcgatccccagggccgcaccagcgaagatctgctcgacctcgccgaatcccgggtctttaaaatcgccgaaagccgcgcgaataaagatgaagggccgaaaaatatcgccgacgtgctcgacgccaccgtggcgcgaattgagcagctcttccagcagccgcatgacggcgtcaccggggtcaataccggctatgacgatctcaataaaaagaccgccggtcttcagccgtcggacctgattattgtcgccgcgcgtccatcgatgggtaaaacgacgtttgcgatgaacctcgtggaaaacgcggcgatgttgcaggataaaccggtcctcatcttcagtctggagatgccctcggagcagattatgatgcgttctctggcctcgctgtcgcgcgttgaccagacccgtattcgaaccggccagctggatgatgaagactgggcgcgcatttccggcaccatggggattctgctggaaaaacgcaacatctatatcgatgactcctccggcctgacgccgacggaagtgcgttcacgcgcgcggcgtatcgcccgcgagcacggcggcatcggcctgattatgatcgactacctgcagctgatgcgcgtgccgtcgctctccgataaccgtacgctggaaatcgccgaaatttcccgctcgctcaaggcgctggcgaaggagctgcaggtgccggtggtggcgctgtcgcagcttaaccgctccctggaacagcgtgcggataagcgcccggtgaactccgacctgcgtgaatctggctccattgagcaggatgccgacttaatcatgtttatctaccgtgatgaggtttaccacgaaaacagtgacttaaaaggcatcgccgaaattattattggtaaacagcgtaacggtcctatcgggacggtgcgcctgacgtttaacggtcagtggtcacgttttgataattatgctgggccacaatacgacgacgaataa

SEQ ID NO: 175292 - DNA, 984 bp, Klebsiella oxytoca
atggcaacacgaattgaatttcaccagcacggagggcctgatgttctgcaagcggtggagttcacgccgaaagatcccgcagagcacgaaattcaggtagagaacaaggccatcggcatcaactacattgatacctatatccgcagcggcctctatccaccgccgtcattgccgagcagcctcggcaccgaagccgctggcgtcgtgagcaaagtcggtaacggcgtgaagcatattaaagccggcgaccgggtggtctacgcgcaatcggcgctgggggcctatagctccgtgcataacgtacctgccgataaggccgctattttaccggacgccatttctttcgagcaggcggcagcgtcgttcctgaaagggctcacggtttattacctgctgcgtaaaacctatgagatcaaagcaggcgagccgttcctgttccacgcggcggccggcggcgtcgggctcatcgcctgtcagtgggccaaagcgctgggcgctaagctgatcggtaccgtcggcagcgcgcaaaaagccgaacgcgctaaacaggccggcgcctggcagatcattaactatcgcgaagagaatatcgtcgaacgcctgaaagcgatcaccgacggtaagaaagttcaggtggtttatgattccgtcggtaaagatacctgggaagcgtctcttgattgcctgcagcgccgggggctgatggtgagcttcggcaactcttcgggcccggtgaccggcgtgaatctcggcattctcaaccagaaaggttcgctgtacgttacccgcccgtcgctgcagggctatatcactacgcgcgaagagctgacggaggccagcaacgagctgttctcgctgatcgccagcggggtgataaaagtggatgttgcggagagtcagaaatatgcattgagcgatgcccgccgcgcgcatgaggtgctggaaagccgggcgacgcagggctcgagtttgctgttgccatag

SEQ ID NO: 175293 - DNA, 243 bp, Klebsiella oxytoca
atgctggaactcttatttgttattggcttttttgtcatgctgttggtcaccggcgtttcactgctgggaattattgccgcgattgtggtcgcgaccgcgctgatgtttgtcggtggtttgtttgcgttaatgattaagctgctgccctggctgctgctggccgtagtcgtggtgtgggtgattcgggcgataaaatcgccaaccgggaaccgttatcgcggtaataaccgctggcgttactaa

SEQ ID NO: 175294 - DNA, 942 bp, Klebsiella oxytoca
atgctcgactggaccgacagacactgccgttattttctgcgtcagctgtcgcgccacacgctgctgtataccgaaatggtgaccactggtgcgattattcacggtaagggcgactatctggcctacagcgaggaagagcatccggtcgccctgcagctcggcggcagcgatccggctgcgttggcgcactgcgcaaagctggcgcaggcgcgcggctatgatgaaattaacctcaacgtcggctgcccgtccgatcgcgtacagaacggtatgtttggcgcctgcttgatggggaacgcgcagctggtggctgactgtattaaagcgatgcgcgacgtcgtgtcgatcccggttacggtaaaaacccgtatcggcattgacgaccaggacagctatgagtttctgtgcgattttatcgaaacggtatccgggaagggcgaatgcgagatgtttatcatccacgcgcgtaaagcctggctttcaggcctgagccccaaagagaaccgcgagatcccgccgctggactatccacgcgtttaccagcttaagcgcgatttcccgcatctgaccatggcgatcaacggcggtattaagtcgctggaagaggcaaaggagcatcttgagcatatggacggcgtgatggtaggacgtgaggcctatcagaatccgggtattctggcctcggtggatcgggagattttcggcgtggaaggcgtcgatgctgacccggtttccgtggtccgggcgatgtatccctatatcgaacgcgaactgagtaacggaacctacctggggcacgtgacgcgtcatatgctggggctcttccagggcattcccggcgcgcgccagtggcgtcgctatctgagcgaaaatgcgcataaagccggggccgacatcaatgtactggaacaggcgctgaaactggttgccgacaagcgttag

SEQ ID NO: 175295 - DNA, 489 bp, Klebsiella oxytoca
atgaaacgacctgattgcattcgacactggcgtgaactggaaggggcggatgattccacctaccctgacagtaccgagcttttctccatcggtgcgccgctggcgcgcggtctgcggctcaatcgcctggggatccaccatgagcgcctgccgcccgggcgccgcacttcttatccacatgcggaaagcgacgaagaagagtttatctacgtgctggaaggctatccggaagtgtggattaacggctacctgtggaagctggagccgggggatagcgtcggttttcctgccggaaccggtatttgccacacgttcctcaataacaccgaacaggaggtccgcctgttagtcgttggtgaggcaaacaagaaatttaatcgtatctactatccgcttaaccccggctatgccgctacgcgtcaggatcgctgggttgaccatccgccgcagtttttcggccctcacgacggcaagccgcggaaaagatag

SEQ ID NO: 175296 - DNA, 516 bp, Klebsiella oxytoca
atggataagaccacttcgcaacaaatgctagcgcatgctgaaaagctctgcgcgcagcgtggcgtgcgcctgaccccgcagcgcctcgaagtattgcgtttgatgagcctgcagcaaggggcaatcagcgcctacgacctgctcgatctccttcgtgaaaaagagccccaggctaaaccgccgaccgtctatcgggcgctggagtttttactggagcaggggttcgcgcataaggtggaatcgaccaatagctacgtgctctgccaccttttcgatcagccaacccacagctcagcgatgtttatttgcgaccgctgcggcggcgtgaaagaagagtgcgcggaaggcgtcgaagatataatgcatacgctggcggcaagaatgggattcgcgctgcgccacaacgtgattgaagctcacggcctctgcgctgcctgcggcgaggtcgaatcctgcagtacgccgggccactgccatcacgaccataccatccagattaaaaagaaagcccgctga

SEQ ID NO: 175297 - DNA, 213 bp, Klebsiella oxytoca
atgatgaataaagacgaaatcggcggtaactggaaacagttcaaaggcaaagcgaaagagaaatggggcaagctgactgatgatgacatgaccgtcattgagggtaagcgtgaccagctggtcggtaaaatccaggaacgttatggatatgaaaaagaccaggcagacaaagaagtgaccgattgggaaaccaaaaacgactaccgctggtag

SEQ ID NO: 175298 - DNA, 1317 bp, Klebsiella oxytoca
atgttttttaacgccgccgacaaagccctgtggcgcttagcgctgcccatgatcttctccaatatcaccgttccgctgctcgggctggtggacaccgccgttattggtcatctcgatagcccggtttatctggggggcgtggcggttggcgcaacggcaaccagtttcctctttatgctgctgttgttcctgcgaatgagtaccactgggctgacggcccaggcgtacggcgctaaagatccgcagcgtctggcgcgtgcgctggtgcagccgctgtgcctggcgctggccgccggggcggccattgtgctcttgcggatgccgttgatcgacctggcgctgcacatcgtcggcggcagcgaagccgtgctcgaacaggccagacgcttccttgagatccgctggctaagcgcgccggcatcgctggcgaacctggtcctgctgggctggctgctgggcgtgcagtacgccagagcgccggtgatcctgctggtggtcggcaatgttcttaacattatgctcgatgtatggctggtgatgggtctgcatatgaacgtgcagggggcggcgctggcaacggtcacggcagaatacgccactttctttatcggcctgctgatggcaaggcgcgtgctggcgctgcgcggcgtttccctgttaatgctaaaaaacgcctggcgcggcgatatacgtcgcctgctggcgctgaatcgcgacatcatgctgcgttcgctgctgctacagctttgcttcggtgcggtaacggtatttggcgctcgcctcggcgccgatgtcgtcgcggtcaatgcggttctcatgacgatgctgacctttaccgcctacgcgctggacggttttgcctacgccgttgaggcgcactccgggcaggcctacggcgcgcgcgacgatagccggctgctggctgtctggcatgcggcttgccgccagtcagggatagtggcgctggcgtttgcgctgatttacggacttgccggcgaacagattattgcgttgttgacctcgctgccttccctgcagcagctggccgaccgctatctggtctggcagatgattctgccggtcattggcgtctggtgctacctgctggacggcatgtttatcggtgcgacgcgcggtgcggagatgcgtaacagcatggcggtggcggcggcggggtttgccctgacgctattgacggtacccacgctcggtaaccatggactgtggctggcgctgacggtatttctcgctctgcgcggcgtttccctggcagcgatctggcggcggcactggcggcgcggaacctggttttcgtaa

SEQ ID NO: 175299 - DNA, 609 bp, Klebsiella oxytoca
atgaaagcgttaacgaccaggcagcaagaggtgtttgatctcattcgggatcatatcagccagacgggcatgccgccgacgcgtgcggagattgctcagcgcttggggttccgttccccaaacgcggcggaagagcacctgaaagcgctggcgcgtaaaggcgcaatcgaaatcgtttccggcgcctcccgcggtattcgtctgctgacggaagaagaaacgggcctgccgcttattggccgcgtagcagcaggggaaccgctgctggcccagcagcatattgaaggccactatcaggtcgatccggccatgtttaaaccgaatgccgattttctgctgcgcgtcagtggtatgtcgatgaaagacatcggcattcttgatggcgacctgctggcagtccataaaactcaggatgtgcgtaacggtcaggtagttgtggcgcgtattgacgaagaagtgaccgtaaagcgcctgaaaaagcagggtaacgtcgtcgaactgctgccggaaaacagcgaattttcgccaatcgtggtggatcttcgtcaacaaagtttcaccattgaaggcctggccgtcggcgttattcgcaacggcaactggcagtaa

SEQ ID NO: 175300 - DNA, 369 bp, Klebsiella oxytoca
atggccaataataccactgggttaacccgaattattaaagcggcagggtattcctggaaaggattccgggcggcatgggtcaacgaggccgcatttcgtcaggaaggcatcgcggccatcattgccgtggtgattgcctgctggttagacgtcgatgccattacccgggtgctgttaattggctcggtcctgatagtgatgatagttgaaattatcaacagcgcgattgaagcggtcgtggaccgtatcggctctgagcatcatgagctttccgggcgcgcgaaagacatgggctctgcggcggttttgctggcgattgtcatcgcgctgatcacctggggaacccttttatgggcaaattaccgctaa

SEQ ID NO: 175301 - DNA, 2424 bp, Klebsiella oxytoca
atgtctggctggcaacgaatttactataaattactgaatttaccattaagggcgctggtaaaaagcaagtcgattccggcacaacctgctcaggagttaggcctggatacctcgcggcccattatgtacgtcctgccctacaattcgaaggcggacctgctgacgctgcgcgcgcaatgtctggagcatgagttaccggacccgctggagccgctggagatcgacggcgccctgcttccgcgctacgtatttatccacggcggaccgcgcgtattcacctattacacgccgaaagaagagtctatcaagctctttcacgactatctggatttgcaccgtaatcatcccgatcttgatgtgcaaatggtgccggtttcagtgatgttcggtcgcgcgccggggcgtgaaaaaggcgaggttaacccgcctctgcgcatgctcaacggcattcagaaattcttcgccgttctgtggctgggccgcgacagctttgtgcgtttctcgccttcggtctcgctgcgtaaaatggcggacgaacacggcaccgataaaactatcgctcagaagctggcccgcgtggcgcgtatgcacttcgcccgtcagcgtctggcggcggtcggtccgcgcctgcctgcgcgccaggatctgttcaataaactgctggcgtcgaaagccattgcccgtgcggtagaagacgaagcgcgcagcaagaaaatttctcatgaaaaggcgcagcaaaacgctatcgccctgatggaagagatcgccgcgaacttctcctacgagatgattcgcctgacagaccgcgtgctgggctttacctggaaccgtctgtatcagggcattaacgtgcataacgccgagcgcgtgcgccagctggcgcacgaaggccacgagatcgtttatgtcccgtgccaccgcagccatatggattatctgctgctctcgtacgtgatttatcatcagggcctggttccgccgcatatcgccgccggtatcaacctgaacttctggcctgccgggccgattttccggcgcggcggcgctttcttcattcgccgtacgttcaagggcaataagctctattcgacggtattccgcgaatacctcggcgagctgttcagccgcggctactccgtcgaatacttcgttgagggcggccgctctcgtaccggacgcctgctggatccgaaaaccggtaccctgtcgatgaccattcaggcgatgctgcgcggcggtaatcgtcccatcaccctggtgccgatctacatcggctacgagcacgtgatggaggttggtacctacgctaaagagctgcgcggagcgacaaaagagaaagagaacctgccgcagatgctgcgcggcttaagcaagctgcgtaatctcggccagggctacgttaacttcggcgaaccgctgccgctgatggcctacctgaatcaacatgtgccggactggcgcgagtcgatcgatcctatcgaagccgttcgcccctcctggctgacgccgacggtaaataacatcgcctcagacctgatggtacgcattaacaatgccggtgcggcaaacgccatgaacctgtgctgtacggcgctgctggcatcgcgtcagcgttccctgacccgcgagcagcttaccgaacagctggagtgctacctcgccctgctgcgcaacgtgccgtactctgcggacgcgaccacgcctacggcgtctgccagcgagcttatcgaccacgcgctgcagatgaacaagttcgaagtcgagaaagacacgatcggcgatatcatcattctgccgcgcgagcaggccgtcctgatgacctattaccgcaacaacatcgcccatatgctggtgatgccgtcactgttagccgccatcgtcactcagcatcgtcgtattacccgcagcgaaatattgcgtcacgtcgagatgttctatccgttcctcaaggccgagctgttcctgcgctgggaaaaagcggagctggcgggcgtcgtcgatgcgctgattgccgagatgcagcgtcaggggcttatcgccgtgaatgacgatgaggtgagcgtcaatccgtctcatgcccgttccctgcagctgctggccgcaggcgcgcgcgaaacgctgcagcgctacgccatcaccttctggctgctgagcgctaacccgtcaatcaaccgcagttcgctggagaaagagagccgcaccgtggcgcagcgcctgtccgttctgcacggtatcaatgcgccggagttcttcgataaggcggtattcagcacgctggtgctgaccctgcgcgacgaaggctatatcagcgataccggagatgccgagccggaagagacgttgaagatctaccgtatgctggcggatctgattacttctgatgtgcgtttgacgattgaaagcgttacccaggatgaagcgtaa

SEQ ID NO: 175302 - DNA, 867 bp, Klebsiella oxytoca
atggagtggagtctgacgcagaacaagctgttggcgtttcaccgcctgatgcgtactgacaaaccgatcggcgcgctgctgctgctgtggccgacgctgtgggcgctgtgggtggccacgccggggataccgccgctgtggatcctcgccgtgtttgttgccggcgtctggttaatgcgcgccgcaggctgcgtggtcaatgattatgccgatcgtaaatttgacggccacgttaaacggacggcccgtcgtccgctgccgagcggcgacgtcagcgaaaaggaggcgcgaacgctgtttgtcgtgctggtgctgctttctttcctgctggtgctgaccctgaacaccatgaccattctgctgtcgatagcggcgctggcgctggcatgggtctatccatttatgaaacgctacacccacttgccgcaggtggtgctgggcgcggcatttggctggtcgatcccgatggccttttcggcggtaagcgaatcgctgccgctcagctgctggctgatgttcctcgccaacatcctgtgggcggtggcctacgatacccagtatgcgatggtcgatcgtgatgatgacgtcaaaatcggtatcaaatcgacggcgattctgtttggcgacaacgatcgcttaatcatcggtattttacaggtggcggtactgggtctgatggcggcagtaggctggctgagcgggctgggctgggaatattactggtcgttgtttatcgccgcggcgctgtttgtctggcagcaaaagctgatatttaaacgcgaacgcgatagctgctttaaggcatttatgaataataactacgtggggctggtactgtttctcggcctggcgatggggtatatgtag

SEQ ID NO: 175303 - DNA, 498 bp, Klebsiella oxytoca
atgccacatcctgcgcttacgcaactgcgtgcgctgcgttattttgccgcaatgcccccgctgcacgcgcatctgcgcgactggctattgctggaagactcaatgaccaaacgctttgagcaacaggggaagcgagttagcgtcatcatggttaacgaaggttttgttggacgcgaagcgctggcagatgaagcgcctctgttacccgtcgaatcccgctactggctgcgggaaattatcctttgcgctaatggcgaaccctggcttgctggccgaactatcgtgccggagtcgacgctgagcggccccgaactggcgctgcaacagctgggacaaacgccgctgggccgctatctcttcacgtcatcgacgctaacccgcgattttattgaaattggtcgtaatgcagagctttgggggcgtcgttcccgcctccggttgagcggcaaaccgctgctgctgacggagctgtttttgcctgcatcgccgttgtattga

SEQ ID NO: 175304 - DNA, 933 bp, Klebsiella oxytoca
atgaaaatgaagaaaagtctcgttgccctctgcctgtccgtcggcctgatggcctgcgtacccgcagtcagttttgctgatgttaatttcgtgccgcagaacacctctgccgcgccgtcgattccggcctccgcgttgcagcagctcacctggactccagtcgaccaatccaaaacgcaaaccacaaagctcgccgtggccgggcagacgctcaatgtccccggaatcagtggtccggtcgccgcatacagcgttccggcgaatattggcgagctcaatattacgttaaccagcgaagtggaaaaacaagctgcggtatatgcaccgaacgtgctgattcttgatcagaatatgacgccatctgcattcttccccagcagctactttacttatcttgaaccgggcgtgatgagctcagatcgtctggagggtgtaatgcgcctgactccggcgctgggacagcagaaaatttatgtgctggtctttaccacgccgcaggatttacagcagaccactaaattaatcgatccggcgaaggcatatgccaaaggcaccggcaatgcggtgccggatattccggatcccatcgcgaaacacgtcaccgacggtaccatcagcctgaaggtaaaaacctctaccggctccagcgtgctggttggcccgctgttcggttcgtctggtccggggcctgttaccgtcggtaataccgctgctcctgcctatagcgcgccggtcgccgccccggccccggctccagcggcgaaaaccgaaccgatgcttgatgataccgaaacttacttcaataacggcattaagcaggcggttgcgaaaggcgatatcgacaaggctctgaaattgatgaacgaagctgaacgtcttggttcgaaatctgctcgttccacctttatcagcagtgtaaaaggcaaggggtga

SEQ ID NO: 175305 - DNA, 1287 bp, Klebsiella oxytoca
atgatgattactctgcgcaaacttccactggcggtcgccgttgcggcaggcgttatgtctgctcaggcgctggccgttgatttccacggctatgctcgttctggtatcggctggaccggcagcggcggtgagcaacagtgcttccaggcaaccggtgctcaaagcaaataccgtcttggtaacgaatgtgaaacctatgcggaactgaaactgggccaggaagtctggaaagaaggtgataagagcttctacttcgatactaacgtcgcctactctgtgtcgcagcagaacgactgggaatccaccagtccggcattccgtgaagctaacgtgcagggtaaaaacctgatcgaatggttgccaggttccaccatctgggccggtaagcgcttctaccagcgtcatgacgttcatatgatcgacttctactactgggatatttctggtcctggtgcgggtattgaaaacatcgatctgggcttcggtaaactctctctggcagcaacgcgttcttctgaatccggcggctccggtaccttcgccgatcgcgaccagttcggtaatcgcgtttacgacaatatcgtgccgaacgatgtattcgacgtgcgtttagccggtctggaaactaacccaggcggcacgctggagctgggcgttgactacggccacactaacatccctgatgattattctctgcagccgggcgcttccaaagacggctggatgcttaccgctgagcatactcagagcatgctgaaaggctttaacaaatttgttctgcagtatgcaactgactctatgacctccagcggtaaaggtgttccgcagggtggcagcattaataacgatggatctatgtggcgcgtgctggaccacggtgcgatctctctcggcgatagctgggatctgatgtacgtcggtatgtaccaggatatcgaccgcgacaacaacaatggtacccagtggtggaccgtcggcgttcgtccaatgtacaagtggacgcctatcatgagcaccctgatggaaatcggctacgacaacgtcaaatctcaacgcaccagcgatcgtaacagccagtataaagtgaccctggcccagcagtggcaggctggtgacagcatctggtcccgtccggcaatccgcgtattcgcaacgtacgccaaatgggatgagaaatggggctataacgatagcggcgtagcgtataacgacaccagtgctaaaacctttagccgtggcgatagcgacgagtggaccttcggtgcccagatggaaatctggtggtaa

SEQ ID NO: 175306 - DNA, 1110 bp, Klebsiella oxytoca
atggcgagcgtacagctgcgaaatgtaacgaaagcctggggtgacgtggtggtatcgaaagatattaatctcgaaatccaggatggggagttcgtcgtgtttgttgggccatcaggctgcggcaaatccaccctgctgcgtatgattgccgggctggaaacggtgaccagcggcgatctgctgattggcgatacccgaatgaatgatgttccgcccgccgagcgcggtatcgggatggtgtttcaatcttatgcgctttacccccacctttccgtcgcggaaaacatgtctttcggccttaagctggccggcgccaaaaaagaactgatcaaccagcgcgtgacccaggtggcggaagttctgcagcttgcccatctgctggaacgtaaaccgaaagcgctttctggcggccagcgccagcgcgtggcgattggtcgtaccctggtggctgaaccgcgcgttttcctgctggatgaaccgctctcaaaccttgacgccgcgctgcgcgtacagatgcgtattgaaatatcccgtctgcataaacgccttggccgcacgatgatttacgtgacccacgaccaggtcgaagcgatgacgctggccgacaagattgtggtgctggatgccggtcgcgtcgcgcaggtcgggaagcctctcgaactctatcactacccggcggaccgtttcgtcgcgggctttattggctcgccgaagatgaatttcctgccggtcaaagtcaccgctaccgctattgagcaggtgcaggtggagctgccgaaccgccagcaggtctggctgccggtggacagcgcccgcgttcaggttggcgccaacatgtctttaggtatccgtccggagcatctgctgcccagcgatattgccgacgtcaccctcgaaggtgaagtccaggtggtcgaacagctcggccacgaaacgcaaattcatattcagatcccatccatccgtcagaacctggtttaccgccagaacgacgtggtgctggtagaagagggagccacattcgccatcggtttgccgccggagcgttgccatttattccgtgaggatggcaccgcttgtcgtcggctgcataaagagccgggcgtgtaa

SEQ ID NO: 175307 - DNA, 1191 bp, Klebsiella oxytoca
atgaaaatcaaaactggcgctcgcatcctcgcgctgtctgcattgaccacgatgatgttttccgcctctgccctcgcaaaaattgaagaaggtaagctggttatctggattaacggcgacaaaggctacaacggcctcgctgaagtgggtaaaaagtttgagaaagacaccggcatcaaagtctccgtagaacatccggacaagctggaagagaagttcccgcaggttgccgcgaccggcgacggccccgacatcattttctgggctcacgaccgcttcggcggctacgcacagtccggtctgctggcggaaatcaccccggataaagctttccaggacaaactctatccgttcacctgggatgcggttcgctacaacggcaagctgattgcctacccggttgccgttgaagcgctgtcgctgatctataacaaagacctggtagcgaacccgccgaaaacctgggaagagatcccggcgctggataaagaactgaaagcgaaaggtaagagcgcgctgatgttcaacctgcaagaaccgtacttcacctggccgctgattgctgccgacggcggttacgcgttcaagtttgaaaacggtaagtacgacgtgaaagacgtgggcgtagatagcgctggcgcgaaagcgggcctgaccttcctggtcgacctgatcaagaacaaacatatgaacgccgacaccgactactccatcgcggaagcggccttcaacaaaggcgaaactgcgatgaccatcaacggtccgtgggcgtggtctaacatcgataagagcaaggttaactacggcgttaccctgctgccaacctttaaaggtaatgcgtccaagccgttcgttggcgtactcagcgccggtattaacgccgccagcccgaacaaagaactggcgaaagagttcctcgaaaactatctgatgaccgaccagggtctggatgaagttaacaaggacaaaccgctgggcgcggttgcgctgaaatccttccaggaaaaactggaaaaagatccgcgtatcgccgccaccatggctaacgcccagaaaggtgaaatcatgccgaacatcccgcagatgtccgccttctggtatgccgttcgtaccgcagttatcaacgccgctagcggtcgccagaccgtcgatgccgccctgaaagacgcgcaggctcgtatcaccaagtaa

SEQ ID NO: 175308 - DNA, 1545 bp, Klebsiella oxytoca
atggatgtcgtgaaaaagaaacactggtggcaaagtccgcagctcacatggtctgtgatcggcttgctgtgcctgctggtgggttaccttgttgttttgatgtacgcccagggggagtacctgtttgccatcatgacgctgattttaagctcggttggcctgtatattttttccaatcgcaaggcctatgcctggcgctatgtttacccgggtctcgctgggatggggctgttcgtcctgttcccgctgatctgcactatcgctatcgctttcaccaactacagcagtactaaccagcttacctttgaacgcgcccaacaggtgctgatggaccgttccttccaggcgggtaaatcctacaacttcgcgctttatccggcgggagatgagtggaagctggcgctgaccgatggcgagagcggcaaaaactatctttccgacgcttttaaattcggcggcgaacagaagctggcgttaaaagaggctgatgccctgccggaaggcgaacgcgccaccctgcgcgtgattacgcaaaaccgcaccgccctgaaccagctgaccgccgtcctgccggatgagagcaaagtcattatgagctccctgcgtcagttctccggcacccagccgctgtacgcgctggccaatgacggtacgctgaccaacaaccagagcggcgtgaaatatcggccgaacgccgaggtcggtttctatcaggcgattaacgccgacggcagctggggcagcgaaaagctcagcccgggctacaccgtgaccatcggctgggataacttcacccgcgtgttccaggatgaaggtatccagaaaccgttcttcgcgattttcgtctggacggtggtcttctctgttctgaccgtgattctcaccgttgcggtcggcatggtgctcgcctgtctcgtccagtgggaagccctgaaaggcaaagcgatttatcgcgtactgctgattctgccttatgccgtaccgtcgtttatctcaattctgatcttcaaagggctgttcaaccagagctttggtgagatcaacatgatgctcagcgcgctgttcggcatcaagccggcctggtttagcgacccgactaccgcgcgcaccatgattatcatcgtcaacacctggctgggctatccgtacatgatgatcctgtgcatgggcctgctgaaagcgattcctgacgatttatatgaagcctcggcaatggatggcgccacgccgttccagaacttcttcaaaattacgctgccgctgctgatcaagccgctgacgccgctgatgatcgccagcttcgcctttaactttaacaatttcgtgctgattcagctgttgaccaacggcgggccggaccggctcggcaccaccacgccggcgggctacaccgaccttttggtgagctatacctatcgcatcgcctttgaaggcggcggcgggcaggacttcggcctcgcggcggctatcgccacgctgatcttcctgctggtaggcgccctggcgattgttaacctgaaagccacacgtatgaagttcgattaa

SEQ ID NO: 175309 - DNA, 891 bp, Klebsiella oxytoca
atggctatggttcaacccaaatctcagaagctgcgtttactgacaacgcacctcctgctgctgatttttatcgcggcgattatgttcccgctgctgatggtcatcgctatctcgctgcgcgaagggaacttcgccaccggtagcctgattcccgaaagtatctcctgggagcactggcggctggcgttaggcttcagcgtcgaacacgctgacggccgcgtcacgccgccccccttcccggttctcctgtggctgtggaactccatcaaggtggccggcattaccgccattggcatcgtcgcgctctctacaacctgcgcttacgcttttgcccgtatgcgcttcccgggtaaagccacgctgcttaaaggaatgctgattttccagatgttccccgcggttctgtcgctggtcgcgctgtatgccctgtttgaccgtctcggccagtacgtaccgttcgttggactgaatacccacggcggcgtgatcttcgcctatatgggcggtatcgcgctgcacgtctggacaatcaaaggctacttcgaaaccatcgacggctcgctggaagaagcggcggcgctggacggcgcgacgccatggcaggctttccgcctggtgctgctcccgctatcggtaccgattctggcggtggtgtttattctgtcgttcatcgccgcgattaccgaagtgccggtggcctctctgctgctgcgcgatgtgaacagctatacccttgcggtcggaatgcaacagtatctcaacccgcagaactatctgtggggcgactttgccgccgcggcggtgctctccgccattccgattaccgtagtgttcctgctggcccagcgctggttggttaacggcctgaccgcaggcggagtgaaaggttaa

SEQ ID NO: 175310 - DNA, 1476 bp, Klebsiella oxytoca
atgaatacccaatataattcaagctatatcttttcgattacgttagtcgccacgttaggaggactattatttggctacgataccgcagtcatctccggtacggtagaatccttaaacactgtttttgtggctccgcaaaacctgagtgaatctgccgccaactcattgctgggcttctgcgttgccagcgccttgattggctgcatcattggaggcgcgcttggcggctattgtagtaaccgttttggccgccgggattcgctaaaaattgccgcgcttctgttttttatctccggtatcggttcggcatggcctgaattaggttttaccccgataaatcctgacaacgcggtgccagtttatttagccggatatgtaccagaattcgttatttaccgcattattggaggcattggcgtaggtttagcatctatgctttcaccgatgtatatcgcggaactggcgccggcaagcatacgaggaaaactggtttcctttaaccagttcgcgattatttttgggcagctattggtttactgtgttaactatttcattgcaaaatcaggtgatgctaactggctgaataccaatggttggcgatatatgtttgcctcagaatgcattcccgcactgctgtttttagggctactgtataccgtaccggaaagcccgcgctggctgatggcgcagggcaaacaggaacaggcggagggtattctgcgcaaaattatgggcagcaagctcgccgtccaggcaatgcaggagatcaatctgtcactggaaaatggccgtaaaacgggcggtcgtctgctgatgtttggcgcaggcgtcattactatcggcgttatgctgtctatattccagcagtttgtcggcatcaacgtcgtgctctactacgctccggaagtcttcaaaacgctgggagccagcactgatgtcgccctgctgcagaccattatcgtgggcgttatcaacctgactttcaccgttctggccatcatgacggttgataaatttggccgcaagccgctgcaaattattggcgcgctcgggatggcgcttggcatgttcagccttggcaccgccttttatactcaagcatccggtttggtggcgctgctgtcgatgctgctttacgtcgccgcatttgccatgtcctggggcccggtttgctgggtgctgctggcagaaatcttccctaacgcgattcgcggcaaagctctcgccattgcggttgccgcgcagtggctggcgaactactttgtctcctggaccttcccgatgatggataaaaactcctggctggttgcccattttcacaacggtttttcctactggatttacggttgtatgggaattctggcggcgatgtttatgtggaaatttgtgccggaaacgaaaggcaagacgctggaagaactcgaagagctgtgggcacccgcagaagagaaaacgcttcaggcctctatcagataa

SEQ ID NO: 175311 - DNA, 411 bp, Klebsiella oxytoca
atgccgccggtttatcgtccgttggtgagttttattgcaaccgccatgcaaaccgttttgaatcttggcctgctgtgcctgggggtcattctgatcgtattcctcggtaaagagacgttgcatctggcgcatgttctgtttacccctgaacctgtcagtaaatacaagctggtggaagggctggtggtctacttcctctatttcgagtttatcgcgctgattgtgaagtactttgaatcgggatttcacttcccgctacgctactttgtttatatcggcatcaccgccatcgtacgcctgattatcatcgatcatgagtcgcccatggcggtgctgatttactccgccgcgatcctgattctggtgattacgctctggctgtgtaactccaaccgactgaaacgcgagtaa

SEQ ID NO: 175312 - DNA, 1278 bp, Klebsiella oxytoca
atgattaatgaacgcgcatccatttttataaaatggctaaaacaagaagtggctccggcattaggttgtaccgaacccgtcgctatttcttttactaccgcttacgctgcgaaacatttagatacggcctgtcaaagtattaacggttttatttctgcgaatctgtacaaaaacgcgacgggcgtaactattccaggaacatccgttagcggtgtcgcgcttgccgccgccattggcgcttttggcggcgatgccgataagggtttaaaaacgctggaggggattacccagcagcatgtcgaattagcgcaaaagctaatcgccgatggccaggttaatattcgcgtggaagatactcccgattttatccatctggatctgaccctgaccggtggcgaaaagagctgccgcgtggtagttaaaggcacgcataccaatatcgttgaactttatattaatggcgaagcgcaggctttggctaataaacagaatacggtaacgcagcaggaagcgttagaaaccttttcgcttgccgaagccttcaattttataagcgaagtcgattttgccgacatcgaatttattctcgaagccgcccgcctcaattcggcgctggcaaatgaaggcaagagcaagaaatatggtttaaacatcaatggtaccttctctgatgcagtaaaaaagggtctgctcagcaacgacctgctcagtaaagtcatcatcaataccgtcgccgcatccgacgcgaggatgggcggcgctcccgtcgtcgccatgtcaaactttggttccggtaaccagggtatcgccgctaccatgccggtagtgacggtcgcggagcatcttaatgccgatgaagagacgctcgcacgggcgctcgcgctctcccacctgaccgcgatatcgatccactcccgctatacgcgtctgtccgcgctatgcgcggcgtctacggcagcaatgggagcagctgccgggatggcgtggctatttactcgcgatatggaaaccattaacaccgcgattattaatatggtcagtgatattaccggtatgatttgtgacggcgcttctaatagctgcgcgatgaaagtttcatccgtcgtgtccagcgcatttaaggctgtattgatggccatgcaaaatagctgcgcaagctctaatgatgggatcgtttgcgctgacgttgagcaaacgattaataatctctgtcgtctggttgttaagcccatggcctataccgacaaagaaattatcaacatcatggttgctaaataa

SEQ ID NO: 175313 - DNA, 738 bp, Klebsiella oxytoca
atgaacaaaaaagttatcctacagggcgccagcgccattcttcccttgtgtatcggcgactttcccttttcatttatcgtcggcgcgctaagcgtgagcgccggaatgagcgtctggcaaagtacggtctggtccaccattgttattgcgggttcagcacaaatgctggcgttgaatatgctcaaaaccggggcgagcctcggggtaattatattcaccacgctgattattaatctccgtcatatactttacagcgcatcaatttccagtaccgtacgcgaggcgtccttttttaaaaaatgctttatggcctatgctctgaccgatgaggtgtacgccacgacggtgaaagagatggaggagaataaaaaggataaatatctgttctactcttcagccatgctgacattttggttcgcctgggttttagccaatttccttggcgctctggttggcgcctcatttccgcatattgaaaaatacggtctggacttcgcgatggtcgccgcctttatcgccatcgtcgttccgcaaatcaagagccaggcctgtaccgtcgccgccattgtggctgccgtatccggcgtacttttggtcgtgctgccctattcgttaggcattgtcgtcgcatccgtattgggcgtaatggcgggcctgagcgtcgatctcgccgaagagcgtaaacaagcgcaggccgccgctaaactctctctcgaaggagcgctggaaaatgagtaa

SEQ ID NO: 175314 - DNA, 321 bp, Klebsiella oxytoca
atgagtaatagcttttttatcgccctgacgctgggtatggccgccgtgacctttcttattcgcttctcgttcattggtctcgccgggaaaatccagatgtcgaaccgggtcagcaaaacgctgcgctttgtgccggtgactgttctgccagccatcatcacgattcagatcctgagcgtgaactccagcatggagtttgatttaaaaaacccgaaagtcatcgccgcgattatctgcacgcttgccagcttccgactggggctggtctgggtcgtcgtcagcggcgttggttcactggttttacttaactatttcatgtaa

SEQ ID NO: 175315 - DNA, 378 bp, Klebsiella oxytoca
atgattatttccaccgcgtccgcgcctgccgccatcggtccgtatgttcagggggtaaacctgggtaccatgacgatgacctcagggcagctcccggttaatgcgcaagatggcaccatgtctgacgacatcgctgtgcaaacgcgccagtcgctggaaaacgttaaggctatcgtggaagcggcgggcttgcaggtgaaaaatattgttaagacgatggttttcgtcaaggatctgaacgattttgccaccatcaacgcggtctatgaagcgttcttcgttgaacacaacgcggcgtttccagcccgctcctgcgttgaggtcaccagactgcctaaagatgcgggtattgaaatcgaggccatcgccgtcgcctga

SEQ ID NO: 175316 - DNA, 510 bp, Klebsiella oxytoca
atgctaaagattcgtcttgcacgtccggaagatgcggctttactcaacgatatggcgaatgccagctatcgtcatcactttacccacctctggcataacgccgatgaaatggagcgctacctgcagcaagagtatgccgtggcctcactggagcgcagcctggccgatacgcagtgctgctggttaattgctgaggcagaggagccaatcggctttgctaaatacgcctgccgccaggacatcaaccccgaaggtccaaccggtacgctattgcataagctctatctgttacctgcaacaacgggccatcgctatggcgagcagctttttcacgccgtcgagaagcgagcaaaagttgccggtgaacgctggctctggctggaggtgctcgccgcgaatacccgcgcccgccgtttttatgaacgtcagggaatgcagcacgtaaaagatgtcatctttcattctgcgacccagcaaagcacattacacattttggctaaaccgatctga

SEQ ID NO: 175317 - DNA, 456 bp, Klebsiella oxytoca
atgcatacccttcgtgaaaccgccattcgcaacgtcgccagcggcgaaaacgtggtgatttaccagcccgccaacctctatgactgcacgctaggcgataacgtcttcgtcggccccttcgttgaaatccagggccatacccgcgttggcagcgacagcaaaattcagtcccatacctttatctgcgagtacgtgaccatcggcgaacgctgttttatcggccacggcgtaatgttcgctaacgatatgttccgcgatggcaagcccaacgccgaccgcgaaagctggggaagaatcatcattggcaacgatgtgtctatcggcagcggcgcaaccattctggcggtcagcatttgcgatggcgtcgtgattggcgcgggcagcgtggtgacaaaatccattacagagaaaggcgtgtgggcaggaaacccggcaaaactgctgcggcggctataa

SEQ ID NO: 175318 - DNA, 1650 bp, Klebsiella oxytoca
atgaaaaacatcaacccaacgcagacctctgcctggcaggcattacagaaacactttgatgaaatgaaagacgttaccatcgcggatctgttcgcgaaagatagcgaccgtttctctaaattctccgccacgttcgacgatctgatgctggtggatttttccaaaaaccgcatcaccgaagagacgctggccaaactgcaggatctggccaaagagaccttcctggctgacgccattaaatccatgttctccggcgagaagattaaccgcacggaagatcgcgcggtgctgcacgttgcgctgcgtaaccgcagcaatactccgattctggttgatggcaaagatgtgatgccggaagtgaacgccgtgcttgagaagatgaaaatcttctctgaagctattatctccggtagctggaaaggctacaccggtaaagcgattaccgacgtcgtgaacatcggtatcggcggctccgatcttggcccgttcatggtgaccgaagcgctgcgtccgtacaaaaatcacctgaatatgcactttgtttctaacgtcgatggtacccatatcgccgaagtgctgaaaacggtgaacccggaaaccacgctgttcctggtggcgtcgaaaacctttaccacccaggaaaccatgaccaacgcccacagcgcgcgcgactggttcctggcgaccgctggcgatgagaaacacgtagcgaaacacttcgccgcgctctccaccaacggtaaagcggtaggtgaattcggtattgataccgccaatatgtttgagttctgggactgggttggcggtcgttactctctgtggtctgctatcggcctgtccatcatcctgtccgtgggcttcgacaacttcgtcgagctgctctccggcgcgcacgcgatggacaaacacttctccaccacgccggctgagaaaaacctgccggtgctgctggcgctgatcggtatctggtacaacaacttcttcggcgctgaaaccgaagcgattctgccgtacgaccagtatatgcaccgctttgccgcctacttccagcagggcaacatggaatccaacggtaaatacgttgaccgtaacggcaacgccgtggattaccagacgggcccgatcatctggggcgagccgggcaccaacggtcagcacgcgttctatcagctgattcaccaggggaccaaaatggtgccgtgcgattttatcgctccggcgattacgcataacccgctgtctgaccatcatccgaagctgctgtctaacttctttgcgcagaccgaagcgctggcgtttggtaaatcccgcgaagtggttgaacaggaatatcgcgatcagggtaaagatcccgcgacgctggaacacgtggtgccgttcaaagtgtttgaaggcaaccgcccgactaactccatcctgctgcgtgaaatcacgccgttcagtctgggcgcgctgattgccctgtatgaacataagattttcacccagggcgtgattatgaacatcttcaccttcgaccagtggggcgttgagctgggcaaacagctggcgaaccgcatcctgccggagctgaaggatggttctgaagtcagcagccacgacagctccactaacggcctgattaaccgctataaatcctggcgcgcataa

SEQ ID NO: 175319 - DNA, 705 bp, Klebsiella oxytoca; identical to SEQ ID NO: 8686

SEQ ID NO: 175320 - DNA, 1350 bp, Klebsiella oxytoca
atgacagacttagttgtagccaaattcggcggtaccagcgttgccgactttgatgccatgaaccgcagcgtagacgtcgcgctgctggatgccaatacccgcgtggtggtgctttccgcctcggctggcgtgaccaacctgctggtcgccttagcggaagggctggaacctggcgaacgtttcgcaaagctcgatgccatgcggcaaatccagttcaatattctggagcgtctgcgttatccgaacgtgattcgcgatgaaattgaacgcctgctggaaaacatcaccaccctggcggaagccgcctccctggccagttcaagcgcgttaaccgacgaactggtcagccatggcgaactgatgtccactctgctatttgtcgagatcctgcgcgagcgcggtatcgccgcccagtggttcgacgtgcgcaaggttatgcgcaccaacgatcgctttggccgcgcggaaccggatatcgccgccttatctgaactcaccgagcagcttctggctccgcgtctggcggaaggcctggtgatcacccagggctttattggcagcgaagcgaaaggccgtaccaccacgcttggccgcggcggcagcgactataccgccgcgctactcggcgaagcgctacacgctacccgcgtcgatatctggaccgatgttccgggtatctataccaccgacccgcgcgttgcgccggcggccaaacgcattgacgttatcgcctttgaagaagcggcggaaatggcgacctttggcgcgaaagtgctgcatccggccaccctgcttcccgccgtacgtagcgatattccggtattcgtcggctccagcaaagagccaaaagcgggcggcacgctggtatgcaaaaatacggaaaatccgccgctgttccgcgcgctggcgctgcgccgcaagcagactctgctgaccctgcacagcctcaatatgctgcactcgcgcggttttctggccgaggtattcagcacgctggcgcgtcacagtatctccgtcgatctgatcaccacttctgaagtgagcgtggcgctgaccatggataccaccggttcgacttcggccggcgacaccctgctcacccagtcgctgctgaccgaactgtcctcgctgtgccgcgttgaggttgaacaggacctggcgctggttgccatcattggtaacgaactgtcgaaagcgtgcggcgtcggtaaagaggtgtttggcgtgctggagccgtttaatattcgaatgatttgctacggcgcatccagccacaatctgtgcttcctggtaccgggtgcggatgccgaaaaagtggtgcagaagctgcatcataatctgttcgagtaa

SEQ ID NO: 175321 - DNA, 936 bp, Klebsiella oxytoca
atggcaagttataaaaagaaagtattttatatgttgggtgtgattccagcattattattaatggtatccttgccgctgagagctgaatcgatatccaatatgcgatattcattttcatttaaaacaaaccgcagcgcatgtatggccaggattaataatgcgccgctactgaataatttttcggctaatagtggaacggtaacggcaggaggagatatcactccctttgccgcaaatgggaaaaatacccttgaactggtgatgggagctacggatccagatcaacctgagatgctttatgcggattcatggtgcgagcttgttgtcttacggaataccacaaaatccagtgaagtagtttcgacgataaagttaacggtcgatggaaataagaaaatcatcgcctcatcttcttctaaccccaatggagcgcaaaatgaaggcgcggttagcgatgttcaatcagctatggataaagagaacgatttatatggtgcgggacgtgagattacgttaagcgggatgcctgaatgggcctgggaaaaagcgcgaaaaatatctgtacaagatctgccagcgataaaagaaacatacactaagatctggcaagcgatgaataagcgggatgtgggtgcgttaaagaccatggctcaaatatcaagtaaagagatggcgttagctacgggattttctgctgattttatctttaagtcatatggtctgccagaaaaggtacaagataccaacctgacgacagcagagttgaaatgggaagataaagaactggtaacgtattgcgatggtcggctattcaggctagcgcggggtatatatcaaaactcgccgttgaaaattataaataaagagggggaagaggtttttacctataatccctaccttgctattattgatggagaagtggtgattgtcaggtga

SEQ ID NO: 175322 - DNA, 789 bp, Klebsiella oxytoca
atgacgtataacggtgtggatgccgccatgcgccataaggtgcggcggcagttacaggaggtggagcagcgctacggcgtcagggtgctctacgcctgcgagtccggcagccggggctggggctttgcttcgccggacagcgattatgatgtgcggtttctctatgttcatccccctgagtggtacctgcgggtggatgcgccgcgcgatgttatcgagctgcccatcgacgctgagctggacgtctgcggttgggagtggcgtaaggcgctgggtctgctgaaaggggcaaatccgacgctgatcgaatggctggactcgccggtggtgtatcagcaggatgatgcgacggttcaggcgcttaagcggctgataccggagtggttttctccggtacgcgcccgctggcattactactcgatggccagaaagaattttcgcggctatctgcagggtgaacaggtgcggttgaaaaagtacttttacgtgctgcgtccgctactggccgtccgctgggttgaggcgggaaaaggggcgccgccgatgcgctttgctgaactgctgacgggaagctgtctggaggcgggcctgcgtcaggaaatcgacgagctgctggcgcgcaaacagcgcgccggcgaggctgaatatggtccgcggcggccattactgcatgcgtttattcagtccgagctgctcagaggcgcgatcccgccagcgctgccggatagccggacagggaatattagggaactggacagattactgatgaccacggtgatggggaagtaa

SEQ ID NO: 175323 - DNA, 1128 bp, Klebsiella oxytoca
atggctaaaaaaatcactatacggaaaggccaactggggcttctctctcgtcagggagattactatcagattctggaagcgggcgagtatcgcctgccgtggttcaacgttcctgaagtgctaatcgttaacagggacggcagcgaagtgccggaggcgctggccgagtatttacggcgctttcaggcggaatggatcgaacagtactgcctggcggcggacctgacggataacgaggccggagcgctctataacaacggcgtgctgcaggaaattctgccgccagcgacgcgtcgactttactgggccgccggtgacgagatgcagctgctacgtctggatacccggcaggttgaggtccccgaggcgatcatgaacgcggtgctgcagccgagacgtcacgggacggtaaaaggtcgcgaagcgatcctgaccgtatcggtgccagcctggcacgtcggggtattgaaagtcgatggtgagacgcagtcgctgctgccgccgggcctgagcgcctactggaagatcaatcacctggtggaagctgaagtggtcgatacccgcctgcaggtgctggaagtcggcggtcaggagattctgaccaaagataaagtgaatctgcgtttaaatctggcggcgaactggcgctacagcgatgtgttgcgggcttttgggcagctgacgaagcccctggaccatctgtatcgcgaactgcagtttgcgctgcgtgaagccgtcggaacgcgaacgctggatgaactactggaagataagcacatcattgatgaggtggtgagcgcgcaggtaaccgagcgcatggcggcatttggtatcgaagtcgcctcgctgggcgtgaaagatattgttttgcccggcgacatgaaagctattctgtcgcagctggtggaggcggagaaatcggcgcaggcgaacgtgatccgccggcgtgaagagaccgcggcgacgcgttcgctgctcaacaccgcgaaagtgatggaaaacaacccggtcgcgctgcgcttaaaagagctggaaacgctggaaagggtggcggagcgtatcgataaaatctcggtctttggcggcctggaccaggtgctgcatggactggtcaatctaaaaggataa

SEQ ID NO: 175324 - DNA, 1581 bp, Klebsiella oxytoca
atgaacaagcgtcgggtggtgattggcgttctcggaacggtactggataaacgcggcaagcgggctaatcgtttaaagaaatggcggcccaccgttgggctatgccagcaggccgattttcctgtcgacaggctggagctcatccaccagccgcacgatgaaagcctggcgcaaaagctgatcgaagatatcgccctgctttcgccgcaaaccgaagtacgcccgcatagggtcgagataaacgatccgtgggattttgaagaggtctacgcggcgtttctcgacttcgccagccgctacagctttgataccgaaaacgaagagtatctggtgcatatcactaccgggactcacgtggcgcaaatctgctggttcctgctgacggaggcgcgctatcttcccgccaatctgctgcagaccggtcctgcgccgaaaggctcaccggatgaagccatcgctgccggtatttactcagttatcgatctggacttaaaccgctatgccgcgctcaccagccgctttcagcgcgagcagcagcagtcggtctctttcctgaaagccgggatagagacgcgcaatgcgacgttcaacaagcttatcgatcgaattgagcgcgtggcgatccgatcgaccgatccgatcctgcttactggcccaacgggcgccggtaagtcctttctcgccagacgtatctatcagctgcgccagtcgcgtcatttagtggcgggaaaatttatggcggttaactgcgccaccctgcgcggcgataacgcaatgtctacgctgtttggccatgtcaaaggcgcgtttaccggcgcggtcacgccgcgcgccggactattacgcgaagccgacggcggcgtgctgtttcttgatgaaatcgccgagctggggctggacgagcaggccatgctgctgaaggccattgaagaaaaaacctttttcccgtttggttcggacaacgaggcgcacagcgactttcagctaatcgccggaacgcatcgcgatatgcagcagtgggtggcggaaggacgctttcgcgaagatctttatgcgcgcatcaatatgtggcgctttgccctccccggcctggcgcagcggcgggaagatattgcgccaaacgtggagtatgaactacggcgactggccagcgaacggcagacgcagatccgctttgataaagaggcccgcgagcgctatctggcctttgcctgctcgccgcaggcgcagtggcgcggcaattttcgcgagctcagctcatccgtggcgcgtatggcgacgctggccgagcaggggcgcattacgcaggccgttgtggaagaggagattatgctgctgaaagagagctggcagctgacgacgtcttctcctgacatagcaatggaaatcgatctcttcgatcgccggcagctggaaacggtgctggaggtctgccagcgcagcgcttcgctctcagaagccggacgcgagctgttcgccgtctcccgtcagaaaaaggccaatcctaacgatgctgaccgcctgcgcaagtatttagcgcgcttcggactcagctgggagcttatccgcagcggaacatga

SEQ ID NO: 175325 - DNA, 942 bp, Klebsiella oxytoca
atgctcgccacgcttacgcggctgttcccattatgggcgctgctgctctcggttatcgcttattacacgccatccacttttactcccgttggcccttgggtcccgacgctgctgatgctgattatgttcggcatgggcgtgcatctgaaagtcgacgactttaagcgcgtgctttcccgccccgcgccggttgccgcagggatttttctccactacctggtgatgccgctcgccgcctggctgctggcgctgatttttcacatgccgccggagctttccgccggcatggtgctggtgggcagcgtcgccagcggtacggcatccaacgtgatgatctttctggcaaaaggcgatgttgcgctctcagtcaccatctcctcggtatccaccctggtcggcgtggtcgcgacgccgctgctgacgcgtctgtacgtggatgcgcatattcaggtagatgtgatgggaatgctgctcagcattctgcaaattgtggtgatcccaattgcactggggctggcggtgcatcatctgctgccgaaagtggtgaaggcggtggaaccgtttctcccggccttttcgatggtctgcattctggcgattatctgcgccgtggtggcaggctccgcgtcgcatatcgcttccgttggttttgtggtgattatcgccgttatcctgcataacactatcggtctgctcggcggctactggggcgggcgactgtttggctttgacgagtccacctgccgcacgctggcgatcgaggtgggaatgcagaactccggccttgccgccgcgttggggaaaatctactttggcccgctggccgcgctgcccggggcgctgttctcggtctggcacaacctgtccggctcgctgctggccggttactggtcagggaagccgattgcggatgaatcgcgtaaaacggaaaaagagagctaa

SEQ ID NO: 175326 - DNA, 273 bp, Klebsiella oxytoca
atggcactcccccgcatcactcaaaaagagatgaccgagcgcgaacagcgcgaactgaaaaccctgctcgaccgcgcgcgcatcgcccatggccgtccgctgaccaacgcggagaccaacagcgtgaaaaaagagtacatcgataaactgatgctccagcgcgaagccgaggctaagaaagcccgccagctcaagaaaaagcaggcttacaaaccggatgcggaggcctcgttttcctggtcggcaaatacgccaacgcgcggcagacgctaa

SEQ ID NO: 175327 - DNA, 873 bp, Klebsiella oxytoca
atgctgcccgactcgtcaacccgactcaataaatacatcagcgaaagcggaatttgctcgcgccgtgaagccgatcgctttatcgaacaaggcaacgtttttatcaacggcaaacgcgccactattggcgaccaggttaaagctggcgacgtagtcaaggtcaatggccggttgattgagccgcgcgaagcggatgatttagtactgattgcgctgaataaaccggttggcatcgtcagcactaccgaagacggggagcgcgacaacatcgttgatttcgttaaccacagcaaacgcgtattcccaatcggccgtctggacaaagactcgcaggggctcatctttctgaccaaccatggcgatctggtgaataaaatcctgcgcgccggtaacgaccatgaaaaagagtatctggtcaccgttgataagccggtgaccgatgagtttattcgcggaatgggcgcgggcgtaccgattctcggcacggtaacgaagaagtgcaaagtgaaaaaagaagcgccttttgtgtttcgcattaccctggttcaggggctgaatcgccagatccgccggatgtgcgaatattttggctatgaagtgacgaagcttgagcggacgcggatcatgaacgtcagcctgacggggatcccgctgggagagtggcgcgatctgaccgacgatgagctgatcgatctcttcaagctgattgagaactcgtcttcagaggcgaaaccgaaggcaaaggcgaagccgaaaacggccggcattaagcgcccggtagtcgcgatggaaaaaaccagcgagaagtcttcccgtccggcgtcgaacggcaaacgctttactgcgcctgggcgtaaaaagaaagggcgttag

SEQ ID NO: 175328 - DNA, 948 bp, Klebsiella oxytoca
atggaaaacagcgacgatattcgtctgatcgtaaaaatcgcccagctctattatgagcaggatatgacccaggcgcagattgcccgcgagctggggatataccgcaccaccatcagccgtctgctgaagcgcggccgcgagcagggcatcgtcactatcgccatcaactatgactacaacgaaaatctgtggcttgagcagcagctgaaacaaaaatttggcctcaaggaggcggtggtggcggcctgcgactcgctgctggaggaggatcagctcaatcttatcggcctgcatggcgcacaattggtcgacaggctgctggagccgggcgatatcgtcggtttctcctgggggcgtgcggtacgcgcgctggtggagaatctgccgcaggccagtcagtcccgtcaggttatctgcgtcccgattatcggcggcccctccggcaagctggagagccgctaccacgtgaatacgctgacctacggcgccgcggcgaagctgaaagcggaatcgcatctcgccgatttcccggcgctgctggataacaaattaattcgcaacggtattatgcaatcccagcactttaaagctattgcatcttactgggataacctggacgtcgcgctggtggggatcggttcaccggctatccgcgacggcgccaactggcatgcgttttacggcagcgaagagagcgacgatctcaacgcccgccaggtcgccggtgatatctgctcgcgcttttacaatattgatggcgcgctggtagaaaccgccatgagcgagaaaacgctgtctattgagatggcgaaactcaggcaggcgcgttattcggtaggtatcgccatgggcgaggaaaaatactccggtattcttggcgccttaaatggacactatattaactgtctggtgacgaatcgagaaaccgccgagtcgctactgaagtaa

SEQ ID NO: 175329 - DNA, 804 bp, Klebsiella oxytoca
atggatacgtggttaaacttaaaagataaaattattattgttaccggtggcgcatcaggaattggcctggcgattgtcgatgaattattagcccagggcgcaaatgtgcagatgagcgatattcacggcggcgataaacatcagctcggtgaaaattattgtttctggccaacagatatttccagcgccagtgaagtgaataataccgtcgacagtattattcagcgttttggccgtattgacggactggttaataacgctggcgtcaacttcccgcgtttattagtcgatgagaaagcaccgtccggccgctatgaattaaatgaagcggcattcgaaaaaatggtcaatatcaatcaaaaaggcgtatttctgatgtcacaggcggtagcccgccagatggttaaacagcgcagcggcgtgattgttaacgtctcgtcggaaagcggcctcgaaggctctgaaggccagagctgttacgccgcgactaaagccgcgctgaatagctttacccgctcatggtcgaaagagttaggtaaacacggtattcgcgtcgtgggcgttgcgccgggcattctggaaaaaaccgggctgcgcacgcctgagtacgaacaggcgctggcctggacccgtaatattaccgtcgagcagctgcgcgaaggctatagcaaaaattcgattccgattggtcgttcgggtcggctcagcgaagtcgctgattttgtttgctatctgctctcagatcgcgccagctatatcaccggagtcaccactaacatcgcgggcggaaaaacgcgcggctaa

SEQ ID NO: 175330 - DNA, 408 bp, Klebsiella oxytoca
atggttaacgtcatcttctgcgcccacggccagctggcctgcgccatgctcgactcggtgcgcatggtttacggcgatgtcaacgtcagcgccgtggagtttgtaccgggtgaaaacgcgggcgacatcgctggtaagcttgaaaagttggtaagtactcacaaagacgaagagtggcttattgccgtcgatttacagtgcggcagcccgtggaatgccgccgccgggctagcgatgcgcaacccgcagctccgggtcatcagcggcctgtcgctgccgctggctctggagctggtcgataatcagcaaacgatgaatgcagaagcgctgtgccaacacctggaacttatcgccagccagtgctgcgtcacctggcggcaaccggaaaccgttgaggaggatttctga

SEQ ID NO: 175331 - DNA, 495 bp, Klebsiella oxytoca
atgaacattacgctcgcgcgcattgacgaccgtttgattcacggccaggtcaccaccgtttggtcaaaagtggccaacgcccagcgcattattatctgtaatgacgacgtgtataacgacgacgttcgccgcacgctgcttcgccaggccgcgccgccgggcatgaaggtcaatgtggtgaatatcgagaaagccgtcgccgtttatcacaacccgcaatatcaggacgaaacggtcttttatttattcacaaacccgcaggatgtattaaccatggtgcagcagggggtgaaaatagccaccctgaatattggcggcatggcctggcgaccgggtaagaaacaattaaccaaagcggtgtcattagacgcagcggatattaatacctttcagcagttagataagctgggggttaaacttgatttacgcgtcgtagcctcagatccgtcggttaatattctcgataaaatagcagagcagtccgttacagaataa

SEQ ID NO: 175332 - DNA, 798 bp, Klebsiella oxytoca
atggaaataagtaccctacaaataatagccatatttattttttcctgtattgccgggatgggcagcgtgctggatgaattccagacgcaccgtccattaatcgcctgtaccgtgattggcttaattctcggcgatttaaaaaccggaattatgctcggcgggacgctggagctcatcgcgctcggctggatgaacgtcggcgcggcgcagtctccggattcggcgttagccagcattatttccgccatcctggtgatcgttggccagcaaagcatcgctaccggaatagcgattgcgctgccggtcgcggccgcaggccaggtactcaccgtgttcgcccgcaccattaccgtggtgttccagcacgcggcggataaggccgcggaagaggcgcgcttcagaacaatcgatctgctgcacgtgtcggcgctgggcgttcaggcgctgcgcgtcgccattcccgcgctggtggtttcgctgttcgtcagcgcggatatggtcagcaatatgctcagcgccatcccggaattcgtcacccgcggtctgcaaatcgccggcggttttatcgtggtggtcggctacgccatggtgctgcgcatgatgggcgtgaagtatctgatgcctttcttctttctcggcttcctcgcgggcggctatctcgactttagtctgctggctttcggcggcgtgggggtcatcatcgcgctgatttatatccagctcaacccgcagtggcgtaaacctgaaccgcaggccgccgccccctcttccaccgcccttgaccagcttgacgactga

SEQ ID NO: 175333 - DNA, 825 bp, Klebsiella oxytoca
atggaacagaaaaaaattacccaaggcgacctggtgagcatgtttctgcgatccaacctgcagcaggcgtcattcaacttcgagcgtatccacgggcttggtttctgctacgacatgatcccggccatcaagcgcctctacccgctgaaggaggatcaggttgccgcgctgaagcgccatctggtgttcttcaataccactccggcagtctgcgggccggttattggcgtgaccgtcgcgatggaggaagcgcgggccaacggcgccgctattgacgatggcgccatcaacgggatcaaagtcggcctgatgggaccgctggcaggcgtgggcgacccgctggtatggggcacgctgcggccaattaccgccgccctcggcgcctcgctggcgctctccggaaatattcttggtccgctgctgttcttctttattttcaacgcggttcgtctggcgatgaagtggtacggactgcagcttggcttccgtaaaggggtcaatatcgtcagcgatatgggcggtaacctgctgcaaaaactgaccgaaggcgcctccattcttggcctgtttgtgatgggcgtgctggtcaccaagtggaccaccatcaacgtcccgctggtggtctcgcaaacgccgggcgccaacggctcaaccgtcaccatgaccgtacaaaacatcctcgatcagctttgccccggcctgctggctctgggcctgacgctgctaatggtgcgcctgctcaataagaaagtgaacccggtctggctgattttcgccctcttcggtttggggattatcggtaacgcactgggcttcctgtcctga

SEQ ID NO: 175334 - DNA, 1233 bp, Klebsiella oxytoca
atgcaaacaacaacagccctgcgcctgtacggcaaacgcgatctgcgcctggaaacctttgcacttccggcgatgcaggatgatgaaattctcgcccgggtggtcaccgacagcctgtgcctctcttcgtggaaagaggcgaaccagggcgaggaccacaaaaaggtgcctgacgatgtggcgactaacccgatcatcatcggccatgagttctgcggagagatcatcgccgtcggcaaaaaatggcagcacaagtttcacgctggccagcgctatgtgattcaggccaatctgcagctaccggatcgcccggactgccccggttattccttcccgtggatcggcggcgaagccacccacgtggtgatccctgacgaggtgatggcgcaggattgcctgctcacctgggaaggcgatacctggtttgaaggttcgctggtggagccgctttcctgcgtaatcggcgcgttcaacgccaactatcatctgcaggaaggcagctataaccatgtgatgggcattcgcccgcaggggcgcaccctgatcctcggcggcaccggcccgatgggtctgctggctatcgactacgcgctgcatggcccgatcaacccggcgctgctggtggtcaccgacaccaataagccaaaactcagctatgcgcgccagcactatccctccgagccgcaaacgctgattcactatctggatgggcacgacgccagccgcgaaacgttgatggcgctctccggcggccacggttttgacgatatttttgtcttcgtccctaacgaacagctcatcactctggcatcctcgctgctggccccggacggctgcctgaactttttcgccggcccgcaggataagcagttcagcgcgccgatcaatttttacgatgtgcattacgccttcactcactacgtcggcacctccggcggcaataccgacgatatgcgcgccgccgtagcgctgatgcaggcaaaaaaagtccagactgcaaaagtggtgacccatattctggggctgaatgcggcgggcgagaccaccctggatttaccggcggtgggcggcggtaagaagctggtttataccgggaaaaatttcccgctgacgccgctgggagacattcgcgacccgcagctggcggcgattatggaacgtcaccacggtatctggtcaaaagaggcggaagagtatctgctggcccacgcggaggatattgctcatgattaa

SEQ ID NO: 175335 - DNA, 810 bp, Klebsiella oxytoca
atgattaatcgcgatacgcagctatgcatgtcgctggccggtcgcccgggcaacttcggtacccgcttccataactatctgtatgaaaaactcgggctgaattatatctataaagcctttaccacccaggatattgccgcagcggtgaagggcgttcgcgcattgggcatccgcggctgcgcggtctcaatgccgtttaaagagagctgcataccatttctcgacgctcttgatccttcggcgaaggcgattgattcggtcaacaccatcgtcaacgacgacggcaggctaaccgggttgaataccgactacatcgcggtgaaaagcctgattgacagccatcagctcgactcctctgccaaagtgatgatccagggcagcggcgggatgggcaaagcggtcatcgccgcctttcgcgatgccggtttccgcgatgtgattatcgccgcccgccatcgcgatcgtggactggtgctggcaaagcagtacggttttcaatggcagccaaagccggaagggatcgcggcggatattctggttaacgtcacgccgctcggcatggcgggcggtgcggaaagcgaaaccctggcctttagcccgacgatggtggaacgggccgacgtggtatttgacgtggtcgctctgccgccggaaaccccgctcatcaaactggcgaagaagcgggacaaacacgttatcagcggcgcggaggtgattgccctgcaggcggtggagcagtttgcgctctacaccggcgtgcgtccggacgcggcgctggtcgctgaagccgcggcctttgccagaggataa

SEQ ID NO: 175336 - DNA, 690 bp, Klebsiella oxytoca
atggaactgctgctattgagtaactcaacgctgccgggcaaagcctggctggaacatgcgctgccgaccattgccgggcagctaaatggccgccgttccgcggtattcatcccttttgccggggtgacgcaaacctgggatgattacaccgcgaaaaccgccgccgtcttcagcccaatgggcgttatggttaccggtattcacagcgtcgcggacccggtttcggcgattgagaacgcggagatagttatcgtcggcggcggcaatacctttcagctgctgaaagagtgtcgcgaccgcggcctgctggcgccgatggtggatgtagtgaagcgcggggcgctgtatatcggctggagcgcgggcgctaaccttgcctgcccgacaattcgcaccaccaatgatatgccgattgtcgaccctaacggtttttctgcactggggctgtttccgctgcaaattaacccgcacttcaccaacgcgctgccggaaggccacaaaggggaaactcgcgaacagcggattcgcgagctgctggtggttgcgccagagttgacgattatcggcctgccggaaggcaactggatacaggtgacgcagggccacgccactctcggcggcccgaatccgacgctggttttcagagccggagaggaagcggtaaccctgaacgcaggccatcgtttctga

SEQ ID NO: 175337 - DNA, 1632 bp, Klebsiella oxytoca
gtgttaactctgctacacctgttgtccgccgtcgctctactggtgtggggcacccatattgttcgtaccggcgtgatgcgcgtctacggcgctcgcctgagaagtgtactcagcagcagcgtggagaaaaaaccgctcgccttctgcgcggggatcggggttactgcgctggtccagagcagcaacgccaccaccatgctggtcacctcttttgtcgcccaggatctggtggcgttagcccctgcgctggtgatggtgctgggcgctgacgttggtaccgcgctgatggcgagggtgctgaccttcgacctgtcctggctttcgccgctgctgatttttatcggcgtcattttctttcttgggcgcaagcaaacgcgtgcgggccagctcgggcgcgtggggattggcctgggcttgattctgctggcgctggagctgatcgttcaggcggtgcatcccatcacccaggctaacggcgtgcaggtgattttcgcctcgttgaccggcgatattatgctggatgcgctgatcggcgcggtatttgccatcatcagctattcaagcctggcagcggtgctgctgaccgctacgttaaccgccaccggcgtgatttcgttcccggtggcgctgtgcctggtgattggcgccaacctcggatccgggctgctggcgatgctaaacaacagcggcgctaatgccgccgcgcgccgcgttgcgctcggcagcctgttgtttaagctggtgggtagtctgattatcctgccgtttgtccatctgttggcaaacgttatggatgagcttccgctgcaaaaatccgaactggttatctatttccacgtcttctacaacctgatccgctgtatcgccatggtgccgttcgccgggccgatggctaacctctgtaagcgactgattcgcgatgagccggagctggatgcacgactgaagccaaagcatcttgatacttcagcgctggacaccccggctctggcgctggctaacgccgcccgcgaaaccctgcgtatcggcgatgccatggagcagatgctggaaagcctgcataaagtgatgcacggtgaaccgcgtgaagagaaagagctgcggcggctggcggacgatatcaacgtactttacaccgcgattaagctctatctggcgcggatgccaaaagaggagctggccgatgaggaatcccgccgctgggcggaaattatcgaaatggcgctcaacctcgagcaggcttcagatatcgttgaacgaatgggcagcgaaatcgccgataaatcgctggccgcgcggcgcgcgttctccatggaggggttgaaagagctggatgcgctctacgatcagctgctcagcaatctacagctggcgatgtcggttttcttttccggcgacgtaccgagcgcccgccgcttgcgccgtagcaaacaccgttttcgcattatgaaccgtcgttactcgcatgctcacgttgatcgcctgcatcagcaaaacgtgcagagtatcgaaaccagtacgctgcacctggcgctgctgggcgatatgaagcgtctgaactcgctgttctgctcggtagcctatagcgtgatggagcagccggatgaggacgatgagcgcgatgattattaa

SEQ ID NO: 175338 - DNA, 3684 bp, Klebsiella oxytoca
gtgagcagcaaagttgagcaactgcatcagcagttaaaagaacgtattctggttctggatgggggcatgggcaccatgatccagagctatcgtctgagtgagcaggacttccgcggcgagcgttttgccgactggccgtgcgacctgaagggcaacaacgacctgctggttctcagcaagccggaagtgatcaccgccatccacgatgcctattttgcggccggggcggatatcattgaaaccaacacctttaactcgacgaccatcgcgatggcggattaccagatggaatccctgtcggcggaaatcaactttacggcggcgaaactggcccgcgccagcgccgatgcctggaccgcgcgcacgccggaaaaaccacgctacgtggcaggcgttctcggcccgactaaccgcactgcgtccatttctcctgacgtcaatgacccggcctttcgcaacatcacctttgacgggctagtggaagcctatcgtgaatccaccaaagcgctggtggaaggcggggcggatctgattctgattgagacggtgttcgataccctcaacgccaaagcggcgatctttgcggtcaaagaggagtttgaagcgctgggggtcgatctgccgattatgatctctggcaccatcaccgacgcctccgggcgcacgctgtccggccagaccaccgaagccttttataactcgctgcgccacgccgatgcgctcactttcggcctcaactgcgctctggggccggacgaactgcgccagtacgtgcaggagctgtcgcgtatcgccgaatgctacgttaccgcccacccgaacgccggcctgccgaacgcctttggtgaatacgatctggacgccgacacgatggcgacgcaaattcgcgaatgggcggaggccggcttcctgaatattgtcggcggctgctgcggcaccacgccggaacatatcgccgccatgagccgcgcggtggccggcctgccgccgcgccaactgccggagatccccgtcgcctgccgtctttccggccttgagccgctgaatatcggcgatgacagcctgtttgtgaacgtcggcgaacgcaccaacgttaccggctcggcgaaattcaaacgcctgattaaagaagaaaaatataacgaagcgctggatgtggcgcgccagcaggtggaaagcggcgcacagattatcgatatcaatatggatgaggggatgctcgacgccgaagcggcgatgacgcgtttcctcaacctgattgccggtgagccggatatcgcccgcgtgccgattatgatcgactcctccaaatgggaggttatcgaaaagggcctgaagtgtattcagggcaaaggcatcgttaactccatctcgatgaaagagggcgttgagccgtttatccagcatgcgaaaaaggtgcgccgctacggggccgccgtcgtggtgatggcctttgatgaagtgggtcaggccgatacccgcgaacgtaaaattgaaatttgccgccgggcgtacaccattcttaccgaagaggtgggcttcccgccggaagacatcatcttcgacccgaatattttcgccgtggcgaccggaattgaagagcacaacaactatgcccaggactttatcggcgcctgtgaagatatcaaacgcgaactgccgcacgcgctgatctccggcggcgtctctaacgtgtcgttctccttccgcggtaacgacccggtgcgcgaggcgattcacgcagtattcctctactacgccatccgtaacggcatggatatgggtatcgtcaacgctggacagctggcaatttacgacgaccttcccgccgagctgcgcgacgcggttgaagatgtgattctgaaccgccgcgatgatggcaccgaacgcctgctggatctggcggagaaatatcgcggcagcaaaactgacgataccgccaacgcccagcaggcggaatggcgcagctgggacgtcaaaaaacgtctcgagtactcgctggttaaaggcattaccgaatttattgagctcgataccgaagaagcccgacagcaggccgcgcgcccgatcgaggttatcgaaggaccgctgatggacggtatgaacgtggttggcgatctgttcggtgaagggaaaatgttcctgcctcaggtggtgaaatccgcccgcgtaatgaagcaggcggtggcctacctcgaaccctatattgaggccagcaaagagaaaggttccagcaacggcaagatggtcatcgccaccgtgaagggtgacgttcacgatatcggcaagaatattgtcggcgtcgtgctgcagtgtaataactatgaaatcgtcgatctgggcgtgatggtgcctgcggataaaatcctgaaaaccgcccgcgaggttaacgccgacctgattggcctctccgggctgattacgccgtcgctggatgagatggtcaacgtggcgaaggagatggagcgtcagggctttactattccgctgctgatcggtggcgcaaccacctcgaaagcgcatacggcagtgaaaatcgagcagaactacagcggcccgacggtctacgtgcagaacgcctcgcgcaccgtcggcgtggtcgccgccctgctgtccgatagccagcgcgatgattttgtcgcccgtacccgcaaagagtacgaaacggtgcgtattcagcacggacgtaaaaagccgcgcactccccccgtcacgctggaagccgcgcgcgataacgacctggcctttgactgggcaagctacaccccgccggtggctcatcgtctgggcgtgcatgaggtggaagccagtattgaaaccctgcgtaattatatcgactggacgccgttctttatgacctggtcgctggccggtaagtatccgcgcattctggaagatgaaatcgtgggcgaagaggcacagcgcctgtttaaagacgccaacgaactgctggataagctcagtgccgggaaggcccttaatccacgcggcgtcgtggggctgttcccggctaaccgcgtcggcgacgatattgaaatctatcgcgatgaaacccggactcacgtgctgacggtggggcatcatctgcgccagcagaccgagaaagtcggctttgccaactactgcctggcggattttgtcgcgccgaagctgtcggggaaggcggactatatcggcgcctttgcggtgaccggcggccttgaggaagacgcgctggccgacgcctgggaggcacagcacgatgactataacaagattatggtgaaggcgattgccgaccgtctggcggaagccttcgccgagtatctgcatgagcgggtgcgtaaggtctactggggctatgcggcgaacgaaaacctcagcaacgaggagctgatccgcgagaattaccagggaatacgcccggcgccgggctatcccgcctgtccggagcacaccgaaaaggcgaccatctgggagctgctggaggtggaaaaacgtaccggcatgaagctgacggaatcctttgccatgtggcccggcgcgtcggtttccggctggtacttcagccatccggacagtaagtacttcgcggtagcgcaaattcagcgcgatcaggtggaggactatgcgttacgtaaggggatgagcgtggcggaagtggagcgctggctggcgccgaacctcggttacgatgccgactga

SEQ ID NO: 175339 - DNA, 828 bp, Klebsiella oxytoca
atggcgacccccgctcccgcaaaacgcggcagaaaacctgccgcctccgccgccgctccggctggcgggcaagttcagtccctgacccgcggcctgaagctgctcgaatggattgctgaatctcacggcagcgtggcgctgaccgaactggcccagcaggccggcttgcctaattccaccacccaccgcctgttaaccacgatgcagcagttgggttttgttcgtcaggtcggtgaactgggccactggtcggtgggcgcccatgctttcgtcgtcggcagcagcttcctgcaaagtcgtaacctgttggcgatcgtccatccgattttgcgtcagctgatggaagactccggcgaaacggttaacctcgcggtgctggacccgagcgatcatcaggcgatcattatcgatcaggtgcagtgtacccaactgatgcgtatgtcggcgccgattggcggtaagctgccgatgcacgcttctggcgccggtaaggcgtttttgtcgcagttgagtgaagatcaggtcaccggcctgctgcaccgtcaaggtctgcacgcttacacccacgctacgctggtatcgccggtgcatctgaaagaggacctggcccagacgcgtaagcgcggctattcgtttgatgacgaagaacacgcgctaggactgcgctgcgtagcgtcatgcatttatgatgaacatcgtgagccgttcgccgctatctctatttccgggcccatttcccgcattaccgatgaccgcgtgaccgagttcggcgccatggtgatcaaagcggcgaaagaagtgacgctggcgtatggcggagtgcgataa

SEQ ID NO: 175340 - DNA, 414 bp, Klebsiella oxytoca
atgagcgatctgaaatcctactggcaggataaatacccttctgctttttgctggtctttcggcgattcagcggagctggccgacgagctggcggccctggtcatcgcggggaagaagcgcggcacctgcggttcgcttgccagctatcagcaggagcagccgcccgtgacgccgggggcatatcacattgtgctggacggccagggcaaagccgtctgcgtgatacgtaccctgatgctcaggctgatccggtttaatgaaatgagtcctgagctcgccgcgctggagggcgaaggtgatttgagcctcgcttactggcaatcggcgcatcaggcattctttgaacgcgaaggcacctgggcgccggatatggagctggtgtacgaagaatttgcggttatagaggccgcctga

SEQ ID NO: 175341 - DNA, 1743 bp, Klebsiella oxytoca
atgacacgtggcctggaattattgattgcgcaaactattttgcagggtttcgacgcccagtacggtcgttttcttgaagttacttccggcgcccagcagcgctttgaacaggccgactggcatgccgtccagcaggcaatgaagcagcgtatccatctctacgatcaccatgtcggcctggtcgtcgagcagctgcgctgcattaccgatggcaaaaataccgatagcgactttttgctgcgggtaaaagaacactatacccgcctgctgccggattaccctcgcttcgaaattgcggagagctttttcaattccgtctattgtcggttgtttgaccaccgctcgctgactcccgagcggctttttattttcagctcgcagcccgagcggcgcctgcgctctataccgcggccgctggcgaaagatttctttcccgagcgcggctgggacacgttattacgcaaagtgttatccgatcttcctctccgcctgccgtggcaaaacagagcgcgcgatatcgggtatatcaccgtttgcctgcaggaagcgcttggcggcgagctgctctcccggtcgtatctacaggtggcgaatgaacttttttaccgcaataaggcagcctggctggtaggcaaattggttacgccgatggccacgctgccttttcttctgccaatccatcgtaccgatgaaggagaactgtttgtcgatgcttgcctgacgacgcatgccgaagccagtatcgtttttggcttcgcccgctcctattttatggtttacgcgccgcagcccggcgcgctggtcgagtggctgcgcgagattctgccgggtaaaaccaccgccgaactgtacatggcgattggctgccagaagcatgcgaaaacggaaagctatcgggaatacctgcactatctttcccgcagcaatgaacaatttgttgaagcgccggggatccgcgggatggtcatgctggtgtttaccttgccgggctttgaccgggtatttaaggtcattaaggaccgcttcgcgccgcagaaagagatgactgccgctcacgtgcgcgcctgttaccagctggtcaaagagcatgaccgcgtgggacggatggccgacacccaggagtttgagaacttcgtgctggagaaacggcaaattgcgcccgagctgatggccctgttacaaaccgaagccggtgggaaaattaccgacctcggcgatcggattgcgatcagccatctgtatatcgagcggcggatggtgccgctgaatatctggctggagcaggttgacgggcaggcgctgcgcgatgcagtcgaggagtacgggaacgccattcgtcagctggctgccgccaacattttcccgggcgatatgctatttaagaattttggcgttacgcgtcacggccgggtggtgttctacgattacgatgaaatttgctatatgacggaggtgaatttccgcgagatcccgccagcgcgctatccggaagatgagcttgccagcgagccctggtacagcgtctcgccgggcgatgtttttccggaggagtttcgccactggctgtgcgccgacccgcgtatcgggccgctatttgaagagatgcacgccgacctgctgcgcgccgactactggcgggagctgcaaaaacgtattcgcaacggccacgtggaagacgtctacgcctatcgtcgccgtcagcgcttttgcgtgcgctatggcaacctgcaacaggcagggtaa

SEQ ID NO: 175342 - DNA, 1320 bp, Klebsiella oxytoca
atggagcatctgcacatgaaaacccgtacccaacaaatcgaagaattaaacaaagagtggaccaacccgcgctgggaaggcattactcgcccatacagcgccgaagacgtggtgaagctacgcggctccgttaacccggaatgtacgctggcgcagctgggcgcggcaaagatgtggcgactgctgcacggcgaagcgaaaaaaggctacgtcaacagcctgggcgcgctgaccgggggccaggcgttacagcaggcgaaagcgggcattgaagcgatttacctttctggctggcaggtcgcggcggacgccaacctggcctccagcatgtatccggatcaatcgctctatccggctaactcagtaccggccgtggtcgatcggatcaataacaccttccgccgcgcggatcagatccagtggtctgcgggtattgaaccgaacgatcagcgttataccgattatttcctgccgatcgtcgccgatgcggaagcgggatttggcggcgtgcttaatgcgtttgagctgatgaaatcgatgattgaggccggtgcagcggccgtacacttcgaggatcagctggcttcggtgaagaaatgcggccatatgggcggcaaagtgctggttcccacgcaagaagcgattcagaaactggttgccgcgcgtctggcggcagacgtaatgggcgtgccaacgctggtgattgcccgcactgacgccgatgcggcggatttaattacctcagactgcgatccttacgatcgtcagttcattaccggcgaccgtaccagcgaaggtttcttccgcacccatgccggtatcgaacaggcgatcagccgcgggctggcctacgcgccctatgccgacctggtgtggtgtgaaacctccaccccggaccttgagctggcgaagcgctttgccgatgcgatccatgcgaaatatccgggcaaactgctggcctataactgctcaccgtcgtttaactggcagaaaaagctggatgataaaaccattgccagcttccagcagcagctggcggatatgggctacaaatatcagttcatcaccctggccggtattcacagcatgtggttcaacatgttcgatctggctcacgcttacgcccagggcgaggggatgaagcactacgttgagaaggttcagcagccggaattcgcggcggcgaaagatggctatacctttgtctcccatcagcaggaggtcgggactggctacttcgataaggtcaccaccattatccagggcggaacctcatcagtaacggcgttaaccggctctacagaagaagatcagttctga

SEQ ID NO: 175343 - DNA, 1602 bp, Klebsiella oxytoca
atgacgcagcaggcgacaattactgacgaactggcttttagccagccatatggcgaccaggagaagcaaatcttaacgcctgaggcagtcgaatttttgactgaactggtgagccgctttacgcctgagcgcaataaactcctggcggcgcgtctccagcagcagcaggaaattgatgacggtaagctacctgattttatttcggaaacagcttccattcgtaatggtgattggaaaattcgcggtatccctgtggatttgcaggatcgccgggtggaaatcaccggtccggtagagcgtaagatggtgatcaatgcgctgaatgcgaacgtaaaagtctttatggcggatttcgaagactcactggcgcctgaatggagcaaagtcattgaggggcaaattaacctgcgcgatgcggttaacggcaccatcagctataccaatgaagctggcaaaatctatcagctcaaaccgaacccggcgctgctgatctgtcgcgtgcgcggcctgcatctgccggaaaaacacgtgacatggcgcagggaagccattcccggcagcctgttcgactttgctctttatttcttccataactacaaagcgttactggaaaaaggcagcgggccctatttctatctgccgaaaacccaggcctggcaggaagccgcgtggtggagtgaagtctttagctttacggaagaccgttttgagctgccgcgcggtactatcaaagccacgctgctgattgaaacgctgcccgccgtattccagatggacgaaatcctgcatgccctgcgcgaccatattgtgggtctgaactgcgggcgctgggactatatcttcagctatatcaaaacgctgaagaatcacccggaccgcgttctgccggatcgtcaggtggtgacgatggataagccattcctcagtgcctactcacgattgttaattaagacctgccataagcgcggcgcatttgcgatgggcggcatggcggcctttattccgagcaaagatgctgagcggaacaatcaggtgctgaacaaggtaaaagcggacaaatcgctggaggcgaataacggccatgatggcacatggattgcgcatcccggtctggctgacaccgcgatggccgtctttaatggcgtgctcggtgagaacaaaaatcagctatttgtcacccgtgaagacgatgcgccaattaccgctgaacagctgctggccccctgcgagggcgaacgaaccgaagagggcatgcgcgccaacattcgcgtggcggtgcagtacatcgaggcgtggatttccggcaacggctgcgtaccgatttatggcctcatggaggatgcggcaacggccgagatctcacgtacctcaatctggcagtggatccatcacgaaaaaacgctcagcagcggtcaaccggtaactaaagcgctgttccgccagtggctggccgaagagatgcgggtgattcaggacgaactgggcgagcaccgctacagcagcgggcgctttgacgaggccgcgcgcctgatggaacagatcaccacttccgatgagctcattgacttcctgactttgccgggttaccgcctgctggcctga

SEQ ID NO: 175344 - DNA, 930 bp, Klebsiella oxytoca
atgccaattcgggtgcaggacgagctaccggccgtcaatttcttgcgtaatgaaaacgtctttgtgatgacgacaactcgcgcgacgactcaggaaatccgcccgctgaaggtgctcatccttaatctgatgccgaagaaaatcgagactgagaatcagtttttgcgactgctttccaactctcctctgcagcttgatatccagctgctgcgcatcgatgcccgcgaatcgcgtaataccccagcggaacacctgaacaacttctactgcaactttgaagatatttgcgatcagaattttgatggcctgattgttaccggcgcgcccttaggtttggttgagtttaatgacgttgcctactggccgcagatcaaacaggtgctggaatgggctaaagatcatgttacctcaacgctatttgtctgttgggctgtacaggcggccctcaatatcctctatggtatccctaaacagacgcgctctgagaagatttccggcgtctacgaacaccatatcctgcaaccacatgctttattaacccgcggctttgacgatagctttctcgcgccgcactcgcgctatgccgattttccggcggcgctgatacgcgactacaccgacctggaaattctggcggaaacggaagagggcgatgcctacctgttcgccagcaaagacaagcgtatcgccttcgtgaccggtcatccagaatatgatgcaaacaccctggccagcgagttcttccgcgatgtggaagcgggcctcgatccccaggttccacacaattatttcccgcaaaacgatccgcagaacaaaccgcgcgccacctggcgaagccatggcaatctactgtttatcaactggctgaattattacgtctaccagatcacgccatacgatctacgccatatgaatccgactctggattaa

SEQ ID NO: 175345 - DNA, 438 bp, Klebsiella oxytoca
atggttattagtatccgccgttcacggcatgatgaagggaaaaaactgattgcgatctggtgtcgatcggtcgatgcaacgcacggttttttatcaaaagcatatagagcggagctggaagagctggtgagctcattcttacccgaagcgccgctgtgggtagcagtaacggagaaaaatgagccggtcgcctttatgcttctaacgggggaacatatggatgcgttatttgttgatcctgccgttcgcggctgtggcgtgggtaagcttttgattaaacacgccttgacgttagcgcccagactgacgactaacgttaacgagcagaatgaacaagcggtcggattttataagaaaatgggctttaaggtgacaggccgttctgaaacggacgatcttggaaaaccgtatccgttattgaatttggtacatgagtaa

SEQ ID NO: 175346 - DNA, 168 bp, Klebsiella oxytoca
atggtggtgggggaaggattattcgtcgcttcgctcctcacccttcgggccgttgcctgcggcaacgttgtctcgctgacgctcgactcgaaccttaatcgaagcttctcatccttccctgcatcggaagaatatatggcaatgtgctttgagcaggtagcggtgtaa

SEQ ID NO: 175347 - DNA, 168 bp, Klebsiella oxytoca
atggtggtgggggaaggattattcgtcgcttcgctcctcacccttcgggccgttgcctgcggcaacgttgtctcgctgacgctcgactcgaaccttaatcgaagcttctcatccttccctgcatcgggagaatatatggcaatgtgctttgagcaggtagcggtgtaa

SEQ ID NO: 175348 - DNA, 678 bp, Klebsiella oxytoca
atgcacttcctgaatatgttcttctttgacatctatccgtatatcgccgggacggtatttctggtcggcagctggctacgttacgactatgggcagtacacctggcgtgcggcctccagccagatgctggaccgtaaagggatgaatctggcctcgaacctgttccatattggtattctgggaatttttgccggtcattttctcggcatgctgacgccccactggatgtacgagtcattcctgccggtcgacgtgaagcagaagatggcgatgatcgcgggcggcgcctgcggcgtcatgacgctggtgggcgggctactgttgctgaaacgccgtctgctgagcccccgcgtgcgcgccaccaccaccggagcggatattctgatcctctccctgctgatggtacagtgcgctctgggtctgctgactattccgttctccgctcagcatatggacggtagcgaaatgatgaagctggtgggctgggcgcagtcggtggtgaccttccacggcggggcttcgcagcatctggacggcgtggcgtttattttccgcgtgcatctggtgctggggatgacgctgtttgtgctgttcccgttctcccgtctggtgcatatctggagcgcgccggtcgagtacctgacgcgcaaataccagattgttcgcgcccgtcgctga

SEQ ID NO: 175349 - DNA, 711 bp, Klebsiella oxytoca
atgattgaactcgtcattgtgtcgcgccttcttgagtaccctgacgctgccttatggcagcatcagcaggagctgttcgacgctattgcctcttcggaaaagctcgcgccggaggatgcccataagctgagcgttttcctgcgcgacctgaccgcccaggatgtgctggacgcgcagtctcgctacagtgagctgttcgatcgcggccgtgcgacctcgctgctgctgtttgagcacgtgcacggcgaatcccgcgatcgcggccaggcaatggtcgacttgatggcgcagtatgaacgccacggtctgcagctggatagccgcgaattgccggatcatctcccgctgtatcttgagtatctggcgcagctgccggaggcggaagcgcgcggcggattgcaggacgttgcgccgattctcggtctactgagcgctcgcctgcagcagcgcgatagccgctacgcggtactgtttgagctgctgctcaagctggcacacgcccaggtagatagccagaaagtggcggaaaaaatcgccgatgaggcccgcgacgatacgccgcaggcgctggacgccgtctgggaagaagaacaggtgaaattctttgccgatcagggctgcggcgagtcggagatctccgctcaccagcgtcgttttgccggagccgttgccccgcaatatttgaatatctctaacggaggacagcaataa

SEQ ID NO: 175350 - DNA, 1536 bp, Klebsiella oxytoca
atgaaaattcgttcacaagtcggcatggtgctgaatctcgataagtgcatcggctgtcatacctgttcagtcacctgtaaaaacgtctggaccagccgcgagggtatggagtacgcgtggttcaacaacgttgaaagtaagccgggcgttggtttcccgaacgactgggagaatcaggaaaagtggaagggcggctggatccgtaagatcaacggcaagctgcagccgcgcatgggcaaccgcgcgatgctgctgggtaaaatctttgctaacccgcatttgccgggcatcgacgactattacgagccctttgattacgactaccagaatctgcacaacgcgccggaaagcaaacatcagccgatcgctcgcccgcgctcgctgatcaccggccagcggatggataaaatcaccagcggtccgaactgggaagagattctgggcggcgaatttgaaaaacgcgccaaagaccagaacttcgaaaacatgcagaaggcgatgtacggccagttcgaaaacacctttatgatgtatctcccgcgcctgtgcgaacactgtctgaacccggcgtgcgtcgcgacctgcccgagcggcgcgatctataaacgtgaagaagacggcatcgtgctgatcgaccaggacaagtgccgcggctggcgcatgtgcatcaccggttgcccgtacaagaaaatctatttcaactggaagagcggcaaatcagagaagtgcattttctgctacccgcgtatcgaatccgggatgccgaccgtctgttcggaaacctgcgtggggcgtattcgctacctcggcgtgctgctgtatgacgcggacgcgattgaaaatgccgccagcacggagaatgagaaagacctgtatcagcgtcagctggacgtgttcctcaacccgaacgacccgaaagtgattgagcaggcgctgaaggacggcgtgccgcagggggttatcgaagccgcccagcagtcgccggtgtacaaaatggcgatggactggaagctggcgctgccgctgcatccggaatatcgcaccctgcctatggtctggtacgtgccgcctctgtcgccgattcagtcagccgccgatgcgggtgaactgggcagcaacggtattctgccggacgtcgaaagcctgcgtatcccggttcagtatctggcaaacctgctaaccgcgggcgatacccagccggtgctgctggcgctgaaacgcatgctggcgatgcgccacttcaaacgcgcggaaaccgtagacggcgtactggatacccgggcgctggaagaggttggcctcactgaagcccaggcgcaggagatgtatcgctatctggctatcgccaactacgaagaccgtttcgtggtgccgagcagccatcgcgagcaggcccgcgatgctttcccggagaaaaacggttgcggcttcaccttcggtgacggctgccacggttctgacagccagtttaatctgttcaacagccgccgtatcgatgctatcgacgtcaccagcaaaacggagccgcacccatga

SEQ ID NO: 175351 - DNA, 3744 bp, Klebsiella oxytoca
atgagtaaattcctggaccggtttcgctacttcaaacagaagggtgaaacctttgccgatgggcacggccagcttctaaaaaccaaccgggactgggaggatggataccgtcaacgttggcagcatgacaaaattgtgcgctccacccacggtgtcaactgcaccggctcatgcagctggaagatttatgtcaaaaatggtcttgtcacctgggaaacccagcagaccgactatccgcgcacccgtccggatatgccaaaccacgagcctcgcggctgcccgcgcggcgccagctactcctggtatctttacagcgctaatcgcctgaagtacccgctgatgcgcaaacgcctgatgaaaatgtggcgtgaagcgaaagtacagcacagcgatccggttgacgcatgggcctcgattattgaagatgccgacaaagcgaaaagctttaagcaggcgcgcggccgcggcggtttcgtgcgttcgtcctggcaggaagtgaacgagctgattgccgcctctaacgtctataccgtcaaaacctacggcccggaccgcgtagccggcttctcgcccatcccggcgatgtcgatggtctcctatgcctccggcgcgcgctatctgtcgctgatcggcgggacctgcctgagcttttacgactggtactgcgacctgccgcctgcatcaccgcagacctggggcgagcagaccgacgtaccggaatctgccgactggtacaactccagctatatcattgcctggggatccaacgtaccgcagacccgtaccccggatgcccacttcttcaccgaagttcgctataagggcactaaaaccgttgctatcacccctgactacgccgaaatcgccaagctttgcgatctgtggctggcgccgaagcagggtaccgatgcggcgatggcgctggcgatgggtcacgtcatgctgcgcgagttccacctcgacaaaccaagccagtactttaccgattacgtgcgccgctacaccgacatgccgatgctggtgatgctcgaagagcgcgatggctattacgccgcaggccgcatgctgcgcgcagctgatctggtggatgcattaggtcaggaaacaaatccggaatggaaaaccgtcgcctttgatgagaagggcgaaatcaccgtaccgaacggttctatcggtttccgctggggcgacaaaggtaaatggaatcttgaacagcgcgacggtaaaaccggcgaagatgtcgagctacgcctgagcctgctgggcggccacgacgatatcgctaacgttggcttcccctattttggcggcgaaggtaccgagcactttaataaagtcgagctggaaaacgtgctgctgcacaaactgccggtaaaacgcctgcagaaggccgacggttctaccgtgctggtcaccaccgtctacgacctgaccatggcgaactatggcctggatcgcggactcggcgatgaaaactgcgccagcagctacgatgacctcaaagcgtataccccggcatgggcggagaaaatcaccggcgtttcccgggcgcatattatccgcaccgcgcgggagtttgccgataacgccgataagacccacggccgttcgatgatcatcgtcggcgccggtctgaaccactggttccacctcgatatgaactatcgcggtcttatcaatatgctgatcttctgcggctgcgttggtcagagcggcggcggctgggcgcactatgtcggccaggaaaaactgcgtccgcagaccggctggcagccgctggcgtttgcccttgactggcagcgtccggcgcgccatatgaacagcacatcgtacttctataaccactccagccagtggcgctatgaaaccgtaaccgcgcaggaactgctgtcgccgttagcggataaatcccgctacagcggccacctgattgatttcaacgtgcgcgccgagcgtatgggctggcttccgtcggcgccgcagctgggcaccaacccgctgcgtattgcgcatgcggcaaaaaaagcgggcatgacgccggtcgattacaccgtcaaatcgctgaaagagggttccattcgctttgccgcagagcagccggaaaacggtaaaaaccatccgcgcaacctgtttatctggcgttccaacctgctgggctcctcgggtaaaggccacgagtacatgctgaagtacctgctgggtacggaaaacggtattcagggcaaagatctcggcaagcagggcggcgtgaagccggaagaagtggagtggaaagataacggtctcgacggcaagctggatctggtggtgaccctcgacttccgtctgtcgagtacctgcctctactccgacatcgtgctgccgaccgctacctggtatgaaaaagacgacatgaatacctcggatatgcatccgtttattcatccgctgtctgccgccgtcgacccggcctgggaatcgaaaagcgactgggatatctacaaagatatcgcgaaaaagttctccgaagtgtgcgtgggtcatttgggtcaggaaaccgacgtggtaacgctgcctatccagcacgactccgccgccgaactggcgcagccgctggacgttaaggactggaaaaaaggcgaatgcgacctgattccagggaaaaccgcgccgcatattctgaccgtcgagcgcgattatccggcgacatacgaacgctttacctctatcggcccgctgatggagaaaatcggcaacggcggtaaaggcatcgcctggaatacccagagcgagatggatctgctgcgcaagctcaactacaccaaagcggatggaccggccaaaggtcagccgatgcttaataccgccattgacgcggcggaaatgatcctgaccctggcgccggaaaccaacggccacgtggcggttaaagcctgggcggcgctcagcgaatttaccggtcgcgaccatacgcacctggcgacgaataaagaagaggaaaaaatccgcttccgcgatattcaggcccagccgcgcaaaattatctccagcccgacctggtccggactcgaagatgagcacgtttcttataacgccggctacaccaacgttcacgaactgatcccgtggcgcacgctttccggccgccagcagctgtatcaggatcaccagtggatgcgtgattttggcgaaagcctgctggtttatcgtccgccaatcgacacccgctccgtgaaaacggtgatgggcgcgaaatccaacggcaacccggagaaggcattgaacttcctgacgccgcaccagaagtgggggatccactccacctacagcgacaacctgctgatgctgacgctgtcgcgcggcgggccgattgtctggatgagcgaagcggacgccaaagatctggggatcgaagataacgactggatcgaagtgtttaacagcaacggcgcgctgaccgcccgcgcggtggtaagccagcgcgtaccggccgggatgaccatgatgtaccacgcgcaggaacgtatcgtaaacctgccgggttccgagatcaccgaacagcgcggggggattcacaactccgtgactcgtattacgccaaagccgacccatatgatcggcggctatgcgcagctggcctacggctttaactactacggcacggtagggtctaaccgcgacgagttcgtggtagtacgtaagatgaagaatattaactggttagatggcgaaggtaacgaccaggtacaggagagcgtaaaatga

SEQ ID NO: 175352 - DNA, 1389 bp, Klebsiella oxytoca
atgagtcactcttcaatcccggagaagactaacagctcagtcattagcgactggcgtcctgaagatcctgaattctggcagcagcgcggtcatcgcgtcgccagccgcaatctgtggatctccgttccgtgtcttttactggcattctgcgtctggatgttgttcagcgccgttgccgtcaacctcaataaagtcggctttcagtttactaccgaccagttgtttatgctgaccgcgctcccggcgctgtccggcgcgctgctgcgcgtgccttacgcgtttatggtgccgctgttcggcggtcgtcgctggactgcgttcagtaccgggatcatgatcgtaccctgcgtatggttaggcttcgcggtgcaggatacctctacgcctttcagcgttttcgtgatcatctctctgctgtgcggctttgcgggggcgaactttgcttccagtatggctaacatcagcttcttcttcccgaaacagaagcagggcggcgcgctgggtatcaacggcggcctcggtaatatgggcgtcagcgtgatgcagctggttgctcctctggtggtatccctgtctattttcgccgtctttggcggtaccggcagcgaacagccggatggttccatgctatatctggaaaacgccgcgtggatctgggtgccgttcctgattatcttcaccctggcggcgtggttcttcatgaacgacctgtcggcatcgaaggcgtcgctgagcgagcagctgccggtactgaagcgcgcgcatctgtggattatggcgctgctctatcttgccaccttcggctcgtttatcggcttctcggcgggcttcgccatgctgtccaagacccagttcccggatgtgcagattctgcactatgcgttcttcgggccgtttatcggcgcactggcacgctcgaccggcggggcgatctccgaccgactcggcgggactcgcgtgacgctggtgaactttgtggtcatggctatcttctgcggcctgctattcctgacgctgccgacccacggcgagggcggtaactttattgccttcttcgcggtatttatggtgctgttcctgaccgctggtctggggagcgcgtctactttccagatgatctcggttatcttccgtaaaatgacgatggatcgcgtcaaggcgcagggcggcagcgaagcgcaggccatgcgtgaagcggcgaccgatacggcggcggcgctgggctttatttcagcgattggcgccattggcggcttctttattccaaaagcgtttggtatctcgctggatttgaccggctcgccggccggagcaatgaaggtattcctggtgttctatatcgcctgcgtggtgattacctgggcaatctacggacgcaagcagaaataa

SEQ ID NO: 175353 - DNA, 1779 bp, Klebsiella oxytoca
atgttgaaacgactttttacgccgctgacgctggttaatcaactcgcgctgatcgttctgttggccacgatcatcggcgtcgccggaatggcgatctcttcccgcctggtgcatggcgttcagggcagcgcgcatgccatcaataaagccggttcgctgcgcatgcagagctatcgcctgctggcggcgataccgttgaccgacagcgatcaaaagctgctggatgaaatgacggcaaccgtctttagcccggaactgcagtacgccgctcgccatgacgatcagcagcggcagctccaggcgctgcagcactactggcagctggagctggcgccgggaatgcgcaaagcgcaaaatcaggcctcggtcgcgacggatgtcgccggctttgtcgaccgcattgaccagttggttaccgctttcgatcacaccaccgaggagcggattaaacacgttgtctggatccagcgcatcatggccgtagggatggcgctgctgctggtatttaccatcgtctggctgcgcgcccgcctgttacgtccgtggaaacagctgctcggtatggcccgagcggtgagccgacgtgatttcacccagcgggcgcagattagcgggcgcaacgagatggcgacgctcggcatggcgctgaacaacatgtccaaagagctggcggagagctattcggtgcttgaacgccgggtgcaggaaaaaaccgccggcctggagcaaaaaaacgagatcctcgcctttctgtggcaggccaaccgccgcctgcactctaacgcgccgctctgtgaacgcatttcgcccgttcttaacggtttacaggggctgaccctgctgcgcgatattgaagttcgcgtctacgaccttgaagacgaagacaaccatcaggagttttcctgccactccgatattcagtgcgacgacaggggctgttatctctgtccccgcgacctgccgccgctgcctgataccggcaccactttaaaatggcggctgtcggatgcccataatcagtacggtattttactggccaccctgcccgccgggcgtcatctgagccacgatcagcagcagctggttgacacgctggtggaacaacttaccggcaccctcgctctcgatcgtcatcaggagcgccagcagcagctaatcgtcatggaggagcgcgccactatcgcccgcgagctccacgactccatcgcccagtcgctctcctgtatgaaaatgcaggttagctgcctgcaaatgcagggcgatgacctgccggaagcgagccgccagctgctggggcaaatccgtaatgaactgaatacctcctgggctcagctgcgcgaactgctgacgaccttccggctacagctcaccgagccgggactacgtacggcgctggaggccagctgccaggaatacagcgcccacttcggttttacggtacgcctggactatcagctgccgccgcgttttgtgccgtcgcatcaggccatccatctgctgcaaatcgcccgggaagcgctcagcaacgcgctgaagcacgccaatgccaccgatgtcagcgttaccgtggcgttgcgggacaatcaggtccgtctgacggtggccgataacggtcgcggcgtaccggaccatgcggagcgcagcaaccactacggcctgattatcatgcgcgatcgcgctcagagcctgcgcggggactgccaggttcggcgccgggaaaccggcggtaccgaagtggtggtcacttttatccctgaaaaatcgttttcaatccaataa

SEQ ID NO: 175354 - DNA, 651 bp, Klebsiella oxytoca
atgagtcaacaggaacgggcaaccatccttctcatcgacgatcacccgatgctgcgcaccggcgtcaaacagctgatcagcatggccccggatatccaggttatcggcgaagccagcaacggcgagcaaggtattgcgatggcggaatcattggatcctgatttgattctgctggatctcaatatgccgggcatgaacggtctggaaacgctcgacaagctgcgcgagaagtcgctgtccggccgcgtggtggtgtttagcgtctccaatcatgaagaagacgtggtgaccgcgctgaaacgcggcgccgacggctacctgctgaaggatatggagccggaagatttgctgaaagcgctacagcaggcggcggcaggcgaaatggtgctcagcgaagcgttaaccccggtgctggctgccagcctgcgcgctaatcgcgctacctcagaccgcgacatcagccagctaaccccgcgcgagcgcgatattctcaagctgattgcccagggcctgccaaacaaaatgatcgcccgccgtctggatatcaccgaaagtaccgttaaagtgcacgtcaaacatatgttgaagaaaatgaagctgaaatcgcgcgtggaagctgcggtttgggtccatcaggagcgcgtattctag

SEQ ID NO: 175355 - DNA, 1380 bp, Klebsiella oxytoca
ttgagctccttgtcgttccgtataaccccttatttaccgcttctcctgctgctgacaggcgctcccacccgcgcgctgcaggatactcaggccttttccagaggccctgaaagcttacccgaccttggcctggcgccgcaggtcgatgacgacgcaaaacattttgccgagatggcgaaaaaatttggcgaagccagcatgagcgataatgggctgacaaccggcgaacaggcgcgtgtatttgctatgagccggctgggcaacgaagtcagccaccagttggaaagctggctttcgccgtggggcaacgccaacgtcgatttgctggtcgataaagagggcaattttaccggcagcaaggggagctggtttgttcctctgcaggataacggcgactatctcacctggaaccagtactcggtcacccagcgggataacggtctggtcggcaatgtcggcctcggccagcgctggcggatgggctcctggctgctgggctacaactccttctacgataaagtgctcgatgagcgcatggcgcgcggcagcgtcggggccgaagcctggggtgaatcgctgcgcctgtcggctaactactaccagccgctcggcggctggcagcaggggagtagcctgactcagcagcagcgtatggcgagcggctacgatgtgaccgctcaggcgcggctgccgttttatcagcacattaataccagcgtgagcgtggagcagtacttcggcgatagcgttgacctgttccattcgggcaccggctatcacaatccggtcgcggtgtcggtggggctgaattacacccccgtgccgctggtcacggtgaccgccaaacataagcagggcgagagcggcgtcagccaaaacgatattgggttaaagctgaactatcgttttggcgttcctctgaaacagcagctggcggccgatgaagtcgccgttagccgatcgcttcgcggcagccgctacgatagcccggaacgcgataatctgccggtggttgaatatcgccagcgcaaaacgctgtcggtttatctggcgacgccgccctgggatcttcagcccggggagacggtgcagctgaaactacagattcgtagcctgcacggaattaagtcgctaagctggcagggcgatacccaggcgctgagcctgacctcgccgatagaggccaacagtacggacggctggaccgtgattatgccgcgctggaacagcgaagccggggcaagcaaccgctggcatctttcgctggtggtggaggataaaacgggtcagcgcgtctcatccaatgagatcgcactggcgctgactgagccgttggtacgcgtaccggccgatggcgtttcgtggcagcatctgccctag

SEQ ID NO: 175356 - DNA, 2601 bp, Klebsiella oxytoca
atgaatgaaaccaggaccacttgcccctattgcggggtcggctgcggcattatcgccagcctgaatgccgacggccaggttaccgtacgcggggatgaacaacatccggcaaactttggccgcctgtgcgtgaagggggcggcgctgggcgaaaccgtcgggctgacgggaagattgctcttcccggaagtcgatggcggtcgcgcgacctgggcccaggcgctggcagcggcgggttcgcgtctgcgggagattatcgacgagcacgggccgcaagcggtggcgttttatgcctccggccagctgctgaccgaggattactacgtggccaataagctgatgaaggggtttatcggcgcggcaaatatcgatactaattcgcggctgtgcatgtcttcagcggtcaccggctataaacgggcgctgggcgctgatgtggtgccgtgcagctatgaggacgtggaaaacagcgatctggtggtgctggtcgggtcgaacgccgcctgggcgcatccggtactctatcagcggctggcgcaggcgaagcgcgacaatccgcagatgcgggtggtggtcattgatccgcgtcggaccgccacctgcgatattgcggaccggcatctggcgctggctcccggcagcgacggcgggctatttgtcggcctgttgaacgccattgccgcccgcgacgacatctgcggcgattttagcgatgcgccgcaggcgctggccatcgcgcaggactgggatatcaaccacgtcgcgcagttctgcggcctgccgcgacagcagatcgccgatttctacagcgagtttatcgccgctccccgcgccatcacgctctataccatggggattaaccagtccgccagcggcagcgataaatgtaacgctatcattaacgttcacctggcgagcggtaaatatgggcgtccgggctgcgggcctttttcgctgaccggacaacctaacgccatgggcggacgcgaggtgggcggactggcgaccatgctcgcgtcgcatatgaactttgaaaccgacgatttacggcgtctggcgcgcttctgggggaccgaacgtctggcgcaaacgccggggctgtcggcggtggatctgttcgccgccattggccgcggcgaggtgaaagcggtgtggattatgggcaccaacccggtagtgtcgctgccggacagccatgcggtaagcaaagcgctggcggcctgtccgctggtcatcgtgtccgacatcgccgccgctaccgataccggacgctttgcccatatccgctttcccgcgctggcgtggggagagaagagcggcacggtaaccaactccgaacgaaggatctcacgccagcgcgctttcatggcgccaccgggggaggccagagccgactggtggatcgtcgcccgcgtggcccaggcgctgggcttcggctccgcttttgcctggcagcacccgcacgaggtgttcagcgaacacgccgcgctttcaggatatgaaaatgatggccagcgggcatttgatatcggcggactggcggatctcagccgcgaagcgtgggaggcgctggaaccggtgcgctggccggtgagccgcagtgaagcagcctggagtgtgcataagggctggcatcgcgacggtaaactgcggatggtgccggtcgcgccgcaacctacccgggcgaccaccgatgcgttctatccactgatcctcaacagcgggcggatccgcgatcagtggcacaccatgacccgcaccggcgcggtgccgcgtctgatgcagcatattaacgagccggtggtggaagtcgcgccagcggacgcgacgcgctatcagctgctggaaggcgaactggcgcgggtgcgctcaccgaatggggtgatggtagcaaaagtgattgtcagcaatggccagcgtcccgggtcgctgtttgtgccgatgcactggaatgatcagtttgctcgccagggacgggtgaataacctgctgtctgcagtcactgacccgcactccgggcagccggaaagtaaacaggcggcagtggcgatagctgcctggctaccagcgtggaaaggcgagcttttttctcgcttgtcggtgccgctacccgcttcactacactggcggcggcgggcagcgcagggaatcattcatctttcgctggcgggggatatcgcctcccgcgagtggcttattgagtggtgccagcgaaaagggtggcaactacagacagccaaaggcggtagcatctggaacctgctggcgtggcagggggaagagctgatgctcggctggtggagcgatgtcaacgaaccgcgcgtggatgccgagtggattagcgccgcgtttcgcagccctccgccgaatgctacccagcgtcacgcattattgagcggcagaaagggtagcgatgaggtaccgcgcggacgcattatctgtagctgctttagcgtgggcgaacgggcgatagacgaagcgattgccactggctgccgtacgcccgccgcactgggagcaaagctcaaatgcggcaccaactgcggctcttgtatcccggaacttaaggcgctgctggcggcgaagctggcgcaggcctga

SEQ ID NO: 175357 - DNA, 4071 bp, Klebsiella oxytoca
atgacgcggcaactggtgattattggtaacggtatggcggccacgcgcctggcgcaggcattggtagaacgggatgcgcagcggtttagcatcaccattatcggcgatgaacccggccaggcctataaccgcattcagctgtcgcctgtgctgggcgcagagaaaacagcaggcgagacgagactgctgcccgagacgtggtatcaacggcataacgttaaggtacgcgccggcgagacggttacggcggtggatattcatgcccgtacgctgcaaaccaccgcaggggtagttagctgggatgaactggtgttcgccacaggctcgctaccgtttgtgccgccgttaccgggcattacgcagccgcacgtttttgctttccgcactctggcggacgtcgagggcatcctggccatcgacggcccggcggtggttatcggcgggggcgtactcggcgtagaggccgccgcggcgctgcggcgttatggtgacagtgtcactttacttcatcgcggaagcgggctgatggagcagcaaatcgatgcttttgccggcgagcagctgcaaatgctgcttgccgagcgcgggattcgctgcgtgatggagagccgtatcgccgctattgatgcacatcaggtgcggctggaggacggccgcgcgtttgccgcctcgcgggtggtgctggcgaccggcgtgcagccgaacaaacggctggccgagcgcagcgggctggcctgcgcccgcggaatcctcgttgaccgccagctggcaaccgtgcagccgggcgtcagcgccatcggggagtgctgtgaaatcgacggtcggacctgggggctggtggcgccatgcctgcgccaggcggaggtgctggctgcccgcctgtgcgctaccccaggcgaagatttttgctggcaggatagcggcactcgtctgaaggtcagcggtatcgagttgttcagcgcgggcgagctgcgggccgcagaacaggatgaaagctgtatcagctgggacccgctggaccgccactaccggcgcctgctgctgcgcgacggtaagctgcgcggcgtactgctgctgggcgattgcagcagcgctgcgcccctcaccgctctgctgggggcggatgccccggcgccggcagagtggctcttcgatccctcttcaacgatgcagccgcgcgctgcgggaaaaattatgatgacaaaacctgttttagtgctggtcggacacggtatggtcggccaccattttcttgagcaatgcgtcgaccgtcgccttcatcaacggtatcggattgtggtgttctgcgaggaacgctatgccgcctacgaccgggttcatctgactgaatatttcaccggacgcagcgcagaatcgctgtcgctggttgagggcgattttttcgctcagcacggtattgagctgcgcctgagcgaatcggtcgccagcatcgaccgcgaagcgcgggtggtgcgcgatgccttcggccacgaaacccactgggataagctggtgctggcgacggggtcttacccgtttgttccgccggtgccgggtcatcatctcgagggctgttttgtttatcgtacgcttgacgacctcgaccagattgccgcccgcgccgcaaccgcccgacggggtgtggttatcggcggcgggctgctcgggctggaagcggccaacgcgctgaagcaattggggctggaaactcacgttgtcgagtttgcgccgaacctgatggcggtgcagctggacaacggcggcgcggcaatgctgcgagaaaaaatcagtcaactgggcgtcggggtgcataccagcaaggcgacgacggagattgttcgcaacgaacaggggctacagctgaactttgccgacggtagctcgctggcggccgatatgctggtgttctccgccggtattcgcccgcaggacgggctggcgcgcagcggcgggctggaagtgggcgaacgcggcgggatttgtatcgacaaccagtgtcgtacctccgacccggacgtgctggcaatcggcgaatgtgccctgtgggagaacaaaatttatggtctggtggcgcctggctatcagatggcgcgcgccgcagcggctaccctggcgggcgaggaaggctgctttagcggcgcggatatgagcactaagctgaagctgctgggcgttgatgtcgcctcgttcggcgacgcccaggggcgcaccccgggctgtcagagctatcagtggaccgatgggccgcagcagatctacaaaaaaattgtagtcagcgcggagggcaacaaactgctcggcggggtgctggtcggggatgtcagcgactatgccacgctgctacagatgatgcttaacggtatggctttacccaatcacccggaaagcctgatccttccggcgctggagggcagcgcgccaaaagcgctcggcgtggcggcgttgccggacagcgcgcagatttgctcctgtcacaacgtcagcaaaggcgatatctgccaggcggtgaacggcggcgcgggcgatatggcggcgataaaaagctgcaccaaagcggcgaccggctgcggcggctgtagcgcgctggtaaaacaggtgatggagtatcagcttgccgagcagggcgttgaagtcaaaaaggatatctgcgagcattttgcgtggtcgcggcaggagatctatcacctggtacgcgtcaaccatattcgcaccttcgaacagctgattgcccgctatggacgcggtcacggctgtgagatctgtaaacctctggcggcctcggtgctggcctcctgctggaatgaatatctgctgaagccggcgcatttgcctcttcaggacactaacgaccgctacttcgccaatattcagaaagatggcacctattcggtggtaccgcgtatggcggcgggagaggtgacgccggacgggctgattgcgatcggccagatcgccaaacgctatcagctgtacagtaaagtgaccggcggccagcgtatcgatctgttcggcgcgcgcctggagcagctcccggcaatctggcgcgagctggccgaggcgggatttgaaaccggccacgcctacggcaaatccctgcggacggtgaaatcctgcgtgggttcaacctggtgccgctatggcgtccaggattccaccggcctggcggtaaccctcgaacatcgctataaggggctgcgcgcgccgcacaaaattaaaatggcggtctccggctgtacccgcgaatgcgcggaggcccagggcaaggatattggcgtcatcgctacggagaagggctggaatctgtacgtttgcggcaacggcggtatgaagccgcgccatgccgacctgttcgccagcgatctggatgaagccacccttatccgcagtatcgaccggctgctgatgttctatattcgtaccgccgaccgtctgcagcgtaccagtacctggatggataatcttgagggaggcgtcgactatctgcgcgcggttatcctcgaagacagccttggcatcggcgaagagctggagcaggagatggcgcgggtggtcgagagctaccagtgcgaatggcaaaccacccttaacgatccgcagcggctggcgctgttccgctcctacgtgaacagcgatgagccggacgaagcggtgcagcggcaaaccctgcgcggccagccgcagctggccccgttcgcggcgcaggccgaaccggcgctgctgtcccgcccgtggcaggccatttgcgatctcgacgccatcccgcagcaggcggggattggcgcgcggctcggcgagcggcagattgcgctgttccgctttggcgatcaggtatatgccctcgataatcttgaaccgggcagcgaggccaacgttctttcgcgcggcctgctgggcgatgcgggcggtgaaccgatcgtgatttcgcctctgtataagcagcgtattcgcctgcgcgatggccgccagtgcgacgacggcgaaatggcggtacgcgcatggccggtaaaagtggagaacggtaaagtatgggttggcaaccagcagctgctggcgcgcgcggaggcctcgtga

SEQ ID NO: 175358 - DNA, 789 bp, Klebsiella oxytoca
atgaaaccactcattcaggtccagggcgtcagccagcgtttcaataccaccagcggcgaattcctcgcactgcaggatgtctcattcgatatttacgagggggagaccatcagcctgattggtcactcagggtgcggtaagtcaactctgctgaatctgattgccgggattaccttgccgacggagggcggcctgctgtgtgataaccgtgaaatcgccgggccgggcccggaacgcgcggtggtgtttcagaaccactctctgctgccgtggctgacctgcttcgataacgttgcgctggcggtggatcaggtcttccgccgcagcatgagcaaaggcgagcgcaaagagtggattgagcacaacctcgaacgggtccagatggggcacgccctgcacaagcgcccgggagaaatatccggcggtatgaagcagcgcgttggcattgcccgggcgctggcgatgaagccgaaagtgctgctgctggatgaaccctttggcgcccttgatgccctgacgcgggcgcatttacaggacgcggtgatgcagattcagcagtcgctgaatactaccatcgtgatgattacccatgatgttgatgaagcggtgctgctttccgaccgggtgctgatgatgaccaatggtccggcggcgacggtcggggagatcctcgatgttaacctgccgcgcccgcgcaatcgcgtgcagctggcggacgatagccgttatcaccatctgcgtcagcagatcctgcacttcctctatgaaaaacagccgaaagcggcatag

SEQ ID NO: 175359 - DNA, 885 bp, Klebsiella oxytoca
atgaaacacgcatataaaactcaaccgcaggccagcgctggaaaggcgcccggcgaagtgatcaccctgcctccgctgcaggttcgcaaaaccacgcctccgttcagccgctggctgcgcgatgctacccaacgtctgctgccgccgctgctcgggctgggattgctgctgttgggctggcagctggcagcaataaacagcaaaggtttcccgacgccgctcagcacgctggattccgcgttgaccctttttgccgatccgttttatcaggacgggccgaacgatatggggatcggctggaacgtgctggcgtcgctgcagcgcgtggcggtggggtttggccttgccgcgctggcgggcattcctctgggctttctgatcggtcgttcgccattcttcgcccggatgtttaacccgttgattgcgctgctgcgcccggtcagcccgctggcctggctgcctattggcctgctgctgttccagaaggcggaaccggcctcgagctggaccatttttatctgctcgatctggccgatggttattaacaccgccgagggcgtgcggcgtattcctgaggactacctcaacgtggcccgcgtgctgcagctttccgaggggacggtgatgcgcaagatcctctttccggcggtcttacccgcggtgctgaccggggttcgtctctcgattggtatcgcctggctggtgatcgtcgccgccgaaatgctcaccggcggcttagggatcggcttctggatctggaacgagtggaacaacctcaacgttgaaaacatcatcattgccatcgtcattatcggcgtggtcgggttgctgctggaacaggggctgatgctgctcgcccgtcgttttagctggcaggataaataa

SEQ ID NO: 175360 - DNA, 1257 bp, Klebsiella oxytoca
atgggcgatacgttttcaatttcacgacggcgtttattacagacgggggcggcgctaggcggcgcgatgctgctgcccggcatgatgcaggcggcatgggcggcggggacggataagccggaacagaccaccgtgcgggtgggttttattccgctgaccgactgtgcccccttagccatcgcttccctaaagggattcgataaaaagtacggcatcaccctcgtcccgagcaaggaggccagctgggcggcagtgcgcgacaagctggttgccggagagctggacgccgcgcacattctgtacggcatgctctacggccttgagctggggatcgccagtaaaccccaggcgatggccaatctgatgactcttaaccgcaacgggcaggcgattacgctctccagcgagctgcaggagaagggcgtcaccgacctgggcggactgaaaaaacggatcgaccagcaggcgccgggcagctacaccttcgcccatacctttccaaccggcacccacgcgatgtggctctattactggctggcgagcggtggaattaaccctttcgacgatatccgcaccgtcgttgtgccgccgccgcagatggtgatgaacatgcgtatcggcaatatgagcggtttttgtgtcggcgagccgtggaacgcgcgcgccattaacgatcgcatcggcttcaccgtcgccacttctcaggatatctggccggaacatccggaaaaaattctcggcacccgcagcgaatgggttgagcgtaacccgaatacggctcgggcgttggtggcggcgctgatggaggcccaacgctggattgatgcttccgtggagaatactcgcgaaacggcgcggatactcgccagacgcgcgtggctgaacacgaaagagcagtacctcaccgggcgcatgctcggcgcatacgacaatggtatcggtcgccgctggcaggatgcgcacccgatgcgcttctacgaacagggggaggtgagctttccatggctctcggacggcatgtggtttttgacccagttccgccgctggggattgttgaaggcgtcgccggattatcaggcggtggcgcagcgcattaatcgcattgacgtctggaaagaggcggcgctggctgtcggcgggatcggcgcgccgaagcagccgatgcgcagcagcacattgctcgacggcaaggtctggaatggggccgacccggaaggctatgccagcagtttcgcgattcaacgtaaaggggcatga

SEQ ID NO: 175361 - DNA, 1197 bp, Klebsiella oxytoca
atgaataatacggctggcaataggcctgaggtggtcgactggtttgtgcgcgcgcggcgacgccagaaacagcagctacgtcagctgtcgcagctggggtcgctggcaggagagataagttcgctggtgcatatgctgcagtgcgaacgcggcgcgtcgaatatctggctgtgctcgggcggcagactgtactcggcggagtgccgggcggcagcggcgctggtcgatgagctattcacacgtttcaacgccgcgctggaacccgcccgtgatgccgccagcagcgcgctctgctggcgcattgcctgcgcggcgtggtatttgacgcagcttgcggcgctgcgccaacgcgtgcgcgcccggaacattcctgccgaagaggcgaccgggcagtttagtcgtattattcgccatctgttgaatattgttccgcagctcaatgacagtatcgacgacccgcaaatcgctggacgtatggtagcgctctatagctttatgcagggaaaagagctggccggacaggaacgtgcgctgggcgcgctaggctttgcccgcgggcagttcagcgatgaactgcgtcagcaactggtggaccgcattgatggtcagcagccctgtttcgatagttttcaggccttaagctatccgcccctcaccactctgtttgccagccagtgcctggccagcctggagattgaacagctgcggcgggttgcctgtacccgccagcctccagtagacgagggagaaacggcgctccgctggttttgcgcacagacccagcgccttgagcagctccgtggcgtggaagagcggctgatcgtcgacctgctcaacgccaccgccgccctgctggaaggcgaagagcagagcatgcagttgccgcccgcaaactgggatgaggctgaggacagtatcgccctgcggctggacaaacagctgctgccgctggtacgccagcaggcccttgagcttcagcaactctcctgccagcttgcatcgttaaaggaagcccttgaagagcgcaaactgattgagaaggcgaaaagcgtgctgatgacccatcaggggatgccggaggaacaggcctggcagacgctgcgaaaaatggcgatggataagaaccagcggatggtggagatagcccgtgcgctgctaacggtaaaatcactctggcagacaaccccaaaggagtag

SEQ ID NO: 175362 - DNA, 354 bp, Klebsiella oxytoca
atgcaacgtattgtgattatcgctaacggtgccgcctacggcagcgaatctctgttcaacagcctgcgtctggcgatcgccctgcgcgagcagcagtccgaccttgaactcaaactgtttttaatgtccgatgcggtcaccgccggcctgcgcgggcagaagccagtggaaggctacaatattcagcagatgctggagatcctcaccgcgcaaaatgtgccggtgaagctgtgtaaaacctgtaccgatggccgggggatcagcgcgctgccgctgattgatggcgtggagattggcaccctcgttgagctggcgcagtggacgctggcggcggataaagtcctgaccttctaa

SEQ ID NO: 175363 - DNA, 243 bp, Klebsiella oxytoca
atggcaatggtaaaagcaagtttgacgttgtttggcggtgacacattagtggtgcgttgttctgaacgctgccatattcacctgatgagtgccaaagtgcctggcgatagtcacgctgatgttctgagcgtacaggacagagatagcgcgtatctgaccgtgccttacagcggcacctggaacgttctcatcgacagccacagccagtcgctggaacactctatcagctacgttcccgcctga

SEQ ID NO: 175364 - DNA, 681 bp, Klebsiella oxytoca
gtgttaactcgtgatttcttactgaatgcagattgtaaaacggcgtttggcgctattgaggaatcgcttctctggtcggcagaacaacgggccgcctctttggcggcgaccctggcctgtcgtccggatgacggctcggtgtggatctttggttacggttcgctaatgtggaatccggcgctggaatatcgcgaatcctgtaccggtacgctaccgggctggcaccgcgcgttctgtttgcggctcaccgccgggcgcggtagcgccatgcagccgggccgcatgctggcgctgaaagaaggtgggcgcacgaccggcgtcgcctaccgcctgcccgatgaatcgctggaagaagagctgacgctgctgtggaagcgggagatgattaccggctgctacctgccgacctggtgtaagctggagcttgacgatggtcgcaccgtcaatgcgctggtctttattatggacccgcgacatccgctgtttgaggcggacaccagcgcgcaggtgattgcgccgctgatagcgcgcgccagcgggccgcttggcaccaacgctcagtatctgttcgcgctcgatcaggagttgcgcaaactcggcatgcacgacgcttgcctcgacgatttagtcggtaaggtacgtcatctgcttggtgagaatagccagccggggctggcttaa

SEQ ID NO: 175365 - DNA, 231 bp, Klebsiella oxytoca
atgccctatagcaacaaaagtgaattgcccgacagcgttcagcacgtactgcccgcccacgcccaggagatttacaaagaagcctttaatagtgcctgggagcagtataaacataaagaggaccggcgtgatgacgccagccgcgaagagacggcgcataaagtggcctgggcagcggtgaaaaatgaatatcaaaaaggtgaggatgataagtggcataagaagaaataa

SEQ ID NO: 175366 - DNA, 1101 bp, Klebsiella oxytoca
atgaccgatgcacatgaggcggtaaaaacccgccacaaggagacctccctcgcctttccggttctggcgctggcggtgctgttcttctggggaagcagccagtcactgccagtggtcgttgcgattaatattctggcgctggtcggcatactaagcagcgcctttagcgtcgtccgccacgccgacgtgctggcccaccgccttggcgaaccttacggatcgttaattttaagcctctcagtggtgattcttgaagtcagcctgatttccgcattaatggctaccggcgacgccgcgccgactctgatgcgcgatacgctttattcgatcattatgattgttaccggcgggcttgtcggtttctctttactgctgggcgggcgcaaattcgccacccagtatatgaatctgttcgggattaaacagtaccttatcgccctctttccgctggcgataatcgttctggtcttcccgatggcgctgcccggggccaactttaccaccggccaggcgctgctggtggcgctgatctccgccgctatgtacggcgttttcctgctgattcaaaccaaaacgcaccagagcctgtttgtttacgaacatgaggatgacggcgacgacgatgacccgcatcacggcaaaccgtcggcgcacagcagcaagtggcacaccgcctggctgctgatacatctggttgcggttattgcggtcactaaaatgaatgccaatccgctggagacgctgttgaccagcatgaacgctcccgttgcctttaccggcttcctggtggcgctgctgatcctctccccggagggccttggcgcgctgaaggccgtattaaacaatcaggtccagcgggcgatgaacctgtttttcggttccgtgctggccaccatttccctgaccgtaccagtagtgacgcttatcgccttcctcaccggtaacgaactgcgttttggccttggcgccccggagatggtcgtgatggtcgcctcgctgctgctgtgccagatatcgttctctaccggacgcaccaatgtgctgaacggtgcggcgcatctggcgctgttcgctgcctacctgatgaccatttttgcctga

SEQ ID NO: 175367 - DNA, 855 bp, Klebsiella oxytoca
atgaaacaaaaagtggttagcattggtgatatcaacgtagcaaacgacctgccattcgtgctgtttggcggcatgaacgtgctggagtcccgcgatcttgcgatgcgtatctgcgaacactacgtgaccgttacgcagaagctgggcattccttacgtgttcaaagcctcttttgataaagctaaccgttcttccatccactcctatcgcgggccgggtctggaagaagggatgaagattttccaggagttgaaacagactttcggcgtgaaaatcatcaccgacgttcacgaagccagccaggcgcagccggtcgctgacgtggtggatgttattcagctgccagcgttcctcgcccgtcagaccgatctggttgaagcgatggcgaaaaccggcgcggttatcaacgtgaaaaaaccgcagttcgtgagtccgggccagatgggcaatatcgtcgataagtttatcgaaggcggcaacgacaaagtgatcctttgcgatcgcggcgcaaacttcggctacgacaacctggtcgtcgatatgctgggctttggggtgatgaaaaaagcctccaataactcaccggttatcttcgacgttacccacgccctgcagtgccgcgacccgtttggcgcggcctccggcggccgtcgcgctcaggttgccgaactggcgcgcgccgggatggcggttgggatcgcgggtctgtttattgaagcgcatccggatccggagcacgcgaaatgcgacggtccttccgcgctgccgctggataaactggagccgttcctcaagcagatgaaagccatcgacgatctcgttaaaagctttgatgagctcgataccagcaagtaa

SEQ ID NO: 175368 - DNA, 813 bp, Klebsiella oxytoca
atgaggtcgttagctgatttcgaatttaataaagcgccgttatgtgacggcatggtcctcatttctgaattaatccgcgacgattttccgacgcactatgtgcaggatgagctggagcggctgctggccctggcgcgtgaggagattgcctcctcgtgggaccaggagcgccagatagagcgtttgctggagcttttctacaatgactggggctttagcgattcgcgcggcgtttaccgtctgtccgacgtgctatggcttgataaagtcttgaataatcgccagggtagcgcggtgtcgttaggcgcgatcctgctgtggattgctcagcgtctggcgctaccggtggtgccggtgattttcccgacccagatgctgcttcgcgccgaccctgaagagagcgaggagatgtggctcattaacccgtttaacggcgaaacgctcaacgagcatacgctggaagtgtggctgaagggcaatattagcccagttgccgaactgtttaacgaagaccttgatgaagcggataacgcggaggtgatccgcaagctgctcgatacccttaaatcggcgctgatggaagagcggcagatggagctggcgctacggaccagcgaagcgctgctgcagttcaatccggaagacccgtacgaaattcgcgaccgggggctgatatacgcccagctggattgcgatcacgtggcgctgcaggaccttaattacttcgttgaacagtgcccggaggatcccatcagcgagatgatccgagcgcagatcaacaccatttcgcacaaacaaattacattgcattaa

SEQ ID NO: 175369 - DNA, 393 bp, Klebsiella oxytoca
atgaatctgtttaacgctgtcctgtatctgcatatcgcctgcgtggtggtctcggtcagcctgtttgtcctgcgctactggtggcactggagcggcaatcgccggctcgaccagcgctgggttcgcatcgcgccgcactgcagcgatacgctgctgtttctcagcggcgccggattaatggcaataacgcactatctgccgtttaccgaagagggtacatggctgactgagaagctgtttggcgttatcatttatatcgcattgggatttatcgcgctgggccgtcgtcgtccgcgcagtcagcagagccggtttgtcgcctttctgctggccctggtggtgttgtttatcattattcaactcgccatcacaagaacaccgttactggggtaa

SEQ ID NO: 175370 - DNA, 849 bp, Klebsiella oxytoca
atgacttttcagcaatggctgacgcaggccatcgctcgtctgagccaaagtgaaagcccgcgccgggatgccgaaatcctgctgggtcacgtgaccggcaaagcgcggacctatattctcgcctttggcgaaacggcgctgacggcggagcaggccgtcgagctggaaacgctgctgagccgtcgcgcacggggcgagccggtggctcacctggtgggccagcgcgaattctggtcgctgccgctgttcgtttctccggccacgctgatcccgcgtccggataccgaatgccttgttgagcagacgctgatgcggttacccggcaagccgtgccgcattctcgatctcggtaccggcaccggcgctatagctctggcgctggccagcgaacgccccgattgccacgtcaccgccgttgactttatgcccgatgcggttgcgctggcggcgcgtaacgttgagcacctcgccatcaagaatgttaccgtgctgcaaagccactggtatagcgcgctcgccgcacagccgttcgacatcatcgtcagtaatccaccctatattgatgaaaccgacccgcatcttgcgcagggcgatgtgcgctttgagccaaaaacggcgctggtcgccgccgatggcggtctcgccgatctggcttacatcattcgcgaaggccgccgcttcctgactcccggcggtttgatgctgctggaacacggctggaagcagggggaagcggtgcgcgcaatctttcgcgaggcgggttatggcaatattgctacctgccgcgactacggcgacaacgagcgtctgacgctcgggcaatatcaggaggcgtatgaatctgtttaa

SEQ ID NO: 175371 - DNA, 1083 bp, Klebsiella oxytoca
atgaagccttctattgttgccaaactggaagccctctatgaacgccatgaggaagttcaggcgctcctcggcgatgccgcaaccatcgccgatcaggataaatttcgcgcgttgtcgcgcgaatacgcgcagctgagcgacgtcgcgcgctgctataccgactggcgtcagctgcaggatgatattgaagccgcgcagatgatgctcgacgatccggagatgcgcgaaatggcgcaggaagagctgcgcgaagcgaaagaaaagggtgagcagatggagcagcagctgcaggttctgctgttgccaaaagatccggacgacgagcgtaacgcgtttgttgaagttcgtgccggcaccggcggtgatgaagcggcgctgttcgcgggcgatctgttccgtatgtatagccgttacgcggaatcacgccgctggcgcgtggaaatcatgagcgccaacgaaggcgagcacggcggcttcaaagaggtgattgccaaaatcagcggcgacggcgtctatgggcgactgaagttcgaatccggcggccatcgcgttcagcgcgtcccggccaccgaatcccaggggcgtatccacacctccgcctgcaccgtggcggtgatgccggaactcccggaagccgaaatgccggatatcaacccgagcgacctgcgcatcgataccttccgctcctccggcgcgggcggtcagcacgttaacaccaccgactcggcaattcgtattacccacctgccgaccggcattgttgtcgaatgccaggacgaacgttcccagcataaaaacaaagccaaagcgttatcagtgcttggcgcgcgtatccgcgccgcggaagtctccagacgccagcaggcggaagcctccgagcgccgtaacctgctgggcagcggcgatcgcagcgatcgtaaccgtacctataactatccgcagggccgcgtgaccgatcaccgcatcaacctgacgctttaccgtctggatgaagcgatggaaggcaagctggatatgctgattgagccgatcgttcaggagtatcaggccgatcagctggcagccctttccgagcaggaatga

SEQ ID NO: 175372 - DNA, 1257 bp, Klebsiella oxytoca
atgacccttttagctcttggcattaaccacaaaacagctcctgtagcgctgcgagaacgcgtaacgttttcgccggatacgctcgatcaggcgctggagagcttgctggcccagccaatggtgcagggcggagtggtgctgtcgacctgtaaccgcacggaactttatctcagcgtcgaagagcaggataacctccaggaagctcttattcgctggctgtgcgactaccacggtttaaatgaagaggacctgcgtaaaagcctttactggcatcaggacaacgaggcggtcagccacctgatgcgcgtcgccagcggtcttgattcgctggtgctgggcgaaccgcagatcctcgggcaggtgaaaaaagcctttgcggattccagccgtgggcacctgaacgtcagtgaactggagcgcatgttccagaagtcgttctcagtggccaaacgggtgcgcaccgaaaccgatatcggcgccagcgcggtctccgtggcgttcgctgcctgtactctggcgcggcaaatcttcgaatcactctccagcgtgaccgtgctgctggtcggcgccggtgagactatcgaactggtggctcgccatctgcgcgaacataaagtccgcaagatggtgattgccaaccgcacccgcgagcgcgctcaggcgctggccgatgaagtcggcgcggaggtgatcgcgctgagcgatatcgacgagcggctgaaagaggccgatatcatcatcagttctaccgccagcccgctgccgattatcggcaaggggatggtggagcgcgcgctgaaggcgcgccgcaatcagccgatgctgctggtggatatcgccgttccgcgcgatgtcgaaccggaggttggcaagctggcgaacgcctatctttacagcgtggacgatctgcaaaacatcattcagcacaatctggcgcagcgtaaagccgcggcggtgcaggcggaaaccattgttgagcaggaagccagcgagtttatggcctggctacgcgcccagagcgccagcgagaccatccgcgaatatcgttcccaggccgagcaggtccgcgaggagctgacggcgaaagcgctggcagcgctcaatcagggcggcgatgcgcaggaaatcatgcaggatctggcgcgcaagctcactaaccgcctgatccactcgccaaccaaatctcttcagcaggccgcccgtgacggggatgatgaacgcctgcatattctgcgcaacagcctcgggctggaatag

SEQ ID NO: 175373 - DNA, 612 bp, Klebsiella oxytoca
atgaatcgactgttccgcctgttgccgctggcaagcctcgttctgaccgcctgtgcgattaatgctccgaaagggccgggtaaaagcccggattctccacagtggcgtcagcaccagcaagatgtccgcaatcttaatcagttccagacgcgcggcgcttttgcttatctttctgatgagcaaaaagtctatgcccgcttcttctggcagcagacgggccaggaccgctaccgcctgctgctgactaacccgctcggcagcaccgaactgtcgttaaccgcccagccgggcaacgtgcagctgattgacaataaaggccagacttacacggcgaccgacgccgaagagatgattggccgcctgaccggcatgccgattccgctcaatagcctgcggcagtggatcattggcctgccgggcgaggccaccgactactcgcttgatgaccagtatcgcctgcgcgaactgaactacacgcaaaacggcaaaacctggcacgtcacctggggcggctacacctcagacaccaaaccttcgctaccggccaatatggaacttaacgacggcagtcagcgcatcaagctgaaaatggataactggattgtgaaatga

SEQ ID NO: 175374 - DNA, 852 bp, Klebsiella oxytoca
atgatgacccgctggccctctcccgcaaaactgaatctgtttttatacattaccgggcagcgcgccgacggttaccacacgctgcagacgctttttcagtttctggattatggcgacacgctgacgattgaaccgcgcgacgatggccaactgcgtctgctaacgccggttgacggcgtaccggatgaagagaatctgattattcgcgcggccaggctgttaatgcaggccgcagcgcaggacgggaagcttcctgcaggcagcggcgccgatatcagcattgataaggtgctgccgatgggcggcggcctcggcggcggctcgtccaacgcggccaccgtactggtggcgctgaatcacttgtggggctgtaatcttccggaagatgagctggcggcgttgggtctgcagctcggcgccgacgtgccggtgttcgttcgcggccatgcggcctttgctgaaggcatcggggaaattctcaccccggccgaaccggaggaaaaatggtatctggtggcgcatccgggggtcagcattccaacgccgatcatttttcgcgatccggaacttccgcgcaataccccggccaggtcaattaatacgttattaaaatgtaaattcggcaatgattgcgaggttatcgcaagaaaacgttttcgtgaggttgatgcggcgctttcctggctgttagaatatgcgccgtcgcgcctgactggcaccggtgcatgtgtatttgctgaatttgacactgaatccgccgctcgtcaggtgcttgaaaaagccccggcatggctgcatggcttcgtggcgcgaggtgttaacatctctccgctcaagcaggcgctgcgctaa

SEQ ID NO: 175375 - DNA, 948 bp, Klebsiella oxytoca
gtgcctgatatgaagctttttgctggtaacgccaccccggaactagcacaacgtattgccaaccgcctgtacacttctcttggcgacgccgctgtaggtcgttttagcgacggcgaagtcagcgtacaaatcaatgaaaacgtacgcggtggtgatattttcatcatccagtccacttgtgctcccaccaacgacaacctgatggaactggttgttatggttgatgctctgcgtcgtgcttcggcaggtcgtatcaccgctgttatcccctacttcggttatgctcgccaggaccgtcgtgttcgttctgctcgtgttcctatcaccgcgaaagtggttgctgatttcctgtcaagcgtcggcgttgaccgcgttctgaccgttgacctgcacgcagaacaaattcagggcttctttgacgttccggtggataacgtattcggcagcccgatcctgctggaagatatgctgcagctgaacctggataaccctatcgtggtttctccggacatcggcggcgtggttcgcgctcgcgctatcgccaagctgctgaacgataccgatatggctatcatcgacaaacgccgtccgcgcgctaacgtttctcaggtgatgcacatcatcggtgacgtcgctggtcgtgactgcgtgatggttgacgatatgatcgataccggcggcaccctgtgtaaggccgcagaagcgctgaaagagcgcggtgctaaacgcgtattcgcctacgcaacgcacccgatcttctccggcaacgccatccagaacatcaaaaactctgtgattgacgaattcgtcgtctgcgataccattccgctgacgccggaaatcaaagcgctggaaaaggtacgtactctgacactgtctggtatgctggccgaagcgattcgtcgtatcagcaacgaagaatctatctctgctatgttcgaacattaa

SEQ ID NO: 175376 - DNA, 1653 bp, Klebsiella oxytoca
atgcctttccgcgccctcatcgacgcttgttggaaagaaaaatataccgcttcgcggtttacccgtgatgtgatcgccgggattaccgtcgggattatcgctatcccgctggcgatggcgctggcaattggcagcggcgtggcgccgcagtacggtctctacacttctgctgtggcggggatcgtgattgcgttaaccggcggctcgcgcttcagcgtttccgggccaaccgccgcttttgtggtcattctctacccggtatcgcagcagttcggccttgcgggactgctggttgcaactttgatgtctgggatcttcctgattcttttcggcctggcacgctttggccggctgattgaatatatcccgctatcggttaccctcggcttcacctccgggatcggtatcaccattggtaccatgcagattaaagattttctcggtctgcagatggcgcacgtgcctgaacattatctgcagaaagtcggcgcgctggttatggcgctgccgacgattaatcccggcgatgccgccatcggtattgtcacgctgggcacgctgattatctggcctcgcctgggtattcgtctgccgggccacctgccggcgctgctggcaggctgcgcggtcatgggcgtggttaatctgctcggcggcagcgtcgccaccatcggctctcagttccactatattctcgccgacggcagtcagggcaacggtattccgcagctgctgccgcagctggtgctgccgtgggatatgcccggttcggagttcacgcttagctggtcctcgctgcgggcgctgctgccggcggcgttttccatggccatgctcggggcgattgagtccctgctgtgcgccgtagtgctggacggcatgaccggcaccaaacataaggccaatagcgagctcattggccaggggctgggcaatatcgtcgctccgttcttcggcggcattaccgccaccgccgccatcgcccgctcggcggccaacgttcgcgccggggcgacttcgccgatttccgccgtgatccacgcgctgctggtcattatggcgctgctgatcctcgctcccctgctctcctggctgccgctttccgctatggcggcactgctgctgatggtggcatggaatatgagcgaagcgcacaaggttgttaacctgctgcgctatgcgccaaaagacgacattatcgtcatgctgatgtgcatgtcgctgaccgtactgtttgatatggtcatcgcgatcagcgtcggtattgtgctggcctccctgctgtttatgcgccggatcgcgcgtatgacccgcctcgcgccggtgaacgtcgaagttcctgacgacgtgctggtgctgcgcgtgattggcccgctatttttcgccgctgcggaagggctatttaccgacctcgaaaccagagtggaaggtaagcgtatcgtggtgctgaaatgggatgcggtgccggtgctggatgccggcgggctggatgccttccagcgcttcgtgaataagctgccggaaggctgtgaactgcgcgtgtcgaatctggagtttcagccgctgcgcacgctggctcgcgccggagttaaacccattccgggccgtctgagcttctacccggaccgcaacgccgcgctggcggatatttaa

SEQ ID NO: 175377 - DNA, 1047 bp, Klebsiella oxytoca
atgttaattcaggtgggagaactggcgaagcgcgccggaatgaccgtccgcacgttacatcactatgaacaaacgggattgctgacgccttcggccagaagcgcggcgggttaccggttatataatctggcggccgttcagcggctgcatatgattaaagcgctggcgcaggccgggctggaactcgccacaattaaggactatctcgaccgggacgccttctcgctgtccgatctgctggtcaagcagatcgccaccctcgaccgacagctgcaaactctctcaacgctgcgccagcgcctggcgctgctgcgcgaagagctggacagcggaggcgagcccgatcttgagtcctgggtacaaacgctggagctgatgaaaatgtacgatcgctggtttagtcaacaggaattacaggtgctgccgtttgcggagcaggatgagcagcgtaaccagacatggctggagttggtgggggaagcgcagcagctcatgggcgaacgctgcccggcagatgagccgcgggcgattgcgctggcaacccgctggatggagcagctggagcaggataccgccggcaggccggagtttctgactcgcctgaatgagatgcacgccgccgaaccgcagatgcgtgaacaaactggggtgacgccggagatgattgatttcattacccgtgcttttgccgaaagcaagctggccatctgggcgcgctatctgaacgccgaagagctggcctttacccggcagcactatttcgatcgcctgatggagtggccggcgctggtggccgacctgcatcgggcctgtcgtgagaagcgagacccggcctccccggaaggtcagcagctggcgcagcgctggctggcgctgttccagtcttacgcgggtaaagatgcgcagacgcagcagaagtttcgctatgccatggagcaggagccgcatttgatgaaaggaacgtggatgacttcggaggtgctcagctggcttcagcaggcgattggcgtgatgatgcggcaggcgcaggggcctgccgccgaataa

SEQ ID NO: 175378 - DNA, 276 bp, Klebsiella oxytoca
atgaaacgcagaaacgcttcgttactcggtaatgtgctgatggggttggggttggtcgtcatggttgtcggcgttggttattccattttaaaccagcttccgcagcttgacctgccgcagtttttcgcacacggcgcgatattaagtatttttgtcggcgcggtactgtggctggcgggcgcgcgtatcggcggtcatgaacaggtcagcgacagatactggtgggttcgccactacgataaacgctgccgccgcgatcagcatcgccacagctga

SEQ ID NO: 175379 - DNA, 585 bp, Klebsiella oxytoca
gtgagcataaaactgattgtcggcctggcgaaccccggcgctgaatacgcagcgacccgacataacgccggcgcctggtacgtggatttattggcagaacgctaccgcgcgccgctgcgcgaagagagcaaattcttcggctatacctcgcggattaaccttgcgggcgaggatgttcgcctgctggtcccaacgacctttatgaacctgagtggtaaagccgtcggcgcgatggcgaccttttttcgcattaatccggatgaaatcctggtcgcccacgatgagctcgacttaccgcctggcgtcgctaagttcaagctgggcggcggtcacggcggccataatggcctgaaagacatcattagcaagctgggcaataacccgaactttcaccgcttacgcgtgggaatcggccatccgggcgataaaaataaagttgtcggttttgtgctgggcaagccgcccgccagcgagcagaagctgattgatgaggccgttgacgaagcggtacgctgcaccgaagtgtggatgaaggatggcctgaccaaagcgaccaaccgtttacacgcttttaaagcgcaataa

SEQ ID NO: 175380 - DNA, 1095 bp, Klebsiella oxytoca
atgggattcaaatgcggtatcgtcggtttgcccaacgtcggcaaatccaccctgttcaatgcgctcaccaaagcgggtattgaagcggccaacttccccttctgtaccattgagccgaacaccggtgtcgtgccgatgcccgatccgcgtctggacaaactggctgaaatcgttaaaccgcagcgtattctgccgaccacgatggaattcgttgatatcgcgggcctggtcaaaggcgcctccaaaggcgaaggcctgggcaaccagtttctgaccaacatccgcgaaaccgaagctatcggtcacgtggtgcgctgtttcgaaaacgacaacattatccacgttaacaataaagtggacccggctgacgatattgaagtgatcaataccgaactggcgctctccgacctggatacctgcgaacgcgccatccatcgcgtgcagaagaaagccaaaggcggcgataaagacgcgaaagccgagctggcggcgctggaaaaatgcctgccgcaccttgagaatgccggtatgctgcgttcgttgaaaaatctgaccgacgaagacaaagcggcgattaaatacctgagcttcctgaccctgaagccgaccatgtatatcgccaacgtcaacgaagacggctttgagaacaacccttatctcgataaagtccgcgaaatcgccgctgccgaaggttcggtggtcgtcgccgtttgcgccgccgttgagtccgatatcgccgagctggacgatgccgaccgcgatgagtttatggccgaactgggtcttgaagagcctggcctgaaccgcgttatccgcgccggttacgaactgctgaacctgcagacctacttcaccgcaggcgtgaaggaagttcgcgcgtggactatcccggtcggcgcaacggctccgcaggccgcaggtaaaatccacaccgatttcgaaaagggctttatccgcgcgcagaccattgcctatgaagactttattacctacaaaggcgaacagggtgccaaagaagccgggaaaatgcgcgctgaaggtaaagactacatcgtaaaagacggcgatgtgatgaacttcctgttcaacgtttaa

SEQ ID NO: 175381 - DNA, 1785 bp, Klebsiella oxytoca
atgataccgtccaaagcaccttccattttaatgcagattcagcctacaattcagaagtttgcaaggatgttgtccagcgtactacagttggaggttgagattgtcgataacgaattataccgcgttgcgggaaccggggcttatagtaagcagattggctataaattaaattcaaattcacggcttcttcgttacattattgaaacacagagcgaaaaggtcgtcacccattcccgcttcgatcctctctgcaaagattgtaacaataaggacaagtgcgaagagaaagcgttcctcggcactccggtgatgtatcacgaccgctgcgttggcgttattagcctggtggcgctaacccgcgagcagcaggaacgtattaatgagaacattcaggaattttcagattatgttcgccacgtctccagcatattcgtttcccgctttttacaggaacgggcagttggcgataatatccacaaaatatttttaaccatgattgaaaatatggaccagggcgtgctggtggtaggcaacgatcaaaaagttaaatttgccaaccaggccgcgctgaaaataatgagcgtgacgcagggccacgttattggcaagtccatccagtttcagcctttgaccttcgaagataatttcaagcacggccatatgcagcacattatctcctttgacgatcgcaaggagctcattatcggccagctgcacgcggtgcaggatcaatggctgtttttaatggcctttcaccagtcgcactcttctggtgatttcagctgcgggcaggaagggccgcaaattgaagcgatggttggcgagtgtcggcctatgcggcagttgaaaaagctcatcagccgcgtggcgccaagcccgtccagcgtgatgatagccggcgagagcgggaccgggaaagaggttgttgcccgcgctatccataagctcagcgaccgccacacgaagccctttatcgccattaactgcgccgccatacccgagcagctactggagagtgaactgttcggctacgtgaagggagcgtttaccggcgcatcggctaacggtaagaccggcctgattcaggcggccaacagcggaacgctattcctggatgaaattggcgatatgccgctcaccctgcaggccaagctgctgcgggccatcgaatcacgagagattcagccggtaggcgccagccatccggttcaggtcgatatccgcattatttccgcaaccaatcaaaaccttgaccagtacattgcggaagggaagttccgcgaagatctctactatcgcctgaacgtcatcccgctgcgtctgccgccgctacgcgaacgccaggacgacattgagctactgattcactattttctgcatttgcataccggtcggctcaacctggtttaccccggcgtcgcgcaggatgtgatcgatttcctcaaacgctaccgctggccgggcaatattcgcgaactcagcaatttgatggagtacctggtcaacgtggtgccctcgggcgagattatcgatatgtccctcctgccgcccaatctgttgagcagcggtgaactggcgagccagccgacagcgcctgtttcagcggcagcgaccatcgcccaggaggaaaacgtaacggcgctggaagagatggagcggcagatgatccgtgacgccctctctcgctacagtaataaaaagcaggcagcggacgagctgggtatcggcatcgccacgctgtatcgcaaaataaagaaatattcgctggcggcgggtcagaactga

SEQ ID NO: 175382 - DNA, 1188 bp, Klebsiella oxytoca
atgaaaactgttaacgaactgattaaggatatcaataaacttaactctcatctcagtgagaaagactttttgctgacctgggagcaatcgccggatgagctgaagcaggtgctggatgtcgccgccgcgctgaaaaccctgcgcgatgaaaatatcgccaccaaagtgtttaacagcggattaggtatttccgtattccgcgataactcaacccgcacccgcttctcctatgcctccgcgctcaacctgttaggtctggcccagcaggatctggatgagggaaaatcgcaaattgcccacggcgaaacggtccgtgaaaccgccaacatgatctccttctgcgccgatgccatcggcatccgcgatgacatgttccttggcgcgggcaatgcctacatgcgtgaggtaggcgaagcgctggatgacggccacaagcagggcgtcctgccgcagcgtccggcgctgatcaatctgcagtgcgatatcgaccacccgacgcaatccatggccgatctcgcctggctgcgcgagcacttcggttcgctggagaacctgaagggcaagaaaatcgctatgacctgggcctattcgccgagctatggcaaaccgctctcggtaccgcagggcattatcggcctgatgacccgcttcggaatggacgtcaccctcgcccacccggaaggttacgacctgatcccggacgttattgaagtggcaaaaaacaacgccaaagcttccggcggcagcttccgccaggtaaacagcatggaagaagcatttaaagacgccgatatcgtctacccgaaatcctgggcgccgtacaaggtgatggaaaaacgcaccgagctgctgcgcgcgaatgaccatgaaggcctgaaggcgctggaaaaagcctgccttgaacagaacgccggacataaagactggcactgtacggaagagatgatgaaacacacccgcgacggcgacgcgctgtacatgcactgcctgccggcggatatcaccggcgtctcctgcgacgcgggcgaagtcaccgagggcgtcttcgaaaagtaccgtatcccgacctacaaagaggccagctggaagccgtatatcatcgccgcgatgatcgtgtgccgcaaatacgccaatccgggcaaggtgctggagcaactgctcaaggaagcgcagaaacgcatcaaataa

SEQ ID NO: 175383 - DNA, 1200 bp, Klebsiella oxytoca
atgtctgctttctcactgaaaatggatattgccgaaaaccgttttttcaacggggagacttcgccgctgttttcacgccagcaggcgcagcaggctcgccgctttcatcaaaaaattaccggctataagcctacgccgctggtggcgctgaacgagctttccgccctgtttggcgtgcaaaaaatcctcgtcaaagacgagtcacgacgctttggcctcaatgccttcaaaatgctcggtggctcttacgctattgccaggctgctctgtgaaaaataccatttagatatcaacgacctctccttcgaaacgctcaaatccagcattaaagagaagatgacgttcgccaccaccaccgatggcaaccacggccgcggagtggcgtgggcggcccgccagttaggccagaacgccgttatctatatgcctaaaggttccgcacaggagcgggttgatgccattctgcgcctcggcgccgagtgtatcgttaccgacatgaactacgacgacaccgtccgctttaccatgcagaccgcgcagaaaaacggctgggaggtggtgcaggacaccgcctgggaaggctacacaaaaattccgacctggattatgcagggctacgccaccctcgctgatgaagcggtagaacagctctcctcgatgggtatcgcccgtccgacgcacgtgctcctgcagggcggcgtgggggcgatggcgggcggcgtgctgggctacctggccgatgtctacggcgcgaagcatctccattccattatcgtcgaaccggagctggccgactgtctctaccgctctgccctgaagggccagatcgttaacgtcagcggcgatatggccaccattatggccggcctcgcctgcggtgagcctaacccgctgggctgggaagtgctgcgcaactgcgccacgcagtttgtctcctgtcaggatgccgtcgccgccctcggcatgcgggtgctgggaaacccgacgggccaggatcctcgcatcatctccggcgaatccggcgccgtcggtctcggcctgctggcggcgattcatttccatccgcagcgcgaagcgctgatgcacaagctcaagctggatagcgattccgtggtgctggtgattagcaccgagggcgacaccgacgttaagcactatcgcgaagtcgtctgggaaggcaaacatccggccgcgcagtag

SEQ ID NO: 175384 - DNA, 1212 bp, Klebsiella oxytoca
atggctaagcaaattccgttcaacgcgatcctggaaaaatcaaaacagtatgaaaaagagatgacccgcttcctgcgcgatatgatcgccatccccagcgaaagcagtgatgagaagcgcgtggtgcaccgcatcaaagaggagatggagaaagtcgggttcgacaaagtggaaatcgatccgatgggtaacgtactgggctacatcggccacggcccgcgtctggtcgccatggacgcgcacattgataccgtcggcattggtaacatcaaaaactggaacttcgacccgtacgaaggtatggagaccgatgagctgatcggcggacgcggcgcgtctgaccaggagggcggaatggcctccatggtttatgccggtaaaattatcaaagatctgggtctggaagatgagtataccctgctggtgaccggtaccgttcaggaggaggattgcgacggcctgtgctggcagtacattattgaacaatccggcattcgtcctgaatttgtcgtcagcaccgaacccaccgactgccagatttaccgcggccagcgcgggcgtatggagatccgcgtggaagttcagggcgtcagctgccacggctccgctccggagcgcggcgataacgccattttcaaaatggcccccattctcaccgagctggaacaactttcgcagaagctgggctacgacgagttcctcggcaaaggcaccctgacggtgtcagagattttcttcacctcgccgagccgctgcgcggtggcggatagctgcgccgtctccattgaccgccgtctgacctggggcgaaacctgggaaggcgcgctggaagagatccgcgcgctgccggcggtgaaaaaagccgccgcggtggtctcaatgtacaactacgaacgcccctcctggaccgggctggtctacccgaccgaatgctacttcccgacctggaaagtggaagagaaccacttcaccgtccgcgccctgagtaacgcctacgaaggtctgttcggcaaagctccggtggtggataaatggaccttctccaccaacggcgtgtcaattatgggccgccacggcattccggttatcggttttgggccagggaaagagccggaagcgcacgcgccaaatgagaaaacctggaaatcgcatctggtgacctgcgccgcaatgtatgccgccatcccgctgagctggctggctacggagtaa

SEQ ID NO: 175385 - DNA, 1407 bp, Klebsiella oxytoca
atgcgcgtactgattaaaaatggcctcgtcgtcaacgccgacggacaggtaaagcaggacctgctcattgaagatggcctcgtcaagcgccttgccgattctattgaggcagaacaaccctgcgaagtgattgacgccgagggctgctacgtgatgcccggcggcgtcgacgttcatactcatttcaatattgacgtggggctcgcccgcagctgcgatgatttttttaccggaacccgggccgcggcctgcggcggcaccaccaccattgttgatcatatgggctttggccccgtcggctgccacctgcgccaccagttcgaagtctatcgcggctacgccgcctataaagccgttatcgactacagttttcacggcgttatccagcacgttaaccacggcattctcgacgagatcccgatgatggtggatagcggcatcagcagctttaagctctatctgacctaccagtacaaacttaacgatgacgagttgctgcaggcaatgcgccacctgcagcgcgccggcgcgctgacgacggtccatccggaaaacgatgccgccatcgcccagcgccgggcggaatttatcaacgccggtaaaaccgcgccgcgctatcacgccctgagccgcccgctggagtgcgaggcggaagccatcgcccgaacgatcaacctcgccaggctggcgggaaacgcgccgctctatattgttcatctttccaacgccctgggcctggagtatctacgtcttgccagaagacgccaccagccggtgtgggtagagacctgcccgcagtatctgctgctcgacgagcgctgctacgagcgtgaagatgcgcttaactacctgctcagccctcccctgcgcaacgccagtaataacgatgcgctatggcgcggcatccatgatggggatattgacacggtcgccaccgaccactgcgctttctctgcccagcagcgcaggcagatctccggcggcgactttagccgctgtccgaacggtctgcccggagtagaaaaccgcctgttgctgctgttctcgcacggcgtgatgagcgggcgcatcacccccgagcgctttgtggcgctcaccagcgccaatccggcgaagctgtttggtctgtggccgcagaagggtctgctggcgcccggcgccgatggcgacgtggttatcatcgatccacagcgtacgaccaccatccgccatgccatgctgcacgacaacgcagactattcaccctatgaaggctttatctgccagggcgcgattcgccagacgctctcccacggcagagtgatcttcgataacggcacctttaccggcatcgccggacagggccgctttttacgccgacaacctttttccaccgctcaccagaccgtcagcggaacagaaacgtaa

SEQ ID NO: 175386 - DNA, 933 bp, Klebsiella oxytoca
atgagtaaaaaaattgttctcgctctcggcgggaatgcgctgggcgacgatctcgccggacagatgcgggccgtacagcacaccgcccggacgatcgtcgatcttatctcccttggtcaccaggtggtggtcactcacggcaacggcccgcaggtgggcatgattaatcaggccttcgaggccgcggcaaaaaccgaagcccacacaccgatgctaccgatgtcggtctgcgtggctctcagccagggctacatcggctacgacctgcagaacgcgattcgtgaagaactgctcacgcgccagctggacattccggtggccaccctgataacccaggtggaagtggacgctaacgatgaggcttttcttaatccgaccaagcccatcggctcattcttcagcaaagaagaggctgagaagctgagccaaaacggctacatcatgaaagaggatgccgggcgcggctaccgtcgcgtcgtcgcgtcgccaaagccggtcgatattatcgagaaacaaacggtaaaagcgctgatggatgactgccacgtggtgatcaccgtcggcggcggcggcattccggtcatacgcgaaggtaatcatctgcgcggcgccagcgcggtcatcgacaaggactgggccagcgcgaagctggcggagatgatcgacgccgatctgctgatcatcctcaccgccgtggagaaggtggcgatcaacttcggtaaacctgacgagcagtggctggataacctctccctgcgcgatgccgaacgttttatcgaagagggacactttgccaaaggctctatgctgccaaaagtggaagccgccgccgccttcgcccgctcaggcccggggcgcaaagcgctgatcacgatgctaagcaaagccaaagaggggatagaaggaaaaacgggcaccatcataagccaataa

SEQ ID NO: 175387 - DNA, 834 bp, Klebsiella oxytoca
atgaatatttttgcagaagctgcacgacttgaggagcagaaccgtccctttgccctggcgcagattgtcgaaagccggggctctaccccccgacactccgctcagatgctcatccgggaggacggctcgattgtgggcaccattggcggcgggatggtggagcgtaaagtcatcgatgaggcgctggaggcgctgagcgagcgggagtcgcgaatgttccacggccgcatggcgcgcaccggtagcgacgccgtgggctccgactgcggcggcgcgatgtcggtttatatcagcgttcacggcctgcgcccgcgcctgctgttggtcggcgccgggcacgtcaatcgtgcggttgcccacgccgcggcgctggtggattttgacatctgcgtgggcgatatctatcccgccagcctttgcccggaggcttttccgctttcggcgaggctggtccatggctccagctttacggaagtggtcgaggcgatggcggtgcggccgcaggatttcgtactgatcgccaccaacaaccaggatcgcgaggcgctggacaggctgataacccagccggtagcctggcttgggctgctggccagccgacggaaagtgcaggcttttttacgccagatgcgggagaacggcgtgccggaggcggatatcagccgcctgcgggcgccgattggttatgacatcggcgccgagacgccaaacgagattgctatcagcgtactggcggaaatcctgcaggtgaaaaacggcgcgcctggggggcttatggatcaggtgcggcaatcttgtcagccggattgtctggctgaggcggtggcaatctga

SEQ ID NO: 175388 - DNA, 3105 bp, Klebsiella oxytoca
atgggagatataatgcgtcccgtgccgtttgaggagcttttaacgcgcattttcgacgagtatcagagtcagcggactatttttggcattcccgagcaacagttttacacgccgcaggcgcagaggtcgatcggcgtattcggcgaaagctgtgcgacgccgctcggcccggcagccgggccgcatacccagctggcgcaaaacatcattaccgcatggctcaccggcgggcggtttatcgagctgaaaaccgtacagatccttgaccggctggagctggaaaaaccctgtatcgatgccgaagatgagtgctttaacaccgaatggtccaccgaatttaccctcaagaaagcctgggatgaatacctgaaagcctggttcacgctgcatctgctcgagcaggtctttccgctgggcacccataaagagagcaagtcgtttattttcaatatgagcgttggctacaaccttgacggtattaaacagccgccaatgcaggaatttatcgacaatatgatggacgcctccgcccatcctaaattcgcccagtaccgcgacaccctgaaccgctggctgcaaaatagaacctttatcgatcgcctgccaacatgcgcgcgcaaagacgggctcgataaccttgcccagcgcgtgcccgccaggctggttgaaggggtgaccctctcgacgatgcacggctgtccgccggatgagatcgaagccatctgccgctatatgctgacggagaaaaacctcaacacctttgtgaagctcaatccgaccctgctcggctatccacgcgtacgccagatcctcgacacctgcggcttcggctatatcggccttagcgaagagtcatttgaccacgaccttaagatcgaccgggcgctggagatgctgacgcgcctgatggcgctggcgaaagagcgcagccttggctttggcgtcaagctgaccaacaccctcggcaccgtcaataacaagggggcgctgccgggagatgaaatgtatatgtccggccgcgccctgttcccgctatctatcaacgtggccgccctgctctcgcgggcgtttgacggcaagctgccgatctcctattccggcggcgccagccagctgaatattcgcgaaattttcgaaaccggcattcgccctatcaccatggccaccgacctgctgaagccgggaggatatctgcgcctgagcgagtgcatgcgcgagctgggaaaagccgacggctggaacatgacgcagatcgacgtcgagcgcctcaacgcactggcggaaaaagcggtgagcatggactacacccagaaacagtggaagccggaagagcgcattgataccggcgagcccctgccgctgcttgactgctacgtcgctccctgcgtaacggcctgcgccattaagcaggatattccggaatatattcgcctgctgggcgagcatcgctacgccgacgcgctggagctaatctatcagcgtaacgcgttgccggccattaccggccatatctgcgaccaccagtgccagtacaactgtacgcgcctggattacgacagcgcgctcaacattcgtgagctgaaaaaagtggcgctggagaaaggctgggacgagtaccgcagccgctggcacaaacccgcgggctccggctccctgcacccggtagcggtgatcggcgcaggccctgcgggtctcgccgccggatactttctcgcccgcgccgggcatccggtcacggtttttgaacgcgaagccaacgccgggggcgtggtgcagaatatcattccgcagttccgcattcccggcgagcttatccagcacgatatcgattttgtcgtcgcccacggcgtcaaaattgagtacggctgcgacccgcatctgagcgtagaaaagctgcaggcggaaggttttcgttatgtgctggtcggcaccggtaccgataaaaacagcggcgtgaagctgcgcggcgataaccagaacgtgcataagtcgctgcagttcctgcgccagttcaaccgcggcgaccgactggatctgggcaaacgcgtggccgtggtcggcgccggcaataccgcgatggactgcgcccgcgcggcgctacgcgtgccgggcgtgcagagcgcaaccatcgtctatcgccgttctcagcaagagatgcccgcctggcgcgaagagtacgatgaggcgctgctcgacggcgtcgacttcgagtggctatgcaacccggaacagtttaacgccgacggaacgctcgtcgtacgcgtgatgaagctgggcgagccggatgagaaaggccgccgccgtccggtagaaaccgatgagcttcgcacgctgaaagtcgactccctgattaccgccatcggcgagcagcaggacggcgaagcgctgtcggcaatggggatcccgctcgacccgcagggctggccggtggtcaacgccgatggcgagaccagcaagccgaacgtctttctgattggcgacgttcagcgcggcccctcttctatcgtctccgctatcggcaacgcgcggcgggccacggacctgatcctggcgcgggagaatatcgccagcagctacgggaataaagtctggaacaatgtcgatccggcgaaggtgtatcagcgtaaaggcgctatcgccgtcacgctggtggataaaaaccagcgcgaggcttttgtcgagcaggaagccagccgctgcctggagtgcaactacgtgtgcagcaagtgcgtcgacgtctgtccaaaccgcgccaatatttccgtggccgtcccggggttccagaatcgtttccagaccctgcacctggacgcttattgcaacgaatgcggcaactgcgctcagttctgcccgtggcaggggaaaccgtataaagacaaaatcaccgtattcagcctcgagcaggattttgtcaacagcaccaatccgggcttcttcgtcgagggtgccagcgtcaaagtgcgtcagaacgaccagacgtggcagctggaaattaacgaccgcggccagtttaacgaggtaccggcccagctcgacgccatgtgccgcatcataagccatattcatcagcatcaaagctatctcctgggaggcgttgaagtatga

SEQ ID NO: 175389 - DNA, 1338 bp, Klebsiella oxytoca
atgagtatcctgatcctgaaaaatgccaccgccgcgcagatctatccggcgaaagtgtgggagaacgtcgatattgccattgaggatgataaaattctcgccgtcggccccggcctgtgccagcgctatccgcaggcgcaggtgaaagagatgcgcgggcaactggtaatgcccggcatggtctgctcgcacaatcacttttattccggcctgtcccgggggattcaggctaatatcgcccccagcccggactttatctccacgctgaaaaacctgtggtggcgccttgaccgggcgctggacgaagagtcgcttttctacagcggtctgatctgcgccatggaggccgtgcgtagcggctgcacggcggttatcgatcatcatgcgtcgccccactatatcgctggctccctgagccagctgcgcaacgcttttctcaaaatcgggctgcgcgggatgacctgcttcgaaacgaccgaccgcaactttggcagccgcgagctgcgcgacagcgttgaggagaacattcgctttgccagagagatcgacgccgcccgcgaaaaaggagagcaaccttatctggtggaggcccatatcggcgcccatgcgccgttcaccgtgcctgatgaaggcctggcgatgctgcgcgaagcgctaaaagccaccggccgcggcctgcatatccacgcggcggaagaccgctacgatgtttctcacagccatcacctttacggcaaggacctgctggtgcggctggcggagttcgaccttatcaacagtaagacgctgattgctcacggtctgtatatctccgatgccgacgtggagctgctcaatgcgcaggacggtttcctggtgcataacgcgcgctccaatatgaacaatcacgtcggctacaactaccacctgccgcagatccgtaatctggcgctcggcaccgacggcattggttccgatatgttcgaggagctgaagtttgccttctttaaacaccgcgacgccggcgggccgctgtggccggacagcttcgcgaaggcgctgagtaacggtaatgaactgttgaatcgcaacttcaacgcccactttggccgccttgaggcgggctataaagcggacctcaccatttgcgactatatggcgccgacgccgctgattgcggaaaatatcgccggacatatcgccttcggcctgggagcaaacagcgtgcgcagcgtgatggtgaacggcgtgatgatctacgaggatcgccagttcagcttcgactgcgagccgatattccgcgaagcgcagaaagtggcgaaaaaaatgtgggcgcgaatggatgcgctccccgcatag

SEQ ID NO: 175390 - DNA, 477 bp, Klebsiella oxytoca
atgaccagttttatcgttgccagttcgcaggcctgcatcggctgcaggacctgtgaggttgcctgtgcgctggaacatgtggcgccgggggcggagttccatccccgcctgaaggtgatgcgcctcgacgatcttagcgtgccggtgatgtgtcatcagtgcgagaatgcgccctgcgtgggcgcctgcccgaccggggcgctgagtatgggggcggagaaagttgaagccgacggcggacgctgcattggttgtcagagctgcgttgtcgcctgcccgtttggggcgattaccatcgaggtggaggccggtctgacgccggttatcgtcaagtgcgacctttgcggtacccgcgagcgcggccccgcctgcgttgatgtctgcccgacggcggcgctgagtatcatgaccgaagagcagctcagagcgctgcaaaagcagcgcaatatcgctactgccgcgctgctgtcgctataa

SEQ ID NO: 175391 - DNA, 1941 bp, Klebsiella oxytoca
atgaataaatttattgttgccgattctgcaaactgtattggctgccacgcctgtgaagtggcctgcgtcacctctcatcgccaggacagctggccccagcagcgcagcgactttctgccgcgtattcgggtgttcttccaccgcaacgccagcagtgcgacaacctgccgccactgcaacgacgctccgtgcgtcggcgcttgcccgacccaggcgctgatcgtagccaacgacagcgttcagtttacagaggcgctgtgcatcggctgtaaaaactgcgtcatcgcctgtccctttggggcgattgagatggtggccaacgatgacgacgcgccgcagctggcgcagaaatgcgatctttgccgtcagcatccttccggtcagcaggcatgcgtggccagctgtccaacccaggcgctgcgtctgatggatgaagccgcgattaaccagctgcgtaccgcgcggcagatccgctccgcgctggaaaccccgctggaagccgttcgcggcgtaagacgtcgggcgatactcaataaacctccgcgcgttggcgcgaaaaaagtgcccgccgatgaccgcatgcagcacttccgggaaatttatcagccgctgagcgagtgcgatgcggagtacgagagcgaacgctgtctctactgcgcgcagaaggcatggtgcaactggacctgtcctttacataatcatattcccgatttcattcgcctggtgaacgagggcaagattatcgaggcggcggagttatgccatcagagcagctccctgccggagatttgcggccgggtctgtccacaggacaggctgtgcgaaggggcctgcacgctcaagaacgaaggcggctcggtcgccattggcaaccttgagcgctatatcaccgataccgcgctggcgatgggctggcggccgacaatcgacaaagtggccccgcgaccggagcgggtggcggtgatcggcgccgggcctgccggtctgggctgcgccgatattctcgtgcgcgcgggcgtgcacgttgacgtttttgaccgccatccggagatcggcggtctgctgaccttcggtatcccgccgttcaagctggataaaaaggtgcttgagatgcgccgcgacatttttagcgccatgggcgtcaattttcatctcaatcaggaggtgggtcgcgacgtggcttttgccgatctgctgaaaaactatgacgccgtcttcctcggcgtgggcacctacggtctgatggccgccggtctggagggagagaacgcccccggcgtgattcaggccctgccgttcctgattgccagcacccgcgaggtgatggggcttgaagagagcgccgagtatccgctgaccgacatcaaggggaaacgcgtggtggtgcttggcgggggagatacggcgatggactgtctgcgcaccgccgttcgccgcggcgcagcgagcgtgacctgcgcttaccgtcgcgatgaactgagtatgcccggatcgaaaaaagaggtggtgaacgcgcgggaagagggcgtgaaatttgagtttaacgtgcagccgcagcgcattcagctcaaccgtaaggggcaggtctgcgcggtggagatgatccgcacgaagatgggcgagccggggccggacggccgccgccggccgcagccgatcccggattccgggtttgaacttcaagccgatgtgctcattatggcgtttggctttcaggctcacgagatgccgtggctacgcggccacggcattaagctggaccgctgggggcagatagttaccggtggaaaagggcgcggaacgacgcaaaccagccatgacaaaatctttgccggcggcgacgccgtgaccggggcggacctggtggttaccgccatggtcgccgggcggcaggcggccagcgagatgttgacgcaattcagggcccgggaggagatatga

SEQ ID NO: 175392 - DNA, 1476 bp, Klebsiella oxytoca
atgaaagatatcgccaattccgcctcacgcaacggtcattcaaccgcaccggttgatgaggttttacccgttacgcaaatgattctttatggactacagcacgtgctggtgatgtatgcgggcgccgtggcggttccgctcgttgtgggtaatgcggtagggctcccgccggagcacattattttactgattagcgccgacctgtttatctgcggcgcggccaccatcgtacagtcgctgggggtcggtaagtggctcggctgtcggctgccgctaatccagggttgtaccttcgccgcgctgatcccgatggtgttgatcggcaaggagtatgggatcggcggtatttccggggccgtgatcgtctccggtattttcatcctctgctgcgccccgtggattagcaagctcatccgcttctttcccaaggtggtcatgggcagcatcgtcacgcttatcggcatgtctattatgccggtcgctggcgggtggatcggcggcggcagcagcgagatgagcggctttggcgcccccttctcgctgctgatggcggcgattactctggtgattattcttaatatttacacctttgcctccggcgtggtgaaaaatacgtcggtactgatcggcctgattatcggcaccgtactctggagctgctttaagcctctcgactttagtctggtccacgccacaccctggctccatctaccgaccctgatgccgtttgccaaacctgaatttcatattatccccgtcgccctgctatcaatggtcatggtggtggtcatggtggaaaccatgtcctcaatgatggcgaccggggatatcgtcgggaaaaaagttgacgcgaaaatgctgcgcaacggccttaacacctgcggcatcgcgaccactatctgcggattttttaatctgtttccctacgccgcgttcgcgcagaacgtcggcctgatcggtttaaccggggtacgcagccgctttgtggtgtcggtctccggtatcattctgattctgatgggcgtgttctcaaggatggcggcgctggtggtgctgataccaaagccgatcctcggcggcgcaggcatcgtcatgttcggtatggtggccgtctccggtattcgtaccctggggcaggtgaactatcgcaacaataataacggcatggtcgtggcgttgaccctcggcctcggcatgatgccggtgctggtgcccaatctgtttacccagtttccgccgatggttcagctgtttctgcacagcgggatcaccatcggtaccctgacggctatcgtcgccaacctcaccctcaacggcagcgtgcctttccgcgttaaccacgaaacgccggtccccgatccggcccctccgagctcagcggcgcgcaatatggccgtcagaaccgtcagaatgtggctcctgctgcgcaaagttcagaaggagagacagcctgaagaagcccaggagggacagtaa

SEQ ID NO: 175393 - DNA, 420 bp, Klebsiella oxytoca
atgaagagagtaacgaccgtctgcccctactgcgcctccggctgcaaaatgcagctcacggtagaggagggaaaaattacccgcgccgacgccgcgatggggaaaaacaatcagggcaccctgtgccttaagggctactacggctgggattttattgacgacccgcagatcctcacgccgcgcctgaaaacccctatgatccgccgccagcgcggcggcaagctggaatccgtctcctgggacgaagcgctcgattatgtggcaaatcgcctcagcgacatcaaggcgaaatacgggccggacgcgattcagaccaccggctcttcgcgcgccaccggcaacgaaaccaactacatcatgcaaaaatttgcgcgcgccgttattggtaccaataacgtcgactgctgcgcacgcgtctga

SEQ ID NO: 175394 - DNA, 1680 bp, Klebsiella oxytoca
atgagtaatgccatcaccgagatcgataataccgatctggtgtttattttcggctataacccggcggattcgcacccgatcgtggcgaatcacatcctcaatgctaaacgcaacggggccaaaatcatcgtctgcgatccgcgcaaaatcgaaaccgcgcgcattgccgacctgcatctggccctgaaaaacggttccaatattgcgctgctcaacgccatcgggcaggtgattattgcggaggatctctacgataaatcctttgtcgccgggcgttccgaaggtttcgaagcgtatcgcaaaatcgtcgaaggctatacgccggagtcggtggaagccatcaccggcgtcagcgccaggcagattcgcgaatgcgcgcggctgtatgccaccgccggaaacgccatgattctgtggggaatgggcgtgacccagttctggcagggcgttgaaacggtgcgttccctgaccagcctggcgatcctcactggcaatctggggaaaccgcacgtcggcgttaatccggtgcgcggccagaataacgtccagggcgcctgcgacatgggggcgctgccggacacctatcccggctatcagtacgtgaaatttccggagaatcggcaaaagttcgccaaagcctggggcgtcgggagcctgccggagaaccctggctaccgcatcagcgagctgccgcaccgcgtagcgcacggcgaagtgcgggcggcgtatatcatgggagaggatccgctccagaccgatgccgagctttccgccgtgcgtcaggccttcgaagagatggagctggtcatcgtccaggatatctttatgaccaaaaccgccgcggcggccgatgtgattctgccctcgacctcatggggcgagcatgaaggcgtctataccgcagcggaccgcggcttccagcggtttttcaaggcggtagagccgaagtgggatctgaaaaccgactggcagatcatctgtgagatcgccacccgtatgggttatccgatgaagtacgacaacacccagcagatctgggatgaactccgccacttgtgccccaacttcttcggcgcgacctacgagaaaatgggggaactgggctacgtgcagtggccgtgtcgcgacgagtcggaggcggaccagggcacttcgtatctgtttgcggaacgtttctccaccccgaacgggctggcgcagttcttcacctgcgaatggcaagcgccgatcgataagctgagcgacgagtatccactggtgctctccacggtgcgcgaagtgggccactactcctgccgttcgatgaccggcaactgcgcggcgctggccaaactggcggacgaaccgggctacatccagatcaacaccgccgacgcaaaacgtctcggcattgaggacgaagaactggtgtgggttcactcgcgcaaaggcaaggtgatttcccgggcgaagatcagcgacaggccgaataaaggggccgtctatatgacctatcaatggtggatcggcgcctgcaacgagctggtcaccgagaatcttagccctatcaccaaaaccccggagtacaagtactgcgccgttaacgttgagcgcattgccgatcggcaagccgccgaaaggtacgtcattgaggaatacagcaagctgaaagcccgcctgcgcgaaagcgccgcggggtaa

SEQ ID NO: 175395 - DNA, 606 bp, Klebsiella oxytoca
atgagcaaaaaagtcgataagcagtgcattatgctggctgccgggctctcaagccgcatgggcaagtggaaaatgatgatgccgtggggtgaaggaacgattctggatagcgcccttgccagcgccctggcgttctgcgatcgggtggtgctggtcacggggtttcgcggcgatgagttggccgcgtgctatcaggaccatccgggcgttgaggtggtctttaacccgcgatatcaggagggcatgttctcttcgattcagtgcggggtgagccatatccgcgcttcgtgtttctttctggcgctgggcgatatgccggaggtcacgccgggcgtataccgcaggctatgggccaacgccgacgcggaaagctgcctcattccggcttacgatcgcggaaaaggccacccggtacttctgccgcagcgggcgatatctttgattaaccacgcggcggaagaggccaccctgagggaggtcatcggtcagatggcagtacgcgttatcccggtggagaatcagggaattcactgggatgtagacactccgcagcagtatcttgcggtcgcgcgccgctgccgcaaggatctgacggctgtcggatag

SEQ ID NO: 175396 - DNA, 459 bp, Klebsiella oxytoca
atgaaccatattgagctaaaagtgaatggcatccgcattgcccgcgatgttaaagacaatgtccgcctgatcgattttctacgtgaagatctcaagttaaccggcaccaaagagggctgttcggtgggtgagtgcggcgcctgcaccgtcattctggacggaaaatcggtctgctcctgcctgctgctggccgcccagtgcaacggggcggaggtcaccaccgtcgaagcgctgcatcacgatccggtcggcaaaaaattgcagaatgcctttattcgtcacggcggcgttcagtgcggcttctgcacccccggcgtattgatgagcgctaaagcgctgctggatgccaacccggcccccagcgacgatgagctgaaagaggcgctggaagggaatatctgccgctgtacgggatatcagccgatcatcacctcgattaaagccgtgctgaaatcctga

SEQ ID NO: 175397 - DNA, 3213 bp, Klebsiella oxytoca
atggatacagtgcttgttggcagtgaggtgccccgcgtagacgggctcgccaaggtgacgggtaaagctgtctacggcgatgacatcaccatgaataatatgctgtatggcgtatgccgctacgtcgatatccctgccgggcgtattgattctctcgacctgtcggaggcggaaaaagtcccgggggtcgtgcgcatcgccacctgggacgatatacccggccagcgcaaactgggggcgattgttcccgatcatccgccgattattgacaaggagatcgcctaccgcggcgacgtggtagccgtcgtggcggcggaatcctatgaggcggcctgcattgccgtcgataaaatcaaaatcacctataccccgtgggaaccgattacttcgccggaagaggccatgaagcccggggcgcgccttatccacagcgaactcgatagcaatatcatcaatcgccaccacacggcgaagggcgatatagaagccggctttgccgcctccacccatatctttgaacgtgaatatgaagtgggttttcaggagcatggctatattgagccggagtccattactgcctatctggacaataatgaacagatcatgaccattgaagggtcgattcagaacgctcaccgcacccgggcggtgattgccaaatatctcgacctgccccaggcgaaagtcaatattaagcgttcggtcctcggcggctccttcggcggtaaggatgacattatcgataatgtctcctgccgcgcggcgctgctggtgcacctgaccggacggccggttaagatctcctataaccgtgaacagtcgatgcgcgagagctacaagcgccatccttataagatgaaataccgcattggcgtggacgacgacgcgcgtattcaggcgattaaaattgacatcatcgccgatggcggcagctactgcggccagacggtgtttgtcacctggcgcagttccgtccaggcggcgggtccctataatattcctaacgtgcgcgtcgatctggtgggggtgtataccaacaacaactacacctcggcctaccgcggctacggcgcgccgcaggtcattttcgccaacgaatcgctgatggatgacgtggcgggcgaactgggcctgtcgcccgtcgaattccgcctgcgcaatattctcaagcagggcgataccagcatggccgggcaggtcttcagcgaacacaccgtctccgcgcaggaggtgctggagaagacgctgctcaaggccgaatatgaggccaaacgcgagcactataaaaaacttaacgcggaaggcggcccgatccgctacgggattggcttcgcgctgagccatcgcggctgctctctgggggcggaggggctggatgcgtcctcggccctgattcaggtgaatgccgacgccagcgtgaacatttccacttcggtatccgagaacgggcaggggctgcagaccaccatgtcgctgctggcggcggaagcgttcggtattgcgctcgatcgggtgatgtttagcgaaccggccaccgcgatgatcgccgacggcggctcaacggtcgcttcgcgcggtaccctgatgggcgggcaggcgattctgagcgcggcgaacaaaattaaacaacgcatggcggacgccgtcagggaaacgctaaaagcgcagagcattgacgatattgcctggcaaaatggcaaagtgttcaaccgtcacagcccggagctgagtctcagtttccagcaggtgtgcgatatgacccgggctaccggggcaaacctctccgcctacggctggcacgtggcgccgaatattcactgggatgaagagaaaggctgcggcagcccctatttcacctgggtgtacggctgccagctggccgacgtggcggtggatatgcgcaccggtaaaattaccgtcaataacgtcgtcgccactcacgatgtgggaaaagtcattaacccggttggctttagcggccaggtttacggcggcgtgctgcaggggatgatcggctacggcatgctggaggatttcaacaccgagcacggcgtggtgaaatcggaaaacttcgatacctatctgctgccgaccatcaaggatatgccgcacatcgatatcatcgcggtggaaaactatgataaagcgggcccgatgggggcgaaggttatcggcgaaccggtgctcgaactgggcgctgcggccctcaacaacgcggtgagcttcgccatcgaccgacccaaccggaccctgccgctgacgcttgaacaggttcgcctcggctataaccttaagaagccggaacgccagagcgagcagatgctggaatcgggcgataagaaacaggttcaccgcctcaacaccctgtcgctgagcgtcccgcaaaccctgaaagaggctctgacgctgatggccgagaagggggcaatgcctattgccggcggtaccgatgtgctggttcaggcccggatgctgtccggcgaagtgccgcttgttaatattgccgggctggcggagctgaaggagatttttgacgttgagggtggcgtctcaattggttccggcgtctgctttaccgatctggttaagcatccgttgattcagcaacgctatccgctactggtcactgcctgtaaaaccgtcggctccctgcagctgcgcaatcgggcaacgatcggcggcaatatcgtcaacgccgccccgtgcgcggactccatgccgccgctcatcatctatgatgcggaagtcgagctgcgcagcgcgcgcggaacgcgccggatgccggtcagcgaattcgtcgtgggcggctatcgcacccttcttgaacccgatgagctggtggtccgctttatcctgccggcgccgacgcagcaaccgctgatcaatcgctatctgcagcttggccggcgcaatgcgttgaacattacgcgccagagcttaaccgggcagttcatggtcgataagggcgtggttcgcctgtgccgtctggtggatggcgcgctgatggctaaaccgcagcggctgactgaggttgagcaggcgctcaccggtaagacgctagacgccgccaccatcgactatgcggcaggcgtgcttcacgacaaggtagaaaaagccatcggcggacgctggtcagccccctataaagtccccgtatttatcgatatgttccggcagatgctgcaggaagtcatgacagagcagaagaaataa

SEQ ID NO: 175398 - DNA, 1440 bp, Klebsiella oxytoca
atgtctcttattatgaatctgaacctacagcagagaaaacgactacaccagataaccctggttgcgacatttggcggcctgttattcggttatgacaccggcgttattaatggcgcattttcctctctgaaacaatatatggctttgacgccgaccactgaaggtctggtcatgagcgtattgctgatcggcgctgcgctaggcagcgtgttcgggggaaaattcgccgatttctttggccgaagaaaatacctgctttttttatcctttatttttttcatcggcgcactgatgtccgctctggcgccagatatcaccgtactgcttatttcacgtttcatcctcggctatgccgtcggcggcgcttcggtcaccgcccccacctttatatctgaagtcgcgccaacggaaatgcgcggaaaactcactggcttaaatgaagtcgcgattgtcatcggccagttagccgcatttgccatcaacgccattattggcatcctctggggccatctgcccgacgtctggcgctatatgctgatggtacagaccattcccgctatctgcctgtttatcggcatgctgcgttcgccggaaagccctcgctggctcgttagcaaaaaccgccatgaagaagcgctggaaattttaaagcaaatccgcccgcttgaacgcgcaaccaaagaattcaacgatatcaccaccttaattaaggccgaagccgataaaaagctccattcgcaaaacgcctttatcaccatccttcagacgccatggattttcaaactcctgctggtaggggtgatttgggcggcgctgcagcagaccaccggggtcaacgtcatcatgtactatggcactgagatcctgagcagcgccggattctccgaaagaacctccctcatctgcaacgtactcaatggcgtgttctccgtcggcggcatgttatttggcgttctgttcctggtcgatcgttttaagcgtaaaaccatcattatttatggtttcgcgatcatggctaccctgcaccttatcattgccggcgtagactacaccctggtcggcgacatcaaagccacggccatctggctgctcggcgcgatgttcgttggcgtaatgcaggggacgatgggctttatcacctgggtggtgctggcggaactctttccgctcaagttccgcggactgtcgatgggcatatcggtatttttcatgtgggtgatgaacgccatcgtcagctatctgttcccattattgcaggccaagctcgggttaggcccggtgttcctgatttttgccgcgattaactacctggcgattatttttgtcgtcacggcgctacctgaaacatcaaataaatcgctggagcagctggaagaagagctgtcggccaataaatcttcagcacgatttaatgcagcaacaaaggaaagcggattatga

SEQ ID NO: 175399 - DNA, 435 bp, Klebsiella oxytoca
atgatcgataacattacgcaagataatcttcatctgtcatgccgggcaaaaaataaagcggaagtgctggcgatgattggcgctgactttaaggccaggggttatgtcagtgaagattgcgtggcctttcttgctgaaagagagcgccaggtctccacctttttaggtaacggcattacgctgccgcatctgcctaaatcagccacaaacatcatagttaaaaccggcgttgagatttatcagttccctgacggcgtaatctgggacagaaataacgtcatgttcattgccattggcgtgattgctaaagagagtgagcacattgatgtgctaagagaagtcgcgtcaatctttagcgatgaagttatcgccagagcgctgtcattgattgccaataaagcggactttttaaggatcctccagcaaaaccaataa

SEQ ID NO: 175400 - DNA, 411 bp, Klebsiella oxytoca
gtgaaaaaattatccggtctggttctgttatctgctatgtctttcatccccgcagcgtttagtgctcccaccgggacgctcagcgtacatattctcaatcagcaaaccgggctgccttcctcgggcgtgacggtgaccctggaaaaacagcaggcgaataaatggaccgagcttgcaagcggcgtaaccgacaacgatggccgaattaaatcgctgtatccggcagaaggggatatgcagccggggatttacaaagtgaccttcaaaaccggcgatgacttcaataagcagaaactggcctcatttttcccggagatcccggttctctttaccgtgacgcgcaccaatgaaaagctacatattcctttgctgctcagccagtatggctattccacctataaaggcagctga

SEQ ID NO: 175401 - DNA, 528 bp, Klebsiella oxytoca
atgaagatatggcctgttctgactggcgttgctatcgcattaacccttgtcgcctgtaaatcccccacgccacccaaaggtgtccagcccataagcgactttgacgcgagtcggtatctgggcaaatggtatgaagttgcccgccttgaaaatcgtttcgaacgcggcctggagcaggtcaccgcgacctacggtcaacgcagcgatggcggcattagcgtagttaaccgtggttacgatccgcagaaacaaaaatggaacgagagcgagggtaaagcttatttcaccggcgctcctgatactgcggcgctgaaagtctccttttttggcccgttttacggtggctataacgtgatcgcgctggatagccagtatcaatatgcactggtcagcggccccgatcgcggctatctgtggatcctgtcgcgcacgccgaccatccctgactccgtgaagcaggagtatgtgagcattgcgcggaagttgggcttcccggtcgataaactcgtctgggtgacccacagataa

SEQ ID NO: 175402 - DNA, 495 bp, Klebsiella oxytoca
atgaaactctggagtaaaacgctaatcgcttctgccgtatgcttatttcttgccggctgtgatgattcctcaaaggttgatgctaatctggataaagcaaaagataacgcccaacaaattaaagaggcggcgtccgataaagccgacgcaattaaggatgaagctgataaacacattgatgcaataaaaaaacaggcggcggacgaggccaacaatctcagcagccaggcctccagcatcaaggcggaggcggataaaaaagcggaagcaattgctcagcaggcccaggcccaggctgatgccgtcaagcaggatgcccggcagaaaagcgaccaaatagtgcaggaagctggcaaaattaaagacagcgcgattgttgatgccaataatctggccaacgatgcggcgaataaaacaaaagaaattaaagagagtatcgctcccgctaaaaccgcagaagatgcggccaatgcgaaccagcagacatcacactga

SEQ ID NO: 175403 - DNA, 1641 bp, Klebsiella oxytoca
atgtcacgtattgaatcagtaaaagacgctcttcttgcgctcggaattcaggaaagcagcgagctgttttataaccccgattacgacttgctgattgcgcatgaaaccagtgcagagctcaccggcgcggcgcgcggcgtcatgaccgagtccggggccgttgccgtggataccgggatctttaccggacgctctccgcgcgacaaatatatcgtcagagacgagctgacgcgtgacaccgtctggtggtccgattccggccttggccgcaacgataataagccgttatccacggagatttgggctgacctgaagacgctggttgccggacagctgagcggcaaaaaattgtatgttgtcgatgcctggtgcggcgccagtccggcaacgcgcctgggcgtccgcttcgtcaccgaagtggcctggcaggcgcacttcgtcaaaaacatgtttattgcgccgagcgcggaagagctggctgaatttacgccggacttcgtcgtcctcaacggcgcgggctgcaccaacgataaatggcaggaacaagggctgaattccgagaactttgtcgcctttaacctgagcgaaaaaattcagctgatcggcggcacctggtacggcggcgaaatgaagaagggtctcttctcggtgatgaactatctgctcccgcagcaggggatcgcctcgatgcactgttcagctaaccgcggcaaagcgggagacgtggcgctcttctttggtctgtcaggcaccggcaaaaccacgctttccaccgacccgctgcgtcagctgatcggcgatgacgagcacggctgggacgatgaaggcgtgtttaacttcgaaggcggctgctatgccaagaccattaatcttgacccgcatgccgaaccggaaatttacggcgcgattcgtcgtaacgcgctgctggaaaacgtggtggtcagagccgatggcagcgtggattacgccgacggcagtaagactgaaaatacccgcgtttcttatccgctgtcgcatattgacaacatcgtgaaaccggtatcgcgcgcgggccatccgtcgaaggtcatttttcttgccgccgatgcttttggcgtgctgccgccggtatcccgtctgacaaccgagcagatgcagtatcatttcctgtcgggttttacctcgaagctggccggaaccgagcgcggcattactcagcccacgccaaccttctccgcctgctatggcgcggccttcctgctgctgcacccgacgcagtatgccagcgttctggctgcgaaaatggcggcatcgggcgccgaggcctggctggtgaataccggctggaacggagagggcaagcgcctttcgctacgcgatacgcgcaatatcatcagcgcgatcttaaacggcactaccggcgagctgcgcgaggagacggtcccggtgttcggtctgtctattccgcaaaccgtgccaggcgtggatagcgcgctgcttgacccgcgtagcggctggtcttccgccgacaaatggcaggagaaggccgaaagcctggcgcagttgtttatggataacttcaggcaatatagcgataccgaagccggcgcccgcctggcgttagccggtccgacgctgacaaaatcagccgtcacggcctaa

SEQ ID NO: 175404 - DNA, 894 bp, Klebsiella oxytoca
gtgctggcgaatcttgaagtaaaatggctttacgatgtgattgcccttgaggaagccagaagctttacgctcgcggccaaaagccgcaatatttcgcagtcctccttcagccgccgcattcaggcgctcgagtcttcgctgggcttcagcatcttcgaccgttcggcaaacccgctgcagctgaccaaccgcgggaagattttcgttggctacgcacgaaatatgctcgacgatatggacttccagatcagccgaattaaagggctgaacaacaccacgcagaaaataagaatcgacgccgcgccgtcgctttccgttttattactgccagaaattatcgccggttataccgaccggaagaataaaacttttcatgttgaatcgattaatgtcaacgatgccgtatttaatcttaaagaaggcaaaagtgattttatcctgtcgttttataatgaagagctgatgaactatccgtttatcaatcataaaattttcgactcagcgctgcacctcgtttctccctgcgataagcacggcagaccgctttttaatttgcatcgcggggtgctgccgctgatgaaatacgccaacgacagctatatggggcgccaggtgaatcaggtgatcgaccgcaagccggaaattaccttctcgctgacctttgtctcctcaatgagcgagctgttaaaacgtatgatcctcaacggcgacggcgtgggctggctgccgcaatactctatcaagcgcgagctcgaggaaggccgcctgacgataatggatgagagcctgtccttgccgatcggcgcctatatttatcgctccggtgcgcggctcaaccagtccgccgaacgtttctggcagcatattaaggccatgagtaccgtcaccgcatag

SEQ ID NO: 175405 - DNA, 687 bp, Klebsiella oxytoca
atgtctaccgttatcgatacctttatcgccccgccgtgccacgctgaaatcgatatcctctaccaggatgaccatctgctgctgatcgataaaccctcaggcctgctgagcctgtcggggaaaaatcctctgaatctcgactcggtacattatcgactggtacaacagtttcccggctgcacgctggcgcaccgtcttgatttcggcacctccgggctgatggtgattgcgcgcaacaaggccatcaacgccgcgctctgccagcagttcagccagcgtgcggtgagcaaagtctacagcgcgctgctgtgcgggcatctggcggatgatgaaggaaccgttgacgctccgataaccaaagatccggcgctgtttccgctgatgacgatttgcccgcgccacggcaaacctgctcgctccggctatcgggtcgtggagcgcctgcgctatcaaggtcaagtgccggtaacgcgagtccagctgacgccggaaaccggccgcacccatcagttgcgtattcactgccagcaccttggccatcctattctgggctgcgatctgtacggcggcatggcgcttccggggacagaacaggcaccgcgcctgatgctgcacgccagcgaactgcatttcgtgcatccggttagcggagagaggatcgacgccgtcagccccagcgcgttttaa

SEQ ID NO: 175406 - DNA, 810 bp, Klebsiella oxytoca
atgaagagcatgagtgaaaggctggcgtttccgatgtacgcggtgaatgacgaggatactcaggcgctctggcgggcggtgcggcagctgctggcggctcgcggcgtggtggatgaggatgggctgtcatatacggtacctgaggatctgctggcgcactggcgccatccggcgctgctgttgagccagacctgcggttatccgctggtgacgctgttggcgaacgtgcaaacggtcggctgttttcactattcggcgcccggatgcgaagggcggaactaccgcagcctgctggtggcgcgtaaagcgaacggtggtcaggcgctggcagattttcgcgggcgtcgggtcgcgtgcaattcgccggattcccagtccggctataacgtgctgttaaaaatgatcgcgccgctgtcgcgcgatgggcgtttcttctcaacggtcgcgtttagcggcagccatcgccagtcgctgcgtgaagttcagcaggggacggcggatattgccgccattgattgcgtgacctgggcgctgctgcagcgtcatcagccggaggcgctggcggggctgacggtgattgcccatagcccactggccccggggctaccgctgattacgtcggcgacgacgcccgcggcgacgctggagttgctcagagaggcattgcagcagctggtgagcgatgaacgctatcagccgctttgcgaagcgctgtttatctgcggctacagcgatatgcggcgcgcggactatcagccgctgctggcgtggcgtgaagaggccgcggccagaggcgttgtgcggctatag

SEQ ID NO: 175407 - DNA, 984 bp, Klebsiella oxytoca
atggcaaaaagcagatcggcctatttgcatccgcagcagcgcgagcggattcagcagttgtcccgcagctggctgtggcgcagcgaactgccgacctggctactgatttttgcgatctacggcggctggtttgcctcgctggcctggtggcgcgcgctggggctgttcccggccacgctgctgctggtctggttcaccgcctggtatatgtcactgcagcacgagttcattcacggccatcccacctcgcggccgtggtttaatcaactgctggggaccctgccgctggcggtctggtacccctatggtctgtatcgcgactcgcacctggcgcaccataatcatcatctgctgacgcagccggttgacgatccggaatcctactattttacgccgcagagctggcagcattttgccccctggcagcgcagtcttattcatctgcgcaatacgtttatcggcaggctgctggtagcgccgctgctggatattgcccagacgctcagctgcgcgctgacggcgctgcgtcttcggcgggtgaagacgctagcgatgtggctggttcacggcctgctgctggcggcgctgttcgcgtggatgcatcaccttgacttttcgccgctctatttcgtgctggctgtcagctatcctgcgctggcgttaaccaaagtgcgctcttttcttgagcaccgcgccgcggacgatccgctggcccgttcggtgattaacgaggcggggctggtctggcgggtgctgttcctcaatctcaactaccattcagtgcatcacgatttgccgggcgtaccgtggtacgggctgcgaaaaatctatctgcataatcaggcggagtatcagcggcgcaacgccgggtttgtggtgcgcggctacggtgaatggctgcggcatttttttgccagaccggtgacggtgaatgcgcatcccgggttcaaccagcagggtaaggcggatgaagagcatgagtga

SEQ ID NO: 175408 - DNA, 1140 bp, Klebsiella oxytoca
atgttgggacgtgccgcgctggtactggttactgcgctattgatgtttccgcaaatagcggaaacgatttatagcccggcgctgaccgatatcagcgcccggttttccgtgagcgcagcgcaggcggcgcaaacgctctccgtatactttatcggttttgccgtcggcgttctgttgtggggcggattcagcgatcgctacggtcggcgcccggccctgctggcggggttaggtgtctacgcggcggggtgcctgctggcgctgtgggccagcgatttttcgctgctgctggtggcgcggatcgtcacggccgctggcacggcaaccggctcagtggtgacgcagacggttctgcgggactgctatagcgggcggcagctggcggggattttttcgtttatcggcctggcgctggcggtgagcccggccatcggggtctatatcggcggtgggttgaccgccatctggggtatgcgcggtgtattcagcgcgctggcgatttttgccgccgcgctcctgctgggctgcctgtggttgatgccggaaacgcgcccgcataacctcaggggagggtcttttcttgacgtgctgaggcggatggcgggcgacaggcgtatcgctctggcggcaattctggtggcggcatttaacatcagcctgttcagctactacagtctggctccctttctgttcgccagattcgatctcgatgccctggcctttggctacagcggcgtggcgcttgccgcgggttcgctgttcggcgcgctgcttaaccgccgtctgctgcgtcagaatgtcccgctggggcaaatgctcgcgatcgcctgcatcctccacctggcgggcgctgccgccgtgtacgtgctgcgggaatcgctgtggtttgtggcgccggtcgcgctggtcaccctcgcgtatgcgatggcgatcccgctggttctgggatcggcgctgagcgcctatggcgactgtcggggcaccgccggcgccattttcggcttgttttattatcttctgataggcgccggtctgctggcggccggatgggggcaatcgctgggcgcatcgctgctgctgtgcgctggggtaagcctcatcgccgggtggcgctatatgcactcgctcaacgacgcataa

SEQ ID NO: 175409 - DNA, 768 bp, Klebsiella oxytoca
atggcctggcttgacgctgatgcggcattcgatccggatgcgttaataaaaagcctgattggcgtgcagtcggcgctgggtaaccatgactccggcagccaccagcataagatggcgcagatcctgtttacccgtcagggatgcgtacgtttgacgctcgacgatggcgcgctgctgtgcctgcttccgccgggacgcgccgcctggatcccggccggtatcagtcatcgcgcggagatgaaaaacattgtcgattatcgttcagtctggtttcagccgcagcgttaccctcaattgccaacgcaggcggcgatactcaacgtggtgccactgctgcgcgaactcttagagcgtatcagcgccagcccctgggataccgactgggaaaccgagccggcgcggcatctcgcggccctgtgccaggcggaaattcgcgccgccgcccaggagccgatgatgctggcgctgccgcaggataaacggctggcgcagctttccggcgatgcgctaccgccggcgcttgggacgctcgcagcccgctgcggcgccagcgaaaaaaccatcagccgcctgttccgccgcgataccggtatgtcctaccagcagtggcgtcagcagtggcgattaatgaaggcagttgagatgctggctaccgggcagcggattaccgataccgcgatggcgcttgatttcgccagcgatagcgcctttatctactttttccgcaccatgaccggcatgacgccgggacgctatttcgccccctga

SEQ ID NO: 175410 - DNA, 753 bp, Klebsiella oxytoca
atgacctattgcgtggccatgtgtttgtcagatggactggtgtttgcctcagactcccgcaccaacgcgggagtggaccatattgcaacgtttaaaaaactgcacgttttccatcaggatggcgaacgcgtcatggtcctgcagtctgcgggtaacctggccacgactcagagcgtgattagcctgctcagcgcccgcattcgtacccagcaggaaccgaatctgatgcaggtgacttcgttatacgacgcggcgatgctgatcggcaaaacgttgcaggaggtgattcaacgcgacgccagcaatcagcagaactgcggcaataccaacttcaactgtaacctgctgctcggcgggcagatcgccggggaaacgcaccggctgttccatatctatccggaaggcaactttattgaagccacgcgcgacacgccctatttccagattggcgagagtaaatacggcaaaccgatcatcgaccgggtcctgaccatcgataccccccttgagcaggcgatgtgctgcgcgctgatctcgatcgactccaccttgcgcagcaatctttcggtgggactgccgctggacacgctgctctaccgcagcggtagcctgagcagcgccgggcagcatcggatcaccgagaatgatccctatttcaataccattcgcaaagcctggtccgaggggttacaaagcaccttcctgcagctgccgccgttcacgccgggcggccaggatcagggggcgaaatag

SEQ ID NO: 175411 - DNA, 816 bp, Klebsiella oxytoca
atgaaactggtaatcgatcacctgacccgctacggctacgatgaagaagtgaagttttcaacccagtacctgcgcctgacgccgcgcagcagcggtcggcagaagatcaccgcctggacattaaccctgccggacggttccgccgtcgccaccaccgacgcgtggggcaacgtgctgcacgtgctgacgctggataatccgcataaagagattaccatccgcgccagcgggatcgtcgatatcgtggaagagggggaagagattggcgcggagccgcaggagctgctgtcgccgctggttttcttgcgctgtaccccgcttacccgcgctgacggcccgatccgcgaatttgcccagcgctggtatcagccggaggctcaggaagcgagcctgaaccggttaatgaccgagctgctgctgagaatgccctattcgccgggcgccacgcaggtacaggactcggccgccgacgcgttcgcgcgatcgaaaggggtttgccaggatcacacccatgtgtttctcgcctgctgccgggcgctggcgatcccggcgcgctacgtcagcggctatgtctacagcgataacgccgagcatgtcgctatgcacgcctgggctgaagtatggctgaacgatcgctggcagccgtttgatatcacgaacaatacccgccgtctgaatcagcatttgcggctggcgaccgggctggactatcttgatgcgtgtccggtgcgcggtacccgcctcggcggcggcggagaaattttgttaactaacgctgaggtgcgcgagcattcacagcaggcgcagcagcaataa

SEQ ID NO: 175412 - DNA, 930 bp, Klebsiella oxytoca
atgttaagccgcacagcgagtgaactcttctggatggcgcgctatcttgagcgcgcggaaagttatgcccgggtgctggacgtgacctggaagctgtcgatgatcccccgccacagccagcagtcgcgggatttagccttgccgctaaatctatcgctgacccacgagctgtttcaggcccggcacgcgcgtttcaccatgagcaacctgcttaattttttcgccctcgacggcaacaacccgtacagcatttttagctgcgtcgagatggcgtggaacaacgcccacgcggtgcgcggcagcctgtcggcggaagtgtgggaaagcatcaacgccacgcgtattgagctgcgaaaactgcgccagcaggggatcggcgagctgggcaacgacgccttctttgagtgggtaaaagagcgggttcatttgtttcgcggggcgattctcggcacgctgctgcgtaacgacgccctgagctttatcggtatcgggacgctgatcgaacgggcatccgccaccgcccagctgctgctgattaaggatcagcagttaaacagcgatcccgatccggtccgcgagtattaccggctggatacgctgcttaacgcggtcagcgcacgcgaggcatataacagcatctaccgccagccggtcagccgcgaaacggtgatggagctgctgatcctgcgcaacgatgtgccgagatcgctgcgagcgagcatttccgacctcgtcgggcagctggagcagattgccaacgatcgttcgcacttgccgctgcgcctggcgcaccagcttaacgtcgacctgcgttttagcacccgcgacgatctggcgcaggctgatttgcaggtcacccttaatgcactgctggcgcggattaacgcgctttccgacagcatcagacaaacctatctggaggcgttatga

SEQ ID NO: 175413 - DNA, 1440 bp, Klebsiella oxytoca
atgataaaaataacgcttcctgacgggcattattatgatgagatgcttaccgcacagggagagcagcgtcagcactataacgcctggtggcaatggtttcgcagtaccgatcaattctctatccggcagaaaaaagagcaggcggagctgctctttcaccgcatcggcatcacttttaacgtctacggcgaagacgaggggaccgaacgtctgatccctttcgacagcgtgccgcgcattatccccgccggcgagtggcagcgaatcgaccgcggcatccgccagcgggtgaaggcgctcaacgcctttctttacgatatttaccacgatcaaaatatcctgcgcgcgggactgatcccggccgaacaggtgctggcgaatgaacagtatcagccctgtatgcaggggataaacttacccaataacacctatgcccatatcaccggggttgatatggtgcgcaacagcgacggccagtattacgtgctggaggataatctccgcaccccctccggcgtctcctacatgctggaaaaccgcaaaatgatgatgcggctctaccccgaaatgttcgaacagcatcgtattgcgccggtagaacgctaccccagctatctgctgcaaacgctgcgcgaaagctcgcccgtggacgacccgtgcgtggtggtgatgaccccagggcggtttaacagcgcctattttgaacacagctttctggcccagcagatgggcgttgagctggtggagagcgcggatctgtttattaaaaccggggcggtgtatatgcgcaccaccgaggggccgcggcgcgtggacgtcatataccggcggatcgacgatgcgtatctcgacccgctggcctttcgcgccgactctatgctgggcgtgccggggctgctgtcggtgtaccgcgccggaggcgtggtgctggcgaatgccatcggcaccggcgtcgccgacgataaatcgatctaccccttcgtgccggagatgatccgtttctatctgggcgagcaaccgatcctcagcaatattcccacctggcaatgccgtaaagcggaagatctcagctacgtgctgagccatcttgagctgatggtcgtgaaggaggttcacggcgcgggcggctacggcatgctggtcggtccgcgctcgaccaaagaggagcgcgatgcgtttcgtcagcgtctgctggcaaacccggccaactatatcgcccaggacaccctggcgctgtcaacctgcccgacctttatagaagaggggctggcgccgcgccatatcgatctccggccctttgtcctttccggtcaggagatccgcctggttcccggcggcctgacgcgggtggcgctaaccgaaggctcgctggtggtgaactcgtcgcagggcggcggcaccaaggatacctgggtgatggaggaggacgaatcatgttaa

SEQ ID NO: 175414 - DNA, 2781 bp, Klebsiella oxytoca
atgtatgacagtaaagcggggaccccgctggaagggtttgccgaatttgccgccgccgccgctgccgagggcgcggtgctgctgagaaacgatcgcggcatgctgccgcttgacgctcagcagccggtttcgttatttggccgtacgcaaattgactactatcgtagcggtaccggctcgggcggggcggtaaacgtggtgagccgaaccaccttgttgcaggccatgcgcgcgcgcagcggggagaagctcaatgagcagctggccacgctttacgagagctggacgcaacagcatccttttgacaacggcggcggaggctgggcggctgagccctggtatcagcaggagatgccgctgagcgatgagcagattcgtcaggcccgcgccgtctcgacccaggcggtgattgtccttggccgtaccgctggtgaagatcaggataacgcggatgttgaaggcggataccggctcacggccaacgaaatgatgctgctacatcaggtctgccgcgagtttgacgatgtggcggtcgtgctgaataccgccgggcttatcgatctcgcatgggccgacgatccgctgctgcgtactcgcattcgcgcgctgctgtacgtgtggcacggcggcgccgacggggcgcaggcggctgcttcgcttctctatggtgaggtaacgccatccggcaagctggtgggcagcatcgtcaaatcgctggatgaccatccggcatcgccctgctggggagcggaagcgcaaaacctctatcaggaggatatctacgtcggctatcgctactttgaaaccttttgtccccagcgtttgcagtttccttttgggtttggtctctcctatacccgcttcaccctgcaatcggcgcgggcggaagcctttgacgaccagatccagacgaccatcaccgtaaccaacgacggcgcgcgttttgcgggcaaagaagtcgtccagatttaccttcaggcgccgcagggcgcgctcgggaaaccggccagggcgctggtggccttcgccaaaacccgcctgctgcagccgggtgaaagcgaaaccttaacgttatcgatcccgctggagcgttttgcttccctcgacgatagcggggctaccgggcatccccattgctacgtgatggaacccggactgtatcgtttattgatcggtaacagcgtgcgcgatctgcaacctttgccggtagacggagaggcggggtacacgcagaagactctgcggatcctctcccgccatcagcaggtgctggcgccaacggtacctttcgtgcgcattaggcccgctggcgatggcggcgatgggcgctaccagatcgaatgggaagaagtgccgcgacggaagattaacctgcgctcgcgtattgaggagcgcctgccagagagcatcactctcaccggcaaccaggggcttaccctcagcgacgttgcggaagggcgcgcgacgatgaacgcttttgttgctcagctgtcggtggaggagctggcctgtctggtgcgcggggagggcatgtgcagctacaaagtcacccccggcgtcgcgtcggcctttggcggagtggcggacagcctgctggaaaaaggcattccgctggcgtgtgccgccgacgggccttccggtattcgcatggataacggcgcaaaggccactctgctgcccagcggtacgctgctggcctccagctgggacccgatactcgtggagcgtttatacgtgatggagggcaaggagctgctgcgcaacggtatcgacctgctgctggggccggggatgaacatccagcgccatccgctcaacgggcgcaattttgaatatttttccgaagatccgcttatcaccgggatgatggcggcggcggtggtgcgcggcattcgcagcggcggcggcgtggcgacgcttaagcactttgcctgtaataatcaggagtttgccagagccacagcggactcggtagtgtcggagcgcgcgctgcgtgaaatctacctgaaaggctttgagtacgcggtgaaatccgccggcgccagcgcggtgatgaccgcctacaacccggtcaacggttaccaggcggcctccagctacgatctcaccaccaccatactgcgcgaagagtggggctttcgcgggatcgtcatgaccgactggtgggcaacgatgaacgatcccatcgatggcggcgcggcgagcacccgcaacaccgcggcgatgatccgcgcgcagaacgatctctatatggtggtcaataataacggcgcggaggttaacgctgccggtgataacaccctggcggcgctggcaaaaggggaactcacgctcggggagcttcagcgctgcgcgataaacatcctcgattttatgctgcagactcaggcctttaagcgtggagaggcgccccgggcgaatgtgattcacctggcggcagaaccggcctgcgccgccggctgcgagggggcaattaaaatcgccgagcagtcgcgtctgcgctatgacgaggacctggtgctgagcgttgaacaggcggcagtctacgatgtgctggtcagcgtgtacgccgacggcgcgccgctggcgcaaaccgccggcaatctgctgctcaatgaccagttcgtggcaacgatacacacccacggcacgctcggccgggaaatggtgcagaagctgtgtcgggttgcgctacagccggggaaataccgcgtggggtttgacgttatcaagccgggtctggtggtggagtggctggagctgaggcgcgttaacgactaa

SEQ ID NO: 175415 - DNA, 1392 bp, Klebsiella oxytoca
atgaaagtgaaatatatcgctctggttatgagtgccgtattttctggcggtctgctggccgcccaaaataataactctgtggatattgaaaaacggttagcacagcttgaacagcgtttaattaacgctgaacagcgggccgccgatgcggaagcgaaaattcagacgctaacccagcagcagaacgtggcggcgaaaaatgcgccaaccgtgaaggtcgagtctgcggagcccgtcgcaccgggcgcggcgccaacgaaactgacgctctctggctatggggatatcaagttttacggcgatgtcgaattcaacatggacggcgccagcagcagcggtagcctgacgtcggtaaaaacctcttccaataaaaactgggcgccgggtactaaagaacgttgggatattaacggccgtattctgctgggcttcgatggtatgcgcaaaatggataacggcaatttcgccggtttctccgcccagccgctggccgatatgaccggtaagatgaaccttgatgatgcggtattcttctttggccgggaagatgactggaaggtcaaagttggtcgtttcgaagcctacgatatgttcccgctgaatcaggatacgtttgtcgaatactccggcaacacggctaacgacctttatagcgatggctacggctatatttacatgatgaaagagggccgcggccgtagcagcagcggtggcaacttcctgctcagtaaaacgatagataactggtatttcgaacttaataatctggtggaaaatggcagcacgctgttccgggactccagctatcacggcaataacctggaaaatgagaaaaacgttgcctatttacgtccggtgattgcgtggaatagcggtcgcttctctaccgccgtcgcgatggaaaagaacgtcgtgaagaatgcttacggttattacgacaatcgcggcagttggatcgaccagtcggaccgcaccggctatggcttgacgatgtcatggaatggacaaaaaaccgatccggaagatggggtcaccactaacctgaacgtggcctatatggatgcctccgatgagaaggatttcaccgcagctattaactccctctggcatcgttttgaactgggttatatctacgcccacaacaaaatcgacaagttcaactcggctaattatgtctctacttgcgacgatggctgctggatctccaacgtgggtgactacgatatccacaccattcacgcgtcgtacctgttccccaatgtcatggatatgaagaacttcaatatctaccttggcgcttacgcctcgtggattgaagcgaaaccaacggatggcgacaaacatgaagactcccgctacggcggccgtcttcgcttcaaatatttcttctga

SEQ ID NO: 175416 - DNA, 1359 bp, Klebsiella oxytoca
atgtctgctggcgacaaaatttctgtcagagaaaaagtaggttacagcctgggggacgcagcgagccatattgtatttgactcctccgttgccatcttagcctacttctataccgatatttatggtctaccgcccgccgtgatggggacgatgtttttgctggttcgtctgctggatgcgattaccgatccgattatgggagcgattgcggatgccacctcaacccgctgggggcgctttcgtccttggctgctggcgatatgcgtcccctttgcggtgagctgcgtgctggtttattccattccatctttctctgactcgggaaaaattgtttacgccgtggcggcatatatattcatgacactgatgtataccgcgataaatatcccttactgctcgctgggcgcggcgctgacctccgatccgcgcgagagtctctcgctgcaatcctggcgtttcgctatcacgccgatcggcggggcgctcggtaccgcgtttattctaccgttggctgactttctctatccgggcgaccgtgcgaccggtattcaggtgtcgatggcaatatttggcgtgatcggctgcctgatgtttatcacctgtttcgccaccactaaagaacgcgttcagccgattaaagaagaaaatctgaatattgcccgcgatgtgaaaattcttttccgcaacgatcagtggcgtattctctccgtttacaactttatgatgctggttgccgtggtgattcgcggcggcgccgtcgtttattatgttaatagcgtgctgcacaaaggcgccgacgtgattacggtattcatgcttggtgggatgtttgcctccatgctgggctcggtgctggcaaaaccgttcggtacgcgtttttgtaaagtcagactctctttctggattaacctgttgaccgctgcgctgggggtcgtgtgctttattgtaccggtgcaatattggcttctggtgcttggggtccatattctgatctccattattcagggcggtaacggcgcgctgcagtggtcgatgattaccgatgtgaacaactacggcgaatggaaaacccagcggcgtattaccggtatgaacgttgcggccaatatctttgtgataaaactgggcgtcgccgtcggtggggcgatccttggctggatattagcctattaccattacgccgctaacaccacggtacagccggcttccgccgtacagggggtggtgctgttattcacgctggtaccttctgttttttatgttcttaccgcagtctctattaaattctatggcttaactgaaaatagaatgaatggcatcgttgatgatttgaaaaacggaacttttgctgaatcctga

SEQ ID NO: 175417 - DNA, 147 bp, Klebsiella oxytoca
atgccgcttgtctatttatttttcttattcacggattatgttttttatcaattaccagatattcagcgccccccgaagtaccatacaagacagcactgttttaatcgccaatattttgtcggcgcggaacagagcgatgcccggtaa

SEQ ID NO: 175418 - DNA, 1707 bp, Klebsiella oxytoca
atgacgagtccggtttcccgtcgccccgcaacccttcgtctggcgctcgggggcgcatttgtcgctctggcgacgctgacggctcaggctgaagagacccgccctatcccgcaatcgcccgatatcctgctcggaccgctgtttaacgacgtgcaaagcgccaaacttttctctgaccagaaaacgttcgctgacgccatccctaacggcgatccgctgatgatccttgccgattatcgtatgcagaaaaatcagaccagctttgatttgcggcactttgtcgagcttaactttaccctgcctcaggaaaacgaccagtacgttccgccaaaagggcaaaccctgcgccagcatatcaatggactctggccagtgctgacccgcagtaccgttgaagtagaaaaatgggattcgctgctgccgctgccaaaaccttacgtggtgcccggcggacgctttcgcgaagtctattactgggatagctacttcaccatgcttggcctggctgagagcggccactgggataaaatcgaagatatggtgaccaactttgccgccgagatcgacgcctggggtcatattcccaacggcaaccgcacttactatctgagccgttcgcagccgcctttcttcccgtttatggttgaactgctggccacccatgatggcgacgaggcactcaagaaatggctgccgcagatggagaaagagtaccagtactggatggatggcgctgaggcgcttcagcccggcagcgccagcaagcgcgtggtgcgcatggccgacggcgcgctgctcaaccgctactgggatgataacgacacgccgcgcccggaatcctggctggacgatgtgaccaccgccaaaaataaccccaatcgtccggcgactgaaatctaccgcgatctgcgctctgccgcggcatccggctgggactttagctcacgctggatggataacccgcagcagctcggcactatccgtaccacctctattgttccggtcgatttgaactcgctgatgttccatatggaaaaagccatcgctcgcgccagcaaagcggcgggagactcgaccaaagccgcgaagtatgacgcgttagccaatgcccgccagaaagcgctggaaaactacctgtggaatgataaagagggctggtacgccgattacgatcttaaaagtcataaggtgcgcaatcagctgaccgccgcggcgctgttcccgctgtacgttaacgccgcctccagcgaacgcgctgcgaaagtcgccgccgccaccgaaacgcggctacttaagcccggcggcctgaccaccaccacggtgaatagcggccagcagtgggacgcccccaacggctgggcgccgctgcagtgggtcgcggcggagggtttgcaaaaatatggccagcaaaaaattgcgatggaggtaagctggcgtttcctgagcaacgtccagcacacttacgacagcaaacagaagctggtggaaaaatatgatgtcagttcgacgggaaccggcggcggcggcggcgagtatccgctacaggacggctttggctggaccaacggcgtcacgctgaagatgctggacctggtgtgcccgaaagagaagccgtgcgattccgtgcctaccgcgcgcccggcggcgaatgacgatatcggctcggcgcagcctgctgcggttgaggagaaaaaagccgcgcagtga

SEQ ID NO: 175419 - DNA, 675 bp, Klebsiella oxytoca
atgccgcctggagcgtttattgtcatctccgtgcggcaaacttcagccaataaggatagatgtgtgaaattgagatggtgtgtttttttatttgtattgttggccggttgtagttcaaaacacgattatcgtaacccgccgtggaatccggaagtcccggttaagcgggcgatgcagtggatgccaatcagcgaaaaagccggcgcggcgtggggcgttgatccccagttgattaccgccattatcgccattgaatccggcggcaacccgacggtggtcagcaaatccggcgcggttggcctgatgcagctgaaaccctcaacgtccgggcgcgatgtttaccggcggatgggctggagcggcgatccttcggtgagcgaactgaaaaatcccgagcgtaatatttctatgggggcggcctaccttagcattctcgagaacggtccgctggcgggcattaaagatccgcaggtaatgcgctatgcggtggtggtttcctacgccaacggcgcgggcgcgctgctgcgcaccttctcgtctaatcgccaggatgcgattgaggagattaacgatatggacgccgatgatttctttgagcacgtggtgaagaaacatccggcaccgcaggccccgcgctatatctggaagctgcagaaagcgctggacgccatgtaa

SEQ ID NO: 175420 - DNA, 915 bp, Klebsiella oxytoca
atgtctcagttttatctcatcgccccctccggctattgcatcaaccaggaagcggcgaatcgcggcgtgcaacgtctgcaggaggccgggcatcaggtggcgcaccaggaagtcattccccgccgggcactgcgctttgccgggactgagaaccaacgccttgccgatattaaccagctcgccgccctcgacggcaaaaaccgtatcgtgctggcggtacgcggcggctacggcgcgactcgcctgctgccgcaaattgactggcaggggctcattgcccgtcagcagcaggatccgctgctcatttgcggccacagcgatttcaccgccatccagatgggcctgctggcaaagggtagcataatcacttttagcgggccgatgctggcgggaaactttggcgccgaagcgcttaatgaatttaccgaacaccatttctggcaggccctgcgcaacccggcgtttacgcttgaatggcacggcgaggggcccgactgtcgcgccagcggcacgctatggggcggcaacctggcgatgctgacctcgcttatcggtaccccgtggatgccgaagattagcgacggggttctggttgtggaggatattaacgagcatcccttccgcgttgagcgtatgctcttgcagctgcttaatagcggtattctggcgcgccagcgggcgattatcctcggcagctttaccggcgctgtcgccaacgactacgatgccggatacgatctgccgatggtatacgactaccttcgccagctgcttaacattccggtcatcagcggcctggattttggccacgagcagcgcacggtcaccctaccgcttggcgccagagcattgctggtcaacaacgcctctgccacgacgttgagcatcagcggccacccggtactgacagaataa

SEQ ID NO: 175421 - DNA, 1734 bp, Klebsiella oxytoca
ttggacgccgctgcggtcatcagtctgtttatcctgggttctgttttagtaacctgtagcatcttattaagttccttttcctcacgcctcggcatcccgattctggttatcttcttagccattgggatgctggcgggtattgacggtatcggcggcattccgtttgacaactaccctttcgcctacatggtaagtaacctggcgctggcggtcattctgcttgacggcgggatgcgcacccaggccagctcctttcgcgtagcgctttggcccgcgctgtcgcttgccacggtcggggtgttaattacctcggccctgaccggactcatggcggcctggctgtttaaactcgacctgattgaaggcatgctgatcggcgcgattgtcggctcgacggatgccgcagcggtgttctcactgctcggcggaaaagggctaaacgaacgcgtcggctcaacgctggaaattgaatccggcagcaacgacccgatggccgtgttcctgaccattacgcttatcgagatgattcagcagcatgaaaccggcctgagctggatgttcctggtgcatatcgtgcagcagtttggcttaggtatcgccatcggtctcggcggcggctatctgctgctacagatgattaaccgcattgtgctgcccgccgggctttacccgctgctggcgctgagcggcgggatcatgattttcgccgccaccacctcgctggacggcagcggcatcctcgcggtctacctgtgcggcttcctgctgggcaaccggccgattcgcaaccgccacggcattctgcaaaactttgacgggctggcgtggctggcgcagatcgccatgttcctggtgctcggcctgctggtcacgccgtcagacctgtggcccatcgccatcccggcgctcattctgtcgatgtggatgattttcatcgcccgtccgctgtcggtattcgccggcctgctgccgtttcgcggctttaacctgcgcgagcgcatatttatcagctgggtgggtctgcgcggcgcggtgccgattattctcgccgtctttccgatgatggcgggcctggagaatgcgcgcctgttctttaacgtggctttcttcgtggtgctggtctcgctgcttttacagggtacgtcgctctcctgggcggccaaaaaagccaaagtagtggtgccaccggtcggatcgcccatctcacgcgtcgggctggatatccatccggaaaatccgtgggagcagtttgtctatcagttgagcgcggagaaatggtgcgtcggcgcggcgctgcgcgacctgcatatgccgccggaaacgcggattgccgcgctattccgcgataacgctctgctgcaccccaccggcagcacccgcctgctggaaggcgatattctctgcgtgattggccgcgaacgcgatttacccgcgctgggtaaactgttcagccagtcgccgccggtggcgctcgatcagcgcttcttcggtgattttattctcgatgccagcgccaggttcgccgacgtggcgcagatttacggcattgacgggggagaagagtttcgcgatcgtcagcagtcgctgggtgacgtcatacagcacctgttaggcgcagccccggttgtcggcgaccaggtggaatttgccggcatggtgtggacggtggcggaaaaagaagaggatcacgttctgcgggttggcgtacggatggcggaagatgaggcggagtga

SEQ ID NO: 175422 - DNA, 1071 bp, Klebsiella oxytoca
atgtctcgtcctgtaaaggccagcattgatatgtcagccttacgccagaatcaacaaattgttcgccgcgcggcgcccggctcgcgcctgtgggcggtggtcaaagccaatgcgtatggccacggtctggcaagggtctggaatgcgcttagcgccgcagacggtttcgcgatgctgaatcttgaagaggcgatactgctgcgtgagctgggctggaaagggccgatactgatgctggaaggcttttttcatgccgatgagctggcgttatttgataaataccgcttgaccaccagcgtgcacagtaactggcaaattaaggcccttcagcaggcgaagctgcatgcgccgcttgatatttacgtcaaggtgaatagcgggatgaaccggctggggtttatgccggatcgtctgcaaatcgtctggcagcagctgcgagcgctcagcaacgtcagtgaaatgacgttgatgtcgcattttgccgaagcggaaaatccggatggcatcgcggagccgatgcggcgcattgagcaggcggcggaagggctggattgcccgcgctcgctggcgaactcggcggccaccttgtggcatccggagtcgcattttaactgggtgaggccggggatcgtgctttatggcgcttcgccttccggccagtggcaggatgtggccaataccgggctgaaaccggtcatgacgctaagcagcgaaattatcgccgtgcagaatctgaaagccggtgaagcggttggatacggcgcaacctggcgcacggctgaggagcggcgaatcggcatcgttgcctgcggctatgccgacggctacccgcgcttagcgcccagcggaacgccggtgctggttgatggcgtccgcaccgtaacggtcgggcgtatctcaatggatatgctggcggtggacctgacaacctgcccgcaggcaggcattggcgcgccggtcgagctatggggtaaagagatcaaaattgacgatgtcgcagcctcctgcggcaccgtcggatatgaattaatgtgcgcccttgcgccgcgcgtgccggttgtgacagtgtaa

SEQ ID NO: 175423 - DNA, 1299 bp, Klebsiella oxytoca
atgcgcgtcgtcatactgggaagtggggttgtaggagtcgcaagcgcctggtatttaagccaggcaggacatgaagtgacggttatcgaccgtcagccgggaccggccgaagagaccagcgccgctaacgccgggcagatctcccccggctacgccgcgccctgggcggcgccgggcgtccctttgaaggcgattaagtggatgttccagcgccacgctccgctggctatcggtctggatggcacccagttccagctgaaatggatgtggcagatgctgcgcaactgcgacactcgccactatatggaaaataaaggacgaatggtgcgcctggccgagtacagccgcgactgcctgaaagcgctgcgcgagagcaccggtattcagtatgaagggcgccagggtggtacgctccagctattccgcactgacaagcagttcgagaacgcgacccgcgatattgcggtgctgcaggatgcgggcgtgccttaccagctgctggaagcgaatcgcctgctggaagttgagccggcgctggcagaagtgagccataagctcacgggcggtttgcgcttacctaatgatgaaaccggcgactgccagctcttcaccactcgtctggcccgaatggcggagcaggcgggcgtgactttccgttttaatactccggtggatgaactgctctatgaaggggatctcatctcgggtgtgaagtgcggcgctgaaattattaaagccgatgcgtacgttatggcattcggatcctattcgacggccatgctgaaagggcgggtggatattccggtctatcccctgaaaggctattcgctgacgatccccatcgcggaagaggacggcgcgccggtttcgactatccttgatgaaacctacaaaatcgccatcacccgtttcgacaggcgtattcgcgttggtggaatggcggaaattgttggatttaataaagaactgctgcagccgcggcgtgaaaccctggagatggtagtgcgcgatctgttcccgcgcggcggccacgttgaacaggcaaccttctggaccggactgcgtccgatgactccggacggtacgccggtggtggggcgtacggggtataaaaatctgtggctcaacaccggccacggcacgctgggatggaccatggcctgtggttcagggcagctgattagcgacctgatctccggacgcacgccggcgatcccgtatgacgatcttgccgtcgcccgctacggacgcggctttacgccggcccgcgctcagcatctgcatggcgttcacaattaa

SEQ ID NO: 175424 - DNA, 1533 bp, Klebsiella oxytoca
atggctacgattgattccatgaacaaggacacaacccgtttaagcgatggacccgactggacttttgagctgctggagacctatctggcagaagtcgaccgggtggcgaagctgtaccgtcttgacacctatccgcaccaaatcgaagtcattacttccgaacagatgatggatgcctactccagcgtcgggatgccgattaactatccgcactggtcgttcggtaaaaaattcatcgagaccgaacaggcctataagcacggccaacaggggctggcttacgaaatcgtcattaactccaacccctgtattgcctatttgatggaagagaacaccattaccatgcaggcgctggtgatggcgcacgcctgctacgggcataactcgtttttcaaaaataactatctctttcgcagctggaccgatgccagctcaatcattgactatctcatcttcgcgcggaaatacatcaccgaatgtgaagagcgctacggcgttgatgaagttgaaaaactgctcgactcctgtcatgccctgatgaattacggcgttgaccgctataaacgcccgcaaaaaatctcgctgcaggaggagaaggcgcggcaaaaaagccgggaagagtatctgcaaagccaggtgaatatgctgtggcgcacgctgccgaagcgagaagaggaaaaaaccatcgaagccgcgcgtcgctacccttctgaaccgcaggaaaatctgctctatttcatggagaaaaacgcgccgctgctggagccgtggcagcgtgagatcctgcgcatcgtgcgcaaggtcagccagtatttttatccgcagaagcagactcaggtgatgaacgaaggctgggcgactttctggcactacaccatcctgaatcacctttatgatgaaggtaaagtgacggagcgctttatgctggagttcctgcacagccacaccaatgtggtgttccagccgccatacaacagccagtggtatagcggtattaacccctacgcgctggggttcgccatgttccaggatatcaaacgtatttgtcagtcgccgacggaagaggacaaatactggttcccggatattgccggctctgactggcttgaaactctgcacttcgcgatgcgcgactttaaggatgaaagctttatcagccagttcctgtcgccgaaaatcatgcgcgacttccgcttcttcaccgtgctggatgacgatcacaacaactatctcgaaatatccgcaattcataatgaagagggatatcgtgagattcgttccaaactttcagcgcagtacaacctgagcaacctcgagccaaacattcaggtatggaatgtggacctgcgcggcgaccgctcgctcaccctgcgctacgtgccgcacaaccgcgtgccgctggataaaggccgccgtgaggtgcttaagcacgttcaccgcctgtggggatttgacgttcttctggagcagcaaaacgccgatggcagcgtcgagttgctggaacgcaccccgccgcggcagaacccgctgtag

SEQ ID NO: 175425 - DNA, 720 bp, Klebsiella oxytoca
atggtcattaaggcgcaaagccctgcgggtttcgctgaagagtacatcattgaaagtatctggaataaccgttttccccctggttcaattcttcccgctgaacgtgaactttctgaactgattggtgttacccgtacaaccttacgtgaagtgttgcagcgtctggcccgcgatggctggttaaccattcagcatggtaaaccgacaaaggtgaacaatttctgggaaacttcaggtttgaatattcttgaaaccctggcgcgtctcgaccatgacagcgtaccgcagctgattgataatctgctgtccgtgcgtaccaatatttcgaccattttcatccgtaccgcttttcgtcagcatccggataaggcgctggaggtactggcgagcgcgcgtgaaattgaagaccacgccgatgcgtttgccgagctggattacaatatcttccgcggtctggcgtttgcctcaggcaatcccatttatggtctgatcctcaacggtatgaaaggcttatatacccgtatcggtcgccactattttgccaatccggaagcgcgcagcctggcgctcggcttctatcatcagttggctaaagtttgtgaagagggcctgcatgagcaggtttatgacatcgtacgccgctacggccgcgacagcggtgagatctggcatcgaatgcagaagaatctaccgggcgacttagcgattaatatgcgttaa

SEQ ID NO: 175426 - DNA, 1563 bp, Klebsiella oxytoca
atgtctgtcgtggaaatgtcttatggccgcgccctgtggcgcaattttcttggccagtccccggactggtacaaactcgctctcatcattttcttaattgttaatccgctggtcttttatctgcatccgtttattgccggatggctgctggttatcgaatttatcttcaccctggcgatggcgctcaagtgctatcccctgctgccgggcggcctgctggccattgaagcggtatttatcggcatgaccaccccggggcatatccgcgaagaggtggccagtaatcttgaagtcctgctgctgctaatgtttatggtcgcggggatctacttcatgaagcagctgctgctgttcatcttcacccgcttgttgcttggcattcgtagcaagatgctgctgtcgctggcgttttgcgtcgcatccgctttcctctccgccttcctcgacgcgttgaccgttgtcgcagtggtgataagcgttgccgtcggcttctacggtatttaccacaaagtcgcttcggcgcggccggatgatgacaatatgctcgacgacagccatattgagcagcactatcgcgatgtcctggagcagttccgcggcttcttgcgcagcctgatgatgcatgccggggtcggcaccgcgctcggcggcgtgatgaccatggtcggcgagccgcagaacctgatcatcgccaaggcggcaggctggcacttcggcgaattcttcatgcgtatgctgccggttagcctgccggtgctggtatgcggactgatcacctgtctgctgctggagaaattccgcctgtttggctacggcgaaccgctgccgccaaccgtgcgcaaagtgctacaggattttgacgatcgcagccgccagagccgcagtcgtcaggatcgcctgcgtcttatcgctcagggtcttatcggcgtctggctgattatcgcccttgcgatgcatcttgcggaagtcggcctgatcggcctgtcggtgattgtgctggcgacaacgttctccggcatcaccgatgaacacgctatcggcaaagccttcaccgaagccctgccgtttaccgccctactgacggtcttctttgccgtggtggcggttattattgaccagcacctttttgccccggtgatcgagttcgttcttcaggcatcgccgcacgcccagctatcgttgttttatctgtttaacggtctgctgtcgtcgatttctgataacgtcttcgttggaaccgtctatatcaacgaggtcaagtccgcgctggagcagggtaccatcagtttgccgcagttcgagctgctggcggtggcgatcaataccggcaccaacctgccatcggtcgctacgccgaacggccaggctgcttttttgttcctgctgacttccgcgctggccccgctgattcgcctctcctatggccggatggtgtggatggcgctgccctatactctcgtcctgaccctcgtcggcctggcctgcgtcgagtttaccctgatgccggccacccagtggatgctggagcacggttggctggtgacgccgcaactgctgaaataa

SEQ ID NO: 175427 - DNA, 531 bp, Klebsiella oxytoca
atgttgcgatatttaaaccagtgctcaaggggacgcggtgcctggctcctgatggcgctaaccgcgtttattcttgaattggtggcgttatggttccagcacgtgatgctgctgcagccgtgcgtactgtgtatttacgagcgctgcgcgctatttggcgtgatgggcgccggtatcgtcggcgccattgcgccaaaaacccctctgcgctacgtcgcgattgtgatttggctctacagcgccctgcgcgggctgcagctgtcatgggaacacaccatgattcagcttcacccttcccccttccagacctgcgatttcgccgctcgtttcccaacgtggctgccgctggataaatggctgcctcaggtgtttgtcgctaccggcgactgctccgtacgccagtgggaattcctgacgctggaaatgccgcagtggctggtcggcatcttcgcagcctatctggtggtcggtgtactggtgcttatcgctcagccgtttaaacctaaaaagcgcgatctgtttggtcgctaa

SEQ ID NO: 175428 - DNA, 345 bp, Klebsiella oxytoca
atgtctcatttgcgtattcccgctagctggaaggtaaaacgctccaccccattctttactaaacagaacgtacccgccgctttgctgacgcaccacaacaccgcagcgggtgttttcggccagctttgcgtgatggaagggacggtaacctactatggtttcgccgatgaacaggcgacagagcctgaggcaaaagtcgttatcaatgctggccagttcgcaaccagcccgccgcagtactggcaccgcattgagctaagcgacgacgcgcagttcaatattaacttttgggttgcagatgacgccgacggtgaaagcggactattccacgcgaagaaaggctaa

SEQ ID NO: 175429 - DNA, 447 bp, Klebsiella oxytoca
atgagcgaacaacctttctggcaacaaaaaacactggatgaaatgagcgatgcggagtgggaatcactttgcgatggctgcggtcagtgctgcctgcataagctgatggatgaagataccgacgaaatctactttaccaacgtcgcctgccgtcagctcaatatcaaaacctgccagtgtcgtaactatgagcgccgcttcgagtatgagccggattgcatcaagctaactcgcgacaatctgcctacgtttgaatggctgccgccgacctgcgcctatcgtctgctggcggaaggccagccgctgccgcactggcatccgctgttaaccggttcgaaggcggcgatgcatggcgaacgcatctccgttcgccatattgcggtgaaagaatccaccgtggttgactggcaggatcatattctgaataaaccggactgggcgcagtaa

SEQ ID NO: 175430 - DNA, 660 bp, Klebsiella oxytoca
atgtaccaacatcataactggcagggtgcgctactggattatccggtaagcaaagtggtttgcgttggcagcaactatgcaaaacacatcaaagagatgggcagtgcgacgccggaagagccggtgctgtttattaaacctgagacggcgctatgcgacatccgccagccgttggtgctgcctgaggggctggggtcagtgcaccatgaagttgagctggcggtactgattggcggtacgctgcgccaggcgacggaagatcatgtgctgaaagccattgctggctatggcgtggcgctggaccttaccctgcgcgatctgcagggaaaactgaaaaaggccggtcagccgtgggagaaggccaaaggctttgataactcctgtcctgtttcaggctttattcccgccgccgagtttcacggcgacgcgcagagtactccgctgagtctgaaggtgaacggcgaagtgcgccagcagggttcgaccgccgacatgatccataagattgtgccgctcatcgcctatatgtcgcgcttttttaccctgaaagccggggatgtggtgctgaccggtacgccggaaggcgtagggccgctgagcagcggagacgagctggaagtcggttttaacggctttttgctgactacccgcgtgctgtaa

SEQ ID NO: 175431 - DNA, 282 bp, Klebsiella oxytoca
atgttttgtgtgatctatcgaagtactaaacgcgagcaaacctatttatatgtcgaaaaaaaggacgatttctcccgcgttcctgacgaattaatgtatagcttcggtacgcccaaactggcaatgattctaccgctcgatggacgaaaaaaactcattcacgccgatttggagaaagtgaaacaggcgctcaccgatcagggctattaccttcagctgcctcctccgtctgaaaatttactcaagaaacacctggcggaacaggggaataaatctgattaa

SEQ ID NO: 175432 - DNA, 699 bp, Klebsiella oxytoca
atgtcaaatacgccaatcgaacttaagggcagtagcttcaccttatctgtggttcatttgcacgatgcaaatcccgaggttattcgtcaggcgttagaagacaaaatcgcccaggctcccgcctttttacggcacgctcccgtggtggtgaatatcagcagcattgaagatgacgtcgactggcgccctctgcatgaggcgatcgcggctaccggcctgcgtattatgggcgtaagcggatgtaaacttccccggctgaaaacggaaattgaccgcgccgggatccctttattaaccgaagggaaagaaaaagtgactcgccaggctgcgcctgaacccgttgccccacctccagctgttaatcagatcacaaaaacgcgtttgattgatcagccggtacgttccggtcagcgaatttatgcgccacactgtgatctaattgttacaaaccatgtgagtgccggagctgaacttatcgccgatggtaacatccatgtatatggcatgatgcggggacgcgcgcttgctggcgcaggcggcgacagagacgcccaaatattttgtaccaacctctcggcggaactggtttccatcgcgggggaatactggctgagtgataacattccggccgaattttatggcaaagcggcccgtctacgtttagacgacagcgctttgacgattcaatcgttgaattaa

SEQ ID NO: 175433 - DNA, 813 bp, Klebsiella oxytoca
atggcacgcattattgttgtgacttcgggtaaaggaggcgttggcaagaccacctccagcgcggccatcgctactggtttggcccagaagggaaagaaaacggtcgttatcgacttcgacatcggcctgcgtaaccttgacctgatcatgggctgtgaacgccgggtcgtttatgatttcgtcaacgtcatccagggcgatgccacgttgaaccaggcgcttattaaagataagcgtacggagaatctctatattctcccggcctcccagacgcgtgacaaagacgccctgacccgcgaaggcgtagacaaagttctcgaagaactgaaaaaaatggattttgattttatcgtctgtgactcccctgcaggcatcgaaaccggtgcgctgatggcgctgtattttgctgatgaagccatcatcaccaccaacccggaagtctcctccgttcgcgactccgaccgtatccttggtatcctggcctccaaatcccgtcgcgcggaaaggggcgaagatccaattaaagagcacctgctgctgacgcgctataacccaggccgcgtaaacaagggtgacatgctgagcatggaagacgtgctggaaattctgcgcatcaatctggtgggcgtgattccggaagatcagtccgtgctgcgcgcgtcaaaccagggcgagccggtgattctggatgacgcctcggacgcgggtaaagcctatgccgatacggttgaacgtctgctcggagaagaacgccctttccgcttcgtagaagaagagaagaaaggtttcctcaaacgcctgttcggaggataa

SEQ ID NO: 175434 - DNA, 270 bp, Klebsiella oxytoca
atggcattactcgacttttttctctcgcggaaaaagaacacggccaatattgcgaaagagcgcctgcaaattatcgtcgcggagcgccgtcgcggcgacgctgaaccgcactatcttccgcagttgcgtaaagacattcttgaggtgatttgcaaatacgtgcaaatcgacccggagatggtcagcgtacagctggagcagagagacggtgatatttcgattctggagctgaacgtgaccctgccggaaactgaagagtcgaagccctga

SEQ ID NO: 175435 - DNA, 1116 bp, Klebsiella oxytoca
atgatcaccaccaacgatggccttcgcgccgtctgtgaagcggcaagcgcggtttctgccatcgcgctggatacggaatttgtccgtactcgtacctactacccgcagctcggtctgctccagctgttcgacggcaaccaggtctcgctgattgaccctctggttatcaccgactgggaaccgatgcgtgaactgctgctgaataaagatgtgaccaaatttttgcacgctggcagtgaagatctggaagtatttcttaatgcctttcatttgatgcctcagccgctgatcgacacgcaaattcttgccgctttttgcggtcgtccgatgtcctggggctttgcgtcgatggtagaagagtataccggcgtggcgctggacaagagcgaatctcgtaccgactggctggcgcgcccgctgaccgaacgccagtgcgtttatgccgccgccgacgtctggtacctgctgccgattgccggaaagctgatggctgaaaccgacagcgcgggctggctttccgccgccctggatgaatgccagctgatgcagcagcgtcgtcaggagattcaggatcctgccgaggcgtggcgcgacattggtaatgcctggcagctgcgcactcgtcagctgggctgcctgcagctgctggcggagtggcggctgcgtaaagcgcgcgaacgcgacctggcggtcaactttgttatccgtgaagagcatttatggaacgtggcgcgctatatgcccaccagcctgggggaacttgacagcctcggactctcgggcagcgagattcgtttccacggtaagacgctgatcgccctcgtcgagaaggcgcaggcgctgccggaagaggcgctgccagagccgctgcaaaatctgatcgacatgcccggttaccgcaagctgtttaaggatatcaaagcgttagttcagaccgtaagcgccgagaagagcgtgagcgcggagctgctggcttcaagaagacagattaatcagctgctgaactggcactggggtctaaaaaacggcaacgggcagcctgaactggtttccggctggcgcggtgaattgatggccgatcgcctgaatgcgctattaagcgactacccgcgctag

SEQ ID NO: 175436 - DNA, 1719 bp, Klebsiella oxytoca
atgacgacgaataactatttcagaggtgatgcagtgaaaaaggtttggctaaaccgttatcccgcagacgttcctgcggagataaaccctgaccgctatcaatccctggttgaactgtttgaacacgccgtccgccgctatgccgaccagccggcctttattaacatgggcgaggtgatgacctaccgcaagctggaggagcgtagccgcgcgttcgccgcttatcttcaggaagggttaggcctgcaaaaaggcgaccgtgtcgcgctgatgatgcctaatctgctgcagtatccggtggcgctgtttggtatcctgcgcgctggcatgattgtcgtgaacgtcaatccgctttataccccgcgcgaactggagcatcagcttaacgacagcggcgccgccgccattgtgatcgtttccaactttgcgcataccctggaaaaggtggttgataaaacccaggtcaagcacgtgattttaacccgcatgggcgatcagctttccacggcgaaaggaacgctggttaactttgtggtgaagtacattaaacggctggtgccaaaataccatctgccggacgccatctcgtttcgcagcgcgctgcagcacggctaccgcatgcagtacattaagccggaaatcgtctctcaggatctcgcttttcttcaatataccggcggcacaaccggcgtggcgaaaggggcaatgctgacccatcgcaatatgctggcgaaccttgagcaggtaaacggtacctacgggccgctgttgcatcgcggcaaagagctggttgttaccgcgctaccgctgtatcacatctttgcgctgaccatgaactgcctgttgttcattgaactgggcgggcaaaacctgctgatcaccaacccgcgcgacatcccaggcctggtcaaagagctagcgaaatatcccttcaccgccatgaccggagtcaataccctgtttaacgcgctgcttaacaacaaagagtttcagcagctcgacttctcttcactgcatctctccgccggcggcggaatgccggtacagcaggtcgttgcggagcgctgggttaagctgaccgggcagtatcttctggaaggctatggcctgacggagtgcgcgccgttggtgagcgtcaatccgcacgatatcgactatcacagcggcagtattggcctgccagtgccgtccaccgaagcgaagctggtggatgatgacgataatgaagttgcgccgggagagccgggggagctgtgcgtgaaagggccacaggtgatgctgggctactggcagcgccctgatgctaccgctgaaatcattaaggacggctggctgcataccggcgatatcgcggtgatggatgacgagggcttcctgcgtatcgtcgatcgcaaaaaagatatgatccttgtctcgggcttcaacgtctatccgaatgaaatcgaggatgtggtaatgcagcattccggggttcaggaggttgctgcggttggcgtaccgtccggaagcagcggtgaggcggtgaaaattttcgtggtgaagaaagagccgacgctgacggaagagatgctgatcgctttctgccgtcgccagctgaccggctacaaggttccgaagctggttgagtttcgcgatgagctgccgaaatccaacgtcgggaaaattttacgtcgagaactgcgtgacgaagcccgtgctaaagtagacaataaagcctga

SEQ ID NO: 175437 - DNA, 585 bp, Klebsiella oxytoca
atggcgggtcaaaaaacggtagtgcgttggttagtcgcggcagcagtggttgctgcgctgagcgggtgcgcttcggtaccggatgccattaagggcaccaccccgacgccgcagcaggatttagttcgcgtgatgaacgcgccgcagctgtatgtcggtcaggaagcgcgctttggcgggaaggtcgtcagcgtgcagaatcagcagggtaaaacccgcctggaaattgccaccgttcagcttgacggcgccgcgcgtccggagctgggcgagccgtcgcgaggtcgtatctttgccgacgtaaacggttttatcgacccggtggattttcgcgggcagctggtcaccgtggttggcccgatcgtcggcgtcgtcgacggtaaagtcggcaatacgccgtataaattcatgctgatgaacgctacgggctacaagcgctggaacgttgtccagcaggtggtcatgccgccgcagccgatgatggacccgtggatgttcggcccgcgcccgtggggctacggatacggcggctggggctggtataatcccggtcctgccgaagtcagaaacgttgtaactgaatga

SEQ ID NO: 175438 - DNA, 696 bp, Klebsiella oxytoca
atgcgaattttagctatcgataccgccacggaggcctgctccgcggcgctgtggaatgatggcaccctcagtgctcattttgaaatctgcccccgcgaacatacccaacgtatcctgcctctggtgcaggatgtcctcaatgaaagcggcacgctattaaccgagcttgacgcgctggcctttggccgtgggccgggcagcttcaccggcgtgcgcattggtatcgggattgcgcaggggctggcgctgggggccgagctgccgatgatcggcgtgtccacgctggcaaccatggcgcagggcgcatggcgaaaaaccggcgccacccgcgtgctggccgccatcgacgccagaatgggcgaagtttactgggcggaatatcagcgcgatgaacagggcgtctggcacggcgaagagagtgaagcggtgctgaagccggaagcggttcgcgagcgtctgcagcagctggagggcgagtgggctaccgtcggcaccggctggcaggcgtggccggatatggctaccggctgcggcttaacgcttgccgacggcgaaattgagcttcctgacgcgcaggatatgctgccgctggcttgccatctgttcacggtgggaaaaaccgtggccgttgaacacgctgaaccagtttatttacgcaatgaagtggcgtggaagaaacttcctggccgcgagtga

SEQ ID NO: 175439 - DNA, 1911 bp, Klebsiella oxytoca
gtgatcgacgattttgcagcagacggccagctggccagcgcgattgccggatttaagccgcgcgagccgcagcgccagatggctttcgccgtcgccagtgcaattgaagaaactcgtccgctggtggtggaggcgggcaccgggaccgggaaaacctacgcctacctggcgcctgcgctacgcgccaacaagaaagtcattatttccaccggctcgaaagcgttacaggatcagctctacagtcgggatttacccactgtcgctaaagcgctgaacttcaccggtaaactggccctgctgaaagggcgttcgaactacctgtgcctggagcgtctggaacagcaggcgctcgccggtggcgacctgccggtgcaaaccctcagcgatgtcattctgctgcgctcgtggtctaaccagaccgtcgatggcgatatcagcacctgcgttagcgtggccgaagattcccaggcctggccgctggccaccagtaccaacgataactgcctcggcagcgactgccccttatataaagactgttttgtggtgaaagcgcggaaaaaggcgatggatgctgacgtggtcgtcgtcaatcatcatctgttcctcgccgatatggtggtcaaagagagcggctttgccgaactgattccggaagcggaagtgatgatcttcgatgaagcgcatcagctgccggatattgccagccagtacttcggccagtcgctctccagccgccagctgatggacctggcgaaagatattactattgcttatcgcaccgaacttaaagacacccagcagctgcagaagtgcgccgaccgcctggcccagagcacgcaggattttcgtctgcagctgggggagcccggctatcgcggcaacctgcgcgagctgctggcggataacaatattcagcgctcgctgctgctgcttgatgatgcgctcgaactctgttacgacgtggcaaagctgtcgctgggccgctcggcgctgctcgatgccgcttttgagcgggccaccgtataccgaggccgcctgaagcggttaaaagagaccaatcagcccggctttagctactggtatgagtgtacttcccgcaacttcaccctggcgctgaccccgctgacggtggcggataagtttaaagaggtgatggcgcaaaagtccgggagctggatcttcacctcggcgacgctatcggtcaatgacgatttgcaccactttaccgatcgtctgggcataggcgacgcgcaaacgctgctgctccctagccccttcgattatgcccaccaggcgctgctgtgcgtgccgcgcaatttgccgttaccgaaccagcccggcgccgcgcgacatctggcggcgatgctcaaaccgctgattgaagccaacgacgggcgctgctttatgctctgcacttcgcacgccatgatgcgcgacctggcggaacagtttcgcgccaccatgacgctgccggttctcctgcagggagaaaccagcaaaggccagcttttacagcaattcgtcagcgccggaaatgcgctgctggtggcgaccagtagcttctgggaaggggtggacgtgcgcggcgatgcgctttctctggtgattatcgacaagctgccgttcacctcgccggacgatccgctgctgaaagcgcggatggaggattgtcgcctgcgcggcggcgatccttttgatgaggtccagctaccggacgccgtcatcaccctcaaacagggcgtggggcgtctgattcgcgacatcgacgatcgcggggtcctggttatctgcgacaaccgtttggttatgcgcccctatggcgccgtcttcctcgcgagccttccgcctgcgccgcgcacgcgcgatatccgtcgggcggtgcgttttcttgcggtgccgtcggcgaggtaa

SEQ ID NO: 175440 - DNA, 345 bp, Klebsiella oxytoca
atgaccattacgcgtattgatgccgaagcccgctggtctgatgtggtgattcataaccagacgctgtactacaccggcgtaccgtccaaccttgatgccgatgcctgcgcgcaaaccgctgatactctggcgcagatcgatgcggtgctggagaaacagggcagcagcaaatcacgtattcttgatgcgactattttcctcgccgacggtgcagactttgcggcgatgaatcaggcctgggatgcatgggtcgtcgccggtcatgcgccggtacgctgtaccgtacaggcgaaactgatgaatccgaagtataaagtcgagattaaaatcatcgccgcagtgtaa

SEQ ID NO: 175441 - DNA, 1143 bp, Klebsiella oxytoca
atgaagctgtacacccttgacgaaacctgcctggaaaacgcccgggcgggcttaaagcagccgttctcgccgctgcagctggcgttaagcaagctggtgtcggaggccgacatcctgcgtcgagaggcgccggaaagcgtggtgcataaaaagctgcgcccggctagcggcgacgcgcacgattactacagtctgggtacctactggtggccgaatccgcggcggcccaacgggctgccctatattcgtcgcgacgggcatatcaatccgcaatgtgaaaacaacgatacggacacctcgcgcattatccgcatgtgcgaacggtgcctgatcctggggctggcatggtactttaccggccagcgccagtatgcgcaggccgcggctacgcaaatccgctgctggttcctggatgccgacacgcggatgaatccgcatctgaactacggccaggcgatcccggggattgtatccggtcgcggcaccgggcttatcgatactcgcttaatgtggatggtggtggataccatcggcctgatcaacacggcgagcgtgcttgataccgatgatattatcggcctgcaccagtggttccgcgactttaaccactggatgtactacagcgaaatcggccactcagagtacgtctggcacaataaccacggcacctggtacgacgcccagcggacgattaacgcgttattctatggcgataaagggctggcggcgcggatcattgagcagggaattacccagcgtatggcggcgcagattgaccaggatggccgacaaacgatggagctggaacgcaccatcccgttccactattcgctatttaacctggaggcgcatctgctgctcaaccgctacgccgaacatgttgagttcgatcgctggaacaccatccgcgacgggcgaggggtgaagcagggcatcgactatctggtgccgtttattcgcgagccggagctctggccgtacagcgatctgcaggggatcgtgtgggatagcgcgctgcgcgtactgctgcagtcagtgcggggttatgcaaagcagtctgccagctatcgtgatgcgctgaagtgtgtgccccaggagaccttacagttaaaggagcaactgatgtggtgtccgggcggatag

SEQ ID NO: 175442 - DNA, 1095 bp, Klebsiella oxytoca
atgggatctgttgtactgaatagcgtgcgtaaatcgtatggtgatgcgcacgtcattaaagacgtgtcgctgactatcccggacggtgaattctgcgttctcgttggccccagcggctgtgggaaatcaaccctgctgcgcatgatcgccggcctggaggagatctctggcggcgaggtgcatattaacgagcgcaacgttaccgaggtagaaccgaagctgcgcgatattgcgatggtgtttcagagctatgcgctctacccgcagatgacggtgcgtgaaaatatgggttttgccctgaagatggcgcgcctgccgaaagcggagattaatcagaaggttaatgaagccgctgcgctgctggggcttgaaccgctactggagcgcttgccgaaggatctctcgggcggccagcgccagcgggtggcgatggggcgggcgatcgtgcgtaagccgcaggtgtttttgtttgacgaaccgctctccaacctcgacgccaagctgcgaacccaggtgcgcggcgaaattcgcgagctgcatcgccggctgaaaaccacctcggtgtacgtcacccacgatcagattgaagccatgaccatggggcagatgatcgtggtgctgcgcgatgggcgcattgagcaggcggggacgccgctggagttgtacgaccggccggcgaatctgttcgtcgctggttttatcggttcgccggagattaaccagctgtcgggcgtcgtggttttgaacggcagcgccaccagcctgcgtctgaaagatggctcgctgctggctttgcccgctggccttcaggtagccgacggtcagcaggtggtgtacgccattcgccctgagcaggtcaacgtcgtccacgaagcgcgcgacgatgcgctggcggcgaaggtgacggcggtggagaataccggctcggatatgcagctgttttgcgataccggcggcggagcgtttacctcggtgttcaaacagcgtctggctgtaaaagagggcgataagatctggctgcagccgaagctctccggcgtgcacctgttcgatggacaaagcggccagcgcatagcgtgccgggaggaaaactaa

SEQ ID NO: 175443 - DNA, 840 bp, Klebsiella oxytoca
atgttaagtaaacgttgggatacagcagggcgctggtgcatttacgcgctgctgctgattgtcttcgtcgggccgttctggggcatcgtggccacggccttcagcggtgcgccggtgaagccgggcgagctgctggcctggccgaatcagttctcgctggaaaacttcatctttgcgtggatggatatcggcgtctggcagtacctgctgaactctatcctggtggtgttcttcggcaccgttctacaggtgtcggtcagcgcgctggcggcgtatgccctggcgcggaaaaagtttcgcggcgtggcgctggtgagcctggtgattttgtccaccatgatgctgccggaagaggtcatcgccattccgctgtacatgattattaactggcgactgccgctgatcgatgcctcgctctacaacagctacctcgggatgattttgccggtggttggctgggctttctccatctttgtcctgaccgaatttatgtcggcgataccgaaagagctggaagaggcggcgcggatagacggcgccaacgaatggcagattttcttccatgtgattctgccgctggtgaaaccggcgctcggtacggtagtgacgttcggcttcattatgatttgggaccagtacctgctgccgctgattgtggttaaccaggacagcctgaatactattccggtgatcctcggcacgctgcgtaccgatgagagcatcacgccgaacatttttatcgctattacgctgctggcgatgctccccagcatcatcgtctatctgggtctgcaaaaacatttcaaccgcgggattatgtccggcgcagtcaaaggataa

SEQ ID NO: 175444 - DNA, 942 bp, Klebsiella oxytoca
atgacgctgcatgagacgaagtcctcgccgataaagcaggccgcttcgcctgactcaaccggatggctgagcgcaaagcgtaagcgggcgctgatcccgtggctgtttttggcgcctgcgctgattattttcagctggtttaagtttatcccgatgattcagggtctggtgatgagcttttacaaggtcaactttaatcagccgaacgagtgggtaggactcgataacttcacccgcgcttttgccgacgcagagctgcacgcggcggtggtgaacactttgctgtacgtggtggtaacgatgttcgccgcggctatcctggccttcttcctcgccatgctgctggaaggcccggcgcgccatctgcgctttattcgaaccgccatctttttacccgcggtcaccagcgcggcaatcgtcgccgaaatgtggcgcattttgttcaacccgacgcccaatggagtggttaaccacatcctcagctggtttggcgtcgccgatcagggcttccttgccagctccgatcaggcgctgggggtcatcatgctgctgcatatctggaaagcggtgccctacaacatggtgatttttattgccggtctggcggggatcagccgcgatttatacgatgcggcgaacgtcgacggcgccagctggtggaatcgtctgcgctacgtcacgctgcccggcatgatcccggcgctctcggtggtgctgatgctctcctttatccgcggtttccgcgtgttcgccgaggtgtacgccaccaccggcggagggccgtctaacgccacggaaatggtgatgacccatatctacaaactgggttttgagcagtttgactatggctacgcctcggcggtgtcgtttctgctgttcaccttcacggttgtattaaccctctgtcatctgacgctgaaaaaacgtatcgcacgttactaa

SEQ ID NO: 175445 - DNA, 1290 bp, Klebsiella oxytoca
atgtctgccaataaattacgttcactattacttctcaccgcactcgggctcggcgttagccaaagctatgcggctaccaccctcaacgtttggatccgcgccagcaacgactcgaaaaatatctacaaacaggaagcggaaaaatttgaagaatcaaccggtatcaaaatcgcgtatttcaacgccactaccgactttgaacagcgactggcgcgcgccacggcgggcaacgccttacccgatctgatttttaacgatgcggcttcgctggggcagtttatccagctgggtattgccgaagaaattgacccgcaagcgatcgccggcggcgaccagctattcccgacggcctggaaaagtacccgctatatcgacggcaaatactacggcgtaccgacttcagcgcaaaccttcgcgctgttcgtacgcaaagactggcgtgaaaaactggggctgccgcagcctaagagctgggatgatatccagaccctggcgaaagccttcactacccaggatcccgacggcaacggcaaaaatgatacctacggctttatcgttcccgcctccacgacacgcggctacgccagctggtttatgagcagctttatctggcaggcgggcggtgatttcgttaaagaagagagcggaaagttcagcgcctcgctcaatacgccggaagtggctcaggcgataacctttatgcgcaccatgatgtgcgaaaaagtcacccagccgggggcgattaacgccaccaccgccgacgttattccatccttccgctcagggcaaagcggcatgttctttagcggcccgtaccatatcgcgctgttcgataaagatcccggtaaagacaattttgaagtggttccggtggtggggccaaaaggcgaagcgactctcgcggagggcaccacggtctttatgatgaagagcagtaaacagaaagaggcggcgcgtaaatttatcgaattcatgatctcgccggaaggccaggagatcggcatgggtaaaggcagccagcatataccggtggtgcgcctgccggtgaataagaacgtcgacgtcaaagccgtttatcaggacgcccgctgggaaactttcgccagcctttacaatgaacagggacgctacgtgccgcaaattcctaactggacgccggtgcgccaggtggccgccgacggttttaaccgaatttttgccgactgcagcagcgatatcgccgctgagctgaaaactatcgacggcaaggtgaacgctgagctgaaaaaacaaaacgtgctggctaactga

SEQ ID NO: 175446 - DNA, 1239 bp, Klebsiella oxytoca
atgatctcaatacctcgccgaggtttgttaggcattgcgctgttttgttccggccttagcgcctcctcatatgccgctgagccgtacacgctcgacggaaaggatttaacctttagccgccagcagattgccgcgaaagatccgctattcgtgcaggcgcaagcggctttgcaaaaaaaagccgatctggcgctcaagcatccgctgttctcggtgatggataaaaccctggtcgccgccagcggcgataagcacgactactatagtttccctccctactggtggccgaaccctgatacgaaagacggactgccctatattcgtaaggatgggcaaaccaacccggatgccaatagcgatgccaccgataaaaaccgcctggtgaagatgagtaacgacgtatcaacccttgcgctggcgtggtacttcacccaggacaatcgctacgcgcagaaggcggcggcccagttgaagagctggtttatcgatccacaaacgcgcatgaatcccaacctgcaatatgcccaggccattcccggcattaataccggacgcggtatcggcattattgatagccgcgcgctggtagaggtggtggatgctatcgccctgctgcaatcctcagaggcgctgaacgaaaacgacgttagcgcattaaagcagtggtttggcgagtattaccagtggatgaccaccagccagaacggtttcgaagaagataactggcacaacaaccacggcagctattttgatatgcaggccgcgaccttcgccctgtttagcggtaaaactgacgaagcgaaacagcgcctgtacattacccagctacgacgcattgccgggcaattcgacattgaaggccgccagatgggcgagctggagcgcacgcgtccgtggcactacagcaatttcaaccttgaagcctataaccgactgggtcgtctgggcgagaaggcgggcgtcgatatctggaacttcaccctcgacgaccatagcctgcgcaaaggctatcaatacatcgccgggtttattaacagcgatacgccatggccctggaaagaccttgataagatggacgacaagaaagcgctgcgcaatatggccaccgccgcgcatgcctggccggaagattccctgttccgcgccaaagcgcaatggttaagagcgaaatatcccgacgatatcaccacgctcattgttccgctttccccatcgtcagaggtcagggataaccgctaa

SEQ ID NO: 175447 - DNA, 2013 bp, Klebsiella oxytoca
atgaaacaattttctggactctggcccgacattgccagacgtgcagccggcgatagcggtctgcttgaacggctggtgcaggaagcgcaaccgcagcttgacgcgacggcgctcattccacaaacggggatcgccagctggaacctctactatttttgcccccatcacggcgtgcggctgacgtggcgggcggatatgcctcatcgccacgcctgcccggttgatggcgaaattttcagcggtgagccgtgggacggcgcatggtggcgagaaatgaacggtcgtaacgccagcgcctgtcagcagcttggtctgatatggcggctgaccggcgaaacggcgtatcgcgataaagttcgcacgctgctgatgggttacgctgacgtctatcccggctatcaaattcacggtgatattcccaacaacggaccggggaagatgaacgcccagacgctgtgcgaagccaactgtattctggagatggcgctgggttatgactttattcgcgacggcttaacctccgccgaagagcggcatattcgcgacaacctgctgcgctgcgcggcaacgtttctacgcgagcaccgcactgcgcagattcataatcacgaagtcaaaattagcgcggcgcttggcgttctcggtttcgttctcgaagatgagagcctgctggaattcgccgttaaccagccttacggcctgcgctggcagctggaaaagggcctgctggcggaggggctatggtttgaaggttcgattcactaccactactacgcgctgcagggcttttttgcctttgaaaaactggcgcgcggcactcgctggagcctgctggatggcccctggtatcagccgatgctgaagttcccgctgtcgctgctgctgccggacggaaccttccctcgcctcaacgactgcctcgccggacaagaaaagctgcgacaccgggatctgtacgaattcgcctggtttatctggcgtgacccgctctacgccgccgtgctgcagtttattgaaacggaacctgatgtccgcgagaccttgctgtggcgcaaccagccgctgcctgaaacgacgcaggcgctcattcctcagcaatcgctgtttgcgccaggcgcggggctcactctctggcggcgcccgcagcaggcgctgctgataaagcacagtccctggggcggcgaacacgatcattacgacaggctggggctgatgctctggcatcacgacggctggctgctcccggatatgggcacaaccggctacggcgcgaaaatgcactacgactactacaaaaacagcgccacccataatacgctttccgtcaatcagaccaaccagcctccggccaatccgcaggtatcaggctggcatatggatagcgacgctctgtggctggacagcgaggttgactggggcaagccgccgccggagctagacagtcatagccgcgtcgagtgggacgcgacggcctggcgagatgtgcgctttcgccgtcgcctgctatggcttgaagaggtgctgatcgatctctctaccgtagagaacccacatcgccagcagctcgactggactttgcacctggcggcgcaggcgctggatcagagcggcacgccgcagcccttttcgctcagcggaccgctgcggcatatggccaatgcaaccatggcgccgctgaacggctgccagccgcgccactttgcgcgcgacggcgataccgttgcgctctggctttccggtgatggtgaactctggcagggagtggcgcccgataacccggcgactcacgatctcagctatctggtcatacgcagtcacctgccgcaggcgcgttttgtctgcctgtgggattttgccaacagcgcaccgctgacggaagtgcaagtgaatcatacgccagtcgggacgcaaattaccttctggcgcggcgagcgcgtgacgcacgtgacgctttacgacgcccccgggaaacgacccgatgcgatctttccgttcgcggaaagcggcacctga

SEQ ID NO: 175448 - DNA, 180 bp, Klebsiella oxytoca
atgtttgcaggtttaccttcgctgagccacgagcaacagcaaaaagcagtggaaagaattcaggagctgatgtcccagggcatgagcagcggccaggctattgctttagtggccgatgaactgcgcgcctcccataccggcgatcggattgtggcgcgctttgaggatgaagacgagtaa

SEQ ID NO: 175449 - DNA, 1356 bp, Klebsiella oxytoca
atgttgtcccccgctatgatttccctgccctggcgtccggatgccgctgaatactattttagctccttaagttcccggccctgggcgatgctgctgcattccggctttgccgaacatccgcataatcgttttgatattgttgtcgcccagccgcgcgccacgctggtaacgcgtggtcaaacgaccgtcatcaacgagggggaaaccgtcatcacctctgacgccgatccgctcacgctcgtgcatcagcagctggcgcgcttcaacctgcatccgcagcctcatccgcatctgccgtttctcggcggcgcgctggggctgttcggctacgatctgggccgccgctttgaatctctgccgtcacgagcggatgcggatatcgcgctgccggatatggcggtggggatctacgactgggcattgatcgtcgatcaccagcgtcgggaggtgtcgttattcagctatgacgatccgcaggcgcgcctggcgtggctggaagcacaggcagagcctgtcgccgaaacctttaccctgacctcagcgtggcgctcaaatatgagccgcgaagagtatggcgagaagtttcgccagatccaggcctggctgcacagcggcgactgctatcaggtcaacctggcgcagcggtttacggcaagctatcgtggggatgagtggcaggccttccgtcagcttaaccgcgccaatcgcgcgccgttcagcgcctttattcgcctggatgaaggggcagtattaagcctgtcgcccgagcgctttattcagctccggcaaggcgaaattcaaaccaggccgattaaggggacgctaccccggctgaccgaccctgagcaggacgcgctgcaggcgcaaaagctggcgaactcgccaaaagaccgcgccgaaaacctgatgatcgtcgatttaatgcgcaacgatattggccgggttgccgctcccggtagcgtccgggtgcccgaactgtttgtggtggagcccttccctgccgtgcatcacctggtgagcaccgtgaccgccagattgcctacccatctgcacgccgccgacctgctgcgcgcggcctttcccggcggctcaattaccggcgcgccgaaggtcagagcgatggagatcattgatgagctggagccgcagcggcgcaatgcgtggtgcggcagcatcggatatctcagcttctgcggcaatatggataccagcattaccatccgtacgctgacggcctggcaggggcagctttactgctccgccggaggcgggattgtcgccgatagcgatgaagcagcggaatatcaggaaacttttgataaagttaatcgtatcctgcagcaactggagagctaa

SEQ ID NO: 175450 - DNA, 579 bp, Klebsiella oxytoca
atggcggacagcgccctcgaacttgacgatttcctttcgcgttttcagcttctgcgcccgcagcccacgcgcagcgcgcttaaccagcgtcaggctgcggtactggtcccgattgtacgtcgcccgcagcctgggctgctgctaacccagcgttcgccgctgatgcgcaagcacgcgggtcaggtcgcttttcccggcggcgcggtagataacagcgatgcgacgctgatcgccgccgcgctgcgcgaggcgcaggaagaggtcgcgatcccgccagagtcggttgaggtcatcggcgttctgccgccggtggatagcgtcaccggctttcaggtcaccccggtggtagggattattccacctgacctgcactatcatgccagccaggatgaagtcgctgcggtcttcgaaatgccgctggccgaagcgctgcggctgggacgctatcacccgctggatatccatcgccgcggcaattctcatcgcgtctggctatcctggtaccagcattattttgtctggggaatgaccgccggtattattcgcgagctggcgctgcagataggcgctcgtccttag

SEQ ID NO: 175451 - DNA, 1365 bp, Klebsiella oxytoca
gtgattagtatattcgacatgttcaaggtggggatcggcccctcatcttcccacactgtagggccgatgaaggccggtaaacagttcgtcgatgacctggtcgaaaagggattgcttaatacagtgacgcgcgtggcggttgacgtctacggctcactgtcattaaccggcaaaggccaccatacggatatcgctattattatgggactggcgggcaatcagcccgatacggtcgatattgacgcgataccggcatttattcgcgacgttgaaacgcgcggacgcctgctgctggcgcaggggcagcatgaggtcgatttcccgcagaatgacggcatgcgttttcgtagcgacaacctgccgctgcatgaaaacgggatgaccattcatgcctgggctggcgagaaagaaatctacagcaaaacctattactccatcggcggcggttttatcgtcgatgaagagcatttcggcaaagagagcgccagcgaactttccgtaccctacccgttcaaatccgcccaggagatgctgggctactgcaaagagaccggcatgtcgctgtccggcatggtgatgcagaacgagctggctctgcacagcaaaaaagagattgaagactattttgctaatatctggcagaccatgcgcgcctgcatcgaccgcggcatgaacaccgaaggcgtactgcctggcccgctgcgcgtgcctcgtcgcgcctcggcgctgcggcggatgctggttgccagcgataaactctccagcgacccgatgaacgtggtggactgggtcaatatgttcgcgctggcggtgaatgaagagaacgccgccggtggccgcgtggtcacggcaccgactaacggcgcctgcggcatcgtgccggcggtactggcttactatgaccactttatcgagtccgtcagcccggatatctatattcgttacttccttgcatctggcgctatcggtacgttgtataaaatgaacgcgtccatttccggcgctgaggtcggctgccagggcgaagtcggcgtggcctgctcgatggccgctgcaggtctggcggaaatccttggcgccagccccgagcaggtctgcgtggcggcggaaatcggcatggaacacaaccttggtctcacctgcgatccggtggccggccaggtgcaggtaccgtgcattgaacgtaacgccatcgcttccgtcaaagccatcaacgccagtcggatggccatgcgccgcaccagcgaaccgcgcgtgtcgctggataaagtcattgagacgatgtatgagaccggtaaggacatgaacgccaaataccgggaaacgtcgcgcggcggcctggcaatcaaagttcagtgcgactaa

SEQ ID NO: 175452 - DNA, 1563 bp, Klebsiella oxytoca
atgcagactgcacaaaaagttatcacaacctatcgcaggaaacgcattctggtttgcttgctggtcgcgctacttacgctaacgacgacgttagtaatacgatttatttcgcagcgtagcctaaatcagcagcgcgtccagatcagcaccaataaaatggtgaccgccatggataatatcctgcggcctctggcggcacagcacgcccccctgctgcacctggtaaaccagccctgtcaggaaattcatctcacgttacgtaagctggcggcgtcgctacagacggtgcgatccatcgccctggtgcagtcgaaacagctgtactgctccagtatttttggtcaacgaaatattccggtgcaccagttacagcccgccttgccgaccagtcacccgctgcttactttcagctacgactcttcgttgctcaagggaacgccagttctcatccagtggtatcccgcttcgcttagcggtgacgacggcgtgctgctggtgattaatatcgagctgctgggcgagttaattttcaatgcaaaatcggcgttaattaccggaattggcctcagcgtcggtgaaaaaagctttattagcggcaccgggctggtcgatcacgaagcgttgccaggcgagcaaatcatctatcgccagcattcgacggaatttcctttcacgattagcgtcagcgggccgggcgcctcagcggtcgccttcaatgagctaccgggcgaactgcccctggcgctgataatcagcctgttgatgaccggtattgcgtggctggcgaccgcgggaagaatgagcttttcccgggaaattaaccttggaatcgccgcccacgagttcacgctttggtgccagcccctgcaggacttacgcacccggcaatgctgcggcgtggagattttgctgcgctggaataacccgcgcagaggcgctatttcgccggatgtctttatccccatcgccgaaggttataacctgatactgcccctgacccgctacgttatttcgcagacggcccataaattagccctctttccgcaggataaacagtttcacatcagcattaacgtcgccgcccgccatttcgcgaatggcgaactgctgcgcgatctgcaccactactggtttagcgcccatccggtacagcagctggtggttgaactcaccgaacgcgacgtgctccaggatggcgatcaccatatggccgaacatctccattttaagggagtaaagctggccatcgacgatttcggcaccggcaacagctctctttcctggctggaaaaactgcgtcctgatgtgttgaaaattgataagtctttcatcggcgcgattggtgtcgatagcgtcaacgcaacggtgaccgacatgatcatcgctctcgcccatcgtctgaagatagtgatggtggcggaaggcgtcgagacccaggagcaggaagcctatctgcgcgacaacggcgtcgatttattgcagggatattattatgcccgacctatgccggtagaggactttccgcagtggctggcggcggaaaagcgtcgggaaatgcggtaa

SEQ ID NO: 175453 - DNA, 1560 bp, Klebsiella oxytoca
atggaattcttaatggatccctctatttgggccggtttgctgacgcttgtcgtccttgaaatcgtattgggtatcgacaacctggtatttatcgccatccttgccgacaagctgccgccaaagcagcgggataaggcgcgcctgatcggcctttcgctggcgctgtttatgcgcctgggtctgctgtcggtcatttcgtggatggtgacgctcactaaaccgcttttcagcgttgccgatttctcgttttccggacgcgacctgatcatgctgctcggcgggatattcctgctgtttaaggcgaccactgaacttcatgaacggctggagaaccgccagcatgactccggtcatggtaaaggttatgccagcttctgggtggtcgtactgcaaatcgtggtactggacgccgtgttctcgctggatgccgtgattaccgcggtcgggatggttaaccatctgccggtaatgatggcggcggtggtgattgcgatggcggtgatgctgctggcctcgaagccgttgactaatttcgtcaaccagcatccgacagtggtggtgctctgcctgagcttcctgctgatgatcggtctgagcctggtcgcggaaggttttggtttccatataccgaagggctacctgtacgccgcgattggcttctcgattaccatcgagttctttaaccagattgcgcgtcgtaactttattcgccaccagtcgacgctgcctctgcgcgcgcgtaccgccgatgcgattctgcgtctgatgggcggccgcaaacagagcgctgcggcacacgatagcgataacgcctcggtggtgccggtaccggaaggtgcgtttgctgaagaagaacgctatatgattaacggcgtgctgaccctggcccagcgttcgttgcgcagcattatgaccccgcgtggggaaataagctgggtgaacgccgagcaaagtgaagaagaaattcgccgtcagctgctctcttcgccgcacagcctgttcccggtatgtcgcggcgagctggatgaaatcattggtatcgtgcgcgcgaaagagatgctggtggcgctggaagccggtgaaaatgttgccgcactggcgtcggcttcgccggcgatcgtggtcccggaaaccctcgacccgattaacctgctgggcgtcctgcgccgggctcgcggtagctttgtcatcgtcaccaacgagtttggcgtggtgcagggcctggtgacgccgctggacgtactggaagcgattgccggtgagttcccggacgccgacgaaacgccggaaattatcattgatggcgacggctggctggtgaaaggttcaaccgatgtgcatgccttgcagcaggcggtaggcgtcgacgatctggtcgatgaggacgaagatattgcgacggttgccgggctggtcattgccgtcaacggccatatcccccgtcctggcgacgtgctggaactgctgcccttgcagttcaccatcgtggaagccaacgactatcgcgtcgatctggtacgcgtcgtcaagcagcgccagtataacgacgaagaagagtaa

SEQ ID NO: 175454 - DNA, 969 bp, Klebsiella oxytoca
gtgacgattgctattgtaataggcacacatggttgggctgcagaacagctgttaaaaacggcagaaatgctgctgggcgaacaggaaaacgttggctggatcgatttcgttcctggcgaaaacgcagaaacgttgatcgagaagtacaacgctcagttggcaaagctggatacagcaaaaggcgtgttatttctcgtcgatacatggggaggcagtccgtttaacgctgccagccgcattgtcgtcgataaagaacatcatgaagtcatcgcgggcgttaatattccgatgctggtcgaaacgctgatggcgcgcgacgataacccgtcgttcgatgagctggttgccctggcggtggaaaccggtcgcgaaggcgtgaaggccctgaaagcgaagccggtggaaaaggccgcccctgctccggttcaggctgctgcaccgaaagcggctgcgccgctgaaaccaatgggtccaaacgactacatggttatcgggcttgcgcgtatcgatgaccgtttaatccacggtcaggtcgccacccgctggactaaagaaaccaacgtttcccgcattatcgtcgtcagcgacgaagttgcggcggatacggtacgtaaaacgctgctgactcaggttgctcctccgggcgttaccgcccacgttgtagacgtcgcgaaaatgatccgcgtctataacaaccccaaatacgcaggcgagcgcattatgctgctgttcactaacccaacggacgttgagcgcgtggttgaaggcggcgtgaaaatcaccagcgtcaacatcggcggtatggctttccgtcagggcaaaacgcaggtgaacaacgccatttcggtcgatgaaaaagatatcgaagcgttcaaaaagctgaacgcccgcggtatcgaactggaagcccgcaaagtttccaccgaccagaaactgaaaatgatggatctgatcgccaaggtgaaataa

SEQ ID NO: 175455 - DNA, 801 bp, Klebsiella oxytoca
atggagattacctttcttcagattgtgctggtgttcatcgtcgcgtgtattgcgggtatggagtcggtacttgatgaatttcagttccaccgtcctctggtggcctgtacgctgattggcgccgttctcggggatatgaaaaccggtattattatcggtggtaccctggaaatgatcgccctgggctggatgaacatcggtgcggccgttgcgccggatgccgcccttgcatctattatctctaccgttctggttatcgccggccatcaaagcatcggtgccggtatcgcgctggccatcccgctggctgcggcaggccaggttctgaccattatcgttcgtaccatcaccgttgccttccagcacgcggcggataaggccgcggagaacggaaacctgacggccatatcctggctacacgtttcctctctgttcctgcaggccatgcgtatcgctattccggcggttatcgtggcgatttccgtgggcaccagcgaagtgcagggcatgctgaacgccattccagaagtggtcaccggcggtctgaacatcgcgggcggcatgatcgtggttgtcggttatgcgatggtcatcaacatgatgcgcgcaggctacctgatgccgttcttctatctgggctttgttaccgccgcgttcaccgatttcaacctggtcgctctgggtgtcattggtaccgtgatggcggtgctctacatccagctgagcccgaaatataaccgcgtagcgggtgcgcctgtgcaggctgctggtaataacgatctcgacaacgaactggactaa

SEQ ID NO: 175456 - DNA, 852 bp, Klebsiella oxytoca
atggttgatatgactaaaaataccaccgagaaaaaactgactcagagtgatattcgtggcgtgttcattcgttctaacctgttccagggttcatggaacttcgaacgtatgcaggcgctgggcttctgcttctccatggtaccggctattcgtcgcctgtatccggagaacaacgatgcgcgtaaacaggcgattaaacgtcaccttgagttctttaacacccatccgtacgttgcagcgccggttcttggcgttacgctggcgatggaagagcagcgtgctaacggcgcagagattgacgatggtgctattaacggtatcaaagttggcctgatgggcccgctggctggcgtaggcgacccaatcttctggggtaccgttcgtcccgtattcgccgcactcggcgccggtatcgcgatgagcggcagcctgctcgggcctctgctgttctttatcctgtttaacgcggtgcgtctgctgacccgttattacggcgtagcgtacggttaccgtaaaggtatcgacatcgttaaagatatgggcggcggcttcctgcagaaactgaccgagggggcgtctattctcggcctgtttgtcatgggggcgctggttaacaaatggacgcacgtcaacattccgctggtggtctccaccatcaccggtcaggatggccagacgcgcgtgaccaccgtgcaaactatccttgaccagctgatgccgggactggtgccgctgctgctgaccttcgcctgtatgtggctgctgcgtaagaaagttaacgccctgtggatcatcgttggcttcttcgtcatcggtattgcaggctacgcagtcggcctgctgggccagtaa

SEQ ID NO: 175457 - DNA, 459 bp, Klebsiella oxytoca
atgacaatcacggacctggtgttaatcctgtttattcttgtactgttcgcgtttgcggtttacgaccagttcatcatgccgcgccgcaatggccccgttttgctggcaatccccctgctccgccgcaatcgcgtcgatggcattatcttcgtcggtcttattgccattctgatttataacaacatcgctaatcatggcgaacttatcaccacctggttattatctgccctggccttaatggggttatatcttttctggatccgttcgcccaaaatcatcttcaaaaagcagggcttttttttcgccaatatctggattgaatataagcgtattacagagatgaatttatcagaagacggggtgctggtgatgcaattagaacaacgtcgcctgctgatccgcgtacgaaatatcgacgacctggaaaagatatacaaacttctcgtttccactcaatga

SEQ ID NO: 175458 - DNA, 567 bp, Klebsiella oxytoca
atgaatgtatccgctacaattcttcttgccttcggcatgtccatggacgccttcgcggcctctattggtaaaggcgcgactctccataaacctaaattttccgaagccctgcgcaccggtctcatctttggcgctatcgaaacgctcactccgctgttcgggtggggaatggggatgctcgccagccagttcgtgctcgagtggaaccactggatagcctttgtattgctggtatttctcggcggccgaatggttatcgaaggagttcgcggcggcgatggcgaggagtgtgaagctccgcgccgtcacggtttctggctgctggtcaccaccgctttcgccaccagccttgacgctatggccgtcggcgttggcctggcgtttttgcaggtcaacattatcgccaccgcgctggctatcggctgcgcgacgctgataatgtcaacgctgggcattatggtaggacgttttatcggcccgctgctcggcaaacgggcggaaatcctcggcggtatcgtgctgatcggcatcggcgcccaaatactctggagccattttgccggctaa

SEQ ID NO: 175459 - DNA, 795 bp, Klebsiella oxytoca
atgtcttacagttgccctctttgccacgcgccgcttgcgcgccgcgataatagctttatctgcccgcagcggcatcagttcgatctggcgaaggaagggtacgtcaatttgctgccggtacagtttaagcgctcccgcgatccgggcgacagcgccgaaatgatgcaggcgcggcgagagtttctcgatgcgggtcattaccagccgcttcgtgaggcggtcagcgcttatctgcacaccttcgcgccaacggatttactggatataggctgtggggaaggctactacactcatgccttcgccgctatcgtcggccgctgttggggactggacgtgtcgaaatcggcgattcgcgcggcggcaaagcgctatccgcaggtcagcttttgcgtcgcctccagccagcgtttaccgtttgaggatgcaagcctggatgcgatagtgcgtatttatgccccctgtaacgcgcttgaactggcgcgcgttgtccgtaccggcggctgggtcatcaccgcgacgccgggacctcgtcacctgatggaactaaaagggttgatctacgacgaagtgcgtttgcacgagcaaaacacggaagcgcttgagggtttcacgctacgtcatcagcagcagctggcctatccgatgcgcctcaaaggcagcgaggcggaagctttactgcaaatgacgccgtttgcgtggcgggcaaaacccccggttcgggaaacgctgcgccagcaggtgctattcagctgccagaccgatttcatgattcactgctggcagcgcgacgcctga

SEQ ID NO: 175460 - DNA, 1746 bp, Klebsiella oxytoca
gtgcaaaagaacaaacttaagtcagccgccaactttacccctttgcggttcgggttgctatgcgtggccattctttgctgtatggggctgctgctggtccgggtaggctggctgcaaattgtctctcctgacaatttggtgaaacaagaagatatgcgctccttgcgcgaagagcctatcgacgtgcagcgcggcatgattagcgatcgcgagggccgcccgctggcggttagcgttccggtgagcgccatctggatcgatccgcaaacaacgctcgcaaaaggcggcgtcggatatggcccgcgctggcaggccatggcgcaagctttacatctcaaccttagcgagctggctcatcgcgtgcaggcgcatcctcacgcgcgctttctctatctcgcgcgccagataaatcctgagcaggcagagtggatcgacaagctgcgcctgccgggtatcaatctgcgcgatgagtcgcgtcgcttttatcccgctggacacgttgccgctaacctgctgggctttaccaacatcgataatcaggggatcgagggagtcgagaaaagctttaatgctcagctgaccggtcaacccgggcgtcggctggtgcgcaaagatcgtcacggcaacgtcatcgaaaatatcacggaagttcctgcagtcccggcccataatttgcagctcagtatcgacgagcgtctacaaacggtgaccgaagacgcgttggataacgccgtgcgctggaacaaagcggagtcgggggcggcggtattaattaaaattgataccggggaaattctgtcgatggccagctaccctgatttcaaccctaacaatcgcgatgatgcaaagctggatgatttccgcaatcgcgcgattagcgatactttcgagccggggtcgacggttaaaccgctggtgctgatgactgccctccagcaaggcattgttcagccggatagcgtggtggatacccatccgtttatcctcgacggccatcgcattcgcgacgtgggttactatccagaattaaccctcaccggcatcctgcaaaaatccagcgataccggcgtttcacatctgtcgctggcgatgcccattcagcatctcatcgatacctataaagcgttcggtttcggcgattctaccggcctgggattaaccggtgaaagcgccgggctgatgccgcagcgtcgctattggggacagctcgaccgggcgaccttcgccttcggctatggtctgatggtcacgccgctgcagctggcgcacgtatacgctaccatcggcagctacggtattgaacgtccgctatcgatcacgcgtatcgatccgccggtcatggggacccgagtgatgccggagcagatagtgcatgaagtcgagcatatgatggagagcgttgccttgccgggcggcggggggaccaaagcggcggtgcgcgactatcgggtggcggtaaaaaccggtaccgccaagaaaatcggccctgacgggaaatatatcgacaaatacgttgcctataccgcaggcgtcgcgccggccagcaatccgaaattcgccctggtggtggtgatgaacgaccccagcaacggttcatattacggcggagcggtgtcggcgccggtattcagtcaaattatgggcgatgtgctgcgcctggaaaacgtcatgcccgatggaatgccggagggctcggaaaacctgatcgtcatgcatcacgacggcgttctgccgcctgcgctgtaa

SEQ ID NO: 175461 - DNA, 210 bp, Klebsiella oxytoca
atggcaaagattaaaggtcaagttaagtggttcaacgagtctaaaggttttggcttcattactccggctgatggcagcaaagatgtgttcgtacacttctccgctatccagggtaacggcttcaaaactctggctgaaggccagaacgttgagttcgaaattcaggacggccagaaaggtccagctgcagttaacgtaactgctatctga

SEQ ID NO: 175462 - DNA, 291 bp, Klebsiella oxytoca
atgagtgagttactaaatcccgggattgtaagcctggcatccgtggcgctgtctgtcgtgctgttgcttgtcggcctgttattatggttttttgttaatcgcgccagttcgcgcgcaaatgagcagatcgcgctactgcaggcgcttctggatcagcaaaagcggcaaaacgcgctgctgcgccgtctctgcgaggccaatgagcctgagaaggagagtgcagcagaaccttccatagccgagaaggggaaaggcgacgacgacttcattcgtctggtcgcagagcgctaa

SEQ ID NO: 175463 - DNA, 240 bp, Klebsiella oxytoca
atgcgattgatcattcgtaccattgtggtgctggctatcttatggattggcgtattattaagcggctacggcgtgttaataggcagcagtgagaatgccggtgggttaggattgcagtgcaaatatctcaccgctcgcggcatcagcaccgcacaatatgttcactccagcagtggtattatcggcattaccgattgccctgttctgcgaaaaagcgtcacggtagtggataacggctag

SEQ ID NO: 175464 - DNA, 792 bp, Klebsiella oxytoca
atggcagttgcagatttggataaacagccagattctgtctcttcggtattgaaggtttttggcatcctgcaggcgcttggcgaagagcgtgaaattggcattaccgaactgtcccagcgcgtcatgatgtcaaaaagcaccgtttatcgctttttgcagaccatgaaatcgctggggtacgtagcgcaggaaggggaatctgagaagtattctttaaccctgaaactcttcgaactcggcgcgcgggctttgcagaacgtcgatctggtgcgcagcgccgacattcagatgcgcgagctatcacgcctgacgaaagagaccgtccacctgggcgccctggatgaagacagcattgtttacatccataaaatcgactcaatgtacaatttgcgcatgtattcgcgcatcggacgccgtaacccgctgtacagcaccgcgatcggtaaggtgctgctggcatggcgcgatcgcgcggaagttgagcagattctggaaggcgttgagtacaaacgcagtaccgaccggaccatcaccagcaccgaagagctgctggcggttctggataaggtccgcgagcagggctacggcgaagataacgaagaacaggaagaagggctgcgctgcatcggggtgccggttttcgaccgcttcggcgtggttatcgccggcctgagtatctctttcccgacgctacgtttctccgaagagcgcctgaacgagtatgttgcgatgctgcacacggcggcgcgtaaaatttctgagcagatgggctacaacgattatccgttctga

SEQ ID NO: 175465 - DNA, 1374 bp, Klebsiella oxytoca
atggataaaaacctccccgatgggctgccagcaccgcagcgttacggcgccatcctgaccattgtattaggcctgacgatggccgtgctggacggcgctatcgccaacgtagcgcttccgacgatcgccagcgatttaaacgcgtcaccggcatcctcaatctggatagtaaacgcctatcaaattgccattgttattgcgcttctgccgctctctttcctcggcgatatggtcggttatcggcgcatttataaaatcggcctggtcgtattcaccttcacctctttagcctgcgcgctctcccgcagcctggaaatgttgacgctggcgcgcgttgcgcagggtcttggcggcgcggcgctaatgagcgttaataccgcgctgattcgcctgatttatccccgccgctttctcggccgcggaatggggatcaactcttttgttgtcgccgtctcatccgctgcgggcccgaccattgccgccgctatcctgtcgatggcttcatggcaatggctgtttctcattaacgttccgctgggcgttatctcactggttctcgcgatgcgctacctgcccgccaatgtcggcgggagcaaggtcacccgcttcgatctgcccagcgccatcatgaatgctctcactttcggcttattaattaccgctctcggcgggttcgcacagggccaatccggcgagctggtgctggcggaggttattgcgatgctggtcgttggattcttttttgtccgccgtcagctcagaatgccggttcccctgctacccgtcgatctgctgcacattccgattttttccctgtccatctgcacctcgatatgctccttctgcgcccagatgctggccatggtttcgctaccattcttcctgcagtcgatgcttggacgcagcgaggtggaaaccggtctgctcctgacgccgtggccgctggcaaccatggtaatggcgccgctggcaggctatttgatagagaaatttcacgccggtctgctgggggcgattggtctgctggtaatggcctgtggcctgttcggtctggcgatgctcccctccacccccacggatctggatattatctggcgaatggcgctctgcggcgcgggctttggcctgttccagtcacccaacaaccatacgatcgtctcttcagcgccggctcaccgcagcggcggagcaagcggcatgttgggtaccgcccgtctgcttggccagagtacaggcgccgcgctggtggcgctgctgtttaacctgctgggcaatagcggaactcataccgcacttctgctggccgggatcctagccgtcgtcgccgctgccgtcagcgggctacgcgtcacgcagccgcgcgccaggctgtag

SEQ ID NO: 175466 - DNA, 882 bp, Klebsiella oxytoca
atgatgcgaatcgcgcttttcctgctgaccaacctggcagtgatggtggtgttcgggctggtgctaagcctgacgggaattcagtcaagcagcatgaccgggctgctgatcatggcgctgttgtttggcttcggcggttcaatcgtttcgctgctgatgtcgaaatggatggcgttgaaatcggtgggtggggaagtcattgagcagccgcgtaacgaaaccgagcgctggttgatgaataccgtcgcgcagcaggcgcgccaggcgggaattgccatgccgcaggtcgcggtctaccatgcgccggatattaacgccttcgcgaccggcgcgcgccgcgatgcgtcgctggttgcggtcagcaccgggctgttgcagaacatgagccgtgatgaagcggaagcggttatcgcccatgagattagccacatcgctaacggcgatatggtcaccatgacgctgattcagggggtggtgaacaccttcgttatctttatctcgcgcgttatcgcgcagattgcggcgggcttcctcggcggcaaccgcgatgaaggtgaaagcagcaacggcaacccgctgatctactttgcggttgctacggtactggagctggtgtttggtattctggccagcatcatcaccatgtggttctcccgctaccgcgaattccatgcggacgctggctcagcgaaactggtggggcgtgagaaaatgatcgctgcgctgcagcgtctgaaaaccagctatgagccgcaggaggccagcagcatgatggcattctgcattaacggtaaagcgaaatccatgagcgagctgtttatgactcacccgcctctggataagcgtattgaagccctgcgcagcggcgaatacctgaagtaa

SEQ ID NO: 175467 - DNA, 2049 bp, Klebsiella oxytoca
atgaacaaattctttaagctcaccgcgttggcgggcctgctggtaatagcaggccagtcgttcgccgtggacgatataacccgggtcgatcaaatccccgtgctgaaagaagagccgcagcacgcgacggtgagcgagcgcgtgacatcgcgctttacccgctctcactaccgccagttcgatctcgacaatgccttttcggcgaaaattttcgatcgctacctgaacctgctggattacagccataacgtactgttagccagcgacgtcaaccagtttgccgcgaaaaagaatcaaatcggcgatgaactgcgcagtgggaagctggacgtattttacgacctgtataacctggcgcagaagcgtcgctttgagcgctatcaatatgcgctgaaagtgctggaacggccgatggattttaccggccacgataatttcaaccttgaccgtagcaagtcgccctggccgaaagatgaagccgagctgaacgcgctgtgggatgccaaggtgaagtttgaccagctaagcctgaagctggctggcaaagatgataaagagattcgcgaaaccttaacccgccgctacaagtttgctatccgccgtctggcgcaaaccaatagcgaagacgttttctcactggcgatgaccgcctttgcgcgtgaaatcgacccgcatacaaactatctctcaccgcgcaacaccgagcagttcaatactgaaatgagcctgtctctggaaggtatcggcgcggtgctgcagatggacgacgactacacggtgatcaattctctggtcgcgggcggtccggcggcgaagagtaaagccatcagcgtgggcgatcgcatcgttggcgtcggccagcctggtaaaggcatggtcgatgtgatcggctggcgtcttgatgatgtcgtcgcgctgattaaaggtcccaagggcagcaaggttcgcctggagattctcccggcgggtaaaggcgcgaaaacgcgtattgtgaccctcacgcgtgaacgcattcgtctggaagaccgtgcggttaagatgtcagtcaaaaccgttggcaaagaaaaagttggcgtgctggatattcctggcttctatgttggcctgacggatgacgttaaggttcagctgcaaaagctggagaaacaaaacgttagcagtatcgtcatcgatctgcgcagcaacggcggcggggcgctgaccgaagcggtttcgctttctggcctgtttatcccctccggcccggttgtccaggttcgcgataataacggtaaagtccgtgaagacagcgataccgatggcgtggtgtactacaaaggtccgctggtcgtcctggtcgatcgtttcagcgcctcggcttccgaaattttcgccgctgcgatgcaggattatggccgcgcgctgatcgtcggagagccgaccttcggtaaagggaccgtccagcagtatcgttcgctgaaccgtatctacgatcagatgctgcgtcctgactggccggcgctgggttccgtacagtacactatccagaaattctatcgcatcaacggcggtagtactcagcgcaagggtgtaacgccggacatcatgatgccgaccggaaccgaagagcgtgagaccggcgagcagtatgaagacaacgcgctgccgtgggatagcgtcaatgcggcaaccttcgtgaaatatggcgatttgacgccgtttggaccggaactgctgaagcgtcacgatgcgcgtattgccaaagatcctgagttccagtacatcatgaaggatattgctcgttataacgcgatgaaagacaaacgcaacatcgtttccctgaactacgcgcagcgtgaaaaggagaacgaagaagatgatgcgattcgtctggcccgcgttaacgatcgcctgaaacgcgaaggtaagccgttactgaaaaagctggaagatctgccgaaggattaccaggagcccgatccgtatcttgatgaaacggttcatattgcgctcgacctggcccatgaggaaaaggatcggccagcggtagagcccccggccagtaaataa

SEQ ID NO: 175468 - DNA, 684 bp, Klebsiella oxytoca
atggaaaatcaacctaagttgaatagcagtaaagaagtcattgcgtttctggccgaacgtttccctcagtgctttagcgctgaaggcgaagctcgccccctgaaagtcggtatttttcaggatctcgttgagcgcgttggcggagagatgaatctcagcaaaacccaacttcgcgctgctttgcgtctttatacttcgagctggcgctatctgtacggcgttaaaccaggcgctgtccgcgttgaccttgacggcaacccgtgcggcgaactggaagagcagcatgtcgctcatgcccgccagcagcttgaagaagcaaaagcccgcgttcaggcgcagcgcgaagcgcagcaggccaaaaaacgtgaagccgctgccgcagcaggccagccggaagagggagcacgtcgcgagcgtaaaccgcgtcctcagcctcaggctcgtcgcaaagaaggcgctgagcagcgtaaaccacgcccggcagcagccgccaaagcgccgcgcgaagagcgtcatacccctgtatcagatgtgtctgtattgaccgttggccaggcactgaaggtgaaagcaggcaataatgcaatggacgccaccgtcctggaaatcaccaaagatggcgttcgtgtacagctgacttctggtatgtcaatgattgtacgcgcagaacacctggtgttctga

SEQ ID NO: 175469 - DNA, 564 bp, Klebsiella oxytoca
atgcatttaaagcttattttattaggctgtaagtgtaaggcagtaagacaactaagcgatcatataatgaacaaatcagaattctacgcggatttaaaccgcgattttcaggcgttaatggcaggcgaaaccagcttcctggcgatgatctcaaataccagcgcgctgttatttgaacgactggcggaagtgaactgggccggtttctatctgctggaaggcgatactctcatcctcgggccgttccagggcaagctggcctgcgtgcgtattccggtaggacgcggcgtatgcgggactgccgtcgcgcagaatcgcgtgcagcgggtcgaggatgttcacgcctttgatggccacatcgcctgcgatgccgccagcaattcggaaattgtcttcccgctacgggtgaacaatcaaaccatcggcgtcctggacatcgatagcacggcgcattcccgcttcaccgttgaagacgagcggggtctggcagaactggtctcgcatctggaaaaactcatttctgccacggattatcaaaaaatattcacccgcgtcgcaggataa

SEQ ID NO: 175470 - DNA, 1245 bp, Klebsiella oxytoca
atgatcgtctactcggtcagcgcccctgttgcgcacgctcactatcagcgctgcccgcagtgcgacctgctgtttagtttaccggtcctcaaaaagaatcaaagcgcctggtgccctcgctgcaacgccaaagtgcgcgatggccgcgactggtcgcttacccggctgggcagcatggcgatcgctatgctgctgctgatgccttttgcgtggagcgaaccgctgctacgtttgcatctgctgggcgtgcgtatcgacgctaacgtccttcagggcatctggcaaatgaccggccagggcgatccgctcacggcggcgatggtgctcttttgcgcggtcgtcgcgccggtgctgctggtggtgtcaatcgcctacctgtggttgggcaacgtgctgggcatgaatctgcgaccgatactgctgatgctggagcggctcaaggagtgggtaatgctggatatttacctggtcggcatcggcgtcgcctccattaaagtgcaggattacgccttcctgcagccgggtatcgggcttgtcgcctatgtttccctcacgctgctcagtatcctgacgcttatccatatgaacgttgaagagctctgggagcgtttttatccccagcgccctgcgctgcgcccggatgaaaatcttcaggtctgtctgggctgccattataccggacatcgcgatgcgcgcgggcgctgccgccgctgccacacgcctttgcgccatcgacgccggcaaagcctgcaaaagagctgggctgcgctgattgcatcactggttttcctgcttcctgccaacctgctgccgatctcgatcatctacgtcaacggcgcgcgtcaggaagacaccatcctttccggcattatgtcgctggccagcagcaacgtcgccatcgccggggtggtgttcatcgccagtattctggtcccattcaccaaagttattgtattgtttaccctgctggtcagcatacaattcaagtgtgaacaggggctacgtacccgcatcctgctgctgcggctgattacctggatcggccgctggtctatgttggatctttttgtcatcgcattaaccatgtcgctgatcaaccgcgatcagctcctcgcgtttacgatggggcccgccgcggtctattttggcgccgcggtaattttaactatccttgctgttgaatggctggacagccgcttactttgggacgcacatgagtcaggaaacgcccgcttcgccgactga

SEQ ID NO: 175471 - DNA, 2634 bp, Klebsiella oxytoca
atgagtcaggaaacgcccgcttcgccgactgaagccaagattaaaactaaacgccgcatttcaccgttctggctgctgccggtcatcgcgctgctgattgccggttggctgatttggaccagctatcaggatcgcggtacgacgatcgtcatcgacttccagtcggccaacggcatcgttccgggacggacgcctatccgctatcagggggtagaagtcggtacggtcgagaatatctcgctaagcaaagatctgagtaaaatcgaggtttctgccagcgtcaaaggcgatatgaaagatgcgctgcgcaaggagacccagttctggctggtgacgccgaaagcctcgcttgccggcgtgtccggcctggatgcgctggttggcggcaactatatcggcatgatgccaggtcagggcgagcccgaggatcattttgtcgccctcgatacccagccgaagtaccacattaataacggcgagctgatgatccatctcaagtcagcggatttaggctcgttaaccagcggctcgctggtctacttccgtaagattccggtcggccgggtgtatgactacgccattaatccgaacaatcagggcgtcacgattgatgtactgatcgagcggcgtttcaccaatctggtgaaaaaagagagccgcttctggaacgtatccggcgtaaaggcggacgtcagcctgagcggagctaaagttcagctggacagcctctccgcgctggtgaacggcgctatcgcctttgattcccccgatgattctccgcaggctcagcagaataccgattatcacttatacgaagacctggcacacagccagcgcggagtggtggtgaaactggaccttccggacggcgcagggttaaaagcgggctctacgccgctgatgtatcagggtctggaggtcggccagctcagtaaactgaatctcaatgctgacgggaaagtcaccggcgaaatgaccgtcgatcccagcgtcgtcagcttgctgcgcgagaagacgctgattcagatgaagaagccgaaaatctcgctggataatcccagcgtcagcgccctgctgaccggaaccacctttgagctggtccccggcgagggtgaaccgcgcaaccagtttgcggtgctgcctgccgataaatccatcctggaagaaccggatgtcgcaaccgtcacgctcaccgcgccggaaagctacggtattgatgccgggcagccgctgatcctgcacggcgttcagattggccaggttctggagcgcaagctaaacgccgacggcgtcactttccaggtcgcagtcatgcccgagtaccgttcactggtgcgcggcgacagcaaattcgtggtcaatagccgtatcgacgtcaaagtcggtattgatggcgtggagttcctcggcgccagcgccagcgaatgggtcaacggcgggatccgcattattccgggcgacaaaggggcgatgcaaagtcgctatccgctgtacgccaaccaggaaaaagcgctggaaaacagcatgagcgatctgccgaccaccactctcacgctctcagctgagacgctgccggacgtccaggcaggatccgtggtgctgtatcgtaaattcgcagtcggggaaatcatcaccgttcagccgcgcaagaacgcttttgagatcaacatccatatcaaaccggaatatcgccatctgctcaccagcaacagcgtgttctgggccgaaggcggcgcgaaagtgcagcttaacggtagcggcctgacggtacaggcatcccccctctcccgcgcgctgaagggcgcgattagctttgataacctcagcggcgccagcgccagcgcgcggatcgataacaaacgcgtgctgtatgcgtcagaaaccgccgcccgcgcggtgggtgggcagataaccctgcacgccttcgacgccggtaaaatcgccgaagggatgccaattcgctacctggggattgatattggccagatccagtcgctgaatttaattaccgcgaaaaacgaagtgcaggcgaaagcggttctctatccggaatacgtcaacaccttcgcccgcgccggcacgcgtttctcggtgattactccgcagatttccgcagcgggcgtcgagcatctggatacgctcttccaggcctatattaacgtggagccgggacgcggtgcgccgcgccgtgattttgaaattcaggaaaccacgattagcgattcacgttatatcgacggcctgagcattatcgtcgaagtacccgaagccggttcgctgggtatcggcacgccagtgctgttccgcgggcttgaagtcggtacggttaccggcctgatgctcggttcgatgtcggatcgcgtcatggtacagctgcgtatcagtaaacgttatcagtatctggtgcgcaacaactcggtgttctggctggcttccggctatagcctcgactttggcctgatcggcggcgtggtgaaaaccggtaccttcaatcagttcattcgcggcggcatcgcttttgcgacgcctccgggtacgccgctggcgccgaaagcgcaggatggtaaacacttcctgctgctggagagtgaaccgaaagagtggcgcgaatggggtaccgccctgccgcgctaa

SEQ ID NO: 175472 - DNA, 1476 bp, Klebsiella oxytoca
atggtaaactacgcccccttttttcgttgtggtgcgctccccgtggctcaaaacgctgtctatcttcctgaagaattcctcgctcaaatgcgtacggcaatgccgacgcatctctctttcgctgactttatcgccgcctgccagcgccccctgcgccgaagccttcgcgtaaatacgcttaaaatcagcgtggctgactttttgcagctggtcgccccctacggctggcagctaacgccggtaccctggtgtgaggaaggtttttggatcgatcgtgaggaagacgacgccctgccgctgggcagcaccgctgaacatctcagcgggctgttttacatccaggaagcgagctccatgctgccggtcgccgcgctgtttgccgacggaaatatgccgaaccgggtgatggacgtcgccgccgcgccggggtcaaaaaccacccagatcgccgcgcgcatgggcaataaaggcgggatcctggccaacgaatattccgccagccgggttaaagtgctgcacgccaatatcagccgctgcgggatcggcaacgtggcgctgacccattttgatgggcgcgtattcggcgccgcgctgccggagtgttttgacgcgattctcctcgacgccccctgctccggcgaaggcgtggtacggaaagaccccgatgcgttaaaaaactggtcgccggaaagcaacgccagtatcgccgagacccagcgcgagcttatcgacagcgcgtttcatgcgcttcgccccggcggcacgctggtctactccacctgtaccctgaaccggcaagaaaacgaagacgtggtcaacggactactggcgcgctatccgcaggcggcagaggtactgccgctcggttcgctgttcccgcaggccagcgaggcgctaaccgaagagggtttcctgcacgtgttcccgcagattttcgattgcgaaggcttcttcgtcgcccgtctgcgtaaaaccgccgccatcgcaccgctgccggcgccgggttataaggtcggtaaattcccctttatcccgcttaaaagccgcgaatcggccgccattgcgaccgccgctgccgccgttggcctgcattggggcgctgaccatacgctctggcagcgggataaagaaatctggctattccctcaggcgctcgagtcgctattcggcaaagtgcgcttttcccgcatcggtatccgtcttgccgaaacccacaacaaaggctatcgctggcagcacgaagcggtcattgcgcttgccgcgcctgatgccccttttgagctgacccaggccgaagcggaagagtggtaccgcggtcgtgacgtctatcctgcagtaccgccgcagcaggatgatgttattgtcacgtttcagggcgcgccgctggggctggcgaaaaaaatcggctcgcgtttaaaaaacagctatccccgtgaactggtgcgcgacggaaagctttttagcactaaagcgtga

SEQ ID NO: 175473 - DNA, 240 bp, Klebsiella oxytoca
atgagtaaaaccagcgtacgtatcggcgcgtttgaaatagacgacgccgaactgcacggcgaacagcagggagagcgaacgttaagcataccctgcaaatccgatccggatttatgtatgcagctagatgcatgggacgcggacaccagcgtacccgccatacttgatggtgaacattccgtcctctaccgtaagcactacgatcgtcagtccgatgcctggatcatgcgtctcgcctga

SEQ ID NO: 175474 - DNA, 192 bp, Klebsiella oxytoca
atgtttgccttagtgctgtttatttgttacctcgacggaggctgtgaagatatcgttgtggatgtgtacgataacgaacggcagtgcaccgcagcgatggacgatcagcgaatacgtcacggcggctgctttccggtagaggattttatcgatagtttctggctgcccgcccaggagtacagtgacttttag

SEQ ID NO: 175475 - DNA, 654 bp, Klebsiella oxytoca
atgtatcagcgtattaacggttccgcctggcgtaatatctggctggttggcgacctgcacggctgctttgcgcggctgatggaagcccttcgcgagcgcaggttcgatccttaccaggacctgcttctttccgtgggcgatctgatcgatcgtgggccgcaaagcgcggagtgtctggatttactgcgctatcgctggtttttcgcggtgcgcggcaaccatgaacagatggcgctggatacgcttgccgatggcgaaccgatgctctgggaaatgaacggcggtggctggtatacgcaacgctcagaacagcagaaagagcgcctcgcgccgcttatcgcccgctgccgtcatctgccgctgattattgagctccactgcgctgagcaagtccatgttatcgcccatgcggattatccggcgacgctttatcgctggcagcaggcggtggatgagcatcaggtgctgtggagccgacagcgtcttaccgatcatctctccgggcgtcacggcgcgattgccgatgctgaccacttctggttcggccatacgccgcttaaacggcgttacgactacgataatcagcactatattgataccggggcggtatttggcggggagttaaccctggcggcgctacagaggacgggctaa

SEQ ID NO: 175476 - DNA, 945 bp, Klebsiella oxytoca
gtgacggataacagcctgcattcagccggggtcgttgaacgacgccccaatcttattgccgacctggtgatggggcgactcacccctgcacccatctggcaaaaacgtaattaccggctgaagtttttactgcgcacggcattattttatgcgccaacgcgcagcatgctggagagcctgtcggcgcgcgcggacttcaatcagctactgaccgctcaggtgactctgccgggcaaggttcatcgtcagtatttaacccgcgggctcaacgccagccagcgcgcgcacgcgattatcagccactaccagtttgtcgactcgctgggcggatcgcgcctggctgatgccatgaccgcagcgaatgagctgccgctgcttgagctggcaggcaaggacgacagccggtttacgctttccgcctcttcggcgggcaaagctgaacgcgagggtgaaacgaccctatggctgcgcgatggcgatgggatcgtgctcgccagcgcgacttttagcgtttcccgtcagcaggatcgctggcagttaactattggcggcctgcaggggccgcgtagcaatatttcgcatgaagtgattaaacgagcaacccgcgcctgctacggtctgttcccgaaacgcctgctgatggagtttatctggctaatggcggcgcgttgcggcattcaacatatttacggagtcagcgataacggtcacgtcttccgcgcgctgcgctatcgtctgagcaaagggcgccatttccacgccagctatgatgaattctggcaatctatcgaaggggtagccgacggtgcatggcgctggcgcttaccactgaagctggaaagaaagacgcttgagagcattgccagtaagaagcgcgctgaatatcgtcgccgcttccagctgctggatgatatggctgcgcagatgacaattctcatcgattaa

SEQ ID NO: 175477 - DNA, 552 bp, Klebsiella oxytoca
atgaacgtgaaaacgatatcgcgcagtatcctgggcggcttactgagcgccatagttcttacgcaaccggcttccgcagcgggaacattaagcggccagattagtgttcaggtcacacttggcagcggctgcagcgtatcgaacgtccgaaatggagaaaacaaccgctggggcacgattaatttcggcgcctacggtgatttagccaactccattgatgcaagcgtcaccggaagcggcggaggtaacgcgcttaccgtgacctgtaccgaagatcttgactcaacgctgacgctggacggcggccagtatggcgatgctgctctgcgttacatgaaaaacgcggcaggaaaccagcagattgcttatcggctctatgccgatgccggccgcagtcaggaaattttacccggcggaacaatcgctatcgtaggcacaggcaacccgcaggctatccccgtttttgcccgtattcgccccgaagaccagagcgtcaacgcgccgacagccgatgtgtatgacgacatcgtaaccgcaacgttaacctggtaa

SEQ ID NO: 175478 - DNA, 519 bp, Klebsiella oxytoca
atgcttcgaccagagtggcttatattatttctgctttttacctcgggcgcccacgccgctactgtccagaagaccttcaaagtctccgcgcagataaccgctggctgcgcgcttggcgcgggggatggctcccaaacgacggatttcggcaccttgagttttggcactctgtcatcgctttataacaatgttgatgtcgccagtacttccggcgccggctcaatcatcgtgacctgtacccccggcaccgctatctcaatcgctctcgactatggcgtaaacggcggttcggccacccggcgctatatgtcgaacggcggcggcaacacgctggcctatcagctttatcaggatgccaaccgcgctaacgtttggggcaacagtactctggccctgagcgttgcatcatttccgagctccacgcaaacctatacggtttatggccgcctttttgccacgaatggcttcccggcggtgggctcctataccgacacggtcaccgtcacgctgacctattaa

SEQ ID NO: 175479 - DNA, 765 bp, Klebsiella oxytoca
atgattcgctgtagatttgcgctgtttacattcgctttatctctcccctgctccgttatggccgcaagctccgtcctcgtttggcccatcttccagactatcgaaagccacgaaaaggggtcagagctgtggctggaaaaccgcggcgctaccccggttaatttacagctgcgcgttttttcctgggaccaaaaagggtcgtccgatgcctatgccgatcagcgtgacgtcgtcgccagcccaccttttaccaccgtcgcgcccggccagcgtcagctggtacggttgatgcgcatcgcccccgtcacggctggcaaagaacaatcctaccgtattgttatcgatgagattcctgccgctgaaccgacggcgcagaaggaacagaattccgccggactgaaaatgcgcatgcgctatgtcctgccgttgtttacctacggacagggcatcaacccgctgaagaacaatggatccgtggaagcggtaagaaccacgctgcgctggtcgctctcgcggcaaaatagccgccagacgctgtgcatcgacaataccggcaatcagcatgcccggctcagcgcggtttactgggccaatgccggtggcaagggccagatagctcaggccaatggcctgctcggctacgtgctggcgcagaaaaagagctgtttcccgctggtgggaaacgcttcagtcccctcaggcatgcacctgttcgcgaaattaacagataacggccaggcggtggaaattccggcggatcgttga

SEQ ID NO: 175480 - DNA, 2334 bp, Klebsiella oxytoca
atgcgcgatctgaaaagggcagcgaccggagggctgttggcactagcgtcggtaacggcctgcgctgcgacctatgattcgttgcctgcgccagcagcttcatacagcgataagcaggagtatgagctgtatctcagcgtatcggtcaacgggaatctcctggcgagcgccgctcctgtaaaggttattgcgggtcgctattggatcgccgccgaggttttgcgccaggcgcatattcccttacagacccaagatgcgctggttgacgtgacgacgatcccctcggttaaagtggaatacgatcggccggggcaaatgctcaatctccgggtgccggacaattggcttcccgagcagcgcatcggggagacgacgggacaaaactaccaggccgcgataagcagtcccggcatgttatttaactatgacgcttacagcctcttctcgtccggcggaacgcaaaccaccagcacctataccgagacgcgcctcttcgggccgccaggcgttctttctaacaatgccgtcatccggcaaaactggtcttcgacgggctacgagcagcagggctttatgcgttacgacactctgtggaaatacagcgacagcgaacagatgattagctaccaggccgtggatgtggtcagtaacgccctgacctggagcagttcagtacgaatgggaggactccggctgagccgtaacttcagcgttcgcccggatctggtgacgtatccgctgctcaatttatccggcagcgcggcggttccttcaagcgtcgatctgtttattaacggctataaaaccagctccgcgcaaatcaatggtggcccctatacgctgaccaacgttccctggatcagcggcgccggcgaagctaccgtggtgaccaccgatgccctgggtcgtcaggtgtccaccagcattcctttttatgtctccaacaccctgctgcgcgaaggcctgagtgattttgatttcacccttggggccctgcgcaacaactacggtatcaagagtgccgattatggcgccggcgcgctgagcgcaatttatcgctatggagtcaacaactggctcacgctgtcgacgcatacggaagaccgcaaaggattaaccaatgccggaataggcagcgatatcggcgtggggaacctgggcaccctcagcctgtcgaccagcgccagccggggcgacggcagcggcaatcaactcaccgccggatactcttattacgccagcagctggggagtgaactatcagcatattcgccgcagcgccgactacaacaacctcagcacctacggttttgtcgccgcattaagccatcagtcagatcaggcgacgctgagcctgagcccatgggacagagcgctcggatctttcagcattggctattttgatatcaaagccgaggataattcacatacccggctcatgaacctctcctggagccgcagcctgtggcaaagcagcagcctcaacctgagcgtaaaccgcgatctgcaggacaatagctacgccagcatgttgcaaatcattatccctttcgattcgcaaagctccgtgcagctaagcggtcaacgatccagctcaggccaatggggggaaaatatcaacgttagtcgctctgccccggcggaaggcgggctgggctggaacctcgcccattcgatcggcggcaataactatagtcaggcggatctgacctggattaatcgcgtgtccacgctgagcggtggctattacgggtcgcgtgacgatcatcacagctggtttgaggccgcaggctcggtcgtgctgatggataacagtctgtttttcgcccggcaaattaacgacgcctttatcgtcgtttctaccggcaactatccaaacattgcggtgaattatgaaaaccgcaaagtcggcgtgaccgataaaaatggtcatctgctgatcccctgggcttcggcctggtatccgggaaaggtcaccctcgatacgctgccgttgcccacggataccgaagccgtcacggtggaaaaacgcatcgccgtacgcgaaggcagcggcgcgctggttgatttcccggttaaccgcgtgcgctcggcaacgctcatcttcgtcgatgctcagggacaaccgctaccggtcggtacgccggtggaggaagttaatagtcaacagcgcgccctggtgggctacgacggcgtggtctggttctcgcacctcgggcgcattaacgaagtcaaaataaatgccggagagcttcgatgcagcatcccgttcgagcttccggagaccacgccggttccgcagcggataggcccggtcagctgtccctcttcatag

SEQ ID NO: 175481 - DNA, 960 bp, Klebsiella oxytoca
ttgaaaaatatcatccgggtattcgtgatgcttttagcgcttgggcaagccagcaacgcgctggccgcctgcagcatcaaaaccagtgcgccagcgatcggccctgtcgattcctttacgctctacagcgcgcctcagggcgtgatggcgggcgcggggttttactgcaccccggaactggtggcgctgaactcgaccaacacgctaagcgctaccctggcgtcggctaaccagagcaacagagtgccccggctgcttaacggcgccggcgatgccatcccttacagcatctgttctgacgcatcctgctcgccggcctatcaggatggcggcgtaataagctggtccaggacaacgctgcttgagctgctggggctatttaactcgagcgatggcaccatgccgctctacttcagaaccaccccgggagccaacgtgcccgccggaacctatagcgatgtcttaaccattacctgggtgtatcgtttttgctacgtcgggctcgatctactgggcattaagatatgtattccgaataacggcaccctggtctctacggtcaacgtatcggtgagggtgaccaatttttgctatatcgacagcgcgccggacgtcgagtttgcccctgccgccctcccgtccggttttagttcctacagcggccagcttgccattcgctgcacaaaaaacgcggcctacaccgtcaatctcgccagtactaacgccagcgtcggcgactggcggcagatgagccagcccatcgctaaccaaccgactgcctttttgcagtatcaattttaccagcccaacggcagcgcctggacggaaaataacaatctcagcgtgaccggctccggcgccgcgcaatctgcaagctacaccctgaagattaacccgaaccagagcaaccagcctgcgggaacctacagcgataccgtcctggtgacggtgagctattaa

SEQ ID NO: 175482 - DNA, 318 bp, Klebsiella oxytoca
atgggctttccatcgccggctacagattatgtagagagtacgctgacagtgagctctctgtgcaatataggagcaaactcgcgagttatcagcactgacagcggctttgctgttcttgatttgtctctgaaagctaagcaggggagcactgtcctgataaggcacgctggattcatggattttgcgaaaatattaggcagggcgtttatcacgatggagggagaagctatcgaaggggaagctctggatgaagtggaagtgatcggcgttgtcacgtatacgattcacgatgcgagtcatgatgagaggccagtatag

SEQ ID NO: 175483 - DNA, 240 bp, Klebsiella oxytoca
atgctcagacaatcagacatcaacaacgcctttcgggagtctattcttcggaattcgaagggctaccagtacctgcacaccagggatttcgtttcttcgctgcagcggcgcggcatccacttctcagagtccgaggcaaatcgctggatagagcgctatcaaaactgctttgctgacaagactcctgaccatagcgaaaacaggctttggatactacgaaacatggggagggtcatgtaa

SEQ ID NO: 175484 - DNA, 792 bp, Klebsiella oxytoca
gtgactacaatcattcgcaataaagacgttgttattgaaaacccgcaattgaaaccaatttatacaccttttacgtcagagcctgggttaattgcaggttggcgttttggtaatggtatggctgatctaagtgggaatggaaatagtttgacggcgataggaacgcccactgttgatagttattttataagcggtgacaaagacaatggatataaaagtacagtccctgatggatatcagcgaacgcttgtggcaatttggcgaaatcatagtgcgacagatgcatatgcctaccctgtaggtaatctggctcaatcatcttctactacaggcatcggtgtaggtttgaaaagcaacagttcatcctcatcaaacttaagccgactgagcggtaacgttggtggcaacaccacaacagcaaatctacttgctatcgcagatggcccgactgacacttacgcgaatagactgaatttccgttgggctgcattctctatcgacggcaatggaaatgccgccaacctttttgtacccgctatgagtgctgcgcttatccctgcgacgttgtcatctggcgccaaccttggaaccagggagataacagaaggcgggttgagcagcatgtaccgtctaattgcttttagaaatccggcgattcctggttcattgcctggctctgcaatagacgttgcagaggtgcttatttttgacagggcgcttgatttggctgcgctacaaaggacctatcagcgctcaaagcaatatatggcgctatacggccaaacgatttaa

SEQ ID NO: 175485 - DNA, 2037 bp, Klebsiella oxytoca
atggcacaagtaccactaccaaccccgaccgataatgaagtgcctagcacagatatcagggacgctgtttacgccggtgctatgctggataaggttgtcaccagcactgatctgacgtacaccgatcgtctcggcggcgagcactacaccgtagacggaattaaggctgaaggggataaggtcgttgaggaaacgcgacagaatctcatcccacttagtcgccagtatatgacgttagctgatgctcaggcagatatagcgaatattccagaaggaggcgcaacctatgtgcgtagccaggatggtagcactcttgcagatgagtacatcaataacgacggggtgctcactcccacgggaaggcaaatgccttctgatgcctccgttgccgaagctgctaaatcagcaatgcatgccgggttaaccacggaacagaacatctatgatgatgagggggttttactggttcatgcgctcgctgatgcagaaggaagaaccccagtaacagttaataagttaggagctgttggattggcaaatgctcagattgaatcagctccggatatccaaaacgcacattggggtattacagacaaaaatggtgttccttatgtttatggcacgccaatgggtggaataggggttggaaataccgagatagtagaaatcccagggcctcccggaattgtattttgtgacgctaactatattccaatggcctgtacgccaggatatgaaagcgatcaggacatcccggtaattggtggctctggcagtgcgccagaaacaccaatagtcccaatttatcttcgtgactggaacggcgtgaggtcgcaagggcagtctctgtctattggcgaaatgcctccggcagccgcagctgcaaatccacctttatcgacaaaccagccttacggaaacctggggtttagttcgaataacaacacttattctccttcaacagacactgcggtcccgttagtcgagaaggcgtatcttccttccgaaggaacataccctgcgggagaatcaccgtgctcgggtgccgctaacaagctcatcgagcgaattcaatctgaaacaggtttcgactggcagcagcagggtgccgttattttctcctcctgcccgggtcgtggaggcactcagatagttaacttgtcaaaagggagtgcatcttaccagcgcgcattagaccacgtcacaaacagcatgcggctggcaaacgcagctggcagaacatttgctgagttagctattctctggactcagggagaatctgatatcggcgctggtgtgtcacgccagagttattataatctgctgagccaatatatttcagatatgctcgctgatacagtaacgataaccggacaggactacactccgtttttcatcagttaccagctggctagtcatcgacagtacagcaaaaccacaccgtcgattgccctggctcagcgcgatgtggcattaaccgggttgtctcgccttagtcatccagcctatatcggtgactacgtggataatgttcacggtacaaatcagacctatttgatgtttgcgaaatattacggacgtgctgtacataaacttctgcaggacaatcagtctggaaaaccacccggtatgcactggctggataaaataggcgaaacgcggcagggtaatatcatcaacctgcaatttaacgttcctcaccctccactggtattagatacaacatgggtaacgctgacagaaaattacggattttatatccgggatatgaatacttctaactttgatgtcctagatattatttcctctgttgaactggctggtccggacagggtgaggattatttgtacgaggcccctccttgataatgaacaggtgacatatggctggggcaaatcaggcgacccattaactacgggccgatcaagcggtccacgcggaaacttacgcgatagtgaaggtgatttgcctggagaaagctatacggacagcgcaggtactttgcgcaaactccataactggtgtgtaatattttaa

SEQ ID NO: 175486 - DNA, 2478 bp, Klebsiella oxytoca
atggttcgatatgaattgcagcgattgcccggtgcgccgctgcagcggggggctgtagtttccggcaccacactgattagcctgctggattctctacagttacaccgcgatgtggtcgttaaactgaatggtcgcgcgctgccggacgactacgatatcagtcggccactatgtaccggtgacgtcgtggcggtgttcgatcagccggagggtggggtcggaaaactggtaacgacaatattacgtccggtctcgaaaatcctttccggtgcgctgaaagtattcggcctgtcaaacaagccgagtgcttcggtatcggtggcgactggcgaatccccaaataatgacttaaccggccagacgaaccgagcgcgactctacaaggggcgccccaatatttacggccagtgccgcgtatttcccgatttgattcaggaggcgctcttcgagttcgtcgacaataataagcagcttacagaatggtttgaggtcggttatggccggtacaccatttcctcgatccgctactcggaatcgaatcttggtagccttgcgggagcgagttctgcgatttataacccgggtgacgtgattggcacgattgaggttggataccagttcgatgacgtcgataatgagattgtgccgggcctgaatgagtctcaagatttcccggcccagaccgccaccacgccggcgccgacatctgtggcgatcgagagtaatcagcttaaggctatagtgctgtcgaacgatgacaactttgcctacttcgctgcgctggcagtgccgcacccggttactttcgttatcaacgccacatggaacgacggtggcacaagcgtcacacggaacgtcactggcgccgggaatatcatctcatcagagagcttcatcggcgaagacacgctttcgtacacgacgttttatatcggcgaactgtcgggagaaattacgtcgctgcctggcgacgcggttatcaaccagacgcttttcacgcttaatgaccagacgccgcttgttattggaccgtcagtctcgccaatcgtctcgacgcaggtctgggtgcatgtgctggttcagctcggagcgactgccggcacaacgcaataccggattagcttctggatggttgatgacgataacaatcaggtgccagggacctcagagcagtacgattatttcttcgacaacgatttccaggtaacgaccagatatttccgtacgacgcataaattcaccccggccgcaggggcggggcgctatgcggtgaccatcgagcgcctcgataacagcaacgatgccaacgtcgtaacgttaatggcgatccacgcagttaacgttcgggaaaacgtcgtttatccggaagacacgattgcccgtatcacgataaaggggtcgaacgacagcaacagcaacagagagcagaagtacaacatgctggcgcagcggcataccatcagctacgaccggacgaccggcgcggtcgattacacgctgcggccaagccggtcgtttgccgacgctatcctgcatgagtgggttgtcgtaagtaagcaggacgaggcaagtattgatgtcgcggctctgtatgccattgccgattcgctgccagatgctcaacttgggtatttcgattacaccttttctgatgagaaacagccgctgggagagcgcatagcgacaatcgccaatgtggcccgcgttgacggcaacaacatcggcgatgttctgacgttctggcgtgatgagaaagtgacaaatcccgatgcggtatttgcgcgctcaaacatgttctgggacgagtacaaagtcgcatggcaaatgtctctccccggtggttatgacggcgtagcgctggactacgttgaccctctgacgaacaagaaggcttacgtctacctgcagatcgacagcagcggaatcactgaggttgaagatgctaccgttaacgcgatgcaaatcagtctggacggctgccggaacgccactcaggcaactgaccgggcatggctggaagcgaggaaaatccattactcgcgcatcacaatgacggtgaaagtgctggaagaaacgcaggtcgtgcgcggtacggtggttcagtgtccggacctgtacgacaacgcgcagcagaccggatacatcaccgggcgcacaggggatgttttttcaacatcagaacgtatcgacttttctttcggcgacatgtgggtggtgatgaccgacagcctcgggaattaccgcggccgctggcgagcctatcctgtaagcggcaagcccaaagcattccaggctgcagccgataccttcgatctgaacatttatgatcgcagcacggtgcaaaaccccagccggtatttcatcgctactgactcggaactgaactccacaatctggcgcgtcgatagcgccaaacccaacaatgacgatactcaaaccctctcactcactgagtattcagactcgatttatccgtaa

SEQ ID NO: 175487 - DNA, 396 bp, Klebsiella oxytoca
atgacacagagcgaatttatcgggcttgttaacggcaagccctgggctaaccgcgcctgcagttttgagcaaatggactgctggggcctggtggttctctattaccggcatgtgctggggcaggagctgcaccacatcgccggctacgaatctggcgctaagttcatcacctgctacgaacatgagcacgtccactggcggagtgtgccggtggcgataagtggatgcatcgccgttttttaccgtggcgaagttccggcgcatatcggtgtgatgatcagtccggttaagtgcctgcacgcccgcggggaattcggctttgtacgctgtgacagcccgctggcattactcaaagtttacagcaaagtggagtacatggtgcatggttcgatatga

SEQ ID NO: 175488 - DNA, 471 bp, Klebsiella oxytoca
atgccgactttgagagaatggaaagagcggcggccggccagtgatatcaagcagactgtggagttttaccatcctgcgtttggttattaccgagtggtcaataacctgttccgcccggcgacgttcggtggaaactccttcgagccagcgcgattcagtgtgaccgagccagcgcaggacggaacggcagttatatcaatgaccataacgtttgtcgccgcgacggagcacgtcagacagacgcttaaaagctggcgtggggctgcgcgcatgacgccgataaaatgcctgtatcagcagtggaatgcgatcggtgacacggcatcactgaaagactggacgctttacgtgaacgacatttccgccgatgccagcaacgtcactgtgaccgccggcaagaccaatccgctgacgctggccaactccatcatttacaccacgaaagactatcccgggctaatcaccgtatga

SEQ ID NO: 175489 - DNA, 477 bp, Klebsiella oxytoca
gtggctacagttcaataccctccgttcctgccgcttccccagcgcgccgatcagaacatgacgcaggatacagcctggcagacgacgcagacggctgtcggccctgcgatatttaccccgatcacaaccgacctgaaagcgacctggacactgcaatggatattcacactgcagcaggccgagcgatttaagtcgtggcttcgctcaccgacgtattgcgaccgggggcgtaactggttccagatgccgatcgacctgggcgatacacagggcgtgcagcagcagacgcttcacttcgtcagtatgccggtgcagaccagcaaaaacggcagcatcgttacctggacggcgacggttatcagcaacggcatcgaggatgtgaccgaggattacgacgactggattgttgaggcgcagcctggttatggctactggctggattatctggtgaccgaagttatgccgagggctgactga

SEQ ID NO: 175490 - DNA, 171 bp, Klebsiella oxytoca
atgtctggtttgattaaccctaaagactcccctgaagagtcagcctacgcactaatcatcgagctggttagggctcaacgtgttccggtttactcatcaaatatttctggactgctgtcgctctatgatgaagctgtcgagcattttaaagacgacgagaagaagagctaa

SEQ ID NO: 175491 - DNA, 168 bp, Klebsiella oxytoca
atgaaattttgtgaattaccggagcgagtacaggtacaggcagctgaaaggctttctgatgaactacaggggattgtggcatggaaagaagaagagagaacggaaaaagcgaaggcgatcgccaaatccgttcgtgaaagctttattgcattatgtgccgatgattag

SEQ ID NO: 175492 - DNA, 3279 bp, Klebsiella oxytoca
atggctgagagcgctggcggaatttattacgacattgagatggatgtgcaagggcttctcgttgcacagcagcgcgttaatcagcgcctggatatgatggagcgcggtttcgacggcactacacgcgccgtgaacaacactgagcgttctatgtccagcctgtcaggcgtggctgttgctttggctgccgctctttctgtgaagcaggtttcagaatatgccgatgcttgggcaacagtaaataacaagctatcaaactcagtaaggcccacagagcagttagcagatgttacgcagcgtgtttttgatgtcactcagtcaacaagaagtagccttgatgcaaccgccacactgtacgcaagactggaaagaggaacgcggcagtacaatacatcagcagaagatttggcaaaactcaccacgataattaaccaaggttttgtcgtttctggcgcaacagcacaagaggctgaaaatgccatcatccaactatcacaggggatagcctctggcgtgctgaggggtgaagaattcaactcagttgctgagcagggtagccgcctcatggttgccctggctgattctttgggggttggtattggcgaactgcgcgcgatggctgcgcaagggaagttgaccaccgatgtggtggtaaatggactgctttctcagggcacggcgataggaaaagaatttgccaataccacgacgacgatcagccaggcactgcaggttgctggtaacaacgtaactaaattctttggcgaaaactctaccgtaaaaactggcgccgctatttttaatgatgcagttgtgactgcaagtgagaacataggcgttctgagcgctgcattaactgctgcagcggcaattatgggaagccgctatgtcggcgcattgacaatgtctgccgcctctcagatccagtctgctttggcggcccagcgtcaggccactgccaatgcccaggccgctcagtctgcgctaatagctgctacgtcagtgaagagaaaggcggttgcagacaaagaggcggctttgtcctcccttgccttagcgcaggcagaatataatgtggccaagggtagcgcagctgaaatgcttgcgctggatgcattaattgcagctaaatcaagagcaagtgcagcatcattgtctttggcgcaggcagaaactgcacaagccgcggcatctgcacgagcagcaactgcagcaagtgctgcctcggtaggtataggccttgcgcgtggggcgctttctttgattggtggtcctggtggcgctgccatgctggcagcatcagccattttctacttctggcagaaagctcaacaagccagagaggaggcgctccgctttgccgatagtctggacaaagtaaacgcctcaatgaaggcgatgaataatacccaactcaggggcaccatcgccgatgctaacgagtctattagagcgcagaaagatgaaatttccgatctgcaggcggaggttgactctttaagttctagatatcgtaatttcaccccagaagctcaagctgtagctgaatcattgggccaaggagctgattttgcccgtcagcaggctgaggtttctgaccagttagccaagaaatcaagggatcttgccaacgctcaagataagttggcgcaaactcaggaaactgcggctgaagccaacagaacattaacaaacaacatgctcacttcaatgggtgtgcatgatgggctgatccaaaagggttggtcacttgagcaggtgcagagcgcggttgcgaaggctttcggcaacacggctgatgaaataaaccgagcaaatcaggctgggcaaaacttcaaccccaaagcgctgcaggtatctcctcctaccgctgatggcgacaaagtaattcttaacctcgaagagcagaacgagttactgaaaattcaagacgatcgccaaagagcagtgacaaaagccaggatgcaggcggcgaaggttactgacaacccaaaccagatatcaaaagctggcgatctggcgggggaaaactttgatctgcaaaaatctgaagaggcgcgcaaggaggcgcaaaggaagagtgagcagcaggataagcgttctgccactgctgcagaatcggtagcgcagaagctcgataagctacgagcagcacaggatctatccacggagtctgccgaaaagcgccgcatccaggaagctggcttgcgtgccgagcaatcacttggaagcggagcaacgcagaagcaactgaatgaggcaagagcgcttggtgaagcaaatgaacgtgccgcgctatccattcagaagcgcaaagaggctgagcagggacagaagtacgccaagcaggagatagcttccgcgcaaactactgttgacccttcaactggacaggcagttgatccactggcacagattaatttgcaggagcaacaaaaacttgaggccctagctaagtaccaggaaattgataagcaaaacacccaactgtacgaggacgctaaaactgcaatcatgcagcaggcctcataccaacgtcaggccatccttctgcaggagcaacagacctatcagcagaatgtgagttcgcttttaggagaatcgtcgaattttgctggctccctggcggatgcgataggtcaagcagcagggaagtcgagtgcggcatatcaagcgcttttcgctattagtaaagggtttgcgattgcacaggcgtccttgaatcttcagaccgctatcagtaatgccatggctatcccgtggcccgccaatattcctgctatagcgcaagcattgtctgctggcacgcagatagttagcgccataagcgggataaactatagtggcggccgtaagaatggaggcccggtatcatccggcaatatttatcctgtcggtgaagacaaccttccggaattcgtgcagaccaataagggtcttttcatgatacccggtgatgatggccgggtattcagcaataaagacgttactagcggatcacccagcatcaagaaggcctcaactggcagtgaatatgtatcaagctcgaagaacagcgcatcgcagagtgactccggtggcggcaagcagattcaggttaatgttcagttttacgaccagacctccggcgggcagcattcatttgaggctcaggcaatgcaagaaggtaatgtagtgacggttgatgcgttcttaaacgatcttgaccgtggtggaccgatgacatctggtatcaaagaccggttcgggctttctgtaaaagccaacggcgcatactaa

SEQ ID NO: 175493 - DNA, 1107 bp, Klebsiella oxytoca
atgagagttaatggacttacgaaaggatttttcatcctgatcgtgctgatcgtcaccctggcttttttcgacgttctctccccctattattcagccattttatgggcggccattctggcggtgatcttccacccggtgaaaaacaaactgcgcgatcggctcggcgagcgcaacggcctggcggcgctgctgaccatcgtcattatctgcctgattgtctttaccccgctggcgatcattctttcgtcgctggccttcgagctcaacgtggtttacaccaaactgcagcataatgacacccagttcccgaccgtggtagccagcctgtttgctcatctgccggaatgggccaggagcttcctttctgagcataatctcgatagcgcggaacagattcagcgccagctttcagacgtagcgctgaaaggaggccagtacctggccggtagcgcattcttgattgggaaagggaccttcggctttaccgtcagcttcggcatcatgctttatctgctgtttttcctgctcaaagatggcccgtatctggtcagactgatccttgaatccctgccgctatcgaatcacgtgaagcagcatctttttgctaaatttgccgccgtctcccgggcgacggtaaaaggcaccgtcgcggtggcgcttgcgcagggtgcgcttgggggactggcgttctggatcgtggggattgatggcagcatcctgtggggcgccctgatggcgtttctgtcgctaatcccggcggtgggctcggcgattatctgggttccagcggcaatctatctcttcgcgaccggccagctctggcagggcgcgtttatcgtcggtttctttgtgatcatcgtagggctggtggataacattctgcgacctttactggttggtaaagataccaaaatgccggactacctgatcctgatcaccacgatcggcggaatggaaatttacggcatcaatggttttgttatcggcccgctgatcgccgcgctgtttatcgcctgctggaaccttctctccggacgcgatcacgctggaaacattgatgagcttgatgaagatttcctcgaagaaggtaaaaatcacgaagagtag

SEQ ID NO: 175494 - DNA, 492 bp, Klebsiella oxytoca
gtgaaaaaaatcactacgttcgccgcttccatgctggctcttgcctgcgtttccgccagcgccgttgcaactgaacagccgctggaaaaaatcgctccctaccctaaagcggagcaagggatgaagcgtcaggtgatccagctgccgcagcagcaggatgagtcgacgttaaaagtggagctgatgattggccaaacgctggaagtcgactgcaatcgtcatcgtcttggcggtcaactggaaagcaaaacccttgaaggctggggctacgactactacgtatttgataaagtgacttcccccgtctcgaccatgatggcctgtccggatggtaaaaaagagaagcagtttgtgatggcaggtctgggcgatgcgggaatgctgcgttacaacagtaagctgccaatcgtggtttataccccggccaacatcgatgtgaaatatcgtatctggagagcggacgaaaccatcggcacggccgttgtgcgttaa

SEQ ID NO: 175495 - DNA, 1635 bp, Klebsiella oxytoca
atgaagaaaaagatggccgtacccagctcacaggcggttggttccaataacactcggaccaacacccgccatgagcaagagacggatgtattgttgattggcggcggcatcatgagcgccacgttgggaacctggctgcaggaactggagccggattggtctattaccatggtcgagcagatgtccagcgtggcggaagagagctcgaacggatggaacaacgcgggtaccggccacgcggcgttgatggagctgaactatacgccgcaaaccgctaacggtatcaacatcgataaagcggtcgacatcaacgaatccttccagatttctcgtcagttctgggcccatcaggtgacccggggcattctgaacaagcctaaatcctttattaacagcgtgccgcacatgagcttcgtatggggcgaagacaatgttaacttcctgcgcgctcgatatgcggctttacaacaaagcgagctgttccgcggtatccgctactctgaagatcatcaacaaataaaagagtgggctccgctggtgatggaaggacgcgatccgcagcagaaggtggccgcgacccgctcggaggtgggtaccgacgtgaattacggcgaaatcacccgtcagttgatcgccgggctgcaaacccatgataatttctctctccagctggggaccgtggtgcgccgttttaagcgcaacgccgacaaaagctggaccgttacgctggcggatgcgaacaaccgtcaccagaaacgggttatcaaggctaaatttatctttatcggggccggcggcgccgcgctaaccctgctgcaggaaaccggtattccgcaggctaaagagtacgcgggcttcccggtcggcggacagttcctggtgtgtgagaacccggaagtggttaatcaccatctggccaaagtctacggtcaggccgaggttggcgcgccgccgatgtcggttccgcacatcgacacccgtattatcgacggcaagcgcgtggtgctgtttgggccgttcgcaaccttctcgacccgcttcctgaaaaacggttcgctttgggatctgctggcctcgaccaacacctcgaatatcatgccgatgctcaacgtggggctggataacttcgatctggtgaagtatttgattagccaggtgctgcaaaaggacaaagatcgtcacgcggcgctgtgtgaatactatccggaagcgcgcaaagaagactggcgcttatggcaggccggccagcgcgtgcagattatcaagcgcgatgagaagaagggcggcgttctgcgcctcggtaccgaggtcgtcagcgatgacgaaggcaccgtagccgcgctgctgggcgcctcgccgggagcgtccactgcggcgccgattatgctgcagctcatggaaaaagtgttcaaagagaaggtcaactcagcggagtggcaggcgaaactgaaagcgattataccaagctacggtacgcgtctggacggcaacgctgcggaaatagaaaaggcgctggcgtggaccagcgaagtgctggaactgcactacgagccggttacggtggctgatgaggttccgcaggcggagctgaagccgctgccggaaggtaaaccggtcgctgatattgcgctctaa

SEQ ID NO: 175496 - DNA, 1248 bp, Klebsiella oxytoca
atgccccctgtttctgattccgctacctccagcaacgctggcgcattaggccagatcctgcgctcgcccgcgctgctgacgcgtgaaacgctggcgggcgtactcaccgcactggcgctaatccccgaggtcatctccttctcggttatcgctggcgttgatccgaaagtcagcctgattgcctccgtagtgctgtgcctggcgatgtcggttctcggcggcagaccagcgatggtcaccgccgccgccggttcggtagcgctggtgattggtccgatggtgcatcaatatggcgtcggctacattctcccggcggtcataatggccggcgttattcaaattttgtttggcatttgcggcatggcgcgcctgatgcgctttattccgcagccggtgatgaccggttttgttaacgcgctgggtattctcatcttttttgcccaggtaccgcatttctggagcaagcagccgctgattatcggcctgttcgtgttaacgctgctgattgtgctgtgggcgccgcgctatataaaggcaatcccttctccgctcatcgctatcgtactgctgacgctgtttaccgttttcagcggccagctgctgccgaccgtcggcgatgaaggctcaatgagcggcggactagcggggttaaccagcctgatagttcctctgaatttaaccacgctgcacatcatctggccctgcgcgctgagtatcgcttttgtcggcctgatggagtcgcttctgacggcaaagctggtggatgatttaacccaaacgccttccagcaaagcgcgcgagagcgcgggtctgggcatcgccaacattctagccggtttctatggcggtatcgccgggtgcgcgatgatcggccagaccatcgttaatgttgaaatgggtaaagcgcgcagccgcgtgtcgaccgttgccgcaggcctggtgctgctcctgctggtgactgccttaagcgaagtgatggcaaaaatcccgatggctgtgctcgccggggtgatggtgattgtcgcggtgaagacctttagctggcacagtattcgtccggctgagctggcgcgcaatccgtggccggaaacgctggtgatgctggtgaccgtcggcgcaaccgtcggcaccagcaatctggcaatcggcgttctggcagggctgatctcaatggcactaatcccccgccgtctgcggactcaagcgcaggctacatcagaaaaagcgtcgccagcccaagaaaaataa

SEQ ID NO: 175497 - DNA, 1437 bp, Klebsiella oxytoca
atgtccgttttgcacaaaaaaagcgccagattgcgcgatgaagagcgcgcccgcctcatttggctcctgagcaccgataaagccgtcacatcttcactgctgggtaaattaaccctcgctgaacgctacgatgacagtaccctggccgacgatctggcggaagtggaaatgctggtttcacacctgccgccgccggatcttgccgatgcgctcgaagcgctgccctatgatgcgcgcaacgcgctctggcggctggtcgccgatgacaagcgcggcaaagtgctgctggaggcgtcggaaagcgtctggggcgacctcatcgaagagatgagcgatcacgatctgctgttcgcgctgcaaaatctcgatatcgatgaacaggtttacctgctacagcacttgccccgcgatctgaccggacgtttactggccaccctgcctgcggataagcgcgcgcgtattcgccagatgatgcgctacgccgacaataccgtcggcgcgatcatggagtttgaggtcattaccgtccgtccggaagcgactctcgcagcggtgcagcgctatctgcggcgactaggtaaaatgccggagaataccgataaactgtttgtgaccacccgcaataagctgctgctcggcgaactcgagctgcaaaccattctgcttaacgatgcgcagaagcgggtaggggaagtgatggaaggcgatccggtgaccttccagccgcacgaagacgcggagaaagtggcgcgtacctttgaacgtgatgacttacttagcgccgcggtgattgatgccgacggcaagctgatgggacgtttaaccattgatgagatcgttgacgtggtctatgaggagacggataacgatttacgccggatgggcggcctgagcaacgatgacgacgtgtttgcgccggtgagcaaagcggtgaagacccgctgggcctggctggcggtgaatctttgcaccgcgtttatcgcttcccgcgtgatcgatggcttcgaacatactatttcccaactggtggcgctggcgtcgctaatgccgattgtcgccgggatcggcggcaacacgggcaaccagacgatcaccatgatcgtgcgggcaatggcgttacagcatattcagccgggaagttttaccttcctgatcttgcgcgagatgggcgttgcgctgatcaatgggatcgtctggggcgggattatgggggctatcacctggtggctatatgacgatccgcaactgggcggcgtgatgacgttggcgatgatgctcaatctactgatggcggcaatgatgggcgtcattatcccaatggtgatggtcaagctgggacgcgacccggcggtcggctccagcgtaatgattaccgcgattaccgacaccggcggattctttatttttcttgggctggcgacgctttttctgatgtag

SEQ ID NO: 175498 - DNA, 1644 bp, Klebsiella oxytoca
atggaacttcttcttcttgtctggcgtcagtaccgctggccgtttatctccgtcattgccctgagcctgctgagcgcggcgctgggtattgggcttatcgcctttattaacctgcgcctgataactatcgtcgatacctccctgacggtactgccggaatttctgggactattattgctgctgatggcggtcacccttggctcgcaactggcgcttactacgctcggccaccattttgtttatcgcctgcgcggggaatttattaagcgcattctggatacgcaaattgagaagatcgagaaaatcggcagcgcgtcgctgctggccgggttaaccagcgacatccgcaacattaccattgctttcgtgcgtctgccggagctggtacaggggattattctgacctttggttccgccgcttatctggcctggctgtcaggaaaaatgatgctggttaccgcgctgtggctggcgttaaccatctggggcggatttgtgctggtgtcgcgggtctacaagcacatggcctcgctgcgcgaaaccgaagataagctgtatcacgattatcaaacggttctcgaaggacgcaaagagctcacccttaatcgcgagcgcgctgaatatgtatttaatcagctctatctcccggacgcgcgcgaataccgccaccatattgtccgcgccgataccttccatctgagcgcggtcaactggtcgaatattatgatgctgggcgcgattggcctggtcttctggatggctaacagcctgggctgggccgatacggcggtggcggccacctattcgttgacgctgctcttcctgcgcacgccgctgctctctgcggttggcgcgctgccgactctgctcagcgctcaggtggcattcaataagctgaataagttttcgctcgcgccctaccgcgctgaattcccgcaggcgcaggtgtacccccactggcagacgctcgagctgcgcgatattaccttccattatcccgacaacagctttgcggttgggccgattaatcttactctcaggcgcggcgagctggtattcctgattggcggcaacgggagcggaaaatcgacgctggccatgctgctgaccggtttgtatcagccggtttctggacagatcctggttgacgggcagccgatggcggcggataagccggaagattaccgcaagcttttctcggcggtctttaccgacgtctggctgttcgacaggctgctgggaccggaagggaaggcggccgatccggcactggtggagaagtggctgggctatctgcaaatgaaccataagctacggctggacgatggcaaaattctcgacctgaagctgtcaaaagggcagaaaaagcgcgtggcgctgctgctggcgttagcagaagacagagatatcatcatgctggatgaatgggcggcagatcaggacccccatttccgccgcgaattctatcaggtgctgctgccgctgatgaaggagatgggcaaaaccctctttgccatcagccatgacgatcactactttcagcacgccgacaggctgctggaaatgcgcggcggccagctctcggagctgaccggaaatgagcgcgaactggcgacccgcgatgcggttgcccgtaccgcctga

SEQ ID NO: 175499 - DNA, 651 bp, Klebsiella oxytoca
atgctcgatctttttgccgatacgccgccctggcaggagcaactggctccgggggcgataattttgcgccgctacgcccgtgaacgcgcgccagcgcttttgcaggcaatcaccgatattgcccatcgttcgccttttcgtcagatggttacccccggcggctatacgatgtcggtggcgatgaccaactgtggcgagctgggctggaccacgaacgcgcgcggctatctctatgccagcgacgatccgctgacgggaaagcgctggccgcagatgccgccgcttttccacgagctggcctcagaggcggcgacggcgggcggctatgcgcactttaccccggatgcgtgtcttattaatcgttatcagcccggcacaaagctgtcgctgcatcaggataaagacgagcgcgacctgagggcgccgatcgtctccgtctcgctggggttgccggcgatattccagtttggcggcctgcggcgtagcgatccgctacagcgggtgctgctggagcacggcgatgtggtggtctggggcggcgaatcacggctgttttaccacggcattcagccgctaaaagagggggttcatccggataccggctcctgtcgctacaatctcactttccgcctggcagggaataaagaataa

SEQ ID NO: 175500 - DNA, 1065 bp, Klebsiella oxytoca
atgaaaccgataatgtttgataccgatgagcgccgctggcaggcagtatgcgaacgcgataccggcgccgatggtcagttcgtttttgccgtgctgactaccggcgtttgctgccgtccgtcctgccgctctcgtcgcgcgctgcgggaaaatgttcgcttctatcctgatgtcgataccgcgcaggcggcaggctttcgcccgtgcaaacgctgccagccggaaaacagcgatccgcagcagcagaaggtagagaaagtcgctgccgcctgccgtctgctggagcaggagacgccgatcacgctggaagcactggcacgccagcttgcggttagcccctttcattttcaccgcctctttaaatccgtgaccggtatgacccccaaagcctggcaacaggcctggcgcgctcgccgtttacgcgaagcgttagggcagggggcgaaaattaccgacgcggcgctatccgccggtttcccggataatagcagctactatcagcaggctgacgccgcgctggggatgaccggccgtcagtttcgccgcggcggtgagaatatggacattacctgggtatgcggcgacgggccgctggggcgctgcctggtggctgagagcgaacggggaatctgtgccgtgctaccgggagataacgacagctcgctgtatgatcaattagccagcctgttccccaatgcgcgactgcatccaggcgatgaagtctttcgcctgcgggttgcgcaggtcttttctcatcttaacgatcatcgccagccgttttctttgccgctggatctgcgcggcacggcttttcagcttcaggtctggcaggcgctgcgacagatcccggcgggggagacccgcagctatcgccaggtggcgcaaagtatggggcgtccccgcgcggtgagggcggtggccagcgcctgtgccgccaataagctggcgctggttatcccgtgtcatcgtgtggttcgcgaggatggggcactatccggctatcgttggggaacggcgcgtaaggcgctgctgctggcgcgagaagcgcaatacgaggagacataa

SEQ ID NO: 175501 - DNA, 1053 bp, Klebsiella oxytoca
atggacatgacatttttccgcgccgccctgttcggggccctggtattactttcaggttgtgattccgccacttctccccagacgccaaaatccgccgctaccgtactggacggtaaaaccatgggcacattctggcgggtcagcgtcatagaccttgatcaggcgaaggccgaggcgctgcgtcagaaagttcaggctcagctggatgctgacgatcgcctgctttctacctggaagaacgattcagcgttgatgcgctttaaccattcgccggagacctcgccctggccggtcagcgaggcgatggcggatatcgtgacgatgtccctgcgaattggtgctaaaactcacggcgctatggatattaccgtcgggccgctggtcaatttatggggctttggcccggacaaacagccggtaaaaacgccggatccgcagcagattgccgatgccaaagcgcgtagcggcttacagcatctgacggtgatcaaccgggccgacgggcagtatctgcaaaaagacattgcggatctgttcgtcgatctctccaccgtcggtgaaggctacgctgccgatcatctggcgcgcctgatggaacaggaggggatctcgcgctacctggtctcggtgggcggggcgctggtgagccggggtatgaatgccgaaggtcaaccgtggcgggtcgcgatccagaaaccgaccgatcgcgaaaatgcggtacaggcgatcgtcgatattaacggccacggtatcagtacctcgggcagctatcgcaactactatgagctggacggcaagcgcatctcgcacgtcatcgatccgcaaaccgggcgaccaatcgatcacaagctggtttcggtgaccgttatcgctccgacggcgctggaagccgatggctgggataccgggctgatggtgctggggccggaaaaagcgcaggaggtggtgcgtgaacaggggctggcggtctatatgattgtcaaagagggggaggggtttaaaacctggatgtctccgcagttccgcgctttcctggttggcgagaaaaattaa

SEQ ID NO: 175502 - DNA, 1098 bp, Klebsiella oxytoca
atgaaagttaaagtactgtccctcctggtaccggctctgctggtagcaggcgcagcgaatgcggctgaagtctataacaaagatggcaacaaattagacctgtacggtaaaatcgacggtctgcactatttctctgacgacaaatcttccgatggcgaccagacctacatgcgtctgggcatcaaaggcgaaactcagatcaacgaccagctgaccggttacggccagtgggaatacaacgttcaggcgaacaacgtagaaggttctgacaagcagtcctggactcgtctggcatttgcgggtctgaaattcggtgacgcgggttctttcgactacggtcgtaactacggcgtagtatacgacgtgacttcctggaccgacgttctgccggaattcggcggcgacacctacggttctgataacttcctgcagtctcgcgctaacggcgtggcgacctaccgtaactccgacttcttcggtctggttgacggtctgaactttgctctgcagtaccagggtaaaaacggcagcaccagcggtgaaggttccaccaacaatggtcgtgactggaataaacagaacggcgacggctacggcacctctctgacctatgatatctatgacggtatcagcgctggttttgcgtactctcactctaaacgtactagcgatcagaacaccaaagcagcactgggccgcggcgacaacgctgaaacctacaccggcggtctgaaatatgacgccaacaacatctatctggcgtctcagtatacccagacctacaacgcaactcgcgccggttccctgggctttgctaacaaagcgcagaacttcgaagtggttgctcagtaccagttcgacttcggtctgcgtccgtccgtggcttacctgcagtccaaaggtaaagatctgggacgtggctacggcgacgaagatctgctgaaatatgttgatgtaggcgcgacctactacttcaacaaaaacatgtccacctacgttgactacaaaatcaacctgctggacgaaaacaacttcacccgtgctgccggtatctctaccgacgacatcgttgctctgggcctggtttaccagttctaa

SEQ ID NO: 175503 - DNA, 2661 bp, Klebsiella oxytoca
atgaccccgaaaaaattttccctgatacccggcaacattacccgcttctttattctcatggtcatcgtcctgctggcgacgatgggggtcatgatccaaagcgccgttaacgcctggctaaaagataaaagctaccaggttgtcgatgtcagctacgacttgcataaacgcatcgatacctggcgctacgccacctggcaaatctatgacaacatcgccgcaacctctgccagctcagcctccgagaccgggttgcaggaaacgcgtttaaagcaggatgtttactatctggagaaaccccggcgcaaaaccgaagcgctgatttttggctctcatgacggctcaacgctggaaatgacgcaaaaaatctccaactatctcgatatcctgtggggcgccgagacgattccctggtcaatgtattatctcaacggcctggataacagcctgatactggtttcaacgctgccgttaaaagatctctcttccagcttcaaagaatcgacgatcagcagcgtcgttgaatcacgccgggctgagatgctgctgcaggccaatacccttgatgaacgcgagacgttttcgtcgctgcgccacctcgcctggcaaaacggctactacttcaccttacgcaccacctttaaccagcccggtcatctggcgacggtagtggccttcgatctgcccattaacgatctcattccgccgagtatgtctctggagagtttccgtctggagcccgatccctcgcagaacggaaccagcaatccggataaagaagctgccgacatcgtcagcattaactttaacggcccgcagattgaaattatcacgaccattaataccaccggtatgcgcctggtctggatggtgccctttagcgagctgattctggaatcgctgcaaaatattttactgccgctgctgctgaatattggtctgctggcgctggcgctgttcggatttaccaccttccgccactacagcggacgtaaaagcgtcgcgggaacggctatctcctcggcagccaatagtgaactacgcgctcagcgcgccattcacgaagagatcgtttccctgctgccgctcgggctgctggtgcacgatctggaggctaaccgtacggtgatcagcaatccgatcgccgatcatctgctgccgcatctgaacctgcaaaacatcattaatatggccgatcagcatcagggcgtgatccaggcgacggtgaacaatgaactgtatgaaatccgtcagttccgcagtcaggtttcgccacgaacgcaaatttttattattcgcgatcaggaccgtgaggtgatggtgaataagaaacttaagcaggcccagcgtctgtatgagaaaaatcagcagggccgcacggcgtttatgcagcatatcggcgcggcgctcaggcagccggcgcagacgctggcggaagaagccgcggcgctcggcatggctgaaagccgcaggctggcccagcatgcggacgaactggtgcagttggtagatgaaatcgagctggcaaacctgctggagagcgatagctggaagagcgctcagggtctattctcgattcaggaactgatagatgaagtggtgcctgaagtgctacctatcatcaaacgtaagggtctacagctgctgattaacaacgccttgccggccaatgagcaacgctacggcgatcgcgacgccctgcgccgtacgcttttactgcttatccagtattcggttaccaccacgcctattggcaaaattactctggaagtgagtaaagatgaatcagcggacgatcgtctgaccttccgtattctcgataccggcaacggcgtttccgcaaacgaaattgacaatatgcacttcccgttcctcaacgatacgcaggcagacctctacggcaaggccaacgccctcaccttctggctctgcgatcgcctgacgcgcaagctcggcgggcagctcaatatcaaagcacgcgagtcgctgggtacccgctactccctgcatttaaaaatggccgccagcgcagaggagagtgagtcaggggaacatctgctggatgacgtggtgatattgcttgatgtgaccgccaatgaagtccgccgtattgtgactcgccagctggagagctggggggccacctgcatcacgccggatgacagaatcacaagtcaacaatatgatctttttttaacggataatccgtctaatcttactgcttcgggcttgcttttaagcgatgatgaagcccgggttcataagattggtcctggtcagctccgcgtaaactttaatatcagcgctgcgctgcaggaagctatcctgcaattgattgagcagcagcttgcagaggaagaggagcagccttcctctgccggtagcgaaagtaacgccgaactgcatgccagcggctattacacgctgtttgctgacacggtaccagatgatgttaagaggctgtataatgaacgggcaacgggcgatttcgccgcgctggcgcagaccgctcaccgcctcaaaggggcgtttgctatgctaaatctggtacccggcaagcagttatgtgaaacgcttgagcatctgatccgagaaaaagatgcgcaaggcatagaaaaatatatcagcgacattgacgactacgtcaagagcttgctgtag

SEQ ID NO: 175504 - DNA, 651 bp, Klebsiella oxytoca
atgaacaatatgaacgtaattattgccgatgaccatccgatcgtactgttcggtattcgtaagtcacttgaacaaattgagtgggtgaacgttgtcggcgagtttgaagactccaccgcattaatcaacaatctgccaaaactggacgcacatgtcctgattaccgatttatccatgcccggtgataaatacggcgatggcattacgcttatcaaatacatcaagcgtcatttcccggacctgtcaatcattgtactgacgatgaataacaacccggcgatccttagcgcggttctggatctggacatagaagggattgtcctgaaacagggggcgccaaccgacctgcctaaagcgctggcagcgctgcaaaaaggcaaaaaattcactcccgagagcgtttcgcgcctgctggaaaaaatcagcgccggcggttacggcgacaaacgtttgtcgccgaaagagagtgaagtgctgcgcctgttcgccgaaggcttcctggtcaccgagatagccaaaaagctcaaccgcagcatcaaaaccatcagtagccagaaaaaatcggcgatgatgaagctcggcgtggaaaacgacatcgccctgctgaactacctctcttccgtttccctgagttccaccgacaaagactaa

SEQ ID NO: 175505 - DNA, 2847 bp, Klebsiella oxytoca
ttgaaatatctagcttctttccataacacgttaaaagtttcacgctatctgttcagagcgctggcggtactgctgtgggtgctggtcgcttttgtttcggtgttttacatcgtcaacgctttgcacgatcgggaatcggaaattcgccaggaatttaacctcaatgccgatcaggcgcagcgctatatacagcgtacggccgacgtgattaaggaactgaaatatgttgccggtaatcggccgatagatggcggcgaaggcggcgatacgccggcccagcgcggcaatatttcaattcctgattttgaaccgctctatccggattccgactgtgcgctgatgagttccacctggcgtaattcgctgcagtcattggcgtggtttatgcgctactggcgcgacaatttctccacggcctacgacctcaatcgtatttttttgattggtagcgacaatctgtgcatggccaacttcggcctgcgtgatatcccgctggagcgggaccaggcgcttaaagtactgcatcagcgcattgagcagtatcgcgacgcgccgcaaaacgagcgcggcaataatctattctggataagccagggcgtgcgcccgggcgttggctatttctatgcgctcacgcccatctatgtggcgaatcgtctgcaggcgatgcttggcgtagagcaaaccatccgtatggaaagtttctttaccccgggcagtttgccgatgaacgtgacgatccttgacgataatggacagtcgctgatttcacttgccggatcgaatagcaatatcaaaccggacgcgaagtggatgcaggaacgtctgtggtttggctataccgcgggttttcgcgagctggcgatgaaaaaaagcctgccgccgtcatccttaagtattgtctattcggtgccggtagatcaggtgctggaacgcattcggatgctgatactgaacgcggtggtactcaatctgctcaccggcgcgctccttttcgccctcgcccgaatgtatgaacgacggatttttattccggccgaaaatgatgcccagcgcctggaagagcatgagcagttcaaccgcaaaatcgttgcctccgcgccggtggggatctgtattttacgtaccctcgacggcaccaatatcctgagtaacgagctggcgcataactatctcaacatgttaactcatgaggaccggcagcggctgacgcaaattatctgcggccagcaggtaaactttgtcgatgtgctgaccagcaataataccaacctgcaaatcagctttgtccattcgcgctatcgcaacgagaacgtggcgatctgcgtactggtggacgtatcggcgcgcgtcaaaatggaagagtccctgcaggagatggcccaggccgccgagcaggccagccagtcgaaatcgatgttcctcgccaccgtcagccacgaactgcgtacgccgctgtacgggattatcggcaacctcgatctcttgcagaccaaggagctaccgaagggcgtcgatcgtctggtgacagcgatgaacaactcttccagcctgctgctgaaaatcattagcgatattctcgatttctctaaaattgagtccgagcagcttaaaattgagccgcgggagttttcgccgcgtgaggtaatgaaccatatctccgccaactatctgccgctggtggtgcgtaaacatcttgggctgtactgctttattgagccagacgttccgcaactgatgtccggcgatccgatgcgcctgcagcaggttatttcaaacctgttgagtaatgcgattaagtttaccgataccggctgtattgtcctgcacgtagagcgggcggatgattatctgcgcatcagcgtacgcgacaccggcgaagggatcccggcgaaagaggtgctacgcctgtttgatccgttcttccaggtcggtaccggcgtgcagcgcaacttccagggaaccgggctcggcctggcgatttgtgaaaagcttatcagcatgatggatggcgatattgccgtcgaaaccgaaccgggtatgggcagtcgattcactattcgtatcccgctttatggcgtgcaaaatacgccgccgctgaatattgatggcctggctgaaaaatgctgctggctggcgattgataacagctcgctggcggtgttcgtcgagcagttgctgaccttccacggcgttcctgtccgtcgttttgacgggcaaacgccgggagcggaagatattctgttaaccgatagcgagacgcatgaagcctgggctggctgcgcgatggtgatcttctctcgtcggcatatcggtattccgcaagagcgggcacccggcgagtggctgcatagcgtcgccacgccgcacgagctcctgccgctgctgggacgcatcttccatattgccgtagccagtgcggataacggccctgcgctagctgccgcggatgcgcaaaacgccagcaatgatgacatgatgattctggtggttgacgatcatccgatcaaccgccgcctgttggccgatcagcttggatcgctgggctatcagtgcgtgacggcaaatgatggggtcgatgcgctgaatgtcctgagcaaacagcatattgatatcgtgctcagcgatgtcaacatgccgaacatggacggctatcgcctgactcagcgtattcgccagctggggctcacgctgccggtgattggcgtcaccgccaacgcgctggcggaagagaagcagcgctgcctggaatccggtatggacagctgtctttctaagccggtcacgctggatatcattaagcagacgttaacgctctacgctacgcgggtacgtaagggaagggagtag

SEQ ID NO: 175506 - DNA, 2634 bp, Klebsiella oxytoca
atgagcgaccttgcgagagaaattacaccggtcaacattgaggaagagctgaagagctcctatctggattatgcgatgtcggtcattgttggccgtgcgctgccggatgtccgagatggcctgaagccggtacaccgtcgcgtactatacgccatgaacgtattgggcaatgactggaacaaagcctataaaaaatctgcccgtgtcgtgggtgacgtcatcggtaaataccaccctcatggtgatattgccgtatacggcaccattgtacgtatggcgcagccattctccctgcgttacatgctggtagatggccagggtaactttggttcggtcgacggcgactccgccgcagcgatgcgttatacggaaatccgtatgtcgaagatcgcccatgaactgatggccgacctcgaaaaagagacggtggatttcgtcgataactatgacggcacggagaaaatccctgacgttatgccgaccaaaatcccgaacctgctagtcaacggttcgtccggtatcgcggtaggtatggcgactaatattccgccgcacaacctgaccgaagtgatcaacggctgtctggcctatgttgaaaacgaagacatcagcattgaagggctgatggaacatattcccggcccggacttcccgaccgctgcgatcatcaacggtcgccgcggcattgaagaggcctatcgtacgggtcgcggaaaagtgtacattcgcgctcgcgcggaagtggaagctgacgcgaagaccggccgcgaaaccatcatcgtgcatgaaattccgtatcaggtgaacaaagcgcgcctgattgagaaaatcgccgagctggtcaaagacaaacgcgttgaaggcatcagcgcgctgcgcgacgagtctgataaagatggcatgcgcatcgtgattgaagtgaagcgcgatgcggtgggtgaggtggtgcttaacaacctctattcgcagactcagctccaggtctccttcggtatcaacatggttgccctgcaccatggtcagccgaagatcatgaacctgaaagaaattattgccgcgttcgtgcgccaccgccgcgaagtggtgacccgtcgtactatttttgaactgcgtaaagcccgcgatcgcgcgcatatcctcgaagcgctggcgattgccctggccaacatcgatccgattatcgaactgattcgccgcgcgccgactccggcggaagcgaaagcagcattaatcgcgcgttcatgggatctgggcaacgtttccgctatgctggaacgcgcaggcgatgacgccgctcgtccagaatggctggagcctgagttcggcgtacgcgacggtcagtactacctgaccgaacagcaggcgcaggcgattctggatctgcgtttgcagaaactgaccggtcttgagcatgaaaaactgctcgatgaatacaaagagctgctggaacagattgcggaactgctgcacattctgggcagcgccgatcgcctgatggaagttatccgtgaagagctggagctggtccgtgaacagttcggcgacgcgcgtcgtaccgagatcaccgctaacagcgcggatatcaacatcgaagacctgatcaaccaggaagatgttgtcgtgaccctttcgcatcagggctacgtgaagtaccagccgttaaccgattacgaagcacagcgtcgtggcggtaaaggtaaatctgcggcgcgtataaaagaagaagactttatcgaccgcctgctggtggccaacacccacgacacgatcctctgcttctccagccgcgggcgtctctactggatgaaggtttatcagctgccggaagccagccgcggcgcgcgcgggcgtccgatcgtcaacctgctgccgctcgaagccaacgaacgtatcaccgcgattctgccggtacgtgagtacgaagagggcgtgaacgtctttatggctaccgccagcggtaccgtgaagaaaacggcgctgaccgaattcagccgtccgcgttctgccggtattatcgcggttaacctcaacgaaggtgatgagctgattggcgtcgatctgacctccggtcaggacgaagttatgctgttctccgccgccggtaaagtggtgcgctttaaagaggacgccgtccgcgcaatgggccgtaccgctaccggcgtacgcggcatcaagctggccggcgaagataaagtggtttcgttgatcattccgcgcggtgaaggggccatcctgaccgttacgcagaatggctacggtaaacgtaccgcggctgaagagtatccaaccaagtcgcgtgcgacccagggcgtaatctcaatcaaagtgaccgaacgcaacggttccgtggtgggcgcggtgcaggttgatgactgcgaccagattatgatgatcaccgatgcgggcacgctggtacgaacccgcgtttccgaggtgagcattgtcggccgtaacactcagggcgtgatcctgattcgtaccgcggaagatgaaaatgtggtcggtctgcagcgcgttgctgagccggttgatgacgaagagctggatgccatcgacggcagcgcggcggaaggcgatgaagatatcgcgccggaagcggacactgacgatgacatcgccgaagatgaagagtaa

SEQ ID NO: 175507 - DNA, 729 bp, Klebsiella oxytoca
atgaatgccgaaaaaccgtcggtggcccacaatgttgatcataatgaaatcgctaaatttgaagccgtcgcatcgcgctggtgggatttagagggcgaattcaaaccgttacatcgcattaatcctttgcgtcttggctatattgcggagcgctcaggcggcctgtttggtaagaaagtgctggatgtcggctgcggcggcggcatcctggcagaaagcatggcccgggaaggcgctacggtcaccggtctggatatggggtttgaaccgcttcaggtcgcgaaactgcatgccctggagagcggtattcaggtcgactatgtccaggaaaccgtggaagaacacgcggcgaagcacgccggggagtacgacgtcgtcacctgcatggagatgctggagcacgtgccggacccgcagtcggtcgttcacgcctgcgcgcggctggtcaagcctggcggccaggtattcttctcaaccattaaccgtaacggtaaagcctggctgatggcggttgtcggcgccgagtacgtcatgaagatggtgccgaagggaacccacgatgtgaagaaattcattaaaccagcggagctgctcggctgggtggatgagacaattctgaaagagcagcacattaccggtcttcattacaatccgctgaccaataccttcaagctggcgccgggggtggatgttaactatatgttgcatacaacggcgaaaaaagcataa

SEQ ID NO: 175508 - DNA, 2286 bp, Klebsiella oxytoca
atgaatcagagtctgctggtgacaaagcgcgacggtagcaccgagcgcatcaatctcgacaaaatccaccgcgtgctggattgggcggcagaagggctgaataacgtatccatctcccaggtagaactgcgttctcacattcagttctatgacggcattaaaaccgccgatattcacgaaaccattatcaaagccgctgcggatctgatctcccgcgacgcgccggactaccagtatctcgccgctcgtctggcgattttccacctgcgcaaaaaagcctacggccagtttgagccgccagcgctgttcgaccacgtgtcgaaaatggtgaaaaacggcaaatacgatactcatctgctggaagactacacggaagaagagttcaagcagatggattcgtttatcgagcacgatcgcgatatgaccttctcctacgctgcggttaagcagctcgaaggcaaatatctggtacagaaccgcgtcaccggtgagatctacgaaagcgcccagttcctgtacattctggtggccgcctgcctgttctccaactatccgcgcgagacgcgtctggactatatcaagcgtttctatgacgcggtgtcgacgtttaaaatctcgctgccgacgccgattatgtccggcgtgcgtaccccgacccgtcagttcagctcctgcgtgctgatcgagtgcggtgatagcctggattctattaacgcgacctccagcgcgattgttaaatacgtttctcagcgcgccggtatcggcatcaatgccggccgcatccgcgcgctgggtagcccgattcgcggcggtgaagctttccacaccggctgtattccgttctataagcacttccagaccgcagtgaaatcctgctcgcagggcggcgtccgcggtggtgctgccaccctcttctacccgatgtggcatctggaagtcgaaagcctgctggtgctgaaaaacaaccgcggtaccgacgccaaccgcgttcgtcatatggactacggcgtacagatcaacaagctgatgtacactcgcctgctgaaaggcggagacatcaccctgttcagcccatccgacgttccgggcctgtacgatgcgttcttcgccgaccaggacgagttcgagcgcctgtatacccaatacgagcaggacgacagcatccgcaagcagcgcattaaagccgtagagctgttctcgctgatgatgcaggagcgtgcctccaccggtcgtatctacatccagaacgtggaccactgcaacacccacagcccgtttgacccggttgtcgcgccggtgcgccagtccaacctgtgcctggaaatcgccctgccgaccaagccgctggaagatgtaaacgacgagaacggtgaaattgcgctgtgcaccctgtccgctttcaacctcggggttatcgatagcctggatgagctggaagagctggcggtgctggccgttcgcgcgctggatgccctgctggattaccaggactacccgatcccggcggccaaacgcggcgcgatgggccgtcgtacgctgggtattggcgtgattaactttgcctactatctggcgaagcacggtaaacgctactccgacggcagcgctaacaacctgacgcataaaacgttcgaagcgattcagtactatctgctgaaagcttctaacgagctggcgatcgaacaaggcgcgtgcccgtggtttaacgaaaccacctatgcaaaaggcattctgccgatcgatacctacaagaaagacctggatgctatcgtcagcgaatctctgcactacgattgggagcggcttcgcgagtcgatcaaaacgcacggcctgcgtaactccacgctctccgcgctgatgccgtccgagacctcttcgcagatctccaacgccaccaacggcattgaaccgccgcgcggtcacgtcagcatcaaagcgtcaaaagacggtatcctgcgccaggtggtgccggattacgaaaaactgcagaacggctacgagctgctgtgggaaatgccgaacaacgacggttatttacagctggtcggtattatgcagaagtttatcgaccagtcgatttccgccaataccaactacgacccgacgcgcttcccgtcaggcaaagtgccgatgcagcagttgctgaaagacttgctcaatgcctataagttcggcgtcaaaacgctgtactatcacaacactcgcgatggcgcggaagatgcccaggatgacctggcgccgtctattcaggacgacggctgcgaaagcggcgcatgtaagatctaa

SEQ ID NO: 175509 - DNA, 1131 bp, Klebsiella oxytoca
atggcatataccactttttctcagactaaaaacgatcagctgcttgagccgatgttttttggtcagccggtgaacgtcgcccgctacgatcagcaaaaatatgacatcttcgaaaagctgattgaaaaacagctctctttcttctggcgtccggaagaagttgacgtttcccgcgaccgtatcgactaccaggcgctgccggaacacgaaaaacacatttttatcagcaacctgaaatatcagacgctgctggactcgatccagggacgcagcccgaacgttgccctgctgccgctgatttccattcctgagctggaaacctgggttgaaacctgggcgttctcggagaccatccactcgcgctcctacacccatatcatccgtaatatcgtcaacgatccggcgatggtatttgacgatatcgtcaccaacgagcagatccaaaaacgcgcggaaggcatttccagctattacgatgaattgattgagctgaccagctactggcatctgctgggcgaaggcacccacagcgtgaacggtaaaaccattaccgtgaacctgcgcgagctgaagaagaaactgtacctgtgcctgatgagcgtgaacgcgctggaagccatccgtttttacgtcagcttcgcctgctctttcgcctttgccgagcgcaagctgatggaaggtaacgccaagattatccgtctgatcgcccgcgacgaagcgctgcacctgaccggcactcagcacatgctgaatctgctgcgctccggcgttgacgatccggaaatggcggaaatcgccgaagagtgcaagcaggagtgctacgacctgttcgtgctggcggcacagcaggagaaagagtgggcggattatctgttccgcgacggttcgatgatcggcctgaacaaagatattctttgccagtacgttgagtacattactaacatccgcatgcaggcggtaggtctcgatctgccgttccagacccgctccaacccgatcccgtggatcaacacctggctggtgtccgataacgtgcaggtcgcgccgcaggaagtggaagtcagctcttatctggtcgggcagatcgattccgaagtcgacgctgacgatctgagcaacttccagctctga

SEQ ID NO: 175510 - DNA, 255 bp, Klebsiella oxytoca
atgaaacgcattttcttgaagatttctgacactcgccttgagtgtcaggatgaacatccctccctgctggcggctctggaatcgcacaatatcgacgtggagtatcaatgccgcgaaggatactgcggatcgtgtcgtctgcggctggtttccggtcaggttgactggctcaccgagccgctggcgtttgtccagccgggagagattttgccctgctgctgccgggcaaaaggcgatatcgaaattgagatgtaa

SEQ ID NO: 175511 - DNA, 1071 bp, Klebsiella oxytoca
atgaaaagtcaattaaccaccctgatgagcggagtgctgctggccgccacggcgctctccttcagcgccgtggcgggagagaaaatcgttatcgcccaccgcggcgccagcggctatctgccggaacataccctgccggcgaaagcgatggcctacgcgcagggggcggattaccttgagcaagacctggtgatgaccaaagatgaccggctggtggtcctgcatgaccactatctggatcgggtgaccgacgtggcccagcgtttcccgcagcgggcgcgtaaagatggccgcttctacgctatcgactttaccctcgctgagataaagtcgctgaagtttaccgaagggtttgaaccgaaagatggcaagaacgtgcaaacttatccgggtcgcttcccgatggggaaatctgatttccgcattcataccttcgaagaggagattgagtttgtccaggggttaaaccattcgaccggcaaaaatatcggcatctacccggaaatcaaagcgccgtggttccaccatcaggaaggcaaggatattgccgccagcacgctgaaagtgctgaaggaatatggttacaccggcaagcaggataaggtgtatctgcagtgctttgacgccaacgagctcaagcgtattaagcatgagctggagccgaaaatggggatggatctcaatctggtgcagcttatcgcctataccgactggaatgagacccagcagcggcaggctgacggcaagtgggtgaactacagctatgactggatgttcaaaccaggggcaatggcgcagatcgcccagtacgctgacggtattggtccggactaccatatgctggtggcggaaggctcgaaaccggaagacgtgaagctgacggcaatggtgaaagaggcgcacgccagcggcatgcaggtacatccatacacggttcgcgcggatcaattgcctgactacgccatcgacgtcaatcagctctataacgtgctgtaccatcaggcggatgtcgacggcttgttcaccgattttccggataaagccgtgcagtttctgcacgctaagcagtaa

SEQ ID NO: 175512 - DNA, 1347 bp, Klebsiella oxytoca
atgttaagtatatttaaacccgcagcgcataaagcgcgattgccaaccgcggaaatcgatcctttatatcgtcgattacgctggcagatctttatcggtattttcttcggatatgctgcttactatttggttcgtaagaactttgctttagcaatgccctaccttatcgagcaggggttctcccgtggcgacctcggttttgccctttccggtatctccatcgcctacggattttcgaaattcatcatggggtcggtttccgaccgctcgaatccgcgcatttttttaccggcaggcttgattcttgccgcgctggtgatgctggtgatgggcttcgtcccttgggcgacctccagcattatggtgatgttcgttctgctgttcctgtgcggctggttccaggggatgggctggccgccgtgcggacgtacgatggtgcattggtggtcgcagaaagagcgcggcggtatcgtgtcggtatggaactgcgcgcataacgtcggcggcgggatcccgccgctgctgttcctgctgggaatggcgtggtttaacgactggcatgcggcgctgtatatgccggctttcggcgcgatcctgctggcgattttcgccttcgcgatgatgcgcgatactccgcagtcctgcggtttgccgccgatcgaagagtataaaaacgattatcctgatgactacagcgagaagcatgaagaggagctgaccgcaaagcagatctttatgcagtatatcctgccgaacaagctgttgtggtacatcgccgttgcaaacgtgtttgtttacctgctgcgctacggcattcttgactggtcgccaacctacctgaaagaggttaagcacttcgcgctggataaatcctcctgggcctacttcctttatgaatatgcggggattccgggcactctactgtgcggctggatgtcggataaagtgtttaaaggcaaccgcggcgcgaccggcgtcttctttatgaccctggtcaccatcgccaccgttgtctactggctgaacccgccgggtaacccgggcgtggatatggcctgtatgattattatcggcttcctgatttatggcccggtgatgctgattggcctgcatgcgctggagctggcgccgaaaaaagccgccggcaccgctgcgggcttcaccggcctgttcggctatctcggcggttccgtggccgcgagcgccatcgttggctataccgtcgatttcttcggctgggacggcggctttatggtgatgatcggcggcagcgtgctggcggttgtgctgctgattatcgtgatgctgggtgaacgacgccaccatcaacagatgaaacaaggttaa

SEQ ID NO: 175513 - DNA, 1623 bp, Klebsiella oxytoca
atggccgatagtcgtgaatatgacgtcattattattggcggcggcgccaccggcgccgggatcgcgcgcgactgcgcgctgcgcgggctaaaggcagcgctggtggagcgctacgatatcgccaccggcgcgactggccgcaatcacggtctgctgcatagcggcgcgcgctatgcggtcaccgatagcgaatcagcgcgcgagtgcattagcgaaaaccgtatattgcgccgtatcgcccgccactgcatagagcccaccagcggcctgtttattaccttgccggaagatgacccggcgtaccagtacacctttatcagcgcctgtcagcaggcaggtatcgaagcccagcctctgacgcccgccgaagcgctgcgtattgagcccgcggttaacccggcgctgctcggcgcggtacaggttcccgacggcaccgtcgatcctttccgcctcaccgcggcgaatatgctcgatgcccgcgaacatggcgcgacgatcctcaccggctgcgaagtcaccggtctgctgcggcagggcgatcgtgtccatggcgtcgcgatctacaatcatcagcaccgagaatcgcgcgcgctgcgcgctcaggtggtggttaacgccgccgggatttgggggcagcgcatcgcagagtacgccgacctgcgcatcgcgatgtttccggcaaaaggatctttgctgatcctcgaccaccgcattaaccgtcaggttatcaaccgctgccgcaaaccggctgacgccgatatcctggtgcccggcgatactatttcgctgattggcaccacctcgatgcatattccctatgacgaaattgacgacaaccgggtaaccaccgaggaagtcgaaacgctgctgcgggagggagaaaagctggcgccgatcatggggcggacgcgggtccttcgcgcctattccggtatacgcccgctggtcgccagcgatgacgatcccagtggccgtagcgtcagccgcggtatcgtgctgctcgaccacgcccgccgcgacggtatggaaggcttcatcaccatcaccggcggtaagctgatgacctatcgtctgatggcggagtgggccacggatgcgctatgccgcaagctcggaaataccgccccctgcacgaccgccgatacgccgctgcccggttcgcaggaaccggcggaagccacgctaagtaaaatcatctcgttacctgcgccgctgcgcgggtcggccatctaccgccacggcgatcgcaccccggcatggcttggcgatagccgccagcgccgtagcctggtctgcgaatgcgaggcggtcactgccggagaagtagagtacgcggttgaaaacctggcggtgaaaaacctgcttgacctgcgccgccgtacccgcgtcggcatgggaacctgtcagggcgaactgtgcgcctgccgcgccgccgggctgctcgcgcgttttaacgtcaccacctccgcgcggtccctcacccagctgtcccaatttttgaacgaacgctggaaaggcgttcagccggtggcctggggggatgcgctgcgcgaaagcgagtttacccgctgggtttatctcggtctgtgcggattagaaaaggagcaccaggatgaagtttga

SEQ ID NO: 175514 - DNA, 1260 bp, Klebsiella oxytoca
atgaagtttgattgcgcgattattggcggcggccttgccgggctgctctgcgggctggcgctcaaccagcgcggcctgcgcagcgtgattatcagccggggccaaagcgccctgcacttctcttccgcctcgctggatttgctctcgacgctgccgaatggcgaaaccgtcaccgatgttgcttacggtatcggccagttggcccgccagcttcccgaacacccttatgccaggctcggcgccgaaagggtgatgaattacgcccgccaggctcaggcgctgtttgccgactgcgggattgccatgcagggcgatgccagccagccgcatctgcgcgtgacgccgctgggaatcttacgcgcggcctggctttctccgcaggaaatcgccaccgcgccgctgcccgtcagcggcgtctgcgtcgttggcatcagcgggttcggcgacttccagccgcatcttgccgcggcctctctgcaccagcacggcgtgaccgccgtagcacacgagatagaattaccccttcttgatgttctgcgcgatagcccatccgaatttcgcgccgccaatatcgcccgccggctggacgatgaagcgcactggcctgccctgctggcggcgctgcgcccgctggcgcagcagcataatttactgattatgcccgcctgcttcggcctcgccgacgatcgcttgtaccagtggctgcggcagcgtctgccctgcccgctgcgcctgctgcctaccctgccgccatcggtgccggggatgcgcctgcacgcccagctgcagcggcaatttatccgcagcggcgggacctggctgaccggggatgaagtcattgatatcagccaccaggacggtagggttaacgcgatctggacgcgcaatcacggcgatattccgctgcgcccgcgcttcgctgtgctggccagcggcagctttttcagtaacgggctggtcgccgaacgtagcggcgtgcgcgagccgatcctcggtctggatctgcagcagacgctgccgcgcgaaagctggtatcagcaggatttttttgcctcgcagccctggcagcgtttcggcctgaaaaccgatgaggctctgcgtccccagcgtcaggggcggacgctggagaatctgttcgccgtcggttcgatcctcggcggttttgatgccatcgcgctgggatgcggcggcggcgtgtgcgcagtgaccgcgcttcacgccgcagggctaattggcgagcttgccggaggtgagtcatga

SEQ ID NO: 175515 - DNA, 1179 bp, Klebsiella oxytoca
atgaacgacacgcgctttgaacactgtattaaatgcaccgtttgcaccaccgcctgcccggtcagccgggttaatccgcgctacccggggccaaaacaggccgggccggacggcgagcgcctgcgcctgaaagacggcgcgctctacgacgaggcgttaaaatactgcattaactgtaaacgctgtgaagtcgcctgcccttcagacgtcaaaatcggcgatattatccagcgggcgcgcatggaatacggccggcaaaagcccacgctgcgcgataccatcctcagccacaccgatctgatgggcaccctctccacgccgtttgctccgctggtaaacgccgccaccgggctgatgccggtacgtcgggtactggatgccgcgctcaaaatcgatcaccgccgctcgctgcccaaatatggcttcggcacctttcgccgcgcgtatcgacagctggctggccaacaggcgcagtacgccgagcaggtggccttctttcacggctgctatgtgaactacaacaatccgcagttgggtaaagatcttatccgggtgctcaacgccataggcatcggcgtgcagctattgcataaagaaaaatgctgcggcgtgccgctcattgccaacggtttttttgcgaaggcgcgtaaacaggcacagagcaacgttaccgcgatgcgggaaaataacctgccagtggtggcgacgtcctcgacctgcacttttacgctgcgcgatgaatatccgcacgtccttgatatcgataatcacgatgtgcgcgaccgggttgaactggcgacccgctggatctggcgtcagctggacgccggacggaagctggcgctgaaatcgctgccgctgaaggtgatctatcacacgccctgccatatggagaagatgggctggtcgctgtatacccttgagctattgcggctgatccccggcttgcagctggaggtgctcgactcgcaatgctgcggtattgccggcaccttcggcttcaagtcggagaattacgactcatcgcaggcgattggcgcgccgctgttccgacaaattgaggagagcggcgcggacctggtagtgaccgactgtgaaacctgtaaatggcagatagagatgtccaccagtaaacgctgcgagcatcccatcactctgctggcgttggcgctggcctga

SEQ ID NO: 175516 - DNA, 804 bp, Klebsiella oxytoca
atgaacgcaattttatcgaacccatttaaagcggggttattgcaaggggaagcacaaattggcctgtggctgagctcgacctcctcttatatggctgagattgccgccacctcgggttacgactggctgctgattgacggtgaacatgcgccgaataccattcaggatctttatcatcagctacaggccattgcgccctacgccagccagccggtgattcgtccggtagagggcaatcgcagcctgattaaacaggtgctggatattggcgccagaacgctgctgatccccatggtcgataccgcagaacaggcgcgggacattgtctcggcgacgcgctatccgccgctggggacccgcggcgtcggcgccggggtagctcgcgccgcgcgctggggaagggtagagaactatatggcgcaggccaacgatgagctgtgcctgctgattcaggttgagagcaaaaccgccctcgataatctggatgcgatccttgaagtcgaggggattgacggcgtctttatcggcccggcggacctgtcggcctcgctgggctacccggataacgccggtcatcctgaagtgcagcgggttattgaacagagcatccgccgcattcgcgcggcgggaaaggcggccggattcctggccgtcgatccagagatggcgcacaaagcgctggcgtggggggcgaatttcgttgccgttggtgtcgataccaatctctataccagcgcgctggataaacgactggcgatgttcaggccggtagccgaacaggcggagggcaaggggagctactag

SEQ ID NO: 175517 - DNA, 1290 bp, Klebsiella oxytoca
atgagcaacaccttgcttgagagcgtggtgaagaaaaaccgcgcccgtttgatcccctttatgctggcgctgtacgtgctggcgtttcttgaccgttcgaatatcggctttgcgaaagagacctatcagctggataccggcctcagcaatgaagcttacgcgctgggggcggggattttctttgtggtgtacgcctttcttggggtacctgccaacctgctgatgcgcaaattcggcgcgagaaaatggattggctgcaccaccttgctgtggggcattctttcagcggcgatggcgtgggcggatacggaagcgaaatttctgctggtacgcaccctgcttggcgccgccgaagcgggtttctttccgggcatgatctacctgacctcacagtggtttccgcagcagaaccgcgccagcattatgggattattttatatgggcgcgccgctggcgctcaccctcgggtcgccgctctccggcgcgctgctggaaatgcacggttttatggggcatcccggttggttctggatgtttattattgaaggcttactggcggtcggcgcgggtttcttcactttcttctggcttgacgacacgccgcaaaacgcccgcttcctgaccgctgccgaaaagcaggcgctcatcagcgagctggccagcgaagagcagaaaaagattacttcgcgtttgtccgatgcgctgcgcaacggccgcgtctggcagctggcgattatctatctcaccattcaggtggcggtttacggcctgatcttcttcctgccgacccaggttgcggcgctgctcggcactaaagtggggtttgtggcatcggtggtgaccgcgatcccgtgggtggcagcgctgttcggtacctggctgattcctcgctactccgaccgcaccggcgagcggcgtaatattgcggcattaaccctgctggcggcggcaattggcattgcggtctccgggctggtgtcgccggtactggccatcatcgcgctgtgcgttgccgccgtcggcgtcattgccgtacagccggtcttctggactatgccgacgcagctgttatccggcacggcgctggccgcaggcattggtttcgtcaacctgtttggcgcgatcggcggatttttagcgccgattatacgcgtccaggctgaaacgatgttcggcaataattctgccggattattgaccctcgcctgcgtggcggttgtcggggttgttattatcttttcactgcgcgtgagccgcacggtaccgcaggccggcagcgtacagcattaa

SEQ ID NO: 175518 - DNA, 1206 bp, Klebsiella oxytoca
atgaccctaccgaaaattaaacacgtccgcgcctggtttatcggcggcgctaccgcagagaaaggcgctggcggcggcgactatcatgaccagggagcaaaccactggattgacgatcatatcgccacgccgatgagcaaatataaacagtatgaacagtcccgccagtcgtttggcatcaacgttctcggcacgctgattgttgaagtcgaagccgaaaacggccagaccggctttgcggtatcaaccgccggcgagatgggctgttttattgtggaaaagcacctgaaccgctttatcgaagggaagtgcgtcagcgatatcaaactgatccatgaccagatgctcaacgccaccatgtactactccggctccggcggcctggtgatgaataccatctcctgtatcgacctggcgctgtgggatctgttcggcaaagtggtgggattaccggtatacaaactgttgggcggcgcggtacgcgatgaaattcagttctacgctaccggggcccgtccggacctggcgaaagagatgggctttattggcggcaagatgccgacccactggggcccgcacgatggcgatgcggggatccgcaaagatgccgccatggtggccgatatgcgcgaaaaatgcggcccggacttctggctaatgctggactgctggatgagccaggacgttaactacgccactaaactggcccacgcctgcgcgccctataaccttaagtggatcgaagagtgcctgccgccgcagcagtatgaaggctatcgcgagctgaaacgcaatgccccggccggaatgatggtcaccagcggcgagcaccacggcacgctgcaatccttccgcacgctgtcggaaaccggcatcgatattatgcagcctgacgtaggctggtgcggcggtctgaccacgctggtggagattgcggcgatcgccaaatcgcgcggccagctggtggtaccgcacggctcgtcggtctattcgcatcatgcggtcattacctttaccaacacgccgttcagcgaattcctgatgaccagcccggactgctcaacgatgcgtccgcagtttgacccgattctggttgatgagccggtaccggtgaacgggcgcattcataaaaccgttctggataaaccgggttttggcgtcgagctgaaccgcgactgcaacctgaaacgtccttatagccactga

SEQ ID NO: 175519 - DNA, 783 bp, Klebsiella oxytoca
atgttggaatcaagcaaagtcccggcgctaacccgcgccatcgatattctcaatttgatcgcccgcattggtccgtgcagcgcggcgaccattattgacgaactgggtattccgaaaagcaccgcttacctgctgctgggagaactgagaaaacagcgcttcctcagcatggataatcaggacaactactgtctgtggaccaaactagttgagctggccggtcacgcgctgagcaaaatggatctgcgcgaactggcgcgtccgcgcctgacgcagctaatggatcagtgcggactgctctgccatctgggcattatcgatggcggtaacgcctactacattctgaagattgaatccccggccaccatcagcgtgcgttcccacgaaggtaaaagcctgtcgctgtaccgctccggtatcggtaaatgcctgcttgcctggcagcccgagcgggttcaggagtcaattatcagcgagctgcagtgggagagggcaacgccaaccaccatcaccagcgcccagctgcttcgcgatgaactggggcgtattcgcgcccgcggctggagcttcgataacggcgaagattatcccgacgttcgctgcgtggcggcgccggtttttaatgccaataacgagctgaccgccgccatctccgtggtgggtactcgtctgcaaatcaatgaagacaatcgcgattatctcgctggcagggcgattgcctgcgccaaggacatttctcgtctgctggggtggaaaagccccttcgaacaacaagcctcataa

SEQ ID NO: 175520 - DNA, 1197 bp, Klebsiella oxytoca
atgttaaacgtggaaatgctgtccaccggcgatgaagtgctgcatgggcaaatcatcgataccaatgccgcgtggctggcggatttcttttttaatcaaggattacctttaaagcgtcgccataccgtgggtgacgatcttgactccctggtggcgattttacgcgagcgcagcgagcatgccgacgtgctgatcgtcaacggcggtctgggcccgaccagcgatgatttaagcgcgcttgccgcagcgaccgccaaaggtgaagggctgattctgcatgaagcgtggctggaaaccatgacccgtttctttgccgagcgcggaaggcctatggccgccagcaaccgtaaacaggcggaaattccgcaaagcgccgagatgatcaacaatccggtcggaaccgcctgcggttttgccgtgcagctaaaccgctgcctgatgtttttcactcccggcgtgccgtctgaatttaagataatggtcgagcaggaaatcttaccgcgcctgcgcgaacgttttccgctgcccgccgcgccgctgtgtctgcgtctgaccaccttcggtcgttccgaaagcgagctggcgcagagcctcgagcatttacaactgccgccgggcgtggtgatgggctatcgttcctcaatgccgattatcgaactgaagctgaccgggcctgccgaacagcgcgaggcgatgctggcgctgtggccggaagtgcaaaaagtggccggagagagcatcgttttcgaaggcaccgaaggcctgccggcgcagatcgcccgtcgtctgcaggagcgccagctaagcctgacgctaagcgagcagttcaccggcggtctgctggcgctacagctttcacgggtcaatgccccgctgttggccagcgaagtcattccggcgcaggaggagaccctggcgcagtctgcgcgctgggcggcggaacggcgcgaaaaacactttgccggtctggcgctggcggtgagtggtcaggagagcgatcacctgaactttgcgctttccacgccggacggcacccacgcgctgcgggtgaagttcgcgaccaaccgccacagcgtgcaggtgcgtcaggaggtctgcgcgatgatggctctcaacatgctgcgccgctggctgaatggccagcccgtggccggtgaacacggctggattaacgtcgttgactatctcgccgtttag

SEQ ID NO: 175521 - DNA, 543 bp, Klebsiella oxytoca
atgaaaaaaagtatatttgcggccctcgctggcatgatgttcgtctcaacggcggcgcatgcgatcagcttcagcggacaggccggcgagcactacacgaaccttggcgtcggatttggcacggaatctaccggcctggcggtaaccggcagctggctgcataacgatgacgacggcgatgcggcaggcctgggactggggctgaacatccctttaggtccattccttgccaccgttggcggtaaaggggtttataccaatccgaataacggcgatgagggctacgcagcagcggttggcggcggcctgcagtggaagatcggcgacagcttccgcctgttcggcgaatattattattctcctgattcgctctccagcggtatcgacagttatcaggaagctaatgccggcgcgcgctttaccattatgcgtcctctgagcattgaagccggttatcgctaccttaacctggcgggtaaagacggcaaccgcgataacgcggtcgcggacggcccgtacgtcggcgttaacgccagcttctaa

SEQ ID NO: 175522 - DNA, 1449 bp, Klebsiella oxytoca
atgagcaaaaaaggattaaccaccggctccggcgcgccggttgtcgataataacaatgtcatcaccgcaggtcctcgcggcccgatgctgctgcaggatgtctggtttctggaaaaactggcccacttcgaccgggaggttatcccggaacgccgaatgcacgcaaaaggctccggcgcttacggtaaattaacggtcacccacgatatcagccgctacacgcgcgcaaaaatgttcgccgaggtcggtaaaaccaccgatctgttcctgcgcttttccaccgttgccggagaacgcggcgccgcagacgccgagcgcgacatccgcggcttcgctatcaagttttataccgaagagggcaactgggatctggtaggcaataatacccctgttttttatcttcgcgacccgctgaaattcccggacctgaaccacgtagtgaagcgcgatccgcgcaccaacctgcgcaaccctacctggaagtgggattttttctccctgctgcccgaaacgctgcatcagttgactatcgacttcagcgaccgcggcatcccgcgctcttatcgccatatgcacggcttcggcagccacgcgttcagctttataaatgccgacaatcaacgtttttgggtgaaattccactttaaatcccagcaggggatcgccaacctgatggatgatgaagcaaaacgtctggtggccgaggaccgcgagagttcgcagcgcgatctctatgagtcgattgaaagaggcgattttccgcgctggaccttttacgtgcagatcatgccggaagcagaagccagccgggtcccttaccatcctttcgatctgaccaaagtatggccgcatagtgattatccgctgatagaagtgggggtacttgagctcaactgcaacccggacaactatttcgccgaggttgagcaggttgcgatgaatccggctaacgtggtgcctggcgtcagcttctctccggatcgcatgctgcagggtcgtttattctcctacggcgacacccagcgctaccgcctgggcgttaaccatcatcagattccggtcaatgcgccgcgctgcccgttccataactaccatcgcgatggcgcgatgcgcgtcgacggcaatagcggcaacggcgtcacctatgagccaaacagcttcggcctctatcaggagcagccggactttagcgaaccgcctttaaatcttgaaggcgcggcggctcactggaatcatcgggaagataacgactattttagccaaccgcgcgcgctgttcgggctattaagcgaagacgagcatcagcgtatgttccatcgaatcgccagcgatatgcgggatatccctgaatttatccagcagcgacaaattggcctgtttagtcaagtccatcccgactacggcgcgggcgtggccgcggcgctgaaagtcttacagaaaaccctgtaa

SEQ ID NO: 175523 - DNA, 663 bp, Klebsiella oxytoca
atgggttggggccatcatcagctgccgctggttattcctctgctgttttatcacggcagaatcagtccctacccgcactcaacgcgctggctggacggtttttctctaccagaggtggccgagcggctctatagccagaactttccgctaatagacgtgactgagatcccagatgaccagctgatacagcaccggcgggtcgctatgctggaactgttgcaaaagcatattcggcagcggcataggatggacatctcagagcaactggtcagaatattgtccccgggatacactacccgtcggcagtttaaaacgttgctgaattatatgcttcaggcgggcaacgccgccgatccggtggcttttttacgcaagctagcgcaaaagacgtcactcaagccgcataaggaaacgctgaagaatattgctcattttctcgaagagcgaggtcgcaaagaggggatgcttcagggaatgaaggcggggatagaaaaaggtttgcgcaagggccgacaggaaggtcgtaatgaaggcagaaatgaagggcaactagcggcgacaaaacgcatcgcccgggcgatgctggaagaggggcttgagcctgaccaggtcgcaaagctaaccggactgtcgctgcggcagctcgctaagcttcagcactaa

SEQ ID NO: 175524 - DNA, 426 bp, Klebsiella oxytoca
atgcgtcaaaggactattgtctgcccgctcattcaacatgagggtcactatctgttgtgcaaaatggccgacgatcgcggggtatttcccgggcagtgggcgctctccggcggcggcgtcgagcctggcgaacgcatcgaagcggcgctgcggcgggaaattcgcgaagagctgggcgaaaaactgcagctaacccacatcacaccgtggacctttagcgatgacgtacgggttaaaacctacgccgatggccgtcaggaagaaatatatatgatttatcttatcttcgactgcgtcagcgccaatcgcgaagtaaccatcaacgaggagtttcaggactacgcctgggtaaaagcggaagatcttccccactatgatttgaacgaggcgacccggaagacgctcaccctgaaaggcctactctga

SEQ ID NO: 175525 - DNA, 1416 bp, Klebsiella oxytoca
atgaggtggggtaagccgcagtcgttattcgctcagctgctgctgtttcttggcctgccgctggtgttactgtgggggctgtcggcattcaatagctacgtcagcgctctgcaggcggcgacccaggcttacgatcgtacgctgctctcctccgcccgcacggtggcggaacgcctggtggtacgcggcggcagactggaggtgaatgtcccctgggtggtgctcgatagcttcgagctgaatatgaacgatcgcctgtactataaggtgctcgatcccggtaagcgggtgatttcaggttttgacgatctgccatcgatgccgccctcaacctctcgtaccgagctctatccggcgctggcgtggttttatcataccgagtatcgcggtcaggccatccgcgtggcgcggctgctgcagccggttaacgaaggtggcgttgtgggaatggcggaaatctatatcgccgaaacgctgcagtcgcggcgctggctggcgggacagctgctgttttcatcgtggatctcgcaggggctattggtgctgttgacgctggtgctcaccggctggctgctgcgtcgggtgctgcggccgatgcgtcggctttcggcgctcatggtgcggcgcgaacccggcctgttgacgccgctgccggaactgctgccgtggtcggaaacccgtttattgattgttgcttttaaccgctatatcgaccggctgcgggcgatgatctcccggcaggagcggtttagcgccgatgcttctcatcagttaaaaacgccgctggcggtgctgaaaacccaggcttcggtggcgctggcgagcggcgatccccggctgtggcgagagagtctggaggcgatgagcggcacgctggacagtacgattctgcttaccgaacgcctgctacagctggctaccatcaaacgtaaagagcagggagaacatgcgtttccgccggtggatctgtatgagatcgtccacaacagctgcttttcccgtcttcagcaggcgcggagcaaagctatcgatctcggctatgagggggaaccctcaacggtgactatcgccggcgatggcgtgctgttgagcgagctgtgcgcaaatctgttggataacgcgatccgctatacgccgcagggcggtatcgtcacggtcagcctgcatcgtgaaggggaggcggtgctgctggatgttgaagacagcgggccgggaatcgatgatgcgcagatccagcaggcgctcatgccgttccaccgtctggaaaacgttggtgataatcccggcgccgggctcggactggcgctggtcagcgatattgcacgcctgcatcgcagccatccgcagctgctgcgtagcgaaacgctgggcgggctgaaggtcaggctgcgctttttgactgtgggttcagagtag

SEQ ID NO: 175526 - DNA, 675 bp, Klebsiella oxytoca
atgcgtctcttactggcagaagataaccgtgagctggctcactggctggagaaagcgctggtacagggcgggtttgccgtggactgcgtatttgatggccgggcggccgatcatctgttgcaaagcgaaaaatacgcgctggcggtactggatatcggcatgccgggcttcgatggcctggaagtcgtgcagcgtctgcgaaagcgcggacaaacccttcccgttttgctgctgaccgcacgcagcgcggtggcggatcgggtaaaagggctcaacgtcggcgccgatgactatttaccaaaaccgtttgaacttgaagagctggacgccaggctgcgcgcactgctgcggcgtagcgaaggccaggtgcatgagattcagcagatcggctctctggaatatcgcgatgaaggctattttttactgcgcggacagacgctatcgttgaccccgcgcgagcaggcgctgctgacggtgctgatgtttcgccgcacgcgtccggtgtcgcgccagcagctgtttgaacaggtcttcagccttaacgatgacgtcagcccggaaagcatcgagctatatatccatcgtctgcggaagaaacttcaggagagcaacgtgcgaattgtgaccctgcgcggcctgggttacgtgctggagctcgccgatgaggtggggtaa

SEQ ID NO: 175527 - DNA, 981 bp, Klebsiella oxytoca
atgaatatcccgttccttcgccctcttagcgctatcgcgttatgcctttttaccgcctctgcctgggccgccgaagcgccttcccgtaccgaatgtatcgcgcccgccaagcccggcggcggcttcgatctcacctgtaagctgattcaggtgagcctgatggaaaccggcgccatccaaaaaccgatgcgcgtcacctatatgcccggcggcgtaggcgcagtggcctataacgctatcgtcgcccagcgccccggagaacccggcaccgttgtcgccttctccggcggctcgctgctcaacctggcgcagggcaagtttggccgctacggcgtggatgatgtccgctggctggccagcgtcggcaccgattacggcatgattgccgtccgcgccgactcgccgtggaaagatctgccgtcgtttatggcggcaatggaaaaaaatcccgccagtatcgtcatcggcgccggcgcctcaatcggcagccaggactggatgaaagcggcgctgctggcgcagaaagcaaacgtcgatccgcacaaaatgcgctacgtggcgtttgagggcggtggcgaaccggtcaccgcgctgctgggtaatcacgtgcaggcagtatccggcgatctcagcgaaatggtgccttatctccagggcaataaaatccgcgtgctggcggtcttcgctaacgaaaggctgcccggcgcgctcgccgatgtccctaccgccaaagagcagggctatgacctggtgtggccgattattcgcggtttcttcgtcggcccgaaagtcagcgatgccgattatcagtggtgggtggcggagtttactcgactgcagcagaccgacgcgtttaaaaaacagcgcgagctgcgcggcctgtttgaattcaatttgaacgggaaagagctggacgcctacgtcaaagagcaggtggaagagtatcgcctgcaggcgaaatcttttggccttgccaaataa

SEQ ID NO: 175528 - DNA, 432 bp, Klebsiella oxytoca
atgagcgatcgtatttttgccggaatatggctgctgctctgcgtaggggggatgtttatcgcctggcaaatccacagcgaatacgcctatgaacccgtcggcccgcgcccctttccggtcggcattatcggcctgatgctgctgtgctccgttttgctgctactgcggcggcccgacgcaatctcctggcccgggcgtctggttttacaacggctgttgacgatggtcgtggcattggcggtttatgcgtggggttttgaatggctggggtttcctctggccaccgcgctgctgaccgctgtttttggcctgctgtttggcgccaccctgcccgctgctggggtagcaggcgtcgcgatgggcatcgcgctgtggtacgtctttgacgccctgcttgatgtcaccctgccgctcggcgtctggttaagttaa

SEQ ID NO: 175529 - DNA, 1521 bp, Klebsiella oxytoca
atggatatctggatttatctgtcgcagggcttcgctgtcgccatgacgccgggcaacctgacgattgcgctgatcggctgcttcgtcggcaccatcgtcggactcctgccgggtctcggcccgattaacggcgtggcgatcctgttgccgctggcctttgccctgcacctgcccgcagaatcggcgttaattctgctggctacggtctatattggatgtgaatacggcgggcgtatttcgtcgatcctgctcaacgtgcccggcgatgccgccgccattatgaccgccatcgacggttacccgatggcgcagcagggacgcggcggcgtggcgctgtcgatctctgccgtgagctcctttgtgggttcaacgatcgctatcggcgggatcatcctgttcgcgccggtgctggcgcagtggtcgctggcgttcggtccggcggaatatttcgccctgatgatttttgccatcgcctgcctcggcagcatgatggcgcaaaatccgctgaaatcgtttctcgccgcgttaatcgggttggggctggcgacggtgggcgttgatgccaataccggggtgtaccgtttcactttcgatagcgttcatctttccgacggcgtgcagtttatcgtggtggtgattgggctcttttcggtttcggagattttgctgatgctggagagcaccagcagcggacagaggctggtacggaaaaccgggcgcatgctgtttaacgccaaagaggcgggccagtgcgtgggcgcgacgctgcgttcatcggtggtgggcttttttgtcggtattctgccgggcgcgggggcgaccattgccagcgccatcacctatatgaccgagaaaaagctcagcggtaacagcgataccttcggtaagggcgatattcgcggcgtggcggcgccggaggcggcaaataacgcctccgcctgcggatcgttcattccgatgcttaccctcggcgtccccggctccggaactaccgcggtgatgatgggcgccctgaccctctacaatatcactccgggtccggcgatgtttaccgagcagccggatatcgtctggggattaattgccgcgctgctgatcgccaacgtgatgctgctgattatgaacattccgctgatcggtctgttcacccgcatgctgacgatcccgctgtggtttctggccccggccatcgccgctgtgtccgcggtcggcgtctacgcggtacacagcaccaccttcgacctgctgttgatggttgggctgggcgtgctgggctacattatgcgtaagatgcacttcccgatgtcgccgttgatcttagggtttgtgctgggcgagatgctggagcagaacctgcgccgcgcgctgtccatcagtaacggcaacgtggggattttgtggcaaagcggcgtaactaaaacgctcctggtgttagccatcgcggtgcttgttgtccctccgctgctgcgttactggcgcaaacgtcagcttaacacgcagggcgacctgccctcttcctga

SEQ ID NO: 175530 - DNA, 624 bp, Klebsiella oxytoca
atgaccgtcgcagcatcccgctcggggttaacattcgcagcgctggcgctggccctgattcttatttataccggtatcagcgcaggggaaaagcttacctggctgatggaagtgacgccggtgattatcatcgttccgcttttgctggccacgcgcgctcgctatccgctgacgacgctgctttatgtgctgattttcttccatgccatcattttgatggtcggcggtatgtacacctacgcgaaagtgcccatcggctttgatgtccaggcgtggctgggtttgagtcgtaatccctacgacaagctggggcactttttccaggggctggtgccggccctggcggcgcgggagattctgctgcgcggcggctacgttcacgggcgtaaaatgctcgctttcgtggtctgctgcattgcgctggcgattagcgccgtctatgagctgatcgaatggtgggcggcgctggcgctgggacagggggcggatgattttctcggcacccagggcgatccctgggatactcagtccgatatgttctgcgccctgctcggcgcgctgaccaccgtttttgcgctgggccgctggcatacgaagcagctactgcacgtccagcgcatctga

SEQ ID NO: 175531 - DNA, 1392 bp, Klebsiella oxytoca
gtgacctttagcgactggccctggcgccactggcgccagcagcgaggggaggcgcatgcgctgcgcctgaacgagcggcggctaagctggcgggaactgtgcgcgcaaatcgatgcgctggcggcaggactgcaagcccagggcgttcgcgatggtgatggcgtactgctgcgggctgacaaccagcccgatgttttgctggcatggctgtcgctcctgcagtgcggtgcgcgcgtgttgccgctgaatccgcagctgcccgggccactgctggctgaactgctgccgaccctggacctgcgccacgcgctggtgctgaacggcggcgatcttccggtaacgcttaatccactgactctgtaccctgtcgacggcgagcgcgcggctgactggcgagaagatcgtatggcttccatgacgctgacttcggggtcgacggggctaccgaaagcggcggtacacgcttttcgcgcccatattgccagcgctgaaggggtacttgcgttgataccctttgcgccgcaggacgactggctgctgtcgctgccgctgtttcacgtctccggccaggggattctctggcgctggctggttgccggcgcaggcctgacggtgcgcgacaaacagccgctggcgctggcgctacgcggctgtactcacgcctccctggtgccaacccagctctggcggctgctgagcggcgatgacgaggtgtcgttaaaagcggttttgctcggcggcgcggccatcccggtggcgctaaccgaacaggcgcgcaggcgcggtatccgctgctggtgcggctacggactgaccgagtttgcctccacggtatgcgccaaggaagcggatggcctggcggatgtcgggctgccgctgccggggcgcgaattgcgcatcgtggatggcgaagtgtggcttcgatcggacagcatggccgcaggctactggcgaggcggccaaacgataccgctcaccaacgccgatggctggtttgccacccgcgatcggggccggcttgacaacggcaggctgaccatccttggaagaatggataatcttttttttagtggcggagaaggcattcagccggaggaagtcgagcgggttatcggcgcacacccgttgattgagcaagtttttatcgtgccgcaggatgatgcggagtttggccagcggccggtggcggtagtagagtgtcgcgatcatggcgatccatccgtgctggctgactggtgcgccgataagctggcgcgctttcagcagcctgtgcgctggttacggctgcctgaatcgctgaaaaccggcggaattaaaatttcccgccgggcgttacgtgactgggtcaaccagcagcagagctccgcctcagatgcgctggacgtgcagtag

SEQ ID NO: 175532 - DNA, 966 bp, Klebsiella oxytoca
atgcggcaggcgcaggtctaccgctggcagctaccgatggacgcgggagtggtgctgcgtgaacggcggttaaaaacccgcgatggcttgcttctgcagctgcgcgatggcgagcgcgaaggctggggggagatttctcccctgcctggattcagtctggaaacgctggatgaggcgcaggcagcgctgctggcatgggcgaacgcctggcgcgaaggccaggatggcgcgttgccgacgccgccttcagccgccttcgggataagctgcgcactggcggagctgggcggtgagctgccgctggcggcggattatcgcgccgcgccgctctgttccggcgatccggatgaactgttcgccaggctttcgcagatgcccggcgagaaggtcgccaaggtcaaggtcggcctgtatgaggcggtgcgcgacggcatggtggtcaatctgctgctggaagcgattcccgatctgacgctgcgtctcgacgctaaccgcgcctggacgccgttgaaggcgcagcagttcgctaaatacgtgagcccgcactatcgcaaccgtatcgcctttctcgaagaaccctgcaaaaaccgcgatgattcgcgcgcgtttgcccaacaaacgggcatcgctatcgcctgggatgagagcctgcgcgaagcggactttacgtttgctgccgagccgggtctgcgcgcggtggtgattaaaccgacgttgaccggcagtctgcaaaaggtccagcagcaggtcgcgcaggctcatgcgctggggctgacggcggttatcagttcagccattgagtccagccttggcctgacgcagctggcgcgaattgccgcctggctgacgccgaataccattcccggtctggataccctgagcctcatgcgcggccaactggtgcgcagctggccgaaaagcgagctgccgtgtctgaccgtcgatgaactggagccgctgctgtga

SEQ ID NO: 175533 - DNA, 858 bp, Klebsiella oxytoca
atgatctctcttgatgaagcaatgctttacgctccgattgaatggcaggactgctccgaaggctacagcgatattcgctaccacaaatcggcggacgggattgccaaaataaccatcaaccgcccgcaggtacgtaacgcgtttcgtccgctgaccgtcaaagagatgattcaggcgctctcggatgcccgctatgacgacaatatcggcgtgatcgtcctgaccggtgaaggcgataaagctttttgcgccggcggcgatcagaaagtccgcggcgactacggcggctatcaggatgactccggcgttcatcatctcaacgtactcgattttcagcgccagatccgcacctgtccgaaaccggtagtggcgatggtggcggggtactccatcggcggcggccacgttctgcatatgatgtgcgatctgaccatcgccgcggaaaacgcaatcttcggtcagaccggcccgaaagttggttcttttgacggcggctggggcgcctcctatatggcgcgcattgtcgggcagaaaaaagcccgtgagatctggttcctgtgccgccagtacgacgcgcagcaggcgctggatatggggctggtcaataccgtcgtgccgctggcggatctggaaaaagagaccgtgcgctggtgccgtgaaatgctgcagaacagtccgatggcgctgcgctgcctgaaggccgcgctgaacgccgactgcgatggtcaggcgggactgcaggagctggcgggcaatgccaccatgctgttttacatgaccgaagagggtcaggagggacgcaacgctttcaaccagaagcgccaaccggacttcagcaaatttaaacggaatccgtaa

SEQ ID NO: 175534 - DNA, 759 bp, Klebsiella oxytoca
atgattctgcacgcgcatgcggaacgcgggctgccgggctatccctggctggtcttcttgcatggttttgccggcgatagcctcgaatggcgggcggtggggcaggcgttcggtgcgtatccgcgtctctatattgacctgccgggccacggcggctcggcggatagggcagttaaccgttttacggatgtcagcgagctgattaagaatacgctaattagttacaacatgcataagtactggctggtggggtactccctcggcggacgggtggcgatgtattatgccagccagtcgcatgaggggctctgcgggctggtcgtcgagggagggcatccgggtctggcggacgataatcagcgtgcgcagcgccggcgcagcgatgccgcctgggctgaacgctttcgccgagagccgcttacgcaggtctttgccgactggtatcagcagccggtcttcgcctccctggacgcagcgcagcgtgcggcgctggttgcgctacgcagctgcaacaacggcagggcgttagccgcgatgctgcaggcctgctcactggctgaacagcccgatctgcgcgaggcattacgggcgcgcgatttcccattccattacctttgcggcgaacgcgacggcaagtttcgcgccatcgccgatgagctatccgccatcacgcacgtgattaatcatgccggacacaacgcgcatcgggaaaaccccgatgcagtcgtggcttgtctggcgcagtttttagcgagttaa

SEQ ID NO: 175535 - DNA, 1671 bp, Klebsiella oxytoca
atgtcagtaagcgcatttaaccgacgctgggcggcggtgatcctcgaagctttaacgcgccacggcgtgcagcatatctgcattgcgcccggatcgcgctcgacccctttgaccctggcggcggcggaaaaccgcgcgtttatttaccatacccactttgatgaacgcggccttggccatctggcgttagggctggcaaaagccagcggccagccggtggcggtgattgtcacttccggcaccgccacggccaacctctatcctgcgctgatagaagcgggtctgaccggcgaaaaactcattttactgaccgccgaccggccgccggagctcatcgactgcggtgcgaaccaggccattcgtcaaccgggcatgtttgcttcgcatccgtcgcagaccctggccctgccgcgcccatcgcaggatatctccgcccgctggctggtctcgaccctcgaccaggcgctcggcgcgctgcactgcggcggcattcatatcaactgtccttttgccgaaccgctgtacggcgatatggacgacaccggggtcgcgtggcagcagcagctcggcgactggtggcagagcgacaagccctggctgagtcacaatctgcatctggaaagcgaaaagcagcgcgactggtttttctggcggcaaaaacgcggcgtcgtggttgccggacgaatgagcgcggaagagggcctgaaggttgccgaatgggcgaaaacgctcggctggccgctgattggcgatgtcctttcgcaaaccgggcagccgctgccctgcgccgatctgtggctcggtaacggtcaagcggttagcgaactggcgcaggcgcaaattatcgttcagctgggcagcagcctgaccagcaaacgcgttttgcagtggcaggccacctgcgaacctgaagagtactggctgatcgacaacctgccgggtcgtctggatcccgcccaacatcgtggtcgccgactggtgtgcgccatcgaccgctggcttgaacagcatccggcggaaaagcggcagccgtgggctaccgtcattcctgcgctttcacgccaggcatggcaggcggctgtcgccagcagcgaggatttcggcgaggcccagctggcgcagcgaatccgtcgctacctgccggatcagggccagctgtttgtcggcaacagtctggtggtgcgcttaattgacgccctgtcgcagcttcccgcaggctacccggtctacagcaatcgcggggccagcggaatagatggtctgctggcgacgacggccggcgtgcagcgcgccagcgcgcgtccgaccctggccatcgtcggcgatctctcggcgctttacgacctcaattcgctggcgctgctgcgtcaggcctccgcgccgctggtgctgattgtcgtcaacaataacggcgggcagattttctccctgctgccaacgccgcaggagcagcgcagccagttctatctgatgccgcagaatatccattttgcgcacgcggcggcgatgttcgatctgacttatcattgccccgcggactggagtgagctggagcgcgcgctggacgttgcctggcgagcgcccggcgcaacgctgatcgagctggtggttaatgaaaccgacggtacgcaaaccctccagcagctgcttgcgcaggtgagtcagctatga

SEQ ID NO: 175536 - DNA, 1356 bp, Klebsiella oxytoca
atgtggggtttttactccgtggaggtttgcgtgctgtctgtgtccaccgcgctggaaagcctgtaccgctgcctggatgaagcgtttccgccatcgcccggctggcgcatcttcgatatccccttcgcgctgaatgacgcttttgatccgcttctgtggtgtacccatcagcagcagtggccgcagttctactggcagcagcgcagcggcgatgaagagctggccgctctgggggcggtaaaaatcttttcctctctgccgcaggcgcacgcttttcttcagcaacaagcgcgtgacgatctgcggatttgcggtcttaatgcgtttgatccgcagcgcggcatgctgctgttgccgaggctggagtggcgtcggcttggcggtcacgccacgctacgcctgacgctgtatagcgatacctcactgcgtgacgatgcctgcgcggcgcgcgagtttctccgctcgctgacgacccggcaagcgcagcctggcacgcttccttctctgctcagtgagcagcatttcccggcttatccgcagtggcgagatctggttgcacaggcgacacaggcgatagcggcaggggagatggataaagtcgtgctggcgcgcgccaccgatttacagtttgccgccccgctgaacgtcggggcgataatggccgccagccgccgcagcaatctgcactgttttcattatctgatggcttttaatccgcaagaagccttcttcggctcaacgccggaacggctatggcgacggcgcggcgcgctgatgcgtaccgaggcgctggcgggaacagcggccagccataaggacgatcgccaggcgcagcgcctgggcgactggctgatgggcgatgacaagaaccagcgggaaaatatgctggtggttgaggatatctgtcagcgtatgcaggcggagacgcgcgcgctggaggtgctgccgccgcagatcgtccgtttgcgtaaagtgcagcatctgcggcgctgtatatgggccgagctggacgtccccgatgatgcccgctgtctgcgccagctccagcccacggcggcggtcgccgggctgccgcgtcaggtggcgctggattttatcacccggaacgagctttttacccgcgactggtatgcgggctccgccggttatctgtcgctggcgcaaagcgaattttgcgtttcgttacgctcggcgaaggtacagcagcatacgctcaggctctacgccggagcgggcatcgtcagcggctctgacccggagcatgagtggcaggaaattgaaaataaagctgcaggattgcgttcgttactgctcacagaagcagagataaaacgatgcatatcaaaacggcaataa

SEQ ID NO: 175537 - DNA, 462 bp, Klebsiella oxytoca
atgatgacatggcaggatcttcaccacgctgaactgaccgtcccccagctctatgctgtgctgaaattacgctgtgcggtgttcgttgtcgaacaaacctgcgcctatcaggatatcgacggcgacgatctggtaggggagaaccgccatcttctcggctggcgcggcgatgaactggtggcctatgcgcgcattctcaagagcgatgatgaatatgagccggtcgtgattggtcgggtgatcgtcagcccggcggtgcgcggcgaaaagctgggctatcaactgatggagcatgcgctggccagctgccgtcaacactggccgcagaaggccatttatcttggcgcccaggcgcatctgcaaaaattctacgccagcttcggctttgtgccggtgaccgacgtctacgacgaggacggcatcgaccatattggcatggcatacgaaatcgccacccactag

SEQ ID NO: 175538 - DNA, 921 bp, Klebsiella oxytoca
atggaattactctttttggggacatccgctggcgtgccaacccgtacgcgtaatatgacgtcgatggtgctgaatttgcaacagccaactatggcggagatgtggctgttcgactgcggggagggaacgcagcatcagtttctccacaccccttatcatcccggcaagctgaataagatctttattacccatttacatggcgatcatcttttcggtcttcccggcctgctgtgcagccgctcaatgcagggtaattctctgccgttaacgctgtacgggccaaaggggcttaaggagtttgtggaaaccgccctgcgtcttagcggttcctggaccgattatccactggcaatcgtcgaagtcgaaccgggtctggtatttgatgaagccggtttccgggtcaccgcctggccgttaaaccatccggttgagtgctacggctatcggatcgaacagcatgataagccgggtacccttgatgccgcacagcttatcgccgagggcgtgcctcccggtccgttgttccaccgcttaaaactggggctgacggttgaactggaagatggtcggttgattgacggcagccgctaccttgggccggtaacgcccggtaagaagctggcgattttcggcgataccgccccctgcccggaggcgctggagctggcgcgcggcgtggacgttatggttcatgaggttacgctcgaacaggcgatggcggaaaaagccaacggtcgcgggcattcatccagccagcaaacggcggcgttagcgagggaagcaggcgtcgggacgcttatcgccactcattttagctcgcgctatgatgccgaaggctgtcatcggctgttggctgagtgtcgggaggtctttccccctaccgtgctggcggaagattttctggtttataacatcgaataa

SEQ ID NO: 175539 - DNA, 531 bp, Klebsiella oxytoca
atgcaggatgagacggaatatctgagcgttaaagacgttgagcgcctggtgcttgccgcacattattgtgcgcaccccgagagaaatagctgcatgatccaaatgtgctttttgcacggttgtcggattaatgaaattaccgcattaactttgcgggatgtcgacctgccgggaaaacgaatttatattcgccgggcgcgtcacggtatctcggggtatcatccattacaacccaaagagattatctcattacagcgctggctgttggccagagagtgttatccagcccataatgatttactctttatctcttcgcgaggaaatcagatgactcgccagcgtttttatcaaatcattcgtgaatgctgtgagctggcgaaactgaagcaaaatattcacccgcggatgctgcgccatgcttgcggatatgaattgggtaaaaaaggcatagatgatgactctatccaggattatctgggctatcgcaatttaaaatctattctgcgttataacggttatgttgaagagtaa

SEQ ID NO: 175540 - DNA, 510 bp, Klebsiella oxytoca
atgaaaaaggcgctatggctggcattgctgctgcctgttttttcatcctggggcggcatccctctgaacgtgaagggtaatatttattatctcccctgcgacgtcagcaccgacacgaagtatcaggaggtgaatttcggcacgctgctgaatatcgattttcaaactgccggcaccgcttctgagtggaaaacctttagcctgaacgttgaaaattgcccggcgggtacgacgaaagcgacggtgaaatttgatggcgtgaccgacggcgatgatgccacgcatttcgccaatatggccgccagcgatgcggcgcaaaatatcgcgctgcagataaccaataccgatcattccacaacctataaaaaccaggatcggatgactattgctattaacggtagcaccggcaaaggcgaattcccgctggccgcgcgcttatattcaacgcagggcggagcaaaagtgggaaaattcgagtcggtggtgcagctgacttttacctatcagtaa

SEQ ID NO: 175541 - DNA, 1044 bp, Klebsiella oxytoca
atgaaacgattttcatggggattactgaccggtctggcggcgctggcgatatcgccgcagattatggcggaaacgggctggtgtcagaatacgggtaatggcggagctcctttccaggacagcttttcatttattgaaacttttactaacccttcgcaaaaccaggccggaatggcgttccctcgtctgtaccattggactaccgggggaacctatcaggcgaaatgtgattgcggtagcgatgttactggtactacgtattttcgagccacggttccgggattagtcgcgacgcaaacccgaagcggcttgaattattatcagctgaataaatacctggagatcgccagcgagctatttattgccggcggggtgaatcagtatttaccgacgcccattcaggataaaagcaatttaaataatcagggttatgcctgtaacccgggcggtacgctgtttaataccggttcagtgggatatatctcgctctactttacccggccgttcgtcggtcaggtgacgatcccgccaacggtgatcctgaacgtttacgggtcgcggaaaacggggagctatagcagtattcctctcacgcagatctcaatgagcggctcggtaacagtaccgcagtcctgcgagattaataccggtcagccgattaatatcgacttcggcgatattgccgcgaataactttaaaacttcaggtcagatgccgacgggctttacgccgcatgttgtcaatatgacggtagcctgtactaatatttcctcaggggtaaaaattgcgctttccttccagggaacggcggatacgaatgacagtaccgcgctggcgaccacaaatagtgatattgcggttcgtatagaaaatattactggtgtcaaaatccccgttatatccggaatgctgccggtcaatctgaattacgcgacccagaaaggggacacgaccatgaaaatctatccgattaataccaccgggaatgtacccgatggcggcggatttacggcaacggcaaccattcaagcagaaatcgaatag

SEQ ID NO: 175542 - DNA, 2550 bp, Klebsiella oxytoca
atgaaaaataatcataaaaaatggcggcttaaccggatagccggagctctggccgttgcgctgttaccgctgtgtgacgaggtcctggcgcgggatgttttcaacccggccctgttggaaatggatggacctcagacgggcatcagcgatttatcagcctatgagcaggtcggaggccagcagccgggcagctatcgggtggatatttaccttaataacgtttttatggatacccgcgatgtgacttttcagcagggggaaggcgccgggaaaacggaactgcagccgtgcctgaaggttgaagagcttgcggaatggggcgtgcgcgtctcccggtttccagacctggggcgtaagtcagcaaactgtgcggatatgagcgtcataccgcaggcgaaagccgagtttcgtttcagccaacagcggctgttattaagcttccctcaggcggcagtgtccagcgcagcccggggctgggtcgatcctaaacagtgggatgacggggtgacggcgctgctgctgaattacgcttttagcggagccaacaactggtcgcgcaagaacgacacgccggatagcgataatcaatacgttaacctccgtcccggtattaacatcggaccgtggcgtttgcgtaactacacgacctggacccgcagcagcggcggcggcgagtcgagtaacagctgggatacggtctacacctatgcgcagcgcaatattaatgctctgcaaggggtgatgacgctgggcgacagtagcaccgacgccgacgtttttgaaggtattccctttcgcggagcgatgctggcttccgatgacgatatgctgccggaaagcctgcgcggctatgcgccggttgtgcgcgggatcgcgcggactaacgcccaggtcattattcgccagaacggctatgagatttatcagacctatgtctcccccggggcatttgaaatcaccgatatgtatccgaccgggggttctggcgatctgtcggtgactatcaaagaggccgatggcagcgagcagaacctgatcgtgccctatgcttcactccccgttctgcagcgtgaagggcgtctgaaatatagcgtaactactggggtgtatcgcgcctacgacaatagtattgacgagacgcctctctctcaggcaacggccatctacggtctgccatggggatggacgttgtacggcggcggtcagtttagtagcaaatatcagtcgctggcgttgggtatgggcaaaaacctcggcgaactgggagccgtgtcgaccgacgttacccaggcctggtcgaatcgccaggataaagataaagagagcggtcagtcggttcgtcttcgttacagcaaagatcttccgggattagggaccaacgtcagcctggcaggatatcgctatgccaccagcggttactgggatatgcaggaggtgctggatacctatcgcgatgacgcctatacgccttcagtggaacggcggcgcaaccggggggaggtgacgatcagccagagtcttggcgatgagatggggtcgctatcgctaagctatattcgcgaggactactggaacactggtcgtaccatggagtccgtgggcgtcggttacaacaatagctggcgcggcatcagctatagcatgaactatagctacaatcgcaataccaccgatcagaacaccggtaaacgtaatgatgaagaccatctgttcgccttaagcatcagcataccgctgggcgaatggctgcctaatccggtctatgccaactactcccttaacagcagcaaaaatggctcgactaccaacaacctgggcctctccggtaccttgctggagcgtaacaacctgagctggagcgtacaggaaggttacaccagccagggaagaggggagagcggcagcgttaacgccgactggcgtgcgacctacgcggaactgaccggcggctacagtcacgataaatatagccaccgtcttaactacgccctgcgcggcggagttctggcgcatgagaatgggctgacgctcgggcagccatttggtgaaaccctcgctttagttaaagcaccaggcgccgctggcgttggcatcaacaaccagaccggcgtcagaaccgactggcggggctatgccctggtgccttacacctcgccgtatcgtaaaaacaccttaacgcttgataccagcacgatgccggatgatgtcgaccttgagctaacgacgcaaacggtggtgccaacccgcggggcggtagtgcgcgctaattacgctaccagcgtcggtagccgggtgctgatgacggtgcgtcaggataacgggcggccggtgccttttggcgccatggtcagcattcctggagccgcgtcatctgagcaagcttttatcgttggcgatagcggccaggtctatctgaccgggctggaatctagcggcgtacttaacgtgaagtggggggccagcgcgcaagatcgctgccgggtccagtatgcgctgccgtcagggaaaagcctcaccggcattatcgtagcccaggggctatgccgttaa

SEQ ID NO: 175543 - DNA, 663 bp, Klebsiella oxytoca
atgaaacgatacctgaaagtgctaatggctggatggctgttagtgggcgctgcggcacatgcgggcgtcgtcaccgggggaactcgcctgatatatcccgggggcaaaaaagagtcctctctgagcgttaccaataccgatgctacgccttatctcattcaaagctgggttgaagctgcgcagggggccgccccttttctgttgactccgcctttatttcgcctggatggcgagcagcaaacccgtctgcgggtgatttatagcggcggcctgccggaaaacaaagagagcatgttctggatgaacatcaaagcgattccttcttcgcaagcgaaagccggggccaacaccctgcagatcgcgatcaaaacgcgcatcaaactcatctatcgacctaaatccgtcgtgggttcgccggagatggtaacggaacagcttcgctgggcgcgtagcggtaacacgctccaggtaaccaatccgaccgcgttctatatgaatttcgccgaggtcaaaataggcggggccgaagtcaaggacgccaactgggtggggccaggggaaacggcgcgctttgaactaccgcgcggtagcgccggcgctttgcagtggaagctgattaacgattacggcggaatcggcgcgcagcaccgcgctaatttgtag

SEQ ID NO: 175544 - DNA, 537 bp, Klebsiella oxytoca
atgaaaaaaacattacttgctgctgtagttgccggttgcgcggcgttctctggtgctgcgctggcggatgacggtcaggtgaagtttctcggcgaaatcatcgatgctggctgtgacgtggttaacgacatgaccaacccgctggaagttcatatggggcagattgccaagaccgcatttagcggtaccggttctactgcggctgaacaggatttctcgatcaaactggaaaactgcccgacgaccgtcgccaaagcatcggtactgttctccggccctaacgtcaacggtgataatgaaaaactggagctgaccggcgccggtaccgatcctgacgttgccgaaggcgtggccctgcagctggttgatggcagcaacaacaataccctgccgctgttcacccgttccaccagcctgaatatcccggctaccggcaaaatcgatctgccgttccgcgttcgttatatccagactgataccacagtggttgccggtaaggcagacggtagcgcgaacttcactatcagctacaactga

SEQ ID NO: 175545 - DNA, 552 bp, Klebsiella oxytoca
atgaaaacaaggcgtaagcatttgactgtcggtgaagttcagcgtttggttgatgcagccaggcggggggctaacccggaacgcgatgtctgtttattgtggatgtgttttaatcatggatgcagggtgagtgaaattcgtcactggaagctctcggatatcgatattcaaagcggggttatttatattcgacggttaaaaaatggcttttcaacgacccatcccatatataaacaagaggtgaaagttcttaatgaatggctgcgcgtgcgtaaggattatcccggtaatcattccggctggctctttttatcgcgcaatggtcaacctttatcccggcagcgaatatatcagatgatgaagaacctgagtcttgtcgcccagctggagatcagcgctcatccccatatgctgcgccacgcctgcggttttgcgctggctaacaacggtgtcgatacgcgattaatccaggattttctcgggcacaggaatattcagcatacggtcatttatacagcaagtaatgatgcaagatttagagaggtttggtaa

SEQ ID NO: 175546 - DNA, 1458 bp, Klebsiella oxytoca
atgacaataactccacaacaactgatcgcactgctaccgttgctgatcgtcggcttgacggtggtagttgtgatgctctccattgcgtggcgacgcaatcatttccttaatgccacgctgtcggttctcggccttaacgccgcgctgatctcactctggttcgtaggccagaacggggcgatggacgtcacgccgctgattcgcgttgacggctacgccatgctctataccggcctggtgctgctggccagcctggcaacctgcacctttgcctacccgtggcttgagggttacaaggacaacaaagaagagttctatctgctggtgctgattgccgcgctgggcggcattctgctggcgggcgcgaaccatcttgcggcgctgttcctcggcattgagctgatttcgctgccgctgtttggcctggtcggctacgctttccgccagaaacgttcgctggaggccagtatcaaatatacgatcctgtccgccgttgcctcttcgttcctgctgttcggtatggcgctggtgtatgccaattccggtaacctctccttcctggcgctcggtaagagcctgacggatggcatgctgcatgagccgctgctgctggccggtctcggcctgatgattgtcggtcttggctttaagctgtcgctggtgccgttccatctgtggacgccggacgtctaccagggcgcgcctgccccggtatcgacctttctggccaccgccagcaagattgctatcttcggcgtggtcatgcgtctgttcctttacatgccggtgggtgacagcgaggcagtgcgggtggtactgggtctgatcgcctttgcatcgattatctttggtaacctgatggccctgagccagaccaacatcaaacgtctgctcggctactcttccatttcccatcttggctatctgctggtggcgctgattgccctgcagagcggtgagatgtcgatggaagcggtgggcgtctatctggccggatatctgttcagcagcctcggcgctttcggcgtggtgagcctgatgtccagcccgtatcgcggaccggatgcggattcgctctactcctatcgcggcctgttctggcaccgacctattctgtcggcggtgatgacggtgatgatgctgtctcttgccggtatcccgatgacgctgggctttatcggtaagttctacgtgctggcggtgggtgtgcatgcgcacctgtggtggctggtcggggcggtggtcgtgggttcggcgattggcctctactactatctgcgcgtggcggtgagcctctacctcagcgcgccggagaaactgaatcgcgatgcgccgtctaactggcagtacagcgccggcggtatcgtcgtgctgatctccgcgctgctggtgctggtgctcggcgtgtggccgcaaccgctcatcaacatcgtacagctggcgacgccgctgatgtaa

SEQ ID NO: 175547 - DNA, 1530 bp, Klebsiella oxytoca
atgttattaccctggctaatattaattcccttcatcggcggcttcctgtgctggcagactgaacgctttggcgtgaagatgccgcgctggatcgcgctgatcactatgggattgacgtttctgcttggcctgcagttgtggatgcagggcggctattctctcacgcaatctaccggtattccgcagtggcagtcggaattcgtgatgccgtggatcccgcgattcgggattagcattcatctggctatcgacggtctgtcgctgctgatggtggtgctgaccgggctgctcggcgtgctggcggtgctctgttcgtggcgcgaaatcgagaaatatcagggttttttccatcttaacctgatgtggatcctcggcggcgtgatcggcgtattcctggctatcgacctgttcctgttcttcttcttctgggaaatgatgctggtgccgatgtacttcctgatcgcgctgtggggccataaggcttccgacggtaaaacgcgtatcacggcggcaaccaagttcttcatttatacccaggcgagcggtctggtgatgctgatatccatcctggcgctggcgtttgtgcacttcaacgctaccggcgtatggaccttcaactatgaagagctgctgaagacgccgatgtcgcacggcgtggaatacctgctgatgctgggcttctttatcgctttcgcggtaaaaatgccggtggttccgctgcacggctggctgccggatgcgcactctcaggcgccgaccgcgggttccgttgacctcgcggggatcctgctgaaaaccgcggcctacggcctgctgcgctttgcgctgccgctgttcccgaacgcttccgccgaatttgcgccgatcgcgatgtggcttggcgtgatcggtattttctacggcgcgtggatggccttcagccagtacgatattaagcgtctgatcgcttacacctccgtctcccatatgggcttcgtgctgattgctatctacaccggcagccagctggcttaccagggtgcggtgattcagatgatcgctcatggtctgtcagcagccggtctgtttatcctttgcggtcagctttacgagcgtctgcatacgcgcgatatgcgccagatgggcggtctgtggagcaaaattaagtggctgccggcgctgtcgatgttctttgcggtggcgaccctcgggatgccgggcaccggtaacttcgtcggcgaatttatgattctgttcggtagctataagaccgtgccggtgattaccgttatttctacctttggtctggtgttcgcttccgtatactcgctgtcgatgctgcatcgcgcgtacttcggtaaagcaaaaagcgaaatcgccgccaaagcgctgccgggaatgtccctgcgtgaactgtcgatcatcctgctgctggttgttctgctggtgctgctgggcttcttcccgcagccgattctggacacctcgcactctgcgatgagcaacattcagcagtggtttgttaattctgtttctactacaaggccgtaa

SEQ ID NO: 175548 - DNA, 1842 bp, Klebsiella oxytoca
atgaacatgcttaccctaaccattcttttgccattgattggctttgttttgctggccttctctcgcggacgctggtcggagaatttatccgccaccgtgggggtgggttcggtcggtctggcggcgctggcgacggcgtttgtcggcgtcgacttctttgccaacggcaaacaggcggtcagcgttccgctgtggacctggatgtcggtgggcgacttcaatgttggcttcaacctggtgctggacggtctctctctgaccatgctgtccgtggtcaccggcgtcggtttcctgatccacatgttcgcctcctggtatatgcgcggtgaagagggctactcccgcttcttcgcttataccaacctgtttatcgccagcatggtggttctggtgctcgctgataacctgctgctgatgtacctcggctgggaaggcgtgggcctctgctcctatctgctgatcggtttctactacaccgatccgaagaacggcgcggcggcaatgaaagcgttcgtagtgacccgcgtcggcgatgtgttcctggcgttcgcgctgttcattctctacaacgaactgggcaccctgaacttccgcgaaatggttgagctggcgcctgcgcactttgccgccggtaataacatgctgatgtgggcaaccctgatgctgctgggcggcgcggtgggtaaatctgcgcagctgccgttgcagacctggcttgcggacgcgatggctggtccaactccggtctccgcgctgatccacgccgccaccatggtgaccgccggcgtctacctgattgcgcgcacgcatggcctgttcctgatgaccccggaaattctgcatctcgtcgggatcgttggggcggtaacgctggtgctggcaggtttcgccgcgctggtgcagaccgatatcaaacgcgtactcgcgtattccaccatgagccagattggctacatgttcctcgcgctcggcgtgcaggcgtgggatgcggcgattttccacctgatgacccatgcgttcttcaaagcgctgctgttcctgtcgtccggctcggtgatcctcgcctgccaccacgaacagaatatcttcaagatgggcggcctgcgtaagtctattccgctggtgtacgtctgcttcctggtgggtggcgcggcgctgtccgcactgccgctggtgacggcaggcttcttcagtaaggatgagatcctggcgggcgcgatggcgaacggtcatctgaatctgatggtggccggtctggtcggggcatttatgacctcactgtacaccttccgtatgattttcatcgtgttccacggcaaagaacaaattcatgctcacgcagggaaggggattacccatcatctgccgctgattgtgttgctggtgctctcaaccttcgttggcgcgctgattgtgccgccgctggatggcgtactgccgcagaccaccgagcttgagcatggacgcgtcatgaccctggagattgcctccggagtgattgccatcgccggtattctgattgccgcctggctgtggctgggtaaacgcacgctggtcacatcgattgccaacagcgcgccgggtcgtctgctcgggacctggtggtacaacgcctggggctttgactggctgtacgacaaagtgttcgtcaagccgttcctcggcgtggcgtggctgctgaagagcgatccgctgaatgcgctgatgaacattccggcgatcctttcccgcttcgcaggtaaaggcctggtggtaagcgagaacggctatctgcgctggtatgtggcttcaatgggcattggcgctgtcgtggtgctggcgttactgatggtattgcgctga

SEQ ID NO: 175549 - DNA, 303 bp, Klebsiella oxytoca
atgatccccttaacacatggactgatcctcgcctctgtcctgtttgtcctcggcctgacggggctggttatccgccgcaatctgctgtttatgctgattagcctggagatcatgatcaatgccgcggcgctggctttcgtggttgcaggaagctactggggccagaccgatggccagataatgtatatcctcgccatcaccctcgccgccgcggaagcgagtatcggcctggcgctgctgctgcagctccatcgtcgtcgccagaacctgaacatcgattcagtaagtgagttgcgcggatga

SEQ ID NO: 175550 - DNA, 555 bp, Klebsiella oxytoca
atggaattcgctttttatatctgtggcctgatagccatcctcgcaaccctgcgggtgatcacccacaccaatccggtgcacgcgctgctgtacctgatcatttcgctgttggcgatcgccggggtgttcttctcgctaggggcttactttgccggtgcgctggaaattatcgtctacgccggggccattatggtgctgttcgtgttcgtggtgatgatgctcaatctgggcggcagcgaaattgagcaggagcgccagtggctgaaacccgggatctggattggccccgccatcctctctgcggtactgctggtggttatcgtttacgccatcctcggtattaacgatcagggaattgacggtgcggcgattaacgccaaagaggtcggtattgcgctgtttggtccgtacgttctggctgtggagctggcctccatgctgctgctcgcgggcctggttgttgccttccatatcggccgcgaagagcgcgccggggaagtgctgagcaaccgcccgaacgacagcgataaaagaaaaacggaggaacacgcatga

SEQ ID NO: 175551 - DNA, 543 bp, Klebsiella oxytoca
atgaccttaaaagaattattggtagggtttggcacccaggtccgcagtatctgcatgatcgggatgcacgcctttgccaaacgtgaaactcggatgtacccggaagagccggtatatctgccgccgcgctaccgtggccgcatcgtgctgacgcgcgatccggacggcgaggagcgctgcgttgcctgtaacctgtgtgcggtagcttgtccggtaggctgtatctctctgcaaaaagccgaaactaaagacggccgctggtatccggagtttttccgcatcaacttctcacgctgcattttctgcggtctgtgcgaagaagcatgcccgacgacggcgattcagttgaccccggactttgagctgggcgaatacaaacgtcaggatctggtgtacgaaaaagaggatctgctgatttccggtccgggtaaatacccggaatataacttctaccggatggcgggtatggcaatcgacggcaaagataagggcgaagcagagaacgaagctaagcctatcgacgtcaagagcctgttaccgtaa

SEQ ID NO: 175552 - DNA, 978 bp, Klebsiella oxytoca
atgagttggttaactcccgatctcatcgacattctgttaggcatccttaaggcggtagtgattctactggtggtggtcacctgcggcgcgtttatgagctttggcgaacgtcgtctgctgggcctgttccagaaccgttacggacctaaccgcgtgggctggggcggttcgctgcagcttgtcgccgacatgatcaaaatgttctttaaagaggactgggttccgcgcttctcggatcgcgtgatctttactctggcgccggtgatcgcctttacttcgctgctgctggccttcgccatcgtgccggtcagcccgacgtgggtggtggccgatctgaacatcggtatcctgttcttcctgatgatggcgggcctggcggtctatgcggtgctgttcgccggctggtcgagcaacaacaaatactcgctgcttggcgcgatgcgtgcttctgcccagaccctgagctacgaagtgttcctcggcctttccctgatgggcgtagtggcgcaggccggttcattcaacatgaccgatatcgtcaataaccaggcgcatctgtggaacgtcatcccgcagttctttggtttcgtgacctttgcgattgcgggcgtggcggtatgtcaccgtcacccgtttgaccaaccggaagcggaacaggagctggctgacggttaccacatcgaatactccggcatgaagttcggtctgttcttcgtcggtgaatatatcgggattgttaccgtatcggcgctgatcgtgacgctgttcttcggcggctggaatggcccatggttacctcctttcatctggttcgcgctgaaaaccgcgttctttatgatgatgttcattttgatccgcgcatcattaccgcgtccgcgctatgaccaggtaatgtcctttggctggaaggtatgcctgccgttaacgctgatcaacttgttggtaacggcggctgtcattctctggcaggcgcaataa

SEQ ID NO: 175553 - DNA, 2727 bp, Klebsiella oxytoca
atggctacgattcatgtagacggcaaagagtacgaggtcaacggagcggacaacctgttagaagcttgtctctctctgggtcttgatattccttacttttgctggcatccggcgctgggaagcgttggtgcttgccgccagtgtgcggtgaagcaatatcagaacgcggaagacacgcgtggccgcctggtgatgtcctgtatgactccggcatccgacggcacttttatttctatcgacgacgcagaagcgaagcagtttcgcgaaagcgtagttgagtggctgatgaccaaccacccgcacgactgtccggtgtgcgaagagggcggcaactgtcacttacaggatatgaccgtgatgaccggtcatagcttccgtcgctaccgctttaccaagcgtacccaccgtaaccaggatctggggccgttcatctcccacgaaatgaaccgctgcatcgcctgctaccgctgcgttcgctactataaagactatgccgacggtaccgacctgggcgtctatggcgctcacgataacgtctacttcggtcgcccggaagacggcgtgctggagagcgaattctccggcaacctggttgaagtctgtccgaccggcgtctttaccgataaaacacactccgagcgctataaccgtaaatgggatatgcagtttgcaccaagcatctgccagcagtgttccatcggctgtaacatcagccccggcgagcgctacggcgaactgcgtcgtatcgaaaaccgctataacggtacccttaaccgttacttcctctgcgaccgcggacgttttggctacggctatgtgaatctgaaagatcgcccgcgtcagccggttcagcgtcgcggcgacgatctgattacccttaacgccgagcaggcgatgcagggggcggcagatattctgcgccagtcgaagaaagtgattggtatcggctccccgcgcgccagcattgaaagcaactttgcgctgcgtgagctggtcggcgccgacaacttctataccggcatcgcgaagggcgaacaggaacgcctgcagatgatgctgaaagtgctgcgcgaaggcggtattcataccccggcgctgcgcgagatcgaatcttacgatgcggtgctgatcctcggtgaagatattacccagaccggcgcgcgtatcgcgctggcggtgcgtcaggcggtgaaaggcaaagcgcgcgaaatggcggcggcgcagaaggtcgccgactggcagatcgccgcgatccttaacatcggccagcgtgcaaagcatccgctgttcgtgaccaacatcgacgacacccgtcttgatgacattgcggcatggacctatcgcgcgccggtggaagatcaggcgcgtcttggcttcgccatcgcccacgcgctggacgatagcgcgccggcggtcgaaggtctgagcagcgagctgaaaggcaaaatcgaggtgatcgttcaggcgttagccggagcgaaaaaaccgctgattgtttccggaactaacgccggcagcatcgaggtgattcaggctgcagcgaacgtggcgaaagccctgaaaggccgcggcgccgatgttggcgtgaccatggtcgcccgggcagtgaatagcgttggtctcgggatgatcggcggcggctcgcttgaagaggcgctgagtgaactggaaaccggcgcagccgatgcggttatcgtgctggaaaacgatctgcaccgccacgcttcagccgcccgcgtagatgcggcgctggcgaaagcgccgctggtgctggtggttgaccatcagcgtacggcgattatggaaaaagcgcatctggtgctctccgcggcaagctttgcggaaagcgatggcaccgtggtcaacaacgaaggtcgcgcccagcgcttcttccaggtttacgacccggcctattacgatgcgaaaaccgtgatgctggaaagctggcgctggctgcactcgttgcacagcacagtgaacaatcgtcaggttgactggacgcagctggaccacgtgattgacgccgccattgccgccctgccgcagctggccgcgatcaaagacgccgcgccggatgcgaccttccgcattcgcggtcagaagctggctcgtgaaccgcaccgctacagcggacgtacggcgatgcgcgccaacatcagcgtgcatgaaccgcgtcagccgcaggataaagacaccatgttcgccttctctatggaagggaacaaccagccgtccgcgccgcgttcgcaaattccgtttgcctgggctccgggctggaactcccctcaggcgtggaacaagttccaggatgaagtgggcggtaaactgcgccacggcgatccgggcgtgcgtctgatcgaagcctccgccagcggtcttgagtactttaccgcggttccggcaagcttccaggcagaagaagggaaatggcgtatcgcgccttactaccatctgttcggcagcgacgagctgtcgcagcgttctccggtattccagagccgtatgccgcagccgtacgttaagctcaacccagcagatgccgcgaagcttggcgtgaacgaaggggcgatggtttccttcagcgttgatggccaggcgcttagcctgccgctggtaatctcggcggggctgacggcagggcaggttggcttaccgatgggcttgccagggattgcgccggtgctgaccggagcgcgtattgatactctgcaggaggcgaaagcatga

SEQ ID NO: 175554 - DNA, 1338 bp, Klebsiella oxytoca
atgaaaaccattattcgtactgccgaaacccatccgctgacctggcggctgcgcgacgacaagcagccggtatggctggatgaataccagagcaaaaatggctacgccggggcgcgtaaagcgctctccgggatggcgccggatgaaatcgtcacggcggtaaaagacgctggcctgaaagggcgcggcggcgcgggcttttccaccggtttgaagtggagcctgatgccgaaagacgaatccatgaacatccgttatctgctgtgtaacgccgatgaaatggagccgggtacctataaagaccgcctgctgatggagcagctgccgcacctgctggtggagggtatgctgatctccgcttttgcgctgaaagcttaccgcggctacatcttcctgcgcggagaatatgttgaagcggctcagcatctgcgccgggcgattgccgaagcgaccgaagcgggcctgctcggcaaaaacatactcggcaccggttttgacttcgagctgttcgtccataccggggcagggcgctatatttgcggcgaagaaaccgcgttgattaactctctcgaaggccgccgcgcgaacccgcgctcgaagccgccgttcccggccagctccggcgtatggggcaaaccgacctgcgttaacaacgttgaaaccctgtgcaacgtgccggcgattctggctaacggcgttgagtggtatcagaacatttccaccagtaaagatgccggcaccaagctgatgggcttctccgggcgggtgaaaaatccgggcgtctgggagctgccgttcggcaccaccgcgcgcgagatcctcgaagattacgccggcggcatgcgcgatggcctgaagttcaaggcctggcagccgggcggcgcgggtaccgacttcctgactgaagcgcatcttgacctgccgatggagttcgaaagcatcggtaaagcgggaagccgcctggggacgtcgctggcgatggccgttgaccacgagatcaacatggtatcgctggtgcgcaacctcgaagagtttttcgcccgcgagtcctgcggctggtgcacgccttgccgcgacggtctgccgtggagcgtgaaaattctgcgcgctctcgagcgcggcgaagggcagccgggggatatcgagacgcttgagcaactgtgtcgattcctcggaccgggtaaaaccttctgcgcgcacgcgccgggtgcggctgagccgctacagagcgcgattaaatatttccgcgaagaattcgaagctggcattaaacagcagttcagcaatacccatgcaatcaacgggattcagccgaacctgcttaagacgcgctggtaa

SEQ ID NO: 175555 - DNA, 501 bp, Klebsiella oxytoca
atgcacgagaatcaacaaccacaaaccgaggcttttgagctgagtgcggcagagcgtgaggcgattgagcacgagaagcaccactacgaagacccgcgtgcggcgtccattgaagcgctgaagatcgttcagaagcagcgcggctgggtgccggacggcgcaatctacgctatcgccgatgtgctggggatcccggccagcgacgtagaaggcgtggcgacgttctatagccagattttccgccagccggtagggcgtcacgtcattcgctactgcgatagcgtggtgtgccatattaccgggttccagggcattcagtcggcgatcgagaagaagctggatatcaaaccgggtcaaacgacctttgatggccgcttcactctgctgccgacctgctgtctgggcaactgcgacaaggggccgacgatgatgattgatgaggacactcacagttatctgacgccggaagcgattcctgacctcctggagcggtataaatga

SEQ ID NO: 175556 - DNA, 1809 bp, Klebsiella oxytoca
atggtgaacaatatgaccgatttaaccgcgcatgacgccgcaccagcctggcaaacccgcgatcaccttgatgacccggtgatcggcgaactgcgcaaccgttttgggccggatgcctttaccgttcagcctacccgcaccggcgttccggtggtttgggttaagcgcgaacagttgcttgaggtgggtgatttcctgaagaaattgccgaagccttacgtgatgctgttcgacctgcacggcatggacgaacgtctgcgcacgcaccgcgacggtttacccgccgcggatttttccgttttctatcacctgatttcaatagaccgcaaccgcgacatcatgctcaaggttgccttgtctgaaaacgatctgcatctgccgaccttcaccaaactgttccctaacgctaactggtatgagcgtgaaacctgggagatgtttggcgtgaccttcgacggccacccgaacctcaggcgcatcatgatgccgccgacatgggaaggccatccgctgcgtaaagactatccggcgcgcgccaccgaatttgacccgtttgagctgaccaaagccaaacaggatctggaaatggaagcgctgaccttcaaaccggaagagtggggcatgaagcgcgggaccgaaaacgaggacttcatgttccttaacctcggcccgaaccacccttcagcgcacggtgcgttccgtattattctgcagctcgatggcgaagagattatcgactgcgtgcccgatatcggttaccaccaccgcggcgcggagaagatgggcgaacgccagtcctggcatagctacattccttataccgaccgtattgaatatcttggcggctgcgttaacgaaatgccgtacgtactggcggtagaaaaactggcgggtattaccgtgccggaccgcgtcaacgtgatccgcgtgatgctctccgagctgttccgcatcaacagccatctgctgtacatctccacctttatccaggacgtcggggcgatgacgccggtattctttgcctttaccgaccgccagaagatctacgatctggtggaggcgattaccggtttccgtatgcacccggcctggttccgcatcggcggcgtcgcgcacgacctgcctcgcggctgggatcgcctgctgcgcgaattcctcgagtggatgccgaagcgtctggattcctatgagaaagccgcgctacgcaacactatcctgatcggtcgttcgaaaggggttgccgcctataatgcgaaagaagcgctggagtggggcaccaccggcgcgggcctgcgcgccaccggcatcggcttcgacgtacgtaaatggcgtccctattctggctatgaaaacttcgactttgagatcccgaccggcggtggcgtctccgactgctacacccgcgtgatgctgaaagtggaagagctgcgccagagcctgcgcattcttcagcagtgcctcgataacatgccggaaggcccgttcaaggcggatcacccgctcacgacgccgccgccgaaagagcgcacgctgcagcatatcgaaaccctgattacgcacttcctgcaggtttcctggggcccggtgatgccggcgcaggaatccttccagatgattgaagcgacgaagggtattaacagttactacctgaccagcgacggcagcaccatgagctaccgtacccgcgtgcgtacgccgagcttcgcgcacctgcagcagatcccggccgccattcgcggcagtctggtctctgacctgattgtctatctgggtagtatcgattttgttatgtcagacgtggaccgctaa

SEQ ID NO: 175557 - DNA, 675 bp, Klebsiella oxytoca
atggattatacgctcacccgcatcgatcctaacggtgagaacgaccgttaccccctgcaaaaacaggagatcgtaaccgaccccctggagcaagaagtcaataaaagcgtgtatatggggaaactcgaacacgccttgcatgacatggtgaactggggccgtaagaactcaatctggccttataactttggcctttcttgctgctacgtggaaatggtgacgtcattcaccgcggtgcatgacgttgcgcgctttggtgcagaagtattacgtgcctccccgcgtcaggctgacctgatggtggttgcggggacctgcttcaccaaaatggcgccggtcattcagcgtctttatgaccagatgctggagccgaagtgggttatctcgatgggcgcatgcgccaactccggcggaatgtacgatatttactccgtcgtccagggcgtggataagtttattccggtcgatgtttacatcccgggctgtccaccgcgtccggaagcttacatgcaggcgctgatgctgctgcaggaatccattggtaaagaacgccgtccgctctcgtgggtggtaggcgatcagggcgtgtaccgcgccaatatgcagtcggaacgcgagcgtaaacgcggcgagcgtattgcagtgaccaatctgcggactccggacgagatttaa

SEQ ID NO: 175558 - DNA, 447 bp, Klebsiella oxytoca
atgcgtatgtcaacatccactgaagtcatcgctcatcattgggcattcgctatatttctcatcatcgctatcggcctgtgctgcctgatgctcgtcggcggctggtatcttggcggacgcgcgcgcgcgcgtagcaagaacacgccgtttgaatccgggatcgactccgtcggttcggctcgcttacgtctttctgcgaagttttatctggtagccatgttcttcgtgattttcgacgtggaagccctgtatctctacgcatggtcggcctctatccgtgaaagcggctgggtcggctttgtggaagccgcaattttcattttagtgctactggctggtctggtttacctcgttcgtatcggcgcactggactggacgcctgcgcgctcccgtcgcacgctggttaacccggaaacagacagtcccactaaccgtcatacgcagtaa

SEQ ID NO: 175559 - DNA, 927 bp, Klebsiella oxytoca
atgataaatgaaaatcgttcgatactaaatttagacctcgacctcttgagaacctttgttgccgtcgccgatctcagtacatttgccgctgccgccgttgcggtgtgccggactcagtcagcggtaagccagcagatgcagcggctggagcagttggtcggcaaagaactttttgctcgccacgggcgcaataaactcctgacagaacagggtattcagctgttaggctatgcgcggaagattctgcgttttaacgatgaagcctgtatgtcgctcatgttcggcagcctccaggggacgctgacagtgggcgcttctgatgagacagcggataccattttaccgttcttattaaatcggatcggtagtttttatcccaagctgacccttgaaattaaagtcctcaatcatcccgatatagtagatatgctgaacaatggggcgatcgatctcgcgctaacgacccgaccaacgaagggttcggaaatgctgacgctgcgcacttcgccaaccctgtggtactgcgcggcggattacgttctcccgcagggcgagtcggtcccgcttgtattgctggatgccgcagatccgtttcgcgaagatatcactacggtactcgatgttgcccgggttccctggcatctgtcccatacggcgtcatcaatggctggggtcaaagcggcggtgaaagccggacttggcgtaaccgcgcagccggtagagatgatgagcccggagtttcgcgtgccgggcagaagcgacgggttaccggtgctgccggatacccactacatgttgaactgtaaccctcagaaggcaagcgagctcactcaggcgattttccagtcattgagcacggagtaccagccatggtctagccagcgcatttatacccctgaagggggagataattcccttgtttcctga

SEQ ID NO: 175560 - DNA, 1218 bp, Klebsiella oxytoca
atgtcccccatcgaaaaatccagcaagttagataacgtctgttacgacatccgcggcccggttctgaaagaggcgaaacgccttgaagaagaaggcaataaagtcctgaagctgaacatcggcaacccagcgccgttcggctttgacgcacctgacgaaatcctcgttgacgtcatccgcaatctccccacatcccagggctatagcgattcaaaaggtctttattccgcgcgtaaggccatcatgcagcactatcaggcccgcggtatgcgcgatgtgacggtcgaagacatctatatcggtaacggcgtttccgagcttatcgtccaggccatgcaggccctgctgaacagcggtgatgaaatgctggttccggcgccggattatccgctctggaccgccgcggtcgcgctttccagcggtaaagcggtgcattatctttgcgatgaatcgtccgactggttcccggatctcgacgatattcgcgccaaaatcaccccgcgcacccgcggcattgtgattatcaacccgaataacccaaccggggcggtatactcaaaagagctgctgatggagatcgtagagatcgcccggcagaataacctgattattttcgccgacgagatctacgataagatcctctacgatgatgcgcagcaccattcgatagccccgctggccccggatctgctcaccgtaacctttaatggtctgtcaaaaacctaccgcgtcgccggcttccgccagggctggatggtgcttaacggcccgaagaaacacgctaaaggctacatcgaaggcctggagatgctggcttccatgcgcctgtgcgccaacgttccggcccagcatgcaattcaaacggccctcggcggttatcagagcatcagcgagtttatcgttcccggcggccgtttatatgaacagcgtaatcgcgcctgggagctgattaacgaaatccccggcgtctcgtgcactaagccgaaaggcgcgctgtatatgttcccgaaaatcgatgctaaacgctttaatattcacgatgaccaaaaaatggtgctcgattttctgctgcaggagaaagtcctgctggttcagggaaccgcctttaactggccgtggccggatcacgtacgtattgtgaccctcccgcgcgaagacgatcttgaaatggcgattacccgcttcggacgcttcctttcccgctaccatcagctctga

SEQ ID NO: 175561 - DNA, 600 bp, Klebsiella oxytoca
atgagtcagagtcatttctttgcccacctctcccgcctgaaactgatcaaccgctggccgctgatgcgcaatgtccgcacagaaaacgtctccgaacacagcttacaggtcgccatggttgcccatgcgctggcggcgattaaaaatcgcaaatttggcggtcaggttaacgctgagcgaatcgcgctgctggcgatgtatcatgatgcttcggaagtgctgaccggcgatctgccgacgccggtgaagtatttcaattcgcaaattgcgcaagagtacaaagccatcgagaaaatcgcccagcagaagctggtcgatatggttcctgacgagctgcgcgacatttttgcgccactcattgacgaacatcactatagcgaagaggaaaaatccattgtcaaacaggccgatgcgctttgcgcctacctgaagtgtctggaagagctatcggcgggtaacaatgaatttctgctggccaagggccgcctggagaaaacgctggaatcgcgccgcagtccagagatggactactttatgcgggtatttgtaccgagcttccatctttcccttgatgaaattagccaggattcacctttataa

SEQ ID NO: 175562 - DNA, 1833 bp, Klebsiella oxytoca
gtgaacggtgaattgatttgggtgttatctcttcttgccgtagccgtcgtgctctttgccaccggaaaagtgcgcatggacgctatcgctttgctggtgattgtcgcgtttgtcctcagcgataccttgacgctcagcgaggccttctccggttttagcgatcccaacgttatccttattgccgcgcttttcattattggcgatgggctggtgcgtaccggggttgccactaaaatgggttcctggctggtgaaggttgccggtaacagcgaaaccaaaatgctggtttttttgatgctgaccgttgccgggctgggcgcttttatgagctcgacgggcgtggtggccatttttattccggtggtgctcagcgtatcaatgcgcatgaacacctcgccttcgcggttaatgatgccgctcagttttgccgggcttatcagcgggatgatgacgcttgtcgccacgccgcccaacctggtcgtcaacagcgaactattacgcgaagggctgcaaggattcagcttttttagcgtcacgccgataggcctggtggtgctggttctgggcgttttctatatgctggtgatgcgctttatgcttaagggagatgaaagcgaacaggtcagagatgggcgtaaacgcagcacctttcgcgatctcatcaaagattatcatctgaccggcagggcgcgtcgcctggctattcgccccggctcgccgatgattggccagcgcctggacgacctgaaactacgcgagcgctatggggcgaacgtcatcggcgttgagcgctggcggcgctttcggcgggttatcgtgaacgttaatggggtatcagaattccgcgcccgtgacgttttgctgatcgatatgtcggcttcggacgttgatttacgccagttttgcggcgagcagatgcttgagccgatggtgctgcgcggtgaatatttttccgatcaggcgctggacgtagggatggcggaagtctctctgatcccggattcagagctgattggcaagtcggtgcgcgaaatcgcttttcgtacccgttttgatttgaacatcgtgggcctgaagcgcgatggcaaagccattgatggcgcggtcaccgatgaacccctgcagcttggcgatatcatgctggtggttggcaactggcggcagatagccctgctggccaagcgggggcgggacttcgtggtgctgaatatgcccattgaggtcaatgacgcctcgccggcgcacagccaggcgccgcacgccattttctgtctggtgctgatggtggcgcttatgctgactgacgaaatacctaaccctatagcggccatcattgcctgcctgctgatgggtaaattccgctgcatcaacgcggaaagcgcctataaagccatccactggccgagcattattttgatcgtcggaatgatgccttttgccctggcgctgcagaaaaccggcggggtggatctggttgtgaaaggcctgatggacgtggcggggagtaaagggccctatctgatgctgggctgcctgttcgtgatgtgcgcggctatcggcctgtttatttccaataccgctaccgcggtgctgatggcgccgattgcgctggctgcggcgaagtcgatgggcgtatcgccatatccctttgcgatggtcgtggctatggcggcttctgcggcgtttatgacgccggtatcatcaccggtgaacacgctggtgctggggccgggtaagtactcatttagcgatttcgtcaaaattggcgtaccgtttaccatcatggtgatggtggtgtgcgtactgctaatcccggtactgttcccgttttga

SEQ ID NO: 175563 - DNA, 672 bp, Klebsiella oxytoca
atggaggttcccgtgcagtgtaaaggtttcctgtttgatcttgacgggacattagtcgattcgttgccggtggtggagcgttcgtggtgcaaatgggcggatcgattcagtatccctcatgatgaagtgctgaacttcattcatggcaagcaggcaatcacctcgttgcgtcactttctccccggccgcagcgaagaagagattcaggctgaattcaccctgctggaaacggtagaagcgacggataccgatggcgttacggcgctgccgggtgcggttgcgttgctcaaaaccctggatgaagccgggatcccctgggcgattgtgacgtcgggttcgatacctgtggcccacgctcgtcaccgtgccgcaggtctgcctgaagctgaggtgttcgtcactgccgagcgcgtaaagcacgggaaacccgctccggatgcctatctgctgggggccgaactgttgggcctggcaccggcggattgcgccgtcgtggaggatgcccctgccggtctgctttccggcctgaatgccggctgtcggaccatcgcggtcaacgtgcccgccgatgcaccgcgtcttgatgaagcggatttagtattaacgacgctggaaagcctgcaggttgagcgtctgcctgacggcaaggtgaatgttagccttaaaaactaa

SEQ ID NO: 175564 - DNA, 495 bp, Klebsiella oxytoca
atggaaatgaccaatgcgcaacgtctgattctgtcgaatcagtacaagatgatgacgatgctcgacccggacaacgccgaacgctatcgccgtctacagaccatcattgagcgtggatacgggctgcagatgcgcgagctggaccgcgagtttggccagcttaccgaggaaacgtgtcgtaccatcattgatatcatggagatgtatcatgcgctgcatgtctcctggaccaacctgaaggacgccagcggaatcgacgagcgtcgggtcacattcctcggttttgacgttgccactgaagctcgctatctcggctacgttcgctttatggtcaacgttgagggacgctacagccactttgacgccgggactcacggctttaactcccagaccccgatgtgggaaaaataccagcgtatgctgagcacctggcacgcctgcccgcgtcagtatcatctgagcagtaacgaaattaatcaaattatcaacgcctga

SEQ ID NO: 175565 - DNA, 456 bp, Klebsiella oxytoca
atgtctggtccagaaaatcgccctgtaagttttttcggcttgtttcgccacgggcagcattatgcaaagacctggcctctggataagcgccttgccccggtgtttatcgaaaaccgtattattcgcgccacgcgctatgcgattcgtatcatgccgcccgtagcgattttcacgctgtgctggcaaatcgcccttggcggccagcttggcccggccgtggctaccgcgctgtttgcgctgagcctgccgatgcagggattatggtggttgggcaagcgctcggtgacgccgctgccgccgtcgattttaaactggttttatgaagtgcgcggtaaattgcaggaggccggacaagcattaacgccggtcgacggtaagcctgattatcaggctttagctgacacgcttaagcgcgccttcaaacaactggataaaactttcctggatgatttgtaa

SEQ ID NO: 175566 - DNA, 1203 bp, Klebsiella oxytoca
atgtcgagtaagttagtactggttctgaactgcggtagctcctctctgaaattcgctatccttgatgccgtcaacggtgacgaatacctgtccggtttagcagaatgtttccatcttccagaagcccgtatcaaatggaaaatggatggcagcaaacaagaagccgagctaggcgctggcgctgctcacagtgaagcgctgaactttatcgttaacactattctggcacaaaaaccagaactgtctgctcagctgaccgcaatcggccatcgtatcgttcacggcggtgagaaatacaccagctccgttgttatcgatgactccgtcattcagggcattaaagattccgcatctttcgctccgctgcacaaccctgcgcacctgatcggtatcgctgaagcgctgaaatccttcccgcatctgaaagataagaacgttgccgtgttcgacaccgcgttccaccagaccatgccggaagaatcttacctctatgccctgccgtacagcctgtacaaagaacacggcgtacgtcgctacggcgcgcacggtaccagccacttctatgtgactcaggaagctgcgaaagttctgaacaaaccggttgaagagctgaacatcatcacctgccatctgggcaacggtggttccgtttccgctatccgtaacggtaaatgcgttgacacctctatgggtctgactccgctggaaggcctggttatgggtacgcgttctggcgatatcgacccggcaatcattttccatctgcacgatgccctgggcatgagcgtagacgccatcaacaaaatgctgaccaaagagtccggtctgctcggcctgaccgaagtgaccagcgactgccgctatgttgaagacaactaccaggacaaagcggatgctaaacgcgctatggacgtttactgccaccgcctggcaaaatacatcggttcctacaccgcgctgatggatggccgtctggacgcggttattttcaccggcggtatcggtgagaacgcggcgatggttcgcgaactgtctctgggcaaactgggcgtactgggctttgaagttgatcacgagcgcaacctggctgcccgtttcggcaagtctggcttcatcaacaaagaaggcactcgcccggctatcgtcattccgaccaacgaagagctggtcatcgcgcaagacgccaaccgtctgaccgcctga

SEQ ID NO: 175567 - DNA, 2199 bp, Klebsiella oxytoca
gtggtgcagttttgtatcccgcccgatactggcggtaacgaaagaggatatatcgtgtcccgtacaattatgctgatccctaccggaaccagcgtaggcctgaccagcgtcagcctcggtgttgtccgtgctatggaacgtaaaggcgtgcgcctgagcgtctttaaaccaatcgctcaaccacgcgccggtggcgatgcgccagaccagacgacgaccatcattcgcgcgaactccgaccttccggccgcagaaccgttgaagatgagccacgttgagtcgctgctctccagcaaccagaaagacgtgctgatggaagagatcatcgccaactaccacgccaacgctcaggatgctgaagtggtgctggttgaaggtctggtcccgacccgcaaacatcagtttgcccagtcgctgaactacgaaatcgccaaaacgctgaacgctgaaatcgtcttcgtcatgtcccagggtaccgatactccggaacagctgaaagaacgcgttgagctgactcgcagcagcttcggcggcgcgaaaaacaccagcattaccggcgtaatcgtcaacaagctgaatgcgccagttgacgaacagggccgtactcgccctgacctgtcagaaatcttcgacgactcttccaaagcgaaagtcgtgaagatcgatccggctcagctgcagaacggtagcccattaccggttctgggcgcggtgccgtggagcttcgatctgatcgccacccgcgcgatcgatatggcgcgtcacctgaacgccaccatcatcaacgaaggcgacattaatacccgccgcgtgaagtccgtgaccttctgcgcacgcagcattccacacatgctggagcacttccgcgcaggatcgctgctggtcacttccgcagaccgtcccgacgttctggtcgccgcctgcctggccgcgatgaacggcgtggaaatcggcgccatcctgctgaccggcggctacgaaatggacgagcgcatcagcaagctgtgcgaacgcgcattcgcgaccggcctgccggtatttatggtcaacaccaatacctggcagacctccctgagcctgcagagcttcaacctggaagttccggttgacgatcacgagcgcatcgagaaagttcaggaatacgtggctaactacattaacgctgactggatcgagtcgctcaccgcgacttccgagcgtagccgtcgcctctctccgccagccttccgctatcagctcaccgagctggcgcgtaaagcaggcaagcgcgttgttctgccggaaggtaacgaaccgcgtaccgttaaagccgccgctatctgcgccgagcgcggtatcgccacctgcgtcctgctgggcaaccccgaagaaatcacccgcgttgccgcgtctcagggcgtagagctgggcgccgggattgaaatcgtcgatccggaagtggttcgcgaaagctacgtagctcgcctggtcgagctgcgtaagagcaagggtatgaccgaagcggttgctcgcgagcagctggaagacaacgtggttcttggcaccctgatgctggagcaagacgaagttgacggtctggtctccggcgcggttcacaccaccgccaacaccatccgtccgccactgcagctgatcaaaacggcccctggcagctctctggtctcctccgtattcttcatgctgctgccggaacaggtttacgtttacggcgactgcgcgatcaacccggatccgaccgctgagcagctggctgaaatcgccattcagtctgctgaatccgcaattgcctttggcatcgagccgcgcgtggccatgctctcctactccaccggcacttcaggcgcaggcagcgatgtagagaaagttcgcgaagcaactcgtctggcgcaggaaaaacgtcctgacctgatgatcgacggcccgctgcagtatgatgctgcggtaatggctgacgttgcgaaatccaaagcgccgaactccccggttgccggacgcgctaccgtgttcatcttcccggatctgaacaccggtaacaccacttacaaagccgtacagcgttccgccgacctgatctccatcgggccgatgctccaaggcatgcgtaagccggtgaacgacctgtcccgcggcgcgctggttgacgatatcgtctataccatcgccctgaccgcgattcagtcgtcccagcagcaagcataa

SEQ ID NO: 175568 - DNA, 954 bp, Klebsiella oxytoca
atgattaagcttgcaccagcagggcaaaaagatgccgtagagatgcgtaaggtttatgccgggttcgtcgcagagcagattgcagacaagagcccaattatcgccctggaagcggatttgatgagttccatggcgatggacggcgtcgcgcgggagcatccgcagcacgtcatcaactgcggcatcatggaagccaacgtgataggcactgccgccgggctatcgttgaccggacgcaagccgtttgtgcacacctttaccgcttttgccagccgccgctgtttcgaccagctgtttatgtcgctcgattatcagcggaataacgtcaaagtgattgcttccgatgcgggggtgaccgcctgccataacggcggaacccatatgtcgtttgaagatatggggattgtgcgcggcctggcgcattcggtcgtgctggaagtgaccgatgcggtgatgttcgatgagattctgcgtcagcttatcgatctcgacggcttctactgggttcgcaccattcgcaaacaggcgccgagcgtgtacgcgccgggttcaacgttcaccattggcaaagggaatgtgctgcgcgaaggtgaagatatcacgctgattgccaatgggattatggtggcggaagcgctggaggcggcgcgccagcttgagcaggaaggcgttagcgcggcggtgattgatatgtttaccctgaagcccattgaccgcatgctggtgaaaaattacgccgaaaaaaccgggcgcatcgtgacctgcgaaaaccacagtattcacaatggactgggatcggcggtggcggaggtgctggtggaaacctgtccggtaccgatgcggcgcgtaggagtgaaagagcgctacggtcaggtgggaacgcaggagttcttgcagaaggagtatggcctgacggcgcatgatattgtctcagcggcgcgcgagctgctgtaa

SEQ ID NO: 175569 - DNA, 831 bp, Klebsiella oxytoca
atgaatgtgcaagaagtgactaaactggcgcgagacattcgcgtcgcaacccttaaatcgctgacggatctcggtttcggccactacggcggcagtatgtcggtcgtggaaacgctggcggtactgtacggcgcggtgatgaaaattgatcccgccgatccggactggcccgagcgcgactactttgtgttatcgaagggccatgccggcccggcgctgtacagtacgctggcgataaagggatatttcccgatggaggaactaagcacgctgaaccagaacggtacgcggctgccaagccatccggatcggctaaaaacgcgcggcgtagacgccacaacggggtcgctggggcaggggatttccatcgctggcgggatggcgctgtcgcataagctggcgggacggacgaatcgtgtgttctgtattgttggcgacggggaactgaatgaaggccagtgctgggaagcattccagtttatcgcccatcatcgcctgaataacctgaccgtgtttgttgactggaacaagctacagcttgacggcaggctggatgagatcattcgcgcttttaatctggaagataaattccgcgcctttggttttgatgtcatgaccgttaaaggcgatgacgttcccggactgctggctgcggtacagcccgttccgcccgtcgatgcgcgaccgcgggtagtcattctcgatagcgtgaaaggccagggcgtgccgtatctcgaaaatctcagcaacaaccaccatttgcgcctgacgggcgaaatgaaagagacgctaaacgaggcgattcgccaactggaggccgaacatgattaa

SEQ ID NO: 175570 - DNA, 1392 bp, Klebsiella oxytoca
atgtatatccttgaaacgctgaattttgttgttgatattcttaaagtcccttcagtactggtcggtttaattgcgttaattggtctggtggcgcaaaaaaaatctttctccgacgtcgtgaagggaacaattaaaactattctgggctttatcgttctcggcggtggcgcgacggtattagtcggctcgctgaatccactgggggggatgtttgaacacgcatttaatattcagggaattatccctaataatgaggcgatagtttctattgcgctggaaaaatatggtgcttcaaccgcgctgattatggcgtttgggatggtggcaaatattgtggtcgcccggtttacgcgcctgaagtacatttttctcaccgggcaccacaccttctatatggcctgcatgattggcgtgattctcaccgtggcgggttttgagggggtcgggctggtatttaccggttcgctgatccttggtctggtcatggcattcttcccggcgttggcccagcgctatatgaagcgtattaccggaaccgatgacattgctttcggccacttcggcactctgggctacgtactgtcggggtggatcggtagcgtttgcggtaaaggctcgcgttcaacagaagagatgaacctgccaaaaaacctgagcttcctgcgcgacagctccatctctatttcgctgaccatgatgatcatctatctgattatggcggtgagcgcagggcgtgaatacgttgaaagcaccttcagcggcggccagaactacctggtctacgccatcattatggcgatcaccttcgctgccggggtgttcatcatcctgcaaggggtacgcctgattctggcggaaatcgtaccggcctttaccgggttttcggaaaaactggtgcccaatgcccgtccggcgctggactgtccggttgtttatccctatgcgcccaatgcggtactgattggcttcctgtttagcttcctcggcgggctggtcgggctgttcctctgcgggcaatttaagtgggtgttgattctgcccggcgtggtgccgcatttctttaccggcgcgaccgctggcgtgtttggcaacgcgaccggcgggcggcgcggggcaatgatcggcgcgtttgccaacggtctgctgatcaccttcctgccggtgctgctcctgcctgtactgggggcgattggttttgccaataccactttctcggatgctgatttcggcgtcgtcggcatcgtgctgggtaatctggcccgctatctgtcgccgtttgcgataactggcctggttgtggcgttgttcgtactgctggtggcgtacaacgtttttgcgaaaaagaaatctgtgggccgcggcgcgcaggagaacagcggagcgaaatcatga

SEQ ID NO: 175571 - DNA, 273 bp, Klebsiella oxytoca
atgaaaattatggcaatttgcggttctggcctgggcagcagttttatggttgaaatgaatattaaaaaagtgcttaaaaagctcgaaatcgaggccgaggtagagcactccgatctgtcgtcggcaactcctggcgcggcggatctgtttgtgatggctaaagatattgctgccagcgccagcgtaccggaaagccagctggtggtgattactaacatcatcgatattaatgaactcgaagcgcagctgcgcgcgtggttcgccagacaataa

SEQ ID NO: 175572 - DNA, 444 bp, Klebsiella oxytoca
atgctcaacacatggctctctgatgccaccattgcgctgcggcagaacgtagacagctggccccaggcgctggatatctgcgcccggccgctgctcgaggccggcgttatcgaacctgcttacgtgaaggcgatcgtggagcagcatcgcaggctggggccgtattacgtgctggcgccgggactggcgatgccgcatgcgcggccagaggagggggcaaagggcttaggactatcgctgttgaaactggaacagggcgtatcgtttggctcagaggagttcgacccggttgatattatcattatgcttgcggcaccggataaacatagccatctcgaaatgatcgcggctctggcggaattattttccagcgatgaagatatgcatcaattacatcaggcaaccggccttgaggagattaaaaaaatcatcgcacgcttctga

SEQ ID NO: 175573 - DNA, 1020 bp, Klebsiella oxytoca
atgtctctaacccgaaaacggcgtagtaccggtaaagtgacgatcgccgatgttgctcagctggcaggtgtgggaaccatgaccgtatcccgcgcgcttcgcacgccggaacaagtttccgataaactccgtgaaaaaatcgaagcggcggtgcaagaactcgggtatatgcctaacctcgccgccagcgccctggcatcagcctcttcaagaactatcgcgatggtggtccccaatctggcggaggcgggctgctcagcgatgtttgccgggcttcagcaggtactacagccggcgggttatcaaatcatgctcgcggaatcgcagcaccgtcttgagcaggaagaaaagttgctggaaacgctgctggcttcgaatatcgccgccgccattctgcttagcgttgaacatagcgataccgtacgccactggctgcaaaacgcctcgattccggtggtggaaatgggggcgatgcgcgccgatcctatcgacatgaatatcggcattgataacgtagcggcgatgttcgagctgacggagatgctcattcaccgcggctatcagaatatcggtctgctgtgcgccaatcaggaacagtggatttttcagcagcatttgcaggggtggtacaaggccatgctgcgccatcatatgtcgcctaaccgggtgattaacgctgcgctaccggccaacttttccaccggcgcttcgcagctgccggagtttttgctggcatggccagaactcgatgcgctggtctgcgtttccgatgagctggcatgcggggcgctgtatgagtgccagcgtcggcgcatcaaggtgcctgatgatttagccgtcgtcggctttggcgacagtgacgtgagtcgggtgtgccagccgccgttaacgaccatggctgtgccgcaccacaagattggtatagaagccgggcgagcccttctggagcgttttaatgagggaaactggagcgacaggaaacccatcgcgtccagtttatgcatgcgggatagctgctaa

SEQ ID NO: 175574 - DNA, 555 bp, Klebsiella oxytoca
atggcggaacagaatcatttggcaagcacagaatgggtcgatattgttaatgaaaacaacgaggtgatagcacaatccagccgcgaacaaatgcgcgcggagtgtctgcgtcatcgcgcgacctacattgttgttcatgatgggatgggcaaaatcctggtgcagcgtcgtaccgaaacgaaagatttccagccgggcatgctggacgccaccgccggtggcgtggtgcaggctgatgagcaaatgctggagtccgcgcgccgcgaggcggaagaagagctcggcattgccggcgtgcccttcgctgaccacgggcagttctactacgaagataagcactgccgcgtctggggcggtctgtttagctgcgtatcgcacggaccgttcgcgctgcaagaagaagaagtgagcgaagtgtgctggctgacgccggaagagatcaccgcccgctgcgatgaattcactccggattcattaaaagcgctggcgctgtggatgacccgcaatgccaacaatgagccaacaaaagccgaaaaacaggaagaggcggaatag

SEQ ID NO: 175575 - DNA, 552 bp, Klebsiella oxytoca
atgaagctgatgtttgcctcggatatccatggctctctgcctgcagccgaacgcgtgcttgagctattcgcgcgaagcggggcgcagtggctggttattctcggtgatgtgctgaatcacggaccgcgtaacgcgcttcctgaaggttatgccccggcccaggtcgcagaggtgttaaatcgcgtagcggagcgggtggttgccgttcgcggcaactgcgacagcgaagtcgatcagatgctgctccatttccccataaccgccccctggcagcaggttttgagcgagcgaacccgcctgtttctcactcacggacatctgtacagccccgataatttgcctccactcgccgctggcgatgtgctggcttacggccatactcatattccggtagccgagaaacgcggcgagatttttctcttcaatcccggctcggtcagcatccctaaagggggatttaccgccagctacggtcttctgaacgaggggcgattgcaggttttagcactcgatgatcatcaggttattgcagaggtcgcaatttacccgtaa

SEQ ID NO: 175576 - DNA, 645 bp, Klebsiella oxytoca
atgagccagtccgcgattaccctgtggtccgacgccgattttttctcgccctatgtgatgtccgtgtacgttgccctgcaggaaaagagcctgcctttcactctaaaaaccgtcgatctcgacagcggcgagcatctgcaaagcggctggaaaggctacagcgtgacgcggcgcgtaccgctgctggaggtcggtgagttcttcctgagcgaatcctccgcgattaccgaatatctcgatgaacgcttcgcgcctccggagtgggagaggctgtatccgcatgacctgcaaaagcgcgcgcgggcgcgtcaggtgcaggcctggctgcgtagcgatttaatgccgattcgtgaagaacgctcgacggccgtggtttttgccggagaaaagaaaccgccgctcagcgaagccgggaaaaaaagcgccggcaagctgtttgaaacggctggcgttctgctatcccatggcgggcagaatttatttggcgaatggtctatagccgataccgaccttgcgctgatgctcaatcgtctggttctgaacggcgatgaggttccgaccgcgctggctgattacgccaccttccagtggcagcgagcgtcagtccagcgctacgtcgcactctcagccaaacgagcgggctga

SEQ ID NO: 175577 - DNA, 630 bp, Klebsiella oxytoca
atgatcgatctttactacgcacccactcccaatggccacaaaatcacgctcttcctcgaagaagctcagttggcctatcgtctcatccgggtggatatcggcaaaggggagcagttccaaccctcctaccttgcgatttcgccaaataacaagatcccggcggtcgttgaccatgaacccgccgacggcggtggcccgttaaacctgtttgagtccggagcaatcctgctctaccttgcagaaaaaagcggcaagttactgagcggtgagctccgcgagcgccacgctacgctccagtggttattctggcaggtcggcggtttagggccgatgctcgggcaaaaccaccactttaaccactgcgccccgcaggcggtaccctatgccatcgagcgctatcaggtagaaactcagcggctgtacggcgtgctcaaccggcgccttggcgagagcccctggctgggcggcaaccactacagtatcgccgatatcgcctgctggccgtgggtgaatgcccatcagcgccagcgcatcgacctcgccagttttccggcggttcacaactggtttgaacgcattcgtcatcgcccggcgaccgttgaggcgcttctgaaaacagaagcctggtaa

SEQ ID NO: 175578 - DNA, 363 bp, Klebsiella oxytoca
atgtctcaaccagacgccattattcgaattaagaacctgcgcctgcgtacttttatcggaattaaagaggaagagatcgccaaccgccaggatgtggtggtcaacgtcgctatccactatccggcggagaaatcacgcaacagcgaagatattaacgatgcgctgaactaccgcaccattactaagcgcattattagtcatatcgaaaataaccgcttttctctactggaaaaattaactcaggatgtgctcgacatcgcacgcgaacatcactgggtcacatatgctgaagtagagatcgacaaactgcatgcactgcgctacgccgattccgtctccatgacgatgagctggcggcgctag

SEQ ID NO: 175579 - DNA, 894 bp, Klebsiella oxytoca
atgaacgttctgcttactggcggtaccggcctgattggccggcatctgataccccggctgctggagctggggcatcgcgtaacggtttcaacccgcagccctgaaaaggcgaaaaaccgcctcgattctcgcgtcactctgtggcgcgattttgagcatcaggtgaatcttaacggttttgatgccgtcatcaatctggcaggcgaacctatcgccgataaacgctggacggcggagcagaagcagcgcctctgccacagccgttgggatatcacccaaaagctggtcaccctaatcaacgccagcgacgcgccgcccgcggtgctgattagcggttcagccgccggctattatggcgatctcggcgaagttgtcgtcaccgaagaagagccgccgcataatgagtttacccacaagctttgcgcccgctgggagcagattgcctgcgaagcgcagagcgatcgcacccgcgtatgcctgctgcgtaccggggtggtgctggcgccgcgaggcggcattctggccaaaatggcgcccgcctttaagcttggcctcggcggccctatcggcagcggcagacagtatctggcctggatccacatcgacgatatggtcaacggtatactgtggctgcttgataacgacctgcgcgggccgtttaatatggtttccccttacccggttcgtaacgagcagttcgctcatgcgctgggccatgcgctaaaccgtccggcgattttccgcgtcccggcggcggctattcgtctgctgatgggagaatcttccgttctggtactcggcggccagcgcgcattgcctaaacgcctggaagcggccggatttggctttcgttggtacgatctggaagaggcgctggccgacgtgctgcggtag

SEQ ID NO: 175580 - DNA, 255 bp, Klebsiella oxytoca
atgaaggaacatccggataaacatatcagagcagctattgactacgcgctggcacggggctggatttttatcactggcggcaaaagcgctcactgttttggcaggttgatgtgtgggacggcccggcaccgggaacatatgatgagcatctggtcaacgcctgcggtacccattaaccacgccaggcaaattatcagaatggtcgaccgctgccagccgcctgcctcgggtcagcttaaccacaagaaggattaa

SEQ ID NO: 175581 - DNA, 567 bp, Klebsiella oxytoca
atggcgctgtataattttacgctcaccctctccggcgtaacttctcgtaccgtgggtctggaagatgcactgcatgccgcaggctgcgctgacgccctggtctgtttttacggaacggcggtctatctggagttcgatcgcgaaagagactctcttgagcaggctattctgtcagccattgctgatatcgaatccgctccggctctgaatgcgcgagtcgaatccgtcgattccgcgctggtaggattaagcgatattgccgaactcaccggcctgacgcgacaggccgtcgccttattgaaagatggcgcgcgaggctcgggccagtttccgggaccggtgcagcgcgttaaaggcaattcgccgctatggcgctggaaaaccatcgttggctggctggtaacggagggacgacttgctgaagactcagcgctggtcgcccacgccgaggtgctggacgatctcaatctggcgctgcagctgagggctacgcgggagagcaaaaccgtgttgcactatcttagcgggctggaaagtcagcgccaggcttcaccgacggttgcttaa

SEQ ID NO: 175582 - DNA, 498 bp, Klebsiella oxytoca
atgataacactcaccactccgcgcctgcgtctctctgggtttaacgcatccgactggcctttttttctgcgcttacggcgagatccagaagtgatgcgctatatgggagagcttcttgaggagccggcgctgcggacgctgtttgagtcccgctgcgcagaccctggcgtattcgttttacgtgatgccagcggcgcggcaattggcgatatcgggctgcgcatcagcagtaaaaacccgcacgaagcggatgtcggatacgcactcctgcccgaagctcaggggaaagggtacgccagcgaagcgctaaaagcgatttgcgactacggttttcagcagctcggcgttcacgccatcaatgcctgggtgctgggcagtaacgctggttcctctcgtctgctggaaaaacacggttttatccgcattcaggtgctcgaaaaagcctatcgcctgaacggaattgattacgacgactgggtatatcggctggagcgttag

SEQ ID NO: 175583 - DNA, 774 bp, Klebsiella oxytoca
atgtccgacaataaattaaatgtaatcgatctgcataaacgttacggcgaacacgaggtgctgaaaggcgtttcgctgcgggcgaaagccggggacgtgatcagtattattggctcatccggttccggtaaaagcacctttctgcgctgcattaactttcttgaaaagcccagcgaagggacaattgtggttaacgggcagaacattggtctggttcgtgataaagacggtcagctcaaggtgtcggataagaaccaactgcgtctgctgcggactcgcctgacgatggtgttccagcatttcaatctctggagccatatgacggtgctggaaaacgtgatggaagcgccgattcaggttttgggcctgagcaaacaggaagcgcgcgagcgggcggtgaaatatctggcgaaggtggggattgacgaacgccagcagattaaatatccggtgcatctctccggcggccagcagcagcgcgtgtccatcgcccgcgcgctggcgatggaacccgatgtgctgctgtttgatgaaccgacgtcggcgcttgatcctgaactggtgggtgaagtgttgcgcattatgcagcagctggctgaagaggggaaaaccatggtcgtggtcacccatgagatgggctttgcgcgccacgtctcctctcacgtaatcttcctgcatcagggcaagatagaagaagaggggcaccctgacgaagtcttcggtaatccgaaaagccagcgcttgcagcagttcctgaaaggctctttaaagtaa

SEQ ID NO: 175584 - DNA, 717 bp, Klebsiella oxytoca
gtgattgatattattcaggagtactggaaatctctgctgtggaccgacggctatcgcttcaccggcgtagcgattacgctctggctgctgatctcttcagtcgtgatgggcggcatactcgcggtttttcttgccataggccgggtatcgagcaacaaatttatccagttcccaatctggcttttcacctatatctttcgcggtaccccgctgtatgtgcagctgctggtgttctattccggtatgtacacgctggagatcgtcaaaggtacagaactgctgaacgccttctttcgtagcggtctgaactgtacggtactggcgttgacgctgaatacctgcgcttataccacggagatttttgccggagcgattcgttcagtgccggcgggagagatcgaagccgcccgcgcgtacggtttttctgcggtcaaaatgtatcgctgcattattttgccttccgcgctgcgtattgctctgcctgcctacagcaacgaagtgatcctgatgctgcattccaccgcgctggcctttaccgccacggtgccggatctgctgaaaattgcccgtgatatcaactcggcaacctaccagccatttaccgcttttggcattgccgcagttctgtatttaattatctcctatgtgctgattagcttattccgcagggcggaaaagcgctggctgcagcatatcaaaccttcttcgacgcattga

SEQ ID NO: 175585 - DNA, 687 bp, Klebsiella oxytoca
atgctgtacggtttttctcaggttatttttcagggcgcgctggtcacccttgagctggcgttaagctcggtcgttctggcagtgcttatcggcctggcaggcgcgggggcgaagctttccagcaatcgtccgctggcgctgatttttgaaggctataccaccttaattcgcggcgtacccgatctggtgctgatgctgctgattttctacgggttgcagatcgcgctcaacgcgctgaccgatgcgcttggcctcgcgcagtttgatatcgaccccatggtcgcggggattatcactctgggctttatttacggcgcttacttcaccgaaacctttcgcggcgccttcctggcggtaccgaagggacatattgaagcggcaacggccttcggcttcagcggcgggcagacctttcgccgcattctgtttccggcaatgatgcgctatgcgctgcccggaattggcaataactggcaggtgatcctcaaagcgactgccctggtctcattgctggggctggaagatgtggttaaggcaactcagctggcgggtaaaagcacctgggagcctttctacttcgctattgtctgcggcctgatttatctggtgtttaccacggtttccaatggtgtgctgctgatgctcgaacgccgttattctgttggcgtgaagagggctgacctgtga

SEQ ID NO: 175586 - DNA, 783 bp, Klebsiella oxytoca
atgaaaaaactggcgttgtctctctccttagcgctggccctttccagcgtttccaccgtattcgcagcaattccgcaaaaagtccgcattggcaccgatcctacttatgccccgttcgaatcaaagaatgcacagggtgaattggttggttttgacatcgatctggcaaaagagctgtgtaagcgcatcaatacgcaatgtaccttcattgagaacccgctggacgcgctgatcccttctttaaaagcgaagaagatcgacgccattatgtcttcgctttcgatcaccgaaaaacgccagcaggaaattgccttcaccgacaaactttacgcggctgattctcgcctggtcgtcaaaaaaggcagcgatatcacgccagaccttgcgaagctgaaaggtaagcgcattggcgttctgcagggcaccacacaagaaacctatggcaatgaacactgggcgccgaaaggtattgaaatcgtttcctatcagggtcaggacaatatctattccgatttgaccgccggacgtattgacgcggcgttccaggatgaagttgccgccagcgaaggcttcctcaaacagcctatcggcaaagattatcagttcggcggcccgtcgattaaagacgagaagctgtttggcgtcggcaccggaatggggctgcgcaaagaggataatgagctgcgtgaagcattaaataaagcctttgccgagatgcgccaggacggcacctacgacaagctggcgaagaaatatttcgattttaacgtgtacggcgactaa

SEQ ID NO: 175587 - DNA, 783 bp, Klebsiella oxytoca
atgaagaagacggtcctggctttctctttaatgatgggcatttgcagcgcttccagcgccttcgccgcgctgccgcagagtattcgcattggcaccgatgccacctacgcgcctttttcttctaaggatgcgaaaggggatttcgtgggttttgacattgatttgggtaatgagctctgttcgcgcatcaaagtaaaatgtacctgggttggcagcgatttcgactccctgatcccatcgctgaaggcgaagaaaatcgacgccatcatctcttcgttatcgatcaccgaaaaacgccagcaggaaatcgcgttctctgacaagctctacgcggcggactctcgcctgattgccgccaaaggctcaccgattcaaccgacgctggaatctctgaaaggcaagcacgtcggcgttctgcagggctccacccaggaggcctacggcaatgaacgctggcgcagccacggggtagacgtcgtggcttatcagaatcaggacttaatctactcagacctcgccgcgggccgcctggatgccgccttgcaggatgaggtcgccgccagcgaaggcttcctcaagcaaccagccggtaaagattttgcctttgccggaccttctgttaaagacaaaaaattcttcggagatggcacaggtattggcctgcgtaaggacgatagcgaactgaaggccgcttttgataaagccctggctgagcttcgcaaagacggcacctacgacaaaatggcgaagaaatacttcgacttcaacgtttacggtgattaa

SEQ ID NO: 175588 - DNA, 570 bp, Klebsiella oxytoca
gtgaagcgactcattatcggtatctctggcgccagcggcgcaatttacggcgtacgcctgctccaggttttgcgcgaggtgcctgatgtcgaaacccatcttattttaagccaggccgcccgtcagacgctggcgctggagacggacttctccctgcgcgaggtgcaggcgttggccgacgtagtgcacgatgcccgtgatatcgccgccagtatctcttccggctcttttaaaaccgccgggatggtgattttgccatgttcaatgaaaacgctttccggcattgttcatagctataccgatgggctgctgaccagagcggcggacgtggtgcttaaagagcgtcgcccgctggtgctgtgcgttcgggaaacgccgttccacctcggtcatctgcgtctgctggtccaggcggcggaaatgggcgcagtgattatgccgccggttccggcgttctatcatcgtcctgaaagccttgacgatgtgatcaatcaaacggtcaatcgcgttatcgatcagtttgatatctctcttcctgcagacctctttacccgctggcagggcgcgtag

SEQ ID NO: 175589 - DNA, 996 bp, Klebsiella oxytoca
atggtaaaaaagaccagaattaaagatattgcggcggcctgcggcgtgtcgattgccgcagtatcaagagcgctaaaagggcagccggggcttagcgaggagactcgtcagcggatcctgtcgatagcggaagccgaaggctatgattttagccgcttgcgcaacggtcgcatcaagcggctgctgtttttaatgcacagggaacacaatattgccagcgctctgccgttctattcgaccgtcatgcttggcgttgcggacgcttgtagagaaaatgaaattgccatgagcttccagcccattggtccgggagattcagttggcgagttgattaatctccatcagcctgacgcgctgatctgcgcgggttatcttgaagcagagatactggcggaattgaaaaaaacggcgctccccgttgccctggttgatttgtgggcggcggattttccctgtgccaatcctgacaactatcacggcggatttatcgccacccggcacctgcttgaacagggaagaaagcgtattgccttactcggccattcacagcaccattacagcatccgtcagcgtactgaaggctatctgcaggcgctgtttgatgccggaatttctctggccgaggagtatcgagtcgaagtccccccggtcaaggagatagaaaaaccgctggtagaaggcatggagaaactgctggcgctaccgcagccgccggatgctatctttgcttataacgatatggcggcgctggtggcgatgagagtttgcgcgcggaagggcatcaaggtgccggatgagattgcgatcgtcggtttcgatgatattgaagctgctgcctgggcctggccgccgttaaccacggtggccattgataagcgtgagcttggccgcgatgcgttccgtcttttactcagcgatgagggtgacagaaacctgttgttgccggtgcggttagtggttcgcgagagttcattgcggttgcgtccgcaggcataa

SEQ ID NO: 175590 - DNA, 912 bp, Klebsiella oxytoca
atgcatttaggaatggatatcggtgggaccaaagttgagactgtcgtgctggatgacaagggaaaactggtctggcagcagcgcattgcgacaccgaaagccagtattgagcagttcttacagggtatcattggagaagtccatgccgcgcaggattgggcaggcgaaaagctaagcctgggattcggtttgcccggcgcgattgacaccgctacttgtttagtaaaaaattcaaatattcaggtggtcaatgggcatccgctgcatgatatccttagcgactatttttcccagccggtggctgtcgcaaacgatgctaactgtttcgcgctgtcggaagcgatagatggctgcggcgccggtcatgaagtggtgtttggggcgatccttggtaccggatgcggcggcggtgtggtggtgcatcagcgtttgctgaccgggccgaatgcctgcagcggtgaatgggggcataatcctttgccgcactattccccggaacacgatgggccttcgcacttgtgctattgcggtcagcataactgcgtagaatcgtttatctctggcagcgggctggcccgacagtttcgcttacataatgaaggacgcggaaccgctgaagaactggtgttgaagatgcgtgaaggacaccctcaagcgctggcactgtggcggcaattccgtaatcagctggcgcgcgccttcgcaaacgtcgtgaatacgctcgatccggatgtgatagtgataggtggggggctgtcgggcgtcgatgagctgtatagcgatttatcggctgaaatggcaaagtacatattcggtggacgctgcgtgacgccggttctgccggcaaagcatggcgacagcagcggcgtacgcggcgcagcatgggctggagagcaggcgctgcagggataa

SEQ ID NO: 175591 - DNA, 1404 bp, Klebsiella oxytoca
atggctacagtcgataatctggacacgaatgtgcagatggttgatgcgggcgaaacgctctccacccgcgaaaaaataggctatgggctgggagatgccggtggacactgcatctctgacttaatcagcggcttcctgctttttttctacaccgatgtgttcggcctcagcccggccatcgtcggggcaatgttctttaccctgagaatttttgatgcgatatcagacccggttatgggcgttattgctgacagaacccgcagccgctggggccgctttcgcccgtggcagctctggactgccgtgccgcttgcggttatcggcatcctgacgtttaccgtgccagacatgagcccaaacatgaaaattgcctgggcgttcgggacctattttttgctctctattggctataccgccaataacgtcccctactgcgccctgataaacgccatgaccaaccgtcacgatcaggtaatgtcctgccagtcctggcgctttgtgttaagcggtatcgccggcttcctggtctccgtcgggctgccatggatggtcgagctttttggccaggggaatctggctaaaggctaccagtacggcgtggccgtgctgtgcgccgttggtatgatcatgtttttactttgctttttctgggtcaaagagcgggttccgctgtcgctggccggaaaattcacgctgcgccagcatctgcaagggctgcgtaagaacgaccaattactgctgatgctggtgatgtccttcctgctggtgaatattctgtgcattcgcggcggcggctacatgtactttatctcctacgcgctgcagggcagcgccggctttatgtcgctgttttttgctatcgtcaccgtggctgcgattattggcgcggtgatcgtcaacccgctttcacgccgcgtcgacatggttacgctgtacttccgcactaacctagtgctggttattttcggcgtggcgatgtggttcctgcccaccggcccgcagcatcagacactatggctggtctgtatcctgatgaacaacgttgtgcttggtttcaccctgccgctgcacttctcgattatggccttcgccgatgattacggtgaatggaagaatggcgtgcgttcctccggtatgaacttcgcctttaacctcttttttatcaagctctcctgggcctcatccggcggcattatcagcctgttgctgattctggtcgcgtaccgtccaggcctggaaaatcaaactgccgcgtctattcagggcatcaccctgctgcaaaccgtaataccggcaattttccatctggtgctggccctgtgtctgctgaagtgccggctggacggcccaatgatgaaacgtatctccaccgatcttaaccaaagacatagccaaatttcctga

SEQ ID NO: 175592 - DNA, 1968 bp, Klebsiella oxytoca
atgatgcagtccgatgtaattgaagccgacctgaaccgaattaccgttaccgatcctttcctgggagagtatcagcgtttgattcgtgatgtcgtcattccttatcagtgggaagcgctgaacgacaatattcccgatgcggagcccagccacgcgctggccaactatcgcattgccgcgggacaagaggatggccaattttacggaatggtttttcaggatagcgacgtcaccaaatggcttgaggcggtcgcctggtcgttaagccaaaaacctgacgcgacgctcgaacaaaccgctgacgaagcgatcgaactgctggcgcaagcgcagtgtgaagacggctatctcaatacctggtataccgtaaaagaaccgggtcagcgctggactaacctggcagagtgtcatgaactgtactgtgccgggcatctttttgaagcagctgtcgctttttatcgcgccaccggtaaacgtcgtctgttggaaatctcctgccgctttgccgaccacattgataccgtcttcgggcctaaccccggacagcttcgcggctatccgggacatccggaaatcgaactggcgctgatgcgcctgtatgaagtcacccgggaacctcgctatcaggcgttggcctgcttcttcgtcgaagagcgtgggaagcagccctactattacgatatcgagttcgaaaaacgcggcggtacccggcactggatcggttggggcgacgcctggccaggaatgatcaaagacaaaacttacacccatgcgcacaaaccgctcgctgaacagaacgaagcggtcggccacgccgtacgttcggtctatctgatgaccggcctggcgcatatcgcccgtatgacaaatgacgaagagaaacgtcagacctgcctgcggatctggaacaacatggtgcagcgtcggatgtatatcaccggaggaatcggctctcaggggatcggcgaagcttttaccagcgactacgatctgcccaacgataccgcctacggtgaaagctgcgcttcaattggcctgatgatgttcgcccgtcggatgctggaaatggaaggcgatgcgcactatgccgacgtgatggaacgcgctttttacaatacggtactcggcgggatggcgctggacggtaaacacttcttttatgttaacccgctggaaacctatccgaaaagcattccgcataaccatatttacgaccatataaaaccggttcgccagcgctggtttggctgcgcctgctgcccgccaaatatcgcccgcacgttggtggctatcgggcactacctgttcacgccgcgccgggatgcgctgtttatcaatttctacgccggaagcgaagcgcagttcaccattaatgaccagccgctggcgctaaaaatcagcggtaactatccatgggatgaggaggtcaacatcactttcagccacccgcaggccgttcagcatacgctggcgctgcgcctgccggaatggtgtgaagcgccgcaggtgctcatcaacggcgaagccgcgcagggcgaacaactgaaaggctatatgcatattacgcgccaatggcagcagggggatatcattacgctgcgcctgccgatgaccctccgccgggtctacgccaacccgctggttcgccataacgccggtaaagtcgccattcagcgcggaccgctggtttactgcctggaagaggttgataacggcgccgaactgcacaacctgtcgctgcccaaagcgagtcagatacgcgagattccagggaccggggtgctagaaggaaaaatcgtgctgcaggcggaggggcttcgggtactgaccgcccaggaggataaaccgctctacagcttcgaccatcgccagacggcggtagagaaacagaccttaacctttattccatggtttagctgggccaatcgtggcgaaggcgaaatgcgaatttggatcaacgaggcctga

SEQ ID NO: 175593 - DNA, 1518 bp, Klebsiella oxytoca
atgtgcggtattgtcggtatcgccggtgtcatgccggtaaaccagtcgatttatgacgcgttaacggtgcttcagcatcgtggccaggatgccgcaggcatcatcaccattgatgcgaacaactgtttccgtttgcgtaaggcgaacggactggtgagcgatgtttttgaagctcgccatatgcagcgtatgcagggcaatatggggattggtcacgttcgttacccgacggctggcagctccagcgcctctgaggctcagcctttctacgtcaactcaccgtatggtattacgttggcgcacaacggtaacctgaccaacgctcacgagctgcgtaaaaagctgtttgaagaaaaacgccgccacatcaacaccacctccgattccgaaatcctgctcaatatctttgccagcgagctggacaacttccgccactacccgctggaagccgacaatatttttgcggcgattgccgccaccaaccgccagattcgcggcgcttacgcctgcgtggcgatgattatcggtcacggcatggtggccttccgcgacccgaacggcatccgtccgctggtgctgggcaagcgcgatattggcgatggcagtaccgagtatatggtcgcttcggaaagcgtggcgctcgatacgctgggctttgagttcctgcgcgacgtggcgcctggcgaagcggtgtatatcaccgaaaaaggccagctgtttactcgccagtgcgcggaaaacccggtcagcaacccgtgcctgttcgagtacgtgtactttgcgcgtccggactccttcatcgacaaaatttccgtttacagcgcccgcgtcaatatgggcacgaagctgggcgagaaaattgcccgcgagtgggaagatctggatatcgatgtggtcattcccattccggaaacctcctgcgatatcgcactggaaatcgcccgcatcctcgacaagccgtaccgtcaggggtttgttaaaaaccgctacgtaggccgaaccttcatcatgccgggccagcagctgcgccggaaatcggtgcggcgtaagcttaacgccaaccgcgctgagttccgcgataagaacgtgctgttggtggatgattccatcgtgcgcggcaccacctctgagcagattattgagatggcgcgcgaagccggggcgaagaaagtctacctggcttccgctgcgccggaaattcgtttcccgaacgtgtatggcatcgatatgccgaccgccaatgagctgattgctcacgggcgtgaagtggatgagattcgccagatcatcggtgcggatggcctgattttccaggatctggacgatctgattgacgcggtgcgcgctgagaatccggatatacagcagtttgaatgttcggtcttcaacggtatctacgtcactaaagatgttgatcagacctatctggatttccttgactctctgcgcaacgacgacgcaaaagcggttcagctgcagaacgaagtggaaaacctggagatgcacaacgaagggtaa

SEQ ID NO: 175594 - DNA, 489 bp, Klebsiella oxytoca
atggtctggattgattacgccataattgcggtgattggtttttcctcactggttagcctgatccgcggctttgttcgtgaagctttatcgctggtaacctggggatgtgctttctttgttgccagtcattactacacttacctggctgtctggttcacgggctttgaagacgaactggtccgaaatgggattgctatcgcgatactgtttatcgcaacgcttatcgtcggcgctatcgtaaactttgtgataggtcagctggtggagaaaaccggcctgtcgggtaccgacagggtcttagggatctgctttggcgccctgcgcggtgtgctaatcgtctcagcgattctgttctttctcgatagctttaccggtatggcgaaaagcgaagactggcaaaagtctgagcttatcccgcagttcagtttcgttatcagatggttctttgactatctgcagagctcgtcaagtttcttgcccaaagcataa

SEQ ID NO: 175595 - DNA, 684 bp, Klebsiella oxytoca
gtggcaagtaagtttcagaaccgtttagtcgggacgattgtgctggtagcgctgggggtgattatcctgccaggactactggatggtcagaaaaaacattatcaggatgagtttgccgccattccgctggtgcccaaaccaggggaccgcgatgagccggatatgctgccagcggcgactcaggcgctgccttcgcagcctccggaaggggcggcggaagaggtgagagccggtgacgccgcggcgccatcgttggatccgtcgcgcataccggtgaacaacaacagttttgatgtggttcaggagccggttgtcgcgccaaaaccgcaggcgcagccgaaacctcagccgaagccggtagagaaaccacagcagcagcaggttgcggcgcagacgccgccgcctaagccacagcagcaggctgaaatcccggcgccgaccggtaaagcatacgtagtgcagctgggggcgctaaagaacgccgataaggtcaacgaaattgtgggcaagctgcgcgcttccggttttaaggtttacacatcgccttcgacaccggtgcagggtaaaattacccgtattcttgtggggccggatacctcaaaggataagcttaaaggccagcttggagaactgaagcagctttcaggactcagcggcgtggtcatgggctacagcccgaactaa

SEQ ID NO: 175596 - DNA, 1269 bp, Klebsiella oxytoca
atggaaaaacaacctattcctcaggccacgtcgcccctggctacgtggctttcttatctggaacatctgcacagcaaaactatcgatcttgggctggcgcgcgtcagcgaggtcgcgcagcggatggcggtaataaaacctgcgccgtttgtctttacggtcgctgggaccaacggcaaaggcaccacctgccgtaccctggaatcggtgctgatggcggcgggctacaaggttggcgtatacagttcgccgcatctggtgcgctacaccgagcgggtgcgcgtgcagggcgaagagctgccggaactcgcgcatacgacttcttttgccgaaattgaagccgcgcgcggcgatatttccctgagctatttcgagttcggtactctctctgcgctgtggttgtttcagcaggcgcgactggatgtggtgattcttgaggtgggcctgggcggccgccttgatgctaccaatatcgtcgatgctggcgtggcggtggtcaccagtattgccctcgatcatactgactggctggggcccgatcgcgaaagtatcggtcgtgaaaaggcggggattttccgctcaggcaaaccggccatcgtcggcgaacccgatatgccgttgaccatcgcagaggtggcgagcgaaaaaggggcgcagctcctgcgccgtggcgttgactggcagtacgacgccagtgaacaaggctggtccttccgcgatcggcaggggacgttaaacgatctgccgctgccgcaggtaccgctgccgaatgcggcaaccgcgctcgcggccctgcgcgccagcgggcttaaggtgaaggagcaggcgatgcgcgacggcattcaaaacgcgatgctgcctgggcgtttccagataatcagcgaagcgccgcggacgatccttgacgttgctcataacccgcacgcggcggcctatctcgccgggcgtctcaaaaccttatcgaaaacggggcgcgtactggcggttgttggtatgctgcatgataaggatatcgcaggtacgctggcgaatttgcaggcggaagttgacgactggtactgcgcgccgctggaagggccgcgcggagccacggcggagcagctgctggaacatttacgcgcaggtaaagtctataccagcgttgcgcaagcgtggcatgcggcgatggcggatgccagacctgaagatacggtgctggtctgtggttcattccacacggtggcgcatgtaatggaagaaatagacgcggggagaaccggtggcaagtaa

SEQ ID NO: 175597 - DNA, 978 bp, Klebsiella oxytoca
atggcattatgcgccccttgcgacaaaactggcatcgaccaggttcaggtagaaaggttatcaatgagctggattgaacgaattaaaagcaatataacccccacccgtaaggcaagtatccctgaaggtgtatggaccaagtgcgacagctgcggtcaggtattgtaccgcgcagagctggagcgcaacctggaggtttgccctaagtgcgatcaccacatgcgtatgtcggcgcgcaaccgcctgcatagcctgctggacgaaggttccctcgtggagctgggaagcgagctcgagccgaaagatgtgctgaagttccgcgattcgaaaaagtataaagaccgtctggcctcagcccagaaagagactggcgaaaaagacgcgctggtggtcatgaaaggcactctgcatgctatgccggttgttgccgcagctttcgaattctcctttatgggcgggtcaatgggctctgtggtcggcgcgcgctttgtccgcgcggttgagcaggctctggaagacaactgcccgctgatttgcttctccgcatccggcggcgcgcgtatgcaggaagcgctgatgtcgctgatgcagatggcgaaaacctccgctgcgctggcgaaaatgcaggagcgcggattgccgtatatctccgtgctgactgaccccaccatgggcggtgtctcggcgagctttgcgatgctgggcgatctgaatatcgccgagccgaaagcgctgatcggctttgccggtccccgcgttatcgagcagaccgttcgcgagaagctgccggcaggattccagcgcagtgagttcctgattgagaaaggggcgatcgacatgatcgttcgccgcccggaaatgcgtctgaagctggccagcattctggcgaagctaatgaatcttccggcgccaaatccggaacccgctcacgaaggtgaggtggtgccaccggtgccggatcaggaaccagaggcctga

SEQ ID NO: 175598 - DNA, 660 bp, Klebsiella oxytoca
atggatctgattcactttttaatcgattttatcctgcacattgatgtgcatctggctgagctggtcgcggagtacggtatttgggtatacgcgattttgtttttgattctgttctgcgaaaccggcctggtggtcacgccgtttctgccgggggattctctgctgtttgtggcaggagcgctctccgcgctgccgactaacgatctcaacgtccatttaatggtgctgctgatggtcattgcggcgattgttggcgatgcgctgaactacacgattggccggctgttcggtgaaaagcttttcagcaaccccgattcgaaaattttccgccgcagctatctggataagacccatagcttctacgaacgccacggcggcaaaaccatcatcctggcccgtttcgtgccgattgtcagaacgtttgcgccgtttgttgcgggaatggggcatatgtcctatcgtcattttgcgatgtataacgtcgttggcgcgctgctttgggtactgttatttacctatgcgggttatctgtttggcgatttgccgatcgtacaggaaaaccttaagctgctgatcgtcgcgattattgttctgtccgtactgcctggcgtcattgaagtcatccgccacaagcgggcggcggcgaaacaggcgaaataa

SEQ ID NO: 175599 - DNA, 813 bp, Klebsiella oxytoca
atgtctgagatggagcagccgccggtctacaaaatcgcgctgggcatcgaatacgatggcagcaagtactacggctggcagcggcagaacgaagtccgcagcgtacaggagaagctggaaaaggcgctctcgcaggtagcgaacgagcctgttaacgttttttgcgcgggtcgtacggatgccggcgttcacggaaccggccaggtcgtgcattttgaaacgcgctcgcagcgtcaggatgccgcatggaccctgggcgtcaatgccaatttacccggcgatatcgcggttcgctgggtgaagcgggttcctgaggattttcacgcccgcttcagcgccaccgcgcgccgctatcgttatgttatctataatcatcgtctgcggccggcggtattgagccgcggcgtaacccattattatcacccgctggatgcagaacggatgcagcgcgccgctcagtgcctgctgggagagaatgatttcacctcgtttcgtgcggtgcagtgccagtcgcgcacgccgtggcggaacgtgatgcacattaacgtcactcgttatggtgcatatgtggtggtggacatcaaagcgaatgcctttgtacatcatatggtaaggaatattgtcggcagtctgatggaagtaggtgccggtaaccagccagagagctggattgcagaacttctggcggcaaaagacaggacgcttgccgccgcaacggcaaaggcggaaggattgtatctggtggcggtggattacccggcgcgctacgacctccctgtcatgccgatgggcccgctgtttttggcggactaa

SEQ ID NO: 175600 - DNA, 1014 bp, Klebsiella oxytoca
atgtctgaaggctggaatattgccatactgggcgcaacgggcgccgtaggcgaagccctgctcgaaactcttgccgatcgtcagttcccggtgggggatatttatgcccttgcgcgtagcgacagcgccggtgaacatctgcgttttgcgggcaagtcggttctcgtacaggatgcggcggagttcgactggacccaggcccagctggcattttttgccgcgggtgtagaagcgaccgcagcgtatgtcgaagaggccacgaacgcgggctgcctggtgattgacttaagcggtctgtttgctctggagccggatgtgccgctggtggtgccggatgttaacccgttcgtactggcggattaccgcaaccgcaacgttatcgcggtagcgaatagcctgacaagccagctgctgtcggcgttaaaaccgttgatcgatcagggcggcctgtcgcgtataagcgtaaccagcctgctttctgcttccgctcacggtaaaaaagcggttgatgcgctggcgggccagagcgctaaattactcaatggtatgccaatcgatgacgatgatttcttcggccgccagctggcgttcaatatgctgccgctgctgcccgatcgtgaaggaagcgtgcgcgaagagcgacgtatcgtcgatgaagcccgcaagatactgcaggatgacggtctgatgatctccgctaacgtcgtgcagtcgccggtgttctatggccacgcgcagatggtgagctttgaagcgcagcgtccactggcggccgaagaggcgcgcgatgcctttagccgcggggaagatatcgagctgtccgaagagggcgaattcccgacgcaggtcggggatgcttccggcaacgcccgcctttccgtcggctgcgtgcataacgactatggtatgccagaacaggtgcagttctggtcagtcgccgataacgttcgttttggcggcgcgctgatggcggtgaaaatcgctgagaagctggttcaggagtatttgtactga

SEQ ID NO: 175601 - DNA, 1137 bp, Klebsiella oxytoca
gtgaaaatcctcgttgatgaaaatatgccctatgcgcgtgagctttttagccgcctgggggaagtgaaggccgttgcgggtcgtcccgttccggtcgaagcgctcaatgacgctgatgcgctgatggtgcgatccgtcaccaaagttaacgaagcgctgctctccggcaaggctatcaaatttgttggcaccgcaacggcaggcaccgaccatgtcgatcaggcgtggctgcagcgggcgggaatcggtttttccgcggcgccgggctgtaacgctatcgcggtggtggaatatgtcttttcagcgctgctcatgctggctgaacgtgatggctttgcgctgcgcgaccgtaccgtcgggatcgtgggcgtcggcaacgtgggcgggcgcctgcacaaacgtctcgaagcgctgggaattaaaacgctgctttgcgatcccccgcgcgccgatcgcggcgatgagggcgacttccgtcctcttgacgagctggtgcaggaagccgatattctgactttccatacgccgctctataaggaagggcagtacaaaacgctgcacctggcggatgaggcgctgattcgccgcctgaagccggggacgatattaatcaacgcctgccgtggggcagtggtggataacgctgcgctgcttaaacgactacaggaaaatcagccgttaagcgtggtgctggatgtctgggagccggagccggacctgaatatcgaactgctcaagcgggtggatattggtacgccgcatattgccggctacacccttgaaggaaaagcgcgcggtacgacccaggtttttgaggcctacagcgcgtttattggccacccgcagcaggtggcgctggacacgctgctaccggcgccggagtttggccgcattacgttgcacgggccgctcgatcaggcaacgctaaaacggctgacgcatttggtgtatgatgtgcgccgcgatgatgcgccgctgcgaaaagtcgcgggcgttgcgggcgagttcgataagctgcgcaagaattaccaggaacgtcgcgaatggtcttcgctgtacgtgcagtgtagtgatgcccaggcggcgacgctgctgcgccagcttggctttaacgccgtacatcatcctgttcgttaa

SEQ ID NO: 175602 - DNA, 960 bp, Klebsiella oxytoca
atgacgcatcccgtttcaggtatgtccgatcgccctccggggacaggcgaacctccgctcactacccagcagcgcaccgcgcttgagcggctcattacgcgcctggtggcgttaacatcgcagcaaagtgcggaagtgtgggcctgcgtaaagcacgatctgagcctgaaaaacgacgccccgctgttggcaagccattttgcggccgccgaacacagcctgaaccagcgcttaatccttgcccaacagaatcaccaccgccggcaaatcctggcgcagctgagcgaactgctgaaccagggtaataatcgtcaggcggtcagcgattatattcgtcagcatgacggtcaaaccgcgctgcatgcgctcacccagccgcagctggagaacgttttgcaactgctgcaaagcggccagctctcgattcctcagccgcagcagcgcccgccaacccatcgtccactgctgccagcggagcacaatacgctcaatcaacaggtgaccaaactggcagcagctaccggggagtccagcaagctcatctggcagtcgatgctggagctaagcggcgtcaaaagcggggaactgatcccggcgacccactttactcccctctcttactggctccatgcgcggcaaacgctcagtacgcaggctacgccgacgctgatgtcattgcaggccgccttgaagcagccgcttgaagccgcggagtggcaaagagtgatggattttgcgcaaaccagctggcacgcaacggcgcaaacgccgctaagcgcagcccagctgctgacgctgctgaacaaaattttcgtgctcagggtcgccagagcgcaagagacgctggcgatcccaccggttcaggcgccgccttcatcgccgtggctggcgtttaaaaagccgtgggctatcgcgttgacgctgctcgcggggcttattttgctgtggttagtgatttaa

SEQ ID NO: 175603 - DNA, 1176 bp, Klebsiella oxytoca
atgtccgcagtcactgaaacaaaaaaaacgccttcagcgaatggttcgctgtttcggatcactttcgccgtttttcttacctatatgaccgttggcctgccgctgccggttatccccttgttcgtccatcaggaactgggcttcggcaactccatggttggtatcgccgttggtatccagtttctggcgaccgtattaacccgcggctatgcaggtcgtctggcggaccagtacggcgcgaaacgctctgtgctacaggggatgctggcctgtgcgctggctggaggtgcctggctatgcgccgcgctgctgccggtccccgtaatggcgaagtttggcctgctggtgctgggccgtctgatcctggggtttggtgaaagccagctgctcaccggcaatttaagctggggaatggggctggtgggcccgatgcgctcaggtaaagtgatgtcgtggaacggcatggcgatatacggctcgctggcggccggagctccgctggggctgctgatctacagccattacggcgttgcagcgctggccggcgtcaccatggtgctgccgctggtggcgtgggcaattaacggcacggtgcgtaaaattcccgccctcggcggcgagcgtccgtcgctgtggagcgtggtgggaatgatctggcggcccggtattggtcttggactgcagggcgtcggtttcgcggtgataggcacgttcgtctccctctatttcgccagcaacggctgggcgatggccggttttaccttaaccgcgtttggtggagcatttgtgctgatgcgcgtgctgtttggttggatgccggaccgcttcggtggggtgaaagtggccatcgtttcgctgttgattgaggcggtaggactggcgctgctctggcaggcgcccaatgcctgggtcgcgctggcgggcgcggcgctaaccggctgcggttgctcgcttatcttcccggcgctgggcgtagaggttgtgaagcgggtaccgccgcaggttcgaggaacggcgcttggcggctacgctgcgtttcaggatatctcctacggcgtcaccggcccgcttaccggattgcttgcgacttctttaggctattcttccgtcttcctggcggcggcaatatgcgccgtgctggggatcctcattacgctggtatcgctgcgtaaatag

SEQ ID NO: 175604 - DNA, 1218 bp, Klebsiella oxytoca
atgaaacgtgcagtgattactggcctgggcatcgtttccagtattggtaataaccagcaggaagtcctggcatctctgcgtgaaggacgctccgggatcactttctctgaagagtttaaagattcgggaatgcgcagccacgtatggggcaacgttaaactggatacaaccggtttgatcgaccgtaaagtggttcgtttcatgaacgatgcctctatctattcctatctctccatgcagcaggcgattgaagatgcaggcctgaaagatgaggtctatcagcaaaacccgcgcgtgggcctgattgccggttctggcggttcttctaagtctcaggtttttggcgctgatgccatgcgcagcccgcgcggcctgaaagctgtaggtccttatgtggtgaccaaggcgatggcatccgcggtctccgcttgccttgcaacacctttcaaaatttacggtgtgaactactccatcagctccgcctgcgcaacgtctgcgcactgcatcggtaatgctgtggaacaaatccagctgggcaaacaggatatcgtgtttgccggtggcggcgaagagctgtgctgggagatggcgtgtgagttcgacgcgatgggcgcgctgtccaccaaatataacgaaacgccggataaagcttcccgtacttatgatacccaccgtgatggtttcgttattgctggcggcggcggtatggttgtggttgaagagctggaacatgctctggcgcgcggcgcgcacatctatgctgaaatcgttggctacggcgcaacttccgatggcgcagatatggttgccccgtccggtgaaggtgcggttcgctgcatgaagatggcgatggaaggcgtagatacgccgattgactatctgaactcccacggtacctctacgccggtaggcgacgtgaaagagctgggggcgattcgcgaagtcttcggcgataacagcccggctatctccgcgaccaaagcgatgaccggtcactccctgggcgccgctggcgtacaggaggctatctactctctgctgatgctggaacacggctttattgccccgagcatcaacattgaagagatggacgaacaggcagctggtctgaacattgtgaccgagccgaccgagcgtgcgctgactaccgtaatgtctaacagcttcggctttggcggtactaacgccacgctggtgatgcgtaaatacagcgcataa

SEQ ID NO: 175605 - DNA, 1989 bp, Klebsiella oxytoca
gtgaaacaaaacgccatacaacctgccaacctggaattcaacgctgagggtacacctgtttcccgagatttcgacgatgtctacttttccaatgacaacggtctggaagagacgcgctacgttttcctcgacggcaaccggctcaacgaacgtttttcaacacactcacgtccgttatttgtggttgccgaaagcgggttcggtaccggccttaactttctgacgctgtggcaggcgtttgacgtttttcgccgcgataaccctcaggctaccctgcaaagattacacttcatcagtttcgaaaaattcccgctgcgcgcggacgatctgcgcctcgctcaccagcactggccggagcttgcgccctgggccgagcagctgcaggcccgttggccgctgccgtttgccggctgtcatcgactgctgctggacgagggccgcatcacgctggatttatggtttggcgatattaaccagctgaccaacgagctggacgactcgctcaatcagcaggtagacgcctggtttctggatggctttgcgcccgccaaaaacccggacatgtggacggcggaactctttgcggcaatggctcgcctggcgagacccggcggcactctggccacctttacctccgcaggttttgtgcgccgcgggctggaggaagccggtttcagcatgcagaaacgcaagggctttggccgcaagcgagaaatgctcatcggggaaatgaatcaacgactcaactttcccgcgcgtgcgccgtggtttgcccgcagcggcactgaacagcgcgatgcggcgattgttggcggagggatcgccagcgccctgctcgctctggcgctgctgcggcgcgggtggcaggtgacactatactgcgccgatgacgctccggcacaaggcgcatccggcaatcgccagggagcgctctatccgctgctcagccagcacgaccccgccctggcccgctttttccccgctgcatttactttcgctcgccgcctctacgacgatctgccggtcatgttcgatcatgactggtgcggggtgacgcagctgggctgggatgaaaaaagcgcgcataaaattgcccagatggttgagcttaatctgccgccggaaatcgccctcgccgttaatgcgcagagcgctgcggaacaagcaggagtggaaaccggctgcggaggaataacctatcctgccggaggctggctgtgcccccagcagttaaccgcagaactgctggcgctcgccgccactcgcggattacgggttcactaccgatatcccgtagagactatcagcgcggacaataccggctggcaattaaacgatcgtcagtttcatgaagtcgtggtgctggccaatggccatcaggtaacccgcttcagccagacggagcatcttccgatgtatcccgtcgccggccaggtcagccatataccaacaacgccagggctatcgtctttacgccaggtgctgtgctacaacggctacctgacgccgcaaaacccgcacaaccagcagcactgcatcggcgccagctatcatcgtggacagacagataccgcgtttagcgccgacgatcagcagcagaatcgacagcgtctgatagactgtttcccgcaggcgcaatggacgcgggaggttgacgtaagcgcgaatgagtcccgctgcggcgtgcgctgtgcgacgcgcgatcatttgccgatggtcggcagcgtgcctgattatgacgcgaccttaagtgaatatgcctcgctggttgaacatcaggataaggccgaagcagcgccggtttaccgcaatctttatatgctgggtgcgctgggttcgcgcggcctctgctccgccccgctcgcggcagagatcctcgcggcgcaaatgagcaatgagccattaccgatggatcaagagacgctagctgcgctgaatccgaaccggctatgggtaagaaaactgctgaaagggagagcggtgaaataa

SEQ ID NO: 175606 - DNA, 279 bp, Klebsiella oxytoca
atgatcgcggagtttgaatcacgcattctggcgttaattgacaatatggtagaccacgccagtgatgatgaactgtttgccggcggttatctgcgcggccacctgacgctggcggtggccgagctggaaggagaaggggagcatactgcgcaggcggtgcatgataaagtgacccaaagcctggaaaaagccatcagcgcgggcgaactgtcgccgccggatcagatactggtgcagggaatgtgggacagtttgtatcagaaggcgatgcaggcgtag

SEQ ID NO: 175607 - DNA, 549 bp, Klebsiella oxytoca
atgaacagtacgcataaatacgaacagctgatcgaaatcttcgacggctgttttgccgttgattttaatacccgtctgattaaaggcgatgacgaaccgatctatcttccagcagatgaagaggtgccctacaaccgcatcgtctttgcccacggcttttatgccagcgcgctgcacgagatttcgcactggtgcattgccggaaaggcgcgccgcgagctggttgatttcggttactggtactgcccggacgggcgcgacgcgatgacccagtcaaaatttgaagacgtcgaggtgaaacctcaggcgttcgactggctgttttgcgtggcagcgggatatccgtttaacgtcagctgcgacaatctggaaggggattttgaacccgatcggatcgcttttcagcggcgggtacatgcccaggtcatgatctatctggagcaagggatccctgagcgtcccgcgcgttttatcaaggcgctgcaagaatattaccaaacgccgcctttgacggcagaacagttcccgtggccggaagacctgcactaa

SEQ ID NO: 175608 - DNA, 810 bp, Klebsiella oxytoca
atggatagttttatcgatctttttatggtgtcgccgacggtaatggtggtgctgtttttcgtggccattctggcgggatttattgactccctggcgggcggcggcgggctattaaccgtcccggccctgatggcggcgggtcttcctccagcgcaggcgctggcaacgaataagctgcaggcctgcggcgggtcgctgtccgcttcgctttatttcatccgccgcaaggtagtgaatctggccgaccagaagctcaatattctgatgacctttctcggctcgaccggcggcgcgctgctggtccagcacgtccagtctgatgttctcaaacagatactgccaatcctggttatcggcattggcctctattttctgctgatgccgaaactcggcgaagaggaccggcagcgacgtctgtacggtctgccgtttgccctggtggctggcggctgcgtcggtttttacgatggtttctttggcccgggcgccggatccttttacgcgctggctttcgtcaccctggcggggttcaatctggcgaaatcgaccgcgcatgcaaaattgcttaacgcgacgtccaacgttggcggcctgctgctgtttattattggcggcaaggtgatttgggcgaccggctttgtgatgatggccgggcagtttatcggcgctcgcgcgggatcgcgactggtgctgagcaaaggacagtcactgattcggccaatgatcgttgtggtgtcggcggtgatgagcgcgaaacttctttatgatagccatggacaggagatcctccgctggttggggatgaactaa

SEQ ID NO: 175609 - DNA, 825 bp, Klebsiella oxytoca
atgaaaaaaaccgttatcgcactgctggcgcttctcgccagcagtaccagcctggcggcaacgccgtggcagaaaatcacccagcccatcagcggcagcccgcagtcgatcggtgcatttgccaatggctgcatcgttggcgcgcaggcgctgccgttaaacgccaccggctatcaggtgatgcgtaccgatcagcgccgctacttcggccatccggatctcgtgcagtttattcagcgtctaagcaaccaggcgtataacagaggtatgggaacggtactgattggcgatatggggatgccagccggggggcgtttcaacggcggtcatgccagccatcagtccgggcttgacgtcgatatttttctgcagcttccgcaggcgcgctggagttcagctcagctgctgaagccgcaggcgctggatctggtggcccgcgatggtaagcgcgtcgtgccgtcgttgtggagcccgcaaattagccagttgattaagatggcggcggaagatagcgacgtcacgcgtattttcgtcaacccggcaattaagcagcagttgtgcctggatgccggtaacgatcgcgactggctacgcaaagttcgcccatggttccagcaccgggcgcatatgcacgtgcgcctgcgctgtccggcaggcagccttgagtgcgaagatcaggctccgccaccggccggcgatggctgcggtgcggaattgcaaagctggtttgacccccctaaaccaggatcaaccccacctgtgaagaagacgccgcctccgctgccgccttcctgccaggcgctactggatgagcatgttctttaa

SEQ ID NO: 175610 - DNA, 1086 bp, Klebsiella oxytoca
atggcaggaaacacaattggacaactctttcgcgtcacgacgtttggcgaatcgcacggcctggcgctgggctgtatcgtcgacggcgtaccgcccggcattccgctaaccgaagccgatctgcagcacgatctcgatcgccgacgtccgggaacatcgcgctatactacccagcgccgcgaaccggaccaggttaaaatcctctccggcgtattcgagggggtgactaccgggaccagcattggtctgctgattgagaataccgatcagcgttctcaggattacggcgcgattaaagacgttttccgcccgggtcacgctgactacacctacgaacagaaatatggcctgcgcgactatcgcggcggcggtcgttcctctgcccgtgaaaccgctatgcgcgtggctgccggagcgattgccaagaaattcctcgccgcgaaattcgggattgtgattcgcggctgcctgacccagatgggggatattcctctggctatcaaagattgggaacaggttgaacaaaacccgttcttctgtccggatccagagaaaattgaagcgctcgatgaactgatgcgcggcctgaaaaaagagggcgactccatcggagcgaaagtaaccgtggtggccgatggcgttccgccggggctcggtgagccggtatttgaccgcctcgatgcggacattgcgcacgcgctgatgagcattaatgcggtgaagggcgtggaaattggcgatggttttgaggtggtgaagcttcgcggcagcgaaaaccgcgatgaaattaccaaagcgggtttccagagcaaccacgcgggcggcattctcggtggtatcagcagcggtcagcagatcgtggcgaacattgcgctgaagcctacctccagtattaccgttccgggacatacgattaatcgctctggcgaagaagtcgagatgatcaccaaagggcgtcacgatccctgcgttggcattcgtgcggtaccgattgccgaagcgatgctggcgatcgtgcttatggatcactttatgcgtcagcgcgcgcaaaatggcgacgtgacgacatcaattccacgctggtaa

SEQ ID NO: 175611 - DNA, 1005 bp, Klebsiella oxytoca
atgctgatttatccccgtcttcgtggcaaactagccgccgaatttatagcagagcgtgccctgggggatagcgtggataaaatttttgttgatgaagccgttaatgagcttcataccattcaggacatgctgcgttgggcggttagtcgcttcagcgctgcaaatatctggtacggacacggtaccgacaacccgtgggacgaagcggtgcagctggtgatgccgtcgctgtatctgccgctcgatattccggaagatatgcgcaccgcgcgcctgacttccagtgagaaacaccgcatcgttgagcgcgtgattcgccgcattaacgaacgcattccggtcgcttatctgaccaacaaagcctggttctgcggacatgagttttacgtcgatgagcgcgtgctggtgccgcgctcgccgattggcgaactcattaataaccatttttccggcctgattgaccactatccgcagcacatcctcgatatgtgcaccggcagcggctgtatcgctatcgcctgcgcttacgcttttccggaagcggaagtcgatgcggtcgatatttcccctgatgcgctggccgttaccgagcagaacgtagaagaccatggcttaattcaccacgtgacgccaattcgctccgatctgttccgcgacctgccgaaggtgcaatacgatctgatcgtcactaatccgccgtacgtcgatgaagaagatatgtccgacctgccgggtgaatatcgtcatgaaccggttctcggcctggcgtccggtagcgatggcctgaagctaactcggcggatcctggcctgcgcgccggattatctcagcgatgacggtatcctgatttgtgaagtcggcaacagcatggtacatctgatggaacagtatcctgacgttccatttacctggctggagtttgaaaacggcggcgatggcgtctttatgctgactaaaccgcagctgattgccgcccgcgcgcatttcggcatctataaagactaa

SEQ ID NO: 175612 - DNA, 552 bp, Klebsiella oxytoca
atgaaaaagaaaacaacgctaagcgaggaggatcaggcattgttccggcagctaatgaccgacactcgtcagattaagcaggacaccattgttcaccgtccgcagcgcaaaaaaatcgctgaagtaccgcccaagcggctgctccaggagcaggccgataacagccactacttttccgatgagtttcagccgttgctgaataccgaaggatcggtgaagtatgtgcgtgctgacgtcagccactttgagctgaaaaaactgcgtcggggtgattattcgccggagctgtttctcgatctgcacggtttgacccagcagcaggccaagcaggagctgggggcgttgattgccgcctgccgtcgcgagcacgtattttgcgcctgcgtaatgcacgggcatgggaagcatattctcaaacagcaaacgccgctatggctggctcagcacccgcatatcatggcgtttcatcaggcaccaaaagagtacggcggtgacgccgcactgctggtactgattgaagttgaagagtggcaaccgccggagcttccgtaa

SEQ ID NO: 175613 - DNA, 387 bp, Klebsiella oxytoca
atggcaacctggctgaaaggtcaaaaagtggatattgagcgagttcttgtcagtccctacctgcgtgcagaacagacgctggaaatcgttggggagtgcatgaatctgccaaaagatgtcgacgtgatgccggaactcacgccgtgcggcgatgttggcatggtcagcgcttatctccaggcgctggcgaatgaaggtgtggcgacggcgctggtcgtgtcccacctccctctggtggggtacctcgtctcagagctgtgcccgggggaaactcccccgatgttcaccacttcggcgattgcctgcgttacgcttgatgccagcggcaaaggcgagttcaactggcaaatgagcccctgcaatttgaagatggcgaaagctatctga

SEQ ID NO: 175614 - DNA, 2148 bp, Klebsiella oxytoca
atgatggaaaccgtgtcggcatttacgcttgaggttcgcccggacaatatcgctgtcatcaccattgacgcgccaggtgaaaaaatgaacaccctgaaagctgagttcgccagcgaggtgcggggaattatccgtcagctccgcgacaataaagaactgcgcggcgcggtatttatttccgcaaaagcggataactttatcgcaggggccgatatcaacatgattgcccgctgtcattccgctcaggaagcggaggcgctggcccgtcaggggcagcaaatcatggccgagatccacgggctccccattccagtgatcgccgcaattcacggcgcatgcctgggcggaggcctggaactggcgctggcctgccacgggcgggtatgcagcgatgataataaaacccggcttggcctgccggaagttcagttgggcctgctgccaggttctggcggcacccagcgtttaccgcgattaattggcgtcagcagcgcgctggagatgatcctgaccggcaaacagcttcgcccgcgccaggctctgaaggcgggactggtcgatgaagtggtgccacagaccatcctgctacaaaccgcagttgaacgggctcttaaaggtcgtccggcaagccgtaccgtcccggcgcgcgaacgtattctcgcaggacctctcgcccgcagcctgctgtttcgtctggtagcgaaaaagacgcatcacaaaacccagggcaactacccggcaactgagcgcattctgcaggtgattgagaccggactggcgcagggctgcagcagcggatacgcagaagaagcccgcgcttttggcgagctggcgatgacgccacaatcgcaggcgctacgatcgatttttttcgccagcaccgatctaaaaaaagaccgcggtgcggatgcgcagcccgtcgcgctgcgtagcgtgggcattcttggcggaggactgatggggggcggcatcgcctacgttaccgcatgcaaaggagaattgccggtccgcattaaggacattcagccgcgcgggataaatcatgcattgaaatacagttgggatctgctcgataaacaggtgcgccgccgctatctgcgcgccagcgagcgcgatcgccagatggggttgattaccggttcgctggattaccagggctttgcccatcgcgatgtggtgatcgaagcggtatttgaagatctggcactcaagcagaaaatggtcagcgaagtggaacaacactgccacccggagacgatctttgcctctaatacgtcgtctttaccgatcgcagagatcgcggcgcaagcgagcagaccgcagcgggttatcggcctgcactttttcagcccggtagaaaaaatgccgctggtcgaagtgattccacatcgtggtaccgatcggcagactattgccacggtggtaaagctggcgaagctgcaggggaaaacgccgattgtcgtcgcggataaagccggattttatgttaaccgaattctcgcgccctatattaatgaagccatgcgcctgttaatagaaggggagccgatcgatcacattgataagtcgttgattcaatttggctttccggtagggccaattcagcttcttgatgaagtggggatcgataccggcactaaaattattcccgttctggaggcggcatggggagagcgttttagcccgcctgcaaacatcattagcgcaattctgaatgacgatcgcaaagggagaaaaaataaccggggtttctatctttatgcggcaaaagggcgtaaaagcaaaaaacggcccgacccggcgatttacaacctgctgggtatcgcttctccacaggcgcgcttgtccgcgcagcaggtggtggaacgctgcgtcatgatgatgctcaacgaagcggcgcgctgcttcgatgagcaggttattcgcaacgctcgcgatggcgatatcggcgccgtgtttggcattggctttccgccgttccttggtggcccgttccgctatatggatagattgggggcgggggaagtcgcagcgattttgcagcgtctggctgctcaatacggcccgcgttttacaccatgtgacactttgttacacatggccgaacagggggcgaccttttggcccgctgatgaacgtacgacctaa

SEQ ID NO: 175615 - DNA, 1311 bp, Klebsiella oxytoca
atgagtcaggcattaccgctagtcacccgtcagggcgatcgtatcgccatcgtcagcggtttacgtacgccgtttgcccggcaggcgacggctttccacggcgttccagccgttgatttaggtaagctggtggtcggcgaaatgctggctcgcagcaatatccccgcggatataatagacctgctggtatttggtcaggtggtacagatgccggaagcaccgaacatcgcgcgggaaattgtgctgggtaccggtatgagcgtacatactgatgcctatagcgtcagtcgcgcctgtgcgaccagctttcaggcggtggccaacgtcgcggagagcctgatggcgggaaccattcatgcaggcatcgccggcggggccgactcctcttccgtattgcccattggcgtgagcaaaaaacttgccagaacgcttgttgatgccaacaaagcccgcactttgggacagcgcctgaagctcttttcccggctgcgtttccgcgatcttctccctgtgccaccagctgttgccgaatattccaccggtctgcggatgggcgataccgctgagcagatggcgaaaacgtggggtatcacgcgtgagcggcaggatgcgctggcgcttcgttcgcaccagcttgcggcgagggcctgggaggaagggaaattaacggcagaagtcatgactgcctacacgccgccgttccgtgaacctctggaacaggataacaacatccgtaagaattcaacgctggcagattaccaaaagttacgtccggccttcgatcgcaaacacggtagcgtgaccgccgctaacagtacgccgttaaccgatggggcggcggcggtgatcctgatgaccgaatcccgggctaaagcgcttaggttaataccgctgggctacctgcgcagctacgcttttaccgcgattgatgttcgtcaggatatgctgctgggtccggcgtggtcgacaccgctggcgctggaaagagccgggctgacgctggccgatttaaccctgattgatatgcatgaagcctttgctgcgcaaacgctggcgaatttgcaatgcatggccagcgatcgatttgcccgtgaggtgcttggccgctctcaggctatcggcgaagtcgatgagagcaaattcaacgtgcttggcggttcgattgcctacggtcatccctttgccgccaccggcgcgcgaatgattacccaaacgctgcatgaactgcagcgtcgcggcggaggatttgggctggttaccgcctgcgcggcgggtgggttgggttcagctatggttctggaggccgaatga

SEQ ID NO: 175616 - DNA, 285 bp, Klebsiella oxytoca
atgagtaaatgcagtgctgatgaaaccccggtttgctgctgtatggatgttggtaccatcatggacaacaccgattgcaccgcatcttatagccgcgtgtttgcgaaccgcgccgaagcggaagaaatgcttgccgcattgagtgaaagagcgcgtaacgttgaatcggagccgtgcaaaatcaccccgacctttactgaagttgatggcggcgtgaagctggatatcgatttcgtgttcagctgcgaagctgaaaccctgattttccagctcggcctgcgttaa

SEQ ID NO: 175617 - DNA, 1365 bp, Klebsiella oxytoca
atgagccagaaaacccgccttacccaatctgcccttgcagtggctgtagcacttgtttcaagccaggcctggtcggcaggctttcagttaaacgaattctcttcatcgggccttggtcgcgcctattcaggtgaaggagctattgctgacgatgctggaaacgtcagccgtaacccggcattgattatgatgttcgaccgtccgactttctcgggcggcgctatttttgtcgatcctgatgtcaacgtcaccggcagttcagttatcggtaatgacgccagccaggacaatatcgcaccaaccgcatgggtacccaatctgcactttgtggcgccgattaacgaccagtttggctggggggcttctctgacgtctaactatggtttagccaccgagttcaacaatgattttgccgcgggctcaatgggcggtacaaccgacctcgaaaccctcaacctcaatctgagcggcgcctatcgtctcaacgatcactggagctttggtttaggctttgacgccgtctatgccagagctaaactagagcgctacgcgggcgatttaccggatattatcggcgcacagctaccgggaatggtgaaagcaggcaaactctctccggcccaggccgcggcaattggtcaacaggctggcggtatcagccgcgatacgcaaatcgctcgtctgaagggtgatgagtggggcttcggctggaatgcaggcattttatatgaagtcgataaaaacaaccgctacggcttaacctaccgctctgaagtcaaagttgattttgacggagattataagagcagtctgccgtcatccctcaaccctattaactctgccctcggtctgggactgccttacggcactggtggttcgacaatcggcggttctctgacgttgaatctgcccgaaatgtgggaaatctcaggttataaccgcgtagcgccaaaatgggccgttcactacagcctggcttataccagctggagccagttccaggagctgaaagccaccaaaaccagcggcggcgaaacgctgttctataaagacgaaggttttaaagattcctatcgtatcgctctgggtaccacctattaccatgacgataactggaccttccgtaccggtatcgcctttgatgatagcccggttccggcttccaatcgttccatctctatcccggatcaggatcgcctgtggctcagcgccggtacgacttacgcctttaataaagacgcttccgtcgacgtcggtgtgtcctatatgcacggtcagcacgtcgagtttacagaagggccgtatacctttaaatcagaaggtaaagcctggctgtacggcgcgaactttaactaccgtttctaa

SEQ ID NO: 175618 - DNA, 762 bp, Klebsiella oxytoca
atgaattttcgcctgtcggcgcttgcgcttggcgccacattgctggtggggtgcgccagttctggttctggcgatctaccgcaggggcgttcagatccgcttgaaggttttaaccgaaccatgttcaacttcaactacaatgttgtcgatccttatgttcttcggcctgttgccgtagcgtggcgagattatgttccgcagccggcgcgtaatggtctgagcaattttaccagcaaccttgaagaacctgcggtaatggtgaactccttcctgaagggcgatccctataaaggtatggtgcactttacgcgtttcttcctgaacacactcctcgggatgggtgggctggttgatgtagcgggaatggcgaatccaaaactgcaacgcgttgagcctgctcgcttcggtagcaccctgggtcactatggcgtgggatacggcccctatgtgcagttgcctttctacggcagctttacgctgcgtgatgagggcggtgatatggctgatgacttgtatccggttctttcctggctgacatggccgatgtctattggtaaatggatggtagagggagtcgaaacccgcgcgcagctgctggattccgatggcttgctccgtcagtcctccgatccgtatatcctgatgcgtgaagcttacttccagcgtcatgattttatcgccaacggcggtaaactttctccgaatgagaaccccaacgctcaggcgattgaaggcgatctcaaagatatcgattcacagtaa

SEQ ID NO: 175619 - DNA, 897 bp, Klebsiella oxytoca
atgaagccgcaaactcaccatgatagtgaagatgttgaggttgaaagtgaagaaaaacagaatggtgaagaaattgaggtggatgaagaacgcctgccttcacaggcgatggctacgcatgaagtgattcgccaggaaggagagaaagagcttgagcgcgatgccatggcgctcctctggtcagcgattgcagcaggactctcaatgggggcttcgctggttgccaaaggcatattccatgtccatctcagcgagctgcccggcggttttttgctggaaaatctcggctacacctttggctttgttatcgtcattctcgctcggcaacagctgttcaccgagaataccgtcaccgccgtcctgccgattatgcataaacccacgctcagcaatatcggcctgctgttacgtttatggggtgttgtactggcgggtaacttaattggaaccgctatcgcagcatgggcgttcgatgtcatgcccgtgttcgatgaaccgactcgcgaagcctttcttaaaatcagcctgaaggtgatgcaaaatcctccgctggagatgtttgccaatgcgattatctccggttggctggtcgcaaccatggtgtggatgtttcccgccgcaggctccgcgaaaattatcgtcatcatcctgatgacctggcttatcgccctagcggacactacgcatattgtggtgggcagcgtcgagattttctacctggtgttcaacggcacgctgccgtggcaggaattcatctggccgttcgcgctcccgacccttgccggaaacatctgcggtgggacctttattttcgcgttattaagccatgctcagatccgtaatgatatgagccacgagaagaaagcccgtgcggctgaagagagaaaaaagcgctaa

SEQ ID NO: 175620 - DNA, 870 bp, Klebsiella oxytoca
atgaccatggaaagaaaagaacggaacatatggaaactcaacaaccttccgccactggaatattgttcaatctctcgcgctcaaaaattattaaattgtgaattagaagatctgcttcattggcatgatattggtgcaataagcctttgcatcaaattaggcagaaccaacggaacgttaaagagtgctatccgccatcagcagggcggcaacaaaccctatttttttaacacatcaaatattgatgaattgagcagaagcgaaagatcgtggtcccctcactccaaaataaacaaaatttttagattcaatgaaagtgaaccgaacctggatgcccaatatggaacgcctgttacccagttaaaactccgggtttccgtatctggcctgtggtacagccacacgaggaatttaacggaagtactagaaaaccccgatagcatcattactgaacagcggatcagcataatttcaccggcaagaaacgtcctcttctgtcacttcacccccgatgaggatgagaagccaaccatcacgatgaataagctttacatcactaatcaggcgattgagaaaatttatgagcataccatcagcagccgccctctggaatttgcagaaaaaccgctaaatataattgaggataaagaggtgcataatccctcaattattcttcaaaataaactgctcattgaattcatcaatcacatcattcaagccaacccacactttggtgataatattctaaacgcaacggaaaacaataaaaataaaatattcaatatcgcaatggatagactaagggcagaaggcgtggtctccagctacggcagtattaatctcccggcatcagaatacacgctcaaatga

SEQ ID NO: 175621 - DNA, 906 bp, Klebsiella oxytoca
atgttgctgcgacatctcaattacttcattgccgttgctgaacaaggtagttttacgcgggccgcagcgatactgcatatttcgcagccggctttatcgcaacagattcgccagctggaggagtctctgggcgtacggctttttgatcgcagcgggcgtcatacttgtctgacggatgccgggaaggtgtggttgacgtacgcgcacagggcgcggcaggagctcgctgaggggcagcgtgcgcttcatgatgtggaggacctgcagcgcggttcgctacgtattgcgatgatgcctacctttacgacttactttgtggggccgctggtggcttcgttctatcaacgttacccaaatattacgctggatttgcaagagatgacccaggagcgaatggagaccatgttgctcaatgatgagctcgatatcggcattgctttcgaaggcaacgatgcgcgagatattgtttatcagccgctgctttcggaaaccctggcgctggtggtaggccggcgtcaccctctggcgacggccgaacgcgtcaagctggctgcgctcagtcaggaatctctgattctgctcagtcgcgctttcgcgactcgccagcaaatcgaacgttactgccggcagcgtgatattcaaccgaaagttcagatggaggctaactcgattagcgctctcctggccgtggtagaacgcacatcgctggcaaccctgcttccggcgtccattattctggcgcgtgacgatctcactgccattgaactcaccccaccgttactcgcgagaaccgcatgtctgctacagcgaaagggcgcctggcaaagcgccgcggcccgcgaatttatactgatggcgcatcgggctgcgatgaagatcagtgaaggtcttacagatactgaataa

SEQ ID NO: 175622 - DNA, 1188 bp, Klebsiella oxytoca
atgaatcagacgcaacgtaacggcgccatgctgctagtgttggtgcttatcggaatgaatatgcgtccgctgctgacatcgccaggcccgctccttccccagatacagcaggcaagtggtatgagcttcacgcttgcctccctgctcactgcgctcccggtgatcgcgatgggtctgctggcgcttgccggcggctggattaacagccgattcagcgaacgtcaaagtatcgccttcagtctgttaatcatcgccgccggagctttacttcgcgaactggcgccgcagagcgcgctattactcagcagcgcgcttcttggcgggatcggcattggtattatccaggcgctcattcctgcggtaataaaacgcctgtttcatcgtcggacgcctcaggtgatgggactctggtcagcggcgctgatgggcggtggcggtctgggagccgcatttacgccgtggctggcgcagcacagcgctatctggtatcacgcgcttgcgtggtgggcgctacccgcagcgacagcgctcctttgctggtggccgctaagcagaacgttacctgtccagacgccatcgacaatacagctctctgtttttcgccatcgtcgagcgtggatacttagcctctattttggtttgataaacggcggttacgccagtttgatcgcctggctgccaccctactatatgcagtcaggctatagcgcgcagtttagcggtacccttttggcgttaatgaccgtcggccagactggcggagcgctacttctgcctgttctggccaggcatgaagatcggcgaaagcttctgatgctggcgctggcgctgcagctcatcggcttctgcggctttatctggctaccgcagcagctaccgcttgcctgggctatctgctgcggtattggacttggcggcgcgtttccgctctgcctggtactggcgctcgatcacgcgaagcaccccgctatcgcgggtcgcctggtggcctttatgcaaggagtgggctttattattgcaggtatttccccctggctttcagggctgctgcggagcttaaacggcaatttccttccgggctggatgtttcacgccgcctgcgtcctggcgttaatgctcctcacattgcgttttgccccggcacgctatccgcaagagtggcaacatcagaactcagccactcgctaa

SEQ ID NO: 175623 - DNA, 1239 bp, Klebsiella oxytoca
atggctgaattcagtcctgaacgccgttttacgcgtatcgatcgtctccccccgtacgtttttaatattactgccgaactcaaaatggctgcgcgacgccgcggcgaagatattattgacttcagcatgggtaaccccgatggcgcgacgccgccgcatatcgttgaaaagctatgtaccgttgcccagcgccccgatacgcacggttattccacctctcgcggcatcccgcgactgcgccgggcgatttctcgctggtatcaggatcgctatgacgtagagatcgatccggaatcagaagcgattgtgaccatcggttcaaaagaggggctggcgcatctgatgctggcgacgcttgaccatggcgacaccgtgctggtgccgaatcccagctatccaattcatatttacggtgcggtgattgccggagctcaggttcgttcagttcccctcgttgaaggcgtggatttttttaacgagcttgagcgcgctattcgtgagagctatccgaagccgaaaatgatgatcctcggttttccatccaatccgacggcgcagtgcgttgaactggagtttttcgagaaagtcgtcgcgctggcgaagcgttatgacgtactggtcgtgcacgatttggcttacgccgatattgtgtatgacggttggaaagcgccttctattatgcaggttcccggcgcgcgcgatgtggccgtcgaattctttacgctctcaaaaagctacaatatggcaggctggcgtattggctttatggtgggtaacaaaacgttggttaatgcgctggcgcgcattaaaagctaccacgattacggcactttcactcctctgcaggttgcggctattgctgcgcttgaaggcgatcagcagtgcgttcgcgacatcgccgaacagtacaaacgccgccgggacgtgctggtgaaagggctacatgaggcgggctggatggtggagtgcccgaaggcctcgatgtacgtatgggctaagatccctgagcagtacgcggccatggggtccctggagtttgctaaaaagctgctgcaggatgctaaagtctgcgtttcacccggcatcggttttggtgattacggtgatactcacgtacgcttcgctttaatcgaaaaccgcgatcgtatccgccaggccgtacgcggtattaaatcaatgttccgcgccgacgggctgcttccggcagcggctaagttaaccagcgaaagcaacgaataa

SEQ ID NO: 175624 - DNA, 1698 bp, Klebsiella oxytoca
atgcacgaaatatttactatgctgctggcggtttttgaccgcgcggcattaatgctgatttgtctcttttttctcattcgcctgcgcctgtttcgtgaacttctgcataaatccgcgcacacgccaaaagagctgctggccgttaccgccattttctccctgtttgcccttttcagtacctggtccggcgtaccggtcgaaggttcactggtcaacgtgcgtattatcgcagtcatgtccggcgggatcctcttcggcccctgggtaggcgcgatagtgggcgtcattgccggcgtacatcgctatctaatcgatattgatggcgtcaccgccatcccctgctttatcaccagcattgtcgccggtctactctccgggttaatcagtcgtaaagtccctaaagcgcagcgctggaaagcggggatcctcgccgggatgctgtgcgaaaccttaaccatgatactcgtggtggcgtgggctccatcgttctcgctggggatagatatcgtgtcaaaaatcggtattccgatgatccttggcagcgtatgcatcggttttatcgttttgctggtgcagagcgttgaaggggaaaaggaggccagcgccgcgcgtcaggcgaaactggcgctcgacatcgctaacaaaacgctccccttgtttcgccacgtcaatagcgagtccctgcgtcaggtatgcgatattatccgccgcgatattaatgccgatgccgtcgccattaccaatactcaacatgtgatggcctacgtcggcgtcggggaaatcaactaccgggataacgacgactttatcagcccgacaacgcaacaggcgattcgctatggaaaaatcattattaaaaacaatgacgaagctcatcggacgccggaaatacactctatgctggtcattcctctatgggaaaaaggcatcgtcaccggtacgttaaaaatctattattgccacgctcaccgcataacctcatcgctacaggaaatggcgattggcctgtcgcaaatcatctcgactcagctggaggtctcccgcgcagagcagcttcgtgaaatggctaataaagccgaactgcgcgcactgcaaagcaaaattaacccccactttttattcaatgccctgaacgcgatttcgtcgtcgattcgcatgaatccggacaccgcgcgccagttaatttttaatctgtcgcgctatctccgctacaacattgaattaaaagatgatgaacaaatagacatcaaaagggagctgtatcaaatcaaggattacatcgccattgaacaggctcgcttcggcgacaagctgacggtgatttatgatattgatgatgaagtcagctttatgatccccagcctgcttattcagccgctggtggagaatgcgattgtccacgggattcagccttgtaaaggtaaaggggtggtgaccatcggcattaatgagtgcggaaatcgggtacgaattagcgttcgcgatacggggaacggtattgaccctgcggtagtggcgagagtcgaggctaacgaaatgccgggaaataaaattggcctgctcaatgttcatcatcgggtcaagctgctgtacggcgaaggcctgcatatccgacgcctgacgccagggaccgaaatcgccttctatgtgcctcaccagcacgcgccccaggcggccagggagtcgctgctgtcatga

SEQ ID NO: 175625 - DNA, 738 bp, Klebsiella oxytoca
atgaaagtcatcattgttgaagatgagttcctcgcgcagcaagagctcacctggttgattaacacccatagcgagatggagattgtcggcacctttgacgacgggctggacgtactgaagtttttacaacacaacaaagtcgacgccatttttctcgacatcaatattccttcgctggatggcgtactactggcgcaaaatatcagccagttcgcgcataagccctttatcgtatttattaccgcgtggaaagaacatgcggtggaagcctttgagctggaagcctttgattacatcctgaagccctatcaggagtcgcgcatcattaatatgctgcaaaagctgaccagcgcctggcagcagcagcagcagccgagcgccggtgcgatgcctaatccggccagggaaaatgacaccattaacctgattaaagatgagcggattatcgtcaccagcatccacgatatttactatgcggaagcgcatgaaaagatgacttttgtttatacccgaagagagtcatttgtgatgccgatgaatattacggagttctgcaacaagctaccgacggcgcactttttccgctgtcaccgctcgtactgcgtcaacctgaacaaaattcgcgaaatcgaaccctggtttaacaacacctatattctgcggcttcgcgatctggagttccaggttccggtcagccgcagcaaggtcaaagagtttcgccagctcatgcatctgtag

SEQ ID NO: 175626 - DNA, 966 bp, Klebsiella oxytoca
atgacaaaatttgctttagtaggggacgtaggcggaacgaatgctcgtctggcgttgtgcgatctggcaagcggggagatctcccgtgcaaagacctattccgggctcgattatcccagtcttgaagctgttgttcaggtctatctggaagagcataacgtcaaggttgaggacggctgtatagccatcgcctgtcccattaccggcgattgggtggcgatgaccaaccacacctgggcattttctatcgccgagatgaaaaaaaatctggggttctcgcatctggaaatcattaatgatttcacggcggtgtcgatggcgatcccgatgttgaaagccgaacatctgattcagtttggcggcgcgaagccgattgaaggcaagccgatagccgtctatggcgcaggtaccgggttgggcgttgctcatctggttcatgtcgataagcgctgggtgagcctgccgggagagggcgggcacgtggattttgcgcctaacagcgaagaggaaggcattattctggaagagctgcgtaccgagctgggtcacgtctccgccgagcgcgtactttcagggcccggactggtgaacctttatcatgcgatcgttaaatctgacgggcgtctgccggaaaatctgcagcctaaggatgtgactgaacgtgcgctggccgatacctgcatcgattgccgtcgcgcgctatcgctattttgcgtcattatgggccgctttggcggtaacctggcgctgacgctcggtacttttggcggcgtgtatatcgctggcggcattgtgccgcgcttcctcgatttctttaaagcttcaggttttcgcggcggttttgaagataaaggtcggtttaaagccttcgtgcaggatatcccggtctatctgatcgtccacgacaatccggggctactgggatccggagcccacctgcgtcagactctgggacaggttctttaa

SEQ ID NO: 175627 - DNA, 1236 bp, Klebsiella oxytoca
atgctgcacccacgcgccagaaccatgctcctattatcgatacccgcaatcgtcattggtattgcttgcagtctggttttaatcgtggcgatgaaaatagccgccgttttgcaaaatatcctgtggaccagcctgcctgcgagcgtaggcatcaatgctgagggccctgtgtggacgatggctattctcaccggaaccggcatcgccgttgggctgatcgtgcgctttagtcccgggcacgcgggaccggacccggcaacagagtcgctgataggcgcaccggtcagcaccagcgcgctgccgggtctgcttgcggcgctgatagtgggtctggcgggcggcgttagcctggggccggaacatcctattatggtcgtgaatatcgccctggcggctgcggtgggcagtcgcctgtttccacgcattacccctctggactggacgattctcgccgcctccggcaccatcggcgcgctattcggcactccggtcgcggcggcgttgatattttcgcaaacgctgaacggcagcaacgatgttcccctgtgggacaagctatttgctccgctgcttgcggcggcagcgggttccctgaccaccagcctgttttttcacccccatttttcgctaccgctgccttatctgtcggagctgcgcttcgtcgacattattagcggcgccatcgtgacgcttatcgcgattgccgttggcatggtcgccgtctggtgcctgccgcgtctacacacgctgatgcatcgtctgaaaaatcctgtgcttacgctgggcgtcggcgggtttttattagggattctgggcgtcatcggcgggcatatcacgctatttaaaggccttgatgagatgcagcagttgccggtaagcctgacgcttggcgccaatgattacctgcttattgccgtgatcaagcttgcggcgctgatacttgccgccgcctgcggttttcgcggcgggcgtatttttcctgccgtgttcgtcggcgtcgcgatcggtctgatgctgcatgcacacgttcccgccgtgccggcagccatcacggtttcctgcgctatcctcggcctgacgctggtagtgacgcgtgatggctggctgagcctgtttatggcggcagtggtcgtgtcggataccacgctactgccgctactgtgcattgttatgcttccggcctggctgctgctggccggaaagccgttgatgattgccagaaagcatagcgattaa

SEQ ID NO: 175628 - DNA, 1662 bp, Klebsiella oxytoca
atgcaaccgacttataccattggcgattatctgctggatcgtctcgtagattgcggcatagaccgcttgtttggcgtacctggtgattacaatttacagtttctcgatagcgttattgcgcagcagaatttagggtgggtaggttgcgctaacgagctaaacgcggcctacgccgctgatggctatgcgcgtatcaaaggcgcaggcgcgctgttgaccacctacggcgtcggcgaactgagcgcgcttaacggtattgccggcagctacgccgaacatgttccggttctgcatattgtcggcgcaccctcaaccggcgcgcagcagcgcggcgagctgctgcaccatacgctgggcgacggtgatttcagccacttctcgcgcatgagcgagcagattacctgctctcaggcggtactggcggcgggaaatgcctgccatgaaattgaccgcgtactcagcgagatgctcacccatcatcgccccggttatttgatgctgcctgccgatgtggcgaaggcaaaagcgacaccccctgcacatcctttgcttattccgaatctgcctgccgatgagaaccagctggcgggattccgagagcacgcggagcggatgctcagaagtcgtcgtcgcgtatcgctgctggctgattttcttgctcagcgctatgggctacaaaatgttctcagaaaatgggtcgccagcgtgcccgtctcctgcgccacgatgttaatgggcaaagggctttttgatgagcaacaaagcggttttgttggcacttacagcgggattgcgagcgcagaggaaacccgcgaggccattgaaaacgttgacaccattatttgtatcggcacccgttttaccgacaccattaccgcgggctttacccagcatctgccgcaggaaaaaacgattgaaatccagccgtttgccgttcgggtaggcgaccattggttcagccgggttccgatggataaggcgctcgaaatagtcatcgagctctccgcaagtctggcgggggaatgggtgccgccgaatattcaggcgcccggggtgagcggcgcgcctgaaggaagcctgacgcagaaaaacttctggagtacggtgcaggaacagctccgcccgggagacattattcttgccgatcagggaaccgcggcttttggcgccgccgcgcttaagctgcccactgacgcaacgctgattgtccagccgctatggggatcgataggtttcacccttccggcagcctacggggcgcaaatagcagcggtggacagaagggtcgtgctgattgtcggcgatggcgcagcgcagttaactattcaggaactgggatcgatgctcagggataagcaacgtccgctgattctgttgctcaataacgaaggctatacggtggagcgcgcgattcacggccccgagcagcggtataacgatattgcgctctgggactggaatcgtctgcctgatgcttttgctcccgatgtcccgtcccgatgctggcgcgtgactcgcacgcatgagctgagagaagcgatgaacagcagcgtcgcctcagacagactgacgctggtagaggtgatgctgcccaaaatggatatccccgactttctgcgcacggtcactcaggcgctggaagagaggaacagtcgcgtttaa

SEQ ID NO: 175629 - DNA, 993 bp, Klebsiella oxytoca
atggtttaccaggcaaacaccacgcgatatcaaacgatggaataccgccgttgcggtcatagcgggctaaagctaccggcaatttctcttgggctttggcataatttcggcgacgaaacgcgggtggaaaccagccgtcagcttctgcgtcacgcattcgatctcggcatcacccatttcgacctggccaacaactacgggccaccgccgggttccgcggagagcaattttggtcgcatcctgaaagaggacttattgccctatcgcgatgaactgattatctccagtaaagccggttacaccatgtgggatggcccctatggcgactggggctcacgtaaatatctgattgccagcctcgaccaaagccttaaacgaatgggcctcgactatgtcgatattttctaccaccatcgtcccgatcctgaaacgccgctgcaggaaaccatgcgcgcgctggaccatctcgtccgccaggggaaggccctgtacgttggattatcgaattatcctctcgaacaggcccgggaagccgtcaatattcttaacgagctgggcacaccgtgtctgattcatcagcctaaatattccatgttcgaacgctgggtcgagggggggttactcgatttcctgcagagcgcaggggtgggaagtatagcgttttcaccgcttgccggcggccagttaactaaccgttatctgcatggcattccggcggattcccgcgccgccagcggcagtcaattcctgcaaccggatcagcttaccgaaagcaaactggaaaagattcgtcaacttgacgcagtggccgaagcccgcgggcagaagctctcgcagatggccctggcctgggtgctgcgcgacgagaaagtgacttcggtattgattggcgccagcaaaaccacgcagctcgacgatgcgattggcatgctgggaaaccgccgtttcaccgccgaagaacaggcaacgattgacgcaatccttgcggtgtaa

SEQ ID NO: 175630 - DNA, 348 bp, Klebsiella oxytoca
atgttcaggtcactgattttggctgcagtgcttctggcttcagcgccattggttgctaacgctggtgaaatcaccctgttgccatcaataaaattacaaattggcgatcgcgacaattatggtaactactgggacggtggcggctggcgcgaccgtgattactggcgtaaacactatgaatggcgcgataaccgctggcgtcgtcacgataacggctggcatcgcggctgggataaaggtaaagcctacgaacgcggctatcgcgaaggctggaaagatcgcgacgaccgacgcggcggctggggacgaggccatggcggccgcggccatggtcacgggcatcattaa

SEQ ID NO: 175631 - DNA, 1236 bp, Klebsiella oxytoca
atgacaaacagtcgcgttgagaatagcagcggtcgcgcagcgcgcaagattaagctcgccctgatggggcctgcgttcattgctgccattggctatatcgatccgggtaatttcgcgactaacatccaggccggcgccagctttggctaccaactgctatgggtggtcgtgtgggcaaatctgatggcgatgctgattcaggtgatgtcggcgaagctgggtatcgctaccggtaaaaatctggcagagcaaattcgcgaccactacccgcgtccggtggtgtggttttactgggtgcaggcggaaattatcgctatggcgaccgaccttgcagagtttattggcgcagccattggatttaagctggtgctcggcgtgtcattgctgcagggcgcggtattgacggggatcgcgacgttcctgatcctgatgctacagcgccgcggacaaaaaccgctggaaaaagtcatcggcggactgctgctgtttgttgcggcggcttatgtcgttgaacttatcttctcccagccggcgctggcgccgctggcgaaaggcatgctcgtaccgtctctgccaaccagcgaagcggtattccttgccgccggggtattgggggcgaccatcatgccgcatgttatctatttacactcgtcgctcactcagcacctgcacggggggacgcgcaaagagcgctataacgccacgcgctgggatgttgccatcgctatgacaatcgcaggttttgttaacctggccatgatggcgaccgccgccgcggccttccatttcaatggtcacaccggcgttgccgatctcgatcaggcctatctgacgctggagccgttgttgagccacgcggcagccaccatctttgggctgagcctggtcgccgccggtttatcctccacggttgtaggcaccctggcggggcaggtcgtaatgcagggttttattcgctttcatatcccgctgtggtttcgtcgggccattaccatgctgccttcattcattgtgattttgatggggcttgatccgacgcgtattctggtgatgagccaggtcttgctgagcttcggtatcgccctggcgctggtgccgctgctcatctttaccagcaatgcgcggctgatgggggatctggttaattcccggtgggtgaaagtgctggggtgggcgattgtcgcggtggttgtggtgctcaacggctggctgattgttggaacgctggtcggttaa

SEQ ID NO: 175632 - DNA, 1203 bp, Klebsiella oxytoca
atggaccgcgtcttgcactttattctcgcgatcgtagtggtggctattctggccctgttggtcagccacaaccgtaagcagattcgtattcgttatgtcattcagctgcttgtcattgaagtgctgctggcctggttcttcctgaactctgacattggtctgggttttgtgaagggcttctccgagatgttcgaaaaactcctcggctttgccaatgaagggacaaactttgtcttcggcaacatgaacgataaaggcctggctttcttcttcctgaaagttctgtgccctatcgtcttcatttccgcgctgattggtattttgcagcatattcgcattctgcctatcgtcattcgcgcgattggtaccgtactgtccaaaatcaacggtatgggcaagctggaatcctttaacgctgtcagctcgctgattctgggtcagtctgaaaacttcatcgcgtataaagatattcttggcaaaatgtcccgcaaccgcatgtacaccatggctgcgaccgcgatgtctacggtatccatgtctatcgtaggtgcgtacatgaccatgctgcagccgaaatacgttgttgcggcgctggtactcaacatgttcagtacctttatcgttctgtcgctgattaacccgtatcgcgttgacgaaagcgaagaaaatctgcagatgtctaatctgcatgaaggccaaagcttcttcgaaatgctgggtgaatatatcctggcgggctttaaggtggcgattatcgtggccgccatgctgattggctttattgccctgatctccgcgctgaacgccctgttcgccaccgttaccggctggtttggctatagcatctccttccaggggatcctcggctatatcttctatccggtggcgtggatcatgggcgtaccggcaggcgaagcgctgcaggtaggtagtattatggcaaccaagctggtttctaacgaattcgtcgccatgatggatctgcagaaagtggccgccacgctctcaccgcgtgcggaaggtatcatctctatcttcctggtctccttcgctaacttctcatctatcggcattatcgctggcgcaattaaaggcctgaacgaagagcaaggtaacgtggtttctcgcttcggcctgaagctggtttacggttccactctggtgagcgtgctttctgcgtctatcgccgcgctggtactgtaa

SEQ ID NO: 175633 - DNA, 2181 bp, Klebsiella oxytoca
atgattgatcattttaacattaagatcaaaaaaactctgctggcccttctggtctgctttatagccattccgctgtccagatttatttctcctcaaactattattgacggaaatcaaatttatctggcatggctgccgttgagcttaatgtatgctgtgctttttatttttggccgctatgccgttgctccattggtaatcgcgtttgcgattaccaatgcctggataatcgatctgaccttcactcaggcggttatcctgcttttttgccagctcttctcggtattcctctcctgcgctattgtccgttatcagcttggaaggcgctggcgcgccgggctgacggcgaaacatatgggcgtgagggttttctggggcggtttcttcgcgccaattctgctcaagatcacaatgtatctggcggggcgcttcttttcgtttccgctggcgatttccagctatttcggcaatatgtcggttatctacaccgttatcgatatacagagcctgattagcgctgcgttaatttttacgaccttcttttattatccgttgcggatgattatcagtccgcgatatgcgcgagtattctggcgcaatctttgtcattcatggcaagtgcgcgagcagcgagtatttacgctgtactggtttgtagcgctggcggcaatattactggtgctatgtacgccttatgattctgtttttattgctggttatttagttcctcttattttcattttgtactttattggtattagtcgtctggcgcatacgctgattcgcatttcgtggtccgtttcagcatttttactcgtggcctataaccagaattttttgcatggggtacaaagtgaatattccctgtcatttgtgctttcggtgctaatttgtttcactatctgtctgttttatatggcggatatctacgcgcgcagtgaaagaatgaagttcagatggcgagaccaggcggaagaagatccgctaaccggtttgcccaatttgcgtgcgctggagagtcatctgcagcgtaatactgcggttgccatcagcagtttgcgaatacagaatctggatttccttagccgccattacggcatgatgatgagagtagagagcaaacggcagatcgcctgtaagctacagccgctattgtctcagggcgagcggatttttcagcttcccggcagcgagctattgctggtgctaaacggccctgaacctgaggcgcgtttaaatcatatcgtttccacgcttaaccataaaaagttcagctggaacaaccagacgttggatctcgagtttggcgcatcgtggggaggctatagcggtaccgaatcggatattcacccgatgcttggtcagcttagctggctatcggagcaggccggcgcggctcgtcgcgtgttagcgcttgacgccgctcaggaacagatttccgatcaaacaagcgaacaggtccggctgcttgcgcagattaagcaggcgcttaacgagcgcggtctggtactgtatgcccagcccatccgcgatgccgcaggaaagggatactatgaagttctttgccgtatgcgctgcggtaataacatcattacgcccgataagtttattccgccgatcgcgcagtttaatctgagccagcgctttgatatgcaggtactggaaacgctgttcagctcgctcaggcaccatcaagggcagcacttctccgtgaatctgctgccctatacgctgatgcaaaaggatagcgcgacgcaaattatctcgctttttaaacgctataacctgtcggcggaggcgataacgattgaagtcaccgaagagcaggcgttttccgatgtggaaaccagtatgtataacatacagcagctgcgagaattcggctgcgctatcgctatcgatgattttggcaccggctacgctaactatgagcggctgaaaagcctgcaggccgatattttaaaaattgacggttgcttcgtgcgggatatcgaaaccgatccgctggacgccattatggtcaaatcgattatcgaaatggctaaggttaaaaagatgaaggtggtggcggaatacgttgaaacgccggagcagcgggaaaaacttcttcagctaggggtcgattacctccaggggtatctggtaggtaaaccgcagccgctgagcgagctgcggacgtaa

SEQ ID NO: 175634 - DNA, 354 bp, Klebsiella oxytoca
atgctcaaggaacgaatgacacctgaagaaatagcgcatctgactggcttcagtcggcaaaccataaacaaatgggtacgtaaagaggggtggcaaacctccccgcgccccggcgttcagggcggtaaagcgcgcctcgtacatgtcaatgagcaggttcgcgaattcatacgcagcgcgcagcgcgtggccgaaaacccggtcccctactccgcaacggataacgaactggaatctctgcttcttacgctgtgcaaagagatgacgccgggtgagcaaaagttgctgatgtcgctgctgttgcgtgaagggatcacaggattactcaaccgactgggtatccgcgatcggtga

SEQ ID NO: 175635 - DNA, 393 bp, Klebsiella oxytoca
atgatgaaacttaaagataaaatgacgccagcggagctcgccgagagtcttaacctcgcccgacaaaccattaaccgctgggccagagaacaaaaatggcggacggaaccgatacccggagtcaaaggggggcgcgctcgtcttatcgtcatcgacaggccggttatcgatttcctcgccaatattccggcgctacggcatctggcgatagataatcagctggctgaacagcccgtcaaatactttgtgaatgatgctgacgccatatggcggcagattgtcgaaaccatgcacctgatgaccccgaccgaacagttacacctgcgtgatcttcttgcgcgcgaggggattagcggatttctctcccggcttggtattactgatgcaaagtag

SEQ ID NO: 175636 - DNA, 1419 bp, Klebsiella oxytoca
atgaaaatcaaaactcgcttcgcgcccagcccgacaggctatctgcacgttggcggcgcgcgtactgctctctattcctggctttttgcacgtaaccacggcggtgagtttgtgctgcgtattgaagataccgatcttgagcgctccacgccggaggccattgaagccatcatggatggtatgaactggctgagcctggaatgggatgagggtccgtacttccagaccaagcgttttgatcgctataacgccgtcattgatgaaatgctggaagcgggcacggcctataaatgctattgctctaaagagcgtctggaagcgctgcgtgaagaacaaatggcaaaaggcgaaaagccacgttatgacggtcgctgccgccatggccacgaacatcatgctgatgatgaaccttgcgttgttcgttttgccaacccggaagaggggtccgttgtttttgacgaccagatccgcggtccgatcgaattcagcaaccatgagctggacgatctgattattcgccgtaccgatggttctccaacctataacttctgcgtcgtggttgacgactgggatatggaaatcacccacgttattcgtggtgaagaccatatcaacaatacaccgcgccagattaacatcctgaaagcgctgaatgcgcctgtgccggtttacgcccacgtttcgatgattaacggcgatgacggtaaaaaactatccaagcgtcacggcgcggtcagcgttatgcagtatcgcgacgacggctacctgccggaagcgctgctgaactatctggtgcgtctgggatggtccagcggcgaccaggagattttctctcgcgaagagatgattaagctgtttagcctgggtgcggtgagcaaatctgcgagcgcgttcaacaccgaaaaactgcagtggctgaaccatcactatatcaactcgctggccccggaatatgtggcaacgcatttacagtggcacattgagcaggaaaatatcgacacccgtaacggcccgcagctggctgagctggttaagctgcttggcgaacgctgcaaaacgctgaaagagatggcggcgagctgccgttatttctatgaagattttgccgagtttgatgccgatgcggcgaaaaagcacctgcgtcctgttgctcgtcagccgctggaagtggtacgcgataaattagccgctatcagtgactggacagcggaaaatgttcatcacgcgattcaggcgacggctgatgaactggaagtcgggatgggcaaagtcgggatgccgctgcgagttgccgtaaccggcgcaggccagtctccggcgcttgatgtgaccgtgcatgcgattggcaaatcccgtagcgtagaacgtatcaataaggcgctggcctttattgctgaacgcgaaagccaacaatcctga

SEQ ID NO: 175637 - DNA, 852 bp, Klebsiella oxytoca
atgagcgaacgtttaagcattaccccgctggggccgtatattggcgcgcaggtatccggcgtcgatattacccgcccgctgagcgacaaccagtttgagcagctgtatcacgcggtgctgcgtcaccaggtggtgttcctgcgcgagcagaatatcactcccgaacagcagcgggatctcgccctgcgctttggcgacctgcatattcatccggtctatccgcacgcgcccggcgtcgatgagattatcgtgcttgatacccacgacgataacccgccggataacgataactggcacaccgatgtcaccttcattgagacgccgcccgccggggcgatcctcgcggcaaaagagctgccgtcaaccggcggcgacaccctgtggaccagcggcattgcggcctatgaggcgctctccgggcctttacgccagctgttaagcggcctgcacgcggagcatgattttcgcaaatcgtttcaggagtataaatatcgtaaaagcgaagaggagcatcagcgctggctggaggcggtcgcgaaaaatccgccgctgctacatccggtagtgcgcacccatccggtgaccggtaaacaggcgctgtttgtcaatgagggctttaccacccgcatcgttgacgtcacggagaaagagagcgaggcgctgctcggcttcctgtttgctcacgtcactaaaccggactttcaggtgcgctggcgctggcagccgaacgacgtggcgatttgggataaccgcgtcacccagcactacgccaacgccgattacctgccgcagcggcgcattatgcaccgggcgacgattctcggggacaagccgtattaccgggctggttaa

SEQ ID NO: 175638 - DNA, 828 bp, Klebsiella oxytoca
atgagcgtggtcatcaatgataaaccgcgtcagcggaggctgaagtggcgctggccgttctcgcgtcagctcactctcagcgcggcgaccctggcggtactgctggctatctggtgggccgttgccgccctgcagctgattagcccgctgtttctgccgccgccggggcaggtattgcagaaacttatcactattgccggtccgcagggttttatggacgccaccctctggcagcacctggcggcgagcctgacgcgtatcgttatcgcgctgctggcggcggtactgctcggcgtgccggtcgggatcgccatggggctgagccccacggtacgcgggatcctcgacccgctgatcgagctttatcgcccggtgccgccgctggcctatttaccgctgatggtgatctggttcggcatcggcgagacctcgaagatcctgttgatctacctggcgatattcgcgccggtggcgatgtcggcgctggcgggcgtaaagagcgcccagcaggtgcgcattcgcgccgcgcaatctttaggggccagccaggcgcaggtgctgtggctggtgatcctgcccggcgcgctgccggagatcctcaccggcctgcgcattgggctcggcgtgggttggtcgacgctggtggccgcggagctgattgccgccacccgcgggttaggttttatggtgcagtccgccggtgagttcctcgccaccgacgtggtgctggccgggatcgcggtgattgccatcatcgcctttttactggaactggggctgcgcgcgctgcagcgtcgcctgacgccctggcatggagaagtacaatga

SEQ ID NO: 175639 - DNA, 768 bp, Klebsiella oxytoca
atgctgcaaatctcgcatctttccgccgactacggcggtaaaccagcgctggcggatatcaacctgacgctggacagcggtgaactgctggtggtcctcgggccttccggctgcggtaaaaccacgctgctgaacctgattgccggattcgtgccttatcagcacggcagcatcactcttgaaggcaggcgggttgaagggccgggagccgatcgcggcgtggtctttcagaatgaagggctgctgccgtggcgcaacgtgcaggataacgtcgcgctcgggctacagctggcgggcgtcgacaaaacgcagcgccgggcaaccgccgcgcggatgctgaaaaaagtcggcctcgaaggagcggaaaagcgctttatctggcagctttccggcggtcagcgtcagcgggtgggcattgcccgcgcgctggcggccaatccgcagctgctgcttctcgacgagccgtttggtgcgctggatgcctttacccgcgagcagatgcaaaccctgctgctcagcctgtggcatgagaccggcaagaaggtactactgatcacccacgatatcgaagaggcggtgtttatggccaccgagctgatactgctttcgccggggccgggccgggtgctcgaacggctgccgctcgattttggccgccgctttgtggccggcgaatcctgccgcagcattaaatcggacccgcggtttatcgaacagcgcgagtacgtcctcagccgggtatttgaacaacgggaggctttctcatga

SEQ ID NO: 175640 - DNA, 963 bp, Klebsiella oxytoca
atggcactatcatcgcgtatcacactcattgccgcgctggcgctggcggcattccaggcccaggcggtgaacgtcaccgtggcgtatcagacctccgccgaaccggcgaaagtcgcccaggcggacaacaccttcgccaaagcgagcggggcgaccgtcgactggcgcaagtttgacagcggcgcgagcatcgtgcgggcgctggcttccggcgacgtgcagatcggcaacctcggctccagcccgctggcggtcgccgccacccagcaggtgccgattgaagtctttctgctggcctcaaagctcggtaactccgaagcgctggtggtcaaaaagagcatcaccaaaccgcaagacctgatcggcaaacgcatcgccgtgccatttatctctacgactcactacagcctgctgtcggcgctgaagcactgggggattaaaccggggcaggtgcagatcctcaacctgcagccgccggcgattattgccgcctggcagcgcggcgacattgacggcgcctacgtctgggcgccggcggtcaacgcgctggaaaaagacggcacggttctcaccgactcgtcgcaggtgggggagtggggcgcgccgacgctggacgtgtgggtggtacgcaaagactttgccgaaaagcatcctgatattgtcaaagccttcgccaaaagcgccattgacgcgcagcagccctatatcgccaacccggatgagtggctgaagcagccggaaaacatcagcaagctggcgcgcctgagcggcgtaccggaagccgacgtgccggggctggtgaaaggcaatacctatctgaccgccgcccagcaggcgcaggagctgaacgggccggtgaataaagccatcatcgacaccgctaaattcctgaaagagcagggtaaagtccccgcagcgggaagcgactacagccagtacgttaccgaccgttttgtgaagtaa

SEQ ID NO: 175641 - DNA, 630 bp, Klebsiella oxytoca
atgattcgagtggtgctggtcgatgaccatgtggtggtgcgttcaggctttgcgcagttactcagcctcgaagaggatctcgaggtggttggccagttcagcagcgcggcggaagcctggccggcattattgcgcgacgacgtcaacgtggcggtcatggatatcgccatgccggatgagaacggcctgagcctgctaaagcgcctgcgcgcgcaaaagccgcagtttcgcgccattattctcagcatttacgacaccccggccttcgtgcagagcgcccttgatgccggcgccagcggctatctgaccaaacgctgcggcccggaagagctcgtgcaggcggtgcgttccgtcggtatgggtggacactacctgtgcgccgatgccctgcgggcgctgcgcggcggagagcaaccggcgcaggtgctcgaggtgctcaccccgcgtgaacgcgaagtgtttgatttgctcgttaaaggcgacagcgtcaaggaaatcgccttcaagctcgatctcagccacaagacggtgcacgttcatcgcgccaacgtgctgagcaaactgcagtgccacagcaccattgatctggtccatttcgccctcgaccaccagctgctggcgggtcattaa

SEQ ID NO: 175642 - DNA, 1542 bp, Klebsiella oxytoca
atgtcgcgcagccttcgtcacagcgtcatctcgctgttcatcgtgctggcctggggaagcggttggctgatgctgtggacgctcgggttttacctgacccataacggccagcaggcggcgctgttcctgcctcacggcgtctatctggcgctgctgatcctgctttcgcgccgctactggcccgcgctggtgctgcctcccgtgctgatgctgttctggctgcacggcgaacagctgctgaacggctatattctgctggccgcgccgttgatcggcctgcttcccgccggcatcgcccaacagttctggcaccgcttccccctttactggcagcggctgacgctgctgctggccacggttaccgccagcgcattactcaacaccgccctgctctcgccgtttgtgaaaagtccggcgatgatgctcggtctggcctcgtttaccggcggggtgctgctgacgccgtttgtctatctgatttttgaattcctgcgccagcagcaccgctaccacctgctggggctggataccaataatccgccgctgcgcacctcattgatcatctggtgcagcctgttctttattattggcatcggcacccaaatggttctgtcgccggaaatcgagcgtctgctgttaattgtggtgtttctgcccaacgtggtgatggcgtggaagttcggctggcagggcggcgttctctccggtctgctgggcagcatgatgatcaccatcgcccgccaggttggcgtcggattcagcaacctggtggagctggagatttttctggcgacccaggcgctgctcggtatcgggctggggattgccatcagtcgccagcagcacctggcgcaaaacctgcaccactatcgtcagcggctggaggcggagctggcggcgcggcgggcgctaaccgaaaagctgatccataccgaagaggatacgcgcaaaagcctggcgcgcgagctgcacgacgaaatcggccagaatattaccgccattcagatccagtcgcagctggtgaagcgagcgcgcgatccggcgcaaacccaggccgccgccagccagattaacgatctcgcccggcgtattcaccactctacccgccagctgctgcgccagctacgccccccggcccttgatgaactgtcgtttaaagaggcgctgcaccatttgctcaatgagtttgcctttgccgagcgcggtatccgctgccgctttgactaccggctcaccgccacgccggagagcgaaacggtacgttttaccctctatcggctgctacaggagctgcttaacaacgtctgtaaacacgccgacgccagcgaggttgccattgctctgtatcagcaggggacgctgctgcgcctggaggtcaaggacaacggcatcggtatcagccccgacaaaatggccggcttcggcattcagggcatgcgtgaacgggtcagcgccctgggcggagagctgaccctggagtcgcagcatgggacgcgggtaattgttaacttgcccacaaatttgcaacaaacagccggctaa

SEQ ID NO: 175643 - DNA, 1296 bp, Klebsiella oxytoca
atgcgctcagcaaccgacattaatcaacattaccggacgctgcgtccgcagctgctgatgtacatggtcatcggatatgcggcgttttacctgacgcgcaaaagcgtcaactacgtattgccggcgctgcaaacggatctgggtctggataaaggcgatatcggcctgctgggatcgctgttttacctgacctacggtctgtcgaagtttaccgccggactgtggcacgacagccacgggcagcgctggtttatgggcgtgggcctgttcgccaccggtctgctgaacgtggtgttcgccttcggcgaatcgctgacgctgctgctggcggtctggacgctgaacggattttttcagggctggggctggcctccctgcgcccgcctgctgacccactggtactcgcgcaacgaacgcggcttctggtggggctgctggaatatgtcgatcaatatcggcggagcgattatcccgctgattagcgcctttgccgcccactggtggggctggcaggcggcgatgctggcaccggggacgatcagcatggcatcaggcatctggttaacgctgcacctgaaaggaacgccccgcgaagagggattgccgtcagtaggccgctggcgtaacgacccgctggagctgcgccaggagcagcaaagcccgccgatggggctatggcagatgctgcgcaccacgatgctgaagaatccgatgatctggctgctgggcgtctcttacgtgctggtctatctgatccgcatcgcgctcaacgactggggcaacatctggctgacggagagccacggcgtcaatctgctcagcgccaacgccacggtgatgctgtttgaagcgggcggtctgctcggggcgttgttcgccggatggggctcggatctgctgttcagcggccagcgggcgccgatgattttactgttcacgctggggttgatggtctccgtcgccgcgctttggctggcgccggtccatcactacgcgctgctggcggtgtgtttctttacggtgggcttcttcgtttttggcccacaaatgctgattggcctcgcggcggtggagtgcggacacaaagcggcggcgggttcaattaccggatttcttggcctgttcgcctatctgggggcagcgctggcgggctggcctctgtcgctggtcattgaacgctacggctggtcgggcatgttcagtttactctcggtcgccgcagttctgatgggtttattgctgatgccgctgctgatggcgagcattactacctctgctgctcaaaggataaaataa

SEQ ID NO: 175644 - DNA, 1032 bp, Klebsiella oxytoca
atgaaaaaaacgctggtcactaccctgattgcttccggcattgcgctggcgacgttaagcggcgcggcgcacgccaaaggtcgtctggtggtctattgcagcgccaccaacgaaatgtgtgaggcggaaaccaaagccttcggcgaaaaatatgacgtaaaaacctcatttattcgcaacggttccggcagcacgctggcgaaggtcgatgccgagaagaaaaacccgcaggcggatgtctggtacggcggcaccctcgacccgcagtcccaggccggtgaaatgggcctgctgcagccctataaatcgcccaatcttgcgcaggtgatggagcagttccgcgatccggcgaagctgaaaggcaactactcctcggcggtgtacgttggcatactcggcttcggcgtgaacacccagcgcctgaaagagaaaaatctgccggtgccgaaatgctggaaagatctgactaaaccggaatataaaggcgaaattcagattgccgacccgcagagttccggcaccgcctacaccgcgctggcgaccttcgcccagctgtggggggacgatcaggctttcgattatctcaaacagcttaacgctaacgtctcccagtacacgaagtccggtatcgccccggcccgcaacgccgcccgcggtgaaacggccatcggcatcggcttcctgcacgactattcgctggaaaaagaacagggcgcgccgctggagctgatctcgccgtgcgaaggcaccggctatgaaattggcggcgtcagtatcctgaagggcgcgcgcaaccttgacaacgccaaactgtttgtcgactgggtgctgtcgaaagatgcccaagagctggcgtggaagaaaggcaagtcttatcagatcctgaccaacactaccgccgacacctcgccgaactcgctgaagctcgacgacctgaagctcatcaactatgacatggataaatacggctcaacggacgtgcgtaaagcgctaatcaataaatgggttagcgaagtgaagatgggtaaataa

SEQ ID NO: 175645 - DNA, 2079 bp, Klebsiella oxytoca
atgtcacacacacttgcactccatcccgtgaaaaagcgggatgcgatattcctttgggttttattcggctggctggcgtttgccctgctgccgagctggagcctggattacggtctgctggagtccacgagcgatgaaattctcgcggcctacggctggtcacagttcaatatcagctggctgtggtatctgttaccgagcctgctgctgattcgtccctttcaggaagccaggcgggagcagcgcagccgccactatctcgatgctggctgggcgttctgctgtatggcgtttatcgtcgtcagcgccaccgtggaaggccgcggattaggctacgccaccatcgtgctgtttgtcgcgctgggggccatcatgaccctggcgctcacccgcctggaatggctggggggcgaccgctttgtcattggttcgctggtcaccatcgtggcgttaatcggcgtctttatcgtctggccgagcatcgctattttcatcccgatgttcactaacgacgccggcgagtttgccccgctggcgtttatggccgtgctgtcgcaggcgcatattgtccaggtgatcctcaactccatcgccctgtcgattgcggtaggcatcggctgcactttctttggtctggtgctggcgatttacaccacccgtatcgcccagcgcagcgcgattattggccgcattttctcgattctgccgatcgtcaccccgccgtttgtcgtcggtctcggcgttaccctgatgatgggccgttccggctacgtcaccgaactgatggtcgactggtttggcttaaccaacaccaactggctgtacggatttaccggcatctggctggcgcaggtgctggcgttcaccccgatggcgtttatgatcctcgacggcgcgattaagaccattcatccgtcgctggaggaggcgtcgtacaccctgcgcgccagccgctggcagaccttcaacggcgtcttcgtcccgctgctgaaaccggcgctggcgaacgcgtttttaatcgtcatcgttcagtcgctggccgacttcagcaacccgctggtgctcggcggcaacttcgacgtactggcgacgcaaatctacttctatatcaccggttcgcagctcgattatcaggccgccagtactctcggcgcattcctgctgctgttctcgctgctggtgttctgcattcagtatatgtggatcggcaagcgctcttacgtcacggtttccggcaagtcctaccgtggcgacgtgcagccgctgccggtgaccctggtgtggagcgtgatcgccattctggcggtgtggatcgccttcaacgccctgctctacggcagtattttctacggcagctttaccgttaactggggcgtggactacaccctgacgctggataactttatcaagctgttcggccaggggatgagcgacggcgcctggccttcgctgctcgatactctgctttacgccgggatcgccgcgcccatcaccgccgctttcggcctgctgatcgcctggatcgtagtgcggcagcagtttaaaggcaaaaagaccatcgagttcaccaccatgctgtgcttcgcggtgccgggcaccgtggcgggcgtctcctatattctcgcctttaacagcgcgccggtgtacctcaccggaacggcggcgattgtgattatctcgatggtcatgcgtaacgtgccggtgggcattcgggcaggtattgccggtttaggccagatcgacaaatcgctggacgaagcgtcgctcagtctgcgcgcgggttccctgcgcaccattacgcatatcctgctgccgctgctgcgcccggcgatcctctcggcgctgatctacagctttgtgcgcgccattaccaccgtcagcgccattgtgttcctcgtgacgccggacacccgcgtcgctaccgcctatatcctcaaccgggtggaagacggcgaatacggcgtggcgatcgcctacggatcgattctgatcgtcgtgatgctggcgattatttttatctttgactggctgatcggggaagcgcgtatctcccggtcaaaagccaaaaaccaggcgtaa

SEQ ID NO: 175646 - DNA, 1047 bp, Klebsiella oxytoca
atgagtcagaaaaattttgttgagctgcgcaacgtcaccaagcgattcggcagcaacacggttatcgacaatatcaatctcaccatccctcagggacaaatggtgaccctgctcggcccttccggctgcggcaagaccaccattctgcgcctggtcgccgggctggaaaaaccgagcgaaggacagattttcatcgatggcgaagacgttactcatcgctccattcagcagcgcgacatctgtatggtatttcagtcttacgccctgtttccgcatatgtcgctgggggacaacgtcggctacggtctgaagatgctcggcgtgtcgcgcagcgacgtgaaagcgcgggtgaaggaggcgctggcgatggtggatctggaaggattcgaagatcgctatgtcgatcagatctccggcggtcagcagcagcgcgtggcgctggcgcgcgccctgatcctcaagccaaaggtgctgctgtttgatgagcccttaagcaacctagatgccaacctgcggcgcagcatgcgcgataagatccgcgagttacagaagcagtttgatatcacctcgctgtacgtgacccatgatcagagcgaagcctttgcggtttccgataccgtgctggtgatgaataagggacatatcatgcagatcggctcgccgcaggatctttaccgccagcccgcatcgcgctttatggcgagctttatgggcgatgccaacctgttcccggccgcctttagcgaggattttgtcgatatttatggctatcggctgccgaggccgccgcattttgccgcccagggcgagggcagcgtcggcgtgcgcccggaggcaatcaccctgagcgatcgcggcgaggagagccagcgctgcacgattcgctacgtggcctatatgggaccgcagtacgaggtgacggtagagtggcacgggcaggaaattttgctgcaggtgaacgcgacgcggctgcagccggatgtcggcgagcactattatctcgaaatccacccgtacgggatgtttgtgttagcggatgccgggtga

SEQ ID NO: 175647 - DNA, 933 bp, Klebsiella oxytoca
atgtcgcagaataatccgttaaccgccctcattgacgcaaagccctttatcctgctggacggcgcgatggcgacggagctggaagcgcgcggctgcaatcttgccgacagcctgtggtcggcgaaagtgctggtcgacaacccggagcttatccgcgaagttcacctcgactatttccgcgccggcgcgcaggtggcgatcaccgccagctatcaggccactccggcaggttttgctgccctcggccttgatgaagcgcagtcgaaagcgctgatcggcaaaagcgttgagctggcccgcaaggcgcgggaagcgtatctggcggaaaacccgcaggcgggcgcgttgctggttgccggttcggtcggaccgtacggcgccttcctggcggacggctcggagtatcgcggcgattatgtccgcagcgatgaggaatttcaggcatttcatcgtccgcgcgtggaagcgctgctcgacgccggggccgatctgctggcctgtgaaacgatgccgaatttcgccgagatgaaggcgctggcggagctgctgactgcctatccgcgcgcgcgggcatggttctcgtttaccctgcgcgatgcgcagcatctcagcgacggcacgccgctgcgggaagtggttgccgtgctggcaaactatccgcaggtggtggcgctgggcattaactgtatcgcgctggaaaacaccaccgccgcgctggcgcatctgcatagcctgacggcgctgccgctggtggtttatcctaactccggggagcactatgacgcggtatccaagacctggcatcgccacggcgaagcctgtgcaacgctggcggaatatttaccccagtggctggcggcgggcgcgaagctgattggcggctgctgccgcacgacgccgaaggatattgccgaactgaacgcgcggcgttga

SEQ ID NO: 175648 - DNA, 1434 bp, Klebsiella oxytoca
atgtctatacgcccatggggtcaaatgcaaacaacacaacaacaacaaggtgggcagcttaagcgcaccatgaagactcgccacctgatcatgctgtcgctgggtggcgttattggcacagggctattttttaataccggctatatcatctccaccaccggagcggcgggcacgctgctggcctatctgattggcgcgctggtggtctggctggtgatgcagtgtctgggcgaactttcggtggcgatgccggaaaccggggcgtttcacgtctacgccgcgcgctatctcggcccggcgaccgggtataccgtcgcctggctctactggctgacctggaccgtcgcgcttggctcaagcttcaccgccgccggattctgcatgcagtactggttcccgcaggtgccggtatgggtctggtgcgtggtgttctgcgcggtgattttcgcgctcaacgttatctccacccgcttctttgccgaaggtgaattctggttctcgctggtgaaggtggtcaccattatcgcctttattattctcggcggggcggcgatctttggcatcattccgatgcaggatggctctccggcgccggggctgcgcaatatcaccgccgaaggctggttcccgcacggcggtctgccgatcctgatgaccatggtggcggttaacttcgctttctccggcaccgagcttatcggcatcgcggcgggggaaacggagaatccgcataaagtcattccggtggccattcgtaccaccatcgcccggctgattatctttttcatcggcaccgtcttcgtgctggcggcgctgatcccgatgcagcaggcgggagtcgagaaaagcccgtttgtgctggtgtttgaaaaggtcggtattccctacgcggcggatatctttaactttgtgatcctgacggcgattctgtcggcggccaactctggcctttacgcctccgggcggatgctgtggtcgctctccaatgaaaaaacgctgccgtcctgttttaccaaattgaccaggaacggggtgccgctgacggcgatttcggtcagcatgctcggcggcgtgctggcgctcttctccagcgtcgtggccccggatacggtgtttgtcgcgctgtcggcgatttccggttttgcggtggtggcggtatggctgagcatctgcgcctcgcactttatgttccgccgtcgccatctgcagcaggggaaggcgctaagcgaactgcactatcgcgcgccgtggtatccgctggtgccggtgctgggatttgtgctttgcctggtagcctgcgtgggtctggcgtttgacccgagtcagaggattgcgctgtggtgcgggatcccgttcgtggcactgtgttatggtgcgtattatctgactcgttcacggaaactcacccaggagcctcaacatgtcgcagaataa

SEQ ID NO: 175649 - DNA, 1383 bp, Klebsiella oxytoca
atgataccccgcgctttgcctctgtgggccgccgctgccgccgtcggccttctaccgctgcacgccgctcaggccgcgagttccgtgaagtttcccgataaagtctgtgatatcacccactacggcgcagaaggccatcggctgcaaatcgcgctcaacaccgatgccattcaaaaagcgattgatgactgcgccgccgccggagggggaacggtgctggtgccgaaaggtaatttcctcaccaacccgctgtttctgaagaataatattcagcttaagctggagaaagacgccaccctggtggcctcaaccgaagtggctgcctatcgcggcgatgataaaacgcgatacgccgaagcggaaaacggctggctgccgtttattagcatcgccgacgcgcaaaacgtggccatcgtcggtgaaggcactatcgacggccagggcgcagtgtggtgggaacgctggcgggaaaatatccgcgccaccggcaagaaaggcgttaccgaccggccgcggctgatttatatcacccgcgccagcaacgtgcttatcgacggcgtgaccctcacccattcacccagcttccacgtggtcacccgctacgcgcacgatgtcgatatcaacggcacgcgtattctttcgccgtggcatgcgccgaacaccgacgccatcgatcctatcgatagccagaatatccgtattaccaacaactatatcgactgtaacgacgaccatattgccatcaaggcggagaaagccgacccgcgcttcccggacggcgtggtggataacatctatatcgccaacaacactctgaagcaggggcgcgggatctccatcggcagcgagagcgcaggcggcgtgaataacgtgctggtggaaaacaataccttcgaaggttcgatgtacggcattcggattaaaagcccgcgcggcaaaggcggcgaggtaaaaaatatcgtctaccgcaataccagaatgcataacgttgaggtgccgctggtgttctccgcctattacaaagccgcgccgattgtgcaggccgaggtcgataagctgttgcaggcaggcggctttaccctcggcgagcagatctatccgccggacagcgacccgaaacagccgttcgataaatacaagactccgcacttcagtaacatcaccgttgagaatttaacctccaccggcgacagcaaagcggcggcctatattatcggtaccccggaagcgccgctcagcggtttccattttagcaacgtcaatattgaagccgaccgcggcctgcgcattcgcaatgccgagctggagagtaaaggacttaacctgcaggtgaaagcaggtccggtaattcaacaagacgctggcgccatcgtgcaccagtaa

SEQ ID NO: 175650 - DNA, 1380 bp, Klebsiella oxytoca
atgacagagcaaaccacaacgcttaaaagaacgctcggcagtttccgcttatgggggatcgccgttgggctggttatttccggggagtattttggctggagctacggctggtcccaggccgggacgctgggctttctgatcgtcgcgctggccatcgccgcgatgtactgcgcctttatttttagcttcaccgagctgaccaccgccattccgcatgcgggcggaccttttgcctacgcctaccgcgcctttggccccaccggcgggtttatcgccggcttcgcgaccctgattgaattcgtcttcgccccgcccgccatcgctatggccatcggcgcctatctgaacgtgcagtttccggcgctcgaccccaaatgggtggcctgcggcgcctatgttatctttatgacgctgaatattctcggcgtggggattgccgccacctttgagctggtggtgacgttattagcgattttcgaactgctggtgtttatgggcgtggtcgcgccgggcttctcctggagccattttaccgctaacggctgggcgggcgcggaaagctttagcggcctggcgctgccgggcatgtttgccgccatcccgttcgcgatctggttctttctggcgattgaaggcgcatcgatggccgccgaagaagctaaagatccgcagcgcactattccccgggcgctgggcggcggcattctgaccctgaccgtactggcgataggcgtgatggtctttgccggcggcgtcggcgactggcgaaccctggccaatatcaacgacccgctaccgcaggcgatgaaaatggtggtcggcaacagcagcggctggctgcatatgctggtgtggctggggctgtttggcctggtggcctcgttccacgggattatcatgggctactcgcggcagatttactctctggcgcgcgcgggctatctccccgccgggctggcgatgctgaaccgccgcacccgcacgccgcatctggcgatcctcgccgggggcgtggtcggcatcgccgccattttctccgattcgctgatcaccattagcgggatgccgctgaccgcctgtatcgtcacgatgtcggtatttggcgctattgttatgtatatcacctcgatggcggcgctgtttaagctgcgccgcagcgagccgaagctgattcgaccgttccgcgcgccgctctatccgtgggcgccggccttcgcgctggccatggcggtgctctgcctggtggcgatggtctggtacaacacgctgctggcgctgattttcgccgccatgatgctcggcggctacctgtggtttcgcaagaccgcagcggctcgccagcgcgcggcggtggatccgcagctgcgtacggtctcctga

SEQ ID NO: 175651 - DNA, 1389 bp, Klebsiella oxytoca
atgtataaaaccacgctatcgggccaggtatggcgctttgagagcctgaaaaccctactggcgaaggcctcccctgcgcgttccggcgacgcgctggcgggcgttatcgccggctccgccgaagagcggatggcggcaaaaatggcgctggcggaggttccgctcaccgagattctcgataatccgctgattccctacgagcaggatgaggtgacccggctgatcctcgatacccacgacgcccggggcttcgcggcgattcgccatcttacggtcggcgattttcgcgactggctgctcgacgacgccaccgatgaagcggcgctgcgccaggtcgcccgcgcgataaccccggagatggccgccgcggccagcaagctgatgcgcaatcaggatctgatcctcgccgccagcaaatgccgggtcgtcacccgttttcgcaacactatcggcctgccggggcgcctgagcgtgcgcctgcagcctaatcacccgaccgatgacctcaaaggcatcgccgccagcatgctcgacggcctgctgtacggcgcaggagacgcggtgatcggcatcaatccggccagcgacagcctgccggtgctggcgcagctaaaccatatgcttgacgatattattcagcgcttcgccattccgacccagtcgtgcattttgacccacgtcaccaacaccctgcagctgattgagcgcggcgcgccggtggatctggtgttccagtcggtggccggtaccgaagccgccaacagcggtttcggcattaatctggcgctgctgcaggaagcgcgggaagcggcgcttagcctgaaccgcggcacgctgggcaacaacgtgatgtattttgaaaccggccagggcagcgctctttccgccaacgcccaccacggcgttgatcagcagacctgcgaagcccgggcctatgccgtcgcccgtcattttgagccgctgctggtcaatacggtggtgggctttatcggcccggagtatctgtacgatggtaagcagattatccgcgccgggctggaagatcacttctgcggcaagctgatggggctgcccatcggctgcgacgtttgctacaccaatcacgccgaagcggatcaggacgatatggataccctgctgacgctgctttgcgcggccgggctgacctttttgatcggcgtaccgggggcagacgatattatgctcaactaccaaagcacctcgttccacgatgccctttacgcccgccgactgctgggtttacagcatgcgcctgagttcgccgactggctgacgaagatgcagattattgaccgccacggcgcgctgcgtctgaccgatgcccgccatccgctgctttccgtcctgccgcaaggagaaccggtatga

SEQ ID NO: 175652 - DNA, 777 bp, Klebsiella oxytoca
atgaatcctcccgacgcctggaacccgctgcgtgagtttaccgatgcgcggattgcgctggggcgcagcggcgccagcctgccgacccgcgaagtgctgaatttcggcctcgcccacgcccgggcgcgcgatgctatccaccaacctttcgccagcgaccagcttgttcagccgctggcggagctggggctgtcgacgctgaccgtccgcagcgccgccagcgatcgccatgtctatctgaatcgcccggatctggggcgacagctgaacgaagagagccgcgccgacctcgccgccagcggcgcgcgccccgccgacctgctgctggtgattggcgacgggctgtcgtcgtacgccgtgcagcgccaggcagtgccgctgattcgcgccctgctgccctatctgcaaaccctcggcctgagcctggccccggtggtgctggcgcaccagtcgcgggtcgcgctgggcgatgatataggcgaaacgctgaaggccagagcggtggcgatattgattggcgaacggcccgggctctcttcgccggacagcctcggagtgtatttaacctggcagccgcatcgtcagcgtctggagtcggagcgcaactgtatttctaatatccgtccggaagggctgagctttgatgccgccgcttttaagctggcctggttactggagcaggcctttttgcggcggcttaccggagtgcgcctgaaagacgaaagcgataatcctgcgctgcatggaaaaataaaaccgttgagccagctaaaataa

SEQ ID NO: 175653 - DNA, 1137 bp, Klebsiella oxytoca
atgaacaagttttccgggaaagcgtctttaatggccacgctggttgccgcgtgggtcggtgccagcagcgcgcaggcggctgaaattaaaattggcgtggtcttgccgctgagcggcgcgctgagcggctacggacaaccttcgcaaaaagggctggatatcatccagagcattacgccgacgttaaaaaatggcgacaccgtgaagcttatcgtgattgacgataagagcgacaaggtcgaagccgctaacgccatgcagcgcctggtctccagcgataaagtcgacgcggtgatcggcgaagtcacctcctccaataccctggcgatgaccaaaatcgccgacgacagtaaaacgccgctggtctcctcaaccgccaccaacgaccgcgtcacccgcaaccacccttacgtcagtcgggtctgcttctccgacagcttccagggcgtggtcggcgctaacctcgcctcgcgcgatctgaaggctaaaaccgccgccatcgtcttcgacagcagcaacgactactccgttggcctggcgaaagccttccgcacgcagttcctgaaaaacggcggcaccattcctatcgaagttcaggctcccggcggcagcaaagactttaaggcccagctggccagcgtgaaggcgaagaacgtcgacatgatctatatgccgatctactacaccgaaggggcgctgatcgccgtacaggcgaagcagctggggctgagcaagccggtggtcggcggcgacgggctggcggcggatcaggtcttttttgacgtcggcaaagacgcggtcaacggctatatgaccaccgactactactcgccgaacgccaaagagcaaacgccggcgggcgaggtatttatcaaagcctgggaagccaaataccagcagccgacccatacatggggcgcgatggcggcggacgcctataacgtcattatcaacgccatgaaccagtgcagcgacccgcgcgaccgggtttgcgttaacgaaaaaattcgcgctactaaggacttccagggcgtaaccggtacgctgacgttacaaaacggcgacgctatccgcagcgcggtcatcaacgaagtgaaggatggcaagctggcgtttcgtaccgtggttaatccttaa

SEQ ID NO: 175654 - DNA, 900 bp, Klebsiella oxytoca
atggatggtgccatttttctccagcaagtggtcaatggaatgagccttgggggcatgtacgccctgattgccatcggttatacgatggtttatggggtgctgcgcctgatcaacttcgcccatgcggacgtgatgatggtcggggcgtttaccaccctgtttttgttttcttccattggactacccttcggggtagccgttttcctgaccctcgcgctgtgcggcctgttcggcatgctgatcgaccgggtggcctatcgcccgctgcgtcaggcatcaaaaatctcgatgctgatcaccgccatcggcgtcagcttcttcctcgaaaacctgttcaacgtgctgtttggcggcagctcgcgcttcttttccgcaccggaatttttcaataacactcgcgcctttggtgacgtgattatcaccaatgtggcgtggatcgtgccgctgatcaccgtcctgctgctgctggcgatcctctggctgctgtaccgcacccgctacgggatggcgatccgcgcggtggccttcgacgttaataccgtgcgcctgatgggcatcgacgccaaccgcattatctcgctggtgttcgccctcggcagcagcctcgcggcgctgggcggggtgttctactccatcagctacccgaccatcgacccgctgatgggcgtgctgatcggcctgaaggccttcgccgccgcggtgctcggcggaatcggcagcgtcaccggcgcggtgctcggcggctttattctcggctttaccgaggtggtggcggtcgccctctttcccgagctgggcggctacaaagacgcctttgcctttatgttcttgattctggtcctcttattccgcccggttggcattatgggcgatgaacgtctggaaaggagccgtttctga

SEQ ID NO: 175655 - DNA, 1050 bp, Klebsiella oxytoca
atgctcaacgctacgactaccgccggggcgcagctgcgcaacctggtcattattgctctctgcgtcgcgctgctggccgggatcaacgtcgtcttcaacgactacattattcgcgtcatcagcaccattttcgtctttatgatcctcgcagtcagctataacctgatcaacggcgtgaccggccagctgtcgctggagcccaacggctttgtggcggtcggcgcttacgtcaccgccctgctgatcctccccagcgacagcaagctggatatgtttgagatggccgcgcccagcccgtggatcctcgtgctgcacgccgggttcctgcccgcgctgctcattagcggcctgtgcgcggcggcgctggcggtttgccttgccctgccggtcttccgcgtgcgcggcgactacctggcgattgtgaccctcggcttcggctttatcattaaaatcctcgctatcaacaatccgcagatcaccaacggcgcgattggcctcaacgatattccgcagcagccgcatctgctgttctggtgcgggctgttcgccctgctggcgaccgggatgattttgcagctggtgtggtcgaagtacgggcgaatgatgaaagcggtgcgcgacgacgaagacgccgctatcgccatgggggtgaacacgtttcgcattaaaacctgcgccttcgccaccagcgccttcttcgaagggatcggcggcggcctgctggcctcgctgctgaccaccatctcgccgggcctgttcgactttatgcttaccttccagctgctgattattatcgtgctcggcggcctgggcagcaccaccggcgcgctgcttggcaccgtactggtggtcggcagcggcgagtggctgcgctttctcgaccagccgctccagttcttcggtcacgatctcggcgcgtatccgggcctgcggatggtggtgttctcgctgctgctgctgatcatcatgctgttcgcccgcgaaggtctgttgggcaaaaaagagatttggcaggtgggcaaaaggagacgcggcgatggcgcaaaataa

SEQ ID NO: 175656 - DNA, 783 bp, Klebsiella oxytoca
atggcgcaaaataaggtcattttacaggtgcaggacgtgaccatgcagttcggtggcctgcgggctatcgacagcgtcagtttccacgtcgacgaggcggaaatttttggcctgattggccccaacggcgcgggcaaaaccacgatgttcaatgtcatcaccgccaactataaaccgaccagcggcagcgtgaccctcgcgggaaagtcgctgaaggggctgaagccgaaccgggtggtcaacgccgggatcgcccgcacctttcagaatatccgcctgttcaactcgatgacggtattagaaaacgtgatggttggcctcgacagcgccagccgctattcgctgctggaagcggcgctgcatatcggccgctactaccccgccgagcgggcggcaaaggccaaagcgatggcgattctggacgatatcggtatcgcccatttcgccgacgtgcaggccaccaaccttagctacggcaaccagcgcaaggttgaaattgcccgcgcgctggcgacctcgccaaaattactgctgctcgacgaacccgccgccgggatgaacccgaaggagacggaagatctggcagacctgatcttccgcatgcgtaacgactatcagctcagcgtactgctgatcgagcacgatatgccgttcgtcaacaagctgtgcgagcgggtgatggtgctggagtacggcaagccgctgtttagcggcctgatgtcggaagccattgaggatccgggcgtgatttccgcttacctgggggacgttcgttatgcttag

SEQ ID NO: 175657 - DNA, 696 bp, Klebsiella oxytoca
atgcttagcgcgcgcgaattaaacgtgttttacggcgtgattcagggactaaaaggcgttgatattgatatttacgaccgggagatcgttacccttatcggcagcaacggcgcggggaaaacctccaccctcaacggcatcgtcaacctggtgcgctccacggggcgggtcaattttctcaacgaggatatctcccgcagccagacgcatcagattgtgcgtaaggggctggcgctggtacccgaaggacggcgcatcttcaccaacctgaccatcgaagaaaatctgcgcatgggggcctacaataatctcgccggctttacccgcctgcgcgatcgcatgtacagcctgtttccccgcctcaaggagcggcgtgctcagatggcgggcaccatgagcggcggcgagcagcagatgctggcgatcgccagagcgctgatgagcgaaccggtactgctgatgctcgatgagccaagtctcgggctggcgccgaaaattgtcggggagctgttcgccacgattaggcagctacgggaggagaatattaccgtgctgctggtggagcaaaacgccacggcggcgttgaccatcgccgatcgcgcgtatgtgctggagaatgggaagattatgctctcgggtcctgcgcaggaggtgctggcgaatccggaaatcaagcggatgtatctggggggataa

SEQ ID NO: 175658 - DNA, 177 bp, Klebsiella oxytoca
atgaaagtggcgctgtggcaacgcataacgggctggctggcttctttatctgacggtgaagccgggcagcaggatacccaacgcatcatggaggcaatattgccggtcgccagtctctatggaattgagctcggcaacgttgaaacaaggtggtttcgccatgataaaacatactga

SEQ ID NO: 175659 - DNA, 810 bp, Klebsiella oxytoca
atgcgcattgcaaaaacaaaaatcgcgctggcgctgggcatgctggtgctcgccgcgcaggctcaggccgatcaattagccgatatcaaagccgccggcgtggtcaaagtcgccaccttcgacgccaacccgccgttcggttcggtagatccgaaaacgcataaaatcgtcggttacgacgtggacttcgccgaagcgctggccaaatctctcggcgttaagctggagctggtcgccactaacccggccaaccgcattccgctgctgcagtccggcaaggccgacctgatcgtcgccgatatcaccatcactccggaacgtgcacaggtcattgatttctcaacaccttactttgtgaccggccagcagttcctcgttccggcaaaatcaccggataagctcgatgattacagcaaagcgcgcattggcgcggtaaaaggcaccaccggcgaacaagcgctgcatcagcgtttcccgcaatcgcgcgtgctctcttatgatgatattcctctggcgctgaccgccctgcgcaacggcaacgtgcaggccatcactcaggacagcaccatcctggccggactgctggcggaagcgccggacaaagctaacttcaaaatcatccccgacctgctgagcaaagaagagattggcgtcggcgtgaagaaaggcgaaccggccctgctgaaagcggtcaatgacgagctggtcaagctggagaaatccggtgaggcggccaaaatttacgacgtctggtttggcccgagcaccaaaaccccgcagccgcgcgcctttactatcgaagcgaaataa

SEQ ID NO: 175660 - DNA, 819 bp, Klebsiella oxytoca
atgttatcggctctattttcacgctccgcggcatcgtccgcggatttttcgcatctgcagcgcgccagcattgagtttcgcgatgttgccaaaagctacggcgaccatcgggtgctgaacggcgttaacttacaggttgaacccggcgaagtggtggcgatcctcggcccttcgggatcgggcaaatcaaccctgatccgcctgatcaaccagcttgaatcactcagcggaggcgaaatactgatcgacggcaaaccgacagcgcagctcaccggcagcgctctgcgccagctgcgcagccgggtcggctttgtttttcagcagtttaatctctatgcccacctgacggcgcaggagaatatcaccctcgcgctggaacgcgttcacggctggggcaaaagcgccgcccgcgagcgctcgctggcgctgctcaaccaggtcggccttgcggataaagcccggcagatgccggcccagctctcgggcggccagcagcagagggtggcgatcgcccgcgccctcgcctcctcgccgcagattattctgttcgacgaacccacgtcggcgctcgatccggagatgatcggcgaagtactgcaggtcatgaaaaacctcgcccatagcgggatcaccatggtggtggtgacgcatgagatgcagttcgcccgcgagattgctgaccgggtggtgtttatcgacggcggcgatattctcgaagtcgcgccgccggccgagttttttgcccggccgcagcacgcccgcacccgccgtttcctgcaaaaggtgctcgatccgctgcaccaggagagtgaggcgtga

SEQ ID NO: 175661 - DNA, 753 bp, Klebsiella oxytoca
gtgatcccgcatctcgactggcatggcgtgctgagcgggcagccgctgcaatggatcatctccggttttctcaccaccgtctgggtcagcatcgccgggatggttctggcgaccgtgctggccatcctgctgctggcactgcgtctcgggggcggcaggcccggccgttggctggtggcggcctgggtttcactgttccgcaatacgccgctgctggtccagctgctgttctggtattttgccgcctggaatctgctgccgctgggggcgcgggattttattaatgacgatcgcagttggtcgattctcccgggcaacgtctggtggctgacgccggagtttctctgctcaatgtggggactcggggtctttacctcggcgtttctgattgaagagatcgcctccgggctgcgcgccgttagccacggtcagcgggaagcggcgctgtcgcaggggtttacgccctggcaagagctgcgccacattctgctgccgcaggggctggctaacgcctggcagccgattatcggccagtatctcaacctgatgaagctctcttcgctggcgagcggtatcggctttgccgaactgacctatcaggtgcggcaaatcgagagctacaacgcgcatgcgctggaggcgtttgccgtcggcaccgcgctgtatctggcgcttggggtactgatgggcgtggcgctgacgcgtctcggtccgggaagagctcagcaaaggagagccggttatgaacgctaa

SEQ ID NO: 175662 - DNA, 684 bp, Klebsiella oxytoca
atgaacgctaatctggcggtcatcgttgataacctcgattatctgctgtgggggcggctggcggacggtatccccggcggcgtggtgctgacgctgctgatggctatcggcgccgccgcgctggcgctgccgggcggcgttctgctggcagctatcgcctggcgctacgaagggatagtgcggcggctgctatttctgtgggcggaaattattcgcggcatcccgctgatcttcgtgattttctggctgtggtatctgcttcctatgctcaccggcagcgatctcccgggcgcggtcaccgtcacggtggcgctggcgtggtttaccgccgcctcggtgatgcattcagtgctggcgggcctgcaatcgctaccccgtgggcaatacgaagcagcgctgacccagggtttcgctcccgggcaaacgctgcgcctgatcctgctaccgcaggccctgcgtaacgttcagccgtcgctggttgggatatttatcggcctgctcaaagacacctcgctggcctttatcgtcaacgtgccggagctgactaccgtcgccgggcaggtcaataaccgggtgcagatctacccgctggcgatttttgtttttaccggcgcggtttactatctgctgtgctgcggactgagtctgctggcgaatcgccgatatgggagagcgaccgggtag

SEQ ID NO: 175663 - DNA, 543 bp, Klebsiella oxytoca
atggactatctcactgatttacggtcatgtatctggccgagagaagatcgctactttgttgacggattatccacgattatttttgatatccgcgatttgatctacccatctctggatgaactacgcgacgggtttatgtttattaatattagccctaaatttatgagccactttatcagccatgaacaccaatggctgaaaatcgccgagaaaaaacaggtgatattaattgccgcaaccaggctggaggcgctggccaattactggtatttcaatagtcaggccagaggcgtggtttatacggaatccttatacgctattcgccatgagctgacccgagccataaacggtcgttttcgccgcagtgatataaaaaaaggaaaaatgacccgaaaggagatgcaaatcattggtcatcttgcgcaggggatacagccgaaatctattgccaaaattgagaactgcagcgtcaaaacggtttatacccatcagcgtaacgcggaggtgaagctggattttaaaataaataaattagccatctga

SEQ ID NO: 175664 - DNA, 705 bp, Klebsiella oxytoca
atgtccaggcgacgtggcgtaacattaactaatttgctgcggatgctgatctgcctgctgtcgctgggactggcgacagcagcgcaggctatttcggtggggaatttaaccttctcgctggcagcggaagacaatttcgctgctaagcgggttatcaacaacaataaaagcgcccggctgtatcgggtctctatcgtcgctatcgaccgccccggcggcaaagaggtgcgttcccgtccggcggacggcgagctgctgtttgccccgcgtcagctcactctacaggcgggggagagcgaatattttaagttttactaccacggcccgaaagataaccgcgagcgctattatcgggtatcgttccgggaaattccgacccgtaattacgtaatgcgtaatcaaagcggtacggaagtgagtatggatccggtggtggtcatggacactatcctcgtcgttcgcccgcgcgaggtacagttcaaatgggcttacgatcgcgcggcggggaccgtcagcaacaccggcaatacctggtttaagctgctgatcaagcccggatgcgatacgacggaagaggaaggggatgcatggtatttgcggcccggggacgtggttcgcaaggcttcgctgcgccagccggggaaccactacattatctataacgacaaatttattaaaatgacaaaagactgtccggtgaagtag

SEQ ID NO: 175665 - DNA, 1644 bp, Klebsiella oxytoca
atgaaagctaagtggctggcatgtttagtgatgttaacggcggcgctgtgcgtgacgcgggtcaacgccgcggtcaccaaaactacctggccggatgcggcggccatgcagtttgttttcgtggaaaacaactcggatgataacttctttgtcaccccgggcggcgcgctggacccgcgtatgaccggggctaaccgctggaccgggctgaaatataacggctcgggcaccatttatcagcagagcctgggctatatcgacaacggctataacaccggcctgtacgccaactggttcttcgatatgtggctggataactcaccggcttcgcaccctttactcggcctgcgctgtatcaactggtatgcgggctgcgatatggccaccagcctgatcttgccgcaaactaccgatgccaacggcttctatggcgcgacggtaaccaccggcggacaaaagtggatgcacggcatgatgtccgatgctttctaccagtatctgcagcagatgtcggtgggcagcagcttctcaatgaccatcaactcctgcatgacgtcggtgagctacgatgccagcagcggcgcacgctgcaaagatcaggcctcagggtattggtacgtgcgtaacgtcacccatactaaagcggcaaacctgaagctgattaacacccatgcgctggcggaagtgtttatcaacagcgacggggttccgacgctgggcgaaggcaatgccgactgtcgcacccagactatcggtacccgttccggtctgagctgcaaaatggtgaactacaatttgcaaaccaacggcctcagcaatacctcaattcatattttcccggctatcagcaactcggcgctggcctccgcggtgggcagctacgatatgcagttcagcctcgacggcaactcatggaagccggtgagcggcatctctcagtactatacgtttaatgagatgaaatcatcagattcagtgtatgtcttcttctcaagcaacttttttaagcagatggtgacgctgggcatcagcgacgtgaataccaaagatctgtttaatttccgtttctataacaccacctcgcccgagtctggctggtacgagttttcaacctctaacaccctgataattaagccgcgtgatttcagcatcagcattatttccgatgagtacacctcggcgccgacccgtgagggctacgtgggcagcggcgagccgtcgctggatttcggctatattgtgacgaccagcggtaagaccgccgccgatgaagtgctgattaaagtcaccggcccggcacaggttattggcgggcgttcatactgtatttttagttcatccgacggcacggcgaaggtgccgttcccggcgactctggcgtttacgacgcagaccgggtcaaccaaaacttacgatgccggatgcgatgatacctggcgcgatatgaccgatgccctgtggttaaccacgccatggacggatatttccggcgatgtcgggcagatggacaaaacgacggtgaagttttccatcccgatggataatgcgatatcgctgcgaacggtggatgataacggctggtttggtgaagtgagtgcttcaggagaaattcatgtccaggcgacgtggcgtaacattaactaa

SEQ ID NO: 175666 - DNA, 2529 bp, Klebsiella oxytoca
atgcttataccagggattgccccaggacttaaagtgctccttgcctctggcatggccatcttgcttgttccgctcagcgtttccgccgcggctgacaaagtacagcaaatcggcggcgtcattatccctcaggccttcagccaggcgctgcaggacggaatgagcattcctctgtttattcacctcgaaggcagcaacggtacccaggacgatcagcgcatcggcaacgcttttatctggctggataacggcgtactgcgcgtccggcaaatacagctggaagagaacgataacaatgccaccgtcagtgaacagacccgcaagcagctgaccgcgctggccaatgaagcattcactaaagaactcaaaattagtctgacagatgatgcgcagctacagctcagcctgcgccagctgctgctgcagctggtggtgagaaaggaggcgctgggtaccgtgctgcgttcgcgcagcgaagatatcggtcagtccagcgtcaataccctcagcagcacgatgaactataacctcggcgtatataacaaccagatgcgcaacggcggcaacaacacctccagctatctgtcgctgaacaacgtcaccgcgctgcgcgagcatcacgtggtgctcgacggctcgctgtacggtataggctccggcaatcaggacagcgaagtctataaagcgatgtatgaacgcgattttgccggccatcgttttgcgggcgggatgctggatacctggaatttacagtccctcggcccgatgaccgccgtttcggcagggaagatttacggcgcctcatggggcaaccaggccagttcaacggtgttcgacaactcccagtcggcgacgccggtggtcgcctttttacccgccgccggggaagtgcatctcacccgcgacgggcgcctgatgagcgtgcagaactttgccatgggtaaccacgaagtggacacgcgcggcctgccgtatggcatttacgatgtcgaggttgaagtcattgtgaacggccgggtggtcagcaagcgtacccagcgggtcaataaattgttcagccgcggacgcggcgccggcgcgccgctggcctggcagttctggggcggcagcttccatatggaccgttggtctgagagcggtaaaaagacgcttccggctaaagacagctggctggcgggcgcctcggcctccggttcgctcagcaccttaagctgggcggcgaccggctacggttatgataacaacgccgtcgccgagacgcgcctgaccctgccgatcactgagtccattaacgtgaacctgcagaatatgctggccagcgacagctcgtggagcagcatcggcagcatcagcgccacgctgcccggcggcttcagctcggtgtgggtcaaccaggaaaaaacgcagattggcgaccggattcggcgcagtaatgccgacaaccgggctatcggcggtacgctgaatctcaattcactctggtcaaaactggggacgttcagcatcagctataacgatgaccgccgctataacagccactactacacggcggattactaccagacgctttataccggatcctggggatcgctgggcctgcgcgcagggatacagcgctttaataacggcgacagcagcgccagcaccgggaagtatattgcgctcgatttctcgctgccgctcggcaactggttcagcgccgggatgacccatcagaacggctacaccatggccaacctgtcggcgcgtaaacagtttgatgaaggcggcaccatccgtaccatcggcgccaacgtttcgcgggcgatttccggcgacacaggcgatgataaaaccctcagcggcggcgcatatgctcagtttgatacccgctactccaccggtacgctgaacgtgaacagcggcgtggatggctacgtgaacaccaacctgaccgccaacggcagcgtgggctggcaggggaaaaatatcgccgccagcggccgcaccgacggcaatgccggggtgattttcaacaccggactggaaaatgacggcaagctgagcgccaaagttaacggtcgcattgttcagctctccggcaaccgcaactacctgccgctgtcgccctacagccgctatgaagtggagttgcagaacagtaaaaattcgctcgacagctacgatatcgtgaccgggcgcaagagccagctgaccctttatccggggaacgtggcggtgattgagccggaagtgaagcagatggtcacggtctccgggcgcattcgcgcggaagacggcacgctgctggccaatgcgcggattaataaccatatcggtcgtacccgcaccgatgagaacggtgagtttgtgatggatgtggataaaaagtatcccaccatcgatttcagttacggtaaaaaccagagctgcgaagtggcgctggagctaagccaggcgcgcggcgcggtatgggtgggcgatgtggtctgtagcggcctctccacctatgcccgcgtgcagccgacaggagaaggtaatgaaagctaa

SEQ ID NO: 175667 - DNA, 669 bp, Klebsiella oxytoca
atgaaaaaacacattctggccatcggcctgttgctcagcacaatgacgcctgccctggcgctggatgtgggcgatatctcttcgtttatgaacagcgacagcagcacgctgagcaaagagatcaaaaatacgaccgacagcggtcgcttaatcaacatccatatggaacgcctctcttcgccgctggatggcggtaaggtgatcccgatggataagcaggacgagattttactgacccccgccagcctgctgctgcccgcgaaggccagcgacgtgatccgctttttctataaaggcccggcggacgataaagaacgctattaccgcattgtctggttcgatcaggcgctcagcgatgcccagcgcaacggctcgacccgcagcgcggtagccacggcttcggcacgcatcggcaccatcctggtggtggccccgagaaaagtgaattaccgctatcagtacgccaacggcacgttgaccaataccggcaacgccaccctgcgcattctggcctatggcccgtgcctgaaaccggcggatggtaaggattgcaaagaaaactacttcctgatgcccggaaaagagcgccgctttacgcgcgtcaatgtggctgacaaaaaaggacgggtcgcgctctggcagggcgagcagtttgttcccgtgaaatag

SEQ ID NO: 175668 - DNA, 588 bp, Klebsiella oxytoca
atgaaaaaaaaggttcttgcaattgctctggtaaccgcgtttgccggtatgggtgtcgctcaggcagctgacgttactgctcaggcagtcgctacctggtccgcaaccgccaaaaaagacacaaccagcaagctggttgtgactccgctgggcagcctggctttccagtatgctgaaggggttaaaggctttaactcacagaaaggcctgtttgatgtggcaattgaaggtgacaccaccgcgaccgcattcaagctgacctctcgtctgatcaccaataccctgactcagctggatacctctggttccaccctgagcgtgggcgttgactacaacggcgctgcggtcgaaaaaacggctgacaccgtcatgatcgacaccgctgcgggcaccctgggcggcaacctcagcgcgctgtctaacggctataacaccgctggtcgcaccaccgctcaggacggcttcacgttctccatcatcagcggcaccaccaacggcacaactgccgttactgactacagcacgctgccggaaggtatctggagcggtgacgtcagcgtacagttcgacgccacctggaccagctga

SEQ ID NO: 175669 - DNA, 543 bp, Klebsiella oxytoca
atggattataaatattctttagatcagtgcatctggccggcgcatgatagcttttttttaaaaggtctcgctgagcttattctggatatcgatgacttaatctatctttcactagaaaaggtacgccgggaatttgtatttattaaccttagcgccagttcgctgaattattttatccgccgcgataatgagtggttggctgaaatgaaaggaaagcagattgtacttattgctgcaaggcgctcggaggcgctggccaattactggtattacaatggctccattcgaggcgtggtctacgtagacttagctaaggatattcgtcaggagctggcttacgttatcaatggccgttttctacgtaaagatataaagaaagataaaattactaaccgggaaatgcagataattcgtatgacggcgcagggaatgcatccgaaatctatcgccaaaattgagaattgtagtgtgaaaacagtctatacccatcggcgaaatgctgaggccaaattgtattcaaaaatatataagttagcgctgtaa

SEQ ID NO: 175670 - DNA, 843 bp, Klebsiella oxytoca
atgaacagttccctggctgcggttgcagaaaccgattatcaaccgtttacgccgccgtttatcgaccggcagcgtaaggtcctgagcgtacgcaacctgagcaaagcctggcgcgcgcagcaaaccgtactggatagcatcagtttcgatctgcatgcgggcgaattggttggcgtgatcggtcgctccggcgccggaaaatcgacgcttttgcacgtcattaacggtacccatcgcgccagcggcggcgaaatcctcagcttcccggaaggagggacgccgcaggacgtatcaaagctgtccgggcgggcgatgaacgcctggcgtagccagtgcggtatgattttccaggatttttgcctggttccgcgtctcgacgtgttgaccaacgtgctgctgggacgcctgagccaaacctcaaccctgaaatcattattcaaaatcttccccgacgccgaccgcgcccgcgctatctccctgctggaatggatgaatatgctgccgcatgcgctgcagcgagcggaaaatctctccggcggccagatgcagcgcgtggccatttgccgggccctgatgcaaaacccggggattttgctggccgatgaaccggtcgcctctctcgacccgaaaaatacgcagcggatcatgaatgtcctgcgcgaaattagcgaacagggcatcagcgtgatggtaaacctgcattcggtggagctggtgcgagaatactgcacgcgggttatcggcatagccaaaggcaagattatttttgacgaccatcccacgcagctgaatcaggatattctgcatcggctgtatggcgatgaaattagccaattgcattaa

SEQ ID NO: 175671 - DNA, 885 bp, Klebsiella oxytoca
atggcgtggcaggcaagcgctgctgaacaaccgaaggaattaaacctgggtatccttggcggtcagaacgcaacgcagcaaattggcgacaaccagtgcgttaagcaattccttgataaagagctgaaggtcgatacaaaattacgtaactcctccgactattccggcgtcattcagggattactgggtggcaaagttgacgtggtattaagtatgtcgccgtcttcttacgcctccgtttatattaacaatccgcaagcggtcgatattgttgggattgccgtagatgataaagacgggtcccgcggctaccactcggtggtgattgtcaaagcggacagcccgtataaaaagttagaggatctgaagggcaaagcgtttggcttcgccgacccggattccacttccggctttttaattcctaaccacgcctttaaacagcagttcggcggcaccgcggataataaatataataacttcttctccagcgtgaccttctccggcggccacgagcaggatattctcggcgtgctgaacggtcagtttgccggtgcggtgacctggacctccatggtcggtgactataatagcggctacagcgtcggcgccttcaaccgcctgattcgcatggatcacccggatttgatgaagcaaatccgcattatctggcaatcgccgctgatcccgaacggcccgatcctggtcagcaattccctgcctgctgattttaaggccaaagtcattaccgcgattaaaaagctggataccgaggatcacgcctgctttattaaagcgatgggcggcacgcagcatatcggcccgggcagcgtggctgattttcagcagattattgatatgaaacgcgaactggttagcgcgcgttaa

SEQ ID NO: 175672 - DNA, 873 bp, Klebsiella oxytoca
atgaataacacccacacccaattcgaacgctactatcagcaggtacgctcgcggcaaaagcgcgatacctttagcgggtccctgctgctgctggtactctattttgccgccggcagcctggccgagtttaatctccttaccatctggcactcgctgcccaattttctcgattacctgtttgagacgttgcccacgctgcacatcgccgatctgtttgccgattcgcatactaagggctctctggcttactggggctatcgcctgccgattcagctaccgcttatctgggaaacgctgcagctggcgctggcgtcgacgctggttgcggtggtgattgccaccctgctggcgttcgttgccgctaataatgcctggtcccctgccccgctgcgtgttgccgtccgcgtgctggtggcttttctgcgcaccatgccggagctggcgtgggcggtgattttcgtgatggcttttggtatcggcgccatccccggcttcctggcattaatgctgcacactatcggcagcctgaccaagctgttctatgaagcggtagagagcgcccaggataaaccggtgcgcggcctggccgcctgcggcgcgtcgcatctgcagcgtatccgctttgccctgtggccgcaggtcaaacccatcttcctctcatacggctttatgcgcctcgaaattaacttccgctcctcaaccatccttgggctggtgggtgcgggcggcatcggccaggagctgatgaccaatatcaaactggaccgttacgatcaggtcagcatcacgctgctgctgattattctcgtggtctcgctgctggatatgctgtccggccgcctgcggcagtgggttctggaggggaaaaaatga

SEQ ID NO: 175673 - DNA, 882 bp, Klebsiella oxytoca
atgagacagtggcaaaatcaaccggatatcgctgccagccgtcgccagcatcggcatttgtatcaggcccaggggcgctatctgcgctatatcggcctgctgacgctggcctgcctgctctactatgtctggttctttatgcagttcggcatcagcggcgagcaactcgccagcggactggagcaaatcagtcgctatctgctgcggatgttcgtctggcacgacttttttaactggccgttccgctattacttcacgcaaatcgctattaccctggcgattgttttcgccgggacgcttaccgcgacggttatcgccctgctgctctctttcctggcggcgcgcaacattatgcgcggcgtgattccggggacgattgccctgctgatgcgccggttgttcgacgtgctgcgcggtatcgatatggcgatctgggggctgatttttgtccgcgcggtggggctcgggccgctggccggggtactggcgataatcatgcaggataccgggctgctggggcgtctgtacgctgaggggcacgaagcggttgagcgctcgccgggacgcgggctgacggcggtaggcgcgaacgggttacagaagcaccgtttcagcattttcacgcaatctttccccactttcctggcgctgagcctgtatcaaatcgaatcgaatacccgttcagccgcggtgctcggctttgtcggcgcgggagggatcggcctgatttatgcggaaaatatgcgtctgtggaactgggacgtggtgatgtttattaccctgctgctggtggcggtggtgatggcgatggatacgctgtccgcctggctacgccgccgctatattggcggcagcgtggtgccgctgtttaaagcggattag

SEQ ID NO: 175674 - DNA, 663 bp, Klebsiella oxytoca
atgggtaaaacgctgaccattttcgatctggataatacgttgattaagggcgatagcagtacgctgtggagccgctttatggtgcgcgaagggtgggtaaacgatgccgattacctggcgcgggaagcgatgctgatggacgattacgatcgcggcgagatgaatatcgccgattatgtggctctgattcaggcgccgctggttggtgtggcaaagcaggacgttgatgcgctactggcgcgctgcgtgcgtgaagaaattatgccgcgcgtttatccgcaggcctgggatctgattcggactttacaggcaaagggcgagcagatactggtgatctcagcctcggtcagcctgctggtacaggcagtcgcggcgcagctgggcatcgagcaggcgctgggcattgacgtcgagatggtggacggcggctatagcggagtgattgccggtacgccgagctatcagcaggggaaggtggtgcgtcttgagcagtggctggcggcgcatcccgcctgttcgggtgtggtgaccttctacaccgattcgattaacgatctgccgctgtgcctgcgcgccgatcgcgtacggctggtcaacccgtgtccgcagctgacggcggcgaatgcgcagcatcagtggccggtactgacgtggcggctgtga

SEQ ID NO: 175675 - DNA, 810 bp, Klebsiella oxytoca
atgagcgactggctttttctgtgcggcatactatccggcgtgaccacctggctctttggtttcggcggcggtttcgttaccgtcccgctgctctatttactggtcaccggcgcgtggggagcgcaaagcgcagtcggacagcaggcgatgcaaatcgcggtcgccacttcggcgctggttatgctttgttccgcactgctggcgacctggcggcacgtgcgtaccggcaccctgagctggcgtcgtctgtgggccatgctcaccggcattgccgttggcggcatcgccggcgcgctgttggcgcttgaggtgagcggggagtggatccgctggctgttcgttatctacctgctggcaaccgttgccgattgctaccttcgcgccggatttatgactccgccctcccgccgggtggcgccgacggtgtcacacgagcttacgacaggcggcatcattggcctgatcgcctcttttctcggcgtggggggaagcgtgatgaccgttcctctgatgcgccgtcgcggcgtgctgatgtccgaagcggcggcgatggccaacgtgctgacgctgccgctggcggcaacggcgacgctgacctggctattgctcgcctggctgtcgccggtggcgttaccgaatgggtttatcggcaacatctggctgtcggcggcggcgcagctggtggcgggaagctggctgggattaaaaatagcctcccgctggctggcgcgtttaccggatcgctggcatgtgagaatttatccgctattgctgatagccgtactgctggtgatgagcatgcggggataa

SEQ ID NO: 175676 - DNA, 798 bp, Klebsiella oxytoca
atgcgcaacgttgcgattaatgacgtcgatcatctgcctcgccgggtgctggcgctgggcagcgactacccgcccaatacgctgctggagcgccacagccaccgccgggcgcagtttctgtacgcgatgaacgggttaatgaaggtcgaaacggatgacggccagtggctggtcccgccgttcagcggagtatggatcccggcgacaaaaccgcatcgcgtctggatgcccggcgtcagcacccacagcctgtatattgatgcgcagatcgccccgcgtgatagcgagcgctgcgaagtgttacaggtttctccgctgacccatcagctcctgctggccgcctgccagctgccgctgctgtatgaagagagcgggcgcgatgccgccctgattgcgctcctgctccatgaactgggcgccgccgcgccgctgccgatgtttaccccgctcccgcagaacagccacctcgcggcgctatgcggcgattttcagcgacagcccagtatccgcagcacgccgcagcagtgggcgcaaaagctgagcaaaagcgtacgcacctttaatcgtctgtttcgccgggagaccgggatggcgttttgcgactggcgccagcaggcgtgcctgatgtacgccatgacggcgctgcgtgaaggggattcgattaccgaagtcgcgctgagtctgggctatgagtatccggccgcctttaccgcgatgttccgcaaagcgatgggctattcgccgatggcctttatccgccagatcaacggcggaccggcaaacgccagtccgcaataa

SEQ ID NO: 175677 - DNA, 1788 bp, Klebsiella oxytoca
atgggacacccctccgtcttcccgaccggcgccaccctctacgatccgcagcgcgcctggagcggctacacccttttccaggccaccgaacacggcgcggtgctggtggatatgaacggtcacgtggtacgcgaatggcctgaactgcatggatttcccaataaaatcctgcccggcggcgccatccttggccacagcggcgagcgcgatccgcgctacggcatgcaggatatgctcgatctgatccaggtggactgggaaggcaatgtgacctggaaattcgatcgctatgagcaggtgagcgatcccggcaatgaaacgcgctggatggcgcgagctcatcacgactatcagcgggcaggcaatccggtgggctattacgcgccggggctggagccgcaggtggatggcggcaataccctgatcctcgcccataccaacctgctgaacgaagcgatctccgacaagctgctgctggacgacaccattattgaagttgactggcagggcaacgtggtgtgggagtggcgctgcagcgaccatttccacgagctgggtttcgacgacgcggcgcgtaccgcgctctacaacaatccgaatatgcgcgccagcggcggtggaatgggcgactggatgcatatcaattcgatgtcggcgctggggccgaataagtggtatgacgctggcgatgcgcgttttcatcccgacaacattatctgggacgcccgtgaatccaacattatcgccattatcgacaaacagagcggcaagatcgtctggcagctgggcccggactacagcaaaccggagttgaaacacatcggctggattatcggccagcatcatgcgcatatgatcccgcaggggctaccgggcgcgggcaatatcctgattttcgataacggcggctgggccggatacggcgcgccgaatccggcatcggcggacggagtgaaaaacgcctggcgcgattactcccggatcctggagatcaatccgctgacccttgatatcgaatggcgctattcgccttatgaagcggatttgccgcagccgaccgattcgtaccgcttttacagcccgtacatcagcaatatgcagcgcctggaaaacggcaataccctgattaacgaaggatcgaacgggcgcatttttgaagtgacccgcgatcacgaaattgtctgggaatatctttcgccgttctggggcaagacgctgaacaacaatatggtctatcgcgcctaccgcattccctacgcctggatcccgcagctggcgcagccgcaggagacgccgattgcggcggtcgatgtacgaaccctgcgccagcccggtgcggcggcagcgggaccggcgcaaagcgtggtgcgggtggcgggcgtacagccgtacagtaagagcgccgatgcgctgtgcgtggcaaccgataacgataccctgcgccgcagtccgaagctgttccgcgtcgcggaaagcgcgttcacgccgataagcgcggcgagcgagctggagagtaaaaggcccgtgctgctgttcgtaggcgcggagcgctgcgtgcactgccgcaagctctggcaactgctggcgcatgagaaactcagctcgcgaattgctcaactggatacgcgctatctggatgccgaccagcatcaggatctggcgaccacgctcggcgtgcgcggcctgccgacgttgctgctgcttaaagcggggcagccagcaacgcgcgcgcccgcgcagctttcggtggataatctgttcgactggctgaatcgcgcagcagagtaa

SEQ ID NO: 175678 - DNA, 633 bp, Klebsiella oxytoca
gtgggcagcagcggctgcggtaaatcgacgctgctgcggatgctggtaggcctggagtcagcgacccagggcgaaattcgcattaacggcgagccggtcaccggcgtgggcaaagagcgcggcatcgtatttcaggagccgcgcctgtttccgtggctgaaggtgatcgacaacgtgatgctcggtctggcggatgaaaagctcagccgggcggagaagcgccagcgggcgctggaaatgctggaacgcgtgcagctcagcgaattcgccaacgcgctgcccgcgcagctctccggcggtatggcccagcgggtcgccattgcccgcggcctggtggcccgtccgcagattctgatgctcgatgagcctttcggcgcgctggatgccctgacgcgccataccctgcagcaggaacttttacagatacatcagcgcgcgggaaccaccacgctgctggtgacgcacgatgtggaagaagccgtcgccctggccgaccgggtcgttgtgctctcgccgcgtccggggcggatacgggaagtggtaagcctggcgctgccccatccgcgccagcgcgatgatgccgcgtttaccgccgcctgccgccagatacgcaatctgattacttctgcctga

SEQ ID NO: 175679 - DNA, 1569 bp, Klebsiella oxytoca
atgtcacagatgatcttaagaacggatgctcccggcaggccggggttcaggcttaacggctggccgtggctgctgcctgcgttactgctgctgctgtggtacatcgccgcgcgcgagggatggatgccggagcaaattttgcccgcgccgtcggtggttgccgataccgccctgtcgctgctgagcggcgatctactggcgcagtggggattcagccttcagcatctggcgcttggcctgctgctgggcgccatcgcaggcacgctgctcggggcgctgttcggcctggtgccggccgccgcgcagcgggtggaaccgctgttttacgcgctggcgcaaatcccgacgctcggctggatcccgctgtttatggtgctgttcgggatcgataacggcctcaagctggcggtgatcgtcaaaaccaccgtagtaccgatgaccattaatacgcagcaggcggtggccggcgtgccgttgaccctgagcgaagccgcaagagtaatgaatttttcccgctggcagcggctgcgctggctggtgatcccggcaagcctgccgggctggtttaccggcctgcgtctggcgctatcgcaggcctgggtgtcgcttatcgtcgtggaactgctggcttcttcggaaggtattggctacctgatggtctggggtcgtcagctgtttcagctggatatcgtcttcgtcaccattgcggtggttggcctgagcggcatgctgatggagtgggcggcgaaccgggcctgttcccggctggtgttctggccgcagcctgccgccggacgcctggcgtggaaaccgcaggccagctggcgggcgctgcagctgccgttagttctgctggcgctgtggcagctggcctgccagtcaggctggattgatgaagccttgttctcttcgccgctggcggtagcggtgcgctttattcagggcatcctgagcggggagctgactacggcgatgttggccagtctcggacgggcctttgtcggcggcgcgctggggattacgggcggcctgctctgcggactgctgctggcgctgcgcccgcgcgccgggcaaatcttcacgcccacgttaaacgtgctgcgccatatcgccctgtttgcctggctaccgctgctgaccgcatgggtgggcaacgataacggcggcaaaatcgtctttatcgcgctggcgtcgttctttccgatgttcttcagcacgctgcaggccgtgctgcagcgtaacccgcagctcgatgaagtggccagggtactgcgcctgggcgaattagcgcgcctgcgcagggttattcttcccggcgcggcgccggggatcttcgccggtctacggctggcgctgatttacgcctggcttggcaatatcggcgcggaatatttcatgtcctccggcgtcggcatcggcagcctgatgatcaacgcccagcagctgctggatatgcccaccattctctgcggcatggtgctggtcggtatcaccggcgcggcgctggataaagccggacgtttactggaaatgcgcgccacccgctggcgtcaacaggagcagctatga

SEQ ID NO: 175680 - DNA, 1068 bp, Klebsiella oxytoca
atgatgaaagcaatattcaaccgcaccttgctggcgctggtcgcggtcatcggcctggcgtccagcgtccaggccgaaacgctacgcactatccgcatcggcgtgccggaccagagcgcgggcagtaaaccctttattgaggggccggtcggcatggcgtttatccgccatcagttggaagaggtgtttaagccgcagggcgtggaagtgcagtggcagtttttcaaaggcgccggtccggcggtaaatgaagcgttagccaaccgccagctggattttgtctacctcggcgatctggcggcgattatcggtaaggccaacgggctgccgacgcgcctgctgctgggcagccggggttcggaatcttacctcgcggtgaccaaagcttccgggattaaaaccctcgccgatctgaaaggcaaacgggtggcggtttatcgcggcacggcggaccagctggcctttgaccgggcgctgcaaaccgtcggcctcaacgagcgcagcctgcaggtgatcaacctcgactggaacgccggcaaagcggcgctggcggccggtcgcgtcgatgcggtgtggggcggcgtttcgctgctggcgctacgcggcgataagattgatgtggtcgtcaaaagcggtgactccggccgccagaacaccactcaggccgggttcctcggcacgcagacgtttatagacgcctggccgcaggcgacccagcagatcgttaacgtgttggtgaagaacgccgctgaaatcagtgaccccgccaatcgcgacgcctggtccgccgagatggcgcagcagagccagatcccgcaggcgctgtttctcgaagagctgcagccgcaggatctgaactttaccacctcgccgcgcatcgacccgttcctgaccgccagctttagcagcagcgtcgggcaggctcactcgggccgcctgatccgcagcgctttcgacgtcagccagtgggtggacggccagtttgtcgagcgggcgctgaaagcccagcagctggaaaatcgctggccgcagtacgatgccgaaggccaggcgaaaaacgccggttaa

SEQ ID NO: 175681 - DNA, 945 bp, Klebsiella oxytoca
atgcatctggattttcgccaactgcgcaactttgtggcgctcgttgagtacggcagttttaatcgcgcggccgaggcggtgtgcctgtcgcagtcggcattcagccgcagcatccaggcgctggagcagagcgtcgggcatcctttatttgaccggcagagcaagctaccgacgctcaccccgcacgggcaaaagctgctgccctacgcccgccgttttcaggaacttaacgtcgagctcagcagccagctgcgcgaagcggacgatgcgcaaaacggcgaggtcgcctttggctgcggcccggcccccgccgcgaggctgattccggctgccatcggcgagtttcatcgtcttttgccgcaggcgagggtgcgctttcagattgataactggctggctctgcatcaggcgctcacctcccagagctatccttttgtcgtcgccgacagctggcaggccgagctcgacccgcagctgcgcgttcagccactcagcccgcagcgctgctttttcgtctgccatgccgggcatccgctggcaaaacagggtccggtctctattcaggcaatgctgcgttacccctttgcggcaccctatctgccgccgggcgtgcgcaaggtgctggcgaccctcagccagcagcaggacttcacgccggcgattcagtgcgaccatatctacgcgctgctttcgaccctggcgcgaaccaatgcgattagcttcgccagcgaggatggcttcgcgctatgccagcacagccatcggctggttaagctggagctcagcgatctgcctgaagagtggcggctgatgcagacccggtttgccattatctctccggttcatgcggctcagccgccgctggttgcgaagctgattgagatgatcctccataccgatcgtcagcatcagctgcagctgctggcccaggaggaggggagttaa

SEQ ID NO: 175682 - DNA, 564 bp, Klebsiella oxytoca
atgaagcccagactctctcacgcgctactgtttgttccttttttgcttttggcaggatgttcatcctcatcgaaaccgcataaaaccgccgcccagagtagtcactcgaccatcgacggaggttcagacgatctgatcccggtgatcgccgcgctgcacgatcaaatgcatacctgggagggaacgccctacgaatggggcgggacggagcaaagcggcgtcgactgctccgggtttgtctggcgcacgctcaaagatcgcttcaacctgccgatggagcgcattacgacgcgcgagcttctgcatatgggcgagcgcgtgagcccgcggcagctgcggccgggagatttagtcttcttccgtattaaaggcggcatgcacgtcggtttctatgataccgaccgtaattttcttcatgcctccaccagccagggcgtgatgcgctcttcgctggataatccatactggcaatcggtattctaccaggctcgccgcctgccgaaggaatataacgcccagataaccatgaataacgataatctgcatctggcaaaaaatcgttaa

SEQ ID NO: 175683 - DNA, 1053 bp, Klebsiella oxytoca
atgaaaaagagctcactggcattaatgatgatgggtcttattgcttcttcggctacccaggcggcagaagtttataataaaaaaggtaataaactggacgtctacggcaaagtcaaagcgatgcactatatgagcgactatgacagcaaagatggcgatcagacttacgttcgtttcggcattaaaggtgaaacgcagattaacgacgatctgaccggctacggccgttgggaatcggagttctccggcaacaaaaccgaaagcgactccacgcagaaaacgcgtctggcgttcgccggggtgaaagtgaaaaactacggctcattcgactatggtcgtaacctcggcgcgctgtacgacgtcgaagcctggaccgatatgttcccggaattcggcggcgactcttccgcgcagaccgataactttatgaccaaacgcgccagcggcctggccacctggcgcaacaccgatttcttcggcgtggtagatggcctgaatctgaccctgcaatatcagggcaaaaacgaaggtcgcgacgcgaagaaacagaacggcgacggtttcggtaccgccctaagctacgacttcggcggcagcgacttcgccgtcagcgcggcctataccagctccgatcgcacgaacgaccagaacctgctgtctcgcggtacgggtaaaaaagcggaagcctgggcaaccggcctgaaatatgacgccaacaatatttacctggcgaccatgtactcagaaacccgcaaaatgacgccaatcagcggcggttttgccaataaagcgcagaacttcgaagccgtggcgcagtaccagttcgatttcgggctgcgtccgtccctgggctacgtgctgtcaaaaggcaaggatattgagggcgtaggcagcgaagatctggtcaactatattgacgttggcgtgacgtattacttcaacaaaaatatgaatgcctttgtggattacaaaatcaaccagctgaagagcgataataagctcggcattaacgatgatgatatcgttgctgtcggtatgacctatcagttctga

SEQ ID NO: 175684 - DNA, 1104 bp, Klebsiella oxytoca
atgagtgatagccagacgctggtggtaaaactgggcaccagtgttttaacgggcggatcccgccgcctgaaccgcgcccatatcgttgaattagtacgtcagtgcgcgcagctgcacgcgatgggtcatcgaattgtgatcgtcacctccggggcgatagccgccggacgtgagcacctcggctacccggaactgcccgcgaccattgcgtcgaaacagctgctggcagctgtcggccagagccgtcttatccagctgtgggaacagcttttttctatttatggcattcacgttggccagatgctgctgacccgcgccgatatggaagaccgcgaacgcttccttaacgcccgcgataccctgcgcgcgctgctggataacaatatcgtgccggtcattaatgaaaatgacgccgtggcgaccgctgaaattaaagtcggcgataacgataatctttcggcgctggcggcaattctcgcgggcgccgataaactgctgctgctgaccgatcagcaggggctgttcaccgccgacccgcgcaacaacccgcaggccgagctgattaaagacgtttacggcattgatgacgccctgcgcgctatcgcgggcgatagcgtgtcgggtttaggtaccggcggtatgggcaccaagctgcaggccgccgacgtcgcctgccgcgcgggtattgatacgatcattgccgccggtagccgccctggcgtgattggcgacgtgatggagggggtttccgtaggcacccgcttccacgcccaggagtcgccgctggaaaaccgcaaacgctggattttcggcgcgccgccggcgggcgaaattaccgttgacgccggtgcgacccaggcaattcttgaacgcggcagttccctgctgccgaaagggattaaaaccatcaccggcaacttctcgcgcggcgaagtgatccgcatccgcagccttgaaggccgcgatatcgcccacggcgtcagccgctataacagcgatgcgctgcgccgtatcgccgggcagcactcgcagcagatcgatgccattctgggctatgaatatggcccggtcgccgtccaccgtgacgacatgattatccgttaa

SEQ ID NO: 175685 - DNA, 1254 bp, Klebsiella oxytoca
atgctggaacaaatgggcattgctgccaaagcggcctcgtacaaactcgcgcagctttcaagccgcgaaaaaaaccaggtgctggaaaagattgccgactatcttgaagcgcagaccgacgcgatcctgcgggctaacgctgaggatctggcggaagcgcgcgctaacggtttgagcgaggcgctgctcgatcgcctggcgctcaacccggcgcgcctgagcgggattgctcacgatgttcgtcaggtctgcaacctggcggacccggttggtcaggtgatcgacggcggactgctggacagcggcctgcgcattgagcgccgccgcgtgccgctgggcgtggtcggcgtgatttacgaagcgcgcccgaacgtgaccgtcgacgtcgcctctctgtgcctgaaaaccggcaacgcggcgattctgcgcggcggcaaagagacctggcgcaccaatgccgccacggtaaaagtgattcagcaggcgctgcaggagtgcggcttaccggcagccaccgtccaggcgattgagagtccggatcgggcgctggtcggcgagatgctgaagatggataagtatatcgatatgctgatcccgcgcggcggcgcaggtttgcataagctgtgccgcgaacagtcgacgattccggtgatcaccggcgggatcggcgtttgccatatttatatcgaccactccgctgacgttgccgaagcgctgaaagtgatcgttaacgccaaagtgcagcgcccgagcgcctgtaactcggtcgaaacgctgctggtgcatcaggatatcgccgaacgcttcctgcccgcgctgagcaagcagatggcggaaagcggcgtcagcctgcacgccgatgcggcctccctgcccgcgctgcaaaacggcccggccagcgtagagccggtgaaagcggagcagtatgacaatgagtacctgtcgctggatctgaacgtgaaggtggtggccgatcaggatgaagcggtagcgcatattcgcgagcacggtactcagcattccgacgccatcctgacgcgcaccctgggcaacgcgaaccgctttatcaacgaggtggactcctcggcagtgtacgtcaacgcttctacccgctttaccgacggcggccagttcggcctcggcgcggaagtggcggtcagcacccagaagctgcacgcgcgcggcccgatggggctggaagccctgacgacctataagtggattggtttcggcgacgataccattcgtgcttaa

SEQ ID NO: 175686 - DNA, 1080 bp, Klebsiella oxytoca
atgaagtatcgcctcaatggaaaagagaagcgtatggcttttggtgtttatcaagcagtgtcccttgcacaagcgagggcactacatgatgaagccaagaaaaaactggccgaaggtatggatccatcgtttgccaagaaagaagaaaagctggttcgcgatgtgcaactcaataataccttccagtctgtggcgcttgaatggcacggtacgaaggcgagcagatggtcagaagggtatgcttctgacattctggaggcctttaataaagatattttcccatatatcggtcaacagccagtcaacgaaattaagcctcttcttctgctgaatgtactgcgtcgaatggaaagccgtggtgcgacagagaaggccaagaaggttcgccagcgctgcagcgaagtctttcgctacgccatcgttaccggccgtgcggaatataaccctgcagcggatcttaccagcgcgatgtcagggcatgaatcgaagcattatcccttccttaccgttgaggaattaccagacttctttaaagctctttctggctatacaggaagcccgctggttgttcttgccgcacgtttgctgatccttacgggagttcgcaccggtgagcttcgaggtgctttctggagtgagtttgatcttgagaaagcggtgtgggaaattcctgccgagcgaatgaagatgaaacggcctcatctggtgcccctctctacccaagcactagagatcgtacagcagctcaaagtgatgtctgggcaatatcctctggtgtttcctgggaggaatgatccccgcaaaacaatgagcgaagcgagtattaatcaggtgtttaagcggattggatacacggggagggtcacggggcatggtttccgccacacgatgagtacgattttgcatgaggaagggttcaatacggcgtggattgaaacccagctggctcacgttgataagaatgcgattcgtgggacgtataaccatgcgttgtatttggaaggcaggagagagatgatgcagtggtatgctgattatattgataaagttggaagggttactctcaggagtgcttcataa

SEQ ID NO: 175687 - DNA, 2445 bp, Klebsiella oxytoca
atgattgaggctgaaacagggttacccattggtcacatgggagttcaatgcaaatttgttaagcaaagttcaatgcttagctggcttctggaagactcggtttacagcttctataaacagaactgtaaacattgtaatcaacgagttccggtgggatttcccaatattttagagtttgtaggcccaagagaaaaatctgccgaagaacgaaatttggctcgcaaagaagaagaaaggcagagaaagcagaagcagctcaatagacaacaagaacgagcagttttacgtctttcacttactctagaagaaacgtttgtgcttgatttgcttgatgaactcgatcaagaagatatagagaacaacgatccccgtttggaacaacttgctaatctggcacctgagacatttactagtaaaataattgaacacttgttgcctgcactgttacatgagaaattaccatattcaatgccagcagcaaaagctttaataagaactgaattatcacaagcggaaaaactggcaatttcagtatatttaataaacaacttcgaatattgtccacctgctatagaagcaatcctcttggaagcagagaatctatctgaagatgatttcttaaaagtcctttaccactttgttagaatggctgttgaatctcctcctggaatgatgattggtacatttgagcgaaaagtacttaataaaggccccattcagtcactttttaaaaaaagacaagctgatatctatgatgttgttgatgaatacataaaagatactcaccggggaaaatttcaatttgctattgagataattattgcatcggatgatgatgagctgcttctaagacatattagaagtatattttctaagctgatgcgtcgacggactctactcccggaggagcggagagatagcagcattcttttctttcttcgggaggctgctacgaaatgcttagatagatttcccgatgaaagcgataaagttattcaatcctatcttgctgacaaagatgatattgggagacatgaggccaatagagcttacagatctgtactgcgaaataactatagaaaaaaaagtaaaataggaaagacgcaaaaaatagcttttaggcgtttgctctgggctgcagtggaaaatccagaggatagcatggatgatgcaggacaattctttagacactcttgggacgaattttctgagcttgcagttgataattttgacgatttgatcggagcggctgcaacgctaagcgagaaatttgaggcgttgaataaagaaaaaatcatagaaataaatgagagttttcttgatcatttagataaaagtaataagcgtaatgctattgatggcttacagggtgcattgattgaatgggccgcgattggagctaaatctagagggagtgaaggaatcgatgattttcttcagctctatagaagcttaccagaagaacaaactcaaatgcgtgggaacatgattgcccatgtttctaagttattaactggtattgacagcctaacactagtgctctctgattggtatcgtgctcttatggatgagagtacattgattcgagcacgtgccgtacaagcgtgggaaaatgttccctatgatttagtgaagaatttcccagatttattcttcgaagcatattcagtcttgctattagatcaatatgttatggtgcatcagtatgctgttcgcgctttgagccgtagatcttttcctgaggagaaacggggacttgtgagatcccggctatggaatctaatttgctattatactcaacaagataaaaaagataatttcattgtagaatgcattgacgtttttgcttctctttgcttatcagatgaagagagaaagggaaaaattggattgcttctttctaatatattattaattttagaaggaagtgcactttatgatgctatcaatcgattgcgttttcattttgatgatattcacggttttgtcaaagtcgcactcaaagcaattcaggataagtatacccgcaatatttctattgatgactgcatctcagtgatattaagagcgccacttgatgagcttcgaaattgtaaagacgatctccaaaaagcattcaatgctctgaaaccatttaaacctcaacaatttattgaagcattagtgtacgtggctgcgttaagcaagtgtggtgataacgtaactgcaaatgtttgtttaaaggaactactggaagaaattccaaatgatgaaagaaatacacaatggaaacttaaggctgctttagttacagaagcagctagcattgaacatgccataagtgtttgcgaaccctataatgacttaattgaaaaatggaatggccttacggctgagttggagaaagaatatgaagaacgagccaaatttcgagattttccgccaagctttttctccgagagttga

SEQ ID NO: 175688 - DNA, 1473 bp, Klebsiella oxytoca
atgaagaacgagccaaatttcgagattttccgccaagctttttctccgagagttgagattgcagcagcgttggatggtgcactcaagtccattccgaatgacttggtgaaacttaaagaagcgtgtcaaaaactcaatgaaacgctcgatgagctcggtcagggatatgttgaagatcagtatcgtgcatattacatagcaatgactatatttgtatctctagctgagtggaaacatgctatacgtaatgctgagactgatgctcaaaggtttttaaattcagcacaattaaaagcatcagagatcgacatgacgacgagtctctcggagaacaaacaatttaatgaatttatagagcaagtccgttcaatcagtaaattagattcattaaaacaaatacaagaccagttaacaagctggtcattgccactactcttattcgcaaatcttcgcgataaaaatattgaggggattaggcaaggaatatctagtaaagggacaaaagagaataaaacacaagaatcaacagttgcatttctaaagtttgatattgatggggaaccagctcagcaatggaattatcttaagccgggtacggcttatgaccttaacatagaggtcagggtttcaaattggccaaaaagtgcaaatttcctctcattaaagccagtgacaattgatgctcgtgagcgagactggttgcctgattttagatttgagaaaccagagggggaaggccccttcacactgaaggggatcggtcgtgtcgtcttggaagtggcaaattcatttggctcgagaccttacgaattcctatatgctgccgagtttgacaatttaagtaattgccaaaatattgctatcgtaggacataggcgcttactacttgaagggagtgattccgctcaagctccattaactggattttcaaacgtcgataggcatcttataaaaattcgtaacatattacgagctttccctggattacactcagatgacattgctaatacaatggttatacttggcggcttaggaaatgttgcagcacaagctcttaaagctagtttatttattgctggcacatcagagcaaaaatttcagcgtaaaatagccgaaatgcttagaagtaggaatgagattggcgagaacttacaaggccatccagaggctgctggcgggataacggatctcacatttgaagacattccgatagaactaaaagttgaaaataataaggttcttttccccaaagattttcaaaaatatttcgatcaaacagcagcttatgccattggattaggtaagcgtatcggtattttggttgttctggaatcaacgtcaaaatcagcgccggtgggagtaatagaggatgatattgaagtattcactcatccaacaggtcaatctcaagttgcaattgttgttgtcgtcgtaagaggtggtttccctaaacccagttcttattctcgatag

SEQ ID NO: 175689 - DNA, 723 bp, Klebsiella oxytoca
gtgaaaagaaaagttgaaataaccaagaacagcttttttgaacttttttctgatgcaataactctttatgaattatcagctgcaacaaaaaaatcacacatcaaaaaaacacttgccaaatcaagtgtactttcaattaactacgctattgaggctgcagctaactcatttttatcttctatagaaataacgcaaaagttaaaagatcaaattgacaggttctcttcacttgataaatttgactatactcttcaatggcataaagacatatctttacctcgtggaaccactcaaacacaaataataaaagaattaatagcacaacgaaatgcattggtacatcctaagattaaaattttcactgatacaatagaaactaaaccgggtgaaggaaaaattgcttatcaacaccagtctaatattaattccgaacaagctaaaagtaatatatcaggtatatccctcgatcctgaaacatatactgaaaaagatgcttttattgcgattaaggctcttgttgattttttaaattgctatgttaacgattggtggggtattgatttggaaacatctgctttactgcttttgccatcatggaacggctcaatacaagcacaatcaataatttatgagcggaactcacttgagactgttctaaggcatgatcctgcactaaaaataaaatttattgggttgcatggtatatttgagcaatttcaataa

SEQ ID NO: 175690 - DNA, 3810 bp, Klebsiella oxytoca
atgagattccaccctgaagggccttccatacccgatatcctcttagaacgctgtgatacaggtcgagttgtatttctctgtggcgctggggtttcattaccttcagggatgccaagctttgtagagcttacccagcatgtaattgaatactttgacccaccacacgattcagaaatcatggcagcatttcgcccatggcttcacgaccaatcttcggctaatgtccctctcgaccaaattttcaacctcctacatctggaatatggcaaggatgaggtgaatgctttggtatcaaagcgtctggggactgcaagaactgatatagagattggacgtgagcatgccctgattaaaagaatttcctcaaatcagagtggtgttccacagattgtcacaacgaactttgaccgactgttcgaggataaccaagcgcaagataatctaactcgatatgtgccgccagcttttccaaatctgaatttcggttcgacaattgagggaataacatatcttcacggccgcctggtcgacgaaaatgctgtaaaccatccttatgtactgagcagtgcagactttggacgagcatatctttcagaaggatgggcgaccaattttattaagcttcttctggaacgatacatcgttgttttggtcggttatcaggcagaagacccaccagttaaatacctccttcagggtctcaatcatgatggccagtatgatcgttccagactttatgcgtttgatcgcggccttgccgaggatatcgaagccaaatggcgtgacagaggagttacagccatagcctattccgatcatccagctctttggaagactttggaagcatgggctgagcgagcagatgatccacgtcgatggcgagcttctattatcgctaaaagccagcaagatccgaaagttctagcaccgtatgaacgtggtcaacttgcccatatacttcgcactacacaaggtgcgaaattgttctctgaagctgttcctcttccccatccagagtggctttgtgtgatggatgcaaatattcggtcagccaaacagaagaaacgatactacgaacttgatgacaatgatgcagagaccttcgatccacaagaagcttatgggcttgatgacgatctgcaagatatcgctgacgatgaacgtaaacgtggagtgagtaacgataatctccttgaatggcgcgacgaagatgataatccgtcagattaccatcgcttggctggatgtttggagacaatgccgaaacgattgagccatctcatggtctggttctgcaaatctcttgatagccccgtgatggcttggtgggctatccgaaaaatcagtattcatcctctactactacaaaatattgaacgcaatattgagcattcaacatcaatccacaaacgctctcgtcaactgtggagcttaattcttgaacatcataaagatccccgcaatcgtcgttatgacgtcgattggtacgacttaaaagctcgaattacaaaccaaggctggacagctggtgtcttacgagaatttcgtagggtaatgacaccccgattggaaaagaagttgccgtatggattgggtgaagtcagaccgccaagcggctcctgggaggaaattcagttcagcgaattaggccaatttgaagttgtgttcaccgaaagacatgatgacgatttagacgtacctgacaatgtattactacaagtatttagtgctttagaagcgcaaataataattgcctccggaatgttagaggatattgatacgtactactttccaagcccaagttgttatccagaacgtgcggttgaaggagaagaacatttcgcgaaaggtgcggagatattgacatggtttgtccaccttttagaccgagttgttatgaagtggccagaattggctaaggcacacgtaacaacttggccagtaaaggagccgtttttcttccgaaagcttagactttatgcattcagtaaaacaggcgtctttgaggctgaccgtgttgccgaagagcttttgtctttggatcaaagtgaattttgggacacaaatgttacccgcgaacttctttttctgctcactgatcgttgggaagaattctcgcaagaaaatcagaatcgaattatagagcatattttaaccggcccgaaccatttactttattttcccgaggaagacattccaaaacaaagggagatactggcagctagatacgctcgctatctcgaactaagcggctgtaaaatgtccactattcatcgtgaccaactaactgcgatgattaaaagaattcctgactggaatgatggctgggctacatctgttgtcatcaattgggggtcacggacaggttgggttcgtacagacgaaaagccagatataatcttagatcttccagcaaacgaaataatcccaaaagtaaaagagatacttaaacgagaagatgacagctttactagtaggcaaccctttgtcggattgataaaagaaaacccgcgtaaggctttatctgcactagctattgcagggagaggcggtgattaccctaaggaattttggtcgccaatgataagtgagttacctacagatcttaaaccaagggtgagacgagtattcctgaaccgaattgtgcggttgccagttacagctttggtcgagttacgacatacattaagtaactggcttgaacaaaatttagctgcgactcttgaatttgatgaggatctcgggtgggcagtttacgatcatgtcatagagggcatactgagcggtggggctgatgcaacacggagtggtttcggagaagttatccgaaatggtgaggttgtaatacagtctcggcgtacattcagccatgcaatcaatggtcctgtcggtaaatgtactcaagcgctttttcaagtaatgccaagtgaagaaaaaaaagctggttcgcttattccgtattctattaagtctcgtattgaacgtctttttactgcaccaggagaaggtgcggaccacgctatagctataacgtctcgcaatctaaatcggctaatgtttgttgatcctgcatgggtaaaggaatggcttataccccttttggatttaaaacatcctgcggcagaaccagcatggaatggttaccttcagtgcaatgctatgccttcaattgcagtagctgaacttattaaaccagcttttcttaaccttatcccttggatcgaatctctttcttgggaaaaagattattcagttcgagcttcgcaatggcttggcttaatgagaatgtttcaccctgatgagccctccagtccttccaggaatgaaatgcgctccatattacgagcattatctgacgaggctcgaaatcgttttatttcctggttaggattggtcgggcagaaaaacgagagtggctgggttaagtatgtgatcccattaatcagagaggactggcccaaagaacgccaatatagaaccacgagctctgtaaaagcatgggttggtttacttgacgatactggcgataagtttccggaggtttacgattcagtaaaaacatacttagtaccaatcgagacaattgatcatttgttctacagattcactcgggagctcggtggtaaaggagcaattgcagctatttttccagaaaccacacttgatttaatggacaaaataataccacagatattcacgcgtacatcaggagagttgcagaagattcttgagctaattgaagatacagatacaagtctgatcaaggactctcggtacttacggcttattgcactggttgagaaaaattag

SEQ ID NO: 175691 - DNA, 252 bp, Klebsiella oxytoca
atgaaagcactacttattactacattggtcatgggatttatttcagtgaatgccgcatctgccgctcaggaaattaaccacgcagatgggaaagaaaagatgggtgtaatttcagccagcaatgcctatacgcttgatgagttatcggatgttctttctcgtaaggctgatgagcaaggggcaacatcattcaaaatcctgtcgacaacgggggataacaggctacatggggttgctgaaatatataagtaa

SEQ ID NO: 175692 - DNA, 792 bp, Klebsiella oxytoca
atgaaaatacttattgcaggggcgacaggaagtattggccttcatgtcgtcaataccgctatcaaaatgggtcatcagcctgtagcgctggtcagaaataagcgcaaagtgaaatcgcttcctcggggaacggatgttttttacggcgatgtttcattacctgaaaccctcagcgatttgccgaaagatattgatgccatcatcttcacgctcggttccgatggccaggggcgtattggtgccagggcgatagattacggcggagtgcgcaatattttacgaatattcagggatacacctgttcgtatcggcctgatgaccacgattggcgtgactgaacgactcagcacctggaatcaacgcactgaggtccatgactggaaaagacgtgccgagcgtctggtaagggcaagtggtcaccactataccatcgtcaggcccggctggtttgattacaacaatgatgatgagcacagaatcgttatgcttcagggggaccgtcgccatacgggaacaccggaagatggtgtgatatcccgggagcaaatcgcccaggttctggtcagtgccctgacccacgacgaggcaaaaaataaaacgttcgagctggtagctgaacgaggtgaagcacagcagtatctttccccactctttgcagacttgcagactgatgatccacaaaaaaatgatggggttctggacatagacaatatgcctctgcgtgaagaacctgaatgcattattaacgagctgaatttgtattcaaaaaaattaaccaatctacaaccctga

SEQ ID NO: 175693 - DNA, 894 bp, Klebsiella oxytoca
atgctcaaagaaaacttcaacgaactgcaaatctttcttgtggtggcaagggagcgaagttttaccaaagcagcgggcaaactgggcgtctctcagtctgccctcagccatgcgatgaaggccctggaggaaaggctgaatatccgccttctgacccgcacgacccgaagcgttgcccccacggaagccggtgagagaattattgcctgccttgaacctcgtattgccgatcttgaacaggaactggaatcgctggttcagctgaacggcaccgcctccggcaatatccgtttatctgccggggagcatgccgctcgaagcctggtatggccgaagctaaaacccttcctcagggaatatccggaaattaatctcgaactggtggtggataacggctttgtcgatattgttgaggggcgttttgatgccgggatccgcctgggcgaaagcgtggataaggacatgattgcggtaagaattgggccggacatgagaatggccgtagtgggagcacagtcctattttgctgctaatcctgcgccccaaacgccgcacgagctacaacatcaccggtgtatcaatatgcgcctgccaactgccggtgggctttaccactgggagtttgagaaggatgggaaaccgttaagggtcagagtggaagggcaggtcacgtttaatctgcaggcggaaagaattgatgcggcgttatccggttttggcatcgcctgtatacctgaagacagggtgcaggattatataaagtcaggagagcttattcaggttttgcaggactggtgcccatctttccccggatattacctctactacccgagccgcaagcagcatccccccgcttttgcgctgatgatcgatgcacttcgctatcaggaataa

SEQ ID NO: 175694 - DNA, 990 bp, Klebsiella oxytoca
atgcaaaaacgttatctgggtaaatcccgactcgaagtatccgcgcttgggctcggttgcatgggcttaagccacggctacggcccggcgaccgatacccgtcaggctatcgagctcattcgcgcagcggttgaacgtggcgtcaccttcttcgataccgctgaagtgtatggccccttcctcaatgaagaagttgtcggcgaagccttaaaaccattccgtgaccgcgtggtcatcgccaccaagtttggttttacttttggtgacgacaacaagcagcagattttaaacagccgtccggagcatatccgtcaagctgtggaaggatcattacgccgtcttaagactgatgtcattgacctgctgtatcaacaccgtgtcgatccggatgtcccgattgaagatgttgcgggtacggtaaaagacctgatagctgaaggcaaagttaaacatttcggtctgtccgaagcgggtgcgcaaaccattcgtcgtgcgcatgccgtacagcctgtcacggcgctgcaaagcgaatactccatgtggtggcgcgagcctgagcaggagatcctgccgttactggaggagctgggcattggtttcgttcctttcagcccattaggcaagggcttcctgacgggctcgattaagccaggaaccacttttggcaaggatgattacagaagccaggtgccgcgtttcgccgggcaggcgattgaagccaatgaaaagctggtcttattgctgggtgaactggcggcagagaaaggcgtgacgtctgcacagatcgcgctggcgtggctgctggcacaaaagccgtggattgtgcctatccctggaactacgaaactgcaccggctggaggaaaacctgggggccgccgacatcatcctttctcaggatgactcgcgacagataacccaggcgcttgaaaccattaaaatcgtcggcgaacgttactctcctgagcaccaggctcgcgtaggccgttaa

SEQ ID NO: 175695 - DNA, 852 bp, Klebsiella oxytoca
atgcaaactgtaaaactgaacaacggtattgaaatgcccctgctgggctttggtgtcttccagatgacggatgctgctgaatgcgaaagagcagttattgatgccatcgatacgggataccgcctgatcgataccgccgcgtcttaccagaatgaaacccaggtcgggaatgcattgaaacagaccagtatcgcccgtaacgagctctttgtgacgaccaaactctggctacaggatacgaattacgaaggcgctaaagcccagttcgaacgctccctgaatcggctgcagcttgattacgtcgacctgtatctgattcaccagccttacggtgatgtgcatggagcctggcgtgccatggaagaactgcatcaggcaggaaaaattcgcgccattggtgtcagcaatttccatcctgacagactggctgaccttatcgcattcaacaaagtggtccctgcggtaaaccagattgaagttaaccccttcaaccagcagctacatgccgttccatggaatcaaagccatcgcattcagccggaagcctgggcaccatttgctgagggtaaaaatggcttgttccagcatcccgtgttaacggcaattggccagaagtacggcaaaagcgtgggtcaggttgtgctgcgttggatcttccagcgaggcatcatttcactggcgaaatcggtgcgcaaagaacgcatggaagagaacatcaacattctcgattttgaactcagcgctgaagatatgctgcagatttccgccctcgacaccgcaaccagcgccttcttctctcaccgcgacccggcgatggtggaatggctgactggccgcaaacttgatgtttaa

SEQ ID NO: 175696 - DNA, 504 bp, Klebsiella oxytoca
atgcgggaaatagttgtggtgccatacgatgaaaaatggccagagatgtttaaagctgaacattttctgatacaagaattactgggagacgtggttaagaatgttcatcatatcggtagtacgtcagtgcctggactctcagcaaaacccgtaattgacatactgctggaagtttccgacataaatgagctggatacctatggttctgcaatgtcccgtgccgggtatgttgctcgcggcgagaacgggattccggggcgtagatatttcattaagggaggtgatcagcgtagccaccaagtgcatgcatttactgtaggaaatatgcagatattaagacatcttgcctttcgtgattatcttagagaaaacagcgacattgcagagaagtatgctgaggtaaaacactcggctgcattactcagcaggaacgatgttcatcgctatagcgcgctcaaagcgaattttatagagcatcacctccaactcgcgctaactgcttga

SEQ ID NO: 175697 - DNA, 210 bp, Klebsiella oxytoca
atgaaacgccttattgaatacatcttagataattttagttcggcatcgctgtctgttgccgtccttttcgtcaaaccaagaagagtgaatattcctgtaaaacagtattatgcctatgaaatggagagtgatgacctactcattggctatggtatgccatgggataataaataccataatcgccccaacattgttaaattgctgaaataa

SEQ ID NO: 175698 - DNA, 2493 bp, Klebsiella oxytoca
atgcaagagaaaattgatctattaatagaaaaaatgaaatttggagatccagttctatttacaggagcaggtttttcttatggaatgactaacttaaaaagttcgcaaccgaaaggggttgctgatttgtcagcgattttgttgaaagatgcggggattgtagatagtaatgaaataccgcttaaagatatcgttgatttctacataaatgaaaacaaaattaatgaattaatagcaaccttggaagatgagtttttaattagtgaggtgtgtaattatcatagagaactagcaggtataaattggcgaagatgttatacaactaactatgattttggttttgaattagcttgtagtaatatacaaaaaaaaatgagaacaataaatccactcactgggtctgagtatcttcgtgatggtaatgtttgcattcatattaatggtgatatgaatatactaagtaaagagtcactttcaaatgaatttgcacttggtgacatatcatatgttcataataaatttgatgaaacgtattggtttaagcttttaagaaaagactttgaaagtgcaccagcaattgtgttcataggttactctctctacgatgagatgataaaaaagattcttaaatcaaatgatagattcagagaaaaaacatttattataacgtccccatacgctagcccatctgatttattcaagttaaagatttacggtcacgtattaaatattggtaccgaatctttcgctgaaatgataagaggaaagtacaatgaaataatattaccaattaaacaagatgcgctaaggaatcttgtaaagcatgatgatggcgatgacagaaaagaaataacaatggttgacattaataacttcttgttgtttggaaaaattgacagaaagaaaatacatagtgattataaaaatttcctgaataacgaaaaaaatcatttcatccccaggattacttatattctggaatgcgttgagaaaatcaaaaaaaacaaaaatatacttataaaaagtgaaataggaaatggaaaaagtgttctcttggaacaattaataaagcacttatcagaaactgaagatgttaatatatacacaccgaccgagatagatatatcgagccctccttcatattctgatgacttagaaaaactgagagactcgaatgtattatcagtgataatatgtgatgatctgaaccaaaaccaatatttgctttctgatttttcaatgttaaaaaatgcaaataatgtaatattaatctcaagcatcaggaatatagagtacgataaaattgatttcatgaatgttgattttgacaccatcattatagatgaactgtcgactaaatccatcgatgaaagcctgaagagtgaagttgattatttaattgagcttgtggatattcttaacttttggggtgaagaaaaagtaacattgccaataaacacgaaaagaaaaatattagcagaagattataaaaatcaaataagcgaaacattattagaccttttttcatctgaaaatatcataaacaaaataagcgagtaccttgattcaatagtaaaagacccgaagactagagatatatcatttttgatattgttatttaaatatcttaacatccatattgataattacataataagaggattgctaggtagtgattatattgactcaatttcattcaaaaaaaacgaatacatctcattattttactccgatgatagaaattctggatttacaaataaatctagcattttttgtagaataacattaaaaaatctttttgcaaacaaatacaagactgatacatttctaaatttggtaggtttgattgaaactgaaaaagggaggaggaacagtgaaaaagatagcaacataatccatctaaaagatagtcttatcaaggagataatgagatttagtaatattgataatttgctgaaagagatggatggtaaaaaatcatatcttttcacttattatagcgatctgatattaaaagctaagtggttgagcagggaatctcattattggcttcagctagcaatggctaaaatagccaatgacagactcgatgatgctcaaaatgatctaaagacagcatataagtgggctaatgaaaaacaagctataagaaactattcaacatctagtatagatactcaacaggcaaggctttacattaaaaaagcgataaaagaacagcatgataaagctgtgtgggattattttataagtgcacatgttttgttatctaagtgtgagaatgataagtatcgatatagacaagtaaaagaatatgaaagattctttaatcttaaatacaatattctttcagtgaaaaataaaaatgggtttaaatcatgttgtgagcacatgctgtctcaaatgaaattcctgagcaacatagatgcaggtgaatattcaataagatcctgtgaactttcgttaattagaattttagaaaaaatgcaataa

SEQ ID NO: 175699 - DNA, 912 bp, Klebsiella oxytoca
atggctgatgataatctgaatgcccttgctgcatttatggtggtggctaaggaacagaatttcacgcgagcggcaaaacgtctgggtgtttcacagtcagcgctcagtcagactgttcgtgttctggaagcacaactcgggatccggttgcttaaccgaacgaccagaagagttgtcccaactgaagctggggaacgtttactcgcttcagttggacctcagatagaggatattcagcggcagttaatggtgctgagtgaattacgtgataagccagccggtacaatacgacttaccgcaacagaatatgcagcagagtcaatactctggccagcagtgtcgcgtctcgttaaaaaataccccgatattaaagtcgaaattcttacagattatgggctaactgacatcgtcagagatcgttttgatgccggtgtacgtcccggagaaactattgccaaagacatgattgctgttcgtattgcgccagatatgcggatggcagtggcgggatctccagattatttcactaaccggcatgcgcccattactccacaggaattgacagaacactgttgtataaacctgcgcctttccgggcatggaggactctatgcatgggagtttgaaaaggacgggcgagaactgaatgtgcgagttgatgggcaactggttttcaatacgggaagcatgatactgaaagcggcgcttgaaggtcgagggctagcctatctaccagaagggcagcttgaaccctatataacatccggggctcttgttcgcgtgcttgaggattggtgtgaaccttactctggatatcacctttactatccaggccaccgacaacccaccccggcatttagcctgctagttgatgaacttcgctattcaacacgcgagaagcatcagagttaa

SEQ ID NO: 175700 - DNA, 459 bp, Klebsiella oxytoca
atgaaagcgattattgctgctgcagccatatccgtactgggggccgcccaggtttctgccgaaggtattgaaattcgccgtaacgggcagacaccttctgtcgtcggcaaggccgataacttctcgggtcatgctgttgtcagcccgttattaccgccaaacgagtccacgcgtgccaatctgggccaggtggatttcgccccgggtgcgcgtacggcctggcatactcatcctgccggacagttgctgatcgttacggccggtaaaggctgggttcaggaagaaggtaaggctcgtcaggatatcgccccgggtgacgttgtctggatccctgccaccgtacgccactggcatggcgccacggcgacgtcccccatgagccatctggccatgacgtatatggtggacggtaagaacgtggactggcaggagcccgtctcagacgcacagtaccagtaa

SEQ ID NO: 175701 - DNA, 777 bp, Klebsiella oxytoca
atgaaaacttcaacggcagttgcgctggcgctttctctcggatcggctggcgcccttgcagaaacgggggcgcagcggggcccgctgtcagacaccgacatagaggcagtatcccccgcgctcggacgctatgccagcaccaggctggcaggagacctctggaaaagaaacgatttgtcgccacgcgatcgcagcctcgtgaccgttgcagcggttattgcccggaatcagaccgtacttttaccggagcagctggagctggcgctgaaaaacggtgttaagccggctgagctttccgaaaccatcacgcagctggcgttctatgccggctggggcaatgccattgcggccgcagcggtaacgaaagagatattcctgcaaaaaggaattaacgctgaacagcttcctcgcgcggaggaggcgctgctgccgatcgatgaaaaagcggaagcagctcgcgctgcacgcgtggaacagagtatcggtagcgcggtgccggggcttgtcagcgacaccaccgacgtgcttttccgggaattgtggctgcgtcccgggcttgcaccacgggacagaagtctggtgaccctgtctgccctgattgcaaacgggcaggtacagcaaattccgccgcaccttaaccgggcaatgaataacggcctgacccggcagcaggcttcaggcgcactgagtcaccttgcctactactccggctggcctaatgctttttccgccgcgccggttttcaaaacggtgtttgagcagcgtgagtcgaaataa

SEQ ID NO: 175702 - DNA, 738 bp, Klebsiella oxytoca
atgtctcagggtatcgaaaacaaaatcatcgtcatcaccggtgccagcagcggcctgggagcagaaacagcccgacacctgtcgaaactgggcgcaaaggtggtcctgggggcgcgccgtatggagaagcttgagcaacttgccggcgaactggggctggatgccagagccatactccgcaccgacgtgacggaccgtacacaggtccagtcccttgttgaccgggcggtagagctgcacggccgtattgacgtcatcatcaataacgccggcttaatgccgagttcgatgctcgacaagctgaaggtggatgaatgggaccggatgatcgacgtgaacattaagggcgtactttacggtattgccgccgcgctgccgtatatgaaagcgcagaagtccggacagtttatcaacgtgtcatcagtagccggacacaaagttgggcccggcggagccgtctatgccggtaccaaatgggccgtccgcgctatttcagaaggcctgcgtcaggaagtgaagccctggaatatccgcacaactattgtttctcccggcgcggtagataccgaactgactaaaaccatcaccgacgaagatattgcgaaaggtatgtcgaaaacctacgagaatgcgatcccggcagaggcttttgcgcgggtcgttgcatttgccatcagccagcctgacgacgtggatgttaacgaaatacttttccggccgaccgtacaggtttattga

SEQ ID NO: 175703 - DNA, 1209 bp, Klebsiella oxytoca
atgcctgtaaaacattctcaaaataattccggtgcccgggttgtcgcagcgctgatgccggtaatggccgcggttctggtcggttttatcattatcggcgtcgcgctgcccgtcctgccgctgcatgtcaaaaatgacctgggcttcgggacgtttatcgtaggcctggttgccggggcacagtttgcggcatcgctgatttcccgggtgtggtccggaagttattcagacaggcgcggcgccaaaaagggcgtggtggccgggctcatcgccgcggccgtttcagggctactgtaccaggtgtcgctctggctggtcggcatgccggtactgtcagtgggtgtactgcttgccgggcgcgcgatccttgggggggcggaaagcttcatcattaccggcgccgtggcatggggtctggccctcgtggataaagagcacgcaggtaaggttatcgcctgggtgggcaccgcaatgtttgctgctatggcactcggcgggccggtgggcacgatgttgtttgatgccttcggctttgaggcgatcgcactactgacgctcctgcttccgctgctggtactggcatatctcgcccgcatgcccgcggtagcgccccatccccatgccgcacaggcaacctttggttccgtcatgcacgccgtctggttaccggggctgggcgcggcactggccagcacagggtactgcaccattctggccttcagctcactgtattacagcgccatgaactggcagcccgtctggatggcattcactgcctttggcgttgcgctgattgctgcccgaaccgttgcgggccatctgccagatcgctttggtggcgcgcgtattgcgctgatttttgtgctcgtacaggccgccgggctgttcctgatatggcttgccggtacgtccctgattgcgacgacaggtgctgccttagccggttttggctactcattggtttacccgggcctcggtattgaagccatcagtggttcaacaccccagaaccgcggcatggtgatgggcatctacacagcatttcttgacgtggcaatggcgatcggcagccctgcgctcggctggataggaagccacctgggactgaacgcgatatttctggccggcgcgctggcagtgctgtctaccgctgtggtggcattcctgctgttaaaacgcccgggccagagtcaacaaaatccggcctga

SEQ ID NO: 175704 - DNA, 1044 bp, Klebsiella oxytoca
atgaaattgcattcaaaagggaaattaaaaaccctggccgcactgacgatactcagcgtcgctctgggtatgggggcaaacactgccgtcgcggcggatatgtcccacggtgcggataatttctatcaaagcgataaggtgaaaactgaaatcgtaaaattcaaaaatatttacggtatggaagttaccggcacgttatttactccacgcaatatggaagccggtaaaaaatatgacgcccttattgtcggccatccttttgctgcagtaagacagcaggctgctaacctctacgcaaccaaaatggcggaagccggttttgttgcgctgtccttcgaccagtctttctggggtgagagtgcgggtacgccgcgtggggccgtgctgcctgatgtctatgcagaaaacttcagcgctgccgttgatttcctcggaacccgtacgtttgtagaccgtgaaaaaattggtgtaatcggcatctgtggtagtggcggctttgccatcgccgcgacaaaaatggatccccgcatcaaggcgctcgccaccgtcagcatgtacgacatgggtgaatatttccgtaccggtctgaaccatgagcggaccgtggaaatgagaaacaaggacctggcgattgcagcagaacaacgctacaaaacggctgaaaccgggcaacccgtttatggtcccgggcaaaacgatccggtgttcatcgaaggtaaagagtccaatgacttttatcagacggagcgcggtaaggtggcatccaacgatcgccgctcaacaccggcgacctatgcgaagttcatgaacttccatccgtttatcgatatcgagtccatttcaccgcgaccaatactctttgtcgtgggtgatgctgcaccatcccgcacatataccgataccgcctataaaatggccgcagagccgaaagagctggtggagattaagggcgctaaccgtatcgacctgtatgaccgcactgaactcatcccgtgggacaagctggtctcattctttaacaccaatctcaaaacagataaataa

SEQ ID NO: 175705 - DNA, 429 bp, Klebsiella oxytoca
atgttcaaaccggccatgcttgctctggcggccctgacggctgtttcattctcatctttgggtgccgaggctgaaggcatccgggtcaagatcacggcaggtgaccaggtgatgacggcaacgttttatgacaacgccaccacccgggcgctggtctctcgttttccgctgacgttgcctatggaggatttatatggacgtgaaatgtgctaccggttccgggatgcgctgccggcaaacgaaacgaaaaccagcggttatgaggtgggcgatattgtttactgggcaccccgccacagcttcgtcatcatgtacgaacagaacaatgaacggataggtaaccttcagaaagtgggccgaatccactctggagtggggattttcagacatacgggtaatattgatgtgacatttgaaatggcacattga

SEQ ID NO: 175706 - DNA, 1050 bp, Klebsiella oxytoca
atgaaaacggttggttatgcagcgcacgctgccgacgcgaaactggttccttatcattttgaacgtcgcgatttacgtgaaaacgatgtcgccattgaaattctttattgcggcgtttgccactcagatctgcatacggtcaacggagactggggcccgcagccttacccgttgatcccgggccacgaaattgtgggtgtcgtcacgtccgtggggcagaacgtcaaaaaatttcatccaggcgatcatgttgccgttggctgcatggtggatagttgtatgcactgcgatcagtgtgagcatggcgaagagcaattctgtcgtaacgggatgacgcctacctatggcgcaccggatcgcttgagcggcgaaatcactcagggcggatacgccaaacatattgtcgtacgcgaagagtttgtcctgcgtgtgccggaaaatatggatctggcaaagaccgcgccgatcctttgtgctggtatcaccaccttctctccgttgcgtacctggaatgtgggctcgggaagccgcgttggcgtgatcggattaggtggcctgggccatatggcggttaagctggccgtggcgatgggggccgaggtgaccgtcatcagccgcaataagaacaaagaggaagaggcaaaggcgctgggtgcgaaaggcattttgccttcttccgatccgcaggcattgcaggattcagcctgtgcattcgatttaattattgatacagcacccgttaagcatgacctgaatatctataccccgttattggatattgatggctcgttagtcattgtcggccaggttggtctgatggatgaaccgctcacggttcctttgatcatgggtcgccgtcgcgttgcgggttcgctgatcggcggcattgcggaaacccaggaagtcctggatttctgcgcgaagcacgatgtctatcctgagtgcgaaatgattaatatcgatcagatcaacgatgctttcgctcgccttgcacagggagacatggcccaccgcttcgtcattgatatggcctcgctgagcgcagaataa

SEQ ID NO: 175707 - DNA, 354 bp, Klebsiella oxytoca
atgaagataaatatcatacttaacgataaaacccttaccgcgaccctgaataactctcctgcgagccgagaatttgcggccttattaccgcttacgttgcaactgaaagattatgccggggaggagaaaataagtgacttaccttcccggttgaccaccgaaggttcacccgaaggaacgtcagcaaaaaaaggcgatataaccctttatgcgccctggggaaatctggctattttttataaatcccatagctatgtgtctggcttaatgaaacttgggcaattagatgagccagatgcattgcccgtccaccctgatgcctacagcgccagatttgaactgttgacggaataa

SEQ ID NO: 175708 - DNA, 705 bp, Klebsiella oxytoca
atgacacaaaaagatacacatggcgccgttgctgaagtcgcacccgctatggctgcgtatgctgaacgatttattgaaaaagatctctggaatcgtccggagttgtcacgtcgcgaccgcagcctggtcacgattgcagcactcatcagccggaatgatacggctgagcttccgcactaccttaacgtggcgctggatagcggcgtgaagcccgctgaaatctccgaggttattacccatctggcattttatgctggctggccaaacgccacctctgcggcgctggttgcccgcaacgtctttgcgcaccgccatatcgatacggcatccttgccaggggataaagtggatttcctgcctctggataaagcgtcggaaaaccaacgtgccacgatggttgagtcaaactttggcaaggtatcaccgggggtcgtgaaatacaccacggatgcactattcctggacctatggctgcggccgggtctggcaccacgggaccgaagcctggtaacggttagtgcactggttaccgccgggcaagtggcgcaagtgccgtatcatcttaatcgggcgatggataatggtttgacccagactcaggcctcagaggtcttgacacagctggcctttgtggcgggctggccaaacattttctcagctttacccgtatttaaagaggtatttacaggcagaaaccaggcctga

SEQ ID NO: 175709 - DNA, 900 bp, Klebsiella oxytoca
ttggcacgggaaaaccttaatgatttaatggcgtttatagtcgtcgcgcgtgaaaagagctttaccaaagcagcggcacatttaggcgtttcacaatcagccctcagccataccattcgaaccctcgaatcccgtcttgggatgaaacttctgacccgcaccacgcgcagtatttcgttaaccgatatagggcaatccatgttcgatgacctcggcccttatatcgatgggatccaggggcgattacagtcgctgaaggacctcaacagtaaagccgccggtacggtacgtatatcaacgtcagattatgcgattggctctgtcatatggcccaagcttgagccactactcaaggaatacccggatattactctggagctgattgatgactatgcgctgacggatattgtctccggccggtttgatgcaggaacgcggctcggtgagcaaatctctaatggcatgatctccgtgcgtatcggcccggatgtgcgctttgccgtcgtcggttctcctgactatttttcccgccacccttatccgctgcatcctaacgatcttattgatcacagctgcatcaatcttcggtttcccacccacggtaatttgtatgtctgggagttcgaaaaagagggaaagagcctgaacgtcaaggtcagcggtcagctggtgtttagtcgtatctatcagaatttacaggctgccatagaaggatatgggctggcacatgttccccgtgatatagcagagaaacagctcgcccgcggcgaactgatcagcgtccttgaagactggtgtccttactgggatggttattacatctactacccggaaaacagaaatcattcgaaagctttccagctcgttattgacgcgctgcgccactacaaacatccctga

SEQ ID NO: 175710 - DNA, 873 bp, Klebsiella oxytoca
gtgaattattcattattaaacaataacctgaaaatgccgatggctggttttggtgtttttcaggtaacagataaagaagagtgtaaacagtcagtattgactgctattcgtactggctaccgccttatcgataccgcagcagtttacggtaatgaagatgccgttggtgacgccgtacgcgaggctattgccgaagggttatgcagccgcgaagagctgtttattacctcaaaactatgggtacaggacatggccagttacgatatggccaaagcaggaattgaagcgtcgttagaaaaatcagggctggaatattttgacctttatttactgcatcaggccatgcgtgattacttcagcgcgtggcgtgcgctggaagatgcctatgatgccggtaagcttaaggcgattggggtgtctaatttctatgctcatgtattagcaaatttctgcgaaaccgtcagaatcaggccaatggtgaaccaggttgaattgcatccttactttgcgcagcctgctgcacttgaaaccatgaagtattacaacgttcagccggaagcatgggcccccttaggcggcggaaggcataagccctatgaaaatgaaatgctgcagcgaattgctgatactcacaaaaaaacagttgctcaggttgtcctgcgctggaatgtgcagcgtggtgtcactgttatccctaaatccacccgtcaagaacgtattgaagagaactttgccatctgggatttcgcattgactgagagtgaaatggaacaaattaacacgctcgatttaggctacgttggtgatgccgtgaagcactttaaccctgaatttgtgcgtggctgtcttggtgtgaaaattcacgatcgctaa

SEQ ID NO: 175711 - DNA, 1065 bp, Klebsiella oxytoca
ttgaagacaatcttaaaaacgctggccatctgcgtgatggcgagtggtctggtggctcagtcggtatacgccgggccgctggtcattcaggaacagggaagcttttctgctggtggcactgtcatcaccgcaccaggaacatttgacgcgaaaaagccgctggactctgctggccaaacctatcatggcgatcatgcctcagtgttctaccaaatcccggagaatccgcataaataccctatcgtcatgctgcacggcgcaggtcagttctcccgtacctgggaaagcaccccggatggtcgcgaagggttccagaacatattcctgcgtcgcgggttctcaacttatcttgtcgatcagccgcgtcggggcagcgccggacgcacgactgtagaaggtgctgttacgccaaaaccggatgaacagatgtggttcaaccagttccgcgttggcgtgtggccagagtattttaaaggtgttcagttctctcacgacaaagaagcactgaatcagtatttccgtcagatgaccccgaataccgggccgtttgatatcaatgtcatctctgatgcgatgtccgccgtagtggataaatccggccccgctatcctcttcacccactctcagggtggcggaccaggctggtacacggcgatgaaaaatgacaaggtcaaagccattgtcgcctttgagcctggcagcagctttgtcttccctgaaaaagaactcccagcccctatgccaagcgcgttcgacacgctgaagggtgagccggtgccgatggagcagtttatggctctgaccaaaatgccgattctgattatttacggcgataacataccggataaacctgtcgccatgcccgcgcaggacagctggcgcgtacgtctggcgatggctcgcgaatggcgtgatgtggtgaacaagcatggcggggatgtcactgtgacgcatctgcctgaagtgggaatcaaagggaatacccacttcccgttctctgatctcaataatgtgcagattgctgatttggtgagtcagttcctgaaagaaaaaaatctgcagtag

SEQ ID NO: 175712 - DNA, 579 bp, Klebsiella oxytoca
atggagcatgatcccactcgccgaatgttaatcaccgcacttgccgggctgacgctggcgaacgtttcgctggcgacagctgccaacgccaacgtacagggtaaaagccatgttctggtggcgtacttttcccgcagcggaaatacacgggtgattgcgggcgtcattcaccgcagcctgaataccgatctgtttgaaatcgaaccggctacgccttatccggaagactattttcagaccgttgaacaggcgaaaaatgagcgtgagcggggcgtaaaacccgcattgaaaaatagcatcgcagatatctcacgctacgagaccgtgtatttaggctttccgatctgggggaccagcgtgccgcctgtcgtgcaagcatttctcagcagccacaaccttgcgggcaaattactcatccccttcattactcacggtggctacggtaaaggagacagcgacgacatccttgcccgtctcgcccctactgcgcgtagggaaaaaccgctggttattgaatgcgaccaggagcgaagaaccactgaaacggtcaccagttggttagtgacaatacgcagttaa

SEQ ID NO: 175713 - DNA, 762 bp, Klebsiella oxytoca
atgaacaataccacgcccattaaggcattagcggcaacggtactgctgacctttggttttggtctcgcggcacatgctgcgcccgtcaataaaggagcctcagaaatgaaccacgaacaaaaggtttcagatacactgtcagcccgccaacaggccatcccgttgattgcggcatcgatggccagcagtcagatggataagctgaatgcagccctgaatcagggactggatgccggactcacgataaacgaaaccaaagagattctcgtccagctttatgcctatacgggcttcccccgtagcctgaatgcacttagtgaactgatgaaggtcgtcgaagcacgtcaacaacgtggtatcaaggacattgagggtaaagagccggttgcgccgatcccagtcggggatgagcttcgccgtgtcggtaccgcaaaccagacaaaaatctcaggcgctcccgtccagggcccgctgtttgattttgccccggtcattaaccagttcctgcaaacgcaccttttcggcgacattttcgcccgcgataacctcgactggcaaagccgcgagctggcaacggttggcgcattagcggccacaccgggcgtcgaatcacaactgctgtcgcatacgcgagcaagcatgcgggtcggcctgacggcagcgcagctgcgccagctggcacaggttctgcgtgaacatggcgaaaatgatgcagcaacgcgagctgaaaaggcgctgcaagtggctctcgcaaaccagtag

SEQ ID NO: 175714 - DNA, 480 bp, Klebsiella oxytoca
atgatcggacatttacgttacctcgggctgttattgccccttttcgccttttcatcctgggcagcggagcaaaatcccgctgcccatatcgcccccgccggaagccaaaacgctgtatatggggcagaggagtactttaccgggcgcgtccgggttgatcctctcttcaaaccggataacgagatcagcgtttccgggtcttatgtcacctttgagcctggggcgcgttccgcctggcatacccatccggcaggtcagcggttgattgtgacctcgggtgttgggctcacccaacaagaaggccagccggtgcaggttatccgcgcgggtgacgttgtttcttgcccggcgggcgtcaaacactggcacggcgcggcccccggcagcgcgatgacgcatctggcgataagcgggattgtagacggcaaaagcgttaactggatggagaaagtgacagatgaacaataccacgcccattaa

SEQ ID NO: 175715 - DNA, 1458 bp, Klebsiella oxytoca
atgcctgagcgttccatctccgttcacctggcgctgatgtttgccttatccgcgctgctgattgtgtccgttatcggtatcctgctcagaagttccttgcatgattctttgcaaaagcagatgcacaacgaattgttgttccgcgaatcattaatgagcccgtggatcaccgcccgaacctcggctgagggctggtcgacgctggccaataaattcaccgtattaaccaattctgaaggtgaacgcgttcgctactggatagtgagcgataacccacgctttagcatggggggaacaccaccggtgggtgttgagtggtcttctttacaggaaggctttaataaagtgcccggcgcatcggaaggtgcctgctcactgtttctgttagtgaaaacgatccccgccaacggtgaaaggcctgaactgcgctatatcgttgccatcgactccacgccgtatatgggcacactgaatgccttcacccggacgctgctcatcatagccgcgctgggcgtcgtgattgtcgccttgctgggatatattgtatcaaggatcggtcttcgtcccgttggcgcgctcagtaaagaggcccggcatcttgcaccgggagaccatggccagcgcctgaatacccgcgcgttacccgaagaactgcagcaactggcgtcatcctttaacggcgtgttagaacgtcaggaaatcgcctggcgtcagcttgacagctttaacgccgatgttgcgcatgagctccgtaccccgctgacaaaccttatcggccagacgcaactgggtctctcacgccgacgttcacatgatgaactggaagaattactgggttccaatctggaagaacttgaacgcatgacgtctatcgttaacgacatgctgttcctgtcccatgcccatgcgggtgaacatgcgtcccagcttacccaggtgtccctgcgcgaagaaaccctgaaaacagcggagtatgtggaaccctcttttgctgaaaagcagctttcgctgaatgttgagggagatgttaccgcgtacatcgaccgacgactgttccaccgctcactggccaatttactggaaaatagcgcaagacactccccctccaacagtacggttacggtgcggttaagcgaaaccggtcatcaagcctgtgttgaagtgtcaaaccggggcgatccaatagcaccagatcacttacaccggcttttcgagcggttctatcgcgttgacacctcccgggccaggagtgatacccatcatggactgggcctgtcgatcgtgcgtgccgtcgccattatgcaccggggagatgtctttgcccgtagtgaaggaggcatcaatacttttggcctcacctttgcgctacaagcggataaagcggcagacaatgctcaatccggtactgagccgggacccgggttagctgacagaattgtcaggggggcgtcagcctga

SEQ ID NO: 175716 - DNA, 681 bp, Klebsiella oxytoca
atgcgcctgttgttagtcgaagatgaagaaaaaacgtcaacctatctcaaccgtgcgttgagtgagtccggatttacggtagatgtctctgcagacggcgctgaaggtcttcattacgcgctggagttcgactacgacgcgataatactggatgtgatgctgccggggatggatggttaccgggtacttgagggtgtgcgagcagccaaacagacgccggtgctgatgctttcggctcgcggctctgtcgatgaacgcgttaaagggcttcgccttggcgcggatgattatctccccaagcccttctcgctgattgagctggtggcgcgtattcaggcactggtacgtcgccgcgctacggatggcgcagacatcactcaactgcaaattcacgatctgcatctcgacctgctggctcgccgcgtatttcgcgccggaacgcgactagagctgaccgcaaaagagttttccctgttgagccttctggcccggcatcagggggagattctgtcaaagatgatgattgcggagcagatatgggacatgaattttgatagcgatgccaacgtggttgaagtggccattaaacgccttcgggccaaagtggatgcgccgttcgacgtcaaactgctgcataccgttcgtggcatggggtatgtccttgaagtccgatcagaatag

SEQ ID NO: 175717 - DNA, 153 bp, Klebsiella oxytoca
atgctgcaaaacacagcggctaccggcgtgtcgctgacttccgccgagatgaccgagctcacccgctcactggatgccatcactatccaggggcaacgtctgccggatgccgtgcaggtttattccgatgttgaagcaccgatgaaaagttaa

SEQ ID NO: 175718 - DNA, 888 bp, Klebsiella oxytoca
atgaaaagccagaatgccccaacaatgccagagcggcgcaagctattagtcgccggggccggtattgccgccgcctcgctgattccgtacgtatcagcggcgagccaaacctctcatgtcgattcatccagacaatccagccaacgtccttcagctcctggcaagcgtaaactcgggaagctggaagtttctgccatcggtctgggcgtgcagaacatgagtcataaatacgacacctccgttccctggcgtcccgagatgatcaatgttatccaccgtgcatttgatgaaggggtaacgttctttgacgctgctgaagcctacggcccgtttgaagtcgaaaaaattctcggggaaggcgtcgccccgttcagggacaaaatcgttatcgccaccaagtttggctggaacattgaccaacagacgggtaagcgtctgccgggccttaacagcagacctgagcatatccgacaggtcgtcgacaatatgctcaaacgcctgcgtaccgatcgcatcgacttactgtatcaacaccgggttgatccacagatccccattgaagatgtcgccggtgtggtgaaagatttaatggatcaggggaaagtcctgcactgggggctgtctgaaatgggcatcaatacgttgagacgcgctcatgcggcattacccgttaccgccgtgcaaagtgaatactccatgctctggcgtggccctgaaaagcaggtatttccggtgtgtgaagagctgggcattgggttcgtgccatggagcccactcggcgtgcaatttttaacgggctggattgatgagaatacccggttcgctgccggtgatttccgcgcgacagaaacgcgtttctcgcctgaaaacttgccacacaacttatag

SEQ ID NO: 175719 - DNA, 1050 bp, Klebsiella oxytoca
atgaaattcacgcttatcagtgcaatgctactcacggctatggccggagtgacctcagtcaatgcggctgattacaaaaaaaatccattcactctcgtctatgacggagccatcaccgagaacgtcaaaggcaaggtcaacattcacccagtgaaatacgatctgcatggcatccagattgctgcgaatgtctatacccctgctaactacgatcccgccaaaaaatatccggccgtggtggttgcacatcctaatggcggcgtaaaagaacaggtcgccgggttgtatgctcagcgtcttgccgagcagggctacatcacgattaccgccgatgcggcgtatcagggtgctagcggtgggatgccgcgcagcgtggataaacctgctaatcgtattgaggacattcacggcatggcggactacatcagccagtatcctggtgtcgataccgcccgccttggtctgctgggtatttgcggaggtggcgggtattcacttgttgcggctgaaactgacaagcggttcaaatcgatagcaaccatcagcatgtttaattcaggccttgtgcgccgcaacggtatgcaggattcacagctggatactatccagcagcgtcttcaacaggcttctgacgcgcgtgctcaggaagcagccggaggagaagtgctttactccggcgatgccaacctgactgatgaacagattgctaaattaccttttgccttgtatcgccagggctacgagtactactggaaaacccacgcgcacccgaactccacgtttaaatacaccaccagcagtcttctggatttgatgagctttgacgtaacggaccatatcaatctcatcaataaaccgctgttgatgattgccggcacaaaagcggatacgctctatatgactgaagacgcgttcgcgaaagccaccggtacgaaggacaaagaactcttcctgatcgatggcgctacccatatcgagacgtattgggtgccaaaatacgttgaccaggcaatgcaaaagttagacgtcttcttcgataaaaatatttag

SEQ ID NO: 175720 - DNA, 681 bp, Klebsiella oxytoca
atgagtacgcaagagccaacatttagtgaggtagtaaaaaacagatactcggctagagcctttcttccatctcccatccccagcgatatcctcaaagacattttgctcgaagcgcaatgcgcaccatccaactgcaatactcaaccctggaccctgcatattgttgcaggagataaacttcgtgaattaagccacgcactgacggaagatctgagggctgggaactacagccttgattttacgtttgataaagaagcttatcccgagccattcaggcaacgggcttcggagcaggggcgctcgtactatcaggcactgggcgttgcgcggggggataacttaagtcgctcagaagtggtcgagcgtaatgtgagatttttcggcgcgcctcatgttgccctgctattcattcctgctgtaggggacaacgttcgtgtagcctcagacgccggtatgtatgcgcagacattcctgctttctctggcagcccgtggttacgcaggcgttccacaggcagtgctgagttattttgcccaaacggtgcgtaggctattgaatgttcctgagggcttcaggctgctttatggtatttcttttgggatcccagataaaacgcatccctccctgagttacagggaagggcgggtatctctggacgaaagtgtcgtctggcatcaataa

SEQ ID NO: 175721 - DNA, 1203 bp, Klebsiella oxytoca
atgcttaatcaacaggcacaaacacagtcggctacagctaaaaaaaccggtctatcgtttctactcattctcagcgccctgatggctgtaacctctttatcaaccgatatctatctgcccgccatgcccatgatggccaaagatttgcagggtgacgcagagctgacaatcacaggcttccttatcggcttttgcattgcacaactgatttggggaccgattagcgatcgttatggacgtcgactgccgctggttatcggtttaggtctgttcatcgtcggctcggtgggctgcgcgttatcaacggatatcgtgcaaattgtcttctggcgtgtttttcaggcgttaggtgcctgtaccgggccgatgctggctcgagcaatgatccgagacctatttagccgcactcgtgcagcacaaatgctttcgacactgatgataatcatggccatcgcaccgattgccgggcccctgatcggcgggcagatgattaaagtcacctcgtggcatgccattttctggctgctggcgattatcggaacagtaatgctgatgtctttattctggttaccagaaacattacctgctgaaaaacgctcgcaagcctccgtaaccagagcctttcaaaactactatgctttgctaactaacgctaaatacatgcggtttacgctatgcctgacgttctactacgttgcagcctacgcctttatcaccggctctccgtttgtgtacatcacgtacttcggtgttgacccgcagcattacggttggctgtttgcagtaaacattgtgggattgatggcggtgagcatggtcaacagacgtctggttcaccgctatccactcgaaacgttgctcaggaatgccgtattcatcgccactattgcagcgatagtgctggcggtcaccaccggcttgggtgtaggtggaattaccatgattgtcggcgctgtgttcgtattcttctccatgaatggcatcatcgcggcgacatccacggcttgcgctctggacgcagtgcctaatgtggctggctctgcgtcggcgctaatgggggcattacaatacggcagcggaatcatttcctcactgcttctcgctctgttcagtgacggcacaccatggacgatgggctggataattgcgttgtttacagcagccagcgccctgatggcactgaccgttcagctaaaaaaataa

SEQ ID NO: 175722 - DNA, 252 bp, Klebsiella oxytoca
atgtcacaacatgaacagttctgtcaggcttgcggaatgccgatgtcggcgcccgatgcacacagtgccagtgataaatattgtgcgtactgcagcgacagcaacggcaatcttaaaccctgggaagaggcggtatcaggcttggccagcttccttgattcctggcaaaaagtcggtccagaagaagcacagaagcgtgcaaaacgttatctgacggcaatgcctgcctgggctcataaagcggacgagtga

SEQ ID NO: 175723 - DNA, 1629 bp, Klebsiella oxytoca
atgacgattagtacgattatcagggattccgcaaacgcagttttgccggaggaggagcgcaaaatcccctgggatgaaccggcgtttagccagcgtatgctggagaatcatctgtcgcaggagcacgactgggccagccgcaggctggcggttattgaacaacaggtggcatggcttgccgggcagctgcccgccggcgcgcgcattctggatctcggctgcgggccgggtttttatacgcgccagctggcggagcgcggcttttgctgtacgggcgtggatttttctccggcgtcgatcgcctgggctcgtcagcaggcgcaggcggccagccttgatattacctatcaccagcaggacgttcgccactaccagccggaagagcagttcgatttcattatgatgaccttcggtgaactgaatgtgttcagcgcggctgaaacccgggccttggttaatcgctgcgcgcagtggctggtggcgggaggaaaactgcttatcgaagttcatacttatgctgaagttaaacggcaggggatggctgaacccagctggcagcgctgtccgcaggggctatttctggatgtaccgcacctgctgctgacggagcacgcctgggatcccgctgcgcaaaccagcgcaacgcgatttatggcgattgaagagaacggcaacgtgacgcgcttcggcagtcagatgaccgcctggcaggatgacgcctggctcgacctgctgcatacggcaggttttacctcaattatccgcccggatggggcggcatggccggtcagcgatacttttaccgacaagctgtacgcgctgctggccgaaaaaaacgaatcttattctcttactacccactcaatgaaaggaataccaacattggatatcccacgtatttttacgattagtgaaagcgctcaccgcatccataacccgtttacgccggaaaaatacgccacgcttggccgcgtgctgcggatgaaggccggaacgcggatacttgaccttggcagcggatcgggggagatgctctgtacctgggcgcgcgaccacggtattagcggcaccggcgtcgacatgagcgcgctgttcagccagcaggctaagcagcgggcagcagagctcggggttgccgaccgcgtcacgtttatccatcaggacgccgctggttatgtggccgatgaaaaatgcgacatcgccgcctgcgtaggcgcaacctggattgccggtgggtttgccgggacgatggagctgctggcgcaaagcctgaaaccgggcgggttcatgcttatcggcgaaccctactggcgtcagctaccggcaacagacgagatagcccacgcctgtggcgtcagctcgacgaccgatttcctgacgctgccagggcttgtcagcgcgttcgatgacctcggctatgacgtggtggaaatggtactggcagatcaggaaggctgggaccgatatgaagccgcgaaatggctgaccatgcgccgctggctggaggccaaccctgacgacgactttgcggaggaagtcagggccgagctaacactctcgccgaaacgccacgtaacgtacgcacgggaatactttggctggggcgtgttcgcgctcatcgccaagtaa

SEQ ID NO: 175724 - DNA, 552 bp, Klebsiella oxytoca
atgacaaaccataacttcacctttcacatcacctcagagcgtgatgctgatgatattcgcgaagttgaaacccgggccttcggctttagcaaagaggccgatctggttgccgctttgctcaacgatgaaagtgctcacccgagcttatctctgctggccaaacataatggaaaagcagttgggcatattttgttcaccctggcgacgttcaaaggggagtctgactctccgatgatgcatatccttgcccccctggcggtggtgccggaataccagggcgtgggcgtaggcggattgcttatccagcgcggtattgagcatctgaaagccgcaggaagcgaggcggtatttgttctgggacatgccgcttattacccgcggcatggctttgaaccctgtgccggagataaaggctatccggcgccttatcccattcccgaggagcataaagcctgctggatgctgcagcggctttcgtcccggccgctggggagaaccggtcagatacagtgcgcccgggcgttaatgaaacccgagcactggcgcgagtaa

SEQ ID NO: 175725 - DNA, 258 bp, Klebsiella oxytoca
atgaatctatcccgtcaggaacaacgtaccttacacgttctcgctaaaggtggccggatcgcgcatattcgcgatgcatcaggccgcgtaacctctgttgaatgctacagccgcgaagggctcctgctcagcgactgcacgctcgccgttttcaaaaaactcaaaaccaaaaaactcattaagtccgtcaacgggcagccctaccgtatcaataccaccggactgaacaacgttcgcgctcagctggacaaccgctaa

SEQ ID NO: 175726 - DNA, 1185 bp, Klebsiella oxytoca
atggaacagacatggcgctggtatggccctaacgatccggtcactttagctgacgtccgtcaggcgggcgcgaccggagtggtcaccgccctgcaccatatcccgaacggcgaagtgtggacggttgacgagatcctcaagcgtaaggccatcgtggaagaagccgggctggtgtggtcggtagttgaaagcgtaccgattcacgaagagatcaaaacccataccggcaactacgcgcagtggatcgctaactatcagcagagcctacgcaatctggcccagtgcggcattcgtaccgtgtgctacaactttatgccggtcctcgactggacccgtaccgacctggaatacgtcctgccggacggctccaaagccctgcgtttcgatcaaattgaatttgccgcctttgagctgcatatccttaagcgtccgggtgcggaagcggactacaccgccgaagaggtcgcccaggcgaatcagcgcttcgccaccatgagcgaagaggataaagcgcgcctgacccgtaacatcattgccggtctgccgggcgcggaagaaggatataccctcgaccagttccgccagcatctggcaacctacaaagatatcgataaagccgcactgcgcgagaacttcgccgtcttcctgaaagcgattattcccgttgccgaagaggttggcgtgcgtatggcggtccacccggacgatccgccgcgtccgatcctcggcctgccgcgcatcgtctcaacgattgaagatatgcagtggatggtcgataccgtgaacagcatggcgaacggctttaccatgtgcaccggctcctacggggtacgcgccgacaacgacctggttgatatgattaagcagttcggtccgcgtatttactttacccacctgcgctctacgctacgtgaagagaacccgaaaacgttccacgaagcggcgcacctgcacggcgacgtggacatgtatgaagtggtgaaggccattgtcgaagaagagcaccgccgtaaagcggaaggtaaagaggatcttatcccgatgcgtcctgaccacggccaccagatgctcgacgatctgaaaaagaaaaccaaccccggctattccgcaattggtcgcctgaaagggctggccgaagtccgcggcgtggagctggcgatccagcgcgctttttttagccgctaa

SEQ ID NO: 175727 - DNA, 1476 bp, Klebsiella oxytoca
atgactgcaaccattgccgacagcaacctgccggttacgcgccctgcatgggatcgttctcgtctcgaatcccgcatcgttcatctgggctgcggcgcatttcaccgcgcgcatcaggcgctttatacccatcatctgctggaaaccagcgatagcgactggggcatctgcgaagtcaacctgatgccgggcaacgaccgcctcctgattgagaatctgaaaaatcagcagctgctttataccgtggcggaaaaaggcgctgacagcaccgcgctgaaaattatcggttcgatgaaagaggcgctgcatccggaaatcgacggctgtgacggcattctgcgcgccatgacgcgaccgcaaacggcgatcgtttcgctgacggtaacggaaaaaggctactgcaccgatgcggccagcggtcagctcgatctgaataacccgctgattcaacacgacctcgcccatccggcgacgccgaaatccgctataggctacatcgtcgaagcgctgcgcctgcgccgcgaagaggggctaaacgcctttacggtgatgtcctgcgataacgttcgcgagaatggccacgtggcgaaagtggcggtacttggcctggcgcaggcccgtgacccagcgctggcggcgtggattgaagctcacgcgaccttcccgtgcaccatggttgaccgcattgtgcccgcggcaacgcctgaaaccctacaggagattgccgaccagcttggggtctacgatccgtgcgccatcgcctgtgaaccgttccgtcaatgggtgattgaagatagcttcgtcaacggccgcccggagtgggacaaagtcggcgcgcagtttgttgaagacgtcgtgccgtttgaaatgatgaagctacgcatgctcaacggcagccactctttcctggcctatctcggctatctcggcggctatgaaaccatcgccgacaccatgactaacccggcataccgcaaagcggcttttgccctgatgatgcaggagcaggcgccgacgctctcgatgccggaaggcaccgatcttcaggcctacgccacgctgctgattgcccgtttcagcaacccttccctgcgtcaccgcacctggcagatcgccatggacggtagccagaagctgccgcagcgcctgcttgacccaattcgtctgcatctgcaaaacggcagcagctggcgccatctggcgctcggcgtggcgggctggatgcgctatacccagggaagcgatgagcagggacaacccattgatgttgtcgacccgctgctaacggagatccagcagattaatcagcgttatcagggcgcggagcgcgtcgccgcgctgctggccatcagcgggatctttgcccacgatctgccggacaatggcgacttcgtcaacgcggttaccctggcgtatcaacagctgtgcgagcgcggcgcccgcgagtgcgtggcggcggttagcgccagtctgtaa

SEQ ID NO: 175728 - DNA, 777 bp, Klebsiella oxytoca
atgaaatcacaaacttctcagcacagaccttatcaggaagtcggcgcgttaattcgcgatctcatcgtcaagacgccctataaccctggcgatcgcctgccgcctgagcgcgagatcgccgagatgctggatgtaacccgtaccgtggttcgcgaagcgctgatcatgctggaaattaaagggctggtcgaagtgcgccgcggcgccgggatctatgtgctggataacgtcgcggcggaaggcgcggtggagagcgcggacatgaagcattgtaatgatgccggtccttttgagctgctgcaggcccgccaactgctggaaagcaatatcgccgaatttgccgccctgcaggcaacccgggaagatatcatcaaaatgcgccaggccttacagctggaagagcgcgagctggccagcagcgcgccgggcggttccgaaagcggcgatatgcagtttcatctggccatcgccgaagcgacgcacaacagtatgctggtagaactgttccgccagtcatggcagtggcgggaaaataatcccatgtggatccagctgcaccgccatctcggcgacactcactaccgtgaggagtggctggtggatcataaacggatccttgccgccttaatcaaaaaagacgcccgggcggcaaaactcgccatgtggcagcatctggaaaatgttaaacgccgtctgctggagttctccaacgtcgatgatatttacttcgacggctacctgtttgactcctggccgttggataacgccgacgcctga

SEQ ID NO: 175729 - DNA, 990 bp, Klebsiella oxytoca
atgaacaatactcctgggcagaacgagccggcccgccgggcgctgagaagaaccttctccgtcagcgagtttatggcgtttggtgaacgctatggtatcgactatcgctttccgctgctgcaaacgccggagccctcgcacgccagcccggtgctgcaaggtgaagtggaagagatgacgctgccctgcgggatgtgcatcacccactcagatgttcacgtattgcagccctatgaaaccacctcccgccatagcagccctctctatatgctggtggtgctggaaggcagcgtttccctgactctcaacggcgagcagcaccttgtgcgttccgggatggcgttcacctcacgccttagcgaacatcaggccatgtgcgcccgtcacgatgccaacagcaggctccgcacgctctcccttggactctacccggacggcgcctggcgcgacggactgcttgcttcattaatgcgcgaatgggaaagatgccagacgccaacgctcatctggcagataccgggttttctgctgagcggcctgcagtatgcccagcagagcgcgccgggccgcgtttcccggcaactgatgctggaggggctgatcctgcagctgttcggccatggtctgagcgtgtgccaggatgaaagcgcgaagcagatcctcccggcgggcggcgagcagctgcgcctggagagagttcgccgcctgctggagcaggcgccggaaaacgactacaccctgaacgagctggcccagcgggccgcgatgagctccagcagcttgcgcagtaagtttcgccaggcctacggctgttcggtttttgattacctgcgcgattgccggctggcgcgggccagaggctatctgctggaggggtacagcgtgcagcaggcggcctggatgtcgggctatcagcacgccaccaatttctctaccgcctttcgtcgacgctacggtatctccccctgcgacgtgcaaaagacgggctaa

SEQ ID NO: 175730 - DNA, 2091 bp, Klebsiella oxytoca
atgtttgcgaaaactcgcctggcgctactggtaggatgggtgaccggcggcgtcgctttcccgctgctggcccaggaaacaacaaaaaacgaaaccatcgtcgtcacttcgcagatgcaaagcggcgcgaccaaaattgccacgccggatattgagaccccgcaatcggtatccatcatcacgcgcgagcagtttgaagagcagggagcgatcagcgtccgtcaggccgtgagctacacccccggtgtttatagcaaccagattggcgcttccaaccgctttgactatatcgtcctgcgcggcttctccgatggcagcctggataacgtctatcttgacggtctgaaaatgatgggcgataccaactcccatagctcactggtggtcgatccgtggttcctggagaatatcgaagtggtgcgcggcccggcctcggtgctgtatggtcgctcttcgcccggcggcatcgtcgccctcacctcgcgtaagccctctttcgatcccggaggggaaatcaagctgtttgccggtaataacaaccagcgcggggcggcgtttgacgtcaccggcgcgctggacgataacgatcgggtggcggcgcgattaagcggcatgacccgctatgcggactcccagtttgataccttgaaagagcagcgctacgcgattatgcccagcctgacctggcgcatcaccgaccagacgcgccttgatttaatggcctatctgcatcgcgatccggagggcggcagccactcgggtctcccctatgaaggtaccgtggtaccgcactacggcaagaaaattgctaacaccttcttcgaaggtgaagatgattacgacaagtacgaccgccgtgaaaatatggtcggctacaatttcgagcatatgtttgataacggctggtcggtgcggcagaagctgcgctacctgcataccaaagtcgagctgaatcaggtctatgccgcgggctggctgaacgaaaccgaactgaaccgcggttactccggctcggacgaaaagatgaacgccatcactctcgataaccaactcgacggcagcgtcgatacctgggccgtgaaccatcgcctgctgataggcattgactatcaggatcgcagcaacaacaccaccggctactatggcgcattcccggccatcgacgcgtttaatccggtctacggcgcgaagccggattacatcaccatgtacagccgtgaaaaacacaagctgcgccagaccggctactatcttcaggaccagatgtcctgggaccgctggcgcttcaccctgggcgggcgctacgaccaggtcagcgtgtcgaatatcgataagctgaatcaaacgcgcagcgatctggataagaacaatttcagcacccgcgccgccctgctgtatctgttcgacaacgggtttgccccgtacatcagctactctaccgcctttacgcccaccagcttcgccgacgaaaacggcaacgtgctcgatccgatgaaaggcaagcagtgggaagccgggctgaagtatgagccagaaggaatgaacagccagttcagcgcctcggtattccgcatcaatcagaccaatatcgccaccaaagaagagccgaccgatccgtaccgctcgattggcgaaattgagtcgaaaggggtggagctggaggccatcagtcagctaaccgacagcctccgtctgcaggcggcctatacctacaccgacatccgctataagaaaagcagcccggaagagcaaggcaagcgcgccgtttacgcgccgcgcaatcaggccagcgcctggctgagctatgatgtgaaaagcggcccgctggatggtctgacgctgggttccggcgtgcgttacgtcaacggtattaccagcgaccgcttgaatacgcatacccttccatcctatacgctggtggatatgacgattggctatgacctgtcgcaggtcgggattaaaggccttagcgcgcagctgaacgtcaataatctgaccgataagagctacgttgccgcctgtaactcgctctcttactgctactttggcgcagagcgcagtatcgtcggcagcgtctcctggaagttctga

SEQ ID NO: 175731 - DNA, 252 bp, Klebsiella oxytoca
atgtcacagcaagaacggttttgtcaggcctgcggaatgccgatgtccgccgaggaggcgaaaagcgcaagcgacgattactgcgcctggtgctgcgatagcgaggggaagcttaagtcctgggaggatgccgtttccggcctggctgagttcctcgattcctggcagaaagttgggcctgcggaatcgcgcaagcgagcgatgcgctatttaacggccatgcccgcgtgggctcataaagcggaagattaa

SEQ ID NO: 175732 - DNA, 1449 bp, Klebsiella oxytoca
atgcaacttaacgaccctaccctttttcgccagcaggcattcattgacggacgctggcgcgacgccagcagcggagaaaccctcggggttactaaccccgccaacggtcagcagctgggcagcgtgcccaaaatgggcgccgaggaaactcgcgaggcgatcgatgccgccgctcgcgcgctgcccgcgtggcgcgcccttaccgccagggagcgcgccactatcctgcgccgctggtttgatttaatgatggagcatcaggacgatttagcgcgcctgatgacgctggagcaggggaaaccgctggcggaagcaaaaggcgagatcggctacgccgcctcctttatcgagtggtttgccgaagagggtaaacgcatttacggcgacaccattcccggtcatcaggccgacaaacggctgctggtgattaaacaaccgattggcgtaaccgccgctatcactccgtggaatttcccctcggcgatgatcacccgtaaggcgggcccggcgctggccgcaggctgcacgatggtgctcaagcccgccagccagacgccgttctccgcgctggcgctggcggagctcgctaaccgcgccgggatccccgaaggcgtatttaacgtggtgaccggttcggccagcgaagtgggtaacgagctcaccggtaacccgctggtgcgcaaactctcctttaccggctcgacggaaataggtcgccagctgatggaacagtgcgcgaaagatatcaagaaggtctcgctggagctgggcggcaacgcgccgtttatcgtttttgatgacgccgatctggataaagctgtcgaaggcgcgttggcctccaagttccgcaacgccggacagacctgcgtctgcgccaaccgcctgtacattcaggatggcgtctacgatcgcttcgccgaaaagcttcagcaggcggtcagtaagctgcaaatcggcgatggcctgcagccgaacgtcaccatcgggccgctgattgacgagaaagcgatcgccaaagtgcaggaacatattgccgatgcgctggacaaaggcgcgcgggtggctaccggcgggaaaccccatgagctgggcggaaacttctttcagcccacgattctggtggacgtccccagcgatgcgaaagtagcgaaagaagagacctttgggcccctcgccccgctcttccgctttaaagatgaggcagatgttatcgctcaggccaacgataccgagttcggcctggcggcttatttctacgcccgcgatctgggccgcgtctttcgcgttggcgaagcgctggaatacggcattatcggtattaataccggccttatctccaccgaggtggctcccttcggcggcgtgaaatcctccggcctcggtcgcgaaggttcgaagtatggcatagaggattacttagaaatcaaatacatgtgtattgggatttaa

SEQ ID NO: 175733 - DNA, 1404 bp, Klebsiella oxytoca
atgacggatagcacaattaaaatttataacgcccgctacagtaagctaatgaagctactggatttttttgccgttaacctgttcatttttgcttatttaaaatactttctcgtcgaaccatctacggcctctctgttcctcggaataatatattccctgatttttatccgggccaacgagcactttcagttatattcaggccagtttaaaggtcagtattttaaaaaattaacgaagcttttttttagcgtctgtattagcgggctgctgacgtttttattgtttgtgattgctgaactattaatgaacaatcatgccagtacgaacgcgctgctgctggctgaagtgattgcactatgctcgctggccatattcattagtatgtttcttattcgtattatctccagccgctattttttcaaatccagactcaaggtggctattttaggtattacgccagccgggttggccattgagcaggcgctgtttaaggagtatacccataacggtattgaaattaccttctttgaggaccgcgccgtacagcgcgacagccgcctgctcagcattgagaaaaaaggcaactcgcgcgacctgctggcgctggcaaaagcaggcgagatagatgaagtctatatcgccctgccgatggtcgcccagcagcgcattcgccagttcttaaacgaattttccgataccaccgtagatgtgtttctggtaccggacctgttttcctatagctcacatatttcgcagctgcggatgtttggcaatatccagaccatcagcatttttacgtcgccgtttgaaggcgaaggcgcggtgctcaagcgtatcgaagatattgttctcggcaccttgttcaccctcgtcagcctgccggtaatgctcgcggtggccatcggcatcaagctgacgtcgccaggcccggtgctgtttaaacaaaatcgttatggtctgaacggtaagcagatcgcggtatggaagttcagaaccatgcgtgtgatggaaaacagcgcggtcgtcacccaggccacgcgtaacgatccgcgtattacccgcttcggcgcctttctacgcaaaacatcgcttgatgaactgccgcagttttttaacgtgctgcagggaaccatgtcgatagtgggtccccgcccgcacgcggtcgcgcacaatgagcaatatcgcgtgctggtggaaaactacatgattcgccataaagtgaagcccggcattaccgggctggcgcaaattcacggctttcgcggcgaaactgacacgattgataaaatggaaaaacgcattcagtacgatctggaatatattcagtcgtggtcgctgctgctggatatcaaaattgtatttttaacgtttttccgcggatttgtgggcaaaaatgcgttctga

SEQ ID NO: 175734 - DNA, 1287 bp, Klebsiella oxytoca
atgcgttctgaactcactttcctcgcaggtctgctggcgataccttgcgcatgggcggacctgcaggcaaaaccacataccggcgtggctggcatcgatttcgagagccaggtgggttatgacgtcggttacaatgacaacgtgacctggcaacgctacggcggcaacgaaatcgcttcctcctggcagggtattaagccgatttttaaagcgatcggcgagcgctatgaagaccgctatttactgatgtactcgggcgattaccgccgctacgccagcgatagcgctgataaccgtgataaccatttttttatgtttaacggtaagtggcgcttcggcagtatgcatggcctgtcgttggatcttgatgaaacgttcggccatgaagagcgcggccgcgataccactgaggggtttctgcccgagcagttcaaagagtttggcattaataaacccatcgccacgcgcttctttaacagtgaactacgctatagctacggggcgccggaagggcgcggcaaagctgaagttgcgctgatgcataaacagctgcgctttcgcaatcttgacagcattgaggacgccagcgccgacttccattactacatgcacgatcaggagtggcatgaaaacagcctggtcgccgagctttttgatcaaaaagccaaaacgctgcgctaccgctacagttttattaccaaccagcgtcgctatgagctcaacccgttaaaagacagtaatgaatactatctgctgatgggtatgaaaaaccgcctttccggcaagaccgagatcaacggcaacgtcgcatggctgtataaagattttatccataaccccgactcacaggggttcaacggcctgaactgggatattaatgccgactggaaaccgcttgaacagataaaactcaacttacacagttcacaacggataaaagatcctaccgactccggcggctatattctggtatccaattttggcctgggctacgagcaccactggctggtcgacagattctccaccctggttgattactcttatattacagaggattacaagcaccagaccaacggacgcaaagatcgatcaaacctcgtatcgctgaccttcaactacgactatcgaccatccgttaattttcagctgaagctgcaatggaacacgatgcattcgaataaagaaaaagatgccttttatattgggccagactatgaccatgaggtcgagcgcacgctgggctacaacgactcggccattatttttatgacgcaggtacaaatatga

SEQ ID NO: 175735 - DNA, 555 bp, Klebsiella oxytoca
atgatccttagctatggaaaacgggcggtgatttctcttctggcgctatggctggcgggctgttcggcgccagcgcagacgatccgaacgccgccggatgccgtttatcatctggaccagggggatgagatcaatatcgcggtttccggcgagcaggatctcactatgcgcgtaaaaatcgataatagcggcagcgttgattatccttatataggctccctgatgctgaaaggaaaaacgcccgaacaggtcggcaatgaaattgccgataagctgcgcggaagctatctgcaggcgccaatggtcaccgtgagcattgccgaataccgtaaaatttatctgttaggcgaagtcaaaaaaccggacggctacgcctgggagcccggcttaacggcggaaaaagccattgcgctggccggagggttcaccgaccgcgccgatcgccatgacatctgcattcgccagtttcgcagcggtaaactgctggaaaacgtcgccgccgactccgccgtacaggccggagataccatcatcattggcatgagtttcttctga

SEQ ID NO: 175736 - DNA, 2088 bp, Klebsiella oxytoca
atggctatttcattagttgaaaatggaaagaagaaagaaggctttatcgacttcacgccttatttcaacaaaatcaagcacaagctgatttggtgcctggtggtggtcgtggtggctgcggcggcgtcgtggatcctgacgcgctttatgtcatccagctataccgcaaccgcaacggtgctgtttaaagcgcagtcgcaggatgtaacccccctgccgcggctggaaaactacgattccacccgcagcgattactatgaaaccaaatacgcgctgatgggctcccgcgtggtactggaagccgcagtgaaagcgctaaagctggatcaggacccggaatttaacggcggggataagcttgatgaggccgcgcgcgtcaataatgccgtgcgcgccctgcaaaaaaacctgaccatctccggcgtgcgcaccacgcagctggtatccgtttcgatggaggcgaaatcgccgcaaaaagccgccgatattgccaacggcgtggcgcaggcctttatcgattacagcctggcgcagaagcagaaaatcttacttcaggctcagggctggaacgaaaaaatgatggacgatctgcgcaataaactcgatcgccagaaagccgatatcgatgattttctcaaacagaacggtctgctgacttttcgcagcatggatggctacgaaaccgagcgcctggggatcgtgattaaccatctggccgacgcgacccagcgccgtttgaaagcgcaaacggtatgggacaaagtgcgccgccagcagggaaaagcgccggaagcgatcatctcactgccggaaatttccggtcatccgcagattcaggatctgcggatcgcgctgatccagacgcgacgtaacttatcggaagcggcaaaacactatggtcctaagcatccgaaatacctccaggctcaggcccagctgcaggtcgttaacggacaaataggccaggtgctgggtgaactgctcaatgggttacgtcagcagtatcagattgcgctggacgatgagcagcactatcagcagatgctcaacgatcagaaagccgacttccaggcgctgggcgctaagcgcgataaatacaacaccatgatgaccgcgctgaacaaaaccgaagagctgtataaatcgctgtatcagcgggcgaacgagcagaagctctccgagagcttttcggttcctgatgaagtgatctacgatgccgccgtgccgccaaatcaaccgtctaaaccgcagcgcggtctgcttatcgtgatggcgaccctgatggcgctggcgctgtacattatgtacctgattgtcagcaccgcgctggataaaacggtcaacagcatcagcgaacttaaagctaaaacgggccttgatgccagcggtgaattcccgcaattgcctcaggcgaacagcgcgaagctgacgttccagaacctgctgtatgccgacatgatccacagcctgcgcctggcgctgctcggtcagaataatcatggcgggatgatactggtgacctcggcgcaggccgatgccggcagcagcctgattgccgaaatgctggcgtggtccgccgctaagtcaggtaaaacgctgctcattgatgtggactacctggcaagcgatgggctctccgcgcgctatccgcagcataaaacgggctttagcgagcgtcttgatggccgcagcgccgcgcctcaggcggtggtccccctggccgacacgcttgattttatgccgcgaggcgagctgagcgactccgcgctgctgctgttcacctctgagcggctcccggcgctgctgacgacgctgcggcagacctacgattatctgattattaatgcgccttcgctcgggctggcgcaggacgccctgctgctggcgccgcacgtcgatattaccctgctggcgatcaacgctggcgagcaggcgtcgcgcattcgcgacgcgcagaatcgtctgcaaaccgccgcgcctacgccagtcgccaccatgcttaaccgggttcaagaagagaatctggagactcaggaaggcaaacgcctgcccgagcgcggcatgggcgaactgatttcaccgaagtag

SEQ ID NO: 175737 - DNA, 1218 bp, Klebsiella oxytoca
atgaatttaattaagagtatttcttcaatcgccagctcctcggttctttcgcaggcgatcggcgcattttccgtgtggctgatttcccatcgctacggcatggcggaagtcggacactatgcgatgatctacagcaacgtgctgattggcgctcaggtttgcacctttgcgtcgcagctgcttatcccgcgccaggaggagcatgagctggggcagaacgtagtgttttgcctgctacaaagcctgattctggcgctgccctgggcggtcatcaccgggctgattttccatctcaatattgcgtttctctatctgctcaccttcggctatgcgctggttttgattgccgagaacctctcgctgcgcggcggcaactatcagtttctgacctttcagcgcatcgccgtgtcgctggtcgtagcgatagccctgctggcgatgccgaataccacgctgttctatatcgcctggatggccggtattttgctgctgctcagcctctgtctgctgcgcttgttccgcttcagtaccctgacgccagcgcatttttctccgcgcgcgaacgctctttttgcgcgtcagcactggcagcatctcagtcgcgtcggcagcgcggaagtgctggcgatggccagcaataacctgccgacgatgttgataaatgtctggttttcaccgctggtcgcgggctatttctcggtggtaagccgcttctgtttatctccggtgatgattgtcggtaacgcggtgcgcaactccatcttttcaaaatggtcgatggattttcgcaaccgcacctttaactatccggagtacaaaaagattcgcctgctgctgatggccgcggcgctgatctgtatccttgggatctggattttctatccgctggttatgcgcctcggctttagccaggagtggctcaattccattccgacctcacgctatatgttgccctatctgttcgccgcgctggccgtcagtccgctgaccgttattgagcttatctttggttctaaacgctattttttacgtattcagatagagcagttgctaatcatcgccgtcgcttttgtcgttctgcctaagttgggccagagctatgagatagccctgctgacgttctctcttctgaccagcattcgctatctgttcatcctgctgaaaatgaacaaacgggcgctacagctctcccggcaggagcagaaaatatgcagctaa

SEQ ID NO: 175738 - DNA, 1383 bp, Klebsiella oxytoca
atgcagctaaataccggccgctatctggaagcattcgcgctgacgaccatcgtcttctgcggcacgattcagtatttcaccggcgtggcagccgtactgtggcttccttttttcatggtgctggtgatggtgattctgctgatgatgcaaagccgggcgcagccgctggcgcttagcgcgcgcgagaaggtggtgctggcgctgtacctgacttttatcatcctcagcctctgcgccacggttttacaatccggcatcgtcaccgctatcgtcggctttaaaaacgaactggctctgtcgctggtgatgttttgcatgctgctcggcatgtttcgcgagtcgcagctgcatcgcctgacacagcttttttactggctattctacgtccagttcccgctggctatctatcaggtgctggtagtggtgccaaaacgcgtggcgctacgcggtgaggatgaaaagtgggattcggtggtcggcacgtttggtggcgacccgatgggcggcggcaataccgcagcaatggggatgttctgcctgctgattatgctgctgaaggtgtccgaatttaagcacggtatctgctcgttcaagtcgatggcgacgcatatcgtgctggcctttttcctctgcgtggtcggcgaggtaaaattcgtgattctgctgtcgccgttcttactggcactgctgtggatcatgcccgcttacgttagcggtatcagtaaagtcaccctgcgctcattgatgattatcgccgccggcatggtggtattaatttttgccgctatcactattctggcgtccaactactcgtcggccttcggcggagatccgacaaaaagcgcgctctcggtatttatcgattccctcggctatatctttgataccaactacattatggaaagcggcgagctcggccgatttaccactattttcttctggctccagcataacgaactttttggccccggcggaatgctgtttggttacggtctgaacgccaccaacagcggcagtaccgtctcccccggctatattggcgcctggtatcaccttattctcgattccaccgcgctgagcatgctgttgtgggaagtcggtattatcggcgtgatcttatttatcgccatgattgcttctattctcgtcggtatgcggccgaaagagaccttttcccgctacgatcttaaacgtgaagatttacagctgctcagctccgcgcctgcattttacgtctttgccattggctgtttgctcagtcttccctacagccagatcctgatgatcattcccatgctacagtttttattatggctggccctcggggcgcttattgtcattcatcgttctgtccgtctgaattccggtacccaatatgaataa

SEQ ID NO: 175739 - DNA, 1026 bp, Klebsiella oxytoca
atgaataaaacgccatcaattaccgtcagcattaaaaccctcaacgaagcgcagggtattgaaaaaacgatcgacagcgtccgcaagcaattgcagccttatccgcatcaaattatcgtcgccgatagcctgtccaccgacaatacccgggagctggccgtcgccaaagacgcgatggtggtctgcctcgataacgcgaaagatcgctgctgcggcgtgggtcatcagctgggctggttgttcagcgaaggggattacctgctgctgctggatggcgatatggagctggagccgggttttctcgacaccgctgtggcttttctcgaaacgcatcccgagtatgcgggcgtggcgggcagcgtcgagatggatgacgccgctaactatgagtttaaatcgcgcaagcagcgtctgcatcttatctatccgcagggcgataccgatcatcttggcggcggcgggctctatcgccgttcagcaatcgagaaaataggctatctgactaatctgaaccttcacggttatgaagaagctgaactggggatccgtttgcaggccgcgggctataagctccatcgtcttgccgcaccctattttagccatgcatcctataccatgccgaccttcaaaatgctggcctatcgctggaagaacggctttttatgggcgccgggtgaactattacgcaactgctggggaaaaaagcatttccccgccgcgcttaagattgttcgcaacgaactgatattcacgctgtatatcctgatattgattatttgcctgctgacgttcaatcccggggtgattatcatcgccctgcttccgctgctggcgtttatcgcgctgaaggcgattaaaaataaatcgctgcgcgacggcgtccagagcgtgatcaacttatcgttattttccgcaggcgtggtgcgaggcgtcattaaccccgttcgcgatccgctgaaacagcccgccgtgaccgtctctaacccaaaacatatccagacagaacatgaaaatattattcgttaa

SEQ ID NO: 175740 - DNA, 1137 bp, Klebsiella oxytoca
atgctgcaagccggctatcaggttgtcgactttagcatgcagcatgcggaaaataagccttcgccctgggagaatttcttcgtacataacgtggattatcatcaaagccatggcctgacgggtaagctcaaagcgggtatcgattttatctacaacgccgaggcctgcaataaactcaatacgctgctgctggaacagcgcccggatattgtgcactttcacaatatctatcatcagctgacgcccgcattgattggcgtcgctaaacgctttggctgcaaaacggtactgacggcgcacgattataaaatcgtttgtccatcttacaccatgctgcgcgatggccacgtctgcgatgactgtcttaccggttcggtgagcaatgcctttcgccatcgctgccagcagggagacacctttaaaagcctgctgctctcgcttgaggcctactggcaaaagttcgcgcaaaattacgccatgctcgattgcattatcgctcccagcgaatttatgcgtcagacgctgctgcgtaaattacccaggtcgcggatcgatgtgatcgtcaacggtattgatgccagcaccacggtcccgggcgatactgcgggggattatttcctctatatcggccgcttgagccgtgagaaaggcgtggctaccctggcgctggcgcagcaaaaaatgcagcagtccatgccgctgaaaatcgtcggcgatggccctctcggcagcgacctgcgcgcccgctttagcggtccggaatttctcggctatatgcgccatggagaagcgctcaacgcgctgattcgcggcgcgcgagcggtgatcgtcccttccgaatattatgaaaactgctcgatgtcggtgctggaggcgatggcgttcggccgccccgtcgtcggcggcaatatcggcggtattccggagcaaattcgcgatggcattgatggctatctggtggaaccaggagatgccgacgcgctggcgcgcatcatggatagcctggccgccaatcctcagcaggcgcgtgaaatgggcattaacgcacgccagcggttagaggataaatacgatctcgcccggcatatgcaggttctgcaggaactctatcagcagcttgtgggggaagcgaaatga

SEQ ID NO: 175741 - DNA, 1116 bp, Klebsiella oxytoca
atgaagcttaaagtgacggtgctcggcacccgcggtataccgaacgtccagggcggcgtggagacccattgccagaatttgtatcccgaaatctatcaacagaatcatgctgatatctgcgtcattgcccgctcgccgtacgtcgactaccgccgtagcgaatataaaggcgtacagctgaaaagcctgtgggcgcccaaaagccgcaagttcgaagccattattcactctacgctggccgccttcagtaccctgttcgacggttcaaatgtcgtgcacgttcacgcggtcgggcctggcctggtggtcccgctgctgcgcctgctcggcaaacgcgtcgtttttacccaccacggcccggactatgaccggcagaagtgggggaaaatggcgaaggagatgctgcgcctcggtgaaaaatgggcggtgaaatatgccaacgaggtcattgttatctcggaagtgattaatacgttgattcagaccaaacatggccgttataacgcgaacgtgatctataacggcgtgcgccagccgcagcttcccgccgaagaggcccgccaggccacgttggatcagtactctctcaaagccgggcaatacgttgtcgccgtcgcccgctttgttgaagaaaaagggctgcacgatctgattgccgcccacaaagccgccaactgctcgcagccgctggtgctgattggcgatgccgatcatccggatgagtatagcgagcggctgaagaaacaggcggccgctaccccgggggtgatcatgaccggttttattagcggcgatccgttgcataccctgttctcacaggccgggctttttgttctaccgtcttaccatgaagggctgcctattgccctgctggaggccatgtcctggtcactgccggttatcgtcagcgatatccccgctaacctggagattggcctgcctgccggggactatttcccggcaggtgatgtcgccgcgctggcgcaaaagttgcagtcctggagcggcgaggagaccgtggattacagccagttaatgcccaaataccgctggccggacattgcagcgaaaacggctcaggtctatcagcgattaacgaataagagtcaaccgtga

SEQ ID NO: 175742 - DNA, 411 bp, Klebsiella oxytoca
gtgacaaaatcaacatccgacctggtcatcgagcgcttttattccgcgcttgacccggaaacagaagcctcattaacgccggagcagaaacgcggtatcgaacaggcgctggtgagatcgagcctggcgtcgcgccatcgtatcgactttcgccatagctttccgtttctgcatcgtcgctattttgtagtctttttatgcggtcgcgatctgcgcaaaattccgcgagaaagcacgctgctcgggcgtatattttccaccctggcgattacgtttgccgtactgtttgccattcttgccgtgctgctggcgctctatatgcttaaatctgcgctgggtatcgatgtgtttaagaacttccacgtgggtatctggacgtggtttgtaaacctccacgataaagtgaattaa

SEQ ID NO: 175743 - DNA, 1419 bp, Klebsiella oxytoca
atgagctctttttcactgcgccgcgccgcgctgcttttggcgctactgctggccggagccataccctctgcagcggtactggctgaacgtacggttgtcaccccgccggccttcaccggtctgttaacgaatcctggaatcggcgtggccagtttccacgatggttatggtcagaagccctctctgaaagagtatccggacaccggatttgaatacgatcgcttttactggagcgatctggagcctgaagaaggcgtctatcattttgcgccgattgatcatgccttcagcgtcgccgcccagcatcagccggcgatgaacgtcggattacgtttcatggcgctcgatgagccacaatcaggctcgaaaatccccgcctggcttatcgccaaaggcattcagggacaatgggtcgaaaatggcaaaacctttgtcccggatctcagcgatccgacttttatcgcctatgcgcaaaagctgcttaacgccctcggcgcgcgttatgacggcaatcctgaactggcgtttgtcgatatcggcatggtgggttcctggggcgaatggcataactccaatttccctgacgtcgcgccgttgatggaaaagtacactccgcaacagctcaatcgctacgttgatatgcacttcagcagtttcccgaaaacgcccaaaattatgttagtcagcggcggcgactcgctggcctgggccagccaaaaaggcgccggatggcgcgcggactgctggggagactggcataacttttccccggagtggagccatatgcgcgatgactatcctcaacgcctggccgcagcgcagacggcgtgggccggttttaacactggctggcagcacgctcccgttagtcttgaaatttgcggttatatggcggagtgggaaagcgttcagcactatacccgcgaggaggttcaggccagctttgactgggcattagcgcagcacgccagtaccctgaatctgaaatcgcgtccggtaccggccgcctatcgcgatatcgttgataacgcattattgcgtatcggctatcgctaccgggtgagccggctggaatttgatacgcccgtgcgtagcggcactccgcttacgctgaatgttacctggcgtaacgacggcgtcgctccagcctatctcccgtggcttgtacagtggcgaatagttaatgatgcgggcgcgacgatgacgcaagtccgtacgtcggacgatgttcgccagtggctgcccggcgaccatcaaagcaacgtcacgctgccgctgcctgcgggcctgcctgacggccagtaccgcctggaagcggcgctgaccaaccatcaaaatctaccgcgtatacaacttgctaacgaaggtcaaaccggtgacggatggtattcactggcttcgtttaaccttaaggaataa

SEQ ID NO: 175744 - DNA, 507 bp, Klebsiella oxytoca
atgtttgaggctatcaggctggtcggccgggaaatcaaatcctgcggcggcattaaagcgaaaatcgcgcttctgctctatcgtctggcaacgctctaccgcagtcgtaacccgctgtggaagatctgcgcaattccgttcgttattctcaatatcgtgattaacgagtgtttattttgcattgagctgccgtggcgagcgcgcattggatatgggctgaagctgtttcatccgcactgcatcgttattaatcggggaacgatcatcggccaaaattgtactctgcgccagggggtcactattggcagcgtaaccgatagccagggtcaggaaggcaacagcccgcgaatcggcgataacgtagaatttggcgcccacgccgtggtgatcggcgcggtcacgctaggcgataacgtcaaagtcggggcaggcacggtagtgaccaaagatctggccgcaggcatgattgccgtcggtcaaccctatcgggtattaaacggcaattag

SEQ ID NO: 175745 - DNA, 399 bp, Klebsiella oxytoca
atgacgttaccgagtggacacctaaagagtaagctgattaagaaattcacggcgctaggcccttacatccgtgaggagcaatgtgaagacaaccgcttctttttcgattgcctggcagtttgcgtcaacgtaaaaccggcgcctgaaaaacgcgagttctggggatggtggatggagatggaagcgcaggcatcgcgcttcacctatagctaccagtttggattattcgataaagaaggcgactggcgtccggtcgcgattgacgatcctgaagtcaccgaaaagctcgaaaagacgctgcgcgattttcaccaacgagccgaagcgctattggcaacgtttaaccttaagctggaacctgctgatgattttagcgagccggttaagctgagagcctaa

SEQ ID NO: 175746 - DNA, 1245 bp, Klebsiella oxytoca
atgtcccaggctaaccttagcgaaacgctgtttaaaccccgattcaaacatccggaaacctctacgctggtgcgccggttcaataccggagcgcagcaaccgatccagtccgcgctcagcggcaataacgttgatcactggtatcgattgattaatcgcctgatgtggatctggcgtggcgtgacgccgcaggaaatcctcgacgtgcaggcgcgcatcgtcatgagcgatgcggagcgaaccgatccggagctttacgatacggttgtcggctatcgcggcggcaactggatctttgaatgggcgaaacaggcgatggactggcagcaaaaggccggccaggaagaggatctgctcatcagcggccgccactggctgcatgcggcaaacctgtacagcattgccgcctatccgcacattaaaggcgatgagctggcggaacaggcgcaggtgctggcataccgggcttacgaagaggcggctcagcggctgcccggcaagctgcgcgagctggagttttccatccctggcgcggcgccgatcaccgggttcctgcatatgccgccaggcgaggggccgttcccgacggtgctgatgtgcggcggccttgacgcgctccagaccgattattacaacctgtatgagaactattttgcgccattgggcatcgctatgctgaccgtggatatgccttcaattggtttctcgtcaaaatgcaagctgacccaggataccagtatgctgcaccagtatgtgctgcagcatctggccaatgtgccatgggtcgatcatacccgcgtggccgcctttggtttccgttttggcgccaacattgccgtacggctgggctatctggaatctcagcgcctgaaggcggttgcctgcctgggcccggtggtgcacggcctgctggtggatccgctgcatcagggacgggtgccggaaatgtatcttgacgttctggcttcgcgtctgggaatgcacgatgcttccgacgaagcgctgcgcgtggagcttaaccgctactccctgaaggttcagggactgctggggcgccgctgccctacgccaatgctttcgggcttctggaaagacgatccgttcagcccggaagaggagtcgcgattgatcacttcatcctcatccgacggcaagctgctggagatcccgttcaatccggtttatcgcaatttcgatcacgccctgcggcagatcgcccgctggattagccatagatttagttaa

SEQ ID NO: 175747 - DNA, 459 bp, Klebsiella oxytoca
atgagcgaaaaatacgtcgtcacctgggacatgttgcagattcacgcccgcaagctggcaacccgcctgctgccggttgaacagtggaaaggcattattgccgttagccgcggcggtctggtaccgggagcactactggcgcgtgaactgggtattcgtcatgttgacaccgtttgcatctcaagctacgaccacgataaccagcgtgagctgacggttctgaaacgtgcagaaggcgacggcgaaggcttcatcgttatcgatgacctggtcgataccggcggtaccgccgttgctatccgcgaaatgtatcctaaagcgcattttgtcactattttcgcaaaaccggccggccgtccgctggttgacgattatgttattgatattccgcaggatacctggattgaacagccgtgggatatgggcgtggtgttcgtaccgcctatcgcaggccgttaa

SEQ ID NO: 175748 - DNA, 1458 bp, Klebsiella oxytoca
gtgtctgaactgtctcaattatcccctcagccgctgtgggatatttttgccaaaatctgctctattccccacccgtcctatcacgaagaacagctcgctgagcacattatgggctgggcaaaagaaaaaggcttacacgcggaacgcgaccaggttggcaacattctgattcgtaaaggcgccactgccggtatggaaaaccgcaaaccggtagtgctgcaggcgcacctcgatatggtgccgcagaaaaacaacgataccgttcacgacttcactcaggacccgattcaaccttacatcgacggcgagtgggtcaaagcgcgcggcacgactctgggcgccgataacggtatcggcatggcttccgcgctggcggtgctggctgacgacaacgttgttcatggcccgctggaagtgctgctgaccatgacggaagaagccggtatggacggcgcctttggcctgcagcccaactggctgcaggcggatatcctgatcaacaccgactccgaagaagagggtgaaatttacatgggctgcgcgggtgggatcgacttcacctctgacctggcgctgacccgtgaagccgttccggccggtttccagagctttaagctgacccttaaagggctgaagggtggccactccggcggcgagatccacgtcggtttgggcaatgctaacaagctgctggcacgcttcctggcgggccatgctgaagagctcgatctgcgcctggtcgatttcaatggcggcaccctgcgcaacgccatcccgcgcgaagcgttcgcgacggtagccgtagccgcggacaaagcggaaacgctgaaagcgcgagcgaatgagtaccaggagatcctgaaaaacgagctggcggctaaagagaaaaatctcgctgtgctgctggagtcggcggaaaatggccagcctgcgctgacgactcaatctcgtgatacctttgtgcgcctgcttaacgccacgccgaacggcgtcatccgcaactctgacgtggcaaaaggggtggtggaaacctctctgaacgtcggcgtggtgaccatgaccagcgacaacgtgcagattcactgcctgattcgttcgctgattgacagcggtaaagattacgtcgtgagcatgctggactctctgggcaagctggccggtgcgaaaaccgaagccaaaggcgcctatccaggctggcagccggacgccaactctccggtgatgcatctggtacgtgaaacctatcagcgtctgttcaacaaaacgccgaatatccagattatccacgcgggcctggagtgcggtctgttcaagaaaccgtatccggaactggatatggtttccatcgggccaaccattactggccctcactctccggatgaacaggtgcatatcgaaagcgtgggccagtactggacgctgctgactgagctgctgaaatccattccggcgaagtaa

SEQ ID NO: 175749 - DNA, 600 bp, Klebsiella oxytoca
atgattttattgcaactctcttccgctcaggggccggatgaatgctgtctggcggtgaaactgacgttggagcggctcataaaggaagccgcagagcggcggctttccctgacgctgttggaaagtgagccaggacgtcatgccggcaccctgcgttctgttctgctttcgctggatggtgacggcgcgtttgctttcagcgaaagctggtgcggcactttacaatgggtcttttccagtccgttcaggccgcatcacgggcgcaaaaactggtatgttggcgtagggcgcttttcctgcgatgaacagatgctctccagcgagatccgctttgaaacgctgcgctcttccgggcctggcgggcagcacgtgaacaagaccgattccgcggtgcgcgccattcatacggcaagcggcatcagcgtaaaggtgcagtcggagcggagtcagcatgcgaacaaacggctggcgcgtctgctgattgcctggaagctggaacagcagcggcagaatgagagtgcggcgttgaagtctgagcggagaatgttccatcatcagattgagcgcggtaatccgctgcgaacgtttagcgggcgttaa

SEQ ID NO: 175750 - DNA, 1140 bp, Klebsiella oxytoca
atgggcaataatgttcattatacgtctgaatctatttcttatattcgttcagacgatctgtggatcgaaggtttagcgatccaacaattacacacgacggcaaatttaccccacatgcagcgcgtggtgggaatgccagacttacatcccgggcgcggctatcccatcggcgcagccttcttctcgctgggccatctctacccggcactggtgggtaacgatatcggctgcggcatggcgctgtggcaaacggatatcctcgcgcgaaaatacaatgcggataagtttgagaagaaactgtccgctatgggggacgttgcgcaagcaagctggctggacgagcatctgccggaaaatttgttgacccatccctggcgcagcgccctgggatcgattggcggcggtaaccatttcgctgaactgcagcaggtggagcaggttgtggataacgaccgtttccagcaggccggccttgatgctcagcgcctgctgctgctggcgcacagcggatcgcgcggcctcgggcaatccatactgcagcaccatattgcggctttttcgcacgatggcctggcggaaggtagcgctgcggctcgggattatctggcagaacatgatgatgcgctggcttttgcccgcgtgaatcgttatctgattgccacccgcatcctgcaacagatacgggccgacggacggagcgtactggatatcgcgcataactttgtcgagtcctgttctgttgacgggctgcagggttggctgcatcgcaaaggggctacgccggacgaccggggcctggtgataatcccgggctctcgcggcgaccacagctggctggtgcagcctgttacccgcgaggagaccctgcattcgctggcgcatggcgccgggcggaaatggatgcgaaccgaatgcaaagggcgcctgtccagcaaatatacgccggctcagctggcgcgcaccgagctgggaagcagggtgatctgccgcgatcgtcagctgatctatgaagaagcgccgcaggcgtataaatccgttgaaagcgtacttaactgtctggtgcaggccgggctggtcgaaccgatcgcccgtctgcgtccgctgctgacgctgaaaaccagcggagggaaaagcgcatga

SEQ ID NO: 175751 - DNA, 456 bp, Klebsiella oxytoca
atgttaacaataagaatgtacgaagagggggattttccagcgctatgctcactctttttacgcgccgttaaagagacagccagcgccgattattccccgcggcaaattgccgcctgggcacaggttgatgaagaacgctggcgacaaaaactcgcggcgtcacgcgtactggtggcaataaatgatgcctcgccggtcgggtttattaccgccgtagatgactatatcgatttactcttcgtttctcccgactatagccgccagggcgtcgccagcgcgctgctcaatacgctattgaggcagcttcctgagcgcatttatacggtagaggccagtattacggcaaagcccttttttgcgcgtcatggcttcacggttattcagccacaggaagtggaggcgcggggtgaacgttttcttaattatttgatgcggcggcaaatcggcttgcaatag

SEQ ID NO: 175752 - DNA, 1056 bp, Klebsiella oxytoca
atgcgtaaaatcatccatgtagatatggactgcttcttcgcagcggttgaaatgcgtgataacccggcgctgcgcgatatccctatcgccattggcggcagtcgggtacagcgcggcgttatcagtacggctaactatccggcgcgtaagttcggcgtgcgcagcgctatgcctaccgccaccgccctgaaactttgcccacacctgacgctccttcccggccgtttcgacgcttacaaagaggcctcgaaccatatccgggagattttttcccgctatacctcgttaatcgaacccctatcgctggatgaagcctatcttgacgtcagcgacagcgtccattgtcaggggtcagcaacgctgatggcgcaggagatccgtgagaccatccatcgcgagctcaatctgactgcttctgccggcattgcgccggtaaaatttttggcaaaaatcgcctcggatctgaataaacctgacggccagtttgtcattgcgccgcaccaggtagcggagtttgtcaaaacgctgtcgctgtcgaagatcccgggcgtcggcaaagtctccgccgcgaagctggaaagcatgggcctgagaacctgcgaagatgtacagaacagcgatctggcaatgttgctcaagcgctttggtaaattcgggcgaatattgtgggaacgcagccacggcattgatgaacgagaaatcagcagcgagcgccagcgcaaatcggtgggggttgagcgaaccctgatagaggatatccacgaatgggcggagtgtgagtcgattattgagaacctctatccagaacttgaacggcgcctggcgaaagttaaaccggatttgcggattgctcgccagggggtcaagctgaagtttaatgatttccagctcacgacccaggagcatgtctggccccggctgaataaagatgatttgatttctaccgcgcataaagcctggcacgagcggcgcggaggtcggggagtcaggctggtggggctacatgtgacgctgcttgatccgcagctggagcgacaactcgttttgggactgtaa

SEQ ID NO: 175753 - DNA, 858 bp, Klebsiella oxytoca
atgaaatcaatagtaactgcgctcggtttacttattgccagcagcgcctgcgcagcacctcagcttattgctcatcgcggaggtaccggcgatgccccggaaaatacacttccagcaataaaactcgccctggaaaataaggccgaggcgatctggataacggtgcaattaagccaggatggcgtcccggttttatatcgtcctggcgatctttccgcgctgactaatcatacagggaaaatctcaagctatagcgcagccgaactggcacgcatggacgcggggtggaaatggggcgatgaaactcacccctggcgcggtaaaaatgcaacgattcccacgctacaatcggtgctggaacagtggccggagaccttcttttatatcgatatcaaatcgcctgatgccgaccctgcgataatggcggctcggcttggcgatgtgttaaataaaacccatagcctcgcccgcgtacgcgtgtattcaacggacgctcgctatatcgcagcgctaccagagtcaattccccatttcgtcagccgggacgaaacgcgaacaaagctggcgaccatttctcttagccaccagtgtcagcccaccaactcaccaggggacgagtactggtacggccttgagctgaaacgcaaagtagaagtcatcgagaagttcaccctgggcgaaggcgtatcgccggccacgctcacctgggataaagaagcgatggactgtttccgctcacagggcaaagcccatatcatattcttcggcattaataatgctgatgattttcgtacggcaagcgagcttggcgccgacggcgtaatggttgactcaccggcaaaagcgaaaacgtggtaa

SEQ ID NO: 175754 - DNA, 216 bp, Klebsiella oxytoca
atgctgacggtatttgtcgcgacctttgtgattttcgcgctggttattctgggaatgtcgctcgggtatctgatcaagcgaaaaactatccagggcagctgcggggggatctcatcgctgggtctggaaaaggtctgcgactgccctgagccctgcgatgcgcgtaaaaaacgcatggcacgcgaagcgcagcgcaatcaggatcgcatcatttaa

SEQ ID NO: 175755 - DNA, 1224 bp, Klebsiella oxytoca
atggaaataattcttggcgtagtgatgttcacgctgatcgtcctggtgctatccgggctgatattggccgcgcgttcgaagctggtgaatgcgggcgatgtggtcattgaaatcaataacgaagcggataaacagatccgtactccggcgggtgacaagctgctgaatacgctctccagcaacggaatcttcgtctcgtcggcctgcggcgggggcggctcctgcggccaatgccgggtgacggtgaaagagggcggcggtgatatcctgcctaccgaactttctcatatcaccaagcgtgaggcgagagagggctgccgcctggcctgccaggtcgcggtgaagcagaacatgaaaattgagctgccggaggagatttttggcgttaagaagtgggaatgtgaagttatctcgaacgataacaaagccacttttatcaaagagctgaagctgcgcgtgccggacggcgacgcggttccgttccgcgcaggcgggtatattcagatcgaatgtccatcgcacaaggtcgcttatgctgactttgacgttccggatgagtatcgcggcgattgggataaatttaatctcttccgctatgtctcggatgtaaaagagcctacgttacgcgcctactccatggctaactatccggaagagaggggcatcatcatgctcaacgtgcgtatcgcaaccccgccgccgcaggtacctgatgcgcctccgggaattatgtcttcctacatctggtcgttgaagccgggcgataaagtgacgatttccgggccgtttggggaattttttgccaaagaaacggacgctgaaatggtctttatcggcggcggagccggaatggcgccgatgcgctcgcatatttttgatcagcttaagcgcctgcacagtaagcgtaaaatcagcttctggtacggcgcgcgctctctgcgagaaatgttctatgatgacgaattcgagcagctggcacgtgaaaatccgaactttaccttccacgtggcgctctccgatccgcagcctgaagataactggaccggtcataccggctttattcacaatgtcctgtatgaaaactatctgcgcgatcacccggcgccggaagattgtgaattctatatgtgcgggccgccggtgatgaacgccgcggtcatcaaaatgctgaaagatctcggcgttgaggatgaaaacatcatgctcgacgattttggaggctaa

SEQ ID NO: 175756 - DNA, 597 bp, Klebsiella oxytoca
atggctcactacattagcctgtttgtccgcgccgtgtttgttgaaaacatggcactggccttcttcctgggaatgtgtaccttcctcgccgtgtcgaaaaaggtctcaaccgctttcggtctcggcgttgcggtaacggtcgtactcggactggcggtaccgatcaataacctcgtgtataacctcgtgctgcgcgatggcgcgctggtggaaggcgttgacttaagctttctgaacttcatcacctttattggcgtgattgccgcgctggtacaaattctggagatgatcctcgataagtacttcccgacgctttataacgcgctggggatctttctgccgctgattgccgttaactgtgcgatttttggcggcgtctccttcatggtacagcgcgactataacttcaccgaatccatcgtttacggctttggttccggcgtcggctggctgctggcgattgtggcgatggcgggtattcgcgaaaaaatgaaatacgcaaacgtgcctgctggtctgcgcgggttagggatcacctttattaccacgggtctgatggcgctgggctttatgtcattctccggtgtgcagctataa

SEQ ID NO: 175757 - DNA, 639 bp, Klebsiella oxytoca
atggctgatttgggcgacatgaaagaaatgaagcgcgtgctggtggggccgcttatcgctaataaccctatcactctgcaggtactgggcgtctgctccgcgctggcggtgaccaccaagctggagaccgcttttgtaatgaccattgcggtgacgctggttacggcattctccagcatgtttatctccatgattcgccaccacattccgaatagcgtgcgcatcattgtacagatggcgattatcgcttcgctggttatcgtcgtcgatcaggtgctacgcgcttttgcctatgagatctcgaaacagctttcggttttcgtcggtttgatcatcactaactgtatcgtgatggggcgcgccgaagcctatgccatgaagtcgccgccgttggcgagctttatggacggtattggcaacggtctgggatacggggcgatcctaatcatcgtcggtttcctgagagagctgatcggcagtggtaagctattcggtattaccgtgctggaaacggtgcagaacggcggctggtatcagccaaatggtctgtttcttctggcacccagtgcgttcttcattatcggtttgttgatttgggcggtgcgcagctggaagcctgaacagcaggaaaaggagtaa

SEQ ID NO: 175758 - DNA, 795 bp, Klebsiella oxytoca
gtggctgagaataaaagtaacgatagcatcggcaaaacgctgctggtggtgctggtgctttgtctggtctgctcaatcgtggtcgccggttctgccgtcgggctaaaatcacgccagcaggagcagcgcgcgcttgataaacagcgcaatatcctggcggttgctggtctgatgaagcagggaatgagcgcagatgaagtggccgatatttttaaggcccgcatctctccacgattagtcgatctcgctagcggggagctgctggataaagacccgagcaaatttaatcaggcccaggccctgaaagatccgcagcagagcttgcagctggaagccagccaggatccggcgggtattaaacgccgcagtaatatcgccgaaatatatcttgtgcgtgatgaaaaacagcagattcaggaagtcgtactccctatttacggcaacggtctgtggtcggtgatgtacgcgtttgtggcgctggaaaccgatggccgtacggtaaaagggatcacttattacgatcatggcgaaacgccggggctgggcggtgaaattgaaaaccccaactggcgtcagcagttcgtcggtaaacaggtgcttgatgataaagggatgcctgcgctgagaatcgtcaaaggcggcgcgcgtcctggcgacctgcacgccgttgatggcctgtcgggcgcaacgctgacgtcaaatggtgtgcagcatagctttgatttctggatgggcaaactgggctttggcccattcctgcaaaaggtgcgagaaggggagctgaataatggctga

SEQ ID NO: 175759 - DNA, 1239 bp, Klebsiella oxytoca
atgggcttaaagcaactgtttgacaaacttgagccgcactttacgcacggcggcaagctggaaaaatactacccgttgttcgaagcgacggcgaccctgttctatacacccggtcaggtgacgcgcggagcggcgcacgtcagagacgccatcgaccttaagcggatgatgatactggtgtggttcgccgttttcccggcgatgttctggggaatgtataacgttggtctgcagaccataccggcgctggctaaattatatagcgctgaacagctgcagcaggtcatcgccgggaactggcactacagcattgcccagtggctgggggtaaacttcaccgctgatgccggctggctcagtatgatgacgctgggtgcggtatttttcctgcctatctacatcaccgtgtttcttgtcggtgggttctgggaagtcctgtttgctatcgtgcgtaagcacgaaataaacgaaggcttcttcgtgacctcaatcctgtttgcgctgattgtaccgccatcgctgccgctatggcaggctgcgctcgggatcacgtttggcgtcgtcatggccaaggagatctttggcggaaccgggcgtaactttctcaacccggcgctggcggggcgggcctttctgttctttgcctggccggcgcaaatttccggcgatctggtgtggaccgcagcggatggcttttccggcgcgacgccgctgtcccagtgggctagcggcggcggtgaatcgctggttaatgtcacaagcggacagccggtaagctggatggatgccttcctcggcaatattccgggctcgattggcgaggtttcgacgctgatgattctgatcggcggcgccatcatcattttcggtcgcgtggcttcctggcgcattgtcgctggggtattcctcggcatggtggctaccgcgacgctgtttaacttcattggctctgataccaacccgatgtttgccatgccgtggtactggcatctggttctcggcggttttgctttcggcatgatgtttatggcgacggatccggtgtccgcgtcgtttacggataagggtaaatggagctacggcctgctgatcggcgtgatgtgcgtcctgattcgcgtcgtcaacccggcctatccggaagggatgatgctggcgatcctcttcgccaacctctttgcgccgctgttcgattacctggtggtgcgggccaatattaagcggaggaagtcgcgtggctga

SEQ ID NO: 175760 - DNA, 1344 bp, Klebsiella oxytoca
atgattaaaatcacgaaagggctgaatttgcccatagctggcatgccatcacagcagatttcttcgaagactgcggtcaagcgcgttgcgctgttgggtgaagagtacatcggtatgcgcccatcaatggcggtgcgtgaaggggaccgggtgcaaaaaggtcaacttctgttcgaagataaaaaaaatcctggcgtgcgttttacagcacctgcgagtggaaccgtcagcgccattcatcgcggcgagcgccgggttctgcagtcggtcgttattgatgtggatggcgaagagtccgttcattttccccgctatgaattagccgatcttgccggattgacgcgcgagagcgttcagcagcagctgctggagtccgggctgtggacggcatttcgcacccgccctttcagtaaaatacctgcgccgggcagcgttcctgcggccatttttgtcaccgcgatagacacgaatccgctggcggccgatcctcagccaatcattctggcccagcgcgaagcgtttgacgccggtttgacgctgttgacgcggttgaccgacggtaaagttcacgtgtgtcaggccggcggcggcaagcttggcgggcatcctgtcggccaggtgacctttaatcagtttgccggtccgcatccggccgggctggcggggactcacattcattttcttgagccggtcagcctgaaaaagcaggtctggcatcttaactatcaggatgttatcgccgtcggcaaagtgttccttgaaggggagttgtacaacgaacgcatcgttgctcttggcggcccgcaggtcaaagagcctcgtttgttaaagacctgcttaggcgccagccttgatgaactgcttgaagatgagctgctggacgatgaaaaccgcattatctctggttcagtcctcagcggaacccatgcgtgcgggcctcatgctttccttggacgctttcatttacagataagcgttgtgaaagaggggcgcgagaaagagctattcggctgggtgatgccggggaaagataaattctccattacccgtaccaccgtcggccactttctgaagcgtaagctatttaatttctcgacggataccaacggcggcgagcgggctatggtaccgattggcaactatgagcgagtgatgccgctggatattctgcccaccatactgctgcgcgatttgctggcgggagataccgacagcgcgcaggcgctgggctgtctggaactggatgaagaagacctggcgctttgcacctacgtttgtcccggcaagtatgaatatggtccggcattgcgcagcgtgttaacccagattgagcaggaaggataa

SEQ ID NO: 175761 - DNA, 741 bp, Klebsiella oxytoca
atgcgcaaaatcgcattatttattgcgatgcttctgttgccatgcgtttcattcgcagggctacttagcagtaacagctcgacaacgccgatgagcaaagagtataagcagcagctcatgggctcgccggtctacattgagatctttaaagaagagcgcatgctcgatctttacgtcaagatgggcgaaacctggcagcttctcgacagctaccgcatttgtaactactccggcggtctcgggccaaagcagcgtcagggcgacttcaaaagcccggaaggtttttacaatgtttcccgtaaccagttaaaacccgatagtcgtttctataaagcgatcaatatcggctttccgaacgcctacgatcgcgcgcatggttacgaaggaaaatatctgatgattcacggcgcctgcgtatcggtcggctgctacgccatgaccgataccggcattgacgagattttccagttcgtcaccggcgccttagtttttggtcagcccaacgttcaggtgagtatttatcctttccgcatgaccgatgccaacatggcgcgccacaagttttcctacttcgcggatttctggaagcagctgaaacccgggtatgattacttccgcctgacgcacaagccgccggtggtttccgtagtagatggccgctacgtagtgagcaaaccgctcagccacgaagtcgttcagccacagcttgcttcaaactacacggtccccgaggcaaaatag

SEQ ID NO: 175762 - DNA, 768 bp, Klebsiella oxytoca
atgtgcgaactgctcgggatgagcgcgaatgtgccaactgatatttgtttcagctttaccgggctggttcagcgcggtggcggaaccgggccgcataaggacggctggggaattaccttttatgaaggtaaaggctgtcgcacatttaaagatccgcagcctagctttcaatcgcccatcgctaagctggtgcaggaataccccattaaatcctgctcggttatcgcccatattcgtcaggccaaccgcggtattgtcgcgctggaaaatactcatccctttacccgcgaactctggggacgtaactggacctatgcgcataacggccagctggaggggtatgagtctctcgagacgggaaatctgtatcctgtcggggaaaccgatagcgaaaaggcgttctgctggctgctacatagcatcaccgaacgctatccggaaatgccgggagacatggttgaggttttccggtttatcgccacgctcgccggggagctgcgtgaaaaaggcgtgtttaacatgctgctctccgatgggcgctacgtcatggcgttttgctcaacgaatttatactggattacgcgacgggcgccgtttggcgtagcgacgctgctggatcaggatgtcgagattgactttcaacgcgagaccacaccgaatgatgtggtcaccgttatcgccacccagccgctgaccggtaacgaaacctggcataaaatcatgccaggcgagtgggcgctattttgcctcggggaccgtgtagtttga

SEQ ID NO: 175763 - DNA, 582 bp, Klebsiella oxytoca
atgtaccaggatcttattcgtaacgaactgaacgaagccgccgaaacgctggccaattttctgcaggacgaagccaatatccatgcgattcagcgcgcagcggtgctgctggcggatagctttaaggccggcggtaaggtgctctcctgcggtaatggcggttcgcactgcgatgcgatgcactttgcggaagagctgaccgggcgctatcgtgaaaatcgccccggctatccggccattgcgatttcagacgtgagccacctttcttgcgtgagtaatgattttggctatgaatatgttttctctcgctatgtggaatctgtggggcgtgcaggggacgtactgctggggatctccacttccggaaattctggtaacgtcatcaaagcgatcgaagctgcccgcgctcagggcatgaaagttattaccctgaccggtaaagacggcggtaaaatggcaggttctgcggacgttgaaatccgcgtaccgcattttggctatgccgaccgcattcaggaaatccatattaaagtgattcatatcctgattatgctgatcgaaaaagagatggttaaagcttaa

SEQ ID NO: 175764 - DNA, 2445 bp, Klebsiella oxytoca
atgatgattttgagtattgttgcaaccgttgttttactcggtgcgctcttctatcaccgaatcagtctgctgctcagcagcgcgattttgctgctctggaccgccgcgctcggcgttgcagggctgtggaatatctggctgctggtcccgctggccattcttttactgccgttcaattttgcgccgatgcgcaaatctatgatttcagtgccagccttccgcgctttccgtaaggtcatgccgccgatgtcgcgtaccgagaaagaagcaattgatgccgggacaacatggtgggaaggcgatctgttccgcggcaatcccgactggcagaaactgcacaactacccgcagccgcgcctgactgccgaagaacaagcctttattgacggcccggttgaagaagcctgccgaatggcgaacgacttcgaaatcactcacgaaatggcggatctgccgccggagctgtgggcttatctgaaagagcatcgcttctttgcgatgatcattaagaaagagtacggcgggctggagttctccgcttatgcacaggctcgcgttctgcaaaagttgtcgggtgtctccggtattctggcgattaccgtcggcgtgcctaactcattaggcccgggcgagctgctgcagcattacggtacggaagaacagaaaaatcactatctgccacgcctggctcgcggccaggaaattccctgcttcgcgctgaccagcccggaagcgggttcagatgccggcgcgattccggataccggcgtggtctgcatgggcgaatggcaaggccagcaggtgctgggtatgcgtctgacctggaacaaacgctatattacgcttgcccctatcgccaccgtgctggggctggcatttaaactctccgaccccgaccgtctgctgggaggtgaagaagagctgggtattacctgcgccctcatcccgacaaccacgccgggcgttgagatcggtcgtcgtcatttcccgctgaacgttccattccagaatggtccgacccagggaaaagatattttcgttcctatcgactacattatcggcggcccaaccatggccggccagggctggcggatgctcgttgagtgcttatccgtaggtcgcggtatcaccctgccatcgaacgccaccggcggcctgaagtctgtcgccatggccaccggcgcctatgcgcacattcgccgccagttcaaaatctccatcggtaaaatggaagggatcgaagaaccgctggcgcgtattgcaggcaacgcctacgtaatggatgctgccgcctcgttgattacctacggcattatgcttggcgaaaaacctgcggtactgtcggcaatcgtgaagtaccactgtacccaccgcggccagcgttcgatcatcgatgcaatggatattaccggtggtaaaggcattatgctcggcagcggaaacttcctggcgcgggcttatcagggcgcgccaatcgccatcaccgttgaaggcgcgaatattcttacccgcagcatgatgatcttcggccagggggcgattcgttgccatccatacgtgctggatgaaatggcggcggcgcagaataacgacgttaacgctttcgataagctgctgtttaaacacatcggccacgtaggaagcaacaaggtacgcagtttctggctgggcctgactcgcggccttaccagcagctcgccgacccgcgatgccactcgtcgctactatcagcatatgaaccgcctgagcgccaacctggctctgctgtccgatgtctcaatggcggtactgggcggtagtctgaagcgtcgtgaaagaatttctgcgcgtctgggcgatgtgctgagccagctctacctggcgtcggcggtcctgaaacgctatgacgatgaggggcgtaacgaagcggacttaccgctggtgcactggggggtgcaggatgcgctgtatcaggccgagcaggcgattgacgatctgttggtgaacttcccgaatcgtctggtagcgggcgcgcttcgcgtggctatcttcccgaccggacgtcattacctggcgccttcagacaagctggatcataaagtcgcgaaaatcctgcaggttccgagcgcgacacgttctcgtatcggccgcggtcagtatctgacgccgagcgagcataacccggtcggtctgctggaggaagcgctgcttgatgtgatggcggcagatcctatccaccagcgtatctgtaaagagctgggcaagaatctgtcctttacccgacttgatgaactggcccgtaacgcgctggcaaaggggttaatcaatcaggacgaggcggacatcctggtccgtgctgaaaccagccgtctgcgcagcattaacgtcgacgacttcgccccggatgaactggcgacccgaccggtaaagctgccggagaaggttcgcaagattgaagcggcctaa

SEQ ID NO: 175765 - DNA, 771 bp, Klebsiella oxytoca
gtgcccggactgaaaattacccttttacaacaaccgctggtgtggatggacggtcccgccaacctgcgtcatttcgatcgtcaactggaagggattaccgggcgggacctcattgttttacccgaaatgttcaccaccggtttcgcgatggaggcggcaaaacagtcgctatcgcaagaggaagtggttgcctggatgggagctaaagccgcgcaaaccaatgcgctgattgccggcagcgcggcgctgcaaacggaacgcgggcccgttaaccgttttttgctggtggagcccgagggtaaaatccatttctatgataaacgacatctgttccgcatggcggatgaacatcaccattaccaggcgggtaacgaacgggtcatttttgcatggcgcggctggaggatcctgccgctggtgtgctacgacctgcgcttcccggtctggtcgcgcaatcataacgactacgatttagcgctgtatgttgccaactggcccgcaccacgctcaacgcactggcagtcgctactggtggccagggctatcgaaaatcaggcttatgttgccggatgcaatcgcgtcggtaccgacggcaatggccaccattaccggggcgacagtcggataattacgccgcagggcgaaattatcgccaccgccgagccgcatcaggccactcgccttgacgcagagctttcattgacggcgctgaacgagtatcgcgagaagtttccagcctggcaggatgccgaccccttcacgctcaattaa

SEQ ID NO: 175766 - DNA, 741 bp, Klebsiella oxytoca
atgaccgctatgagcactgcaattacacgacagatcgttctcgataccgaaaccaccggtatgaatcagattggtgcgcactatgaggggcacaagataatcgagatcggcgcggtagaggtgatcaaccgccgcctgaccgggaacaacttccacgtctatcttaagccggatcgcctggtggaccctgaagcttttggcgtccacggtattgcggacgaattcctcatggataagcccgtgtttggcgatgttgtcgatgagtttctcgattacatccgcggcgcggagctggtcatccataacgcatcgttcgatatcggctttatggactatgaatttagcaagctgaatcgaggcattccgaagaccgatactttttgcaaggtgaccgacagcctggccctggcgcgtaaaatgttcccgggcaagcgcaatagccttgatgctctttgctcgcgttatgaaatagataacagcaagcgaacgctccacggggctctgctcgatgcccagattctggccgatgtttatctgatgatgaccggcggccagacgacgatggctttctctatggaaggggaagggcagcggcaggccggagatacgggaatacagcgcgttgtccgggcagccagtaagctacgcgtagtttatgccactgatgaagagctggtgaaccatgaatcccgcctcgatctggtacaaaagaaaggcggaagctgcctgtggcgggcatga

SEQ ID NO: 175767 - DNA, 468 bp, Klebsiella oxytoca
atgctcaaacaggtagaaattttcaccgatggttcctgcctgggcaatccaggccccggcggctacggtgcaattttacgctatcgcggaaaagaaaaaacctttagcgaaggctttaacctcacgacgaataaccgcatggagatgatggccgccatcgtcgccctcgaagcgctgaaagaacattgcgaagtgatcctcagtaccgacagccagtatgtgcgtcagggtattactcagtggatccacaactggaaaaagcgcggctggaaaacggcggatataaaaccggtcaaaaatgtcgatctctggcagcgcctggacgctgcgctgggtcaacacaaaataaaatgggagtgggtcaaaggccacgcggggcatccggaaaacgaacgctgcgacgaactggcgcgcgcggccgcctctcatcccacccgggatgataccggttatctggcagagcgctaa

SEQ ID NO: 175768 - DNA, 717 bp, Klebsiella oxytoca
atgaagccggcaaggatacctcagacagttacagcgccagagcactggtccagcatgccctggggcgaatactaccgcgaatcgctggaacggcagatgaaaccgtggctggctaaattatatggctttcatttacttaagattggcaatctgagcgcggaaatcaatacggagtcctgcgcgatttcccatcaggtgaatgtctctttacagggtaatcccgtgcaggtaaaggccgatccgctgcatttgccttttgccgagaagtcggttgatgcctgcctgctggcgcataccttaccctggtgtagcgatccgcatcgactgctgcgggaagcagaccgagtgctgattgacgatggctggatcattttgaccagttttaaccccatgagcctgatgggattacgcaagctggtgccggtcttgcgcaataagcccccctataacagccgcatgtttactttaacgcgtcagatggactggctggcgctgctgaattttgaagtgatgcatcacggttgctaccaggtccttccctggtctcgtcacggggggaaaatgctcagcacccatttacctgctttaggatgtttacagctcattattgcccgtaaacgtacgatccccttgacgctaaacccgatgaaatcgggcaaagcaaaaaaacggataccgcaggcggtgggcgccacacgtcagtggcgcaaggggtaa

SEQ ID NO: 175769 - DNA, 756 bp, Klebsiella oxytoca
atgaatcttatcagtattcccgcatttcaggacaactacatctgggttctcagtgaagatagcggccgctgtctgatagtcgacccgggagaagccgcgccggtgctcgccgcgatagaacaaaaccgctggcagccagaagccatcttcttaacgcatcaccatcacgaccacgttggcggcgtaaaacaactacgtgaaaaattcccggcaatagcggtttacggaccggcagaaacccaggataagggagcaacctgcatcgtaaaggacggagaaagcctgtccgttttgggccgcgaattttctatttttgctacgccaggtcacactttaggacacatctgtttctacagtaaaccttatctattttgtggcgatacaatgttttccggcggctgcggcagactctttgaaggcaccccagaccagatgtatcaatcatttaacaagattaacgcccttcctgatgaaacgttaatatgttgcgcacatgagtacactttagcaaatatgaagtttgcaatgagcatattgccccatgataaggatataaatgattactatcgcaaagttaatgagttacgcgcaaaaaaacaaaagacactacccgtaactctgaaaaatgaacgtcgtataaatttatttttacgtacagatgattatgatttaattgaagaaataaacaaagaaacaaatttgcaacactctgttcagagatttgcgtggttaaggtcaaagaaagacgacttctga

SEQ ID NO: 175770 - DNA, 1368 bp, Klebsiella oxytoca
atgaaggcacgagcgattttactcgcctctgtcctgctggtggggtgccaggcgtctaagaacgatggcaccgtacaacagcacgcacagagcctttctgcagcgagtcaaggggaagcaagcaagttcacaagtcgagcgcgctggttagatgatggaaccttctacgcgcaagaccaggatctgtggacttcgataggcgacgagctaaagatgggaattccggaaaacgtccggattcgcgaacaaaaacagaagtatttaagaaataagagctatctccacgatgtaactttacgggcagagccgtatatgtactggatagccgggcaagttaagaaacgtaacatgccgatggaactggtattactacccatagtggagagcgcttttgacccgcacgcaacgtctggcgccaatgccgcaggcatctggcagatcattccgagcaccgggcgcaattatggtttgaaacagacccgcagttacgatgcgcgtcgtgacatcgttgcctcaaccacggcagcgttaaacatgatgcaacgtctgaacaaaatgttcgacggcgactggttgttaaccgttgcggcgtataacagcggcgaaggccgggtcatgaaggcgatcaaagcgaacaaagcgcgtggtaaacccaccgatttctggtcgctgtctttgccgcatgaaaccaaaatatacgtaccgaaaatgctggccctgagcgatatcctcaagaacagcaagcgctacggcgtgaggctgccgacggcagacgaaagccgggctctggcgcgcgtacgtctcgacagcccggttgagatttcacagttagccgatatggcaggaatgccggtcagcaagctgaagaccttcaatgctggcgtcaaaggatcaaccctgggcgcgaatgggccaaactacgtgctggtgccgcagaagcacgccgcacagctgcgcgaatcgttggcttccggcgatattgcagccgtgcagccgacgctgctggctgacaacaagccgttaaccagccgtagctacaaggtgcgttccggcgatacgatttccggcattgcgtcgcgtctcggcgtatcaaccaaagatctgcagcagtggaacggtattcgcggttctaacctgaaggttggtcagaatctggtgattggcgcaggcagcagcgccgagcgtctggctaacatcagcgatagcatcacttatcgcgtgcgcaaaggcgactccctgtcgagcattgcgaaacgccatggcgtcaacattcgtgatgtcatgcgctggaatagcgatactggcaacctgaagcccggcgatcagctgacgctgttcgtgaaaaacagcgacagaccagaatcctga

SEQ ID NO: 175771 - DNA, 771 bp, Klebsiella oxytoca
atgacaacacgctctcatcatgaccatgtagaaatgcagtttggctcacaggccagcgcctacctgaccagcgccgtacacgcctccgggcgcgatctgcaacgtctggccgaaaggctggcggattttcctcaggcgcacgtgctggatataggatgcggcgccggccacgccagctttgcggcggcagggcaggttgcacaggtgacggcgtatgatttatccagccagatgctggacgttgtggctcaggccgcacgtgataaaggttttgctaatattaccactcagcagggatatgccgagtctttgcctttcgctgacgccagctttgatgtagcgatcagtcgttattctgcgcatcactggcacgatgtcggtctggcgctgcgtgaagtgaagcgagtgctgaagccgggcggagtaatgattattatggatgtgatgtcgcccggtcatccggttcgcgacgtctggctgcagaccgttgaggccctgcgcgatacttcccatgtccgcaactattccagcggcgaatggctggcaatgacgagtgaggcgggtttggtgattaatcatctgctgaccgaccgcttgccgctggagtttggctcatggattgcgcgcatgcgaacgccagcggcgctggcggaagcgattcgcttatatcaggagagcgcatcggctgaggttaaggcctattttgccctgcagcacgatggttcgttcaccagcgatacgattatgtttgaggcccacaaggcggcctga

SEQ ID NO: 175772 - DNA, 807 bp, Klebsiella oxytoca
atgcctaaattgcgaaagaatacctatgccatgcgctatgtcgccggacagcctgcggagagaattttacctccggggtcgtttgcaggcatgactccggcttttccggcgggagtaccgttaagttcggatgaaaaaatccgcgtactggtgtggaacatcttcaagcagcagcgcgccgagtggaaatcagttcttaacaactttggtaaagatgcgcacctggtgttgttacaggaagcgcaaactacacctgaattagtgaagtttgccacgtccaactaccttgcagcggatcaggttccggcactggtgctgccccagcatccttccggcgtgatgacgttagcctctgcgcatcctatctactgttgtcctctgcgtgaacgcgagcctatcctgcggttggcgaagtcggcattagtgaccgtgtatccgttaccggattcccgcctgctgatggtggtcaatattcatgcggttaactttagccttggcgtcgatgtctacagcaagcagctgctgccgattggcgatcagatcgcccatcacagcgggccggtgattatggcaggcgactttaatgcctggagccgcccgcgaatgaatgccctgtaccgctttgcgcgcgaaatgtcgctgcgcgaagttcgtttctctgacgatcagcgccgccgtacgtttggccgcccgcttgattttgtcttctatcgtgggttaagcgtacacgatgcttccgtactggtgacgcgtgcctccgaccacaaccctctactagtcgaattcagtcccggcaagcctgattaa

SEQ ID NO: 175773 - DNA, 1191 bp, Klebsiella oxytoca
atgccgctggcgctacttgccttaactatcggtgcctttgcgattggcacgactgaatttgtcattgtgggcctggtgcctgacattgctgagcaactagctatttcgctaccctctgcagggctgctggtttctgtctatgcgttgggcgtagcgataggtgctcctgtgctcaccgcgctgaccgggcgtatgccgcgtaagcaggtactgctggcgttaatggcgctgtttaccgctggcaatctgctggcatggcaggcgccgggttacgagactctggttctggcgcgcctgctgaccgggctggcgcatggggtattcttttcgatcggttcgacaattgcgaccagcctggtcgcgaaggagaaagcggcctcggcgattgcgatgatgttcggcgggttaaccgttgcgctggtgaccggcgtgccgctaggcaccttcattggccaacactttggctggcgtgaaacattcctggccgtatctattcttggcgtaatcgcgttaatgagcagccttattctggtgcctaataacattccgggccgcgtcagcgcgggtctgcgcgctcagcttaaggttctgacccatccgcgtttactgattatctacgcgatcactgctctggggtatggcggcgtatttacggcatttaccttcctggcgccgatgatgcaggatcttgccggatttagcccatcggccgtcagctggatccttctgggctatggtgtttcagtggcgataggtaacgtatggggcggaaggctggcggataaacatggcgccgtgcccgcgctgaagctgatttttgccgccctggctgcgctactggcgatctttcaatttacggccagtgcgcattatgctgccctggcgacggttttggtgatggggatctttgcttttggcaacgttccgggactgcaggtgtacgtggtgcagaacgcggagcaatacactcctggcgcggttgacgttgcctctggcctgaatattgcagcatttaacattggcattgcgttaggttcggtgattggcgggcagatcgtagcgcattatggtctggcccagacgccgtggatcggcgctctgattgtgctggtggcgctcttactggtcggaattagcggccggcttgataagccagggcttcgcgctaacggccctggcgtagaaggctaa

SEQ ID NO: 175774 - DNA, 903 bp, Klebsiella oxytoca
atgagagctacctcagaagaaatcgccatttttgtcgccgtggtagagagcggcagttttagtcgcgctgccgaacagcttggtcaggctaattccgccgtcagccgggcggtaaaaaagctggagtcaaagctcggcgtcagcctgcttaaccgtactacccgccagctaagcctgaccgaagagggcgagcgttatttccgccgagtgcaggttgtgcttcaggagatggccgccgccgaaaatgagcttctggagagccgaacgacgccaagaggattacttcgcgttgatgccgcgacgccggtgatattgcattttctgatgcctttgatcaggcccttccgtgagcgctacccggaaatgagcctttcgctggtctcgtcagagacctttatcaatctgattgagcggaaagtggacgtcgcgatccgcgccggcacgctaaccgattccagcctgcgcgcccggccgctgttcaatagctaccgcaaaattatcgcctcgccggactatcttgcccggcacggaacgccgcaaagcgtcgccgagctaaaacatcatcagtgcctcggctttagcgagcccgtatccctgaatacctggccagtttcctgctgcgatggccaactgctggaaatcgaaagcgagatatcttccaatagcggggaaacgctcaagcagctgtgtctggccggtaacggtatagcctgtctgtcggactatatggtggataaagaaattgctgaaggggcgtttgtcgaactgctggctgacaaacggctgccgattgaaatgccgtttagcgcggtgtactacagcgacagggcggtgagcacgcggatcagggcttttatcgactttcttagtgagcatgtaaaacagctcccgcaggagctgtaa

SEQ ID NO: 175775 - DNA, 804 bp, Klebsiella oxytoca
atgacaatccctgcatttggtcttgggaccttccgtctgaaagatgacgtagtgatcgcatctgtaaaaacagcgcttgagctgggctatcgcgccattgataccgcgcaaatctatgacaatgaagcggccgtgggccaggctatcgcagaaagcggcgtcgcgcgcgatgaactgttcatcaccaccaagatctggattgaaaatttaagcaaagataagctcatcgcaagcctgaaagagagtctgcagaagctgcgcaccgaatatgtcgatctcacgctgatccactggccgtcgccaaacgatgcggttgccgtggaagagtacatggctgctctgctggaggcgaaacgtcagggactgactcgccagatggggatctctaacttcactattccgctgatggagcgcgccattgctgccgttggggtagagaatatcgcgaccaaccagattgaactgtcaccttatttgcaaaatcgtaaggtcgtcgattgggcctctgagcatggcatccacattacctcttatatgactctggcttatggtaaagcgttaaaagatgaagccattgcccggattgcggcgaaacacaatgccactccggcgcaggttatcctcgcgtgggcaatgggtgaaggctatgcggtgatcccatcttcgaccaggcgcgaaaacctggcaagcaacctgaaagctcaggagctgcagcttgatgaagacgatcgcctggcgatcgccgcgctggactgtcacgatcgtctggttagcccggaaggtctggcgcctgaatgggattaa

SEQ ID NO: 175776 - DNA, 1362 bp, Klebsiella oxytoca
atgaagacgccgcactcttcatttatcagcccgttccgcacgggcggcgatccctgtacctttcgggaggccggcgaactgcaggccgaaataggcaaacttacgcatccggcgcggccggatgtggactggggcagggtagagagcctgagtctggctctgtttcggcaaaacggcgtggagttgcaaacgctggtctgttacgcgctggcgaggacccggcagtatgggatagcaggaatggtggacgctctggatgccctcgcggcattgataaaccagcgctggggagatttctggccgctgcaggtccattcaaggatcgcgctgctggcgtggcttgccgagaagatgaagcaggcgctgcgcacgcaggatcttcagtatcaggatctggcgcagattaaccactgcagccagcacctgacggaaatagagaacgtgctgcggcggtgcgaggtctggcatatgtcaaaactggagcaactggccgttcagttgcgaaatgcggcgatgcgcctggagcgactggcgccgcagggcgaaaaaacggcggcgaagaaaatcgccagggagcgcccctggccgagagatgtaaaaaatggggccaaaaaaaccgctgaagcgcaggcatcgcgaaagcatgacgaaagcttgttattgaagaaaactacggagagtcctcgccagcggcgggtatggcccggctttatcgccgggatgctgacgatggtttgcctgggaggttgcggtttctgggggtggtcatggctgaacccgccagaaatgggcctacgggaggcacagaccgcgacgtcggtgttggcgttgccctcagcgccggggagggatggcaacaagatgctgagctgggcgcagggtatggcgacgacccgcgcgcagctgaagatgctgaatgacctgccgccgctgtggcccctgcgccaggaagaggcgctgctcctggcccttgaacgccgctggccgaataattcgcaaattaaggcgatgagcgccgagtggcgtaagcagcgggaagccagcgcgctgccggtgcctgacttacagcgctatgcccaggcgcaggcgaagctacggcagctttcgctaaggctggatgcgctggatgaacgcaaggggcggtatatgactgcttctgagttgaaatcggcaattttcagcatccggcagctgttacagacgccgccgctggaagaacagctcaggcaactggaggctcaggtacgagccggaagtctctcacaggtgctgcaaatgcagattgattttcattttaagcagttgctaagccgctacgctattttgctggatagcacggaagtgaaaccgaaccctcagtag

SEQ ID NO: 175777 - DNA, 1611 bp, Klebsiella oxytoca
atgcgaatgagtgaattactgcagcagttaacccgcagctgttttcccgatcggaatgcgcttgaggcgggacaacaacaggcggcgctgtggcagacgtggctgctgccagcgacgacggagtctccggtcgggagagaccccgtctaccacgacgatttccagctgatgcgcgacgagctgaataagctttccggcgcggataccgctctgatttgtcagcttgcggaatccctgctgctcactcaggcaaaagatgtacgcatcgccacctgctatatctgggcgcgattgcaccgcgacggcgaacgcggattagcggaaggtctcgccctactggccgggctggtgcagcgcttcgggacgcaactgcttccctctcgtccggcgggccggaaaatggcgctggaatggttaactggcgaaaagatactcgacagcctggcgcgttacccggaagtggcaaaagaagactttgccaatattgtcgcggctctcaatctgctggacgcttctttttctacatggccggaagaacaacagccgccgtccctgataccgctgatccaggcgctggagtcgcggctggcgcagtcgggcgggatgaacgcggtggtgccgcagaacagcgcggcaaccgcttcacctccgacaaattcgctacagatacagtccatcagttccgggcgcgacctgctggatcaggcaaaagcgctggcccgctacctgaacgcgcagccgcagggctggctggcggcgcatcggttgatgaaaactctgcgctgggacaccgtgcatgaactgccgcctgatgtggacggcagaacccggctggctccgccgcgtaccgagtcacgtactcagcttaagcgtttgtactcgcaacagaactggaccgagctgctggaacaggccgacctgatgttcagcgccggggtcaatcatttctggttcgatattcaatggtatttgtatcaggcgctgggcaaagcgggcgcgccgtgggacaagtggacggcaattatccgccaggacctgatgctgttgcttgagcgtttacctgggctggagagcctggcgtggaacgacggcacgccgtttgtcgatgaggtgacccgcagttggattacccggcaggtgctgccgcaagatgaggggaactggcttagcaggacgccaacggccccggtggaagagccggacaacgatgtgctggcgctggaaccggaggcgctggcgctggcggaccgcgagggcgttgatgctgcgctgggctggctccagtcccgtgcggggatcgtcacggcacgccagcgtttgctgttgcgtctgttgatggctcgcatagcggagcagtacggtaaaagcgaaatggcgctgctgctgctggaagagctgcatggcgctgcgcaggggctgacgttgacacaatgggagccggagttaattttcgaagtcacggcacgacagctgaagctgctgcgcctgcgggcgcaccgctatgcagataaagcccatctggcgcggaaaatggaaaatctgctggcggcgctggtggcgatggatcctgcgcgggcggcagtactttgtgatacgcaatataaagactga

SEQ ID NO: 175778 - DNA, 138 bp, Klebsiella oxytoca
atggcgatgaatgcgctgtgctctgggcgttacgactgccgtttcccgttcatcccgaaacccgtcatggccgatagtgatgcaagccttcccctcgccgggaaaatattccggaccggaaaaaatcataaccgatag

SEQ ID NO: 175779 - DNA, 2634 bp, Klebsiella oxytoca
atgaccgtaaaccagccagctgcactgctacgccgcctcaacccgttctgcgcccgcgcgctggacgccgccgcatcgctgtgccagacccgcgctcacgccgagattactattgagcactggttgttgaagctgctggaacagggagaaggggatatcaccgtcgttgcccggcgctatgagtgggatatggagattctctggcaagcgttgctggggcatcttgaaacgcttccacgctcggtacgtgagcgtccgcagctttctggacgcctgacggcgctgatgacgcaggcatggttgttcgcttcgctggagagcaacgagccgcagatccgtagtcagcacttgctgatggcgctgacggagaagcccgaactgctggcttgcgacgatctgtgggtgttgttgagcgtgggtcgcgtccagttagggcggctgcgcgcgctactggacgagcagtcggaagagtgtccggtacggcaaaggcaggctggcgaaccgctggcggaagatataagtgcaaattcttctgcgcttgcggcggatgatagacaagatgatgcgcatcgagcggtccttaaacgtttcaccgcgaatattacagaaaaggcccggatgggccagatcgatccggtgttcggccgcgatgttgagatccgccagatggtggatattctgtcgcgccgtcgcaagaacaatccgctgcttgtgggcgagcctggcgtcggcaaaaccgcgctggtggaagggctggcgctgcgtattgtagatggcaacgtgccggatagtctgaaaaccgtgcatattcactcgctggatctggggctgctacaggcaggggctggcgttaagggggaattcgagcagcggctaaaaaacgtcatcgacgcggtgcaggcatcgccggagccggtgctgctgtttatcgatgaagctcatactatcatcggcgcgggaaatcctgcgggcggcgcagatgcggctaatttactgaaacctgctttggcccgcggtgagctacgcactatcgcagcgacgacctggagcgagtacaaacaatattttgagcgcgatgccgctctggaccgccgttttcaattggtcaaagtggacgagcctgatgacgacacggcctgcctgatgctgcgcgggctgaagacccgctacgcggagcaccatggggtgcacatccaggatagcgccattcaggccgcggtacgtctgtcgcggcgttatctgtccggacgccagctgcctgacaaggcggtagatctgctggacactgccggggcgcgtgtccggatgagtcttgataccctgccggagccgttaactcagcttcagggacatctggccgcgctggatattgagcagaaggcgcttgaaaaggatcgcgcgttttatcctgcatccgcgcaggctcgactggcagagctcgccgaccagcgggatcaactccagcaaaaggcggatcagctggagtatcagtaccaacaagaaaaagcgctggtgcagcagattatagcgctacgccgggaaagtccggacagtgaacggctacctcaactgcaacagcagctgctattgcaacagggattaacgccattgctggcgctggatgtggatgcccgggccgtcgctaccgtcgtagctgactggaccggcgtaccgctcacttccctgctgaaagatgagcagagcgagctgctgaatatggaacagatgctcgccaggcgggtggtaggccaggatggtgcgctaaaggctattgcgcagcggttgcgggcggcaaaaaccgggctcacgccggaaaatggcccgcagggcgtatttctgctgaccggtcctggcggcaccggtaagaccgaaactgcgctggcgatggcggatgcgctgttcggcggcgaaaagtcgcttattaccatcaatctctcagagtatcaggaaccacatacggtttctcagctcaagggagcgccgccgggttatgttggcttcggccagggtggcgtattgacggaagccgtcagaaaacgtccgtatagtctggttctgctcgacgaggtagaaaaggcgcaccgcgacgtcatgaaccttttttaccaggtgttcgatcgcggttttatgcgcgatggggaaggcaggaaaatcgactttcgcaacaccattatcctgatgaccgctaatctcggaagcgatcacattatacaactgctggaaaagaggccggcggccacggatctggatctgcaggaactgctgtatccgctgttgcgggagcacttccagcctgcgctgctggcgcgtttccaaacggtaatttaccgccctctcgggtgggaggcgatgcggtccattgtggaaatgaagctggcggcagtgagccgccgcctgcgcgaacattacggtatggagacggtgatcggggccagtctttacgatcaactggcctcctcctgtctgctgccggataccggggcgcgtaatatcgacagcttactgaaccagcagattctgcctgtactgagccagcagctgctggcgaatcaggcggcgcgacggcaacccaggctgctggcgctcggctggagtcaagaggacggtatcgtactggaattagatacggaataa

SEQ ID NO: 175780 - DNA, 492 bp, Klebsiella oxytoca
atggcaatacctgcttacctttggctgaaagatgacggtggcgcggatatcaaaggttccgtagacgtacagggacgtgagggcagcatcgaggtcgtggcgctggaccacgatgtgtatatcccgacggataacaataccggcaaactgaccggcacccgtacccataagccatttaccttcactaaggaaatcgacgtatccagcccgtatctctacaaggccgtcacgacgggtcagactctgaaaacggcagagttcaagttttaccggataaatgacgccggtcaggaagttgagtatttcaacattacgctggataacgtcaagctggtcagagtggctccgctgatgcacgacattaaggatcctgcgcgcgagaggcacaatcatctggagcgtatcgaattccgttacgaaaagattacctggacctacaaggacggaaacatcattcattccgatgcatggaatgaacgtccttcggcctga

SEQ ID NO: 175781 - DNA, 204 bp, Klebsiella oxytoca
gtggcgttagatagcgcggtgctggcgttgaaaaaacttaaagatgccattcctgcgcctgtgtttccccaacgatacgttgatggtacggaagtatcagatgggctctcttctgcttgcgacctgaatacgcgtgcggaagagaatacggtgggcgcggagcagaacataccgtcggaggcggcggtacctcaatcacactaa

SEQ ID NO: 175782 - DNA, 1533 bp, Klebsiella oxytoca
atgtctgtacaagaacatgacgcaccggtagcgcaggcgcaggctgtgaccagagaaaatgtttatcagtctctgtttaaaaaaattcacctgacgccggtttcttctctgaaacaactcggagagtggcaagatagtgaagcaatggcggaagcatcaacggaggagagggtctctgcagccattcaggtactgctttcctgcgtggcgaaatccggaaaaaatgttgaaaagttagataaatcactgctggattttcatatcagcgagctggatcgaaaaatcagccagcagctggatgccgtgatgcaccacccggactttcaggcgctcgaatcgctctggcgcggcctgtggtttctcgtccagcgaaccgaccctcgaaagaataccaaaattgagcttctggatgtcagcaaggaagacttacgtcaggactttgatgatgcgccggaaattgtccagagcgggctttatcaccacacttatgtgcaggaatatgacactcccggcggcgagccaatagcctcagtgatttccagctatgagtttgataacagcccgcaggacatcgcgttgctgcgtaatatctctcgtgtggccgcggcttcgcatatgccgtttattggttccgtcggacctgaattcttccttaaaaactcaatggaagaggtggctgccataaaagatatcggtagttatttcgatcgtgccgaatatatcaaatggaaaagttttcgcgacactgatgattcccgctatatcggtcttgtaatgccccgtgtacttggccgtctgccgtatggcccggatacgattcccgtccgcagtttcaactatgtggaagaggtgaaagggcccgatcacgaaaaatatctctggaccaacgcgtcattcgcctttgcggcgaatatggtgaaaagctttgttaacaacggctggtgcgtacaaatacgcggaccgcaggcggggggagcagtcaccgatttaccgatccatctttacgacctcggtaccggcaatcagatcaagatcccctcggaggtgatgatcccggagacccgtgaattcgaatttgccaaccttggatttattccactctcttattacaaaaatcgtgattacgcatgcttcttttcggctaactcggcacagaaaccggcgctgtatgagacggcggatgccactgctaacagccgcattaatgcccgcctgccgtatgtctttctgctgtcgcgaattgcgcactatctgaagattattcagcgcgagaatatcggtaccaccaaagaccgacgtttgctggaactggagcttaatacctggctgcgtaacctggtgacggaaatgaccgatcctggtgatgcgcttcaggcatcgcacccgctacgcgatggaaaggtggttgtggaagatattgaggacaatccgggcttctttcgtatcaggctttatgccgtgccgcattttcagattgaaggaatggatatcagcctgtcgctggtatcgcaaatgccgaaggctaaatcgtaa

SEQ ID NO: 175783 - DNA, 489 bp, Klebsiella oxytoca
atgggtaatagttttcaaaatgaggtgccaaaatctcgagttaatcttcaattggatcttcacactggcggggcgggaaagaaaagcgagttaccgttaaagttacttgcggtaggcgattttagtaacggaaaagaacaacggtctttatctgaaagaaataaaataaatatcaataaaaacaattttgatagcgtaatggctgaactcttacctacggtcgatttgctggtcgaaagcactctgtcaggagaagcccgggtagaaaatattaaacttaactttggtagcgtcaaagattttgaaccagaacaggttgctcgcaatatcccatcgcttcgtgcattgatttctatgcgtaatttactacgcgatctcaaatccaacttgctggataacgtcgagttccgtcgtgaactggaaaagattatgaaagatcctgcgatgagtagtgaactacgcgcagagctaacggcactcgcaccgtaa

SEQ ID NO: 175784 - DNA, 657 bp, Klebsiella oxytoca
atgttgacgttgaatcaggtaacctggcgctggcccggcgcggcggatgattgtttgcaaaacatctccctgacgctcggccagggcgaatggctggcgcttaccggcgataacggcgcgggaaaatccaccctgctgcgggtaatggccgggctgctgtcggcaacgtccggtagcgtcaatctgttgaataagccgatggcgcagtataaaaatcgtcagcgcgccaaaattatcggcgtcctgtttcaggaggccgaaaaccagctcttccacagcaaagtctctgaagaggtcgcctatgggctgcggttacagaaattaccggcagcggaagttgcgcaacgcaccgcggcggcgctgcgtttatgcagtctggagagcgtagctgatgcgcatccgctggatttgcataccgcccagcgccgtatggtcgccgtcgcctgtctggaagccatggcgccagagatcctgctgctcgacgaacccagccgcgattttgatcggcactggctggcaatatttgaagcgtggctgacagtttgccgcaaaagaggaaccagcgtagtggctatcagccatgacgcggcttttacacagcggcacttttcccgccgggtgcttctggaaaaaggcagggtgctgaggatggtctga

SEQ ID NO: 175785 - DNA, 678 bp, Klebsiella oxytoca
atggttacgttagagcagttccgttatcacccgacccgggcaacgggtccttcatcatgctttgatttccattattcgcagcccggcatggtggcgatttttggcgataacggcagcgggaaaagcactctggcgcagatcatggcgggctggtatccggattttctgcccggcaatatcgaaggtcatggcactctgcttggcatccctattggacagcaatcactggtcgaacgggcgcagaccatccagctggtccagcaatccccctatctccagctttccggttgtaccttcagcgtcgaagaagaggtcgcttttggccctgaaaatctttgccttcacgaagacgagattatgcgtcgtgttgacgcggcgctctcgctgatggagtgccaggagttacgtcaccgccatccgtccacgctctccggtggagaaacccagcgcgtggcgatcgcctgcgcgctggctatgcagccaatgctactgatccttgatgaagcctttagccgcctgacggcgcaagctaccgccatgcttctgacacgtctgcgggactgggcgctggcgcagcattcactgatcatcctttttgaacgcaccccttcgccttttcttgcctggtgtcagcagggttggcgactacatgatggagcgctttccccgctatgttga

SEQ ID NO: 175786 - DNA, 708 bp, Klebsiella oxytoca
atgcacccttttacctccttaacgctctgggcgctggcggcagtgaccactctgctgctaccgacggatacggtgctgccggtgtatagcgccgcggcttttctcagtttagtgctgctaaaagcaacgcgacggcgggcaaaatatgtcgcctggctactactctcgctgggcattggcctgtggctggtccacggcggctggtttacccagtggctgagcggccagccccgcgacccgcagcgctgggcgaacgccatcacgctgtggctgagaattctggcgattgtttcaacgtcacagctctggatggagtacgtaccggtacagcgctttattcgcgccctgtttgcctcacgcctgccgccgggcgtcgcttatctgttcgctggcccgctgctggttgtcgaacagctaaagcgccagttgacgattatccacgaagcccaacgcgcccgcggcgtaccgctggacgagaatggatatcagcggctgcgcgcaatgcctgcgctcattatccctctgacccataacgcgcttaacgatctggcgatacgcggggcggcgctggatatgcgggcatttcgtttacatcgtcggcgcactacgctttgggcgccgaaagacagcaccttacaacgtctggcgcgttacggcatgctgctggcgatggtcgctgaagcgggagcctggctatggttacgttag

SEQ ID NO: 175787 - DNA, 579 bp, Klebsiella oxytoca
atggctcgtcgccaatttaccagccagtccctggtgctgattgcgatcgccgtcgccatcaacatgatcggcggacagctcatcagtatgttaaaacttcccatttttctcgattcaatcggcaccttaatcagcgcggttctactcggaccggtcattggcatgttgaccggtttactgaccaatcttctgtggggtctgctgaccgatccgattgccgccgcctttgcgccagtggctatggtgattggcctggttgccggatggctggcgagagcgggatggttccgcactttacctaaggtgatcattagcggggttgtcattaccctcgccgtgaccgcggttgccgtgccgctgcggacggcgctgtttggcggcgtgacgggaagcggtgcggatctgttcgtcgcctggatgcattcggtaggtcagaatctgctggagtcggtggcgattaccgtcttaggcgccaatctggtggataaaattcttaccgcgattatcgtctggaccctgttgcgccagctgccgctgcgtacgttgcgccattttcctgctatgtccgccgtacgctaa

SEQ ID NO: 175788 - DNA, 426 bp, Klebsiella oxytoca
atgaccattccccacttgcagccctctgcggcacgttactatgcgcttcgcttacttccgggcgaggaggttttttcacgcctgcgcgccttcctgcaactgcaccatattcaggcagcctggatcgccggctgtaccggtagcttaagcaatgcggcactacgttttgccggccaggatgagaccaccttactgaacggaacctacgaggttatctcgctgaatggcacgctggaattgaaaggagaacatcttcatttagcgatatccgatccgcaaggcgcgatgctcggcggccatatgatgcccggctgtaccgtccgcaccacccttgagctggtgataggcgaactgacctccctggcatttagccgtcagccttgcgcgctttccggctatgacgaactggtcatctcatcccgataa

SEQ ID NO: 175789 - DNA, 1020 bp, Klebsiella oxytoca
atgaccatacgcattgcgattaatggcttcggtcgcatcgggcgtaacgtggttcgtgctttgtatgaatccggacgtcgtgcggaaatcaccgtggtggcaatcaatgaactggcggatgctgccggcatcgcgcatttattgaaatatgacaccagccatggacgctttgcctgggatgtgcgccaggagagagagcagctgtttgtcggcgatgacgccatccgtctgctgcatgaatcttcccttgaggcgttgccctggcgggaactggcggttgatgtggtgcttgactgcaccggcgcttatggcagccgcgagcatggcgaagcccatcttcaggccggcgcgaagaaagtgctcttttcacatcctggcggcaacgatctcgacgcgacgatcgtgtttggcgtcaaccatgatgagctgcgcgctgagcaccgtatcgtctccaacgcctcctgcaccaccaactgcattattccggtcattaagctgttagatgatgcttacggcatcgagtctggtacggtaaccacgattcactccgcgatgcacgatcagcaggttatcgatgcttaccatccggatttgcgccggacgcgagcggccagtcagtcgatcatcccggttgatactaagcttgctgcggggatcacgcgtattttccctcagtttaacgatcgctttgaagctatcgcggtccgtgttccgacgattaatgtgacggcgatcgaccttagcgtcacggtgaaaaaaccggtaaaagcgagtgaagtcaaccagttgctgcaaaaagcagcacagggtgcatttcatggtatagttgactatacggaattgccgttagtctcgatagatttcaaccacgatccgcatagcgccatcgtcgatggcacgcaaacgcgggtaagtggcgcgcatttgatcaaaacgctggtctggtgcgataacgaatggggctttgctaaccggatgctcgacaccacgttagcgatggccgcacaaggtttcaggtaa

SEQ ID NO: 175790 - DNA, 1164 bp, Klebsiella oxytoca
atgtctgtaattaagatgaccgatttggatctggctggtaaacgcgtttttatccgtgcggatctgaacgtaccggttaaagaagggaaagtaaccagcgatgcgcgtatccgtgcttctctgccgaccatcgaactggccctgaaacagggtgcgaaagtgatggtcacttcccacctgggtcgtcctaccgaaggcgagtacaacgaagaattctctctgctgccggttgttaactatctgaaagacaaactgtctaacccggtacgtctggttaaagattacctggacggcgttgaagtcgctgccggcgagctggtggttctggaaaacgttcgctttaacaaaggcgagaaaaaagatgacgaagcgctgtcgaaaaaatacgctgcgctgtgcgatgtcttcgttatggatgcgttcggtactgctcaccgcgcgcaggcttctactcacggtatcggcaaattcgctgacgtcgcttgtgcaggtccgctgctggccgctgagctggacgccctgggtaaagcactgaaagaaccggctcgtccgatggtagctatcgtcggtggttctaaagtttccactaaactgaccgttctggactccctgtctaaaatcgctgaccagctgatcgtcggcggcggcatcgccaacaccttcgttgccgctcagggccacaacgtgggtaaatccctgtacgaagccgatctggttgacgaagctaaacgcctcctgacgacctgcgatatcccggttccgactgacgttcgcgtagcgaccgagttctctgaaaccgcaaccgctaccctgaaatctgttaacgacattaaagatgacgaacagattctggacctgggcgatgcttccgcagagaaactggctgaaatcctgaaaaatgccaaaaccatcctgtggaacggcccggtcggcgtgttcgaattcccgaacttccgcaaagggactgaaatcgtggctaacgccatcgcagatagcgaagcgttctccatcgcaggcggcggcgacaccctggcagcaatcgacctgttcggcattgctgacaaaatctcctacatctccaccggcggcggcgcattcctcgaattcgtggaaggtaaagttctgccggcagtagccatgctcgaagagcgcgctaagcagtaa

SEQ ID NO: 175791 - DNA, 1080 bp, Klebsiella oxytoca
atgtctaaaatttttgatttcgtaaaaccgggcgtcatcactggcgacgacgttcagaaagtgttccaggtagctaaagaaaacaactttgctctgccagcggtaaactgcgtgggtactgattccatcaacgccgttctggaagcagctgcaaaagttcgttctccggttatcgttcagttctctaacggcggcgcagcgttcatcgcgggcaaaggcgtgaaaactgacgttcctcagggcgcagccatcctgggcgctatctctggcgcgcatcacgttcatcagatggctgaacactacggtgttccggttatcctgcacactgaccactgcgctaagaaactgctgccgtggatcgacggtctgctggacgcgggtgaaaaacacttcgccgcgaccggtaaaccgctgttctcttctcacatgattgacctgtctgaagagtccctgcacgaaaacatcgagatctgttctaagtacctggcgcgtatggccaaaatggacatgactctggaaatcgaactgggctgcaccggcggcgaagaagacggcgtggacaacagccacatggacgcttccgctctgtatacccagccggaagacgttgattacgcctacactgagctgagcaaaatcagcccgcgtttcaccatcgccgcttccttcggtaacgtacacggcgtttacaagccgggcaacgtggtgctgaccccgactatcctgcgcgactctcaggaatacgtttctaagaaacataacctgccgcacaacagcctgaacttcgtcttccacggcggttccggttcttccgctcaggaaatcaaagactccgtaagctacggcgtgatcaaaatgaacatcgataccgatacccaatgggcaacctgggacggtatcctgcagtactacaaagctaacgaagcttacctgcagggtcagctgggcaacccgaaaggcgaagaccagccgaacaaaaaatactacgatccgcgcgtatggctgcgcgctgcacagacgtccatggtgactcgtctggagcaggcatttaaagagctgaacgcgatcgacgttctgtaa

SEQ ID NO: 175792 - DNA, 858 bp, Klebsiella oxytoca
atggaagatttgaacgttgtcgatagcataaataacgccggttcatggctggtgcgcaatcaggcattactgctgagctatgccgtcaacattgtcgcggccatcgcgattattattgttggtctgatcgtggcgcggattgtttccaacaccgtcaatcgcctgatgcgggctcgacatattgatgccaccgttgccgattttctttctgcgctggtacgctacgccgtcattgctttcacgctgatcgccgccctcggccgcgtgggtgtgcaaaccgcttcggttatcgcggtacttggcgccgcgggcttagccgtcggtctggcgctgcaggggtcgctgtctaaccttgccgctggggtcctgctggtcgttttccgcccattccgcgctggtgaatacgttgaccttggcggtatcgcgggtaccgtgctgaacgtgcagattttctccacgaccctgcgcagcgcagatggcaaaattgtggtggtaccgaacggtaaaatcattgccgggaatatcatcaacttctctcgcgagccggtacgtcgcaacgagtttattatcggcgtggcctacgatgcggacatcgacaaagtgaagcagctgctcaccaacatcatcgaatcggatgaacgtattctcaaagatcgtgaaatgaccgttcgcctgaatgaactgggcgcttcatctgtgaactacgtggtgcgcgtatggagtaagagcagcgatctgcaaagcgtgtactgggacgtcctggagcgtattaagcgcgattttgacgccaacggcatcagcttcccgtatccgcagatggacgttcatgtcattcgtccgcaggaaaaagcagaataa

SEQ ID NO: 175793 - DNA, 594 bp, Klebsiella oxytoca
atgattttgccgctcggtccgcaaaacgcttttgtgatgaatcagggtattcgtcgtcagtaccatctgatgattgctttgctatgcgccatcagcgatctgctgcttatctgcgccggaatttttggcggcagcgcgctgctgatgcagtccccgtggctgctggcgctggtgacctggggcggcgtcgcttttttattgtggtacggttttggcgcgctgaaaacggcctttagcagcaatctggagctggccagcgcggaggtgatgaagcaggggcgctggaaaatcatcgtcaccatgctggcggtgacctggctgaatcctcacgtttatctggatacgtttgtggtgctcggaagcctcggcggacagctggagatggagccaaagcgctggtttgccctgggcaccatcagcgcctcattcttatggttctttggtctggccctgctggccgcctggctggccccgcgcctgcgcacggcaaaagcgcagcgaattatcaacgtgctggtcggtctggtcatgtggatcatcgcgctggagctggcgaaagacggcttcgctcatgtgcaggcgctgcttaactaa

SEQ ID NO: 175794 - DNA, 756 bp, Klebsiella oxytoca
gtgaagttaaaagtcatggccctggcggcggcactcggatttagcgcaatggcagttcaggccaatgaattgccaaacggcccacatattgttacttcaggtaccgccagcgtcgctgcggttcctgatatcgccacgctggcgattgaagttaacgtctccgcgaaagatgcggcatccgctaaaaaacaggcagatgaacgcgtggctcagtatctctccttcctggagaagagcggcattgcgaagaaggatattaactctgccaacctgcgtacccagcctgattatgattatcagaacggcaaaagcattcttaagggctatcgcgcggtgcgtagcgttgaagtcacgctgcgccagctggataagctcaacgggttgttagatggagcattaaaagccggtctgaacgagatccgttcggtctcactgggcgtggcgcagccggacgcttacaaagataaggcgcgaaaagcggcgattgacgatgcgattcatcaggctcaggagctggctagcggattccacggcaaactggggccggtttatagcgttcgctatcatgtctccaactaccagccgagcccgatggtgcggatgatgaaagccgatgcggcgccggtatctgctcaggaaagctacgagcaggcgaccattcagtttgatgaccaggtggacgtggtgtttgagctgcagccgacccagcctgcgtcgccagcgaaaccggctgaagagccaaaagcagcgcagtaa

SEQ ID NO: 175795 - DNA, 897 bp, Klebsiella oxytoca
atggatatctttatttctaaaaagatgcgcaatttcattctgttggcgcagaccaataacatcgccagagcggcggaaaaaatccatatgaccgcatcgccctttggcaaaagcattgctgcgcttgaggatcagatcggctatacgttatttacccgcaaagataacagcatcagtctcaataaagcggggcaggagctctatcagaagctgtttcctatttaccagcgcctatcggccatcgataacgaaatacactattccgcgcgccgctcgcgtaacgttgttatcggcatcgacaacacctatccgacaataattttcgaccagctcatcagcctgggcgataaatacgatggcgtgaccacccaggccgtggagttcagcgagaatggcgtgattgataatcttttcgaccgtcagctggattttattatttcgccgcagcatgtttcgccccgcgtgcaggagctggaaaatctgaccatcagcgaactggcgccgctgcgtctggggtttcttgtttcccgccgttatgaagataagccgccgcaggatctgttacgtgaactgccctggctgcagatgcgtttccagaatcgggccaattttgaggcgatgctggacgcctatatgcgcccctgcggaatcaacccgacggttatctatcgcccctatagctttatggcgaaaattagcgccgtagagcgggggcagtttttaacggttattccttacttcgcctggcgtctggtaaatccggcgaagctgaagtacttcgacgcgcccggtagcgccatgtatatgcaggagtatctctattcgctgaaaaaccatcgctataccgccacgatgcttcagcacataactgaagatcgcgacggtacggagggctaa

SEQ ID NO: 175796 - DNA, 1467 bp, Klebsiella oxytoca
atgaaacggatgagcgccgatgaagcggcggagattatccagcacgaccagatggtggcgttcagcggcttcactcccgccggttcgcccaaagcgctgcccgcggctatcgctcgccgcgccggtgagttacatcgggcgcagaagcctttccagatccgcctgctgaccggcgcgtctattagcgccgccgccgatgatgcattatcggcagccgatgccgtctcgtggcgcgcgccgtatcagaccgcgtcgggcctgcggcaaaaaatcaatcaggggaaggtgaagtttgtcgatctgcacctgagcgaagtggcgcaaatggttaactacggcttctttggtgagattgatgtcgcggtgatcgaagcctcggctatcgcgccggacgggcgggtctggctcaccagcggtatcggcaacgcgcccacctggctgctacgggcgaagaaagtgatcatcgaactcaatcattatcacagccctcgggttgccgagctggccgatatcgtgctccccggcgccccgccgcggcgcaacagcatcgccatctttcatgcgatggatcgcgtgggtagccggtacgtgcaaatcgatccgaaaaaaattgtcgcggtcgtggagaccgaacagcccgacgccggaaacctgctcgataaaaataatccggtttgtcagaaaattgccgataacgtggtcacctttctgctggaagagatggctcgcgggcgcatcccgcctgaatttttgccgctgcaaagcggcgtgggtaatatcaataacgcggtcatggcgcggctgggtgagaatccggatattccctcttttatgatgtactccgaggtcttacaggagtcggtagtccatctactggaaacagggaaagtcaccggcgtcagcgcctccagcctgacaatatccgccgattcgttgcgcaagatttacgccaatatggatttcttcgccagccgcattgtcctgcgcccgcaggagatctccaatcatccggaaattatccgccgtctgggagttattgccctcaacgtggggctggagtttgacatctacggacacgccaattccacgcacgtagccggggtgaatctgatgaacggcatcggcggtagcggcgattttgaacgcaacgcctggctctctatctttatggcgccgtccatcgccaaagacgggaagatctccactatcgtgccgatgtgcagccatgtcgatcacagcgagcatagcgtgaaggcgatcgttaccgagcagggtatcgccgatctgcgcgggttgtcgccgctgcagcgcgcccgcgctatcattgataactgcgcgcatccgctctaccgggactatttacatcgctatctgcagagcgctcccggcgggcatattcaccacgacctcacccacgccttcgacctgcatcgtaatctgcttgagcacggttcaatgctcggttag

SEQ ID NO: 175797 - DNA, 786 bp, Klebsiella oxytoca
atgtcttatcaatatgttaacgtcgaaattatccagaaggttgcggtgattgagttcaactatagccgcaagcttaacgccttaagcaaggtgtttatcgacgacctgatgcaggcgttgagcgacctcaacaggccggaaattcgctgcgtcattttacgcgcgcctggcggatcaaaggttttctccgccggccatgacatccacgaattacccggcggacgccgcgatccgctttcgtatgacgatccgctgcgccagattacccgcatgatccaaaaatatccgaaaccggtgatctccatggtcgaagggagcgtctggggcggcgcgtttgagatgatcatgagctccgatctgatcatcgccgccagtacgtcaacgttctccatgacgccggtgaatctcggcgtgccctacaacctggtcggcattcacaatctgacccgtgacgctggctttcatatcgtgaaagagctgattttcaccgccctgccgattaccgcccagcgcgcgctggcggtcggtattctcaatcacgtggtggacgctggcgaactggaagattttaccttacagatggcgcaccacattgccgagaaagcgccgctggcgatagcggtcattaaggaagagctgcgcgtgcttggcgaggcgcacaccatgaattccgatgagttcgaacgtattcagggaatgcgccgcgccgtctacgacagtgaggattatcgggaaggcatgagcgcgtttatggaaaagcgtaaacctgaattcgtcggccattaa

SEQ ID NO: 175798 - DNA, 996 bp, Klebsiella oxytoca
atgattaactcatccaccctgagcgacgccattcggcgattacgtttgggcgagcgggccacgctcgcccaggccatgacgctggtagagagtcagcatccccgccaccaggcgctgagcgcccagctggtcgatgcgattatgcccttcaccggcaacgccctgcgcctcggcgtcaccggcacgccgggagccggaaagagtacctttctggaagccttcggcatgctgctgattcgccatggcctgcgggtcgcggtgatagcggtcgatccaagcagcccaatcggcggcggcagcattcttggcgacaagacgcgcatgatcgaactggcgcgctcggactcggcatttatccgcccggtgccctccagcggccatctgggcggcaccagcctgcgcacgcgggagctgatactgctgtgcgaagcggcgggctatgacgtggtcattgtcgaaaccgtcggcgtcggccagtcggaaacggaggtctcccgcctggtggactgcttcatctcgctgcagatcgccggcggcggtgacgatctgcagggcattaaaaaagggatcatggagatggcggatatcgtggttatcaataaagatgatggcgagaaccgcgccagcgtggctatcacccgccatatgtatgaatccgccctgcatattctgcgccgcaagcacgccgcgtggcagccgcgcgttttgagctgtagcgcgctggagcagcgcggtatcgaagccgtctggctcgctatccttgacttcaaaaccaccctcaccgacagcggcgatcttgaaaagctgcgccagcgtcaggcgctggagtggctgcaaaagcagaccgaaaccgaggcgctgcatctgctgtttgcccgagcggactttgatcgctacttccagcaaacgctacaggcggtgaaaaacaatggcctctcgccgcgcaccggcctgcggcagattagcgaattcctccagaatcattactttgcataa

SEQ ID NO: 175799 - DNA, 2145 bp, Klebsiella oxytoca
atgtcagagttacgagagtggcaaacgctcgccaacaaggagcttagccggcggggaaaaaccgtcgatgctctggtaaaacagacggcagaagggattgccgttaaaccgctgtataccgaagccgatattgataatctggaagtgaccggcaccctgcccggcctgccgccttacgtccgcggcccccgcgccaccatgtataccgcccagccgtggaccatccgccagtacgctggtttctcaaccgcgaaagagtccaacgccttctatcgccgcaacctcgctgccgggcagaaagggctttccgtcgccttcgatctcgcgacccatcggggctatgactccgacaatcctcgcgtggcgggcgacgtggggaaagcgggggtagcgatcgataccgtcgaagatatgaagattctgttcgatcgcatcccgctggatgaaatgtccgtgtcgatgaccatgaacggcgcggtgctgccggtaatggcgttttatatcgtcgcggcggaagagcaaggcgttgcgccggaacggctcaccggcacgatccagaacgatattctgaaagagtatctgtgccggaatacctatatttacccgccgaagccctcaatgcgcattattgccgacatcatcgcctggtgttcgggcaatatgccgcgctttaataccatcagcatcagcggctatcacatgggcgaagccggagccaactgcgtgcagcaggtggcctttaccctggccgacggcatcgaatacattaaggccgcgctctccgccggcctgaaaatcgatgacttcgccccgcgcctgtcgttcttcttcggcatcggcatggatctgtttatgaacgtcgcgatgctgcgcgccgcacgctatctgtggagcgaagcggtcagcggcttcggcgccaccaatccaaaatcgttagccctgcgcacccactgccagacttccggctggagcctcaccgagcaggatccctataacaacgtgatccgtaccaccatcgaagcgctcggcgccacgctcggcggcacccagtcgctgcatactaacgcctttgatgaggcgctcggtctgcccaccgacttttccgcacgtatcgcgcgtaatacgcagatcatcattcaggaggagtcggagatctgccgcaccgtggatccgctggggggatcgtattacgtcgagtcgctgaccgatcaaatcgttaagcaggcgcgatccattatgcagcagatcgacgaagcgggagggatggcgaaggcgatcgaagccggactgccgaaacggatgatcgaagaggcctctgcccgcgagcaatcgctgatcgaccagggcaagcgcgtcatcgtcggcgtcaataagtacaagctggaaaaagaagatgaaacggcagtgctggagatcgacaacgtcaaggtacgcaacgagcagatcgcctcgctgaaaaaaatacgggccagtcgggacgatgtgacggtaaaagccgcgctgaacgccctcacccacgccgcgcagcatgatgaaaatctgctggccgccgccatcaacgccgcccgcgtgcgcgccacgctgggcgaaatctccgacgcactggaggtggcttttgaccgctatctggtgcccagccagtgcgtcaccggcgtgattgcgcaaagctaccatcagtcagataaagccgcctgcgagtttgacgccattgttgcgcaaaccgaaaaattcctcgcggatcgcggccgtcgcccgcgcattctgatcgccaaaatgggtcaggacggtcacgatcgcggcgccaaagtgatcgccagcgcctattccgatcttggcttcgatgttgacctgagcccaatgttttctaccccggaggagatcgcccgcctcgccgtggagaacgacgtacacgtggttggcgcctcatcgctggcggcaggccacaaaacgctgatccccgagctggtcgatgcgttgaaaaaatggggacgggaagatatctgcgtcatcgccggcggcgtcattccgccgcaggattacgcgtttctgcaggcgcgcggcgtggccgctatttatggccccggcacgccgatgctggagagcgtacgcgacgtcctgatgaggattagccagcatcatgattaa

SEQ ID NO: 175800 - DNA, 894 bp, Klebsiella oxytoca
atgaaacgaccggactacagaacactacaggcgctggacgcggtaatcagggaacgagggtttgagcgcgccgcgcagaagctttgtattacgcagtccgccgtctctcagcgcatcaaacagctggaaaacatgtttggacaaccgctgctggtacgcaccgtaccgccgcgtcccaccgaacaggggcaaaagctgctggccctgctgcgccaggttgaactgctggaagaggagtggctgggcgatgaacaaaccggctcaacgccgctgctgctgtcgctggcggtcaacgccgacagtctcgccacctggctgttgcccgcgctctccagcgtgctttccgactcccctattcgcctgaatctacaggtagaggacgagactcgaacccaggaacgcctgcgccgcggtgaagtcgtcggcgcggtcagtatccagccgcaggcgctgccaagctgcctggtcgatcagctcggcgccctcgactatctgttcgtcgcctcgaaagagtttgcccagcgctatttccccaatggggtgacccgctcggcgctgctcaaagcgccggtggtggcattcgatcatctcgatgatatgcaccaggcctttttacagcagaacttcgatttgccgccgggcagcgttccctgccatatcgtgaactcttcggaagcctttgtgcagctagcccgccaggggacaacctgctgtatgattccgcatctgcaaattgagcgagagctgaacagcggcgaacttattaatctcacgccgggcctgttccagcgccggatgctctactggcaccgttttgcgccggaaagccgtatgatgcgccgggtgaccgatgcgctgatcgattatggccataaagtgttgagacaagattaa

SEQ ID NO: 175801 - DNA, 660 bp, Klebsiella oxytoca
atgacgcaagatgaactgaaaaaagcagtaggctgggcggcattgcagtatgtacaaccgggcaccatcgttggggtcggcacgggctccacggcggcgcattttattgatgcgctgggcaccatgaaaggtcagattgaaggcgcggtttccagctctgatgcctctactgaaaaactgaaaagcctcggtattacggtttttgatcttaacagcgttgaccgtcttggcatctatgtcgacggcgctgatgaaatcaacggccatatgcaaatgattaaaggcggcggcgcggcgctgacgcgcgagaagattatcgcttcggtcgctgacaaatttatctgtatcgctgatgcttccaagcaggtggacatcctgggtaaattcccgctgccggtggaagtgatcccgatggcgcgcagcgccgtggcgcgtcagctggttaagctgggcggccgtccggagtaccgccagggcgtcgtcaccgataacggcaacgtgatcctcgatgtgtatggtctggaaatcctggacgctattgcgctggaaaataccattaacggtattccgggtgtcgtgaccgtcggcctgtttgcgaatcgcggtgcggacgtcgcgctgattggcaccgctgatggtgtaaaaactatcactaaatag

SEQ ID NO: 175802 - DNA, 129 bp, Klebsiella oxytoca
atggctccctcgcaaatattttttctccaggcctattttggtgacttctgtcacatttatgcgccttgtcttagtaacaacctacctttcttttactttctggtgttttgtcctgctatttcccgctga

SEQ ID NO: 175803 - DNA, 1233 bp, Klebsiella oxytoca
atggctaaggtatcactggaaaaagacaaaattaaatttctgctggttgaaggtgtgcatcaaaaagcggtggacagcctccgcgcagcaggctacaccaatatcgaatttcacaaaggcgcgctggacagcgaagagctgaaagcgtccattcgtgatgcccatttcatcggcctgcgttcccgtactcatctgactgaagagatcttcgcggcggcggaaaaactggttgcggttggctgcttctgtatcggtactaatcaggttgacttaaatgcggcggcaaaacgcggtattccggtatttaacgccccgttctctaatacccgttccgttgcggagctggtgatcggcgagctgctgctcatgctacgcggcgtgccggcggcaaacgccaaagcgcaccgcggcgtatggaacaagctggctgttggcagctttgaagcacgcggcaaaaagctgggtattatcggctatggtcacatcggtacgcagctgggcattcttgccgaatcgttggggatgcacgtctatttctacgatattgaaagcaaactgccgttgggtaacgcgactcaggtacagcatctctccgatctgttgaacatgagcgatgtggtaagcctgcacgtgccggaaaatgcctcaacgaagaatatgattggcgcggaagagctggcgctgatgaaaccgggtgcgctgctgatcaacgcctcacgcggtaccgtggtagatattccggcgctgtgcgatgcgctggcgagcaagcacctggcgggcgcggcgatcgacgtgttcccgaccgaaccggcgaccaacagcgatccgttcaactctccgctgtgtgagttcgacaacgttatcctgaccccgcatattggcggctcaactcaggaagcgcaggaaaacatcggtctggaagtggcgggcaagctggcgaaatactccgataacggttctacgctctctgcggtgaacttcccggaagtgtcgctgccgctgcacggcgggcgccgtctgctgcatatccatgaaaaccgtccgggcgttctgaccgcgattaaccagattttcgccgcgcagggcattaacattgcggcgcagtatctgcagaccactccgcaaatgggctacgtggtcattgatattgaagccgaagaagatgtcgcccagagcgcgctgcaggcgatgaaggctattcctggtaccatccgcgcccgtctgctgttctaa

SEQ ID NO: 175804 - DNA, 597 bp, Klebsiella oxytoca
atgaccctattgccagatgccccctataccagacagcaaattcgccagcagatccgccagcgccgacgcgcgttaacgccggagcagcaaacgcagttcgccctccaggcggcggacagaatgatggcttatccgccggttctgctcgcgcagacggtcgcggtatttctttcgtttgatggcgagctggatacgctgccgcttattgaccagctctggcgggcaggcaaacgggtttatctccccgtgcttcatccgttcagtccgggcaatcttctgtttctgcactaccacccaagcagcgagctgatggtgaatcgtctgaaaatccgcgaaccgaaactcgacgtgcgcgatgtcctcccgcttagccagctggatgtgctggtaacgccgctggtagcatttgatgccgccggacagcgcctgggtatgggcggcggattttacgaccggacgctgcaaaactggcggcagcatcgcctgcagccggtcggctacgcgcatgattgccagcaggtcgacgcgctgccaacggagcagtgggatatcccgctgccagcggtcatcacgccgtcaaaaacctggctctggtaa

SEQ ID NO: 175805 - DNA, 330 bp, Klebsiella oxytoca
atgtctgcacaacccgtagatctccaaatttttggccgttcactgcgagtgaattgcccgcctgaacaaagggatgccctgaaccaggcagctgacgacctgaatcagcggttgcaagatttaaaagaacgcactagagtcacaaatactgagcagctggtcttcatcgccgcgttgaacatcagctatgagttgactcaggaaaaagcgaaaacccgcgactacgccgccagcatggaacagcgtattcggatgcttcagcagaccatcgagcaagcattgcttgagcaaggtcgcataagcgaaagacccgggcagaagtttgaataa

SEQ ID NO: 175806 - DNA, 585 bp, Klebsiella oxytoca
atgcgcatgtctatacagaacgaaatgcctggttacaacgctgtagaccagttactgaaccaacaaggggtaggattaacccctgccgaaatgcacggtctgatcagcgggatcctgtgcggcggcaataaagacagcagctggcagccgttggtgcacgacctgaccaacgaaggcctggcttttgggcatgagctggcgcagtcgctgcgtaacatgcattccgccaccagtgattcgctggaggacgacggcttcttattccagctctacctcccggatggcgatgaggtgagcgtgttcgatcgcgccgatgcgctggcgggttgggtgaaccattttctgcttgggctgggcgtaacgcagcccaagctggataaagtcaaagacgaaacgggtgaagccatcgacgatctgcgcaatattgctcagctcgggtatgacgaagacgaggatcaggaagagctcgaaatgtctctggaagagattatcgaatacgtacgcgttgccgcgttgctgtgtcacgacactttctctctccagaaacccactgcgccggaagtgcaaaaaccgacgctacactaa

SEQ ID NO: 175807 - DNA, 1317 bp, Klebsiella oxytoca
atgactcagcaggaatttctctctcgtcgccaggctctactggcgcagatgcagccaggcagcgccgcgttaatttttgccgcgccggaagcggtacgcagcgcagattcggaatatccctaccgccagagcagcgatttttggtacttcaccggctttaatgagcctgaagcgctgctggtattgattaaaagcgatgagacgcataaccacagcgtgttgtttaaccgcgtgcgcgatctgactgctgaaatctggtttggccgacgccttgggcaggatgccgcgcctgagaagctgggcgtcgatcgcgcgctggcatttagtgaaatcaatcagcagctgttccagctccttaacggcctcgatgctatctattttgcgcagggcgaatatgcctacgccgacgaaatcgtgttcaacgcgctggaaaaactgcgcaaaggcgtgcggcagaatctgcaggcgccaaactcggtcattgactggcggccgatggtgcatgagatgcgcctgtttaagtcggcggaagagctggaggtgatgcgccgcgcaggcgagatctccgcccttgcgcatacccgcgccatggaaaaatgtcgtccagggatgtttgaatatcatctggaaggcgagatcctccacgagttcaaccgtcacggcgcgcgctatccctcttacaacaccatcgtgggcagcggcgaaaatggctgcatcctgcactacaccgaaaacgaaagcgaactgcgcgatggcgatctggtgctgattgacgcaggctgcgaataccgcggctatgcgggcgatatcacccgaaccttcccggtaaacggcaagtttagcccggcgcagcgcgagatttacgatatcgttcttgagtctctggaaacctcgctgaagctttatcgccccggcacctccattaacgaggttaatcagcaggtagtgcggatcatgattaccggcctggtgcgtttggggatcctgaaaggtgaaattgatgagctaattgctaataacgctcatcgtcctttctttatgcatggcctgagccactggctggggctcgacgtacatgatgtcggcaactatgacgtcgaccgctcgcgtattctcgaaccgggaatggtgctgactgtggaaccggggctgtatattgcgatggatgccgacgtcccggcccagtaccgcggcatcggcattcgtattgaagacgacatcgtcattactgaagacggtaatgaaaacctcaccgctggcgtagtgaaaaaagcggatgatatcgaggcgctgatggcggcggcgcgccagctatga

SEQ ID NO: 175808 - DNA, 1179 bp, Klebsiella oxytoca
atgagcgtactgatcgttggcggcggaatgaccggcgcgacgctggcgctggcaatatctcgtctgaccggcggcaagctgccggtgcacctgattgaagcaacagcgccggaatctgcccggcatccgggctttgacgcccgggcaatcgcacttgctgccggcacctgtcagcagctggctcgcgttgatatctggcaggaaattgccgaccgcgccacggctattcagcgcgttcacgtcagcgatcgcggtcacgcggggtttgtgacgctcgaggctaaggactatgggctggcggcgctgggtcaggtggttgagctgcacgacgtcggccaacgcttgtttgcccagctgcgtaaagcgccgggcgtgacgctacactgtccggcaaaagtggaaaatgttagccgcagcgaagagagcgtaagcctggttctggacaacggcgaaacgctcagcggtaaactgctggtcgcggccgatggctcgcgctcaacgctgggggcccgctgcggtatcagctggcagcaagagccctatgaacagctggcgattattgccaacgtcagtaccgctgtgccgcacaacgggcgcgccttcgagcgttttacccaacacggtccgctggcgatgctgcccatgtcgcagggccgctgctccctggtgtggtgtcatccgcagtcgcggcaagaagaggttctgagctggtcggacgaacgcttctgtcatgaacttcagcaggcattcggctggcgtcttggccggatcgtccaggcaggcaagcgcagcgcgtatccgctctcgctcacccgagctacccgcaccattgcccatcgtctggcgctggtcggcaatgcggcgcaaacgctgcatcctattgccggacagggttttaaccttggcctgcgcgacgtgatgagcctggcggaaatgctggcgcagacgcatgccgaaggagaggatccgggtggctattcgctactgagccgctatcaggcccgccgcgccgcagataaagccgccaccgtcggtgtgaccgatgggctggtgcatctgttcgctaatcgctgggcgccgctggtggcggggcgcaacgcaggcctgatggcgatggaattatttaccccggcgcgcgatgcgctggcgcagcgtaccctcggttgggtcccccgttaa

SEQ ID NO: 175809 - DNA, 1203 bp, Klebsiella oxytoca
gtgcaaagtgttgatgtcgctattgttggcggtggaatggtggggctggcggttgcctgtggtttgcagggcagtggactgcgcgtcgccgtgctggagcaggccgcgccgcagccgttaagcgcggatgcgccgccggcgctgcgggtgtcggcaattaatgccgccagcgagaagctgctgaacaaactgggcgtctgggaggacatagtcgcccggcgcgccagctgctaccacggtatggaagtgtgggacaaagacagttttggccgtatcagctttgatgaccagagcatgggctttagccaccttgggcatattattgaaaacgccgtggtgcatcatgttctgtggcaaaaagcgcagcgctgtgctgacgtcacgctactggccccggcgcagctgcagcaggtcgcgtggggcgagaatgaggcctttcttagcctgcaggacggcagcatgttaaccgccaggctggtggttggcgccgatggcgccaattcgtggttgcgtaataaagccgatatcccgctgaccttttgggattatcaacatcatgcgctggttgccactattcgcaccgaagagccgcacgaagcggtggcgcgtcaggtatttcacggcgatggtattctggcgttcctgccgttaagcgatcctcatctctgttctattgtctggtcgttgtctcctgaagaggcggaacgaatgcggcaggcagacgaggccgcttttaatcaggcgctgaatattgccttcgataaccgtctgggtttgtgttccgtagagagcgaacgtcaggtttttccgctcaccggccgctacgcgcggcagtttgccgcccaccgtctggcgctggttggcgatgccgcccataccattcatccgctggcggggcagggcgttaatcttggctttatggatgccgccgaactgattgatgagctgaagcgcctgcatgcgcagggcaaggacatcggccagcatctctatctgcgtcgctatgagcgcagccgcaagcacagcgctgcggtgatgctcgcggggatgcagggcttccgcgacatgttctccggcagccatccggcgaaaaagctgctgcgcgatattggactcaagctggcggatactctccctggcgtgaagccgcagcttattcgacaagcaatggggctaaacgatctcccggcctggttacgttaa

SEQ ID NO: 175810 - DNA, 1095 bp, Klebsiella oxytoca
atggctcaacagactccgttgtttgaacaacacacgctatgcggcgcgcgcatggtggatttccatggctggatgatgccgctgcattacggatcccagatcgatgagcaccatgcggtgcgcggtgatgccggaatgttcgatgtgtcgcacatgaccatcgttgattttcacggcagccgaattcgcgagttcctgcgctatttgctggctaacgacgtggcgaagctcaccgtcccgggcaaagcgctctatagcggcatgctgaccgcctctggcggcgtcattgacgacctgattgtttatttcctttctgaagattatttccgcctcgttgttaactccgccacccgtgaaaaagacctcgcctggatcacccagcagtctgaatcctatggtcttgaaatgaccgtgcgtgacgatctttccctgatcgctgtacaaggtccaaaggcaaaagagaaagcggcgacgctgtttaccgacgcgcagcgccaggctgtagaaggcatgaagcctttctttggcgtgcaggcgggcgatctgtttattgcaaccaccggctataccggcgaagcgggttatgaaatcgcgctgccgaacgagcaggcggtggatttctggcgcggcctgctggacgcgggcgttaagccgtgcggccttggcgcgcgcgatacgctgcgtctggaagcgggaatgaatctttatggacaggagatggacgaaggcgtctctccgctggcggctaacatgggctggaccattgcctgggagcctgctgaccgtgactttatcgggcgtgaggcgctggaactccagcgtgaaaaaggcaccgaacagctggtcggtctggtgatgaccgagaaaggcgttctgcgcggcggcctgccggtacgcttcagcgatgccgagggcaatcagaaagaaggcattatcaccagcgggaccttctccccgacgctgggctacagtattgccctggcgcgcgtaccggaaggcatcggtgaaaccgccgtggtgcagattcgcaaccgcgaaatgccggtcaaagtgacgaaacccgtttttgtacgcaacggcaaagccgtggtgtga

SEQ ID NO: 175811 - DNA, 390 bp, Klebsiella oxytoca
atgagcaacgtaccagcagaactgaaatacagcaaagaacacgaatggctgcgtaaagaagcggacggtacctataccgtcggaatcaccgagcacgcgcaggagctgcttggcgatatggttttcgttgacctgcctgaagtgggcgccgccgttgaagcgggcgccgactgcgcggtggccgaatccgtcaaggcggcttccgatatctacgcgccaattagcggcgaaatcgttgccgtcaatgaagagctgaacgactcacctgagctggtcaacagcgagccgtacaccggcggctggatttttaaaattaaagccagcgatgaagctcaggttgccgcgctgctggatgcgaccgcatacgaagctctgttagaagacgaataa

SEQ ID NO: 175812 - DNA, 2874 bp, Klebsiella oxytoca
atgacccagactttaggccagcttgaaaaccgtgacgcctttattgaacgtcacatcggcccggacgcccgacagcagcaggagatgctgaataccgttggcgccgattcgcttaacgacctgattggccagattgtgccgcaggatattcagctggcgacgccgccgcaggtgggcgaagcaaccacggaattcgccgcgctggcggagctgaaggcgattgccggtcgtaacaagcgcttcaagtcgtacattggcatgggttacaccgccgtgcagctgcctccggttattcagcgcaatatgctggagaacccgggctggtataccgcctacacgccttatcagccggaggtttcccagggtcgcctggaatcactgctgaactttcagcaggtaacgctcgacctgaccggtctggatattgcttcggcctcgctgctggacgaagccactgccgccgcggaagcgatggcaatggccaaacgcgtgagcaaactgaaaaacgctaaccgtttctttgttgccgccgatgttcatccgcagacgctggacgtggtgcgcacccgcgcggaaacctttggtttcgatgtgattgtcgatgatgcggagaaagccctcgaccatcaggacgtcttcggcgtgctgctgcagcaggtagggacgaccggcgaggttcatgattacagcaaactgattgctgatctgaaagcgcgcaaagtgattgtcagcgtcgcagccgattttatggcgctggttctgctgacggctccgggcaagcagggcgcggacattgtgtttggctccgcccagcgcttcggcgtacctatgggctacggcggcccgcacgcggcgttttttgccgcaaaagatgaattcaaacgttccatgccgggccgtattatcggcgtatcgaaagatgcggcgggcaataccgcgctccgcatggcgatgcagacccgcgagcagcatatccgccgcgagaaagcgaactccaatatctgtacctcccaggtactgctggctaatattgccagcctgtacgccgtgttccacggcccggccggcctgaagcgtatcgccagccgcattcatcgcctgaccgatattctggccgcaggtctgcagaaaaaaggcctcaagctccgccatgcgcactactttgacaccctgtgcgtggaagtggctgataaagcggctgtgctggcgcgggcggaagcgctgcagatcaacctgcgtagcgatattcatcacgccgtcgggatcacgctcgacgaagccaccactcgtgaagacgttctgaacctgttccacgctatcgttggcgacgatcgtggcctggatatcgacgctctggataaagacgtggctctggacagccgttcaatcccggccagcatgctgcgcgacgatgcgatcctcactcatccggtgttcaaccgctatcacagcgaaaccgagatgatgcgctatatgcacgcgctggagcgtaaggatctggcgctgaaccaggcgatgatcccgctgggctcctgcacgatgaagctgaatgccgccgccgagatgatccctatcacctggccggaatttgccgaactgcatccgttctgcccggtcgatcaggccgaaggctatcaccagatgatcgctcagctctccgactggctggttaagctgaccggctatgatgcggtatgcatgcagccgaactccggcgcgcagggtgaatacgcgggcctgctggcgattcgccattaccacgagagccgtaacgaagggcatcgcgatatttgcctgatcccaagctccgcacacggtactaacccggcttccgcgcagatggcggggatgcaggtggtggtggtcgcctgcgataaaaacggcaatatcgacctggcggatctgcgggccaaagccgagcagtatgcggcgaacctctcctgcatcatggtcacctatccttccacccacggcgtctacgaagagaccatccgcgaagtgtgtgaagtggtgcatcagtttggcggccaggtttaccttgacggcgccaatatgaacgcccaggtcggcattacctctccgggctttatcggcgcggacgtctcgcaccttaacctgcataaaaccttctgcattccgcacggcggcggcggtccggggatgggacctatcggcgtcaaatcgcacctggcgccgtttgtaccgggccacagcgtggtgcaaattgaaggcatgctgacccgtcagggcgcagtttccgccgcgccgttcggcagcgcctccattctgccgatcagctggatgtatatccggatgatgggcgcagaagggctaaaacaggcaagccagatggcgattctgaacgccaactacattgctacccgtctgaaaaacgcgttcccggtgctgtatactggccgtgacggtcgcgtggcgcacgaatgcattctggatattcgtccgctgaaagaagagaccggcatcagcgagctggatatcgctaagcgactgatcgattatggtttccacgcccctaccatgtccttcccggtcgccggcacgctgatggtggaaccgaccgaatcggaaagcaaagtggagctggaccgctttatcgatgcgatgctggcgattcgcggcgagatcgaccgcgtgaaagccggcgagtggccgctggaggataacccgctggtgaatgcgccgcatactcagggtgaactggtgagcgagtggaaccatccgtacgctcgtgaactggcggtgttcccggccgggctgaacaataaatactggccgaccgttaagcgtctggacgatgtttacggcgaccgcaatctgttctgctcctgcgtaccgatgagtgaatatcagtaa

SEQ ID NO: 175813 - DNA, 744 bp, Klebsiella oxytoca
atgacgatagcattggtgacgggcggtagccgcggaataggtaaagcaacggcgctgctgctggcgcaggaaggctataccgtggtagtgaattaccatcagaatagcgctgccgcgaccgacgtggtgaatgagattcgcgcctgcggcggcaacgccgttgcgctccgggcggacgtcagcgatgaagcgcaggtgatggagatgttcgccgctatcgaccgcctcggtgaaccgctttccgcgctggtcaataacgccgggattttatttacccaggggacgattgaaagcctttgcgccgagcgaattaaccgggtgctggccaccaatgttaccggctacttcctttgctgccgggaggcggtaaagcggatgtcgcacaagcatggcggtaaaggtggggcgattgtgaatgtttcatccgcagcatcgcgcctcggggcgccgggagagtacgtggattatgccgcttcaaaaggcgcggttgattccctgaccaccggattgtcgctggaggtcgcggcgcagggcattcgggttaacggcgtgcgccccggattaatctataccgatatgcacgccagcggcggcgagccgggacgcgtggatcgcgtcaagtcgatgctgcccatgcagcgcggcgggcagccggaagaggtggcgcaggcgatcgtctggctactgagtgataaggcctcctacgttaccggcagcttcctcgagctggcgggcgggagatag

SEQ ID NO: 175814 - DNA, 492 bp, Klebsiella oxytoca
atgatgcttaaagtcttcagacagctcctgacatggatcctgattattgccgccgtcagtctgacggtggattatctacgcaggcccgcactgccgcagaatttctccagcatgccgctgcaaacgcttgatggccgaacggtcgatctggcggcaatgagccaggagcgtcccttattgctatacgtctgggcaacctggtgcagcgtatgccgctataccaccccgtcggtggctgctttagccgacgatggcggtaatgttatgacggtagcgttacgttcgggcgataaggccaccctggcgcgctggctggcgcataaaaaaatagcgctgccgacgatcaatgacgccagcggtcagctatcccaagggtgggaggtacaggtcacgccgacccttatcgttatctcgcgcggcgaggtgaagtcagtcaccaccggctggaccagcaactggggaatgcgcctgcggctatggctggcgtcatag

SEQ ID NO: 175815 - DNA, 1434 bp, Klebsiella oxytoca
atgaaaaaaatccctttaccaaaagactttttatggggcggtgcggtcgccgcacatcaggttgaaggcggctggaataaagacggcaaaggcccgagcatctgcgacgtgctaaccggcggcgcgcacggcgtaccgcgtgagataacccagcaggtcgagccgggtaaatactaccccaaccacgaagccatcgacttccacggccgctataaagaagacatcaagctgttcgccgagatgggcttcaagtgcttccgtacttccatcgcctggacgcgcatctttccgcaaggcgacgaaacccagccaaatgaagaagggctaaaattttacgatgacatgttcgatgaactgctgaagtacaacatcgagccggttatcaccctctcccactttgagatgccgctgcatcttgttcagcagtacggcggctggaccaaccgcaaagtggtcgatttctttgtgcgttttgccgaaacggtcttcgagcgctataagcacaaagtgaaatactggatgaccttcaacgagatcaacaaccagcgtaactggcgcgcgccgctgtttggctactgctgctccggcgtagtctataccgaacatgaaaacccggaagagaccatgtaccaggtgctgcatcatcaattcgtcgccagcgcgctggcggtgaaagcggcgcgtcaaatcaacccggaaatgcaggttggctgcatgctggcgatggttcctctctatccgtactcctgtaagccggaagatgtgatgtttgcgcaggaatcgatgcgtgaacgctacgtctttaccgacgtacagctgcgcggctactacccgagctacgtcctgaacgagtgggaacgccgcggtttcaatatcaaaatggatgaaggcgatgcgcaaatcctgcgtgaaggcacctgtgcgtatctcggtttcagctactacatgaccaacgcggtgagagcggaaggcggcaccggcgacgcaatttccggctttgaaggcagcgtgcccaatccgcatgtcaaagcctccgactggggatggcaaattgacccggttggcctgcgctatgcgctgtgcgaactgtatgaacgctatcagaaaccgctgttcatcgtcgaaaacggctttggcgcgtacgataaagtagaagaagacggcagcatcaacgacgactaccgcatcgactatcttcgcgctcacgttgaagagatgatcaaagcggtgacctacgatggcgttgaactcatgggctacaccccgtggggctgcatcgactgcgtctccttcacaaccggtcagtacagcaagcgctacggcttcatctacgtcaacaagcatgacgacggcaccggggatatgtcccgctcgcgcaaaaagagctttaactggtacaaagaggttatcgccagcaacggcgagaaactgtaa

SEQ ID NO: 175816 - DNA, 756 bp, Klebsiella oxytoca
atgaattgtgagtttgccactgtgagtatcttctcccacgccgctatcgccagtctcaataatcttgagattatggtctatcactacgtcattaaaaatcgcgacaaagtgatgtacatgaccatccgcgagctggcggaagcggccggagtctccacgactaccgttctgcgcttctgccgcaagctgcagtgcgaaggctactcggagtttcgcgtacgctttaaattatatctggagcagaatgagcctcaacaggcaaatatcggcgccagcgaaataatgagcttttttaaaagcatcaataacgatgaatttgaccaactgctcgagcaggcggttgatattatactcgcttcggaaagaattattttcgtcggcgccggcacctccggcgcgctggcaaaatatggcgcacgtttcttttctaacgtcggaaaattcagcaatcatatcgacgatccttattttccggtgaccaatgatatggcgcgtaatgctctggctattgtgctgtcggtctccggtgaaaccgaagaaatcctgcgctttgccagccagttcagcctgcatcgctgtaaagtgatgtccatcaccagccacgagcactcgcggctggcaaagctcgccgacttcaatctctcctggcacgttccgcaaacgcgcatcggcggcgtctacgatattaccacgcagatcccggttatttatattctggaaacgttaggccgtaaattagcgcgcaaactcgtctga

SEQ ID NO: 175817 - DNA, 312 bp, Klebsiella oxytoca
atgcagccaaatgacataaccttttttcagcgttttcaggacgacattctcgccggacgcaaaacgattaccatccgcgatgctgctgaatcgcactttaaaatgggcgatgtgctgcgcgttggccgctatgaagatgacggctatttttgcactattcgcgtggtggccacctcaacggtaacgctggatacgctgaccgaactgcatgcgcagcaggaaaacatgacgctggcgcagctgcgtgaggtgattgcggagatctatcctgaagaaaagcagttttatgttattgaattcgaaaagctttaa

SEQ ID NO: 175818 - DNA, 660 bp, Klebsiella oxytoca
atggttcgcaaatcgttaatcacacagggatattctctggcagaggaagttgccaacagcatcagtcacgggatcgggctggtgttcggtatcgttggtctggtgctgttgttggtgcaggcggtagatagcaacgccggcgcaacggctatcaccagctacagtctgtacggcggcagcatgattttgctgttcctcgcctcgaccctctatcacgcgattccgcatcagcgggctaagctgtggctaaaaaaattcgaccactgcgccatctacctgctgattgccggaacctacacgccgtttctgctggtggggctaaattcgccgctctcgcgcgggctgatgatcgtcatctggagcctggcgctgctggggatcctgtttaagctgacgattgcgcatcgttttaagatcctctctttagtgacctatctgactatgggctggctgtcgctgatcgtcgtttatcagctggcgattaagctggcgattggcggcgtgacgctgcttgcggtgggcggggtcgtctattcgctgggggttattttctacgtttgtaagcgtattccgtacaaccacgctatctggcacggctttgtgctgggcggcagcgtgtgccacttcctggcgatttatttgtacgtcgggcaggcttaa

SEQ ID NO: 175819 - DNA, 744 bp, Klebsiella oxytoca
atgcagcaaattaatttttatcgccaacgagtggcaattaacgtactggcgaaagatatcgctaacgcccgggaaatttatgatgccgccgaaggccatgcggcgattggcgtcctctctgcacaatttgcctccgtagaagaaggtgttcaggaggtaaaacgctggatggcggagataccctccatctccgtaggcctgggcgccggcgatcctgcgcagtattacaaagcggcgatgatcgcgtcagcgcttcacccggcgcatgttaatcagacctttaccggctgcgggtttgccgcaggggcgctggcagctacgggcgggcagcagacctgcattaacgcgctggtcagcccaacgggaacccctggcgaggttcttatctccaccggcgtcagcagctgtcagggtacgccggcacgcgtctcctgcgatgcggcggtacgcatgatgcaggacatgggggcccatgcggcgaagtttttccccatgggcggcgaaaagtcgttaccggagctgtatatgctggcgaccacggcagctcgtaacgggatgacgttaatcgaaccaaccggcggaatcgatctcgataactttggcattattttgcaaagctgcctggaagcaggcgtacctcgcgtgatgcctcatgtttacagctcgataatcgacccgcaaaccggcaatacccggccagaagatatccgcagattaatggatatcgtgaaagccgtggtctga

SEQ ID NO: 175820 - DNA, 1110 bp, Klebsiella oxytoca
atgacgcagaatatctatcaacagttggggttaaaacaggtgattaacgcctgcggcaaaatgacaattctgggcgtttccagcgtggcgccggaggtgatgcaggcaacggcgcgggcggcatcggcctttgtggaaatcgacaggctggtagaccgcaccggcgagcgggtctcccgctttaccggtgcggaggacagctatatcacctcctgcgcctcggcgggaatcgccatcgccgtggccgccgcgattacccatggcgaccaggcgcgagtgatgcagatgccggacagtcgcggtatggccaacgaagtcgtcatgctccgcgggcataacgtcgattacggcgcgcccatcaccagcgcgattcgcttaggcggtgggcgcgtcgtggaggtcggttcaagcaatctggcggcgcgctggcagctggagagcgcgatctctaccagtactgccgccctgctgtatgtgaaatcacaccactgcgtgcaaaaagggatgttgagtatcgaggatttcgtgcaggtcgcacagactcacaacctgccgctgattgttgatgccgccgccgaggaggatttacgcgtctgggcggcaagcggagcggacatggttatctatagcggggcaaaagcgtttaacgcgcccacctccggattcatcaccgggaaaaaacagtggatagcggcgtgtaaggcgcagcatcacggtattgcccgggcgatgaaaatcggcaaggagaatatggtcggtctggtttatgcgctggaacactatcatcaggggcagaaggtggtcactgccgaggaactcctgcccgtcgcgaaagcgatctcagcgataaacggcttacaagccgatattgagcaggatgaagccggacgcgctatctggcgtatccgcattcaggtgaatgcccaggcgctgggcctggatgcccgcgaagtcgaagcacagctgcgcaatggcgatatcgccatttacgcccggcgctataacctccatcagggggtttttagtctggacccacgaacggtggctgaaggggagatggccctgatcgtggcgcgcttaaaggagattgcaaaccatgcagcaaattaa

SEQ ID NO: 175821 - DNA, 858 bp, Klebsiella oxytoca
atgagcagcgatgtaatgcagcatgaactggtggagcgcgcgcgggagaacggcacgctgaccaaagcggacatcaccaaagcctggtttatttactggctgggcgcggaagtttccagctcctatgagcgtttacaaagcctgattttctgcgcctcaatgacgccgattatcaaaaaactctacccgcaaaaagaagagcaggtggaggcgctaaaacgccatctgaacttcttcaactctgagcagacctttggcgcggtgattcaggggatctcgattgcgatggaggagcagaaaacccgcggtgaaccgattagcgacgcgtctatcaccgggattaagaccgggctgatggggccgctggccggaatgggggactcgatcatctgggcggccgtcatgccgttgctgattgcaattttcatcccgttcgccgccagcggcagcgcgatgggcggtattgtgcctttaattctctatccggccattacgctggcgatcagctacggcatggtgcacaaaggctacaccctgggacgcgactcaatcatcggcctgctccagggagggcgaattaaggagcttatctatggcgcgaacgtgctgggcctgattatgatgggcgcgctctccgcaagctacgtcaaaataacgactcccttaaagctcagcgcgctgaagggctcggaggtggtggtccagcaaatcctcgactctatcgcgcccggcctgttgccgctggcggcggtgtttgccatctacttctatctggtgaagaaagggccgcgctacaccaccattctgctgtcaattgtcgcgctcagcgtggtctgttcgctgctgggagtgttgtaa

SEQ ID NO: 175822 - DNA, 750 bp, Klebsiella oxytoca
atggatactttagtctttgcaagcctgatgggattgtattactggtttgcccgcttacgccttggctacaccttctccgccatgctgcttcaacccgtggtgatcgccgtttttgtcggcctgctgttgggcaacatggaaacagcgatgattattggcgctggcatgcagctggtttacctcgacgtgacctcaacgcccggcggtaacgtgccgtcagatccggcgctggccgcctgcatctcgattcctattgccgtaaaagccggaatggatccgaacctggccatcgcgctggccatcccgtttggcgtgatcggcgtattccttgaccagctcagacgcacgctgaacgccgcgtgggtccatatggcggataaacacgcggaaacggccaacatgggcggcattatgcgctgcgcgttcctctacccggcgttgctcggcctggtgctgcgtttcccggtagtgtttgctgccaactattttggccaggacgtggtggaaagtttcctcaagctgatgccgcactggttgactcactcctttgaaattatgggcggcattctgccggcgctgggctttgccatcaccatcatggtgatcggtaagaagagcctgctgccgtggtttatcggcggattctttgcggtgctttacctgaaggtggacatcatggcgatggcaatctttggtacctgcgtggccttcctgattaagggcctggcgaaaaatgaaggagcagcatga

SEQ ID NO: 175823 - DNA, 486 bp, Klebsiella oxytoca
atggctaacatcgtgttatgtcgcatcgacagccgcctcattcatggacaagtggtgacgaagtgggtcggacaatcccaggccaaccggattgcggtagtgagtgatgagctggatgccgatccgtttatgaaaaatatctatctgatggcggcaccgccaaacatcaaagtggattgctacagcaatcagagctttgccgcatcgtggaaagaaaaccagcttggcgacggcagcgtgctggtgctgttcccctctctcgcggcgattcaggaggccgtacagctcgggtttgatgtttccgccattcaggttggcggcttaggcggcgggccgaaccgcaaggtcgttttccagaacatcacgttggatgaaaaagacgttggcattcttcacgacctgaaaagtcgagggattaaggcggtcttccagactatcccggaagataagccgcagtcgctggacgatatcctgaaaaaattctaa

SEQ ID NO: 175824 - DNA, 426 bp, Klebsiella oxytoca
ttgattaccactgaacctttgtcccagatcctgctgctgacccatggcggctggggacaacaactctgcaacagcctgtgcatggtgacgggcgaaattaaaggcgtaacggaaatcgccctgatgcccgtcgatacattgggcgagttttatcagcgcgtagaagctgtcgtgaaaaccctgcccgaaggctcgcttattctgaccgattttattggcgggaccacctctaacgtggccgcgcggctaagcgccgattatccggtggcggtgatttccggactgaatgcctcgctgctgctggaggccctggacaagcgggaacaggggccgctatccgcctgcgtagctgaattggtcgaagccgcgcgcagcagctgtctggacgttgtcgcccacgtgcgtcaattacaacaatcacaataa

SEQ ID NO: 175825 - DNA, 2319 bp, Klebsiella oxytoca
atgcggcgggttccccccccgccgctggtctactttaactgcgccgagtatgcgcataacccggagctgctctcttcgcatttgttcggccatcgacagggcgcatttaccggcgccagtgagaataaagccggtctggtggagcaggcggacggcggatatctgctgcttgatgaggtgcaccgcctgccgtatgaaggacaggaaaaactcttctccattctcgacaaaggccaatatcgcccgctcggttcaagcgccacggcgcggtcgatcacggtacgcttgatttgcgccaccaccgaaccggtcagctcagcgctgctgcgaaccttccagaggcgcatccaggtctgtatcgatctccccgggatccgtcagcgctcggtggaagaacaggtggaacttattgtcggttttctccagcgcgagagccgcaaaattgagcgtacggtcagtatcgacaaaacgctgttgctctggctgctgaataaaccgctggaaggcaatatcggccagctcaaaagcgatatccagtttctttgcgcccaggcgtgggctgcgggaatgaccgagcataacgacacgctccggctggataaacggctggtagaagtgccgttcaacgccaccccggaacagcgtctgctgatcgataccttgtttgacggccaggatcggctaagcgttgatgcgcgcacgttacccgcattgaaaacctctctggcgacaggagcggagatcgaagaaagcgatctgttttacagcttcctgacccgcgaatacgtcaacctgcgcaacagcaacgtcccaccggctgaaacgctggcgatcctcaaaaacaaactcagttccatcttcgaatatggcctctacagccgcgacagcgtggcccatccgccgcgctatggcgatcggattgaagagcgggtgaccctgctgattggctgtgtggaacaggtgctgggctttacgctgccagaaaacctgatgaatccgctgcgtaaacactttctggcgctaattggctacgtgcagcgcgggctgatcccgcagctctactcctccagcctgatcctcgaccgctgcaaagacgagtatgaaaacgcgactctactgtgccggaaaatcaacgaactgctgcatattcagtgcccggcgacggaggtcgtctggctctgtctgttcctgaaagagtgtcgccattatcgccagcggatcgacgccagtcccgactgcggcgtcattttaatcgcccacggcgcgacgacggcgaccagtcaggcgcagtacgtcaaccgggtactggagcgcgagctgttcagcgccatcgatatgccctttgagcagtcggtgcatgacacgctggaaacgctaacccagcggatccagacccaacgctaccggcggctgattctgatggtggatatcggctcgctggtgcattttggcagcaccatcagcaagctattcaagattgacgtcctgttaatgcccaatattacgctgaccagtctgctggagctgggtctggatttaagctatgaaaccagcgagctaccgcagctggcggaattactgcagagtaaaaatatcccctgtcagctctgtactccgcagcaggagaacggcggtaaggtgctggtgatctcctgcattaccggcatgggaaccgcagagaaaatcaaaaaagtgctggaggaaagttttggcgagctgatgtcgcaggatacgcgaatggtgatccttgattacaacgaggttcgcagcctggagcgcgttcagcagtcgctgctggccggtgagcgactggcggggattgtcggcaccttccagccggggctgccggacattccgtttatctcacttgaagagctgttctccgagcaggggccggaactggtgctcagcctgctcacgccggacctatcaagcagtgagcgccgtctggagatggagcgcagcgcgatgcgcttcatcagcgcgctgaccatggaaagtatcatcaaccatatttcggtactcaatccccagcgcattctcaaagaaatggagggcgtgtttaaccatttaaccacctcgctttcgctgaaacccagccgccaggtgacactgcgcttcctgatccactgctgttgcatggtcgagcgtatcgtgattaaccggaaaccgttacagatgtcgctggagagccagcccgcgctggacgtccgcgcgtttagtgtcattaaatccgccttccagccgatcgaagaggcttatgccattcgtttatccgacgcggaatatttttatatctacgaactgctatatcgctga

SEQ ID NO: 175826 - DNA, 519 bp, Klebsiella oxytoca
atgagacggattgaggtcatactgggggaactggagcgattaactcgcgggctgaatcttgcggatctggaacaggaaacggcatttacggcggaagccatcggctttaacctcgggcttgcgcgcaactcggtcagcaaagatctcaatcaattatggaacgacggcctggtgattaagagcaaaggacgccccgtgttcttttggcaccgccaggcaatggaaacgctgctggggcgcagactgaatgataccgaatgtgaagtgcgtacggttgccgaccttctgccgcatcaggaaggttgctcaacggatgatcccttcagcagcctgattggctacgatcgcagcctccgtgatgcggtagaaaaaggccgcgcagcggtgctttatcctcacgggctccatgtattgctgaccggcccctccggggtaggtaaaactttctttgccgaactgatgcaccgttttgcctgcgagcatgcggcgggttccccccccgccgctggtctactttaa

SEQ ID NO: 175827 - DNA, 984 bp, Klebsiella oxytoca
atggcttttacaccttttcctccgcgtcagccctcctcttccgctcgtctgccgttaacgctgatgacgctggatgactgggcgctggcgacgattaccgggccggatggcgagaaatatctgcaggggcagatcaccgctgacgtcagccacctgaccgacgagcagcatctgcttgccgcgcattgtgacgccaagggcaagatgtggagcaatctgcgcgttttccgtcgcaacgagggttttgcgtggattgagcgccgcagcctgcgcgatgcgcagctgactgaactgaaaaagtatgcggtgttctctaaagtgaccatcgccgccgacgatgaatccgtgctgctgggcgttgccgggttccaggcacgcgctgcgctgacgccgctgtttaacgagctgccaaatgccgataaacaggttgtcagcgaaggtgccaccagcgtgctgtggtttgagcatcccgccgagcgcttcctgctggtgaccgatgtggcaaccgccacccgcatcaccgacgcgctgcgcggcgaagcacagctaaacaatagccagcagtggctggcgctgaatattgaagctggcctgccggtcatcgacagcgccaacagcgcgcagtttattccgcaggccaccaacctgcaggcgctgggcggcatcagcttcaaaaaaggctgctataccggtcaggagatggttgcccgcgctaaattccgcggtgccaataagcgcgccctgtggtatctggccgggaccgccagccgcgtgcctgaagccggggaagacttggaaatgaagatgggtgacaactggcgtcgtaccggtaccgttttagcggccgtgcagctggatgatggtcgcctgctggtgcaggtagtgatgaataacgatatggagccgggcagcgtattccgcgtgcgcgacgatgccggcagcctgagcattgagccgctgccgtattcgctggaagagagttaa

SEQ ID NO: 175828 - DNA, 138 bp, Klebsiella oxytoca
atggtaaaagagctatggtgcaatgcaagcgcttttgccaggccattcgtgccctcaaaactgggcgctaacgcgaacgaaattatcaataacctgattattttagagatttcatggaatagcgctcgtgaatcttga

SEQ ID NO: 175829 - DNA, 267 bp, Klebsiella oxytoca
atggatattaacaataaagctcgcatccactgggcatgccgccggggaatgcgtgaactcgatatctccatcatgccgttttttgagcatgagtacgatacgctcagtgatgacgataagcggttgttcatccgcctgctggaaaatgacgatccggacctgttcaactggttgatgaaccatggcgaaccggctgatgcagaactgcagcggatggtaaaattaattcagacacggaatcgggaacgtggtcctgtggcaatctga

SEQ ID NO: 175830 - DNA, 411 bp, Klebsiella oxytoca
gtggtcctgtggcaatctgatttacgcatctcgtggcgagcgcaatggttctcactgttgatgcacggcgtggtggcggcgctggtgctggtgttgccctggccgctgagctataccccgctgtggctgatactgctgtcgctggtggtgttcgactgcgtgcgcagccagcggcggatccatgcccgacagggggaaataaagctgctgattgactctcgcctgcgctggcaaaaagcggagtgggatatcgtcggcaccccgtgggtaatcaatagcggaatgctgctgcgtctgcgaaatacggaaaaccaacgcactcagcatctatgggtggcggcggatagcatggacgcgggcgagtggcgcgatctgcgtcggctggtgttacagaaaccgacgcaagattaa

SEQ ID NO: 175831 - DNA, 522 bp, Klebsiella oxytoca
atgaacataggtcttttttacggctccagcacctgctacacagaaatggcggcggaaaaaatccgcgatatcatcggccctgaactggtgacgctgcataacctgaaagatgattcccctgccctgatgacgcaatatgatgtgctgatcctcggcattccaacctgggattttggcgagatccaggaggactgggaggcggtctggcagcagcttgatacgctggatctgcagggtaaaatcgtcgcgctctatggcatgggcgaccagctaggctacggcgaatggttccttgacgcgctcggcatgctgcacgataagctggcaacaaaaggggttaagttcatcggctactggccaaccgaaggctatgaatttaccagcccgaaaccggtcatcgccgacggccagctgttcgttggtctggcgctcgatgaaaccaaccagtatgacctgagcgatgagcgtattcagaactggtgcgagcaaatcctcggcgaaatggctgagcagttcgcctga

SEQ ID NO: 175832 - DNA, 897 bp, Klebsiella oxytoca
gtggaacaggatctcgcacaaatcgagcagtttcttgatgccttgtggctggagcggaatctggcggaaaacacgctgagcgcctaccgccgggatctgacgatggtcgtggaatggctgcatcatcgtggcctgtcgcttgctagcgtcagcggcgaagatctccagtcgctgctggcggagcggcaaaccggcggttataaagccaccagcaccgcgcgcctgctaagcgccgtgcgtcgcttcttccagcatctgtaccgggaaaaaattcgccccgatgaccccagcgcgctgctcgcatcgccaaagctgccgcagcggctgccgaaggatctgagcgaggcgcaggttgagcgcctgcttcaggcccctttggttgaacaaccgctggaactgcgtgataaagcgatgctggaagtgctgtacgccaccggtctgcgcgtttctgaactggtgggcctgaccatgagcgatatcagcctgcgtcagggcgtgctgcgcgtgatcggtaaaggaaataaagaacgtctggtgccgttaggcgaagaggcggtactgtgggttgagaattacctggagtacgggcgtccctggctgctgaacggcgtggcttccgatgtgctttttcccagccagcgcgcgcagcagatgacgcgccagacgttctggcatcgaattaagcactatgccgtactggcgggaattgatagcgaaaagctctctccgcacgtgctgcgccatgcgttcgctacccatttacttaatcacggcgccgacttacgcgtggtgcagatgctgttaggacacagcgatctctccacgacgcagatctatacccacgtggcgaccgagcgtctgcgacaactccatcaacagcatcacccgcgtgcgtga

SEQ ID NO: 175833 - DNA, 714 bp, Klebsiella oxytoca
atgaaaaaaggtttactgatgttcactctgctggcgaccaccttatccggtgcggcgcatgccgatagcgcggcgatcaagcaactgctggcgaagcttggcgtgcagagctcggacgtgcagccttcgccggtcaaaggcatcagcaccgtgttgacggacagcggcgtgctgtacgtcaccgatgatggtaaacacattatccaggggccgatgtacgatgtcagcggcgcgcagccggtaaacgttaccaatgcgctgctgggggggaagctaaacgccctggaaaaagagatgatcgtctacaaagcgccgcaggaaaaacatgtcatcaccgtcttcaccgatattacctgcggttattgccacaagctgcatgagcagatgagcgactataacgcgctggggattaccgtgcgctatctggccttcccgcgccaggggctgcaaagcgaagccgagcagaatatgaaggctatctggtgcgccaaagatcgcaacaaagcgctggataacgcgatgagcggcaaaggcgtgcagccagcgagctgcgatgttgatatcgctaaacactacacgctcggcgtgcagcttggcgttaacggcacgccggcgatggtgctgagcgacggtacgctgatgcctggctatcgcgatcctaaagacctgaaagcgctccttgatgagcatcaaaaacatataagcggtaactga

SEQ ID NO: 175834 - DNA, 1734 bp, Klebsiella oxytoca
gtgaaacaacagatacaactacgccgccgcgaggcggctgacggcgtcgatttacctgacgatctccctccgctgctgcagcggctgtacgccagccgcggcgtgcgtagcgcgcaggagctggaacgcggtgtaaaaggtatgctgccatggtcgcagctgaccggcgtcgaaaaagcggtagagatgctctacggcgcatttaagcaggagctgcacattgtggtggtcggcgattttgacgccgacggcgctaccagcactgcgcttagcgttctggccctgcgggggctgggctacggcaacgtctcgtacctggtgccaaaccgttttgaggatggctatggcctgagtccggaagtggtcgatcaggctcacgcccgcggcgcgcagatgataatgaccgtggataacggcatttcctcccacgccggcgtcgagcgcgcccatgcgctgggtattccggtgctggtgaccgatcaccatctgccgggggatacgctgcctgccgccgaagcgattattaacccgaacctgcgggactgcgagttcccgtcaaaatcgctggccggggttggcgtggccttttatctgatgctggcgctgcgcacttttctgcgtgataaaggttggtttgatgagcgcggcattgcgccgccgaatctggcggatttactcgatctggtggcgcttggcaccgtggcggacgtcgtaccgctggatgccaacaaccgtattctgacctggcaggggctgagccgcattcgggcaggtaaatgccgtccgggcatcaaggcgctgctggaaatcgccaaccgcgatccgcaaaagctggcggcaagcgatctcggcttcgcgcttggcccgcgccttaatgcggcagggcggctggacgacatgtccgtcggcgtggcgctgctgctgtgcgacaacaccggcgaagcgcgggtgctggccaatgagctggacgcgttaaaccagacgcgtaaagagatagaacaggggatgcaggcggaagcgctgaccctgtgtgaaaagctggaacgcagcagcgagacgctgcccggcggcctggcgatgtaccacccgcagtggcatcagggcgtcgtcggcattctggcctcgcgtattaaagagcgcttccatcgcccggttatcgcctttgcgcccaccggtgacggtacgctcaaaggctcaggtcggtcgattcaggggctgcatatgcgcgatgcgctggagcgtctggataccctctatcccgggctgattctgaagttcggtggtcatgccatggcggcgggtttgtcgttagaagaggcgcgttttgaggagtttcagcagcgtttcggcgaactggtgaccgagtggctcgatcctgcgctactgcagggcgaagtggtctccgacggcccgctggcggcggcagagatgagcatggaggtcgcacaaatgctgcgcgacgccgggccatgggggcagatgttccctgagccgctgttcgatggccgttttcgtctgctacaacagcgtctggtcggcgagcgtcacctgaaggtgatggttgagccggtcggcggcggcccgctgctggacggtattgcgttcaatgtggatacttccatttggccggataacggcgttcgcgaagttcagcttgcctataagctggacatcaatgagttccgcggcaaccgcagcctgcagctgatcattgaccacctctggccaaattga

SEQ ID NO: 175835 - DNA, 882 bp, Klebsiella oxytoca
atgtctcaggggctggaggatgtttccggtctgctggagctggccgttgaagccgacgacgaagagacctttaacgaagccgttgctgagcttgatgtgctggaagagaagctggcgcagcttgagttccgccgcatgttctccggcgaatacgacagcgccgattgctacctcgacatccaggccggttccggcggtacggaagcgcaggactgggcgagcatgctgatgcgcatgtatctgcgctgggccgaagcgcgcggcttcaagaccgagatcatcgaagagtctgaaggcgaagtggcgggcattaagtccgtgaccatcaagattattggcgactacgcttacggctggctgcgtaccgaaaccggcgttcatcgtctggtacgtaagagcccgttcgattccggcggccgccgccatacctctttcagctccgcgttcgtttatccggaagtggatgacgacattgatatcgaaatcaacccggcggatctgcgcattgacgtttatcgcgcatccggcgcgggcggtcagcacgttaaccgtacggaatccgcggtgcgtatcacccatattccgaccggcttagtgacccagtgccagaacgaccgttcgcagcacaagaacaaagaccaggccatgaagcagatgaaagcgaagctttatgagctggaaatgcagaagaaaaatgccgagaagcaggcgatggaagataccaaatccgacatcggctggggcagccagatccgttcttacgtgctggatgactcccgcattaaagatctgcgtaccggggtggaaacccgcaacactcaggcggtgctggacggcagcctggatcaatttatcgaagcaagtttgaaagcagggttatga

SEQ ID NO: 175836 - DNA, 1518 bp, Klebsiella oxytoca
atgtctgaacaacaagcacagggcgctgacgcggcaattgaccttaataatgaactgaaagcccgtcgtgagaagctggctgcgctgcgtgagcagggtatcccgttcccgaatgatttccgtcgtgaccacacctctgaccaactgcacgctgaattcgatgccaaagaaaacgaagagctggaagcgctgaacgttgaagtcgccgttgctggccgcatgatgacccgccgtatcatgggtaaagcctccttcgttacgctgcaggacgttggcggccgcattcagctgtacgtcgcccgcgacgatctggcggaaggcgtctacaacgagcagttcaaaaaatgggacctcggggacatcatcgcggcgcgcggtaagctgttcaaaaccaagaccggtgaactctccatccattgcaccgagctgcgcctgctgaccaaagccctgcgcccgctgccggacaaattccacggcctgcaggatcaggaagcgcgctatcgtcagcgctacctggatctgatctccaacgatgaatcgcgcaacacctttaaagtgcgttcgcagatcctggccggcattcgtcagttcatggtcggccgtggctttatggaagtggaaaccccgatgatgcaggtgatccccggtggcgcttccgcccgtccgttcatcacccatcacaacgcgctggatctggatatgtacctgcgcatcgcgccggaactgtacctgaagcgtctggtggttggcggcttcgagcgcgtgttcgaaatcaaccgtaacttccgtaacgaaggtatctccgttcgtcataacccagagttcaccatgatggaactctatatggcctatgcggactataaagacctgatcgagctgaccgaatccctgttccgcaccctggcgcaggacgttctcggccataccgaagtgccttacggcgatcagacctttgatttcggcaagccgtttgaaaaactgacgatgcgcgaagcgatcaagaagtaccgtccggaaaccgagatggccgatctggataacttcgattctgcaaaagccattgcggaaagcatcggcattcacgttgagaagagctggggtctgggccgcatcgtgaccgagatcttcgaagaagtggcggaagcgcatctgattcagccaaccttcatcaccgaatatccggcagaagtctctccgctggcgcgtcgtaacgacgagaacccggaaatcaccgatcgttttgaattcttcatcggcgggcgtgaaatcggtaacggctttagcgagctgaacgatgcggaagaccaggcgcagcgtttcctcgatcaggttaacgcgaaagctgccggtgacgacgaagccatgttctatgacgaagactacgtcaccgcgctggagcacggcctgccgccgactgcgggcctcggtatcggtatcgaccgtatggtgatgctgtttaccaacagccacactatccgcgacgtgatcctgttcccggcgatgcgtccggtaaaataa

SEQ ID NO: 175837 - DNA, 549 bp, Klebsiella oxytoca
atggccggggaacatgtcattttgctggacgagcaagataagcctacaggtatgctggagaagtatgccgcccacaccctcaatacccctctgcatctcgcgttttccagctggctgttcaatgaacaaggccaactgctggtcacgcgccgctcgctgggcaaaaaagcctggccaggcgtatggacgaactcagtctgcgggcatccgcaaaccggcgaaacctttgaacaggccgttgagcgccgctgccgctttgagctcggcgtcgagataacccgtatcgtcccggtctttccggggttccgttaccgggccgtcgcgccgaatggcattgtcgaaaacgaggtctgtccggtctatgcggcacgagtagccagcgcgttacggataaatcctgacgaagtgatggattttcagtggagccatcttgaggatgttttaagcgcaattcgcgcgacgccctgggcttttagcccgtggatggtcatgcaggctgcggatgataatgcgcgtaatgccttaataagctttagccgccaggcataa

SEQ ID NO: 175838 - DNA, 717 bp, Klebsiella oxytoca
atgttaatcggcccatatgtaaacggagccgccgtgattatcggcggactcatcggcgctgcggcgggcggcaagctccccgagcgcgtcaaaacggcgctgccgatgaccttcggcctgtgctccgttggtcttggtattacgctggtgctcaaagtgaaatatatgcccgccgtcgtgctggcaatggtgattggcgccatcctcggcgaattgctgcatctggaaaagggcatcggtaaagccgcaggttccacccgcggtttgatcaacaaagtgctgccgccggtcaatggcctcggccatgaagagtttaccgagaaatttgtcgccatcctggttctgttttgcgccagcggcaccggtattttcggcgcgatgaccgaaggcatgagcggcgatccgtcaattctgtatatcaaaacgattctcgatctatttaccgccgggattttcgcgacgctgctgggctacgcggtgatgaccattgctatcccgcaggtcattattcaggtggcgctggcgatgctggcggtggttattctgccgtcgatctcgcctgatatgatggcggatttctcctgcgccggcgggctgctgatggtggctaccgggttgcgtatctgtaacattaagctctttccggtagccaacatgttgccagggcttgttttggtaatgcctttgtcccatttatgggctaccctagtggcctga

SEQ ID NO: 175839 - DNA, 579 bp, Klebsiella oxytoca
atgacggcacgcatcatcattggtatcagcggcgcatccgggtttcagtacggcgttaaggcgctggagctactgcgcccgcatcccgttgaagtccacctggtcgtctctaaaggcgcggaaaaaacctgcgagctggagacggattaccgcctggacgaggtgatggcgctggccgacgtggtgcatcccatcgccaatcttggcgcagctatctccagcggttcatttaaaacgctggggatgctggtcgcgccgtgttcaatgcgttctttaggcgccatcgcccactgcctgaccgacaacctgctcacccgcgcggcagacgtggtgctgaaagaacgtcgccgcctggtgctgctggcccgggaaacgccgctgaacctcggccacatccgcaatatggccgccgtaaccgaaatgggcggaattatctttccgccggtcccggcgctttaccagcgtccgcaaacggcggacgacatcgttacccatagcgtcaatcgcgcgctcgatctgtttgacctgcaggtcaataacatcccccgctggggtgaaggcgagctacgttttaattaa

SEQ ID NO: 175840 - DNA, 1494 bp, Klebsiella oxytoca
atgacaaatagtgataacaaaacaccctcatcggtacatgatttacgctccgcgctggagctgctgaaaacgcttcccggcgagtatgttgaaaccaataccgaagtcgacccgcacgccgaactctccggcgtctatcgttacgtaggcgccggcgggacctgccagcgtccgacccgcaagaatggcccggtcatggtcttcaataaaatcaaaggttttgaaaatatcagcgtggcgattggcctgaatggctcccgccagcgcgtcagccattttctccagtgtgaaccggctaaactggggcatctgctgaaggattcagtagaaaacgcaatagccccggtgatgacccagggcgcagcggtatgccagcaagtggtccatctggcaagcgatgccgatttcgatctgcgcaagctgctgccggcaccgacgaataccgaagaagacgccggcccctatattacgatgggcctgtgctacgcctccgatccagaaacacatgagtccgatatcaccattcatcgcctgtgcgtccagagccgcgacgaactctccatgtggctaacgcccggccgccatatcgatgcttttcgcatgaaggcggaagcggcaggccagccgctgccgatttcaatcagcatcggcgtcgatccggccattgaaattgccgcctgtttcgagccgccgaccaccccgctgggcttcaacgagttaagcatcgccggcgcgctgcgcggcaaagcggtggagatgacgcagtgtaaaaccattaacgagaaagcgatcgcccacgctgagatcgtgattgaaggcgaactgctgcccaacgcgcgcgtacgagaagatcagaacacccataccggccgcgcgatgcctgagtttccgggctataccggcgaagctaaagaggcgatcccagtcatcaaagtgaaagccgtcactcaccgtatcaatcccatctggcgcaccaccgttggaccaggcgaagaacacgtcaatatggccggtatcccgaccgaagccagcattctggatatggtcgaacgcgcgatgcctggcaagctgctgaacgtctttgcccattcggctggcggcggcaagctgctggcggtgctgcagttcaaaaaatcctccccggcggacgaagggcgccagcgtcaggctgctctgctggcgttctcagccttcccggaactgaagcacgtcattctggttgatgaagacgtcgatattttcgacagcgacgacgtgctttgggccatgcaaacccgctaccagggcgatgtcgatacaatcactattcccggcgttcgctgccatccgctcgatccgtcgcaggtaccggaatacagcccgagcatcctgcagcagggaatgtcctgcaaaacgatattcgactgcaccgtgccgttccatctgaagcacaacttccagcgctccagatttaaagaagtggacgtgaagcgcttcctgccggatttcgaataa

SEQ ID NO: 175841 - DNA, 900 bp, Klebsiella oxytoca
atgatggatttaaagcgcttacgctatttttgtcgggtggtggaacaaggttcggtgagccaggcggcgaagtcgctgaacatggcgcagccgccgctcagcaagcgaattcaggagctggaagaggagcttcaggtatcgctttttgttcgccggggaaaccgcattgagcctacggaagccggtttttttctctatcgaaaagcgtgtgaaatattacgccaggtagaggatacggcgcgggaaacgacggatattgcgcacaaaaacagaactgaattgagaatcggcttaactcatctctatcagaattattttaaagcattgctgatggaggtatatcgacgtcatcccgacacttccataaatatttccgttactgactccagccatctcgaaacgttattaaccgagggcgcaattgatttagccttaatccagcgcccctaccgtagcgaaggctttgattatgtctcttttgacccgattaagctggtcgcggtgatcaataaaagctgcctgccggagccgccgtctaatccgtatagctacacatcgctggcggcgctgccgctggtattacttcatagagcaaaagattcagggacttacgagatgctaatggagctgtttcgtaagtccggggtcaacgcgaaggtgattatgcacattacgcagccgggcgtaattctcgactggctggagtccggactgcaggctgcgacgctgctaccttcttctgaagtggatgctgataagcttaaccagtgctacgtggtcgatgttttcccctcgccgcaaatattctacccggcgctggtaaaattgccgtctatgccttatctgcccgcgttgatggatattattacgcatggctatccgtttaatacttctgtatga

SEQ ID NO: 175842 - DNA, 726 bp, Klebsiella oxytoca
atgagaaaacgctttgttattgcaataatgttgctgagcagcctgatcgtcgcggggtgttccagctcatccgattccgggtccacctacaccgtgaagcgcggcgacacgctgtacgctatttcacgttccactggcaccagcgtcagggatctcgcccgtctcaacaatatttcacctccctataccatcgaggttgggcaaaagctgaagctgaacagtggttcagggaccacggcgaaggcgggggcatccggcaagaaatcctccgcgaagcgcaccgctgccgtgacgccatcttcggcggtgccgcaatcctcctggccgccggtcgggcaacgctgctggcgctggccgaccagcggcaaagttatactgccgtactccaccagcgatggcggcaataaaggtatcgatattgccggtaagcgcggccagccggtgtatgcggcaggggcgggcaaagtggtgtacgtgggtaaccagctgcgcggctacggcaacctgattatgattaaacataatgaggactatatcagcgcctatgcacacaacgacaagctgatggtgaataacggccagagtgtgaagatcggccagcagattgccaccatgggcagctcggatgcggattccgtgcgcctgcacttccagattcgctaccgggcgacggcgatcgacccgctgcgctatttgccgccgcagggcagtaagcctaagtgctaa

SEQ ID NO: 175843 - DNA, 894 bp, Klebsiella oxytoca
atgctcaaagaaaatttcaacgaactgcaaatctttcttgtagtagcaagggagcgaagtttcaccaaagcggcgggtaaactgggcgtttctcagtctgcactcagccacgcgatgaaggccctggaggaaaggctgaatatacgccttctgacccgtacgacccgaagcgttgcccctacagaagccggtgagagaattattgcctgccttgaaccgcgtattgccgatctcgagcaggagctagaatcgctggttcaactgaacggcaccgcctctggcaatatccgtttatctgccggggagcatgccgtgcggagtctggtatggccgaagctaaaacccttcctcagggaatatccggaaattaatctcgaactggtggtggataacggctttgtcgatattgttgaggggcgttttgacgccgggatccgcctgggcgaaagcgtggataaggacatgattgcggtaagaattgggccggacatgagaatggctgtggtaggagcgccgtcttatttcgctgcaaatcctgcacctgaaacgccgcacgagctgcaaaatcatcggtgtatcaatatgcgcctgccgacagccggtgggctttaccactgggagtttgagaaggatgggaagccgttacgggttagagtggaagggcaggttacgtttaatctgcaggcggaacgaattgatgcggcgttatccggttttggcatcgcctgtatacctgaagacagggtgcaggattatatcaagtcaggagagcttattcaggttctgcaggactggtgtccgtctttccccggatattatctttactacccgagccgtaagcagcatccgcccgcttttgcgctgatgatcgatgcacttcgctacgtggaataa

SEQ ID NO: 175844 - DNA, 951 bp, Klebsiella oxytoca
atgaatcagcttgaacaactaaagcagcgaaccacaattgttgccgacagcggggatattgacagcattatggcttaccagcctgaagatgcgaccaccaacccttcgcttatttataaagcggcgcagcttccgcaataccagaaactggtgaaagatgccgtcgcggcagtgaagtcccgccagaatggaaagccggtacagcctgcggatattgccgattacctggcggtgagtatcggggtgctgatcctgaaaaacgttccgggtcgtatttcaactgaagtggatgctcgcctctcgtttgatacccaggccagtattgctaaagcgcgggaaattattgcactgtatgaagagaaaggtattggcaaagatcgggttttgattaagcttgctgccacctggcaagggatccgtgccgcagaaacgctggaaaaagagggtatccagtgtaacctcacgctactattctcctttgcccaggccagagcctgtgccgatgccaatgttttcctgatttccccgtttgtgggccgtatctacgactggtacaagaaaaacaaccctgataccaccttcaccgtcgagaacgatccgggtgtcgaatcagtgcagaagatctatcgcttttataaaatgcacggctaccgcaccgtggtgatgggggccagtttccgtacgccggaacaggtgctggcgcttaacggatgcgatcgtctgaccgtttccccggcgttgctggcgcagttgcagcaaactcagggggcggtaccaatgccgctgacgtatgaaggtgaaatccaggcgaagcccacagcgatgaccgaggctgagttctactgggctcataatcaggatgcgatggcagtggaaaagctcgccgaaggtattcgcctgtttgccgtggaccagaacagtcttgaggcactgctgagtcaatatctgtaa

SEQ ID NO: 175845 - DNA, 1254 bp, Klebsiella oxytoca
atgaaaaacacaatgaaacagtacgtcgattatattgttaacggtggaaaatcaacaatgctgggaattggccccatgtctccggcattaattcaggcctgttttgagctgggtaaagaaaaagacctgccgctgatgtttattgccagccgcaaccaggttgatgcagatgagtttggcgcgggttacgttaacaactgggatcaatttcgctttgccgccgacctgaaagcgatggcggaaaaagtcggcttcgacggtgattacttcctctgtcgtgaccatggtggcccatggcagcgtgataaagaacgtaaagaccatattccggaagccgaagcgatggcgctagcgcgccgctcttatcaggtagatatggacgccggtttcgacctgttgcatatcgacccgacaaaagacccgtatgtcgtcggtaaagtcattgatatcgaactggtgctgagtcgtaccgttgagctgatccgcttctgcgaagagtaccgtaaggcaaataacctgaaggagttcttctatgaagtcggaactgaagagaccaatggcggcctgaccgacgtcagcgcctatgaagggtttattattgagctgaataagcgtcttgctgccgaatcgctaccgcagccgctgtttatcgttggtcagaccggtaccctgacccgcctgaccaaaaacgttggccattttaacgataagcagtccgcagagctttcggctatcagcacccgtcacggcgtcggtctgaaagagcataatggtgactatcttccggatgagatcctgttgaaacatccaggtctgggcatcacggcaatgaacgtcgccccagcctacggcaccattgaaacccgcgcttatctgaagctggcggaagtcgagaaagatctggcagcgaaaggctttatcaagtcagcatctgatttaaaaaccgtcctgacccgcgagtgcgtgctgagccacaaatgggaaaaatggatgaccgatgagcacaaaaataagtccgaggaacagatctttaacgagccggaattgttgaaagagattctcgaactcagcggccactacaactacgaaaaaccagcagtagtcaaagagatgcagaccatgtttgctaatctgaagtcgtttggtgtcgaacccgagcgttatgtggttaataaaattaaagatatgatccagaacgaagcagagtgcttcaatatgccaggcctgaccacccgcgtcgcgcaggcaaaataa

SEQ ID NO: 175846 - DNA, 1104 bp, Klebsiella oxytoca
atgtcggaaaaaatgaaagtcatcaaggatgatttagttaaagcattcagtaccggggtgtcatatatgatgccggtggtggtggtcggcggtatctgcctggcactctccttgattgggggtgagccggtcgcgggtaaaggcatggtggtgaccaacccattcttattaaacctcggcgctatcggcagcgcgggcctcggaatgatgatcccggtgctggcggcttatatctcctactctatcgccggtaaaccggggctgactccgggtttaatcaccggttttatggccagcacgccgctgggcgcagaccacgtggtaaccggttttctgggggcgatgctgctcggtattctcagcggctacgtggctaaatgggtaaaaggctggaaagtcggtaaggtgctgatgccggttatgccgatcatgattattcctatcgtctcaagcgtcatcgtcggcatgctctatctgtatgtactgattggacccatcggttttgccatgaaatggctggtttccatgctctcccatatgcagggaagcagtggactggtacttggtctgattgtcggtgccatggcagcctttgatatgggtggcccggtaaataaaaccgcaacggcatttactctcgcattaatggctgaaggtatttatggtcctaacggcgcttaccgtgttgcctgcgctattccgccactgggcattgctctctctacttttatttcaccacgtaaatgggctgaagatgaaagacgaatgggaacctctgctgcctttatggggttaattggcattaccgagggcgccattcctttcgccgttaaaaacctgaagaccgttctgccatcaataattatcggcagcgctgtcggtgctggcctggcaatggttcacggcgttgaatcaatggttccacacggcgggttaattgctatcgcaggcgtcaataaagcacctgtatggtatgccatcgatatggttatcggcgttattgtcaccgcaatctgcctatatattctgcgccccaacataagcgagccggtaaaaaaagagtcggctaaaaaaacaatcacttctgatatgaataaagtctga

SEQ ID NO: 175847 - DNA, 321 bp, Klebsiella oxytoca; identical to SEQ ID NO: 106727

SEQ ID NO: 175848 - DNA, 2511 bp, Klebsiella oxytoca
atgtcacagataattacgtatcaatgtgagctgaaggatggtattcacgccagaccggcgggacatatcgaacgattgtgtaatacctttcaatctgaggtgtgctggaataatattcgcagcggcattcagggtaatggtaaaagcgctctctcgattgtcgccaccgataccttactcaacgacgcctgtgaaattaccatcagcggtaaagatgctgcaaacgcggctcagcagctgagtgcgctgcttaaaaaactgccctccttcgaggttagccatgcagatgaagccgcagtgcctgcgggttatctcccgcgttcgctgcgggagactcagctcagttttattcagggttcacgcatcagcggcggtgttgccattgccaaacccgttcgtattcagagtctgtctctggacgaaatgctggcgcgtaacccgggcggtgagtattccacggagcatcagcagcgtatttttctggcgggtttagaggcgcttaagcaagagaagcaggctgcgctggaaattaaaaaaggcgttgaacacgatattttacaggcgcatttttccattatcaccgatgcgacctttcaaagccatatctcctcggcgatttccggtggtgacaatacctgggatgcggtgattaaagctgcaatggaattctgtgaaattcttactcgctcatcaagcaaatacattaaagagcggaccctggatgttctcgatattaccggacaattactttctgcgatctatggcccgggtatattaccgcagaacagtcttgaattaacgcaaccatcgattattctggccaacagtctgacaccaagccagtttctcgggatcaataaagagtttcttgccgggatggtattatccgccacgggtaaaacgtcgcacaccgctatccttgcacgttcgctcggtatcccgactctgacagatattgatttttcgaccctacagctgaatgcagacatggacattattatcgatggcaatccgggtattttaattatcgcaccggatgagaaagttctgcgctattaccagaatgaaattgccgttcagcagagtatgcagcagcaaatgctggctaacgtctatcaggcagcaaccaccagcgatcatcatagcgttgagatagccgccaatattgccagcctggcggaagccgaggcagccttcagtaacggcgctgaaggcatcggactatttcgtaccgaaatgtcattcatggaccgcgaatccgcaccggactaccacgaactggctgagctctacagccaggtgatacaggttgcacaagggaagccggttatcttccgcaccttcgacattggcggtgataagcctgtcgactatatgagcatcggcgaagaagaaaacccgtttctcggcttccgggcggtgcgaacttatccgcgttatcgcgaccttttcgccatgcagctcaaggctatcctcagcgcctcggcttttggcgatgccaaaatcatgatcccgatgatcgccaacgttgatgaagttatctggtgccgtgaagtcctcgaagaggtcaaaagtacgatgcgtgatgaagggctggcattcaacgacagcatctcgctcggcgtgatgctggagatcccctccgttatcttcgcgattagtgaaatagcggaatacgcggatttcttcagcgtgggcagcaacgacctgacgcagtacttttttgccgccgaccgtggaaatacgcaggttgaggcggtatacgataactatgctccggcattcctgcgcgccatgcagtatgccgccgccgaagtccaccgcgcgggcaagtggataggtatctgcggagagctgggtgccagcaaagattttctgccgctgttcgttggcatgggctttgacgaactcagcatgagtggcacctctattccgggtgtaaaacatgcgctgcgggagctgagttttgccaaatgccaggggctggtacaggatattgtggcgttaaaacgttccgctgatgtcaaagtcgcgctgagttcaccggacgtaaaagcggtcagcaaaatgccgatcctcgctccagagtttattctctgcggactacaggccagcgataaaaacgaagttatcaaaaagatgaccgacaatctgtggctgcaccatcgcaccgataatcgggatcaattaaccgatgatatctgggcccgcgaagactcattctccaccgccgtgggctatggcttcgccattccgcacaccaagtcagaccatattcactactccaccatcagtatggcaacccttgcgtcgcccattatgtggggcgatcaggaagtcgaaaccgtattcatgctgacggtgagtaaatccgccgaccctaatgagcatatgaaatatttctccacgcttgcccgaaagctaatgaaagaggatttccgcaatgaaataaaacaggccgaaaacgtcaacgtactctacaacctgatggccaatactttggccgtatga

SEQ ID NO: 175849 - DNA, 729 bp, Klebsiella oxytoca
atggtcatgggtaatggagtacaaaataatacacactctatttatttcgttgtggtaattacgatgcattttcgtggaatattactggatttagacgggacgctggtgaactcgctggatttcgttgaggcctcctggcgtttatgggccactacaaaagagctggatccgagggcggtatgtcattatctccacggtaaacccgctttgagtacgctgcgccactttatgcccgatgccagcgaacagatcatcatcgacgaatttctcgcgctggaagagtttgaagcgagcaataccgacggcatcactgcggttaacggggctgttgattttctccgccagcttgagcagttgcaggtcccctgggccattgtgacttccgggtcgctgaaggttgcctcagcacggatccgacaagccggtttccccgttccgccggtgctggtgaccagcgaagatattcatcatggcaagccgcatccggagccgttcctgacgggtgcagcccgactcggtctttctcccgctaattgcctcgcttttgaagactccactgccggtctgctttctgccacccaggcagggtgcgtggtggttgaagtcctgacccgccagtctgtagttcacgatatcgatacctggaaaaccattgataactacctcgacctgcgcgtaatgcgcaagggcgaggcagattttttacttaagattcagagggagttttaa

SEQ ID NO: 175850 - DNA, 1995 bp, Klebsiella oxytoca; identical to SEQ ID NO: 106730

SEQ ID NO: 175851 - DNA, 741 bp, Klebsiella oxytoca
gtgtatcccgttgaccttcatatgcataccctggccagcacccacgcctatagcacggttcatgactatatcgccgccgcggtgcgtaaacatattcgcctgatcgccattaccgaccatggcccggaaatggttgatgcgccgcatccgtttcactttaataatttgcgtgtgctgccgcgcgttgtcgatggtgtggggatcctgcgcggtattgaggccaatatcaaacctggtggtgagaccgactgtagagacaaaatgcgtgcgtcgctggatttagtgattgctggattccataagcaggtgtttgcgccagcggacattaccaccaataccgatgcgctgattgcagtaatagcgagcggtaaggtgcatattatcagccaccccggtaacccggagtatccgattgatatcccggcggtggtggccgtggctaaggagtgtcatgtggcgttggaggtcaataacgcctctttcgtccattcacgtaagggcagtgaggggaactgtcgcaaaattgtagcagccgtgcgcgacagcggcggacttctctcattgggtagcgattcacacagcgcgttttctctgggggactttagcgcctgtcagcatctgctggtggaggctgattttccagcatcaagagtgctgaatacctctgtgcgacgagtgctgacgtttctggaacagcacggcggggggcggatagccgagctttatgcgcttcctggctaa

SEQ ID NO: 175852 - DNA, 390 bp, Klebsiella oxytoca; identical to SEQ ID NO: 106732

SEQ ID NO: 175853 - DNA, 855 bp, Klebsiella oxytoca
atggctacatttattcaatctattctcagtgaattcagcgctcagggctcgatagacaaaggcgtcatggtagctaacggcaatacgcaggctccggcgatggcctaccatctgcacgttccgcgcattgagttgacggtaaagggcacacttcgcatgctgctgccgaaaggcgtggaccgcatcgtgaaatatgaacgtccggtcggcaccatcacctatatccccgccaatagctggaactcgccgctgtgggaaagcccggttatttgcatgtcgatagtcttctggaagcaggacgtcggtttcagcatcagcaactgggatggcacgcagtttaaagaggtagagaagtacaatctgcaaaactccagcagtacggttcgcgatcggcttctcgacctggctgaatcgctggcgtggtcgcaagataccaccagcgagacctttgcccacttggtctatgcgctgcttaacgacctgctatatcaaattaccgatggcctgaataaccagcgggctcccttctcactgctggacgaaattaagagccatatcgatagtcactaccacacggacattagccgggaaagcgtcgccgaaacgtttaatatttccccaggctatctgtcgcgtctgttttcgaaggagtcagacgtgaaatttaacgaatatctcaagttagcccgcatttcacgttcaaaaacgctgctgaccaataccaatctgaaaataaacgaagtttcagaaaagtgcggtttcacagatactaactatttctgcaaggtgtttcgcgatatcaacgactgtacgccgcttgaataccgccgcaaaaataaaggagcaagatcatga

SEQ ID NO: 175854 - DNA, 1020 bp, Klebsiella oxytoca
atgttaaaactattaaaaaatactaaacgacattttatgaccggtgtctcctacatgatcccgtttgtcgtcgctggtggtgttctgttggcgctcgcggtgatgtttaacggggaagccgccgtaccggaccatggtttcctgaaggccatgtcgcaaattggtatggctggcttaaccctgtttatccccatcctgtcaggatttatcgcgtattcgatggtcgataaaccgggcatcgcgccgggtgccatcggcggcctgatggcttatcagatgggcgccggatttttaggcggcatgctctccgggattattgcagggctggtcgtctatgttctgttgaacctgatcgcccggcttaaaatcccccacttcctgcgcatggtattaccgatatttattattccgctgatcgggaccttcctcaccggcatggcggtgtattacatcattggcgacccgattgccgggctgatgaagtggcttagcgtctggcttggcaatatgcagggcgcgtcgtttattatcctcggtaccatcctgggctgcatgatcgccgttgacatgggcggcccaatgaataaaaccgcttttttctttgctgttgcactgatctcaacgaacccgcagctgatggcggcagtcgctgccgccgactgtactccgcctctggggctggcgctggcaacctttctgtttaaagacatctttaatgatgtggagcgagaagccggtaagccagcgataattatgggctttatggggataacagaaggggcaattccgtttgcggcggcggatccggtacgggtgatcccggcaattatgcttggcagtgcggttgcggcgatcctcacactatggtttggcgcaaccaacgccgccccgtggggcggacttatcgtattaccggtagtcagcaaccattttggctacatcgtttcggtggtcgccgggagcatcaccaccgcctttgcggtgaaagtcctgaagacagttatcaaacctcgggcataa

SEQ ID NO: 175855 - DNA, 2502 bp, Klebsiella oxytoca
atggcggtggttataacctatgtatgtgagcttcacgaaggtgttcatgcccggcctgccggatacatcgcgcggctatgtaatctgttccgggcagatatcgactgggaaaacacccgtacgggactactggcaaatgcgaaaagcgccctctcgctgattgccagtgacacgctggtaaacgatacatgccgcatcaccctttgcggagaggatgaaacgcaggccgcagtccaattgcgcacgctgctttccgatctcccgacttttagccttgaaccggaaccaataaccacgcaggggtatctgccccgctgcctgcgcgagttgaacccacaggtgattcagggaactcgcataaataaaggcgcagccatcgccagaccacagataatgcagagcctgactttcaccgatattatcgcccgcaatccagggtatatcggcaatattgaaagtgaaaaagcccgctttcttgccgggttagattcattacgcgtagagcaagaagccgccctcgcaaaaaaccagggtattgaacacgatcttattgcggcacatctatctctgataaccgacatcgcatttcaggatagtgcgatcggttatctgaataacaacatgaatgcctggtcggccatcgcgcaggcgtcccttgacttttgccatcagcttgagcgctcgcctagccagtatctgcaggagcgcgccctggatattcttgatattgcgacgcagctcatcagtgcgatctatggcgaacaggctctggcttaccacccacctttgctaaatgaaccgacaattgttttcgccagtcatctgacccccaaccagtttctggcgctaaaccgcaaacaccttgcaggtctggtgctctcctctacggggaaaacctcccatacagccatactggctcgttcgtcaggtatcccaaccctggcggatatcgatttttcatcgctggatttcgatgtcgatcagctgataatcattgatggtgagccggggatcctgattacccatccggatgagaaagttctgcgctactaccgtcatgaaattgccgtccagcaggatatgcagcagcggctgcgggaaaatgctttagcgcccgcaagaacccgcgatgggcatcgcgtagaggtagccgctaatattgcaagcctggccgaagcgcaggcggcctttgaaaacggcgcggaaagcatcggcctgtttcgcaccgagataacatatatgggccgcgattacccgccctcctgcgctgaactgacaaacctgtataaacaggttgttactctggcaggggggaagcccgttatctttcgcaccttcgatatcggcggtgataaaccggttggatacctaagcgtcgacaatgaagaaaacccgtttcttggtttccgggcagtgcgtacttatccgcaatatcgcgaccttttttccacccaactgaaggctattctgagcgcctcaacatcaggtaaagccaaaattatgctgccgatgatttctcgggtggaagaacttatctggtgtcgtgaggtactggaatcggttaaacaggagatgcgccacgagggtctggcatttgatgaacagacagcgctcggaatcatgctggaagtaccttcggtactcttttctatggcagagatggcagaacatgcggatttcttcagcgtgggcagtaatgacctgacgcaatactttttcgccgcagaccgaggtaatgcacaggtaaaaacgctttatgacagttgcacgccaccgtttttacgcgccctgcaattcgcagtgaaagaggctcatcgcgccggtaagcctgtcgggttgtgcggtgaactcgctgctgacgaaaccattctcccactgcttatcggcattggctttgatgaattgagtatgaactgcaccgcgattccggggattaagcacgccctgggccaactcagtgccggagattgccggtcgctgacgcagaatcttttgcaaaatcacaacgcacaacagttcaaagccgcattacaaaactcgagcgttagtgcggcgcaaaagccgctactgtcgccggagatggttttatggggaattgacgccgctgataaaaacgaggctatcaaaatgatggttgataacctgtggcttcagcagcgcaccaatacacgtgacaggctctgcagtgatatctgggctcgcgaagtgccttttcctaccgtcgttggctcgggctttgctatcccccatgcccaaacggacgctgtcagggattcctccgtcagtattgccacgctcaggcaacctatcgcctggggcggcgtcatggtggataccctgttcatgctgacgattagcaaatccgcgcaggataacgagcatatgaagtacttctccagcctggcgcgcatgctcatgaatgatgaatttgtcagccagattaaagcggcaaaaagcccggaagcgctttacacgctgatatccagaactctggtcttctga

SEQ ID NO: 175856 - DNA, 573 bp, Klebsiella oxytoca
gtgaaagacctgatcgctgaaggcaaagttaaacatttcggtctgtccgaagcgggtgcgcaaactattcgtcgtgcgcatgccgtacaacctgtcactgccctacaaagcgaatactcaatgtggtggcgcgagcctgagcgggagatcctgccgttgctggaggaattgggtattggttttgtacccttcagtccattaggtaagggcttcctgacaggatcgattaggccaggaaccacttttggcaaggatgactaccgcagcacagtaccgcgtttcgccgggcaggcgattgaagccaatgaaaagctggtttcattgctgggtgaactggcggcagagaaaggtgtgacgtctgcacaaatcgcgctggcgtggctgctggcacaaaagccgtggattgttcctatccctggtaccaccaaactgcatcgactggaagaaaaccttggggctgccgacatcattctttcacaggatgactcacggcagataacacagccgcttgaaacgattaaaatcgtcggcgagcgttactctcctgagcatcgggctcgcgtaggtcgttaa

SEQ ID NO: 175857 - DNA, 390 bp, Klebsiella oxytoca
atgaatgtgacaagaaggcttgcaaccacctatgtcctgctggttgaacccctcaacgggttactgaaaaacaccagtgcttcccgggttgttactgaagtgcgtaaagccgtactgaaaatttcggaagcgcagaggcttaacctgacggctaacgctcatatcgggattgccatgcatctgtcctgtcttatcgataaaaagttgactgaaggacctgcttccgctcccattcgtcaaacacgtgccggaaatcaggccttttccagggatccggtactgaagattttctcaaaagagctacatgctctggagactaagtttcagatagaattcagtgatgatgaaattgtgtacctgaaatcactgtttgaacagaatactttttaa

SEQ ID NO: 175858 - DNA, 360 bp, Klebsiella oxytoca
atgaacaaaaaattagtctttctctccgctcttatgctcacagcttgcagcgctaattccctccagcacggtgctgaaggtgtgcgggtaacgcataatgaaccggacacttcttgcacctatttaggcgatgtcaccggtagccaggggaattttttcacgggaggctggacgtcaaacagcaatctggagacgggtgcccgtaacgatctaaaaaataaagcgtggaaaatgggggggaacgtggtggtactgttaacccaaagggctggccaaaccggaagcgcctatcatggcacaggctcaagccagcaaaccaatgtgacattgagcggaaccgtataccgctgcccacgttaa

SEQ ID NO: 175859 - DNA, 537 bp, Klebsiella oxytoca
atgcagcgtgctttttcaccatggattatggcagcactattattttcgccctcattagcgttggcgatggaaaaccataccctctcccttggctatgcccaaacgcatcttagcgcgttaaagaaatctgcaagtaaggatcttcgcgggctcaatctaaaatatcgctatgagttcaattctgactggggtgtattgaccgctctcacggcaactcgtcatgaagtacaacattaccgttgggacgcaggaaaagtacataaagatggcgataataccactagctatagttcgttaatggtaggaccgacctaccggattaatgactatgttagtttatatggtaatgtaggtatagctggtatgaaggtcaaaaaccgtgacaatcaatcttcctcagaagatgcttttgcctatggtgcaggtcttatttttaatccattcactaacctttccctggatgtgtcatgggaaacagccaaattactttacgttgatacaaacacatttggcgtgagcgtaggttatcgtttttaa

SEQ ID NO: 175860 - DNA, 489 bp, Klebsiella oxytoca
atgcatcactatcaaagaacggtattaagaggcattacgctacttattctggcagcatcttttgtgctgctgattttacaggcacgccagcagcgctatcctctgtcagatgcggattcatttctatgcaccactaaaacggtaacttcagtcctgcctggcaattttctcgctaatggcaatatcgtcctcgatttcaaaaacaaacgcattacattgcagtatgacatcaccactaaagagcaaatcaaaaaagtgttgtatcgcgatgtgtatatgaagaacctgcaaatgcctggccccggcatttatacatttgatgtcgattcggtaaaagttttttctaccgacaccgccggtgattttttagcacattttcgcgtattgcaccccgatgccgccaatgaaattcgcatcaccagggtcggtaacagcacttatttgtactcaatcaatcggcagatatataacgtatgtaccgcgcaataa

SEQ ID NO: 175861 - DNA, 738 bp, Klebsiella oxytoca
atgagtaagaataagtacctaattgataagaaagtcattcttgattgcgagcggatgaccttatcacgcgatcgcgaaagcttaaaaatttctgaatctgaatgcaatttgctccttgcttttcatcagggactctttaaaaaagatgatttaatcgcctgggtgtggggacgaaaaggtgtggtggtttccagtgccagctattacaaattaatcaatcaattacgcggttcgtttgaaaaaatcggccttcccagttctgcggtattaacgcgccctaaggttggtgtgacgctctcggtaactatcgaaccactgccagatgaatcaacacccgtaacgcaaaatagagccagcgacaccgttgcgccagttgcagaatcgttgcctgagccaacgcagtcttcgcaggcagtttcaaaccgaaaagagtggctatttttaatctgcgcaacgctgttcctgctgatggtcatttatctctacagcaaacgccatccagactacttttctgagctgggaacctataacggatataccttttatggtgtcactgaagataatcggtctctcgaggatgcggtgggggctttttccgaactgagtcagcaagtctataagcaaaacggcaatttcatttattatattcgcgttcctgacaccaatatttttgttcagtgtctgaatcaactgaatgtttcggagcccaaatgcatcactatcaaagaacggtattaa

SEQ ID NO: 175862 - DNA, 1563 bp, Klebsiella oxytoca
gtgaaactaaagctatcttttgtgatttgttcagtgcttgtgccgctggtcgtgatgattatattagcgctgctggtcagcgtactacagtttaaacaggacgtggcactgagcgcgaataccttattacgtttcagtaacgatgtatcaaccgcctcatggcgggtcaccgcaaaaaccgtaaaaatagcggacagaccctgcgctgaaatgctgtcggagcttaaccgaacccgcgcctttaccccttatatccgcgatatcggtctgctggaaaacggcaacctgctctgttcctttgttaccagggagcaggcgcacccttttcctttgccgccgggtaaaacgctcccgacgccgttacctgccagatgggtccgttcatttgacttgatggccggaggaccaggcagacccgcggtggtttacacggagcaggtgacggcgcaaaaatcagcgtttgtcatcgtcgattctcgctatattcaggaactgatggatgtcctcgcagaggaaagagccgccgtattcagcctgcggtttggcgagggcgataggattatcagccaaccagcgcagcgtgacagaatagtgatgacccagcatttcgtcaccgccgacggtaagatttcgcttaccgtcggcgcgcctctcgcggcattgatggctctgtggatgaaatctctgcttatctttatccctctctcgctttgcttctcatttatgaccctttttctttaccgacattgggcccagaaacggctatccatggcccgagaaatcacccgcggtatgaaaaacggtcagttcacagtgcattatcaacctgtatttaacgtcagccgcgctcattgcggcggcgtggaggcattaatgcgctggccccttccggatgggagttttattactcccgacatcttcatcaccgcggcagaaaacgaagggatgatcgttccgctttcgcgtcacttatttaagctcatcgcccaggatgtcgaacggtggcaggttgccggggatttttatatcagcgtaaatatttcacctgaacatctggtgcatgagagttttattgccgatgttgaatcgctactggcaagcttagggaaactgcgcctcatgctggagctcaccgaacgcagcctcattgtccaaccggctttagtgtcagataagctcatgcagctgcgtgagaaaggcgtactgatagcgattgacgattttggtaccggctactgctcgctttcttaccttcagcagcttccggctgattatctgaaaatcgatcgtacttttgtcgatacgattgataccagcggcagcgacgtgcccattctggataccattattatgcttagtcaaaggctgggacttaatatcgttgcggaaggcgtcagttcagagcatcagctacgctatatcctcgatcataacgtagattttatacagggctatctttacgcaaagccgatgaattcagatgattttacggtctggcttgatacacggggcaatgagcaaaatgaaaggattaaaagtaaaaacctttcaatagatcggtag

SEQ ID NO: 175863 - DNA, 441 bp, Klebsiella oxytoca
atgctggcaacgctggtatatcaaggagccaggcgcgatgcagacgaaatacataaccttatttgcactgccaaatcaactatttatataaagccgagagagctcatactgaacggaactttggtgctggatcttaagtcgaaccgcattgctattcattattccgtgcaggatcaacggcgagagcagcggttattctttcaggatgttgcaatcaccccgcttaaccgcaccggcatgaaaacctacacctttcgggttaaagccgtgcacaaatttaattctgatacgacgggtgagatgttttcctggctgcgtctcctgcagccggcaaccgagaatgagctgacgataaataaaatcggtccgagggcctaccttttttcactgaaccggcagatctataatttctgcaccaccagcggcggcgctaaagcataa

SEQ ID NO: 175864 - DNA, 747 bp, Klebsiella oxytoca
atggatgagaaatcgttactaatagctgaaaaggtgatatttgacagcgctaaaatgacattaaccaacggtgataaaatcattaaaatttcagaatcggagacaaatttactccttgccttctatcgcggaatatataaaaaggaagatattattaattttgtctggaagaaccgtgcgggttgtgtttccgaatcgagttattacaagctcattaaccagatgcggaataactttgttcttgttggcctgaatgcggccgatattgttacgcgaccacgaattggcgtctcgttatcattggcgttagaacccatcaaaaaagaacctacgccacgatgcgaaaacgtcaggaatgcagggtgcgaaaaagatagccaacgggctctcacgccggacgttaaaaagatttcagccaaaatacgccctctcgtcctgaccattacactattgttgttaacgggtgttgcgatgctatttcagcatgcgccagagcaaaataaacacaacagtagcttcaggatgctcggtaatgaggatgactatatcttctttaagatggccaccgataaagtgacatttaaggaggtggtttcggcttatcacaccctgacgctgccgctatctcgccagaacggacattatctttattatctccgcgaaccgaatatgaatctttttttgcagtgtctgaaccctgttgaaacggcggtacctaaatgcattaccatcaaagaacgctactag

SEQ ID NO: 175865 - DNA, 537 bp, Klebsiella oxytoca
atgttcaagaaaacgacactggctttgcttacagcctcactttttatttctaccagtacatttgcgatgtccaataataccattacctttcgtggtgaagtttccgatgaaacctgttctgtagccattaacggtaatcaggcaaaaccggtagttattctgccgacggtgagtgccaaagaactggcgaaaggcggcgataccgcaggtcaggtgacatttgatattggtctcaccggctgtacgggtaatgccgataaaccgaccaaaatctctaccgtttttgtcggtaaccaggtgaccagcaacggtaatcttggaaataccggggacgccgccaacgtagaagtccagattctcgatacggctgagaaagttatcaatctgaccaacggtttcaaaggtgaaggcgatctgcagctgaagccgggagagacggaagccagcgccacttataccgcgcagtattacgccaacggcgcggcatcggctggtacggtcgaagccactctccagtacgccgtttcctacctgtaa

SEQ ID NO: 175866 - DNA, 759 bp, Klebsiella oxytoca
atgaaaaaggatgctacccgttcagggctgcgctatctgatggcgctgctactcctgtttcttcccgctgccgcggcatgggccagcgtcaccattgtaggcagtcggattatctacccgtcgaccgtaccctctgtcgatgtacagctaaaaaataacgatgactttccctatgtcgtacaaacctggtttgacgatggcgatatgcgtattgggccagagaacgcgagtggcattccttttatctcgacgccgccggtatttcgtatccagccaaaagcaggccaggtggtgcgcgtggtgtatagccagcgtaaagcactgccgcccgatcgtgaatctgtcttctggttcaatgcattgcaggtaccgccggccaatatcggcggccgtcagcagaataaagtgctggtgatgttacggacgcggatcaaacttttttacaggccggaagggattggttcaccgggcaatctggctaaaaagctgcacgttaccgtagtgcgtaatgcccgaaaaggtgccggtattgttatcagcaacccgcagccctggtatgcatccctcagcaacctgagcgtgacggcaagcggcgtatcacgtcagcttaatgtcgaaatggttccacctttctccagccgtactttctggatacctgaaaaattcagcgccaactcgcttaacggtaccgtcaccgtgacgttggttaacgaccagggtgcaaggataagcgagcgttatcatgtcgccgaaggttaa

SEQ ID NO: 175867 - DNA, 2556 bp, Klebsiella oxytoca
atgtcgccgaaggttaagttctgtcgcaaaaacatcttcgttttcttagccgtagcctgctccggtcaggcttttggcgaagaatactattttgatccttctctgctgcaggggacggcttacgggcaaggtatggcgagcgttaacggacccggtacgcccgccggagagtatctggttgacgttatggtcaatggctcgctgctaaaatccggcgtaaagatccgctttactcaagtcaatagcgaacaacgcacggagccctgccttccgttatcgctgatgcaggccgctcgggtaaaatcgctcccggacaaagcgcctcaaaatagctgtcgtccgctcagggaatgggtatcccagggcgaatggcaatttgatagcgcgatgctacagctccggcttacgctgccgatgagcgagctgatacacaggccgcgcggctatcttccgccttcgcagtgggacagcggcgcgctggctctgtttttacgccataacaccaactggacccacacggacaacacccgccagcacttccgctaccagtatttgtggagcgggatcaacgctggcagcaacattgggctgtggcagctccgccatcagggtaacctgcgctatgccgacagcaaccagagcggtagcgactggcattacaatcgcgtacgcagttgggtgcagcgaccactcgccgcaatcgacagcatcctgacgtttggcgataactacactgactccagtttattcggcagcctgtcgtttaatggtatgaaactcgccacggatgagcgcatgtggccgcagggcaaacgcggctatgcgccagaggtacgcggcgtggcggcaagcagcgcgcgggtggtcgtcaaacagctgggcaaagttatctatgaaacccatgttccgcccggaccgttcgctattgacgatctttacaacacccgctatcagggtgatttgcaggttgaagtgattgaggctaacggaaaagtatcgcgctttaccgtgccctattctgcggttcccgactcggtgcgaccaggcaactggcactactcttttgctgttggcaaggtccgccagtactaccgcatcgacaaccgcttccttgaggggacgctgcagcacggggtaaataataatctcactcttaacctcggatcgcggttggcgcatgattatcaggcctggctgatcggcggcgtatgggcgacccgccttggcgcattcggcatgaacgccacctggtctggcgcgcgagtggagcataatgaccgtcagcagggctggcgagcggagctgagctatagcaagaccttttccacaggcacgaatctggtgctggcggcctatcgctactcaaccggtggattccgcgatttggaggatgtatttggcgtacgtcgacaggcgcaaaacggcattgattactactccaatacgctgcatcaacgtcaacgcctttcggcgaccgtcagccagcccttaggccattcaggtacgctcaatctcagcgccagtaccgccgattactacaataatcagtcgcggatcacgcagctgcagctaggctacagcaaccagtggcgaaaagtgagttatggatttaacctcgccaggcagcgttccacctgggactatggccgcttctaccgcagcgttaacgaaccgcaggatctgagccagcggcaaaaatataccgagacgacgctgtcttttactctctccattccatttgactggggcgatagcccgacatccgtagcgatgaactataaccagtcgcgcgcgaatcactcttcaaccttgtcgatgaccgggacccgtggcgagcagagcgaactctcctggtctgtttatggcggctatgagcgctatcgcaatggggacgaaggggcatcgacgactttcggcggtaatctccagcaaaacacccgttttggcgcgctgcgtgcgggctacgaccagggaaaggactatcggcaggtggcgctgggctcctccgggaccctggtgctgcattccggtggcgtgacgctcggtccttacgccagcgacacctttgcattaattcatgccgatggcgcgcagggcgcagtcgtccagaacggtcagggggcggtaatcgacagtttcggttacgccattttacctgcgctatctccgtatcgtcgcaacaacgtctcactcgatactcgccagatgcgcagcgatgctgaactgacggggggaagccaacaagttgttccctatgccggcgcgatcgcgcgggtgaacttctccacgattaccggcaaagcggtgcttatcgcggtgaaaatggcggatggcggcatcccgccgatgggggccgaggtcattaacagcgaaggggccgtcattgggatggtcgggcagggtgggcaggtttatgcccgtatcagcactccctcaggctcattgctggtgcgttggggaaaagggaccgatcgacgttgccatgtgccctaccagttcgatctacattcgcctgaaaacgtgatttatcttacaacgacctgcgagagggaatag

SEQ ID NO: 175868 - DNA, 1335 bp, Klebsiella oxytoca
atgtgttatcttcgccaaacgctgctacttgctgctaccctgcttttcagcaccgcgtcctgggctaactgcgttaaagtgacggataatagtttcctttcggaggcggcgattaaagcaggctataccgcgcgcttctggcgcggcgcctttgatgacaatatcggtcatcttggtctgccgtcagtcattagcgttagcgcgaataataagttccagccttccggcaccgtgcttgccagtacggtgggtaatttcctcactgcaggcgttcagacgccctatacggcaaagcaggtgctttaccgctgtgatttgcaggacgccgggaagctgtatgaactgtattcaaccaacggcgataactactttgttggcgggcgtcgggcgaaagaagtggagggagcctactatgacgcggaacgtaacgtcgcggtacgcatgacgaatctgagtaccggcgaatactatagccgcttctggaagcagcgtcagctcactgcggatagttggtttcaggacgatcgcgcaatttatattcccgcaggcgcatttagtaatgtcctgtatgagatgcttaaaatcgccgcctcggatcaatatatttttaacgacagaattaacaaagacacctataaccagccgcgcggttatatcgcattcaaggggcctggcttactgacctccgctattcaacccggtatggatcatgcttcaagttattatggctggcccgaatcctggcccggtgcgtggagtagctacaatcaggtcacctatattcgcggcgcggcctgctccattgaagattatcccgcgacggtgctgcttcctaccattacagcggaggcgctctcttctggcgaaagcagcgaagcgcctttcagcataacgctggagtgcgaagctggcgcgatgtcctcgactcatcccaccactagtgtcgctaacgtagccatgggttttttagtcaatcagcccggcgccgtggccgccgcgcgccgccttggcctgacgaccaccggcggtggattgacctggttactggacacgcattatggcggaaagggcgtggcttccggagtaggaatacggatttacgatcagggcggtgcgccgcttaaccttttgccggacaaagtgagtaccgggacgggcaacgcccgtggctggtatggatataaagagctcaccgtactaacgagcaaaaaagaccgtggttcggtagaggtctggcacggtgattttaccgcctcccttgaggcgctcggtggacaaccggtaacggtagggagcgtgaatgcgcagttacaggcagtggttagttttcagtaa

SEQ ID NO: 175869 - DNA, 735 bp, Klebsiella oxytoca
atgcgcagttacaggcagtggttagttttcagtaaggcggtgttagcgctgctgttgctggcaggcgtcaattccgcgccgtttgctgcggttaacgttgaccgaacccggctcgtattcgccgctagcgatattgcccagtcgctgacgctcgcaaacgacagcgtaacgccaatgctgttacaagtctggaccgacgccggagagaccgcctcttcacccgataatagccgtacgccgctggtggtattgccgcccgtctttaaaatgcagccggatgagttgagaacacttcgcgtgatgctgagctcgcggcgcagtctgccagaggatcgggagagcctgttctggctcaacatttaccagataccgcccgaactgagcgcgacgaaaagcgctacccgcaagctagtgttacccctacggctgcggttgaaggtatttattcgtccgaccggtttaaaggcgcccaccgccaatgatgaacagaaactgcgcttcagcatcgcttcgcagggcatcacgataaccaacccaacgccgtggtatatgagcctgacagtaacggcaacaaaaggaatcaggatcggttacatgatgctcgcgccgtatgagcggcgggatgtggtgctctctcaggcaccgggcgtgggaacgacggtaaactatgcggtgatcaatgactccggaaactggcgaacctataccgcaaccattatggcgaaagagagttga

SEQ ID NO: 175870 - DNA, 351 bp, Klebsiella oxytoca
atgtcattaacacccttacagcttttcaaaaatctgtccgatgaaacccgtctgggtattgtgctgatacttaaggagatgggggaactgtgcgtgtgcgatctctgcacggcgctggatcagtcgcagcccaagatctcccgccatctggcaatgcttcgggcaagcggactgttgttggatcgcaagcagggtaagtgggtgcactatcgtttatcaccgcatatgcctgtatgggcagcacaggtcattgaacaggcctggttaagccagcgagagatcgtacaggtcatcgcccgcaagctggcatcagcaaactgttcgggaagcggtaaagcggtttgtctttaa

SEQ ID NO: 175871 - DNA, 1293 bp, Klebsiella oxytoca
atgctactggcaggtgctatttttatcctgaccattattctggttatctggcagccgaaggggctgggcatcggctggagcgcgacgcttggcgcagtactggctttgatatctggcgttgtgcatgtgggggatattccggtggtgtggaatatcgtctggaacgcgacggcgacctttatttcggtgattattatcagcctgttgctcgacgagtccggcttttttgaatgggcggcgctgcatgtctctcgttggggtaacggtcgtggccgtttgctgtttacctggatcgttctgctcggcgctgcggtggcggcgctgtttgctaacgatggtgcggcactgattctgactcccattgtcatcgccatgctgctggcattagggttcagcaaggggacgacgctggccttcgtgatggctgccggatttattgccgatacggccagcctgccgcttatcgtgtcgaacctggtgaatatagtctcggcggacttctttggactgggcttcactgagtatgcgtcggtaatggtgccggtggatattgctgctattatcgccacgctggttatgctgcatctgttcttccgcaaagatatcccgccgacttacgatctggctctcctgaaggcacctgaaaaagcagtaaaagatccggctacgttccgcaccggctggattgttttgattcttctgctggtaggttttttcgtcctcgagcctctcgggattcccgttagcgcaattgcggcagttggggcggtaatactgtttaccgtggcgaaacgaggtcatgccattaacacaggcaaagtgctgcgtggcgcaccctggcagatcgttatcttctcattggggatgtacctggtggtctacggtctgcgtaacgccgggctaaccgaatacctttcaggggggctaaacgtactggcggataaaggactctgggccgcgacgctgggtactggcttcctgatggctttcctgtcttcgatcatgaacaacatgccttccgtgctggttggtgcgctctctatcgatgaaagcaccgcaaccggcgttattaaagaggcgatgatctacgccaacgtgattggctgcgatctgggtccgaaaattacacctattggtagcctggcaacgctgctctggctgcatgtactttcacagaagaatatgaccatcacctggggctactattttcgcaccgggatcgttatgactctgcctgtgctgtttgtcacgctggccgcgctggcgctacgtctctctttcactttgtcatga

SEQ ID NO: 175872 - DNA, 426 bp, Klebsiella oxytoca
atgagcaacatcaccatttatcacaacccggcctgcggcacctcgcgtaatacgctggagatgatccgcaatagcggtactgaacccaccgttattcattaccttgaaaatccaccgtcacgcgatgagctggtcaaactcattgccgacatggggatcgcggtgcgggcgctgctgcgtaaaaatgttgagccttatgaagaactgggcctcgcagaagatagatttactgacgatcggttaatcgactttatgctgcagcatccgatcctgattaaccgcccgattgtggtgacaccgttggggacgcgtctgtgccgtccttctgaagttgttctggatattcttcccgatgcccagcaaggcgctttcgctaaggaagatggcgagaaagttgttgatgatgcgggtaaacgggtgaaataa

SEQ ID NO: 175873 - DNA, 456 bp, Klebsiella oxytoca
atgaaaaaaattaaatggctcgctttcttattgttctttacagggttacctcaacaggttaacgccaatgctaatgacaaaatcgtttgcgaagcgaaacactctttatatcatggccaatttgcaattaaagcaacttaccgatttatcatgaatgataacagcggcgttattttgattaatggtaccgcgcaccttggcccggaacgatatgcgataagtcgcgaagtctattttaattataaaagacaaagcggtgatgactatcttctcactagccaaagagtctataccaatccgattgatacgttgccggagttattagcacaacaacactacccctcttttttccttaaagaaaataaaaagttaaacttcctcattaattccgttaatcaaacagactatatcatcagctttgtcagcacgcctttgttttattgcaatggggaataa

SEQ ID NO: 175874 - DNA, 858 bp, Klebsiella oxytoca
atggttaaatacatcatgaataagcaagttattttccttcccggtgagaaacaattgttatcgataaaggatgggacccgatttacgatacttaagagtagcgcccattgcctggagttacttctggaacggcaaggacagctggtatcgcactctgatttaatggtcgcaggttggggtgaggatgcgaagcgtacggtatcaaattcggcttactatcagtcctttgttaatttacgcaatgtattaaaaaaactgggttgcccggataacattctgttgactattcgtggcaagggtgtgcggctgaatgcctacattgccgtggaaaagtatgaggataatccacaaaattcgatagagcgtatccactcagtctcagacgatcgtaatatctttcccgttacagataaccggtatcaggatgaccagctagcggataaaaaaggcatacaaaccggtgaaattttcgcgcagcctgacacagtagcaccgcttacgcctgaaaataaaaaaaccatcaaaatgatctcgtattgtctggcaattttccttccattgataggtttgttcgccttttttttatatcgttccccttttcatcatgaattcattatcgaaggttactcgcatatcaacggcacgccaccttgctactttgccaatgccagaaatataaataacgattttgccattaactttattcatgacgaagggttagtgtgtaataaagacatcaaatatttcatttcatatttttcaacgtcaccacggttaaccgtgtttacgtgcggaaaggaagcgtctttaaaatgtgactcaacaacttacattgtggcaaaaaatgaaaaaaattaa

SEQ ID NO: 175875 - DNA, 576 bp, Klebsiella oxytoca
gtgaacacaaaaacttcaattaaaacaatgctggctttattttcatttgcagcattatccgggtctgcatttgcggtaacgccgacggtcacattccagggcgaagtcaccagccagacctgctcggtcagcatcaatggtgagacaaactccgttgttctgttaccgacagtctctaccgctgactttggcggaaccctggcgaatggacagaccgccgggctgacgccatttaccgtgacggtgagcggctgtactgccccggcggcaggcgagggtcctcaattgattaaaacccgtttcctggggtttgatgtcgacagcgccagcggtacgctgggtaaccgcgcagtcactgatgctgcggtcggttatggtatccagctgaccaccaccgatgccggaacgacgcctgtcgtgctgtcaggagtaaccgatgttgcaggcctctctttacccgagggagatacctccaccagccactcctttggggcacaatattatgttattgatgccgcttctgctacgccgggtgcgattactgccgtagcggaatataccctgagctacctctga

SEQ ID NO: 175876 - DNA, 696 bp, Klebsiella oxytoca
atgcgattgatactgcgattgtttgttctgttgatattcggttttaccggctatgcaaatgcaggcgtgatattaacgggtacgcgaattatttatccggaaggcgccaaagataaaacgctccagttaaccaaccaggagtctcagtcttatattgtacaggtacagattgacaatggaacgccggagggttttgccccgtttatagtcactccgccggtttttcgtatggagcctcatagcggtcagtctgtccgtttgacctattccggagagccgttgccgggcgatcgggaatctgtcttctattttaatttcagccagctgccgtcgttaaaagccggaacgacgcaacaaaataagttaattttcgccatcactaatcgggtgaaagttttctaccgcccggcgtcgctttcggggcatccggaaaaaacgtcagagcatatccatctcagcatggaaggtaagcagatcaggatagtaaaccagagcgaatatcacgcctctgttcgtcgggccacgcttgtccgcaacggaaaggatattcgcctcgcggaaggggtgatgatttcacctaaatccggactggtcgttaccccgtcgtcagaaataaccaacctcagaggccttcttttacgtctcgtgcttgttaacgactatggggtggatattgtgactgagcgtcgattgtaa

SEQ ID NO: 175877 - DNA, 2553 bp, Klebsiella oxytoca
atggcaggtatcaggttatttctcctgacccttttaatccccgcttccgtaacgtttgcttccggcacgagtattaccggagcggcagggatagctgaagaaaatgattatacttttgaccctgctctgtttcgcggcggtcgtttcagtgaaaccgcgctgatgcggctgagcaaaccgggaaatattgcccccggcaacttcaaagtagatgtttacgtgaatggtggattcgtcagcagcgataatattaccttcagtgaaacagaaagcgggcaggtgcggccgtgcctgacgcccggtcagcttgcggcagccgggattgcgccccgcaacggtctgcctgccggcgcaaaagagagcaatacctgtctctccctcagctcgctgattgaaggcagcagcagccattttgacacatcccggctgcggctcgagctgagtataccgcaggctgacatgaatatccggccgcgcggctatgttgatcccggcgaactggaagccggcagctctctgggatttattaactacatcacaaactattatcacgtctcttactccggtaataacgcccgggacctggactccggctggctgtccatgaacggcgggataaatctggggatgtggcagttccgccagctatcaaatgtacagtggaatcgtgactcgggtgcaaactggaataccctccgccggtatctgcagcgcccgttgccggcattcaacagccagcttaccgccggtgaactgagcacgaccgggcgtctgttttcaggtctgagctataaggggataagcctggccaccgatgagagaatgttgccggattccatgcgagggtatgccccggccattcgcggagtggcaggcagtacgtcgaaggtgacggtctcccagaatggacggcagatttaccagaccacggtcgctcctggcccgtttgatattaacgatctctatccgaccagctacagcggcgatctggatgttgaagtcactggggccgacggcagcgtaagccggttcagcgtgccgttctccgccgtaccggagtccatgcgtccggggatctcacgctatggactggctgtcgggcgtaccgttgacgccggcgataactctctgttcagcgacttcacctggcagtacgggctgagcaatgccctgacgctcaatacgggactgcggatcgcggatgactatcaggcggtcattggcggtggggtctacgcctcttctgtaggcgctctgggcctggacatcaccgcctcccgtgcggggatgccggagggcgatgacgtgaagggctacatggcccacatttcctggagtaaaacattccagccgacagcaaccaccgtgacgctggcgggctaccgctattcgacctcaggctatcgcgaacttggtgacgtcctgggcgtaagaaaagccatgcgcgaccacgatcgctggacctccacctcctggcagcaacaatcccggtttgatatctcccttaaccaggggtttggttccttcggcaatatttatctctcaggctccacgcagaattaccgggacggccggagccgggatacgcagctgcaggcgggttacagcaacagttttcataacggtatgagcttcaacatttccctttcccgccagcacgcaggcgggagctatgaggccggcagaaaggaaaccgtgaccgcagtatccgtctcctttccgctgggattcagcgataaaaataacacccagattgtcagcaactcctggacccacgcctccggcggcggcgaccagtttcagagcaatacctctggcatgatcgatgatgcccggacgctgagttataacctgggggtgatgcgcgaccagcagtatcatcagacaacgataagcggcggcctgcaaaaacggctgcccaacgtcagcgtggggctcaatgcctcccggggtgaggggtactggcaggcgtcgggtaatgcgcagggggcgctcgccattcattctggcggcgtgacgttcggaccttatctgagcgacaccttcgcgctggttgaggctaaaggcgcttcaggggcaagcgtatataactccggccagtcgattattgacagccagggctacgccctggtgccctccgtcacaccctatcgttacagcagggtaacgctcgatccccagggaattgatggcaacgcagaactggttgacagcgagcggcgggtcgcgccggtggccggcgctgccgtcagggtggtattccgcaccaggacgggccatgccatgcttattcaggctcgtctgccagacggagagccggtcccgctcggggcggatgtcactgaaccggacgggacgattatcggtatggccggacagaacggacagctctatttacgtacggagcacgctgagggagagctgatcgttcgctggggtgacgacgagcgggatcgctgccgtctggcctaccgcataaaccccaaagaaaccacccggcacctgacaaaactcagcgcagtctgccgacagacgcctgatgcgcagcgatga

SEQ ID NO: 175878 - DNA, 1365 bp, Klebsiella oxytoca
atgaagataatgatgatgaaaagacgaactttcctgcttaacttgctgtttgcctgcctgacgcttttcagcctccgggccggcgccagctgttccctgaccctggttacccagaccgaagactcctatgtcgcgcagataccgttcgggaaaattaacctgacggatacttatctgcagccggtcggtaccatgctggccagcatcgtggtgccgccaacgaattacactcacggcggggctaacggcgcttcggtactctgggaatgtgatgccgcggatcttcccaatatctattttctggtcgccacgaatggcgacgatcgcgtcggcggtttttatgatattggcacggtcgacggcctgagcgacgtctatgccacctggttcgcctacgtcgggatcagacagaccatgtccggcgtcacgctgacccgccactggcagaaggttcccatcacatcatacgccacaagctcaacggggaagattcagatccgtctgcaggatatcccgcctctggtcgccgagctgtaccggatcagcagcctgccgggaacctccgccgcatcggcctattgtggtaacaacaatgatgatggggttggtattggctttgcttccgcgacggggcgtaactattactgtcaaaattccgtcatgactcagcccaacgcctacatccagctgtccggcgacagcagcgtcagcttcagtttcgcacgcgatttcccgggtgaggacagcgcctataactacgatttctggggagcggataacggctttggctacggcatgcggctggcgaacaccctctattccctgcctacctgcgtggcgcgcaatgccaccccgcaggttttatttcgcacaatttctattgctgaactcgaacagggggggagcgccagcgccagcttcaccgtgcaggtagagtgcagtgattcagccgagtcgggtacggctgcaggccagacggcgattggtattcaggtttccccggggtcatacagcgcggccagcacgctggggctggtgaacggcagcggcggcgtgacgcatctggtctctgatgattattttggcgaaaacatggcccggggcgtgggaattaccctgcagaatgcgcaggggaaaagaatgaacttcgtgggtcagccggggacggtatccctgaccacgcccggtggcgaaaatgccggatggtatccggtactggaggcggccgataacgctggaagcaccatggcgggatatacgcactacagcagcacatttttagccaccctgcagaaactggacggccaggcggtcacccccggtaaagtttatgccacagcctatgttctggtgaaaatacagtga

SEQ ID NO: 175879 - DNA, 735 bp, Klebsiella oxytoca
gtgaacaaatttcgccgcgttggctggatatcggtgctgttgataatgtttctcgcgccattacgcgtttatgccggactgatagcgagcggcacgcgagtcatctataccgaaggaacccgggaaatcagcctgatgctggctaataccaattcctggccggtcattgtgcagagctgggttgatgacggcagcggcaatccggcctatacgggggcgccttttattgtgctgccttccgtgtttcgcctgcagccggaaggaatacaggggctgcggattgtctataaccagacccctttgccacgagaccgcgagagcgtgttctggattaacctctatgaaattccgcccgtcagtaaaaatatgccggagcaatcccggctgcagctggcaatgaacacccagttaaaaatattttatcgtccacaaggtctctctcccgctcccgagagtgcggccgcacgtcttaaattccgggcagtacaagaaggcgggcgctggtacgtggagtgcgacaatcccacgccctggcatatatcgtttacggacattattgttcgtcacggaaaaacgcaacggcatgttgagcgggaaatggatatgatgaccgcgccttttagtcagcgccgttatgctctttcggggaatataccggtgacgagcgccagcgagattcagttctactatgttgacgaccggggtgccattctaaatgaccatactcggttatga

SEQ ID NO: 175880 - DNA, 621 bp, Klebsiella oxytoca
ttgaacatcatcaacataattaccgacgatgtgtattttttgcagggggccaggcatttattgaatgaggcggcagaaaatcatgccgtgttatacaatgacataaatgcatcgggactgagagcggtggtgagatcttttgctacctacgatcaaaaagttattttatatattcattgcatcaggaaacgacgagtgttattacgccttgttgcggcttataatctgcaggtgtttgttattacgcattgtaaagtatcagattgcaacaatgataaggaccctatgatcattccttcattcctatcgaaaaaagagtttttgcaaaaaataaaatcagcaaagagaagcgtgtatagaaaaagctcgcagcggtctaaaaggatatttaaaggactgtcggcaggagccagtgtgaaggatctcgcggaaaccttgaatatcacgcaaaaagcggtttatgccattaagaatcacactataaaaaaatttggttttaaatccacgaaaatgaatggctttttactttgccgcgatttattagaaatgaatgaaataggcttgcgctataagaggatcgtagacgggaactttatgtcgatgaatggcaggagatcctag

SEQ ID NO: 175881 - DNA, 1260 bp, Klebsiella oxytoca
atgaataccccgccacggcgtttaatccagtacggcagcgtcatgttgtttccgctggcgatgattatttatgatttttcggcttacctgaccacggatcttattcagccaggcattattcatatcatcaacgagcttcaggctgatgtcccccttgctccggcatcggtcagcctgtatatggctggaggcctggcgctgcagtggctgctgggccctctgtcagatcgtatcggccgccgccccgttctgctcaccggcgccctggtttttgctctctcctgcctgagcatgctgtttgtcgcttcgatcgcgcaatacttcgtcgcccgctttatccagggaaccagcatctgttttatctcgaccgtgggctatgtgtcgattcaggaagcgtttggggaaaccgattcaatcagaatcatggctgcgctgacctctatcgtcctgcttgcgccggttatcggaccgctggccggcgcggcgctaatgacggtgatgcactggaaactgctgttcgccattattggcgcgctgggcctggtggcctgggccctgctgctttttaagatgccggaaaccgttatctctcaggggcggggatttaaaccgggggaagtgctggctgatttcatcgcggcgtttcgtcatcccgtggtgctgacaggttcgctggcggtggcctttggcaacgtgccgatgatcacctgggtggcgctctctccggtgattctgattgagcacggcggcatgtctcccgcggcatatgcctggactcaggtgccggtgttcagtgggctgattatcgccagcgcgatcgtggcgaacgtggtaaaagaccccacttcgccgcgctttatctggcgtaccgttccgatacagctgaccggcctgctgatcctgctggtcggtaatcttctgtggccgcatgtctggttctggtcggtgctgggtaccagcatttatgcgctggggattgggctactttacccggtgctgttccgcttcacgctcttttcccatcatctgccaaaaggcaccgtgtccgccacgctgaatattctggccctgagcgcgtttgccgcttccattgaggcaacccgttggctctacttccatgccggtggcagaatcgccttccactgcgcggcgctgttggccggtctcgccgtggtaatactggtttcccggctgctgaaactgcgtaagcggtatcaggatagttctgcgccgccgcagaccgacgctcagaaactgtag

SEQ ID NO: 175882 - DNA, 513 bp, Klebsiella oxytoca
atgttactgatctttggcggcctgcccggtaccgggaaatcaaccattgctcgcctgctggccgccaggctgggggccgtctggttacgaatcgattcgattgagcaggcgctgatccgcgccgaaaccgtcacccggcacgatataggaccggccggatatctggcggcgtacgccattgctgcggataacctcaggctgggcaacgtggtgattgccgatgcggtgaatcccatcgccattacccgccaggcctggagagaggtcgcgaccgagaatgccgcgccttatctggagatagaagtgacctgctccgaccaaacgcagcatcggtatcgcgtggaaaaccgcgcagcggacattcgcggccatatcctgccggactggcaaaaggtcatcacccgtgattacgaaccctggcattctgccagcctggtgctggatacctcagtactgagcgccgaagaggcggtagagcggatcgttgcgcatattgggtcgcaccgccggtaa

SEQ ID NO: 175883 - DNA, 441 bp, Klebsiella oxytoca
atggtaaatatttatattgcgagtccattttttagcgacgaccaggttgatcgcgtccagcgcgtcgaacaggcgctgaccgccaataaaacggtagataaatttttctcaccgcgcctggccgatgcggagaatctggaatacggcactttaccctggcgcgatttcatctttaagaacgatatcaagcatctcgacgaagccacggtggtggttgccgttgttgatttctttgacgatcacgtcgatagcggtacggcgtacgaaatcggctatgcccacgcgtttaaaaagccgttgattatcgttcaggaaaaagggaataagctaaacctgatgatttcagaaagtctgacttactatacccaaagcgctgaagagctggcgacttacgactttactcaactgaaaaagaatatctttaccggcgacgttttctga

SEQ ID NO: 175884 - DNA, 1650 bp, Klebsiella oxytoca
atggcgcaaatgaatgaaaacatcgcgaccgcaccggtctctcccctacgcgattttttcgcgaaaccacgtatcatcgccaggcccggttttaaccgctggctggtgccaccggccgctctggccgttcatctctgcataggtatggcctatgggttttccgtttactggctgcctatgtcgcagctcataggaggaagcgagtcccttcaatgccccgtcaatatgtcgttctggcagcagctgtttacccgcgattgcgactggaaaatctccatgctcggctggacctacacgctgttttttgtttttctcggctgttcggcggcgctgtggggcagctggcttgagaaggttggaccgcggctggtgagctttattgccaccttatgctggtgcggcggcctgctgctatccagcgtcgccatctatttccatcagctatggttgctgtggctgggggccggggtcatcggcggaatcggtctcggactgggctatatttcaccggtttcgacgctgttgcgctggttccctgacaagcgcggaatggcggccgggatggcgatcatgggttttggcgggggagcgctggtgggggcgccgctggcaaatggtctgatgaattacttcgccggtccgaccggcaacggggtatggcaaagcattctggcgctggcggcgatttatgcgctatttatgcttgccggtacctttggctatcgcctgccgcccatgggctggcacccttcgggcgagaaggcgcaaaaaacgatccgcaataatcccacgatccaggtgcacgtccgcgtcgcctgccgtaccccacagttctggctgctgtggatggtgctatggctcaacgtcaccgcggggatcggtattctcggtatggcttcgccgatgctgcaggagatctttgccggcaaactgctgtcgctcgatctcagctggcatgagctgaacggcgagcagctgaaacgcattgctaccatggccgcaggatttaccggcctgctcagcctgtttaacatcctgggacggtttttctgggcatcggtatccgatctgtgcgggcgaaaaatgacctttgcgatcattttctgcctgggcgccgtgctgtacgggacgttgccgctggtgaatcacggcggctatatcgcgctttatgtctgcgcgatgtgcattatcatttcgatgtacggcggaggctttgccagtattcccgcctatctggctgatgtctttggctcacaaatggtgggcgcgattcatggacgcttgttaaccgcctggtcggcggcggggatcagcggcccggttctggtgaactatctgcgcgagtatcagctgacgcacggggtttcgcccgagcgcgtctacgatattacgctgatggtcctgaccggcctgctggtgttgggttttatctgtaatcagctggtgcgtccgctgacggaagagcatgcgatgaccgcggaacagcagcagcaggcgaaaggtctgtataccatcaataaggatgctcagctcacgtgggaggcccgcccgtccacgctgctgttaaccgtaagctggttagcggtgagcgtgccgcttttatggggcgtcggcaccactctccagcaggccgtgaagttctttatgtaa

SEQ ID NO: 175885 - DNA, 1158 bp, Klebsiella oxytoca
atgattattacgacggcgctggctaatgaaattgtcgcccgggcaatggcgaggattcatcataacgtgaacgtgattgaccatcatggacagatcattgcctcaggtgaacggcatcgtatcggcgagcagcatgagatcgcccgtgaggtgatacgtaccggtaaacgcatttgtattaacaacaccgcggaagccgcgcgtttccagaatgtgcatcccggtattaatcatcccattatctatgacgatcgcgtggtgatggtggtgggcatcagcggcgatcccgcagcgatcagccgctatgctgaactggcggtactcaccgccgagctgctggtccgccaggccatagagatgcgggaaaccaactggcgacagcgtctgcgcgataccctgtttggtcaatatcttgatcaaggcgcttcgcccgccggacaggaagcgcttcatcgcctgatggagcttggcttcgcttttgatgcgccgctggtgccggtcgtggtgaccgtgcaggttgaacagcatcagctaagcgaaatactgagtacgctgctgcgagaattctcgcagttggccggggtaagagacgtcattttgctgggcagcaatgagatcctgctcctcaatacgctgagcgaatcccaggaaacgctgctgcggggcatcgagtttgtcctcagcaatcagatcagccattaccatatcggcattggcgtgcaggcggacagcgctccggatattcgcgaggccatccgattcgcccgttcggtgattgaggtcgggagcaaagtacagccgcagcggcagatctactactttcgcgaaatggcgatgctctgcctgttccgggtgctggaagacagctatatggtcaatttttttatcaataacgtacgccagctgcttgagcatgattccggcgaagtgctgctggataccctcagcagctttattgccaataacgccgagccgggcaaaacgtcgctgctgttggggattcatcgcaatacgctcacctatcggctgcagcagattaaaaagcatattcagctcgatccgatggtcttcaccgacctgacgcagctggcggtgtcggtacactgctatcgtcggcagaacccgcgccagagcgaatggattgataccttaagctaa

SEQ ID NO: 175886 - DNA, 1176 bp, Klebsiella oxytoca
atgaagattgttatcgcgctggattcgtttaagggtagctgtagcgcgcaggccgcttgcgcagcggtagcacaggggttgcgccgggttgacgaggggctggagctggtcgaaatgcccgtgtcggacggcggagaggggctgctctcggcccttgcggaaagtccgcagctgaagggcgcaaggtggcagcagcagcattgcacctcgccttacggtctctccgtagaggccgcgtttctgatcctgcccggcgaacgggccattatcgagatggcgcaaagctgtgggctggagctcacgccgaaagcgcagcgggatgtgcgtctggccagcagctttgggctgggtgagcaggtaaaagcggcgctggatgccggatgtcggcatttgattatcgggctgggcggcagcgcgaccaacgatggcggtatcggttttgcccaggcgcttggcgcccgcttctggcgcgaggacggcacgctgctgccggttcccgcggcgggtcaggatcttgcgcatattcagcgcatcgatttaagcgccatggatccgcgcttacgacaggccgaaatacaggcctcctgcgacgtcacgaatcctctgcttggggaaaatggcgccacctgggtgtatggcgcgcagaaaggcgcggacgaggccgcgctcagggaactggaggcgggtatggcgcactacagtcggcagcttacgcaaacgctcggctacgacgtcagcgaacggcccggcgccggggccgcgggcggtatgggggccgcgctgatcgcttatgcgggcgccacgctgcgcccgggcattgacctggtgctggaactgcttaacgccgaccgccatcttagcgatgccgcgctgaccatcatcggggaaggctggctcgatcgtcagagcgcctttggtaaagccccggtgggcgtggcgggcaaagcggcgcgccacggcgtaccggttgtggccctttgcggcggacgcgatgagagcagtcggcaattgtatcaacaccatattgacgcgatgtggtctatttgccagcgccctatgccgctggcggagtcgatgaacacatgcgaacagctcctcgccgacgcagcggagaatgttctacgaacctttctgagcgggcggcgcggagaggcacataagcggataactgtatga

SEQ ID NO: 175887 - DNA, 1371 bp, Klebsiella oxytoca
atgctgtcgcgacgccgcggagtaaacacgactatgacaacaatcaatcacacacctgccggcgaacaaggtggaaaaaagcggctgatacatcgtttctcctgggtttcgctgctggtttgctggctaatctgggtgcttaacgcctacgatcgcgagatgatcctgcgccttggcccggtcatctctaaagagttttcgctctcgccggaacagtggggcaacgtcgtcgccctgattatggttgccctcgcggtgctggatatccccggctccatctggagcgatcgctacggttcaggctggaagcgagcgcgctttcaggtaccgctggtgctgggctataccgccctctcttttctttccggtattaaagcgatcagccacgggctgacggcctttgtgctgctgcgcgttggcgtcaacctcggggccggctggggcgagcccgtcggcgtcagcaacaccgcagagtggtggccgaaagagaaacgcggcttcgcgctgggggtgcatcataccggctatccgattggcgcgctgctgagcggcgtggtggcaagtctggtgctttccgcatttggcgaaggcagctggcgctactgcttcctgctggcgctgatcgtcgccatcccgctgatgattttctgggcgaaatattccaccgccgatcgcatcaacacgctttatctgcatatcgatagccaggggatgacgcgcccggcgacccaggaaagcagccatgttgccaaaggcgaagggatgaagacctttttacgcaccctgcgcaaccgcaatatttcgctaacggcgggcaataccctgctgacgcaaattgtctatatgggcattaacgttgtgctgccgccgtatctttatcacgtctccggcctgtcgctggcagcatccgccgggctaagtattatcttcacgcttaccggtaccctgggccagataatttggccctggctgtccgatagctttggccgtaaacgtactctgatcgtctgcggtctgtggatgagtatcggcattgcgctgttctatttcgccaccaatatgccgcgtcttatcgccattcagctattttttggcctggtggccaacgccgtgtggcctatttattacgcaatggcttcggactccgccgaagaacgcgccacctctaccgccaacggcattatcaccacggcgatgtttatcggcggcggcgtttcgccattgcttatgggctggctcatccagttcggtgggggatgggaaaatccggcgggttatatctacgccttctttaccatggcgggatgcgcgctgctggggatgttattgcagctcatgaccaccgataaaacgccgcgcaaagcgcattaa

SEQ ID NO: 175888 - DNA, 879 bp, Klebsiella oxytoca
atgcgcatcgaagtcttactggatttaaaaactcgactcggcgaaagcccggtctgggatgtcgaacagcagcgtctttggtgggtggacagcctcgacgggcgcctgttcgcctgtaacgcgcagggcggcgcgattaagagctgggacgtgcggcagaaaattggctcgttcgccctgcgccagaacggcgaaggcgcggtggtggcgctacagaatggcgtacatctgctcgacttcgccagcggcgagctgacgctgctgcaccatccggaagcggaccggccctttaaccggctcaacgacggcaaagtcgatcgtcagggacgttttctgttcggatcgatggatatgcgtgaagaggagccgagcggcgcgctatatcgcctggacgccgatctgtcactacacgtgctgaagaaaaatatcatcgtctctaacgccccctgctggagcccctccggcgagacgttctattttgccgatacctggacgggcgaaatctgcgcctgggactacaacaccgcgaccggcgatctctccggagaacgagtcttttgccgtgtcgatagcagcgaaggcggcgcggcggatggcgccaccgtggacagcgaaggctatctgtggaacgcgctggtctacgcgggcaagctggtgcgctacacgccggagggcaaggtcgatcgcatcattgagatgccggtgaaaaaagtgaccagcgttatgttcggcggcgaaaacctcgacgtgctctacgtcacctcaatggcgcagccgcccctctcgcgcttcccggaagataatcagctgcgcggcagcctgttcgccctgtacgacctgggcgtgaccggcgtagcggaacggcgttttgccggctaa

SEQ ID NO: 175889 - DNA, 1338 bp, Klebsiella oxytoca
atgtccgcaataaatgaaaaggcggtaaacgggacgccgctacagcgcacccataaaaagatctaccgccatttgatgccgctgcttatcgtggcgtacatcatcagctttattgatcgcaccaatattggcatggcgaaagcgaccatgtcggtggatatcggcctttccgcaaccgcattcggcctcggggccgggttgttttttctcacctacgcggtgctggagatccccagcaacctgtttttaacccggattggcgcgcggcgctggatcgcccgcatcatgatcacctgggggatcatctcctgcggtatggcgtttgtcaccgggcctacgtccttttacgtgatgcgccttttgctcggcgctgccgaagcggggctctatccgggcattatttactacctgaccctctggtttggccgcgaagagcgcgctaaagccaccggtctgttcctgctgggggtctgcctggccaacattatcggcgcgccgctgggcggtttgttattaagccttgatggaatgtccggctggcacggctggcagtggatgttctttatcgaagggctgcccgcgatagcgctggctttcgtcgtctggcgcagactgccggataaacccgccgacgcccgctggctggacagcgacgacgtgcaggctatcaacgcggtactggagaaagaagccgaggagacgcgccatacgccaagccgattttccctgaaaaccgcgctcaccacccgggtgtttttgttactggtgctgatttactttacccatcagttttcggtttacggcctgagttatttcctgccggggatcatcggtagctggggccagcttactccgctgcagatcggtctgctgaccgccatcccgtggatcgcagccgccgctggcgggatcctgctgccgcgtttcgcccggacggaaaagcgttcgcgcagcatgctgatggccggatatctggtcatggcgaccggcatggcgattggcgcgattgccggccacggcgtggcgctgcttggcttctcgctggccgccttcatgttcttcgccatgcaatccatcatttttaactggctcccctcgatcatgagcgggcatatgctggcgggcagcttcggcctgcttaactgcctcgggctgtgcgggggctttctcgggccgtttattctcggcgcgtttgaggatcgcaccggcgcggcaacgtccggcttatggttcgccgtcgcgctactgatcatcggcgcgctggtgtctctgttcatcaaaagttcgtcatcccctggcagagcatcggcaaaacaagccggcggcgaaaaagcgtaa

SEQ ID NO: 175890 - DNA, 1191 bp, Klebsiella oxytoca
atgacacaggctaatgatattgtggttgtcagcggcgtccgtaccgctattggcacgtttaacggcagtcttaagcatacccaccagcatgacctcggagcagcggtcattcgcgaagcgatcgcccgcgccggacttgcgccgcaggatatcgacgaaacgatcgtcggcaacgtcgggcaaatcgccgaaagcggttttatcgcccgcatctgccagctgcgggcggggatcccgcaggagagcaccgcgtattcggttaaccgccagtgcggctccggacttcaggccctggcggacggcatgatgcagctgcaaagcggccaggccgaggtggtcgtcgcctgcggaacagaaaatatgacccagctgccctactacctgcgcaaagcgcgcgatggctatcgcatgggccacggcgagctggaagatggactgatctccatcctcacctggccggaagggccttatcacaacggcatcacggcggaaaacgttgcgcaacgcttcggtattacccgtgaagcgatggacgatttcgcctggtcgagccagcagaaggcgctgaaggcgatcgctgaggatcgcttccgcgagcagattctggcccttgaggtgccggacggcaaaaaagcgacccgcctgttcgcgaccgatgaacacccgcgcgacaccccgcgcgaaaagctcgccgcgctgcgtccggcatttaaagccgacggcgtggtgacggcggccaactcctccggcattaacgacggcgcggccgcgctggtgatgatgacccgccagcaggcggaacagcgcggcttaactccgcgcatgcgcattcgcggctgggcggtcgccggctgcggcgcggagattatggggtttggcccctctcccgccacccgacgcctgatggaccgtctcaatatggatgttcacgccatcgatttaattgaactcaatgaggccttcgccgcccaggcgctggcggtgatgaacgatctgcgtctcgatccagcccgcgttaacgtcaacggcggcgcgatcgccctcggccacccggtgggcgccagcggtgcgatcctgccggtcaaactgatgtatgaaatggcgcgcagcggcgcgcgcaccggtctggtcaccatgtgcatcggcggcggccaggggatttctatgctgttcgagcgcgaaggcgcttag

SEQ ID NO: 175891 - DNA, 735 bp, Klebsiella oxytoca
atgaaacttgccagtaaaaccgccattgttaccggcgccgcgcgcggtatcggctttggcattgctcaggtgcttgcgcgggaaggcgcgcgagtgatcatcgccgatcgcgacgcgcacggcgaagccgccgccgcgtccctgcgcgaatcgggcgcacaggcgctgtttatcagctgcaatatcggtgaaaaagcgcaggtcgaagcgctgttttcccaggccgaagaggcgtttggcccggtggatattgtggtgaataacgccggaatcaaccgcgacgccatgctgcacaaactctccgaagcggactgggacacggtgatcgatatcaatctgaagggcacttttctctgtatgcagcaggccgccgtccgcatgcgcgagcgcggcgcgggccgcattatcaatatcgcttccgccagctggcttggcaacgtcggacaaaccaactattcggcgtcaaaagccggcgtggtgggaatgaccaaaaccgcctgccgcgaactggcgaaaaaaggcgtcacggttaacgccatctgcccgggctttatcgataccgatatgacgcgcggcgtcccggaaaacgtctggcaaatcatgatcaacaaaatccctgcgggctacgccggggaggcgaaagacgttggcgagtgcgtggcgtttctggcgtctgacggcgcgcgctatatcaacggtgaagtgattaacgtcggcggcggcatggtgctgtaa

SEQ ID NO: 175892 - DNA, 1602 bp, Klebsiella oxytoca
gtgagcagcaaatttatcgacgcccatcaagcggcgcagtgggtcgccagcggcgacaccgtctgcaccgtcgggatgacgcttatcggcgcggcggagtccattttaagcgctatcgaagcgcgctttctgaccgcgggcgaaccgcgcgacctgacgctgctgcatgccgctgggcaaagcgatcgccagcgcggcatccagcacttcgcccatccgggtatggtgacgcggcttatcggctcgcactggggcctggcgccgcgctggatggcgatgatcaacaacaacgaagtggaagcctggtgcctgccgcaggggcagatcgtccatctctatagcgcgatggccgccgggcttgcggggcggctttcccccgtcgggctcggtacctttgtcgatccgcgcatggaaggcgggcggatgaacgcccgcacccgcgaacggcccgatctgatcgagcacgtgacgtttcgcggcgacgaatatctgttctacccggccattccgctggacgtggtcattgtgcgcggcacccatgctgatgaagagggcaacctcacgaccgatgaagaggtgatgaagctggaagttctgcacgcggttctcgccgccagacgctatggggcgaaggtgctggcgcaggtgaaatatcgcgtggcgaaaggctcgctgcatccgaaaagcatcaccgttcccggcaacctgatcgacgccattgtggtgtgcgaagagccgcaagcggatcatcgccagacctccagctgggacttcgatccggcgctgtgcggcgatatccagctacccgccgcgcagaacgcgccgctgccgctcgacctgcgcaagcttatcggacgaattgcctgccgctatctgacgccaggctgcgtcatcaatctcggcaccggcattcccaacgatgttattggcgccatcattcacgaagaacggctcggcgagcaggtcaccatcaccgtggaatcagggatctacggcgggcagcaggcgggcggcgttgatttcggcattggtcgtaacctgagcgcgatgataagccaccaggatcaaatgctttattacaacggcgcgggggtcgatatcacctttatgggcgccggcgagatggacccgcacggccacgtcaacgccacgcggctcggcgcatcctgccccggcgcgggcggttttatcgatatcacccagaatgcccgccacgtcgtgttctgctcctcttttaccgccaaagggctggagatcgcctgtgaacaaggggccctgcatatccggcgcgaaggcgaggtacgtaaattcgtcgccggggttaatcagatttcttacaacggcgagctggcccgcgccaaaggacaaactatgcattacgtcactgagcgggcggttttcgaactacgcccggaggggccggtgctgacggaaatcgcccccggtatcgatcttgagcgcgacatcctggcgcatatggattttcgtccggcgatcgccgcggatcttcaggttatggacagtcgcttgttcaccccgcagccctgcggcctcgcggaacatctgtcccggaattcatcctctgactcacaaggaaattag

SEQ ID NO: 175893 - DNA, 1557 bp, Klebsiella oxytoca
atgagcagcacctccgccgacttccagaatctgtaccaggccctgagccactgcgccgcccgtagcccggatgccctggcgctggcgtttgaggatcggcgctatctgtaccgcgattttcacctgcgggtacagcgagcgatggcgcagcttgaccaggtctggtcgctgcgcaaaggcgaccgaatcctgctggcctgggggaatcatcccgctttttgcgaagtcctttttgccgcgcttggtctgggcatcgaagtggtgcctttcagcactaagcttaagcaggccgagagcgaggagctggtgggccatatcgccccgcgggtcgtgctgttcgatgcgaccgtacaggactggctgaaacacacccccgacgcgcgcgcggtttcactcagcgaatggcaggcgctctcacttcccgaaccgctgactcgccagccggtcccggttaaccgcgacgatacggcggtgatgatgttcacctccggtaccaccggagagccgaaaggggcgattatcacgcacaataacctgctctgcgcgattgacgcctatacgcaaaaactgaatctcaccgccgcggatagcaccattctggcggtacctatctatcacatcaccggcctgtcggcgctgctggcgctgtttattagcctcggcgcgagcatctggcttcagcaccggttcaacgccccgcaggtgatcaacaccctgcgcgagaagaacattacctttctgcacggctcgccaaccatttttatcctgctgtgccaggccgcgcgcgagcagagcgccagccatccgggcgattttcccgcgctacgcacgattgcctgcggcgcgggccacctgagcgacggactgatcaacgagttaaaaaccctgtttccgcatacggcgattcagccgatctacggtctcaccgaaacgacctcacccgcgacgatttttccgggcgacgtctggggcagcgataaatgcggcagttcgggccaggcgatccccggcctcgccattacgatccgcaacgatcgccagcagcccctccccgccgggcaaatcgggcatatctggctaaaaggcgatgtggtgatccgcgagtactggcagcacagcgaacgacgcccgagctgcgatgcgcagggctggttttgtaccggcgatctgggctatctcgacgacgaaggctggctgtacatcaaagaccgcagcaaggacatgatcaatcgcggcggagagaagatctactcgctggagctggagaacatcctctctacctatcggggagtgcgggaagttgccgtgatcccgacccccagcccggtctatggcgaagagccggtggcgtttatcgtgccggacggccagcaccacctgaccagcgaagagatcctcggctggctaaagatcaaaatcgcccgctttaagctgccggcgcgcattattttcacccgcgttttaccgcgtacccataacggaaaagtgagcaaacagcagctcaaaacgcgcctcgcggaatccatcatcacgctatcaacggaggataaaaagtga

SEQ ID NO: 175894 - DNA, 390 bp, Klebsiella oxytoca
atgcgcgaacttatcaacacgattgctcatattggctatcaggtcagtgacttaacgcgttcgcttgccttctatgaaccgctgggctttcagcgccagcagcggtttagcaagccgtcgccgcagggcactattgaagtcgcgttcctggaaatggcgggcgccgtcctcgagctgtatcagcttcccgcaggaacgccctttgacgctcctcgctgcggtatcgatcatctggcgctggaagtccgcgacctggatgcggtgcagcagcggctggcggcgctcggttatccgctcgatgaagggccgatagaagaagacaacgtgcgcttcctgcttattcgcggccccgatggcgaacggctcgagttcgatgcctttaagcgctaa

SEQ ID NO: 175895 - DNA, 1335 bp, Klebsiella oxytoca
atgagtacgctaatcacggataaggtcgataaagcggcggtccacaatgaaaaactggacaccagcgcgtatttaccgcataccccctggctgcaatttttactggtctgttgcctgtttgcgctatggggaatggcgggcaacctgaatgatattttgatcgcccagtttaaaaagggcttcgatttaacggatacccagacggcgctggtacagtcgatttttttcctcggctacttttttgtcgccctgcctgcggcggcgctgataaagcgttattcctataaagcggcgatcattattgggctgtgcctgtacgccctcggctgcttcctgttcgttccggccgcgcagatcatgacctacggcgcgttcctcgcctgcctgggggtgatcgcctgcggactctcttttctggaaacgtcggcaaacacctattcaagcctgctgggcccgattcaatcgtccacccagcgcattaacttttcgcagatcttcaactcgctgggcgtgatttccggcgtgctgattggccaggtgatggtgtttggcgagaacgatccgagccatgaacagctgctggcgatgcccgccgccgccgcggacgctgcgcgccatcaaatggtcggccaggtggtcggaccctatctgattatcggctccgtgctggtggtgctggcgctggtgttcgtgtttattaaattcccgtcgtgcaagggcacgccctctcagcagcagcaactcccgacggaaagcatgggacctacgctgaaacgcctgtttgctatcccgcgctttcgcctcgggatcctgtcgcagtttttgtacgtcggcgcccaggttggcgtatggagcttcacgattcgctttgtgcagctcgtgcagcagggcaccagcgagcactccgcgacttactggctgctggcttctctggtgatttacgcggtgggtaaaaccgtggccacctggttgatgaaccgcctgaacccggcgctgctgctcggtagctttgccctggccgccactgtccttttattggttgccgtattcagcagttcaatgctggcggtctatgcgctcattctggtcagcttctgtatggcgccatgctggccgacgaactttggtctggtcatcaaagggatggggaaagatacccagaccgcaggctcgatcgtggtgatgtcgattatcggcggggctgttattccgctggtgatgggcattatctcggatatgaacggcggcaatatgcaaatcgcctttatcgctccgctcctgtgctttgtgtatgtcgctttctacggtttctggtgcgtgcgtaagggggtataa

SEQ ID NO: 175896 - DNA, 942 bp, Klebsiella oxytoca
atgtcaggaaaagtctgtgtttttggttcattcaatttcgacatggttgccagggtggagcgctttccggtaccgggcgagtcgttagtggcctgcggaagtatgaccagcgccggggggaaaggggcgaaccaggccaccgccgcgctaaaagcgggggcgaatgtccactatatcggcaagattggcaatgataccttcggccattttgcccgccgtcatctgaaaggcgtgggcttcaatgccgtgacgctgctggtcgccgaagacgtccccaccggcaacgcgctgatttatgtggccggcaatgatgccgaaaacatgattgccgtcgaccccggcgcgaatatgacggtgaccgatgatgaaatcgccggctgcattcccgctatcggctgcgcggatgtggtgctggttcagctggagaacaatctttccgccattgagcaggtcgttgacgccggcaaagaggccggggccttcgtggtgctcaatcctgcgccctggcagcccgttgagcacgcctttctaagcaaagtggatctgctcacgccgaacgccacggaggccgggttaatgaccgggcgccgggttgactctctggcggccgcggccgaggccgccgatgcgctgcatgctcagggcgcgcgcaacgtcattatcaccctcggcgcaaagggcgccctgctgagcgagcagggcgtgaaatcccctattccgtgctttccttctcatccccgcgataccaccggcgcgggcgatgccttcaacggcgcgctggcggcgcgactggcctgcggcgagccgctgcatgccgcagcccgatttgcggcggcctacgccgccgtcagcgtcgaaaagcagggcgcatcatctttacctgagtaccaggaggcacgagaacggcttttgcgtgccgcctctgattatgaaatggcataa

SEQ ID NO: 175897 - DNA, 690 bp, Klebsiella oxytoca
atgcgttattacctttctccctcgctcatgtgtatggacatgatgaagctgacggaacagctgcactttttaaacggcaaagccgacaggctgcatgtcgacataatggacggccactatgtcaaaaatctggcgctatcggccagctttgtggcgcaaattcgtccctacacatcgcttcccatcgatgtccacctgatggtcgaagagcccgcctcgtttatcccgtcgctgatagaagccggcgctgacgctatttcactgcatccggaaaccatctgccgcgaagccttccggctcatcaatatgcttcgccaggcggggaaagaggtgggcgtggtgctcaatcccgccacgccggttgagagcatccagcactatctgcatctgctcgataaggtgacggtgatgaccgtcgatccaggctatgccggtcagccttttattcccgaaatgctcgccaaaatcgcgcagcttcatcagctaaaagagagcggcaacctcagcttcttgctggaagtcgacggctcatgcaatcgcaacacctaccgcgagctgctgggagccggggcgcagatattggtcatgggcagcagcggtttattccgcccggatatgccgcttgagcaggcctgggaaaaaatgtcccgcgatctgtccgccgcgctgcactcccccgagctcgtataa

SEQ ID NO: 175898 - DNA, 801 bp, Klebsiella oxytoca
atgttgccgctggaacgtcatcgtttgattgttgaactgctgggccaacgcggcgtgatgcgggtgaatgagattgcgcaagcgactcgggtctcaagggaaacgattcgccgcgatctgagcgagctggaacggaaagggatcttaaatcggagccacggcggagcgctggcggcggaaaacccgctgccgacgacccgagcggcagcgtccgccctgccggtcgaagatagccagggaagctttcagcaaagaacgctgctgcacagcgaaggcaaaatgcgcgttgcccgtaaagcgctgcagtttctccagccgggaaagaccatcgtcctggacggcagcagcaccagctggtttttggcccggcagatgccggagatggcgttaacggttattacgccatccatccgcatcttacaaaccctgatgagccgacgctcgttgcatctcgtggggctggggggcgacttctccccgaccgaagagtcgttcttcggtgaaactgcctcacgaacgctgcgcgagtatgccatcgatacgctctttttctcctgccagggtctggagcgcgatagcggcttatatgcgggtacggaagcccacgctgcgctgctgaaacagatgatgctggcggcccgtcagaccgtggcattggtcgacggcagcaagctggggcgaacaggcgtcgcgcgcatcggcggattgggcgagctggactgtctggtgaccgaaaagtttgtcgatccgctgctggaaaaagagatgacctggcataacgtcggcctacaaatcgcctga

SEQ ID NO: 175899 - DNA, 714 bp, Klebsiella oxytoca
atgaatgaaacaacccgtcgttttgcacgtttagttgacctgagcgcagtccaggccaccagtaccgaagcggacgttcgcgcctgcgccgagctggctgcccgatacaacattatttccgtccacgttctgccctgctggacgcgttttctcagtacgttgctgccgcagcagggcacgggagaggtgatgattggcgggccggtcggttttcccggcggcgggcatgccaccgacaccaaggttcaggaggtgcgccagctgattgccgacggcgcccgcgaagtggatatggtggtgaatatcggcaaagtgttatccggcgattatgactatgtgcgcgaagatttgcgccgcgtggtggaagccgccgccccggtaccggccaaagtgatcctcgaaacgcactatctcaatgaggagcagattcgccgcgtgtgcgatatcgccgtagaggtggggatgaagtgggtcaaaacctctaccggctgggcgcccaccggcgccacggtggaaaaagtcagcatcattgccgaccagcttaaaggccgaatcgatatcaaaggggccggaggcattcgcgatctggccacggtgcgcgcgctctaccagcttggcgtccgccgctttggcatgagccatggcgcagtaacaaaggtgctggctgaactggagcagcatccggaacgttttcccgagctgaacgccgattaa

SEQ ID NO: 175900 - DNA, 1506 bp, Klebsiella oxytoca
atgaaagataaaatactcacgattgatgttggcactggcagcacccgcgccgctattttgcgcattgacggcgcgatgatcggctttgcgcaaagagagtatgagcaaaccacgccgcgtgcgggctggtcagaacaggccccttctctatggtggcaggccgcctgcgactgcatacgcgaggtgctttaccgctatcctgaaacggctgcgcagattgcggttattggcgcctgcgggcaaatgcacggcaccgttctgctggacgatcgcggcgagctggtggaggacagggcgctgctgtggaatgataagcgcagccagccgcaggtggatgcctttagcgcgcgcgaagggcgggagaagtggctggcgcatttaaataatccacccgcggcggcgtggcccgctttcaaattagcctggtggcgtgaacatcacccggagcgctggccgcagctcgccaaagtgttaatgccgaaggactatattaatttcatgctgaccggcgccctggcgaccgactatagcgaggcgtcctgctatttcctgatggacagcgaaacccgcgcctggtcttcgcaagcctgcgaaacgtttggtctgcgggtcgatcagctaccggatcttaaactttccagcgacataatcggccaggtgaccccacgcgcagccggcctgacgggcctgccggcgggtatcccggtggttgccggtacgtcggatatggcggcctctttactgggttcgggagtgtatgaaccggggatggcgtccgactctaccggcacgtcgacgctgattacggtggtatcgccgcggccattgcgccatccgctggtcaataaccttcatctggctaacgcggcctggggcggatttacgattctcgacgccggcggcgatgccgtccgctgggcgcggctggcgctggccgataaccagattacgcatccgcagcttttgcaggaagcggcagcggtgccggcgggcgcggaagggctgctctttcttccctatctgaccggagaacgcctggccgaacacacgaactcgcgggcgcagtttttcggcctgcagcgtaagcatcgccgcggtcatttattccgcgcggtcctggaaggggtggcctttgcgtcctggcgcaatcttcgccagctgcaggcgtgcgggcaatatccgcaacaaatgatcgcttccggcggcggcgcgcgcagcccgctgtggcttgaaatcaaagccgcggcgtacaatcttccgatattatctacgcgcaatcaggagaatggcgtcaccggatgcggtattatcgccggggttggcgcggggctgtacgccgattttgccagcggcgtgaggcagacggtgcagttcgacaaactgatttcgccagatccccgtctgcgggattattaccacgcctgcagcgagctttttgatacgctgtaccggcaatccgccgccttatacgacaggctggatgcgctcagcgtgggacccgactga

SEQ ID NO: 175901 - DNA, 774 bp, Klebsiella oxytoca
atgtttgcagaagaaagacaggagaagttgctcagtattctcagggaaaaacgcaaagtggctgtttctgagatgtgtgacgtctttaatgtatctggcgccaccattcgtgccgatctccgccagctggaagaggaggggctgctgacccgtacccacggcggcgccgttcttcggacgcgggcgagctttgaacaggcgtcggacgcgcgcgaaattgttaacctcagcgcgaaagagcggatcggccagcgcgcggcggcgctggttgaggatggcgacattatcgtgctggataccggtaccacgactctgcatatcgcgcgcaatattcgtgaccgacagaacgttacggtggtcaccaatgattaccaaatcgcccgcgagctggaagctagcccctctattcaaaccattctgctgggtgggatcgtcaagaagggataccactgcgtggtggcgatcaacggacgttccatacttgataccctgaacgtcgataaagcgtttatgggcgccaattcgctgtcgctgaaacacggcgcctgcgtggccgatatcatgctggcagaaacgaaacgcggcatggttgaacacgccagtcaggtgattatcgtctgcgactacagcaagctgaataatacctcgcttgcccagtttaccgccgcgaatcgtattgataccgtggtggtggatcgtctgcctgatgacgttcaggcgtatcgtaatgccggcattcaggtgatctctctggatgaagaggcgcatctctag

SEQ ID NO: 175902 - DNA, 732 bp, Klebsiella oxytoca
atgaaaggcgcttatctcgcacttgcgctcggtttatttaccggttcggcgctggcggccgagcgggtgatctattttggcaccagcgcaacctatccgccgtttgaattcgtcgacggcaataatcaggtggcgggttttgatattgatatcgccagagcggtatgtaaggagctacaggctacctgcagcttcaccaatcagagttttgatagccttattccggcactgcgttttaagaaaatggatgcggcgatcgccgggatggatatcacgccgctgcgtgagaagcaggtggatttttcgacgccgtacttcaacgaactgtcggcggtggcggtcgtgcgcaaagataccttccacacctttgccgatttaaaaggcaagaagcttggtctggagaacggcacttcccatcagcgctaccttcaggatcgccatcgtgagattgcgtcgcaggcctatgacagctatctgaacgcgcttgtcgatctgcgtaacgggcggctggacggcgtgtttggcgacgtatcggcgatgaaaaactggttaaaggaaaacccggatttcgtcatcatggatgagcgcgccaccgacccggagtattacggcaaagggctgggcattgcgctgcgtaagggcaatccgctgctggcggagatcaaccaggcgctggagaaagtgatggcttcccctgaatacagcgaaattaaagatcgctggattaaataa

SEQ ID NO: 175903 - DNA, 1551 bp, Klebsiella oxytoca
atgcattcctctgttaataaaaatgaatctcggacctttttcggtcatccttacccgctcggttcgctgtttttcaccgaaatgtgggaacggttctcgttttacggcattcgtccattactgatcctgtttatggcggccaccgtctatgacggcgggatggggctggcgcgtgagaacgcttcggccatcgtcgggatttttgccgggaccatgtatcttgccgcgctgcccggcggctggctggcggacaactggctcgggcaacaaaaagcggtctggtatggttcgatactgatcgcgctgggccatctctccatcgcgctgtcggcggtgatgggcgatagcctgttctttatcggcctgatgtttatcgtgctcggttccggcctgttcaaaacctgtatttcggtgatggttggtacgctgtacaagaaaggcgatgcgcgccgcgatggcggcttctcgctgttctacatgggcatcaacatgggctcgtttatcgccccgctgatctccggctggctgatcaaatcccacggctggcactggggctttggcatcggcggcatcgggatgctggtcgcgctgataatcttccgcgtctttgccgtcccggcgatgaaacgctatgacagcgaagtcggcctcgattccacctggaacagcccggtagtgaaacgaaacggcgtcggcgcatggctactggcgctgacggtaggcgtagcggttattgtcgcgttgattgcccagggcgttatcgtgattaacccggtggcggtggccagcgtgctggtctacgtgattgcggcgtcggtggtgctctattttatctacctgttcgtcttcgccgggctgagccgtaaagagcgcgctcgcctgctggtatgctttatcctgctgatttcggcggcctttttctggtcagcgtttgagcagaaaccgacctcgtttaacctgttcgctaacgactataccaaccgtacgatcggctcgttcgagatcccggcggtgtggttccagtcgattaacgccctgtttatcattctgctggcgccggtatttagctgggcctggcctgcgctggcgcgcaaaaacgtacgtccgagcagcatcaccaagtttgttatcggtattttgtgcgcggcggcgggctttggcctgatgatgctggcggcgcaaaatgtcctgagcaacaacggcgcgggcgtttcgccgatgtggctggtgggcagcattctgatgctgacgctgggcgagctgtgcctcagtccgattggtctcgcgaccatgactctgctggcgccggaaagaatgcgcggccagatgatggggctgtggttctgcgccagcgccctggggaacctggctgcgggtctgattggcggtcacgtgaaggccgatcagctggatatgctgcctgacctgtttgcacgctgctccattgcgctgctgatctgcgccgcggtgctgtgcctgctgattgttccggtgcgccggatgctggaaaacaccaaatccagcgagcaaaaaccggcggcgaatgcctga

SEQ ID NO: 175904 - DNA, 1056 bp, Klebsiella oxytoca
atgcaaagcttaacctctctactgggcgcgatccctgcgcctgatgaaaacgcgatggcgcgcgcccggcttcatattgatggtctgctgaaaccgcccggaagccttggacgccttgaagatcttgccgtgcagctggcgggtatgcccggtcttgaaggcgtgccgcaggtgaaaaaaaaggcgctgctggtgatgtgcgccgaccacggcgtgtgggacgaaggggtcgccatttcgccaaaagcggtgaccgcgattcaggcggcgaatatgacgctgggcaaaaccggcgtttgcgtactggcggcgcaggcgggcgcgaaggtgcacgtgattgatgttggaatcgatgccgagctgataccgggcgtcatcaacatgcgcgtggcgcgcggctgcggcaatatcgccgttggtccggcaatgcgccgcagccaggcggaagagctgctgctggaggtgatgcgctatacccgggggctggcggaggatggcgtcacgctgtttggcgtcggggagctcggaatggccaataccaccccggcggcggcaatcgtcagcgtcctgaccggcagcgatgcccaggaggtggtgggaattggcgctaatctgccgttggcgaaggttggcaataaagttgaggtggtacgacgggccatcgccgttaaccgccccgatccgcatgatggtctggacgtgctggcaaaagtgggcggttttgatttattggggatgacgggtgtgatgctgggcgcggcctcctgcggtctgccggtggtgctcgatggcttcctctcctacgcagcggcgctggcggcgtgccgaattgcgccgcaggtgaaaccctatcttatcccgtcgcactattcggcggagaagggggcgcgtacggcgctgatgcatctcgagctggagccctatctgaatatgggaatgcgtttgggagaaggcagcggcgcggcgctggcgatgccgatcgttgaagcggcctgcgcgatgtatcacgaaatggggatgctggcggcgagcaatattgtgttgccgaagggctga

SEQ ID NO: 175905 - DNA, 546 bp, Klebsiella oxytoca
atgctgactttagtgaccggcggggcgcgcagcggtaaaagccgccatgccgaagcgctgatcgcccatgcgccgcaggtactgtatatcgccacctcgcaggtctttgatgacgagatggcggcgaggatccagcaccaccgcgacggcaggcccgcgcactggcgcaccgccgagcgctggcagcagcttgatgagctgatcaccccggatatcgccccagaggaggcgattttgctggaatgcatcaccaccatggtgaccaacctgctgtttgcgctggggggcgacagctcgccggacggctgggattatgcggcgatggagcgggcgatcgacgccgaaatcgcggtactgattgccgcctgccagcgctgcccggcccgcgtggtgctggtgaccaacgaggtagggatggggattgtgccggaaaaccgtcttgcccgccatttccgcgatatcgccggacgcgtcaaccagcgccttgcggcggcggcagacgaggtgtggctggtggtgtcgggcattggcgtaaaaatcaaatag

SEQ ID NO: 175906 - DNA, 1524 bp, Klebsiella oxytoca
atgacgctggcaattatgttacagggcaccgcttctgacgtcggcaaaagcgtgctggtcgcggggctgtgccgcatcttttatcaggacgggcagcgcaccgcgccgtttaaatcgcagaatatggcgcttaattccggtatcacgccggatggcaaagagatgggccgcgcgcagattttccaggccgaagcggcgggtattatcccggatgtgcgcatgaacccggtgctgcttaagccaaccagcgaccgcaaagcgcaggtggtgctgatgggcaaggtggcgaccgatatggacgcggtgagctatcacgaatataaaccgcgcctgcgggaacagatcctcgcggtttataacagcctggccgccgaacatgatgtgctggtgctggaaggggcaggaagtccggcggagatcaatctgcgcgatcgcgacatcgtcaatatgggcatggccgagatggcccagtgcccggtgatcctcgtggcggatatcgatcgcggcggcgtattcgcctctatctacggcacgctcgcgctgctgcacgatcgcgagcgcgcgcgggtcaagggcgtgattattaataaatttcgcggcgacgtggcgctgctgtattccgggatcgagcagatagaagcgctcaccggcgtcccggtgctcggcgtcatgccgtggctggatgtcgatcttgaagatgaggacggcgtcgcgctgcaaaaagggaaatatctgcgcaccgacaggcgcgatattgagattgccgtgattcaggtgccgcacatctccaattttaccgatttcaacgcgctggcggcgcagccggacgtccgcgtccgctatgttcgccagccgcaggagctggtgggcgtggatatggtgatcctgccgggcagtaaaaatacgctcggcgacctcggctggctgcgcgagagcggcatggcgcatgcggtactgcaggcccggcgtcagggcgtaccggtgctggggatctgcggcggctatcagatgctcggcgaaaccattatcgatgaggtagagtcggggcttggcacgcagccggggctggggttgctaaataccgtcacccactttgcgcaaagcaagacgacgacccaggtaacggcgaccctggcaacagcgctgccggcgtggctggcggcgacggcggggctgaccgtaagcggctacgaaattcatatgggcgaaaccgagctgcgcgacggctgccgttcgctgatgcaattacataaaggcagcctgagcgtggcggacggcgcggtcagcgatgacggcctggcgtttggcacctatctgcacggcctgttcgatagcgatgcatttacccgcgcgctggttaacggcctgcgccagcgtaaagggctggcggcgctggatagcgatttcgagtatgcgcagtataaatcgcgccagttcgatctgctggcggacgcgatgcgtcagcatattgatatcgaaaaaatctacgccatcatgcgccaacatcaggagcccgtatgctga

SEQ ID NO: 175907 - DNA, 816 bp, Klebsiella oxytoca
atgcttgccacgaccgatctctggtttcgctatcaggacgagccggtgctgaaggggctgacgctggatttttcccatcacgccgtgaccggactggtaggggcgaacggctgcggaaaatccacgctgtttatgaacctgagcggtctgctgcgcccgcagagcggggcggtgctatggcaagaaaaaccgctggactacagcaagcgcggcctgctggcgctgcgtcagcaggtggcgaccgttttccaggacccggaccagcagattttctataccgatatcgacagcgatatcgcctttagcctgcggaacctgggcgtagcggaagaggaaattgcccgccgggtggacgatgccctgactctcgtcgatgcccaggggtttcgtcaccagccgattcagtgcctgagccacgggcagaaaaagcgcgtggcgatagccggcgcgctggtgctgcaggcgcgctatttactgctcgacgagccgacggcgggtctcgatccttcgggacgcgcgcagatgatcgacatcattaagcgtattgccgatcggggcaaccacgtggcgatctccagccacgatatcgatctgatctatgaaatcagcgatgcggtttacgtgttacgccgcggcgaagtgctggcgcacggcgaccccggggaggtgtttgcccgcagcgaactgatggcccaggccgggctcacccagccgtggctggtgaaactgcacgcgcagctcgggctgccgctgtgtaaaaccgaagaagaattttttacgcggatgcgaagcaacgcgatgaaggaggcgtcatga

SEQ ID NO: 175908 - DNA, 678 bp, Klebsiella oxytoca
atgaccgggtttgaccgactcagctatcagagccgctggtttcacgtcgcaccggagcgcaagttcctgttctggctgctgctgatggtgctggcttttaccctgcctccgttggggcagggtatcgaaatggcgctgattgccgccttaacctgctggctgctgcgggtctcgccgtggcgctggtgccgttggatggcgctgccgtttggcttcctgctgatcggtgtgctgaccattctgttcagcgttagccgcaatccgcaggatctgctggtgagcctgccgctgggcagcgtctggctgggcatgacgtcggaggggttgacgaccgccaatcagaccttctggcgcagcctggcggcgctggcgtccaccttctggctggtgctgaatctgccgttcccgcagcttattttgctgctcaagcgcggacgggtaccgcggctgctgaccgagcaaatcctgctgacctggcgctttatttttattcttttagacgaagcgctggcgattcaccgtgcgcaaacattacgttttggctaccgtagcgtgccgaagggctatcgttcgctggcgatgctggtaggactgctgtttacccgggtgatgattcgctaccagcagatgagcaccacgctggatatcaaactgtatcagggtgattttcacctttaa

SEQ ID NO: 175909 - DNA, 282 bp, Klebsiella oxytoca
atgaaaaagacgctgatattgttcgccatggtggtggcgctggtgatcctgccgttctttgtcaatcacggcggcgaattcggcggttcagacggtgaggcggagagccagattcaggtggtcgcgccgcattatgagccgtggttccagccgctgtacgaaccggctagcggagaaattgagagcctgctgtttacgcttcagggctctctcggcgcggcggtaattttctatattctgggctacagcaaaggcagacagcgccgtgatgaccgggtttga

SEQ ID NO: 175910 - DNA, 738 bp, Klebsiella oxytoca
atgaaacttgaacaacagctaaaacagctgtctttcagcgggttagctgcggcgctattgctgatagtggttcccgaaaaggctttcgcgatgcacatcatggaggggtttttaccgccgatgtgggccctggcatggtggctgctgtttttaccctgcctgtggtacgggctggtgcgcctgcgccgcattgtgcaggaagataacaatcagaaggtgctgctggcgctgtgcggggcgtttatttttgtcctctcggcgctgaaaattccttccgtaaccggcagctgttcccacccgaccggcgtcggcctggcggtgattctcttcgggcctggcgtggtggcgatccttggcgccatcgtactgctgttccaggcgctgctgctggcgcacggcgggctgacgacgctcggcgcgaacgggatgtcgatggcggtcatcgggccggtggtcggctatatggtgtggaaaatggcctgccgcgcgggcattcgccgcgacgtcggggtgtttctctgcgcgatgctggcggatctggtgacctactttgtcacctccgtacagctcggcgtggcctttccggatcccgccgccggcgcgaccggatcgatcgtcaagtttatggggatcttctgcctgacgcagatcccgatcgccattgctgaagggctgttaaccgtcatgatctacgaccagttgaccaaacgtcagctgattaccgcacaggggcattaa

SEQ ID NO: 175911 - DNA, 714 bp, Klebsiella oxytoca
atgagcggcaaactatatgccttaagtaccggccctggcgccgccgacctgatcaccgtgcgcgcggcgcgggtgctgggcacgctggacattctctacgcgcccgccggacgtaaaggcggcgacagcctcgcgctctccatcgtgcgcgagtatatcggcgaacggaccgaagtacgctgctgccatttcccgatgagcgccgacagcgcggaaaaagaggcggtgtgggatgaggttgccgccgcgctggttcaggaagtggaagcgggcaagcaggtcggctttattaccctcggcgacgccatgctgttcagcacctgggtgttcttactccagcgtatcggctgcccggagtggctggagattgttcccggcgtcacctcttttgccgccattgccgcgcgttcaaaaacgccgctggccatggagcagcaatcgctggcggtgatctcctgcaccgcgccggaaacggaaatcgagcaggcgctgcgccagcatgaaagcctggtgctgatgaaagtgtacgggcggtttccccgcatcaaagcgctgctggcgaaaaacggtctgctggatgccgcgctgatgatgtctgaagccacgctgccgggcgagcagtgctggcgccatctcaatgacgtcagcgacgaccagccgctgccctatttctcgaccattctggtcaataaacagtgggagtatgcagaatga

SEQ ID NO: 175912 - DNA, 795 bp, Klebsiella oxytoca
atgaaaaaagcgcttctggtggtcagttttggcaccagctatcccgacacctgtgaaaagaacatcgtcgcctgcgagcgcgagctggcggccagctgtccggaccgcgacacgtttcgcgccttcacctccgggatgattatccgcaagctcaaacagcgcgacggtatcgagattgatacgccgctgcaggcattgcagaagctggccgagcagggctaccaggatgtggcgattcagtcgctgcacattatcaacggcgatgagtatgaaaagatcgtccgcgaagtgcaaagcctgcgcccgctgttcctccgcctgacgctgggggcgccgctgctgagcagccataacgattatgtccagctgatgcaggcgctgcgccagcagatgccgccgcttgccgccgatgaaacggtggtctttatgggccacggcgccagccatcacgctttcgccgcctacgcctgtctggatcatatgatgacggcgaagggatttccggcgcgggtcggcgcggtcgagagctatccggaagtcgatattcttatcgatagcctgcgccagcagggggtgaagggcgtacacctgatgccgctgatgctggtggccggcgatcacgccattaacgatatggcctcggacgaagaggactcctggaaaacgctgttcaacgccgccggtatcacggcgacgccctggctgaacgggctgggagagaatccggcggtgcgcgcaatgttcgtcgctcacctgcagcaggcgctgagcctggcaatggaggaggcggcatga

SEQ ID NO: 175913 - DNA, 786 bp, Klebsiella oxytoca
gtgagccacggcgaggtgctggtgatgggcggaaccagcgacgcgagggcgctgtgtcagcagcttgacgcggcgcaggtcccctacaccctgtcggtggcgacgcccaccggtcagcagctggcgggggatattcgcggccaggtgcgctgcgggcgcctcgagctggaggagatgattgcctggctgaaggctaaccggacccgctgggtgatcgatgcttcgcacccctacgccgaagcggtaagccgcaatatcgtccgggcctgtgaaaccgccggcgtgctgctgagccgctatcagcgcccagagcagctgagcggcctgacgcatccgctgctctataccgtggagagcattgaacaagcctgcgaggtggcgcggcgtttcggccagcgcgtgctgctcaccacgggaagtaaagatctggcgcgctggcgggcgggattaggtgacaaaacgctgctggcccgggtgttgccggtcgccgatgtcatcgcgcaatgcgccgcgctggggtttggcgttggcgagattttcgccctgtgcgggccgttcagcgccgcgttcaacgccgctttttaccgccagtgccgggccgacgtggtgatcaccaaagcctccggcgccgaaggcggctatcaggaaaaagtacaaccctgtctggatgccggtatcccctgcatcgtgattacgcgcccggcgccgctggtgacgggtgaagagttactggaaagtcaggctgcctttgcccggcgcttatcgcgctggctggccgctgcttaa

SEQ ID NO: 175914 - DNA, 726 bp, Klebsiella oxytoca
atgttaagcgtaatcggaatcggccctggctcgcagtccatgatgaccatggaggccattgaagcgctgcaggcggcggaaatcgtcgttggctataagacctacacgcacctggtgaaagcctttaccggcgataagcaggtgattaaaaccggaatgtgcaaagagattgagcgctgccaggcggcgattgagctggcgcaggccggacataacgtggcgctgatcagcagcggcgatgccggtatttacggcatggccggactggtgcttgaactggtcagcaagcagaagctggatgtggaagtccgcctgatcccggggatgaccgccagcattgccgccgcctcgctgctgggcgcgccgctgatgcacgacttctgccatatcagcctcagcgacctgctgactccgtggccggtgattgaaaaacgcattgtcgccgccggggaagccgacttcgtcatctgtttttataatccgcgcagccgcggccgcgagggccatctggcgcgcgcctttgagctgctgtcggccagtaaaagcgcgcagacccctgtgggagtcgtgaaatccgccggacgtaaaaaacaggagaaatggctgaccaccctgggggagatggattttgcaccggtcgatatgaccagcctggtgatcgtcggcaacaaagcgacgtatatccaggatggcctgatgatcacgccgcgaggctacgtgctgtga

SEQ ID NO: 175915 - DNA, 1056 bp, Klebsiella oxytoca
atgaataccgtaaagcctgaatcaatcgcacttttctgcctgacgccagggggcgttcggctggcgaaacggctggcggcgatgctgccgttaacctgctttaccagcgagaagctgctggaagagggttttctcccctttgaaaacggttttgccagcgccgcgcgcgaggccttcagcagctattcggcgctgattttcatcggcgccaccgggatcgcggtacgcgtgctggccccgctggtcaatgataagttcagcgatccggccgtggtggtgatcgacgaacgtggccagcacgtcattagcctgctttccggccatgcggggggcgcgaatgccctcagccgctatctggccgggatgctcggcgccgacccggtgatcaccaccgccaccgacgtcaacgagttggcggccctggatacgctggcattccagcttaatgcccggatgagcgacttccgcgcggcggtgaaaaccgtcaaccagatgctggtcagccatcagcgcgtcggtctgtggtgggacgaagagctggatgaagacgtccgccactgcgaccggcgggggtttatcaccgtgaccgatctgcaccagcttcccgagctggatgcgctggtctgcgtcacgctgcgcaacgaactgccgccgatcgccgtgccgcactggaagctggtgccgcagcgggtggtcgccggaattggctgccgccgcgatacgccattcccgctattagcggcgctgctggcgcgccagcttgaggcgcagcgcctggatccgctggcgctgaaagctatcggcagcgtcacgctgaagaagcacgagcaggggctgattcagctggcttcctgctgtcgcgtaccgttcgaaacctttcccgctgatgccctgcgcgagcatgagcatcactttcccgcttcatcgttcgtcagaaaaaccgtcggcgtggggagcgtatccggtccggcggcctggctgctgagccatgggcaactgttaggcgaaaccctgcgcgaacagggcgtcactattactttgggagtttcacactga

SEQ ID NO: 175916 - DNA, 774 bp, Klebsiella oxytoca
atggctgagacatttgacccccgtagtgtgtggttcgttggcgcagggccgggcgaccgtgagctaattaccctcaagggctaccgcttgctgcagcaggcccaggtggtgatctacgccgggtcgctgataaacaccgagctgctggagtattgtccgcccggtgccgagtgtcacgacagcgccgaactgcatctggagcaaattctcgacctgatggaagccggcgttaaagccgggaaaacggtagtgcgtttacagaccggggacgtgtcgctgtatggctcggtccgcgagcagggtgaagagctgaccaaacgcggtatcgactggcaggtggtgccgggcgtcagcgcgtttctgggcgcggcggcggagctgggcgtcgagtacaccgtgccggaagtctcccagagcctgatcatcacccgccttgaagggcgcacgccggtgccggagcgcgagcagcttgaatcatttgccagccaccagacttcaatggcgatttacctttccgtgcagcgcattcaccgggtagcggagcgcctgattgaaggcggctatccggcaaccacgccggtggcggtgatctataaagcgacctggccggaaagccagaccgtacgcggtacgctggcggatatcggcgacaaggtacgcgaggcggggatccgcaaaacggcgctcattctggtcgggaatttcctgggctctgagtatcactactcaaaactctacgcggcggactttagccatgaataccgtaaagcctga

SEQ ID NO: 175917 - DNA, 570 bp, Klebsiella oxytoca
atgaaagatgagctttttctgcgcggcgagaaggtgccgatgaccaaagaagcggttcgcgcgctggcgctggccaaacttgaactgcaccgggcaagccacctgattgatatcggcgccggtaccggcagcgtgtcgattgaggcggcgctgcagtatccctctttgcaggtaaccgccatcgaacgcaaccccgcggctctccggctgctggacgaaaatcgccagcatttcacctgcggcaatattgagatcctgcccggtgaagcgccgatggtgattaccgagcgggccgacgccatttttatgggcggcagcggcggccgtctcgacgaactgattgactggtcgtggcagcagctctatcccggcggccgtctggtgatgacttttatcctgcaggagaacctgaacgcggctctcgactatctgcagcagcgggggattacacagattgattgcctgctgctgaacgtttcatcgctgaccgcgctgggcagcggccactatttcaaaccgaataatcccgtttttgttatcgcctgtcagaaggaagaaaaccatggctga

SEQ ID NO: 175918 - DNA, 606 bp, Klebsiella oxytoca
atgttaacggtggttggcatggggccgtcaggcctgcatttgatgacgccggcggcgcaagatgcggtcgccagtgcggatgcgctggtaggcggtaagcggcatttgcagcagttccccggatttcgcggcgaacggtttgcgctgggcgccaatattgccgaactgctggtctggctcggcgaacgcgcagcgcagaaggtggtggtgctggcctcaggcgacccgctcttttacgggatcggcacgcggctgatagcccactttggcatcgatcgcgtgcgcattattcccggtatcagcgcggtgcagtatctctgcgcgaaggccggtatcgatatgaacgatatctggctgaccagcagccacgggcgagacgtctgttttgatgagctggcgcgtcagcgcaaggtggcgatggtgaccgacgggcgctgcgggccgcgggaaatcgccgcccagctggcggctcggggtaaagggtatcgctggatggtgattggcgaaaatctggcgatggataacgagcggatccactggctaccggtcagtgaggtcgatgccgaatatgagatgaacgcggtggtgatcctcgatgaaagatga

SEQ ID NO: 175919 - DNA, 1140 bp, Klebsiella oxytoca
atgagcgagcaatccttcgacgccccggtgtggcacaacggcaaggcgctgcgtaaaggctataccaccggatcctgcgcgacggcggcggcaaaggtcgcggcgctgatggtgatgcgccagcacctcattcatcaggtctccattgtgactccttccggcgtcaccctgtgtcttaacgtcgaatcaccgcacgtcgaagggcagcaggcgatcgccgcgattcgtaaagacggcggcgatgacgttgacgccacccacggcatgctgattttcgcccgcgtgacgctcgacgactccggcgagataaccctgcgcggcggcgaaggtatcggcaccatcacccgtaaaggaatcggcctgcctatcggcagcccggcgattaatcgcaccccgcgccacaccattgagtcggcggtgcgcgaagcgataggcccgtcgcgtggggcgacggtagagattttcgccccggagggcgaggagcgggcgcagaaaacctataactcgcggctggggatcctgggtggtatctcgattatcggcaccaccggtatcgtgacgccgatgtcggaagagagctggaagcgttcgctgtcgctggagctggaaattaagcgcgcggcggggctggagcgggtggtgctggtgccgggcaaccacggtgaacgcttcgtacgcgagcagatgggcatcgactcgcaggtggtggtcaccatgagcaacttcgtcggctacatgattgaagaggccgtccgcctcgggttccgtcagattgtgctgattggccatcccggcaagctgattaaagtcgccgccgggatcttccatacccacagccatatcgccgatgcgcgcatggaaacgctggtcgcgcatctggcgctgttgggggcgccgctggcgttgctgcaactggtgagcgaatgcgataccaccgaagcggcgatggagcacattgacgcgtatggttttcagcctatctataaccatcttgctgaacgcatctgcctgcgggtgatgcagatgctgcgttttaccaaaacgccgcccgtctgcgacgccatcatgttctcctttgataacaaggtcctcggcagcaatcgcccggtggccgagattgcgcgggagatgtcatgttaa

SEQ ID NO: 175920 - DNA, 633 bp, Klebsiella oxytoca
atgcactatatccagcaaccgcaggcgattgaggcgaaaagcttcgacattattggcgacattattgcgcagacccgcccggactaccgctttgccagcccgctacacgaagccattatcaagcgggtgatccacaccaccgccgattttgactggctggatatcctgtggttttctcccgacgtgcttcctcgcttaagcgccgccctgagccagccctgcacgctttataccgataccaccatggccctttccgggatcaataaaactctgctggcgaaattcggcggcgagtgccgctgctatatcagcgatccgcgcgtggtggcggaggccaaagcgcaggggatgacccgctcgatggcggcggtcgatattgcggttgccgaggagggcgagaaggtgtttgttttcggcaatgcgcccaccgcgctgtttcgtctgctggagcatgatgtcgcggtcaacggcgtgattggcgtgccggtcggcttcgtcggcgcggcggagtcgaaagacgccctgacgcagagcggcctgccgggcattgccgcgctgggtcgtaaaggcggcagcaacgtcgccgccgctatcgtcaacgccattttataccacttacagggggcgagatga

SEQ ID NO: 175921 - DNA, 960 bp, Klebsiella oxytoca
atgacgctactggcatggggcgttgcctggcttctcgattttatcatcggcgatccgcaaagctggccgcatccggtgcgctggattggcaacctgatcgccgccgttcagcgcggcgtgcgccgctattgccgtagcgatgttgccttgcgcatcggcggcggggtgatgtggatagttgtagtcggactgacgtggggcgtctgctggggcgtgctgacgctggcgcagaggattcatccgtggcttggctggctggttgaggtctggatgattttcaccgtgctggccggacgctgtctggcgcagtcggcgcgggacgtcgagcgaccgctgcgcgcgggggatctggcggaaagccgtagcaagctgtcatggattgtcgggcgcgacacgacgcagcttgcgccgcagcagattaatcgcgcggttgttgagacggtggcggaaaacaccgttgacgggattatcgcgccgctcttcttcctgctgctcggcggcgcgccgctggcgatggcctataaagcggtcaacaccctggattcgatggtcggctataagcacgaaaaataccgcgccatcggcatggttagcgcccgccttgatgatgtcgccaactttatccccgctcgcctgagctggctgcttatcagcctcgccgctctcctctgtggtgaagcgagtggccgcgcgttgcgcatcggctggcgcgatcgctacaaccacagcagcccaaactgcggatggtcggaggccgccgtcgccggggcgctcggcatccggcttggcggcactaacgattactttggtcagcgcgtggagaagccgtggattggcgaggcgacgcgcgacgtttccgtagacgatatttcccgaacgattcgactgatgtgggtgtcttcgaccctggcgctggcgctgtttatggcgatccggttctggctggtcggcgcagcctga

SEQ ID NO: 175922 - DNA, 1380 bp, Klebsiella oxytoca
atggcagccaggcagcacgcattcattcttgcaggtaccggcagcggttgtggtaaaactacggtcacgcttggcctgctcagcctgttgaagcagcgcggcatgcgggttcagccctgcaaagtcggcccggactacctcgacaccggctggcacaccgccgtcagcggcgtcgcttcccgcaacctcgacagctttatgctcccggagccggtgcttaacgcgctattttgcgaacagatgcagcgggcggatatcgcggtcattgagggcgtgatggggctgtatgacggcttcggtaccgaccctggctactgcagcaccgccgcgatggctaaacagctcggctgtccggtcattttgctggtagatggcaaagcggtttccacctccatcgccgccacggtgatgggatttcaacacttcgaccccagtcttaacattgccggcgttatcgtcaatcgcgtcaacagcgaaagccattatcagcttctcaaaggcgccattgaacgctactgcgagctgccggtgctcggctacgtaccgcgagtggaaggggtggcgttacccgaacgccatctgggactggttaccgcccgcgagtcgctggttaaccagcagccgtggcgcgattttgcccaaacgctggcgcaaacgctggatattgaacagcttcttaccctcagccagctctccatcctacccgccggggagtggccgacgctgccgtcccctgatgctggcgcgggcctgacgctggcgctggcggacgacgaggccttcaacttttactacccggataacctctcgctgcttgaacgctgcggagtgaatatcgtgcgcttcagcccgctgcacgatagcgagcttccaccgtgccagatgatttggctcggcggcggctatccggaaattcatgctgccgcgctggcggccaatacgccgatgctggcgcagctgcaggaggcgcaccggcgcggggtggcgatttacgccgaatgcggcggtctgatatatctcggcagctccctggaagacgccaacggtgatatctacccgatggccaaccttattcccggccatagcaaaatgggcaaacggcttacccgctttggctactgcgaagcgcgagctatgcgcaaaacgctgctggcggcgccgggcgaaaccctgcgcggacatgaatttcactactcggattttactcccgagtccccggcggttctggcctgccgcaaggtccgcgacggtatgacccttcagcagtggtccggcggctggcaggtgggcaacgcgttcgccagctatctgcacctgcactttgcgcagcgccccaccatgctcaaccactggctggctgcggcaaggagcgcgctatga

SEQ ID NO: 175923 - DNA, 912 bp, Klebsiella oxytoca
atgatttctgcgagcacactgaactcagaactcattaataaaatcgcacaggattttgcgcaggccaccagtctggcggtggtggtcgtcaatattcatggtgatgaaatatctgaactgtttaacttcacacctttttgccagctgatgcgccagcatccccagcacagcacccgctgtcgaatgagcgaccgctgcggcgggcttgaggcgtctaaaaccgatcagctctgtatctaccgctgccacgccgggttaaccgatttctccattcctctggtcattgccgggcaccttgtgggctttgtgctttgcggccaggtgcgcttaagcaacgatgttgaactggtcgatatcctcaacgtggatgaccgctggcaggccgaccctgagctgcttaaagcgtttcgcgacgtgccggaaatggactactccagagtgattgcttctgctgatttactgaagctcatcgtcgaaaactgccttaaaaaacagctcaactttgtggtgattaaagataatccccagcagccggaacctgcgcgcgccagccgcgttgccagccctcatgacagcaaaatgaagaaggcgctgcgctacattgatgcccatttatccgacgagcttcgcctggaagacgtcgccgctcacgtttatctcagcccctattacttcagtaagctgttcaaaaaatatcagggtattggctttaatgcctgggtgaaccatcagcggatggtgagcgccaaagagctgctttgccacagcgactggagcatcgccagcattgcgcggaatttaggattttcgcaaaccagttatttttgcaaagtttttcgccaggcctatcaggtgactccgcaggcctatcgccagcaaattaacgccagatcacaaactgagccattttaa

SEQ ID NO: 175924 - DNA, 801 bp, Klebsiella oxytoca
atgaatgattcgttaaaagcgcaatgtaccgccgagtttttgggcaccgggctatttttgtttttcggcatcggctgcctgagcgcgttaaaggtggcgggagccagcctcggactgtgggagatatgcattatctgggggttggggatctcgcttgccgtgtatctgacttcggggatctccggcgggcatctcaacccggcggtgaccgtcgctttatggctgtttgcctgctttcccggacgaaaagttttcccctatatcgtttcacaagttgccggcgcctttggcggcgcggtgctggcctatgtgctgtacagcacgatgtttaccgagtttgaatccgcccaccatatcgcgcgcggcagcgtagagagcctgcagctggcgagtattttcagcacctacccggcggcatcgctgagcatctggcatgcggcgctggttgaagtggtgatcacctccatgctgatggggatgattatggcgctgaccgacgacggcaacggcgtaccgaaagggccgctggccccgctgctgatcggcctgctggtggcggtaattggcgcttcaaccgggccgctgaccggctttgcgatgaatccggcgcgtgattttgggccgaagctgtttacgtggatggcgggttggggcgatatcgcgatgaccggcggaagggatattccgtactttattgtgccgattattgcgccactgatcggcgcttgtctcggcgcggccatctatcgttatctgattggtaataatctaccgtgtaatacctgtaaattagaggattaa

SEQ ID NO: 175925 - DNA, 285 bp, Klebsiella oxytoca
atgcaacaagaagcactaggaatggtagaaaccaaaggcttaaccgcagccatagaggccgctgatgcaatggttaagtcagccaatgtgatgttagtgggctatgaaaagattggctccgggctggtaaccgtcatcgtgcgcggcgatgttggcgcggtaaaagcggccaccgatgcgggtgccgccgccgcacgtaacgtgggtgaagtgaaagccgtacacgtcatcccacgccctcacaccgatgtagaaaaaatcttaccgaagggaattagccaatga

SEQ ID NO: 175926 - DNA, 813 bp, Klebsiella oxytoca
atgagcagcaatgagctggttgaacagatcatggctcaggtgattgcccgcgtggcaacgccggaacagcaggccatccctactgaaaaccatccaatacgagagacggctatggcagaaaaaagctgcagtttaacggaatttgtcgggaccgccattggcgacaccctgggcctggttatcgccaacgtcgataccgccctgctggacgcgatgaagcttgaaaagcgctatcgctccatcggcattctcggcgcccgtaccggcgcaggcccgcacattatggcggcggacgaagcggtgaaagccaccaacaccgaagtggtcagcattgagcttccgcgcgataccaaaggcggtgcaggccacggttcgctgattattttaggcggcaacgacgtttccgacgttaagcgcgggattgaagttgcgctgaaagagctcgaccgcaccttcggcgatgtttacggcaatgaagccggacatatcgagctgcagtacaccgcccgcgccagctacgccctggaaaaagccttcggcgcgccgattggccgcgcctgcggcattatcgtcggcgcaccggcctccgttggcgtgctgatggccgataccgccctgaagtcagccaacgtagaagtcgtggcgtatagctctccggcgcacggcaccagcttcagtaacgaagccatcctggtgatttccggcgactccggcgcggtccgccaggcagtcacctccgcgcgcgaaatcggtaaaaccgtccttgcgaccctcggttctgaaccgaaaaacgatcgcccgtcctacatctga

SEQ ID NO: 175927 - DNA, 1665 bp, Klebsiella oxytoca
atgagatcgaaaagatttgaagcactggcgaaacgccctgtgaatcaggacggcttcgttaaggagtggatcgaagaaggctttatcgcgatggaaagcccgaacgatccgaaaccgtcgataaaaatcgttaacggcgcggtgaccgagctggacgggaaaccggtgagcgattttgacctgatcgaccactttatcgcccgctacggcattaacctgaatcgcgccgaagaagtgatggcgatggattcggttaagctggccaacatgctgtgcgatcctaacgttaaacgcagcgaaatcgtcccgctgaccaccgcgatgacgccggcaaaaattgtcgaagtggtttcgcatatgaacgtcgttgagatgatgatggcgatgcagaaaatgcgcgcccgccgcaccccatcccagcaggcgcacgtcaccaacgtcaaagataatccggtacagattgccgccgacgccgccgaaggcgcatggcgtggatttgacgaacaggaaaccaccgttgcggtagcgcgctacgcgccgttcaacgccatcgcgctgctggtcggctcgcaggtaggccgtccgggcgtactgactcagtgctcgctggaagaagccaccgagctgaagctcggcatgctgggccacacctgctacgccgaaaccatctccgtctacggtaccgaaccggtctttaccgacggcgacgacacgccgtggtcgaaaggtttcttagcctcctcctacgcctctcgcggtctgaaaatgcgcttcacctccggctccggctccgaagtgcagatgggctacgccgaaggcaaatccatgctttacctggaagcgcgctgcatctacatcaccaaagccgcgggcgtacaggggctgcaaaacggttccgttagctgcatcggcgtgccgtctgcggtaccttccggcattcgcgcggtgctggcggaaaacctgatctgttcgtcgctggatctggagtgcgcctccagtaacgaccagaccttcacccactccgatatgcgtcgtaccgcgcgcctgctgatgcagtttctgccggggaccgactttatctcttccggttattccgcggtgccgaactacgacaacatgttcgccggttccaacgaagatgccgaagactttgacgactacaacgtcatccagcgcgacctgaaggtggacggtggtctgcgtccggttcgcgaagaagatgttatcgccatccgtaataaggctgcccgcgcgctgcaggccgtttttgccggaatggggctgccgccgattaccgatgaagaagtggaagccgcgacctacgcccacggttcgaaagatatgccggaacgcaacatcgtcgaagacatcaagttcgcccaggaaatcatcaataaaaaccgcaacggcctggaagtagtgaaagcgctggcgcagggcgggttcaccgacgttgcccaggacatgctcaacatccagaaagccaagctgaccggagactatctgcatacctccgcaattatcgtcggcgatgggcaggtgctgtcagccgtcaacgacgttaacgactatgccggtccggcaacgggctatcgcctgcagggcgaacgctgggaagagattaaaaacatccctggcgctcttgatcccaacgagattgattaa

SEQ ID NO: 175928 - DNA, 675 bp, Klebsiella oxytoca
atggaaattaatgaaaaattgctgcgccagataattgaagaagtgctcagcgagatgaagggcagcgataaacccgtctcgtttactgcgccagcggcctccgcggcgccccaggccacgccgcccgccggcgacggcttcctgacggaagtgggcgaagcgcgtcagggaacccagcaggacgaagtgattatcgccgtcggcccggctttcggcctggcgcagaccgtcaatatcgtcggcataccgcataagagcattttgcgcgaagtcattgccggtattgaagaagaaggcattaaggcgcgcgtgattcgctgctttaaatcctccgatgtggccttcgtcgccgttgaaggcaatcgcctgagcggttccggcatctctatcggcatccagtcaaaaggcaccacggtgattcaccagcaggggctgccgccgctctctaacctggagctgttcccccaggcgccgctgctgaccctggaaacctatcgccagattggtaaaaacgccgcccgctatgcgaaacgcgaatcgccgcaaccggtcccgacgctgaacgaccagatggcgcggccaaaataccaggcgaaatcggccattttgcacattaaagagaccaagtacgtggtaacgggcaaaaacccgcaggaactgcgcgtggcgctttga

SEQ ID NO: 175929 - DNA, 522 bp, Klebsiella oxytoca
atgaataccgacgcaattgaatcgatggtgcgcgacgtattaagccgcatgaacagcctgcagggcgaggcgccgacggcggctccggcggcagacggcacgtcccgtagcgcaaaggtcagcgactacccgctggcgaacaaacacccggaatgggtgaaaaccgccaccaataaaacgctggacgactttacgctggaaaacgtgctgagcaacaaagttaccgcccaggatatgcgtattaccccggaaacgctgcgcttacaggcttctatcgccagggacgcgggccgcgaccggctggcgatgaacttcgaacgcgccgccgaactgaccgcggtaccggacgatcgcattcttgaaatctacaacgccctccgcccctatcgctcgacgaaagaggagctgctggcgatcgccgacgatctcgaaagccgctatcaggcgaagatttgcgccgctttcgttcgcgaagcggcaacgctgtacgtcgagcgtaaaaaactcaaaggcgacgattaa

SEQ ID NO: 175930 - DNA, 1833 bp, Klebsiella oxytoca
atgcgatatatagctggcattgatatcggcaactcatcgacggaagtcgccctggcgactctgaatgaggctggcacgctgacaatcacccacagcgcgctggcggaaaccaccgggatcaaaggcacgttgcgtaacgtgttcggtattcaggaggcgctcgccctcgtcgccagaggcgccgggatcgctgtcagcgatatttcgctcatccgcattaatgaagctacgccggtgattggcgatgtggcgatggaaaccattaccgagaccatcatcaccgaatcgaccatgatcggccataacccgaaaacgcccggcggcgcggggcttggcgtgggcatcaccattacgccgcaggagctgttaacccgcccggcggacgcgccctatatcctggtggtgtcgtcggtgttcgattttgccgatatcgccagcgtgattaacgcttccctgcgcgccggatatcagattaccggcgtcattttgcaacgcgacgatggcgtgctggtcagcaaccggctggaaaaaccgctgccgattgttgacgaagtgctgtacatcgaccgcattccgctgggaatgctggcggcaattgaggtcgccgtcccggggaaggtcatcgaaacgctctctaacccctacggcatcgccaccgtattcaacctcaacgccgaggagacgaaaaacatcgtcccgatggctcgtgcgctgattggcaaccgttccgccgtggtggtcaaaacgccatccggtgacgtcaaagcgcgtgcgatacccgccggtaaccttgagctgctggcccagggccggagcgtacgcgtagacgttgccgctggcgccgaagccatcatgaaagcggtcgacggctgcggcaagctcgataacgtcaccggcgagtcggggaccaatatcggcggcatgctggaacacgtgcgccagaccatggccgagttgaccaacaagcccagcagcgaaatattcattcaggatctgctggccgtcgatacctcggtgccggtgagcgtcaccggcggtcttgccggggagttctcgctggagcaggccgtgggcatcgcctcaatggtgaaatcggatcgtttgcagatggcgatgattgcccgcgaaatcgagcagaagctcaatatcgacgtgcagatcggcggcgccgaggccgaagccgccattctgggcgcgctgaccacgccgggtaccacccgaccgctggcgatcctcgacctcggcgcaggctccaccgatgcctccatcatcaaccccaaaggcgaaatcatcgccactcatctcgccggagctggcgatatggtgacgatgattattgcccgcgagctggggctggaagaccgctatctggcggaagagatcaagaagtatccgctggccaaagtggaaagtctgttccatttacgccacgaggacggcagcgtgcagttcttctccacgccgctgccccccgccgtattcgcccgcgtctgcgtggtgaaaccggacgaactggtgccactacccggcgacttagcgctggaaaaagtgcgcgccattcgccgcagcgccaaagagcgggtctttgtcaccaacgccctgcgcgcactgcgtcaggtcagccccaccggcaacattcgcgatattccgttcgtggtgctggtcggcggttcgtcgctggattttgaggtcccgcagctggtcaccgatgcgctggcgcactaccgcctggttgccgggcggggaaatattcgcggcagcgagggccccagaaacgcggtggccaccggcctgattctctcctggcataaggagttcgcgcatggacagtaa

SEQ ID NO: 175931 - DNA, 351 bp, Klebsiella oxytoca
atggacagtaatcacagcgccccggctattgtgatcgccgccatcgacggctgcgacggcctgtggcgcgaagtgctgctgggtatcgaagaggaaggcattcctttcctgctccagcatcacccggctggggatgtcgtggacagcgcctggcaggcggcgcgcagctcgccgctactggtgggcatcgcctgcgaccgccatacgctggtcgtgcactacaagaatttacccgcatcggcgccactttttacgctgatgcatcatcaggacagtcaggcccaacgtaacaccggtaataacgcggcacggctggtcaaagggatcccgttccgggatctgaatagctaa

SEQ ID NO: 175932 - DNA, 276 bp, Klebsiella oxytoca
atgaataacgcactgggactggttgaaacaaaagggttagtaggcgccattgaggccgccgatgcgatggtgaaatcggccaacgtgcagctggtcggctacgaaaaaattggctcgggtctggtgaccgtaatggttcgcggcgatgtcggcgcggtcaaagcggcggtagatgcgggcagcgcggcggcaagcgtcgtaggcgaagtgaaatcctgccacgtgatcccgcgtccgcacagcgacgttgaggccattttaccgaaatcagcctga

SEQ ID NO: 175933 - DNA, 462 bp, Klebsiella oxytoca
gtgaagcaatcactgggattacttgaagtttgtggtctggcactggctattagctgcgccgatatcatggcgaaatccgcttctatcacgctggtcgccctcgaaaagaccaatggttcaggctggacggtcattaaaattaccggtgatgtggcctcagtacaggcggccatcaccaccggtgcacagtttgccgaacagcgaaacggtctggtggctcataaagtcatcgccagacccggagaagggatcctgcccgcagaggccccccccccctccgtcatggaacctgagcctgaagagtcagagacggctaatgtcgtttctgaagcgccagcagaagagcccctccagcaacaaggcgtggtcagctgcaacctgtgcctggatcccaaatgtccgcgccagaagggcgagccgcgcaccctttgcattcatcccggcaagcgaggtgaagcgtaa

SEQ ID NO: 175934 - DNA, 633 bp, Klebsiella oxytoca
atggataaacagcttctcgaatcaacggtcagtaaagtcctcgacgagatgcgtctgcggcccattccgctgggggtttcaaatcgtcatatccacctgtcggcgtcggattatgaacgcctgtttcctggccatcccatcagcgagaaaaaagcgctgctgcagccgggacagtacgctgcggagcaaaccgtcaccctggtagggccgaaggggcagcttaaaaatgtgcgcctgctcggcccgctgcgttcggtaagccaggtggaaatatcgcgtaccgatgccagaaccctgggggttgcggcgccgctgagaatgtccggcgatctgaaagggacgccgggcatccgtctggtcagcccctatggcgaactgacgctgtcgtcaggggttatcgtcgcgcagcggcatattcatatgtcgccgctcgatgcgctgatcctgcgggtttcccacggcgatagggtctccgtggccattgaaggcgacgagcgcgggctgattttcaacaacgtggcgattcgcgtttcaccggatatgcgtctcgaaatgcacattgataccgatgaagccaacgccgctggcgccgataatccgcaggcctttgcccggctggtaggcccgcgatga

SEQ ID NO: 175935 - DNA, 492 bp, Klebsiella oxytoca
atgaacggcgaagttctgcagcgcatcgtggaggaaatcgtctccaggctgcagcgtcgcgcccacagcaaggcgacgctgagcgttgcgcagctgcgcgatgccgactgccccgggctgttcagccagcacgcctcgctgtgcatcctgcttgtcgacctgccgctgctgggccagctgacggaggcggaaaccgacgatcctgcggcccggaaaattcacgacgcgctggctttcggcatccgcgtgcagctcaccctgcacagccagctgctgccggttatcccggtcaaaaaactggcgcgcctgccggcgatcttcaccgacgagcgcgggctgccgctgatcctgcacgcaggatcggtgctgagctatcgcgacgtcgcgcagctgggtcagggtcgcctggttatccaccgcaaatgcatcgtgaccgcgctggcgcgcgaagcggcacaggcgcggcatattcaattaattaagcaggagtaa

SEQ ID NO: 175936 - DNA, 276 bp, Klebsiella oxytoca
atgcatctggcacgagtcacgggcgcggttgtctccacgcaaaaatcgccttccctgatcggcaaaaagctgctgctggtgcggcgggtcagcgccgatggcgagcttcccgcctcgccgacctccggtgatgaagtcgccgtggattccgtcggcgcggggatcggcgagctggttctgctcagcggcggctccagcgccaggcacgttttttccgggccaaacgaggccatcgacctcgccgttgtcggcattgtcgatacgctttcacgttaa

SEQ ID NO: 175937 - DNA, 1011 bp, Klebsiella oxytoca
atggcgatttatacccgaacgggcgacgctggcaccacctcactctttaccggccagcgggtgagtaaaacccacccgcgggttgaagcctacggcacgctggatgagctgaacgccgcgctgagcctgtgcgcctgcgccgccgcggatgaaaatcaccgcgccttacttgaggccatccagcagcagcttttttggtttagcgcagaactggccagcgacagcgaacggccgtcaccgaaacagcgctacatcagcagcgaagagatttccgctctggaagccgccatcgatcgggccatggcccgcgtcgaaccgctgcacagttttattttacccggccgctgcgaagccgcgagccgcctgcattttgcccgcacgctggcccgccgggccgaacggcgactggttgagctggcggcggaagtcaacgtgcgccaggtgctgatgcgctacatcaatcgcttgtcagactgcctgtacgccctggcgcgcgcggaagatagcgatgcgcaccagaacaacatcattcgtgaagtgagccggcgctatctggccgccactctaccgagccgcagcaaggagaagacgcccctggacctttcattccacgatctgcaccagctcacccgcgccgccgttgagcgcgcgcagcagcttcaggtgccggtggtgatcagcatcgttgacgcacacggcaccgaaaccgtgacctggcggatgccggacgccctgctggtcagcagcgaactggcgccgaaaaaagcctggaccgcggtggcgatgaaaacggcgacccatgagctgagcgaggccgttcagccgggcgccgcgctttatggcctcgaaacgcatttgcagggaaaagtggttacctttggcggcggttacgccctgtggcgcgacggctcattaattgggggtcttggcatcagcggcggcagcgttgaacaggacatggatatagcacagaccgccatcgcggccattaacgtgggaactcatcaatga

SEQ ID NO: 175938 - DNA, 1392 bp, Klebsiella oxytoca
atgaatacttctgaactcgaaacgcttattcgcaccattcttagcgaacagttaaccccagcccaaacgccaaacccggcgcagggcaaagggatttttcagtccgtgagcgaggccattgatgccgcgcatcaggcgttcttacgttatcagcagtgcccgctaaaaacccgcagcgccatcattagcgcaatgcgtcaggagctgacgccgcatctggccgccctggcggaagagagcgccaatgaaacggggatgggcaacaaagaagataaatttttgaaaaacaaagctgcgctggacaacacgccgggcgtggaagatctcaccaccgcggcactgaccggcgacggcggcatggtgctgtttgagtattcgccatttggcgttatcgggtcggtcgcaccgagcaccaacccgacggaaaccatcattaataacagcatcagcatgctggcggcgggcaatagcgtctacttcagcccgcatccgggagcaaaaaaggtctcactgaagctgattagcatgattgaagagattgttttccgctgctgcggcatccgcaatctggtggttaccgtagcagaacccactttcgaagccacccagcagatgatggcccatccgcgcattgcggttctggccattaccggcggcccgggtattgtggcgatgggcatgaagagcggtaagaaagtcattggcgctggcgcgggtaacccgccctgcatcgttgatgaaacggcggatctggttaaagcggcggaagatatcatcaacggcgcctcgttcgattacaacctgccctgcattgccgagaagagcctgattgtggtggagagcgtcgccgaacgtctggtgcagcaaatgcaaaccttcggcgcgctgctgctgggccctgccgacaccgacaaactccgcgccgcctgcctgcctgaaggccaggcgaataaaaaactggtcggcaaaagcccatcagccatgctggaagcggccgggatcgccgttccgtcgaaagcgccgcgtctactgatagcactggttaacgccgacgatccgtgggttaccagcgagcagctgatgccgatgctgccgatagtgaaagttagcgatttcgatagcgcgctggccctggcgctgaaggttgaagagggactgcatcataccgccattatgcactcgcagaacgtgtcgcgcctgaacctcgcggcccgcaccctgcaaacctcgatattcgtcaagaacggcccctcttatgccgggatcggcgtcggcggcgaaggctttaccacctttactatcgccacgccgaccggtgaagggacaacctcggcgcgcacgtttgcccgctcccgtcgctgcgtgctgaccaacggcttttccattcgctaa

SEQ ID NO: 175939 - DNA, 1113 bp, Klebsiella oxytoca
atgaagactttctcactacaaacgcggttgtacagcggtcagggtagcctggcggtgctcaagcgctttaccaacaagcacatctggattatctgcgatggctttcttgcgcgctcgccgctgctggaaaccctgcgtcaggcgttgcccgcagataaccgcattagcgtctttagcgagataaccccggaccccactatccacaccgtggtacagggcattgcgcaaatgcaggccctgcagccgcaggtggtcatcggcttcggcggcggatcggcaatggatgcggcgaaagctatcgtctggttcagtcagcagagcggcatcagcatcgaaacctgcgtggccataccgaccaccagcggtaccggttcagaagtgaccagcgcctgcgtaattagcgatccggataaaggcatcaagtacccgctgttcaacaatgcgctctatcccgatatggcgatccttgacccggagctggtggtcagcgtgccgccgcagattacggccaacaccggcatggacgtgctgacccacgcgctggaggcgtgggtctctccgcacgccagcgactttaccgacgcgctggcggaaaaagccgccaaactggtgttccagtatctgcccacggcggtggaaaaaggcgactgcgtggcgacgcgcgggaaaatgcacaatgcctcaacgcttgccgggatggcgttcagccaggcggggctggggcttaaccatgctatcgcccaccagcttggcgggcagtttcatctcccgcacggactggccaacgcgctgctgttaaccgcggttatccgctttaacgccggtcatccgcgcgccggaaaacgctacgcgcggctggccaaagcctgcggcttttgtccggcagacgccagcgatagtacggcgatcaatgcgctgatccagcaaatcgaacggctcaagcagcgctgtgctctgccgtcactggcggtcgcgctgaaagagggacgtgccgagtactcagcgcgcattccggccatggtgcaggccgcactggctgacgtgaccttgcgtacgaatcctcgcccggccagcgccggggaaattcaggaactgctggaggaactgctatga

SEQ ID NO: 175940 - DNA, 1356 bp, Klebsiella oxytoca
atgagtaccgccgtcaacgctgttgaaatggccagaagcgccgaggagatccgcgagcgcgtgcgcgctgcgggcgtagtcggcgcgggtggagcgggttttcccgcccacgtgaagctgcaggcgcaggtggagatctttctggttaacgccgccgagtgcgaaccgatgctcaaggtcgaccagcagctaatgtggcagcaggctgcacgtctggtccgcggcgtgcagtacgcgatgacggcaaccggcgcacgcgaaggggtgattgccctgaaagagaagtaccgccgggctatcgacgccctcaccccgctgctgcctgccggtattcgcctgcatattctgccggatgtctatcccgcaggcgatgaggtgctgactatctggttagctaccggtcgacgggtcgcacccgccgcgctgccagccagcgttggggtcgtggtgaataacgtacaaacggtgctcaatattgcccgtgcggttgagcagcagtttccggtgacccgccgcacgctaaccgttaacggcgcggtcgcccgaccgctgaccgtcaccgtccccatcggcatgtcgctgcgcgaagtgctggcgctggcgggcggcgcgacggtcgacgaccccggttttattaacggtggcccgatgatgggcggcctgatgactgctctcgatagcccggtaaccaaaactaccggcggcctgctggtgctgcccaaaagccatccgcttatccagcggcggatgcaggacgagcgcacggtgctttccgtggcccgtaccgtctgcgaacagtgtcgcctgtgtaccgatctctgcccacggcatctgatcggccacgaactctccccgcacctgctggtgcgggcggtgaactttcatcaggccgccacgccccagctgctgctgagcgcgctcacctgttcggaatgcaacgtctgcgaaagcgtggcctgtccggtggggatctcgccgatgcgcatcaaccgcatgctgaaacgcgagctgcgcgcgcaaaaccagcgctatgaaggaccgctctatccggccgacgaaatggcgaaatatcgcctcgtgccggtgaagcgactgatcgccaaactggggctgagcccctggtatcaggaggcgccgctggtggaagacgaaccggcagtagaaacagtgactttacagttgcgccagcatatcggcgccagcgcggtagcgaacgttgcagtgggagaacgtgttacccgcgggcaatgcgttgccgatatcccggcaggcgcattaggcgcgccggttcacgccagcatcgacggcgtggttgcggccatcagcgaacaggccatcacggttgtaagaggttaa

SEQ ID NO: 175941 - DNA, 555 bp, Klebsiella oxytoca
atgtctcaggctataggaattttagaactcaccagcattgccaaaggaatggaactcggcgatgcgatgctgaaaagcgccaacgtcaatctgctggtcagcaagactatctgcccgggtaagtttctgttgatgctcggcggggatatcggcgctatccagcaggccattgaaaccggcacttcgcaggccggcgaaatgctcgtcgacagcctggtgctggcgaatatccatcccagcgtactcccggccatcagcggcctgaacagcgtagacaaacgccaggcggtcggcatcgttgaaacctggagcgttgcggcctgcatcagcgccgcggaccgggcggtgaaaggctccaacgtcaccctggtacgggtgcatatggccttcggcatcggcggtaaatgctacatggtggtggcgggcgacgtttccgacgtcaacaacgcggttacggtagccagcgaaagcgcgggtgaaaaagggctgctggtttatcgttcggtaatcccgcgaccgcatgaagccatgtggcgacagatggtggagggataa

SEQ ID NO: 175942 - DNA, 351 bp, Klebsiella oxytoca
atggaaagacagccaacaacggatcgcatgattcaggaatacgttcccgggaaacaggtaaccctcgcgcacctgattgccaatcccgggaaagatctctttaagaaactcggcctgcaggatgcggtgtccgccatcggcatcctcaccattacgcccagcgaagcgtcgattatcgcctgcgatatcgccaccaaatccggcgcggtggagatcggttttcttgaccgctttaccggcgccgtggtgctgaccggcgacgtttccgccgtcgagtacgccctcaagcaggtgacgcgcaccttgggcgagatgatgcagtttactacctgctcaataacccggacgtag

SEQ ID NO: 175943 - DNA, 453 bp, Klebsiella oxytoca
atgaaacgtctgatgttgatcggccccagccagtgcggcaaaacctcgctgacccagggcctgcgcggcgaagcgctccattataagaaaacccaggcgattgaatggtcgccgatggccatcgacacgccgggcgaatatctggagaaccgctgcctttatagcgctctgttgaccagcgcctgcgaggccgacgttatcgctctggtgctgaacgccgacgcccagtggtcgccgttttctccgggttttaccgctccgatgaaccgcccgacgattggtctggtcactaaagccgaccttgccgatgcgcagcggatatcgctaatcggcgagtggctcaggcaggctggcgcccagcagatttttatcaccagcgcgctgaataatctgggtcttgatgccgtgctggattttctgaattcgaaggaacctttatgtcttacaaaataa

SEQ ID NO: 175944 - DNA, 1215 bp, Klebsiella oxytoca
atgtcttacaaaataatggccattaatgccggcagctcatcgttaaaattccagctgctggagatgcctcagggcgatatgctctgccagggattgatcgagcgtatcggcatggcaaacgcccaggtgacccttaaaacgccggcgcaaaaatggcaggaaacggcgcccgtagccgatcaccgtgaagccgtcaccctgctgctggaaaagcttctcgaccatcggattatccagagtttgcaggatatcgatggcgtcggccaccgcgtggcgcacggcggggagcgctttaaagattcgacgccggtgaccgatgagaccttagcggaaatcgagcgcctggcggagctggccccgctgcataatccggtcaacgcgctgggcattaaagttttccgccagctgctgcccgacgcgccgtcggtggcggtgtttgataccgcttttcaccagacgctggacgagcgcgcgtttatctatccgctgccctggcgctactacagcgagttgggcattcgccgttacggcttccacggcaccagccacaagtacgttagcgcgacgctggcggaaaagctgggcgtaccgttgagcgctctgcgcgtggtgtgctgccatctcggcaacggcagcagcgtttgcgcaatcaaaggcgggcgctcggttaacacgtcaatgggctttacgccgcagtccggcgtgatgatgggcacccgcagcggcgatatcgatccgtcgattctaccgtggctggcgctgcatgagggaaaaacgccggagcagcttaatcagctgctgaataacgagtccggcctgctgggggtttccggcatctcgcacgattatcgcgatgtcgagcaggcggcggacagcggtaatcgtcaggcagccctggcgctctcgctgtttgccgagcgcattcgcgccaccatcggcagttatattatgcagatgggcggcctggacgcgctgatctttaccggcggcatcggcgaaaactccgcccgcgccaggagcgccatctgccataacctgaatttcctcgggctctcggtcgatgaagagaaaaaccagcacaacgctacctttattcaggccgaaaatgcgatggtcaaagtggcggtcatcaataccaatgaagagctgatgattgcccgcgatgtgatgcgcctggcgcttcccgaagcgcagacattaaccgtttcagcctga

SEQ ID NO: 175945 - DNA, 867 bp, Klebsiella oxytoca
gtggccgtagcgcaatgccccgcctcctgtggggaactcatccagggctggatcctcggcagcgagaagctggtctcctgccccgttgactggtacagcaccgtcgaggtggactacggttcgcctcgggcggatgaacgtccgctggcgcgggcgatggtcgaccagttgctgagctactggcgttatccgccggcgctgagcaaggagattcggatcgatatctgctccacgattccggttgccaaaggtatggccagcagcaccgcggacatcgccgcgacggcggtagccgccgcgcatcatctcggccatccgctggatgaacccaccctcgcccggctctgcgtctccctggagcccaccgacagcactctgtttcgtcagctcaccctgttcgaccacaacaccgccgccacgcagattgcctgtgacagccagcctcagctcgatctgctggtgctggaaagccccgctacgctgctgaccaccgattaccaccgacttccccggcttgaaaagctgcacgcccactccgcgtctctgcagctagcctgggagaaagttcagctggcctgcgagacggataatccccggcggatgggagaggccgcgacgcttagcgccgtcgccagtcagcatctgttaccaaagccggggtttgatacgctgcgggggctggtggaagagtgcgatttatacggtattaacgtggcgcacagcggcagcgtggtcggcctgatgctcgaccgtcaacgtcacgacattgagtatttacagcgacggctggaagagacgcggcttagcgagctctggcccaggcagcacctgctgcgcatggtgcagggcggcgtcgaactgcgctaa

SEQ ID NO: 175946 - DNA, 1080 bp, Klebsiella oxytoca
atggctctattaaagagcgcgcacggcggcaatattcgcgaggccgccgcgcttatgggcatctctgcggagcagctgctggattttagcgccaacatcaacccgctggggatgccggaaagtttaaagcgcgcaatcctcaacaatatggactgcgctgaacgctatcccgacgttgagtatcagcagctgcaccttgcgctggcggaacatcatcatattcctgcgtcgtcgatccttgcaggaaacggcgaaactgaagcgatttttaccctggttcaggggctgaaaccgcgccaggcgatgatcgtcactccgggttttgccgaatatcgccgggcgctgcagtcggtggagtgcgcggtgcgggaatttctgctgcgcgaggaggatggctggcagctcaccggagcgattcttgacgccctgacgccggatctggactgcttatttctctgcacgccgaacaatccaaccggcctgctgcccgatcgtcgactgctggcgctgattgctgaacgctgtcagtcgctggacatcgccctgatcctcgatgaggcgtttatcgattttatccccgatgagccaggatttattccgcttctggcccacaatccgcacgtgtgggtgctgcgttcgctcaccaaattttatgccatacccggcctgcgcctggggtatctggtcaatggcgatgcgcgggcggtggcaagaatgcgcgagcgccagatgccgtggtcgataaatgcttttgccgccctggcgggggagatcattctccaggatagcgcctaccagcagaaaacctggcagtggctggcggaggaagggcagcgcttttatcatcaactgcgccatattcccggcctgacggtctatcccggacaggcaaactatctgtttctgcgctgcgacgttgcggatctggatctgcaatacgcgatgctgcagcagcacatcctgatccgcagctgtgccaattatccagggctcgacgggcgctactttcgcgtcgcgatccgcagccagcaggaaaatacccggctgctgacggccttcaggcgggtatttaacgagtag

SEQ ID NO: 175947 - DNA, 1329 bp, Klebsiella oxytoca
atgcgcctttcgttaaagtttctggtcaatctgtttgttttaaatacgaatgatttcttactgcttgggagtggcatgtcgggatacaagtcaggattaagccgccgccgatttttacagggggcgggcgccatgtggttaatgagtgtgagtccggttgggttggctgccgcggcgcaggtggttgccgtacgcgtctggccatcatcgacctacacgcgcgtcaccgtggagtccaaccatatcctgaaatatcggcagtttgcgctcagtaatcctgaacgtgtggttgtggatctggaaggcgttaacctcaactccgtcctaaaaggcatgggtaaccagattcgcagcgacgatccctatattcagtccgcccgcgtgggacaattcgacccgcaaaccgtacgcatggtgttcgagctgaaacagaacgtaaaaccgcagctgttcgcgctcgctccggtcgccggttttaaagagcgtctggtcatggatctctacccttccaacgcgaccgacgtgcaggatccgctgctggcgctgctcgaggattacaataaaggcgatctgcagcggcaggttccgcctgcggagagcgggccgaaaccgggtaaagccgggcgcgatcggcctatcgttatcatgctcgatcccggacacggcggcgaggattccggcgccgtcggtaaataccgcacccgcgagaaagacgtggtgctgcagatagcccgacggctgcgcgcgctgatcgagaaagagggcaacatgaaggtctatatgacccgcaacgaggatgtctttatcccgctgaaggttcgcgtcgccaaagcgcagaagcagcgcgccgacctgtttgtctctattcacgccgatgcgtttaccagccgtcagccgagcggctcgtcggtatttgccctgtcaaccaaaggggctaccagtaccgcggctaaatatctggctcagacccagaacgcctcggatctgatcggcggcgtcagcaaaagcggcgatcgctacgtcgaccacacgatgttcgacatggtgcagtcgttgaccattgccgacagcctgaagtttggcaaggcggtgctggaaaagatgggaaatattaataacctgcacaagaatcaggttgagcaggcgggcttcgcggtgctgaaagcgccggatattccatcgatcctggtggaaaccgcgtttatcagcaacatcgaagaagagcgtaaactgaaaacggcgaaattccagcagcaggttgcagagtcgattctggcagggattaaagcctacttcgccgacggcgcgacgctggcaaggcgaggataa

SEQ ID NO: 175948 - DNA, 1332 bp, Klebsiella oxytoca
atggtgaaggaacgtcgcaccgaactggtagagggattccgccattctgtcccctatattaacgcccatagaggtaaaacgtttgtcatcatgctgggcggggaagccatcgagcatgataatttctctagcatagtcaacgacattggcctgcttcacagcctgggaattcgtctggtagtggtctatggcgcccgtccgcagatcgacgccaacctggcggagcaccgtcacgaaccggtctatcacaaacaaacccgagtgactgacgccaaaacgctcgagctggttaagcaggcggcgggtatgctgcagctggaaattaccgctcgcctgtcgatgagcctcaacaacacccctctgcagggcgcccacatcaacgtggtcagcggcaatttcattatcgcgcagccgttaggcgtggatgacggcgtggattactgtcacagcgggcgcattcggcgcatcgatgaagaagccattcaccgtcagttggataacggcgcgattgtgctgatgggcccggttgcggtgtcggtcaccggcgaaagctttaacctgacctccgaagagattgcaacccagctggcgattaagctcaaagccgaaaagatgattggcttctgctcgtcacagggggtgtacaaccaggatggcgagatcgtccccgagctattccctaacgaagcccaggcgcgggttgaagagatggaagcggacgaagactacagctccggtaccgtgcgcttcctgcgcggcgcggtaaaagcctgccgcagcggcgtgcgccgctgccacctgattagctatcaggaaaacggcactctgctgcaggagctgttctcacgcgacggtatcggcactcagatagtgatggagagcgccgagcagatccgccgcgccaccattaacgacatcggcggcatccttgagctgataagcccgctggagcagcaaggcattctggtcaggcgttctcgcgaacagctggagatggaaatcgataagttcaccattattcagcgcgacaacaccaccatcgcctgcgccgcgctctatcctttcccggaagagaagatcggcgaaatggcctgcgtggcggtgcatccggactaccgcagctcatcgcgcggcgaagtgctgctcgaacgaattgccgcgcaggcgaagcaaatgggcctcagcaaactgtttgttctgacaacccgcagcattcactggttccaggagcgcggatttacgccggtagacgttgacctgctgccggagagcaaaaaagagatgtacaactatcagcgccgctccaaggtgttgatggcagacctggcctga

SEQ ID NO: 175949 - DNA, 1836 bp, Klebsiella oxytoca
atgaacctggatgaactattgctgcaggcggttgagcagcgactgctgcgcccgctggacgttcagtttgcgctaatggtggcgcaagaagcgcatccggcggtgaagctggtcgcggcgatcctcagtcgcgatgctggtgaagggcacgtctgcctgccgatttcgcgtcttgtcgatgatgaactgttgaaggctaaagcaggtggcctgagcgagcaaattcttgaactgaccggcgcgccggacggctggctgccgctgctcaatgattccgaggccgtcagctgcggagagcggccagcgccgatgattctctgcggcgatcggctttaccttaaccgcatgtggcgcaacgaattaaccgtcgcgcgctttttcaatgaagccaatcaggtgctggaggtggatgaagcccggctggcagcgacgctcgacgcgctgtttccgcccgcagaggaaactgactggcaaaaagtggcggctgctgtcgccctgacccggcggatttcggtaatttccggcggaccgggcaccggtaaaaccacgaccgtcgctaaactcctggccgcgctgatccagatcttctccagcccgcgctgccgtattcgcctggctgcgccgaccggtaaagccgcggcgcgcctgaccgagtcccttggcgctgcgctgcgccgtcttcctctcaccgacgaacaaaaggcgctggtgcccaccgaagccagtaccctccatcgcctgctgggcgcgcagccgggaagccagcggatgcgctatcacagcggaaacccgctgcatcttgatgtgctggtggtcgatgaagcctcaatgattgacctgccgatgatgtcgcgcctgatcgatgcgctacctgagcacggaagggtgattttccttggcgaccgcgatcagctggcttcggtcgaggccggggccgtgctcggcgatatctgcgcgtgggttaatgcaggctataccccggagcgggcgacgcagctcgcccggttaaccggccagccggttccggcaggcgagggtaatatggccggttcgctccgcgatagcctgtgcctgctgcagaaaagctaccgtttcggtcgccattccggtatcggccagctggcctgggcggtgaacagcggcgatcgtagcgcggtacgcgcaacgctgcgccagtcatttgacgatatcgctctgtatccgctgagcgccaccgaagagtatgaagcgatgctgaatcaggcgcaggcgggctacggccgcttcctgcagctgctgcgcgctcgggcagagcccgaagagatgatcgccgcttttggcgaattccagctgttgtgcgcgctgcgcgagggcccgtatggcgtcagtggagttaatgaacagctggagcagatgctcaaccgcaagcgggcgattacgttaccgcgccattcgcgctggtatgaaggtcggccggtgatgatctcgcgcaacgacagcgcgctggggctgtttaacggcgatatcggtatcgcgctggaaagagggggtggcctgcgcgtctggttcccgatgcctgatggcagcatcaagtcggtacagccaagtcgtctgccggagcatgataccgcctgggcgatgacggtgcataaatcgcaggggtcggagttcgatcacgcggcgctgatcctgccttcgcgcagcgtgccgctggtgacccgcgagctggtttataccgctataactcgcgcgaaacggcagctgtcgatctatgccgatgagcaggtactgacccaggcggttgtcgcgcgtaccgaacgacgcagcggcctggcggatattttttccgctcagtga

SEQ ID NO: 175950 - DNA, 3546 bp, Klebsiella oxytoca
atgaccgacaccgccgagtctcttgacccactgcgcttgcccctgacgggcgagcgcctgatagaagcctctgcgggcaccggaaaaacgtttaccatcgccgcgctctatctgcggctgttgctggggctgggtggtgaatccgctttcccccggcagatcagcgtggaagagctgctggtggtgacctttaccgaagcggcgaccgaagagctgcgcggacgtatccgcagcaatatccacgagctgcggatcgcctgcctgcgcgaaagcaccgacaatcctctttatgccgggctgctggcggaaattgccgataaagcccaggcggcgcaaacgctgctgctggccgaacgccagatggatgaagcagcggtatttaccattcacgggttctgccagcggatgctgagccttaacgcctttgagtccggcatgctgttcgaactgcagctgattgaagatgaatcccgcctgcgctatcaggcctgcgccgacttctggcgtcgccactgctacccgctgccgcgcgaaattgctgcggttatccacgaggcgtggaaagggccgcgcgacctgttgaaatccatcgaccgctggctgcaaggagaggcgccgcagctaaaatctccgccccctgctgaagaaacgctggccgaacgccaccagcaaattattgaacgcattaacgcggtcaaacagcagtggctggaacaggcgagcgagattgaggcggtactggaaacctccggtctcgaccggcgcaagttcaatcgcggcaatcagggcaaatggctggaaaaagtgaccgcctgggcccaggaagagactttgagctaccagctgccggatgcgctggaaaagttctctcagcccttcttgcttgagcgcaccaaagcggacggcgcaccgccggtacacccgctgttcagctcgatagaagcgctgctggcgacaccgttaaccctgaccgatctggtgatcgccagggcgatggttgaaatccgcgaggcggtcgcgcgggaaaaacgccgccgcggcgagctgggatttgacgatatgcttagccgcctggatgacgccctgcgcggagagagcggagaagcgctggccagcgcgattcgtcagcgcttcccggtggcgatgatcgatgagtttcaggataccgacccgcagcagtaccgaatctttcgccgcatctggcggcgccaggcggataccgcgctgctgctgattggcgaccctaaacaggctatttacgccttccgcggcgcggatatctttacctacatgaaagcgcgtggagacgtcaccgctcactatacgctcgataccaactggcgctccgccccggggatggttgacagcgtcaatcgcctgtttagcctcagcgataacccttttatgtttcgcgaaatcccgttcctgccggtgaaatcggccgagaaaaatcaggggctgcgctttaccgttgatgatacggcggttccggcgatgaatatctggctgatgccgggcgaggccgtgggcgcaggggattaccagacgtttatggcccagctgtgcgcggcgcaaattcgtgactggctaagcgcgggccagcagggcaaggcgctgctgtggcgcggtgaaaaagctgaacccgtgcgggcttcagacatcacggtgctggtgcgcaatcgtcaggaggcgtcgttaattcgcgatgccctccagctgctgtcgattccttccgtctatctctccaaccgcgatagcgtgtttgaaacgccggaggcgcaggagctgctttggctgctgcaggcggtgctggcccccgagcgcgagaataccctgcgcagcgcgctggcgacctcaatgttcggtcttaacgcgcaggatatcgaaaacctcaaccagaacgaacgggcgtgggatgagctggtagaagagtttagcggctaccggcaagtctggcggcagcgcggcgttatgccgatgctgcgcgcgctgatgaccgagaggcgcattgcagaaaacctgctggcgaccaacggcggcgagcggcgcctgaccgatatcctgcatatcagcgagctgcttcaggaagcggcgaaccagctggagagcgaacatgcgctggtgcgctggctggcgcagcatatcgccgagccggatagcaacgcctccagccagcagatgcgcctggaaagcgacaagcatctggtgcagatcgtcaccatccataaatcgaaagggctggagtatccgctggtctggctgccgtttatcgcgcgttttcgcaaacaggatcaggcgttttatcacgacagaacctcctttgccgccgtgctcgatctgggccaggatgagcgcagcatggagctggctgaggccgaacgtctggccgaagacttacgtctgctgtacgttgcgctgacccgggcggtctggcactgcagcctgggcgttgcgccgcttagcccccgccgcagcgacaagcccggcaccagcgattttcaccacagcgcgctggggcggctgctgcagggcggagaagcgatggacgccgcagggctaacggcgcgactgcaggcgttttgcagcggggatatcgccctgcagctccccgcgacgacgacgcagacgccctggcaggctccacagtcggcgctgccgccgctctccgcgcgtctgcttgagcgttcggtgagcgatgactggcgcgtcaccagctactccggcctgcagcaaaacggacacagcgcggcgcaggaccttttaccgcgtctggatatcgatgccgcaggcgtcggcgatgtggcggaagaaccgcagcttacgccgcaccacttcccgcgcggagcatcgccaggcacgtttctgcacagcctgtttgaagatattgatttcacccagccggtccccgccgactggatggcggaaaagctccagcttagcggcttcgaggagaaatgggccccagtactgaccgaatggctcgacggcgtgctgcgtacccgtctccctggcgcggagatcgcgctgaatcagcttagcgagcgtgataaacaggtggagatggctttttatctgcccatcgagcagcctctggatccgctgcgcctggatgcgctgattcgtcagtacgatccgctctccgtcgatacccccatgctcgatttccgccaggtgcgcggtatgctgaaaggctttattgacctggtatttcgccataacggccgctattacctgctggattacaaatccaactggctggggaaagatcgcgaggcctatacccaggaagcgatgatgcaggctatgcgtacccatcgttacgatttgcagtatcagctctacagcctggcgctgcaccgttatttgcgccaccgtattgccgattatgattacgaacgccactttggcggcgtcatttatctctttttacgcggtatggatggacaggacggcgggcagggtatttttaccacccgtccggcgcgaccgctgattgacggccttgatgcgctgtttgctggagaaactcaggaggtggcgctatga

SEQ ID NO: 175951 - DNA, 2886 bp, Klebsiella oxytoca
atgccccgcagtttatggttcaaggttattgttttactggccgccctctgggcgccgttaagtcaggcagacaccggatggcaaccgattcaggaaaccatccgtaaaagcgacaaagatacccgtcaatatcaggcgatccgcctcgataacggcatggtggtgctgctggtttccgatccccaggcggtaaaatcgctgtcggcgctggtcgttcccgtggggtcgctgcaggaccccgctgagcatcagggactggcccacttcctggagcatatgacgctgatggggtcgaaaaagtacccgcagccggatagcctcgccgaatatctcaaaatgcacggcggcagccataacgccagtaccgctccgtaccgcactgccttctatcttgaagtagaaaacgatgctctggacggcgcggtcgatcgcctggccgacgccatcgccgctccgctgctggataaaaaatatgccgaccgcgagcgtaatgtagtcaacgccgagctgacgatggcgcgcagccgcgacgggatgcggatggcgcaggtcagcgcagaaaccattaacccggcgcaccccggctcgcagttttccggcggtaaccttgaaacgctgagcgacaagcccggcaagccggtgcttgatgccctgcacgcctttcgcgatagctggtattccgccaacctgatgaaggcggtgatctacagcaacaagcctctgccggagctggcaagtatcgcggcggccacctacggtcgcgtgccgaaccacgatatcaacaaaccggaaataaccgtcccggtggtgaccgatgcgcagaagggcatcatcattcactatgtcccggcgatgccgcgtaaagtcctgcgcgtggagttccgcattgataacaatagcgaccagttccgcagcaaaaccgacgagctggtgacctatatgatcggtaatcgcagccccggtacgctctctgattggctgcaaaagcaggggctggctgagggtattcgcgcggactccgacccggttgtcaacggcaacagcggggtgctggctatttctgctactctgacggacaaaggcctggcacaccgcgatgaagtgaccgcggccatcttcagctacctcaatctgctgcgtagccagggaattgataaacgctattttgatgaactggcccacgtgctggcgctcgacttccgctacccgtccatcaaccgcaatatggattacgtcgaatggctggcggacaccatgatccgcgtgccggtcgaacataccctggacgtagttaacatcgccgatcgctacgatccgcaggcgatcaaagaccgtctggcgatgatgacgccgcaaaatgcccgtatctggtacatcagcccgaaagagccgcataacaagaccgcctacttcgttaatgcgccctatcaggtggataaaattagcgagcagacttttgccgactggcagcagaagtccagcgctatcgatctcaagctgccggtgctgaacccctatattccggacgattttagcttaatcaaaagcgataaggcttaccctcatccgcagctgattgtcgatgaaccgacgctgcgggtgatctacgcgccgagtcagtacttcgccagcgaaccaaaagcggatatatcgctggtgctgcgtaacccgcaggcgatggacagcgcccgccgtcaggtgatgtttgccctcaatgattatctggcgggtatcgcgctcgatcagctcagcaaccaggctgcggttgggggcatcagcttctctaccggtgcaaataacgggctgatggttaacgccaacggctatacgcagcatctgccagagctgtttaacgccctgctggacggttactttagctatacgccaaccgaagagcagctggagcaggccaaatcctggtatgcgcagatgatggattcggcggataaaggcaaagcctacgatcaggcgatcatgccgattcagatggtttcacaggtgccgtactttcagcgtgaagatcgccgggcgctgctgccgtcgattacgctgaaagaggtgctggagtatcgcgataacctcaaggcgaaagggcgaccggagctgctggtcatcggtaaccttaccgccgaacggtcaacggcgatggcccgccagatccaaaaacagctgggggcggacggcaacgaatggtgccgcaacaaagacgtactggttgatcgcaagcagctggcgatttttgagaaagcgggtaacagcaccgactccgcccttgccgctgtcttcgcgccgccgaacctggacgaatacgccagctcagctgccagctcgcttctcgggcagatcgtccagccgtggttctacaaccagctgcgtacggaagagcagctgggatacgcggtcttcgccttctcgatgaacgtgggccgccagtggggaatgggcttcctgctgcaaagcaacgataagcagccggctttcctctggcagcgcttccaggccttcttccccacggcggaagccaaactgcgggcgatgaagccggaagagtttgcgcagattcagcagacggtcatcagtcagatgctggaggcaccgcaaacgctgggcgatgaagcatcgaagctgagcaaagatttcgatcgcggtaatatgcgcttcgattcacgtgataaagtagtggctcagattaaactgctgacgccgcaaaagcttgccgacttcttccatcagacggtggtggatccgcagggcatggcaattctctcccaggtttccggtagccagaatggcaaggcggaatacgcgcatccgcaggatggcaaagtctgggagaacgtcagcgcgttgcagaaatcgttacccctgatgcgagagaatgaatga

SEQ ID NO: 175952 - DNA, 3375 bp, Klebsiella oxytoca
atgttaagggtgtaccactcaaaccgtctggatgtgcttgaagccttgatggagtttatcgtcgagcgccagcggctggatgacccttttatgccggaaatggtgctggtacagagtaccgggatggcgcagtggctgcagatgacgctggcgaagcgcttcgggattgcggccaacattgagttcccgctacccgccagttttatctgggacatgtttgtgcgagtgctgaaagatattcccggagaaagcgcgttcagcaagcaaagcatgagctggaaacttatgactctgttaccagagcggcttaatgatgaatcttttacgctactgcgccactacctgcatgacgatagcgacaagcgtaaactgtttcagctggccgccagagtggcggatctctacgaccagtatctggtttatcgcccggagtggctgatgcgctgggaggctgaccagcgcgttgacgggctgggagaggcgcaggagtggcaggcgccgctgtggaaagcgctggtggaatataccgccgagctgggccagccgctgtggcatcgcgccaacttgtaccaacgttttatcagcgcgcttgaagacgccgaacaaccgcccgccgggctgccatcacggatctttatttgcggaatatcggcgctgccgccggtgtatctgcaggcgctccaggcgctgggtaaacatgttgatgtatatgtcctcttcactaacccgtgccgctactactggggcgacatcaaagatccggcatttctggccaaactgctgtcccgccagcggcgccaccaccgcgaaacggcgcgagagctgccactgttccgcgatgcggaacaggcgccggggctgttcaacgacgccggtgagcaggatgtcggcaacccgctactggcctcctggggtaagctggggcgcgactatatctacctgctggcgggtcttgaacgctatgaagagctggacgcttttgtcgatattgtgccggataacctgctgcataatcttcaggcggacattctcgaactgcgcaatgaagccgtggccgggcgcagcgccgaagagtttgccaatagcggcagcaagcggccattggcagcggacgatcgcagcctgacgattcatgtttgtcatagcccacagcgagaagttgaggtgttgcacgatcggctgctggcgatgctcgaagagaatcccgagctcacgccgcgcgatattatcgtcatggtggcggatatcgatagctatagcccgtatattcaggcggttttcggcagcgccagcggcgaacgctggctgccgtgggcgatttccgatcgacgcgcccgtgaatcgcatccggcgctgcaagcctttctcacgctcctttcgctgcccgatagccgctttgccagcgaagatgtgctggcgctgcttgacgtgccggtgctggcggcgcgctttaacattgacgaagaggggctacgctacctgcgacagtgggtgaacgaatccggcgtacgctgggggatggatgatgacaacgtgcgtgaactcgacctcccggcaaccggccagcatacctggcgctttggccttacgcgcatgttattgggctatgccatggacagcagcgagggtgagtggcgctcggtgctgccttatgatgagtcgagcgggctgattgccgagctggtgggcaacctggcatcgctgctgatgcagcttaatctctggcgtcgcgggctggcccaggagcggccactggccgagtggctaccggtatgccgcgatctgctgaacgactttttcctcccggatagcgaaacggaagccgccctcgcgctgatagagcagcagtggcaggcggtgattgacggcggcgtcgacgcccagtatggcgaaacggtaccgctctccttgctgcgcgatgagctgtccctgcgcctcgatcagcagcgtatcagccagcgctttctcgccgggccggttaatatttgcaccctgatgccgatgcgttcgattcctttcaaggtggtctgcctgctggggatgaacgacggtgtttatccgcgcacgcttgcgccgctgggctttgacctgatgagtcagaagccgcagcgcggcgaccgtagccgtcgcgatgacgaccgctatctgttccttgaagccctgatgtccgccgagcagaaactctatatcagctatatcggccgttctattcaggataacagcgaacgctatccctcggttctggttcaggagctggcggactatatcggtcagagccactgcctggaaggagacgaagatctggattgcgatgccagcgagcgccgcgttaaagaacatattactcatctgcatacccgcatgccttttgatgccgcgaattttctggcgaacgaagatcaaagctatgcccgggaatggctggcggctgccagccagcagggggaagcccacggtgagtttatccagccgctaccggtccctgaactcgatcacctgcctctggaacagctgctgcgcttctggcagcatccggtacgcgccttctttcagcagcggctgcgggtgaatttccgctcggaagagagcgagatccctgacgatgaaccttttaccctcgaagggctgagccgctatcagttgaaccagcagttgcttaatacgctgattgagcagcaggacgcctcggcaatgtatcgccgttttcgtgccgccggggagctaccctatggcgcattcggcgaactggcctgggaaacgcagcgtcaggagatgcagaacctggcagagcgggtaatagcctgccgtcaaccggggcagagcatggaaatcgatttgcaatgtaacggagtcaacattactggctggctacagcaggtacaatccgacggtttgctgcgctggcggccatcgttattaagcgtggcgcagggaatgcaactttggctggagcatcttgtctattgtgctagcggcggtcgcggcgaaagtcggctgtttgtgcgcaaagaaggcgagtggcgctttcccccgctggcgcaggaacaggcccaggaatacctgaatgagctcgttgacggttacctacagggaatgtcaaaaccgctgctgttgctgccggaaagcggcggcgcatggctaaaagtctgttatgacgccgaaaagaatgtcatgttaatggacgaagagacgcagcaaaaagcgcgcagtaaatttcttcaggcttatgaagggaacatggtggtcagaggcgaaggtgccgacgtctggtatcagcgcctgtggcgcaccctggagccggaatactatgaagagatccttacgcaaacgcagcgttatttgctaccggtgtttcgttttcatcagtccgaataa

SEQ ID NO: 175953 - DNA, 324 bp, Klebsiella oxytoca
atgccagatgccctgagccggcagagagggtttagcctgccggaaacgctcctggctttagtcttgctgatcgtcaccgtcactgcgctggcgggctatcagcgcgggctggccagcagttctatgcagctcacccagtaccgtcagctgtggcgcgatgcgtggcgatttggtcagcttagccctccggcgattgccgggggccaccagatatcccgtatgcagacatcgatgcaaagatgtgtcagcatcacggtaacgatcacgatgcccgcagccaggcgggcgcagatgacccggctccattgcccggtcagtcagtag

SEQ ID NO: 175954 - DNA, 414 bp, Klebsiella oxytoca
gtgaatcgccagcgcgggctctcttcgctgctgatggtgctactgcttttagcgcttggcacactgttactccaggggctgcaccagcagcagcgttcgctgttagtgcagacggccagcgaaacgcgggcgcttcgcgacgccgctgatgcgcattccgcgctgcagtggggaaaaacgctgacctggccgttgcaagaagcggttagctgccagcagaaggctgcactcgactggcgcgcctgtctgaggatctttagcgacgcctcggtattgctcattggcagcagcggcggtggcagaatgctgctgtggcagtcgggcgctgtggaacaaaaccgcatccatttttcaccacacggctggagcgatttttgcccgttaaaggaggtgagcctatgccagatgccctga

SEQ ID NO: 175955 - DNA, 564 bp, Klebsiella oxytoca
atgtctgtaaaacgtcgcggtttttcgctgccggaaacgctgatcgcgatggctattagctccgtgctattgctcggcagcgcgcgttttctcccggcgctgcagtgggccgcgcttcgccagacccggcagcaggcgctggaaaatgaactatggcagcgaatctacaccgtagcgaagcatctgcagcgcgcaggttattgccgtggccgctgtagcgggcaaccgctgtatatcgcagagagcggcgattgcctgcttgttcgttgggatggcaacagcgatggcgtctggaatcgctctccgtcatcagaatctgatactaccggatttcgcctgcgcgacggggcgctggaaaccctgagaggggcggaggagtgtagcggcaagggctgggagaaaatgaccaatccagcggcgattcaggtcaccgtttttcaggttacccggcagaataagacggatttttcgcctgagttgtcgataacgctggcggcgcattccgttgccgacccgcaaatccgcgcgcgagcggaatatggcgtaacggggtataacctgtga

SEQ ID NO: 175956 - DNA, 468 bp, Klebsiella oxytoca
atgaacagagaacatggctataccctgattgaaaccctggtcaccatggtcgtcgtcgtcattcttggcgccagcggactttatggctggcagagctggcaacagcagcagcgtctgtggcaaaccgcctgccaggttcgcgattatctggtgctgctacgcgatgacgccaactggcacaaccgcgacagggtattaagcgtcgaccgaagcgcggagggctggtgcctgagcgtcagcggagcgacgaacgactgtagcgtcagcaacgctttcacgctgcagccgctatggccggaggtttcgctcagcgcgatgacgccggggctaggattttacggcctgcgaaataccgcctgggcgggacatatccgcctgcaaagcgcggcgggcggctggaatattatcgtttccaactgggggcgaatccgcctgtgccgcggcgaggagacggcatcatgtctgtaa

SEQ ID NO: 175957 - DNA, 795 bp, Klebsiella oxytoca
atgaaacagtatcttgatttgatgcagaaagtgctcgatgagggcacgcaaaaaaatgaccgcaccggtaccggcaccgtctctattttcggccaccagatgcgttttaacctgcaggaaggattcccgttggtgacgaccaagcgctgtcatttacgctccatcatccatgaactgctgtggttcctgaagggtgacaccaacgtcgcgtatctgcacgaaaacaacgtcactatctgggatgaatgggcggatgaaaacggcgacctgggtccggtttatggcaagcagtggcgttcctggcccgcgccggacggccgtcacatcgaccagattagcacggtgatggaacagctgaaaaacgatccggactctcgtcggattattgtctcggcctggaacgtcggcgaactgaacaaaatggcgctggcgccgtgccatgcgttcttccagttctatgtcgccgacggcaagctctcctgccagctctatcagcgctcttgcgacgtgttcctcggcctgccgttcaatatcgccagctacgcgctgctggtgcatatggtagcccagcagtgcgacctcgaagtgggcgattttgtctggaccggcggcgacacgcacctgtacagcaaccacatggagcagacgcacctgcagctaagccgcgaaccgcgggcgctgccgaagctggtgatcaaacgcaagccagcgtcgattttcgactaccgctttgaagacttcgaaatcgaagggtacgatccgcatccggggattaaagcgccggtcgcgatttaa

SEQ ID NO: 175958 - DNA, 876 bp, Klebsiella oxytoca
atgaatagtggctacctgcattttccggagtttgatccggtaattttttccattggaccggtctccctccactggtacggcctgatgtacctggttgggtttgtttttgcgatgtggttggccacccgtcgggccaatcgtccaggcagcggttggacaaaaaacgaagttgaaaacctgctgtacgccggcttccttggggttttcctcggcgggcgtcttggctatgtcttcttctacaacctgccggtgttcctcgacgatccgctctatctgttccgcgtctgggacggcggtatgtccttccacggcggcctgatcggcgtgattctggtgatgatcattttcgccaaacgcaccaagcgtaccttcttccaggtttctgacttcattgcgccgctgattccgtttggcctcggcgccgggcgtctgggtaactttatcaacggtgaactgtgggggcgcgtcgatccgaacttccactacagcatgattttccccggctctcgggcggaagatctggcgctgctgccatcgcatccggagtggcaatcgctgttcgatacctacggcgcgctgccgcgtcatgcttcgcagctctatgaactggcgctggaaggcgtggtgctgttcctgatcctgaacctctttatccgtaagccgcgtccggccggttcggtttccgggctgttccttatcggctatggcttgttccgcatcatcgtggaattcttccgccagcctgatgcgcagtttaccggcggctgggtacagtacatcagcatggggcagattctttcgattccgatggtgcttgcgggtatcataatgatggtctgggcgtaccgttctcgtccgcagcaacaaaattcttga

SEQ ID NO: 175959 - DNA, 2247 bp, Klebsiella oxytoca
atgctcactcggttgcgagaaatagtcgagaaggtcgcgagtgcgccacgtttaaacgaggcgctggatatcctggtaaccgatatctgcgctgcgatggagacggaagtttgttcggtttatctggctgatcatgaccgacgctgttattacctgatggcgacgcgcgggttgaaaaagccccgcgggcgcatcgttgcgcttgcttttgatgaaggcctggtcggcctggtcggccgcctggcggaacccatcaacctcgccgacgcgcaaaagcaccccagctttaaatatattcctgccgtaaaagagggccgctttcgcgctttcctcggggtgccgattatccagcggcgtcagctgctcggcgtgctggtggtacagcagcgcgagctgcgccagtttgacgaaagcgaagagtcttttcttgtcacgctggccacgcaaatcgccggcatcctctcccagtcccagctaaacgcgctatttggtcagtatcgtcagacccgcatccgcgcgctgcccgcatcgtccggcgtagcaattgccgaaggctggatggacgtcagcctgccgctgatggagcaggtttatgaagcctcaaccctcgataccgcttccgagcgcgagcggctgaccggcgcgctggaagaggcggcgaatgagtttcgccgctacagcaaacgctactctgccggcgcgcagaaagagacggcggccatttttgacctctattcacacctgctctctgacgcgcgcctgcgccgcgagctgtttgccgaagtggataaaggcgcggtggccgaatgggcggtgaaaaagatcatcgagaaattcgccgaacagtttgccgcgctcagcgatggctacctgaaagagcgcgcgggcgatctgcgcacgctgggccagcggctgcttttccatctcgacgacagtattcaggggccaaatacctggccggagcgcatcgtgctggtggcggatgaactgtcggccaccaccttagcggaggttcctcaggatcgtttagccggcgtggtggtgcgcgatggcgcggcgaactcccatgccgcgattatggtccgcgcgttgggcattccgacggtgatgggggcggatatccagccttcgttgctgcacggccatacgctgattgtcgatggctatcgcggcgagctgctggtcgacccggagccggtgctgctgcaagagtatcagcgcctgatcagcgaagaaaacgagcttagccgcctggctgaggacgatcttgaacgcgcttcggaactgaaaagcggcgagcgggtaaaagtgatgctcaacgcgggcctgagccccgagcatgaagaaaagctcggcaacttcgtcgacgggattggactttaccgtaccgaaatcccctttatgctgcaaagcggcttcccctctgaagaggagcaggttgcccaatatcagggcatgctgcagatgttcaacgataaatcggtgacgctgcgcacgctggacatcggcgcggacaaacagctgccgtacatgccgatcagcgaagagaacccgtgccttggctggcgtgggattcggatcacgctcgatcagccggagatctttctggtgcaggtccgcgcgatgctgcgcgccaacgcggcgaccggaaacctcagcatcttgctgccgatggttaccagcctcgatgaagtggatgaggctcgtcgcctgatcgatcgcgccagccgcgaagtggaagagatgatcggctacgccattccccgcccgcgtcttggcgtgatgctggaagtgccgtcgatggtgtttatgctgccgcagctggcgaaccgcgtcgattttatttccgtcggcaccaacgatctgacccagtacattctggcggtggatcgcaacaatacccgggtcgccagtatgtatgacagcctgcatcctggggttctgcgggcgctggcgatgatcgcccgcgacgccgagcgttttggtatcgatctgcgcctgtgcggagaaatggcgggcgatccgatgtgcgtgacgatcctgattggcatgggttatcgtcatctgtcgatgaacggccgttcggtggcgagagtgaagtatctgctgcggcgcatcgatatcaatgaagctcaggagctttcgcagcgaagcctggaagcgcagatgaccgccgaagtgcgccatcaggttgcggcatttatggaacgacgaggactcggcggcctgattcgcggcggccgttag

SEQ ID NO: 175960 - DNA, 531 bp, Klebsiella oxytoca
gtgattgatgacgatggctaccgcccaaatgtcggtattgtaatctgtaatcgccagggccaggttatgtgggccaggcgctatggtcagcactcgtggcagttcccgcaagggggcataaatccaggagaatcagcagagcaggcgatgtatcgggaattgttcgaagaagtcgggcttagccgcaaagatgtgcggatcctcgcttcaacccgtaactggttgcgttacaaattgcctaaacgtttggtgcgttgggacacaaagccggtatgtatcggccagaaacagaagtggtttctcctgcaattgataggcagtgatgcagatgtcaatatgcaaaccagcagtacacctgagtttgatggctggcgatgggtaagctactggtacccagtgcgtcaggtggtgtcgtttaagcgcgacgtataccgcagggtgatgaaagagtttgccagcgtcacaatggcgctggcggaaaacacgcctaagccgcaaagcgcgcctgcatatcgacgtaaaagaggttaa

SEQ ID NO: 175961 - DNA, 696 bp, Klebsiella oxytoca
atgtcgaccatcgcgccgctgttatcccccccgcaaagccaggcgcagctgctggcccaggcgcagcagctggcaggctattcgctgggagagctggcgatacttgccggaattcccattccgcgcgatttaaaacgtgataaaggctggatcggtattctgctggaaatatggctgggggcgagcgcaggcagcaagccagagcaggatttcgccgccctcggcgttgagctgaaaacgattcccatcgatgcttttggccggccgctggaaactaccttcgtctgcgtcgcgccgctaaccggcaacagcggcgttacctgggagagcagccacgtacgtcacaagcttaagcgcgtgctgtgggtaccggtagagggcgatcgcgcgatccctttagccgaccgccgcgttggcgctccgctgctgtggagccccagcgaagaagaagagcgacagctacgtatggattgggaagagctgatggacctgatcgtccttggccaggtcgaacgtatcaccgctcgccacggcgaagttctgcagctgcgcccgaaagcggccaacagcaaagcgctgaccgaggccgtaggcgcccgcggcgaaccgatcctcaccttaccgcgcggtttctatctgaagaaaaattttaccgccgccctgctcgcccgccattttcttctttaccctaaataa

SEQ ID NO: 175962 - DNA, 714 bp, Klebsiella oxytoca
atgttatttgcatgggtaaccgatcctaacgcctggctggcgcttggtacgctgacgctgctggagatagtgctcgggatcgataatattattttcctctctctggtggtcgctaagctgcccacggcacaacgggcacatgcccgccgcattgggctgatgggcgcgatgatcatgcgtctggcgctgctggcgtcaatcgcatgggtcgtcaagctcactaaccctctctttaccgtattaggtcaggagatctcttttcgcgatctgatcctgctgctcggcgggctgtttctgatctggaaagcgagtaaagagatccacgaatccatcgaaggcgaagaagaagggctgaaaaccaacgtccattcatttatgggcgctatcgtgcagattatgctgctggatattattttcagcctcgattcggtcattaccgccgttgggctgtcggatcatctgtttataatgatggcggcagtagttatcgcggtgctggtgatgatggttgccgcccgctcgataggcgattttgtcgatcgccacccttcggtaaaaatgctggcgctgtcgtttttgatccttgtcggctttacgctgatgctcgaaagtttcgacgtgcacgtgccgaaaggttacatctatttcgccatgttcttctcgattgcggttgagagcctcaacctgctgcgaaataaaaaaaatccgctgtag

SEQ ID NO: 175963 - DNA, 219 bp, Klebsiella oxytoca
atgaaaaaatgggcagtattgatttccgccgtaggactggcgttctcggtttcaggttgcagcagcgattacgtcatggcaaccaaagatggtcgcatgattctgactgacggcaaacccgctatagacgacgatactggccttatcagctacgaagatcagcagggtaataaaatgcagatcaatcgtgatgacgtttcgcagattattaaacgttaa

SEQ ID NO: 175964 - DNA, 1041 bp, Klebsiella oxytoca
atgcagtatcaccgtatcccacacagttctcttgaaatcagcacgctggggctgggcacaatgacgtttggtgagcagaatagcgaggcagacgcccatgagcagctcgattacgccgtgagccagggcataaacctgatcgatgtcgctgaaatgtatcccgtcccgccgcgcccggaaacccagggtctgacggaaacctacgtcggcaactggctggcgaagcgcggtaaccgcgagaagctggttatcgcctctaaagtcagcggccctgcccgcaataacgacagcagcatccgtcctgaccacaaactggatcgtaaaaatatccgcgaggcgcttcacgacagcctgaagcgcctgcagaccgattatctcgatctctatcaggtacactggccgcagcgcccaaccaactgtttcggcaaactgggctacacctgggccgattccgcgccggtcgtcactctcctggatacgctggatgctctggctgaattccagcgtgccggcaaaattcgctatatcggcgtttccaacgaaacagcatttggcgtcatgcgttaccttcatcttgcggataaacacgacctgccgcgcattgtgacgatccagaacccgtacagcctggtgaaccgcagctatgaagtgggcctggcggaagttagccagtatgaaggcgttgaactgctggcctattcctgcctcgcgttcggtacgctgaccgggaagtacctcaatggcgcaaaaccggccggcgcgcgcaatacgctgttcagccgttttacgcgctatagcggcgagcaaacgcaaaaagcggtggcggcctatgtcgatatcgcgaagcggcataaccttgacccggcacaaatggcgctggccttcgtgcgtcgtcagccgtttgtcgccagtaccctgctgggcgcgacgaccatggaacagctgaaaaccaacgtcgaaagcctccatctggagctgagcgcagaggtgttagcggagattgaagcggtgcatcaggtttatacctacccggcgccgtaa

SEQ ID NO: 175965 - DNA, 1194 bp, Klebsiella oxytoca
atgagtgagtcagtacacactaacaattcgctgtactcgaaagggatgatagcggttatctgcgcccagtttctctcagcattcggcgacaacgcgctgctgttcgctaccctggcgctgatgaagcagctgttctacccggagtggagccagccggtattacagatgttgtttgtgggcgcttacattctttttgcgccgtttgtcgggcaatttgccgatagctttgctaagggacgagtgatgatggtagccaacggcctgaagcttatcggcgcgggctgcatctgcttcggcgtgaatccgtttctcggctataccctggtcggtatcggcgccgccgcctattctccggctaaatacggcatccttggcgagctgaccaccggcgataagttagtgaaagcgaatggcctgatggagtcatccaccattgcggcgatcctgctcggctcgatggcgggcggtattctcgccgactggcacgttgtggcggcgctcagcgtctgcgcggtggtgtacgccggggcggtcgttgccaacctgtggatcccgaagttgcccgcggcgcgtccggggcaatcctggcgcttcaggccgatgacccacagctttttcagcgcctgtacgaccctatggcgcaacggcgaaacccgcttttcattagtcggcaccagcttgttctggggagcgggagtgacgctgcgctttctgctggtgctgtgggtcccggtagcgctgggcattaccagcaacgcgatgccgacctaccttaacgcgatggtggcggtggggatcgtgctgggagctggcgcggcggcgaagctggtgacgctggaaacggtgtcgcgctgtatgcctgccgggatattaattggcgtggcggtcatctttttcgccatccagcaggcgctgctgccggcgtttgctctgctgctgctgctcggcgcgtttggcggcttctttatcgtgccgctcaatgcgctgctccaggagcgcggcaagcatacggtcggcgcgggcaacgctatcgcggtgcagaacctgggcgaaaacgtggcgatgctgctgatgttggggctctattcgctggcggtgagcatcggtattccggtggtcggcgtggggatgggttttggcgtagtgttcgcgctggcaattaccgccctgtggatctggggacggcgcaaataa

SEQ ID NO: 175966 - DNA, 2160 bp, Klebsiella oxytoca
atgcttttgggattttttagactgctattcaaaggattgtatcgggtaaggcttaccggtgacacgcaggcgctgtaccagcaaaaggtactgatcaccccaaaccatgtctcttttattgacggcgttctgctggcgcttttcctgccggtgcgcccggtctttgcggtctattcctcgattagcgagcgctggtttatgcgcgcgctaaagccgctgattgattttgtcccgctggatcccaccaaaccgatgtcgataaagcatctggtacgcctcattgagcaggggcgcccggtggtgatttttccggaagggcgcatttcggtgagcggttcgctgatgaagatttacgacggcgcggcctttgtggcggcgaagtcgcaggcaaccatagtgccgttgagaatcgaaggcgccgaattaacccattttagccgtctgaaggggctggtcagacgccgcctgttcccgcgcattcagctgcacctgctgccgccgactcatttgccgatgcccgaggcgccgcgcgcccgcgaccggcgaaaaattgccggtgagatgctgcatcagatcatgatggaggcgcggatggcggtgcgcccgcgcgaaacgctgtacgagtctctgctggcggcccaggaccgcttcggcgcgcgtaaaaactgcgtggaagatatcaactttcagccggacacctaccgcaagctgctgaccaaaaccctgttcgtggcgcgtattctggaaaaatacagcgctcagggcgaaaaaatcggcctgatgctgccgaatgcgggaattagcgcggcggtgattttcggcgcgatcgcccgtggacggatcccggcgatgatgaattataccgccggagtgaaaggcctgagcagcgccattaccgcggcggaaatcaaaaccatctttacctcacgcacctttctcgataaaggcaagctctggcacctgcccgagcagttgactcaggtgcgctgggtgtttctcgaagatttaaaaggcgacgttaccgccgccgataagctgtggatttttggccatctgctgatgccgaagctggcgcaggtgaagcaggagccggaagatgcggcgatgatcctgtttacctccggctcggaaggcaatccgaaaggagtggtacatagccacaagagcctgctggccaacgtcgaacagattaaaacaattgccgactttaccgctaacgaccgctttatgtcggcgctgccgctgttccactcctttggcctgacggtcggcctgctgaccccgctgtttaccggcgcggaagtcttcctctatcccagcccgttacactaccgcgtggtgccggaactggtatatgaccgtaactgtaccgtgctgttcggcacctccaccttcctcggcaactacgcccgctttgcgaatccctatgatttctatcgcctgcgttacgttgtcgccggcgcagagaagctgcaggagagcacgaagcagatctggcaggacaagtttggtctgcgcattcttgaaggctacggcgtcaccgaatgcgcgccggtggtgtcgattaacgtgccgatggcgacaaaagtgggcaccgttggccgaattctgcctggaatggatgcgcgtttgttggcgatgcccggaattgaagagggaggccggctgcagcttaaagggccgaacatcatgaacggctatctgcgggtggaaaatccgggcgtactggaagcgcccgcggcggagaatcagcacggagaagtggaaaacggctggtacgacaccggagatatcgtcagctttgacgagcagggctacgtgcggatacagggccgcgcgaagcgctttgccaaaatcgccggcgagatggtgtcgctggagatggtcgagcaggtggcgctggcggtttcgccggacaaaatgcacgccacggcgattaaacaggacgccagcaaaggcgaggcgctggtgctgtttaccaccgataatgaactgaatcgtgaaaaactgctgcgctatgcccgcgaacacggcgtaccggagctggcggtaccgcgcgacattcgctggctgaaacagctcccggtattgggcagcggcaagccggactttgtcactcttaaaagtatggttgatcggacggaagattcggatgagtga

SEQ ID NO: 175967 - DNA, 1017 bp, Klebsiella oxytoca
atggcgaccattaaggatgtagcccgactcgcaggcgtttctgtcgctaccgtctcccgcgtgattaacaattcaccgaaagccagtgaagcctcgcgccagtcagtaggcgcggcgatggaaacgctaaattatcaccccaacgccaacgcccgcgcgctggcgcagcagtcaacagaaaccgtcggcctggtggtgggtgatgtctccgaccccttcttcggcgcgatggtcaaagccgtcgagcaggttgcctacaataccggcaattttttgctgatcggcaacggctatcacagccttcacaaagagcgtcaggcgattgaacagctgatccgccaccgctgcgctgcgctggtggttcatgccaaaattatccccgacgacgagctggcctcgctgatgaagcaaatccccggcatggtgctgattaaccgcatcctgcccggcttcgagcagcgctgcgtggcgctggatgaccgctacggcgcgtggctcgctacccgccacctgattcagcaggggcacacccgtatcggctatctctgctcaaaccacgccatttccgatgccgaagatcggctgcagggctactattcggcgttaaaagagagcaacctgccgtgcaacgatcggctggtgacctttgccgaacccgatgagagcggcggcgaactggctatgaccgagctgctgggccgcggcagaaattttaccgccgtcgcctgctataacgactcaatggccgccggcgcgatgggcgtcctgaacgataacgggattgatgtgccgcgcgagatttcgctgattggttttgatgacgtgctgatttcacgctacgtgcggccgcggctgactaccgtgcgctatccgattatcaccatggcgactcaggccgctgagctggcattagcgctggcggaacatcggcctccgccggagataacgcatcttttcagccctacgctggtccgccgtcactcggtgattgcgcctctcgatagcgacaaatcgtag

SEQ ID NO: 175968 - DNA, 477 bp, Klebsiella oxytoca
atgatccaacccctctacgccgcgccgcagcacgcttcacgcgtgacggaatggctatggcgggcttttggcggtgaaacgctgccgcaggcgttcttcgccagtattgtcgggcatagccagacgccaggggcgctgcctatgacctttattgccgctgagggggagacgctgttaggcaccgtcggcctgtggcgctgcgatttaatcagccgtcaggacctttatccatggatggcggcgctctacgtggctcctgaagcgcgcgggcaggggctggccgggaaactacagcagcacgttatcgactatgcccgaaagcagggctatggcgagctgtttctctactccgcctgccgcgatttttatgaacgtttcggctggcagtacatcggcgaaggcctagattatccggccgccgccgtcagtttataccgctacgatttgtcgctatcgagaggcgcaatcaccgagtga

SEQ ID NO: 175969 - DNA, 774 bp, Klebsiella oxytoca
gtggagaaggctatcattccgccggaaaagaaaccctaccaggaaataggtgatgatttacgcgcacagattgcgcaggggcgctatcctatcgggtcgcgcctgccgccggaacgcaatatcgccgagacctacggcgtgagccgcaccatcgtccgtgaagcgctgttgatgctggagctgcaggggacggttgatatccgccagggctcaggggtgtatgtgatgcgcatcccgcacgaggacgatagtgaggaagaacagatgctgagcagcgacgtcgggcccttcgaaatcctgcaggcccgccagctgctggagagcaacatcgccgcctttgccgccaaaatggccacccgcgccgatatcgataacctgaagcgcattatcgagcaggagcagcgggccattgccgctaacgataccagccaggacaacgcccggctgtttcacctggtgctggccggcgcgacgcaaaatcagatgctgctggcgacggtcgagcgcatctggctgcagatggacagcagcccgctgtggcagcagttcaacgtgcatattgccagccgggcgtatcgcctgaagtggctcggcgatcggcaaacgcttctcgccgccctgcgtcgtcgcgatgtgatgggggcctggcaggctatgtggcagcatctcgaaaacgttaaaaacagtctgctggagctgtccgatgaagacgcgccggactttgatggctacctctttgaatcggtgcctatttttcaggggaagctggtgtga

SEQ ID NO: 175970 - DNA, 1428 bp, Klebsiella oxytoca
atgacgacagtaaagatggccattccccgcgactttatcctcggcgccgccgcttcggcgtggcaaaccgagggctggagcggcaagcaagagggtcaggattcctggcccgatctctggtacaagaacgaccgtcacgtctggcataacggctacggtccggctgtggcgacggattttatcaaccgcttccgcgaagatgtgcagttgatgaagctggccgggctcacccactaccgtacatcgataaactggtcgcgctttctcaccgattatgaaaacgtcacggtcgatgaagcctatgcgacgtactacgaccagttgttcgatgaactgctggccaacggcatcgagccgatgatctgccttgagcactatgaactccccggctatctgctggagcagtacggcggttgggcgtcaaaaaaggtggttgcgctgtttgtgcagtatgcagagaaagttttcgcccgctatcaccgcaaggttacgcgctggtttactttcaatgagccgatcgtcgtgcagacccgcgtttacctggacgcgctgcgctggccctacgagcagaataccggcacctggatgcagtggaaccaccacaaggtgctggcgacggcaaaagtggtccagctgttccgcgagaaaggctatcgcggcacggtaggttgcattcttaacccggaggtaacgtacccgcgctcaacagcgccgcatgacgtgcgcgccgccgagcgctacgatctgttctataaccggatttttctcgacccgctggtccacggcgaatacccgcccgagctgctggccctgctcgaacagcacgaggttgcatgggattatcgagcggaagagctggcgattatccgcgaaaacaccgtcgatgagctggggattaacctttactatccgcatcgcgttaaagcgccatcgcgcgcctggcacccgcagacgccgttccatccggcttactactatgagccctttgaactaccgggacgacggatgaataactcccgcggctgggaaatttatccgcaaatcatttttgatatggcgatgcggatcaaacgggactatcgcaatattccgtggttcgtggcggaaagcggcatgggtgtggaaaacgaagggcagtttcgcaatagcgaaggcactatcgccgacgactaccggatccgttttatcagcgagcatctttggcagacgctgcgcgcgcgggaagcgggagccaactgccagggttacatgctatgggcatttaccgataacgtttcgccaatgaacgcctttaaaaaccgctacgggctgattgaaatcgatctgcaaaataatcgtgcccggcggcccaaggcttccgccagctggttccgtaagcttggcgagagtcgcgaattgacgctggatattgatgatgagtggcgctag

SEQ ID NO: 175971 - DNA, 1338 bp, Klebsiella oxytoca
atggcattgcaggacaaactgatcgactcactggggagtttcgccacgaaattcaacagctaccgctacatcatggcgataaaatccgcctttattaccctgatgccggtgatcatcgttggcgccttttcggtgctgatctccaatatggtgctggatccaaaaaacggcctcgccagctttcaggcgctctcgtttctggcggcgctcaaacctattaccagcgcgatcaactacgccacccttaactttctcaatattggcgcggtgttccttattggcattgagctggggcggattaacggcattaagagcctgttccccggactgctggcggtgatctgctttatctgcgtcacgccgaccaccgtcgagatgatggtcgacgggcaaatgcatgaagtgaaggatgtcctgctgcgccagttctccgatacccgcagcctgttccttggcatgtttatcgctattctgtcggtggagatctactgctggctggagggccgtaaggggctgaagattaagatgccggataccgtgccgcccaacgtatcggcatcattttccgcgctgatcccggccattatcaccaccacggtgattgccacctttggctttatttttcatcaggcgaccggcatgtatctgtatgacgcggtctatcaggtggtgcagcagccgctggagcgggtggtgcaaagcctgccggggatcctgctgctgatgtttgtcgcgcagctgttctgggttatcggcattcacggtaatcagatgatcaaaccgatccgcgaaccgctgctgctgggagccattaccgtcaatatgagcgcctttgagcagggcaaagaagtgccgaatatcatcaccatgccgttctgggatgtctatatgagcattggcggatcgggactgacgattggtctgctgattgcggtgatgattgccactaaacgcaaagagatgaaagagatcgccaagctatcgattggaccgggcctgttcaatatcaacgaaccggtcattttcgggatgccgatcatgctcaatccgatcctcgcgatcccctttattattacgccgctggtgaccggcagcatcggctacttcgcgactgccgccggttttgccggtaaagcggtggtgatggtgccctggaccacgccgccgctgatcaacgcctggctgtcaacggcgggctcgatgggcgcggtggtgacgcagcttatctgcatcctgaccgcggtgcttatctacctgccgtttgtcaaaattgcttcccgtcgcgcggaaaacgcccagcgtcaggcggacaacgcgcaagccagcgaaaatgcatga

SEQ ID NO: 175972 - DNA, 1011 bp, Klebsiella oxytoca
atggctacaatgctggatgtctcaattcgcgcaggcgtctctaaagcgacggtttcccgcgtgttgaacggcacgggtcaggtgaaagagagcacccgccaacaggtttttaaggcgatggaagagctgggctatcggcctaattttctcgcccgctcgctggcgaaccgcaccagcaacagtatcggactggtggtttctacctttgacggcttctattttggccgcctgctgcagcaggcttcccgccagacggaagcctggggtaaacagctgatcgttaccgacggccacgatgcgccggaacgtgaagaagaggcggtgcagatgctggccgaccgccagtgcgatgctatcgtgctttacacccgccatatgagcgaaaagaaaatcatgtcgctgattgaatccatcgacatgccgctggtggtgattaaccgtgatgtaagccaggcgagagagcgctgcgtgtttttcgaacagcaggatgcagcgtttcaggcggtggaatatctgataacccagggccatcgcgatatcgcctgtattaccgtaccgatgcacacgccgacgggtaaagctcgcctggaaggctatcgtaacgcgttgaaaaagcacggcattaagtgggatccggcgaaagtgaaatacggcgactccaccatgagccgcggctatgaactctgctgcgagctgctggaagagaaaacgccgtttagcgcgctgttttcctgtaacgatgatatggcgctgggcgcttcgaaggcgctgcaccaggcagggctgcggatcccgcaggatatttcgctgtttggctttgatgacgcgccgagcgctaaatggctggaacctgggctatcgacggtctatctgccgatcgataacatgatcaccaccgctatcgatcaggcgatcaagctggctaacggtcagccgatcgaaaccataccgccgtttaccggcaaactggtgctgcgcgagtcggtcaccaccgggccgtattacgcataa

SEQ ID NO: 175973 - DNA, 1263 bp, Klebsiella oxytoca
atgccacactcgctttacgccaccaataccgacctgaacgcagacaatctgctgcgtttgcccgccgagttcggctgcccggtttgggtctacgacgcgcaaattatccgccgccagattgctcagttgagcaagttcgacgtagtgcgttttgcgcagaaggcctgctcgaatatccacatccttcgcctgatgcgcgagcagggcgtgaaggtggattcggtgtcgttgggcgagatcgagcgcgcgctggctgccggatacgatccgcatcagcatccggaagatatcgtctttaccgctgatctgatcgacgatgcaaccctggcgcgggtgaaagaactgcagatcccggtcaacgccggctcaattgatatgctgagccagctgggcgaagtttcaccgggccatcgcgtctggttgcgggttaacccggggttcggtcacggtcatagccaaaaaaccaataccggcggcgaaaacagcaagcacggcatctggcacagtcatttaacggcggcgctggaagtgatgcgtcgttatcagctacagctggtgggaattcatatgcatatcggctccggcgtagactacggccacctggagcaggtctgcggcgcgatggtgcgtcaggttgtcgaattcggtcaggatctgcaggcgatctccgccggcggcgggctgtcgatcccttaccgcgaaggcgaagaggcgatcgataccgatcactatttcggcctgtggaacgcggcgcgtgaacaggtcgctaaacacctgggccatccggtcgcgcttgagatcgaaccgggtcgcttcctggtggcggaatccggcgtgctggtttctcaggttcgcagcgtaaaagagatgggcagccgccacttcgtgctgattgacgccggttttaatgatttgatgcgtccggcgatgtacggcagctatcaccatattaccgctctggccgcggacggccgcgatctgagcgccgcagcggagatagaaaccgtggtggccgggccgctgtgcgaatcgggcgatgtctttacccagcaggagggagggaaagtggaaacccgcctgctgcctgcggtggtgccgggcgattatctggtgctgcacgataccggcgcttacggcgcgtcgatgtcctcaaactacaatagtcgtccgctactgccggaagtgctgttcgacaacggtaaagcgcggctgatccgccgccgtcagactatcgaagagctgctggcgctcgagcagctgtaa

SEQ ID NO: 175974 - DNA, 927 bp, Klebsiella oxytoca
atgcccgccgttaatctgcgtcatattgaaatcttccatgccgtcatgaccaccggcaatctgaccgaggccgcaagaatgctgcatacctcgcagccgaccgtcagccgcgagctggcgcgttttgaaaaggtgctgggattaacgctgttcgcccgcgcccgcggccgtctgcagccaacggttcagggtttacgcctgtttgaagaggtgcagcgctcctggtacggcctggacagaatcgtcagcgctgcggaaagcctgcgcgagttccgccagggcgaactgtcggtcgcctgtctgccggtattttcccaatcattcctgccgctactgctggagccttttttgacgcgctacccggaggtcagcctgcaaatcgtcccgcaggagtcgccgctgctggaggagtggctttccgcccagcgccacgatctgggattgacggagaccctgcatactcccgccggaaccgagcgtacgcccctgttgaccctgaatgaagtgtgcgtattgccgcagggccatccgcttgccgctaagcaagcattaacgcctgcagactttaatggtgaaaactatattagcctgtcgcgcaccgacagctaccgtcagctgctcgatgcgcggtttcatgaacatcaggtgaaacggcggatggtggtggaaacgcacagcgccgcctccatttgcgctatggtgcgcgccggagtcggcatttcagtggttaacccgctcaccgcgctcgattatgccgggaacggcgtggtggtccgacgctttagcgttgaagtgccttttaccgtaagcctggttcgcccgctccaccgcccgggatccgcgctggtcgatgcgtttgcactgcatttgcaaaacagcatgtctcgcatcctgaccccgctcgaagcggtacttacgaaagcataa

SEQ ID NO: 175975 - DNA, 693 bp, Klebsiella oxytoca
atgaaaacgattggtctgttaggcggtatgagctgggaatcaacgattccttactaccggttgataaatgaaggtattaaagcacgcctcggcggtctgcactccgccagcctgctgttgcacagcgtcgatttccacgaaattgaagcctgtcagtcaaacggcgactgggaacgcgcgggcgagatcctcgcgcaggcggccttcggcctgcagcaggcgggcgccgaagggatcgtcctgtgtaccaacaccatgcataaagtcgcgcaggcgatagaaacgcgctgcgacgtgccgtttttgcatattgccgacgctaccggacgagcgattatcgcaaagggccagcgccgcgttgcgctattaggcacgcgctataccatggaacaggatttttatcgcggccgcctgcagcagcagtttgctattgatacgctgattccggaagctgaagatcgcacgcggattaaccagatcatttttgatgaactgtgcctcggcgtctttaacgcgcattcacgcgactactatctgcaggtcattgacgctctggcggagcagggggcggaaggggtcatttttggctgcaccgaaatcggcctgctggtaccggaagagagcagtccgctgccggtgtttgataccacagcgattcatgcggcggacgcggttgagtttatgctttcgtaa

SEQ ID NO: 175976 - DNA, 327 bp, Klebsiella oxytoca
atgtttatttttcataaagagaccacccttgaagatctgggtaatggcgtcacgcgccgcattcttgcgcacgatggcaaaatgatggcggttgaagtgaacttcgaacaaggcgccattgggccgatgcataaccacccccatgaacagcttacctacgtgctctcaggcgagttcgagttcaccatcggtgatgaaaagcacgtggtcagcgccggcgatacgctctacaagaaaccggaaattatgcacggctgcgtttgcctcaaggcgggaacgctgctggataccttcacccctgtgcgtcaggattttctgcaaaagtag

SEQ ID NO: 175977 - DNA, 891 bp, Klebsiella oxytoca
atgaatgaaaacaaaatgctgggattggcatggatatcgccctacatcatagggttgatagtctttaccgcctttccctttgtttcatctttcttcctcagtttcactgagtacgatttgatgagtccaccggtgtttaacggcatcgaaaactatcgctacatgctgaccgaagatggcctcttctggaaatccatgggcgtgacgttcgcgtatgtctttttaaccatcccgttaaaactggctttcgctctggggatcgcgtttgtcctcaactttaagctgcgcggcatcggttttttccgtaccgcctactacatcccgtcgatactcggtagctcggtggcgattgccgtattgtggcgcgcgctgtttgctatcgacggcctgctgaacagctttatcggcgtgctcggcttcgacccggtcaactggctcggcgagccttcgctggccctgatgtccgttaccctgctgcgcgtctggcagtttggctcagcgatggtcatcttccttgcggcgctgcagaacgttccacaatcacaatatgaagcggcgatgatcgatggcgcttcaaaatggcagatgtttatgaaggtcacggtgccgctaatcacaccggtgattttcttcaacttcatcatgcagactacccaggcgttccaggagtttaccggcccgtacgtcatcaccggcggcggcccaacctactccacctatctgttctcgctctatatctacgacaccgcctttaagtacttcgatatgggctacggtgcggcgctggcatgggtgctgttcctggtggtcgcggtgtttgccgccattgcgtttaagtcttcgaaatattgggtgttctactccgccgataagggaggcaaaaatggctga

SEQ ID NO: 175978 - DNA, 903 bp, Klebsiella oxytoca
atggctgatatccaacaaatcactgaagcaagggacgtcgctgaacgtgaagtcgcgcggacgctgcgccgtgaaaaaataagccgctcgattcgctatgtgatcctgctgttcgtcggcctgctgatgctctacccgctggtatggatgttctcggcgtcgttcaaaccgaaccacgagatcttcaccaccctgagcctgtggcctgcccacgcgacctgggatggctttatcaacggctggaaaaccggcaccgagtacaacttcggccactacatgctgaacacctttaagtatgtgatcccgaaagtgctgctgaccattatctcctccaccatcgtggcctacggctttgcccgcttcgaaatcccgtggaagaaattctggttcgctacgctgatcaccaccatgctcctgccgagcaccgtactgctgatcccgcagtatctgatgttccgcgaaatgggcatgctgaacagctatctgccgctgtacctgccgctggccttcgccactcaggggttcttcgtcttcatgctgattcagttcctgcgcggcgttccgcgcgacatggaagaagcggcgcagattgacggctgcaactccattcaggtgctgtggtacgtggtggtgccaattctgaaaccggcgattatctcggtggcgctgttccagttcatgtggtccatgaacgactttatcggtccgctgatttacgtctacagcgtggataaataccccatcgcgctggcgctgaaaatgtccatcgacgtcacggaaggcgctccgtggaacgaaattctggcaatggcgagtatctccattctgccgtccatcatcgtgttcttcctggcacaacgctacttcgtacagggcgttaccagcagcggaattaaaggttaa

SEQ ID NO: 175979 - DNA, 1128 bp, Klebsiella oxytoca
atggctgaagttattttcaacaaactggaaaaggtctactccaacggcttcaaggcggtacatggtatcgatctgaaaatcgcggacggcgagtttatggttatcgttgggccgtccggctgcgccaaatcgactaccctgcgcatgctggctggtctggaaactatcagcggcggcgaagtgcggatcggcgaaaaaatcgtaaataatctcgcgccaaaagcgcgcggcattgcgatggtgttccagaactacgcgctctatccgcatatgacggtgcgcgagaacctcgccttcggtctgaagctgagcaagctgccaaaagaccagattgaggcccaggtaaacgaagcggcgaaaatccttgagctggaagaactgctggaccgcctgccgcgtcagctctccggcggtcaggcacagcgcgtagcggttggccgcgcgattgtgaaaaagccagatgtattcctgttcgatgaaccgctctctaaccttgacgccaagctgcgcgcctcaatgcgtattcgtatttccgacctgcataaacagctgaaaaaatccggtaaaccggcgaccaccgtctacgtcacccacgatcagaccgaggcgatgaccatgggcgaccgcatctgcgtgatgaagctgggccatatcatgcaggtggataccccggacaacctctatcacaagccgaaaaacatgtttgtggccgggtttatcggcgcgccggagatgaatattcgtcccagccagctggttgagcaagcgggtcgcctgcatctgaccgttggcgacgggctgctgccgctaaatgaccgactgcagagcaaggtcgacacccataagaaccagcaggtgttctttggcgtgcgtccggaatttgtctccatctccgatgaaccgtttgctgaaggctcctgccccggcgagatggtgcgcgtggaaaacatgggccatgaattcttcgtctacctgaaggtggccgattatgaactgaccgcccgcgtgccttcagatgaagcgaagccaatgattgagaaaggacttcatcgcacggtgcatttcaaattcgatctcaacaagtgtcatatctttgacgccaaaactgaacagaacatctctctgtga

SEQ ID NO: 175980 - DNA, 1287 bp, Klebsiella oxytoca
atgaaaaaagtgcttttaagcgccgcaatctccgccactttgggccttaccgcgttgccttctatggcaaaggatgtcgacctgcgtatgtcatggtggggcggcaacggccgtcaccaggtgaccctcaaggcgctggaagagtttcataaacaaaacccggatatcaacgttaaagcggaatataccggctgggacggccatctttcgcgcctgaccacgcaaatcgccggcggtaccgagccggacgtgatgcaaactaactggaactggctgccaatcttttcgaaaaacggcgaaggcttctacgatctcaacaagatgaaggacgtgatcgacctgagccagtttgatgccaaagagctgcaaaccaccacggtagacggcaagcttaacggtatacctatttccgtgaccgcgcgcgtcttctattttaacgatgaaacctggaaaaaagcgggcgtcgagtacccgaaaacctgggacgagctgatggcggcgggtaaaacctttgagagcaagctgggtaaacagtattacccggtcgtactggagcaccaggacactctggcgctgctcaattcatatatgattcagaagtacaaccagccggctatcgatgaaaaaaccaagaaattctcctacagcaaagagcagtgggtcgaattcttccagatgtataaaaagcttatcgacagccacgtgatgccggacaccaagtactatgcctcgttcggtaagagcaacatgtatgaaatgaagccgtggattcagggcgagtgggcgggtacctatatgtggaactccactattaacaaatactccgacaacctgaagccgccagcgaagctggagctgggcagctatccgatgctgccgggcgctaccgacgcaggtctgttctttaaacctgcgcagatgctctccattggtaaatccaccaaaaatccggaagcggcggcgaaggtgatcaacttcctgctgaacagtaaagaaggggttgagacgctgggtcttgagcgcggcgtgccgctgagcaaagtggcggtgcaatacctgaccgaaaacggcgcgatcaaagaggacgatccggcggtatcgggcctgcgcctggcgcagtccctgccggccaaactctcggtgtcgccgtactttgatgacccgcagatcgtcgcccagttcggcacctctctgcagtacatcgactacgggcagaaaaccgtggaagagacggcaattgacttccagcgtcagtctgaccgcatcctgcgccgcgcgatgcgctaa

SEQ ID NO: 175981 - DNA, 1128 bp, Klebsiella oxytoca
atgaaaggcaaaatcatcccgctgagctttctgcacacgcaggacagcgaaaccggtcaccaggtgatccggatgacgccaccgcatgttatctgccatcgcaactatttctatcaaaaatgctttacccgggatggcggtaagctgattttcggcggcgcgtttgaaggccactggaactactatttactcgatatcgccggccagcaggcgacccagctcaccgacgggccgggcgataacacctttggcggtttcctttccgccgacgaccggtcgctgtggtatgtgaaaaacaaccagcagctgcgccgcgtggatctggcctcgctggaggaacaggtcgtatatcaggtggatgaccaatgggtagcctacggaacctgggtcgccaacagcgattgcagtcagatggtcggaatcgaaatcaaaaaaagcgactggcagccgttgaccgactggggcaagttccgcgcattctacttcaccgagccgaagtgccggttgattaatatcgatctgcgcagcggcgaacagcgcgtggtattgcaggaaaaacgctggctcggccacccgatttaccgcccgtttgacgacagcaccatcgccttctgccatgaaggtccgcgcgatgctatcgatgccagaatgtggcttatcaacgctgacggcagcaacatgcgcaaggttcgccagcaccagccgggtgagagctttacgcacgaattctgggtaccggatggctccgcgctttactatgtcgcgcatcaggaaaacgatccgcatcgctatctgtatcgcgccgacccggcaacgctggaaaatcgccagttgatggcgattcctccgtgttcgcatctgatgagcaatcacgatggcagcctggtggtcggcgacggcgcgccgcacagcaccggcgatatccagcttaacgatccgtttatttgggtgtttgatattgccgccgataggcagaccgccgtgtgccgccatgactctacgtggaaagtgattgagggcgagcgccaggcgacgcatccgcatccgtcgttttcaccggataaccgctgggtgctgtttacctccgataaagagggtatgcccgcgctgtatctggcggaggtgtag

SEQ ID NO: 175982 - DNA, 1347 bp, Klebsiella oxytoca
atgaataaaatctgggtcgggtgtgttctgacgtctttatttacccctctggctaatgctcaggcgccgttatctcttgaggaacggctggcgcaaatggaacaacggctaaaggcgaccgagcagcgggcggccagcgcggaggcagaaatccgcgcgctgaaaggtcaggagacgccagcggccacggtggccagcgccgcaccggctaaacctgctttacagcttaatgattatggtgaattaaaattctatggcgacgttgagtttaatatggacggcgccagtcgtaccggtagcctgacgtcggtgaaaaccagtgccaataaaaactgggcgccgggagataaagaacgctgggatattaacggccgcattcttttgggctttgatggattacgcaaaggggctaacggtaaatatgccggattcagcgtgcagccgctggcggatatgaatggcaaaatgaatcttgatgatgccgcatttttcttcggtcagcaggatgactggaaaattaaaatcggtcgttttgaagcctacgatatgttcccgcttaatcaggatacctttattgaatattccggcaacacggccaacgatctgtatagcgacggctacggctatatttatatgatgaaagaggggcgcggacgcagcagcagcggcggcaatttcctgctgagtaaaaatatcgataactggtattttgaggtgaatacgctggtggaggacggcagctcgctgtttgtcgatcagaactatcacggcaacgcgctcgataatcgtaaaaacgtggtgtacgtgcgtccggtggcgtcctggcagtctggcccctggtcggtggcggcagcaatggagagtaacctcgttaacaatgcttacggctatcagaatcagaacgggcgctgggtcgatcagtccagccgcaccggctacggtatgaccatgagctggaatacgctgaagactgatgccgaggacggagcggtggtgaacctgagcaccgcgtatctggacgcggcggatgaaaaggatttcagcgccggtatcaacgctttatggcatcgcgtggagctgggctatatctatgcgcataacaaaatcgaccagtttaatctttccggcgtgagcgcggagtgcgatggcgactgcgcgattctgacgccggggcgctacgacatccacactattcatacctcctggcagctgccgaatattatggatatgccgaactttaatatttatctcggggcctatgcgtcatggctcgattcatcggcggcgaaaagcggtaataccgatgaacgctacggcgcgcgggtgcgatttaaatatttcttctga

SEQ ID NO: 175983 - DNA, 1434 bp, Klebsiella oxytoca
atgacctattccatttcccgggctgagcaagaactgcaggctaaacatgaaaagctgaacctgcgctggtatccgcgctaccacctggccgcccgcgcgggctggatcaacgatcctaatggcctggtctggtttgacggctggtatcacgcgttttaccagcaccatccgtactctaccaaatgggggccgatgcactggggccacgcgcgcagcaaggatctggtgcactgggagcatctgccggtggcgctggccccggaaggcccggaggataaagacggctgcttctccggctcggcggtggtggatggcgatacgctggcgctgatttataccgggcacaaattccacggcgacccgagcgacgaagccaatctttatcaggtgcagtgtctggcgaccagtcgcgacggcattcacttcgaacgtcaggggattgtggtcgacaccccgccgggtatgcaccatttccgcgacccgaaagtgtggcgagaaggggacagctggtacatgatcgtcggcgctcgcgatggcgataccggccaggtgcggctgtatcgttcagccgacctgcgccagtggcaggatgccggcgtcctcgacgaggcggaaaaagagatgggctacatgtgggaatgcccggacttcttcgccctcaacggcaagcatattctgatgttctctccgcaggggctggcggctaaaggctatcaaaaccgcaacctgttccagagcggttatctgctcggtgaatggcagccgggacaggcgtttgtgcgcgagggggcgtttgtggaaatggatcacgggcatgatttttatgccccgcaaagcttcctcactcccgacggccgccgcattgtcatcggctggctggatatgtgggaatcgccgttgccggagcagcaggatggatgggcgggcatgctttcgctgccgcgtgaactgagcctgagcgcggataatcggctacaaatgcgtccggcgaaagaggtcgagagcatgcgcggcgccagcttcccatggccggtgacgacgctgaagaaccagcagaccacgatggtggaaaactgcgaggcgatggaagcgatcctccactgggactgcgccagcagcaacgcagagcagtatggcctgagcttaggcgatggtctgcgcgtttacgtggatgcgcagatgcagcgccttgtgctggagcggcattatccgcagtatggcctgtgcggcactcgcagcgtcccattgaccgagggggccgatctgaagctgagggtatttttcgatagctcttccgtcgaagtgtttgttaatgatggcggggcctgtctgagtagtcgtatatatccggatgccactcgccgtgaattatcgctatttgcctggagcggttcggcgtatttgactgaagcaggagcgtggcagctggaataa

SEQ ID NO: 175984 - DNA, 1242 bp, Klebsiella oxytoca
atgatgaaagcgcatcactctcacagctatccgttactcagtgcgttactgtttttctttttcgtgacctggtcctcttcaggctcgctgctctctatctggctgcaccaggaagtgggccttaagccgggggataccggaattatcttttcggtgctttcggtctccgcgctttttgcgcaggtgtgttacggctttattcaggacaagctcggcttgcggaaaaatctgctctggtacattaccgtactgctgatcctctccgggccggcctatatggtgtttggctatctgctgaaaattaacgtgttactcggcagtattttcggcgggatttatattggattgaccttcaacggcggcatcggcgtgctggagtcctacaccgagcgcgtcgcgcgccagagccagtttgaatttggtaaagcacggatgtgggggtcgctgggctgggcggtggcgacgttcttcgccggattactgttcaacattaacccgcatttaaacttcgccgtcgccagctgctctggcctggtattcttcattctcctggcgcgcctgcgggtctcttctgcgccgcacgccatgcaggaagcggtatcgggcggtaaagtgacgctggaagatgctctgcgtctgctgaccctgccgcgcttttgggcgctggtcttcttcgtgattggcacctgtatttacggcgtatatgaccagcagttcccggtctacttctcctcccagtttccgacgctgcaggaaggtaatgagatgtacggctatctgaactcgttccaggtgttcctggaggccgccggtatgttctgcgcgccgtggctggttaaccgtattggtgcgaaaaacggcctgatcttcgccgggatggtgatggccatgcggatggtggcttccggactggtggaagggccgctgctaatctccatcacgaaactgctgcacgcggtcgaactgccggtgctgctggtctccatctttaaatacaacagtttaaacttcgataagcgtctttcatccacgctctacctggtcggctttgcctgcaccagctcggttatcgccaccgtcctgtcgccgctggcgggctatagctatgagaaatacggcttcgcccagtcctatctgattatgggactgctggtgttctgcaccacctttatctccatcttcttgttgcgttcaagcaagtcctctgcggacccgctgatgccgcaaacttccgctatctga

SEQ ID NO: 175985 - DNA, 996 bp, Klebsiella oxytoca
atggcatctctgaaagatgtggcaaagctggcgaatgtatcgctgatgacggtctcccgggcgctcaatagcccggaaaggctcaagccggagaccctggcgcgcgtccaggcggcaatcgaacagaccaactatgtccccgacctgtcggcgaaaaaaatccgcggcgctcatgcgacgccaaacactatcggagtgctggcgctggataccgtcaccacgccattttcagtagagattacgctctccatcgaagaaaccgcgcgggcgcacggctggaacagcttcgtggtcaatatgttctctgatgatagcccggaaaccattgtcgacctgctgctctcccatcgcccggatggcattatttacaccacgatgggcctgcgtcaggtgccgcttccggccaagctgttaaccctcccctgcgtactggccaactgcgaaagcctgcacgatccggtcgccagctatattccggacgacgaacagggccagtatacggcggtacaggcgctgctggccgctggctatcgccgcccgctgtgcctgcatcttccggccaatcatctggccaccgtccgccgccgcgagggactggagcgcgcctgccgggaagcgggtattgaccccgatacgctcgaccacagctatatggcctacggcgatgagcactatcgcgatattcccgccatcgtgctggcgcacatcgttcgacaaacgccgcagttcgattcagtgatttgcggcaacgaccgcatcgcgtttatggtttatcaaacgctgctggcgcaggggctgcgcattccgcaggatgtggcggttgtgggttacgataatatggtgggaattggcgatctgtttttaccgccgctctcaacggtgcagctaccgcactatgatatcgggcgcctgagcgccctgcatattataaacggcgacagccatcgggagacagttcgggttgccagcccctggctgccgcgcgactcattataa

SEQ ID NO: 175986 - DNA, 1419 bp, Klebsiella oxytoca
atgacctctatcagtcacgactctacaaccatgccgcgttcgcagcgcgatacccgacgtatgaatcagtttgtctccattgccgccgcggtggcgggtctgctgtttggcctcgatatcggggtcatcgccggggcgctgccctttatcaccgatcatttcgttttatccagccgcctgcaggagtgggtggtgagcagcatgatgctgggagccgctattggcgcgctattcaacggctggctctctttccgcctcgggcgtaaatacagtctgatggttggcgcggtgctgttcgtcgccggctccgtgggctctgcatttgcgaccagcgttgaaatgctgctggtggcgaggatcgttctcggcgttgccgtggggatcgcctcgtataccgcgccgctgtatctgtcggaaatggcgagcgaaaacgtgcgcgggaagatgatcagtatgtatcagctgatggtgactctcgggattgtgatggcgtttctctcagataccgcgtttagctacagcggcaactggcgcgccatgcttggcgtgctggcgctgcctgcggtggtgctgattatcctggtgatttttctgccaaacagcccacgctggctggcggaaaaagggcgtcacgtggaagcggaagaggtgctgcgaatgctgcgcgacacgtcagagaaagcccgcgacgaactgaatgagatccgtgaaagcctgaagctgaagcagggcggctgggcgctgtttaaggtcaaccgcaacgtgcgtcgggcggtatttctcggcatgctgttgcaggcgatgcagcagtttaccggtatgaatatcatcatgtactacgcgccgcgcatctttaaaatggcgggtttcaccaccacggaacagcagatggtcgcgaccctggtggtaggcctgacctttatgttcgccacctttatcgccgtctttaccgtcgacaaggccggacgtaaaccggcgctgaaaattggctttagcgtgatggccatcggcacgctggtgctgggctactgtctgatgcagtttgataacggcaccgcttccagcggcctctcctggctgtcggtggggatgaccatgatgtgcatcgctggctatgcgatgagcgccgcgccggtggtgtggatcctgtgttcggaaattcagccgctgaagtgccgcgatttcggtattacctgctccactaccaccaactgggtgtcgaatatgatcatcggcgcgaccttcctgacgctgttggatgctattggcgcggcgggaaccttctggctctataccgcgctgaacgtcgccttcattggcgtgactttctggctgatcccggaaaccaaaaacgtcactctggaacatattgaacgtaagctgatgtccggcgagaaactgcgcaatatcggcaattaa

SEQ ID NO: 175987 - DNA, 762 bp, Klebsiella oxytoca
atgattcttgacgcattctccctgcagggcaaagtggccgttgtgagcggttgtgataccggtctgggccagggtatggcggtcggcctggcggaagccggctgcgacatcgttggtatcaatattgttgaaccgaccgaaaccattgagcgcgtaacggcgctgggccgtcgttttctcagcctgaccgccgacctgcgtcagattgacggcatcccgcagctgctggagcgcgcggtagctgagttcggtcatatcgacattctggttaacaacgccggtctgattcgtcgcgaagacgcgatcgaattcagcgagaaaaactgggacgacgtcatgaacctgaatattaagagcgtgttctttatgtctcaggcagcggcgaaacactttattgcccagggcaccggcggcaagattatcaatatcgcttccatgctctctttccagggcggtatccgcgtaccgtcttacacggcgtccaaaagcgcggtgatgggcgtgactcgtctgctggcgaacgagtgggctaagcacggcatcaacgttaacgcgctggcgcccggctatatggcgaccaacaatacccagcagctgcgcgctgacgaacagcgcagcagcgaaatcctcgaccgtatcccggcgggacgctggggcctgccgagcgacctgatggggccggtggtattcctggcttccagcgcgtctgactacgtcaacggctataccgtggcggtggacggcggctggctggcgcgctaa

SEQ ID NO: 175988 - DNA, 1176 bp, Klebsiella oxytoca
atggctaaaggcatgcgggttaaactgaattatgaagtcagccgcgatccggacaccggcgcggagatcacccgtttaaccccaccggaagtgacatgtcatcgtaactatttctatcagaagtgtttttttaacgatggcagccatttgctgtttgccggcgagttcgacggcaactggaactactatctgctggatctcgccaaagccgaggcggtgcagctaacggaaggcgccggcgataacacgtttgggggcttcctttccccggatgataaatctctttattacgtgaagaacgaccgtacgctgctggaggttaacctcaccaccctgcaagaacgtgaagtttatcgcgtggccgatgactgggtgggctacggcacctgggtggccaacagcgattgcaccaaactggttggcattgagatagccaaaagcgactggacgccgcttaacgactggcagattttccacgatttcttccacaaaggcccccattgccgcctgctgcgcgtcgacctgcaaaccggcgaaagcagcgtgatccacgaagagaagaaatggcttggccatccgatttatcgtcctttcgatgaccataccgtcgccttctgccatgaagggccgcatgacctggtcgatgcgcggatgtggatggtaaatgaagacggtagcaacgtgcgtaaagttaaagagcatgcggaaggcgaaagctgcacccatgaattctgggtaccgaacggctcggcgctggtgtacgtctcatatctgaaggggcagcagggtcgcacgatctatagcttcaacccggataccggcgttaatgaagcggtaatgcagatgccggcctgttcacatctgatgagtaacttcgacggcacgttgctggtgggcgatggctccggtacgccggtggacgtcaaagataccagcggctacaccattgataacgacccgtatctctacgctttcgatgtcgcgaagcaggcttatttccgcgtcgcgcgtcacgatacgtcctgggcaaccgtggctaatagccgccaggttacccacccgcacccgtcctttaccccggacgacagcgccattttgttcagttccgataaagacggtaaacccgccgtatatatcgcgaaactgccgccgcagcccgaaatgctgaaggcatag

SEQ ID NO: 175989 - DNA, 696 bp, Klebsiella oxytoca
atgttcgcaagatctctggcccttgctgcactctgtggcatgtctttcgcagcttcggcagtcacggtagatttacgtcacgaattcattgatggaggcaaaacggataagaccaacgctgaccgcgtctccgtctcccatcgtttcgctaacggctttggcttctccgttgaggcgaagtggaagtcgggcggcgataacaccagccagccttattctgatttcgtcggtaatggtcatgaagagagcattagctggcagtggaaggctaacaagaacttctcggtcacgccggggttcaatattgaaagtaacgatagccgctcaatctacaagccgaatctgcgcgtgcaatacagcttcgataatggtttctacgttgctgcccgttatcgttatgactacacccgctacccggcgaatgcagggaaagaggatgataaagtcaaccgtggcgatgcgtgggccggttacgtgttcggcgactggcgtgccgagctgaactatgtttatgcgcgcagtaccgaaggggttaaacgcaacgacaataaaccttactctcaggagtacaacctcaaggttgcctacaagctggataaaaactgggcgccgtacggtgagctcggcaacgtcggcgtcaacgatcgcagcgatcgccagacccgtttccgcgtaggtgttgcctactcattctaa

SEQ ID NO: 175990 - DNA, 1176 bp, Klebsiella oxytoca
atgaaagatgtcgtaattgtcggcgcgttgcgaacgcccatcggctgttttcagggcacgttatcgcgtcattccgcggtagagctgggcagcgtggtcgtcaaggcgttagttgagcgcagcggcgtcgatccccagagtatagatgaagtgatcctcggccaggtactgactgcgggcaccggccagaatcctgcgcgccagtcggcaatccgcggcgggctgcccaataccgtttctgccattaccattaacgatgtatgcggttccgggctcaaggcgctgcacctggccacgcaggcgattcagtgcggcgaagcggatgtggttatcgccggcgggcaggagaatatgagccgcgctccgcacgtgctgaccgacagccgtaccggcgcgcagttgggcaatagtcagcttatcgatagcctcgtccacgacggcctgtgggatgcgttcaatgattatcatatgggggtgacggcggagaatctggcgcgcgagtacaacattagccgtgaactacaggacgcctgggcgctcagctcgcagcataaagcacggcgggcgattgattccggtcgttttcgcgatgaaatcgtgccggtagccagtgaactcaacggtaccctccgcctggtggacaccgatgaacaaccgcgcgttgaccccagcgctgaagcgctcgccagcctgcttccgacctttgacctgcagggctcggtcaccgcagggaatgcctcaagcattaacgatggcgcggcggcggtaatgatgatgagcgaagccaaagcagaggagctggggctgccgattctggcgcgcatccgcgccttcgccagcgttggcgtcgatccggcgttgatgggcatcgcgccggtccatgccacccgtcgctgcctggaacgtgcgggctggaagctggatgaggtcgatcttatcgaagccaacgaggcttttgccgctcaggctatttcggtcggcagggttctggaatgggacgagcggcgggtgaacgtgaacggcggcgcgattgcgctgggccaccccattggcgcttccggctgccgtattctggtttcactggtgcacgagatgattaaacgcgatgcccgcaaagggctggctacgctgtgcatcggcggcggtcagggcgtggccctggcggttgaacgttaa

SEQ ID NO: 175991 - DNA, 873 bp, Klebsiella oxytoca
atgcgctattctcccgaagcccttaccgctttcgtcgaagccgtcgcctgcggttcattttctgccgcggcgcggcggctgcgcaaaagccagtccaccatcagcaccgcgatcgccaacctggaagccgatctgggggtgacgttgttcgatcgtaccgccaggcagcccgcgctgacgccgcagggcgagcaggtgctcagctacgtgaaagcgattctggcggccagcgacaggcttgatgagctggcaatttcgctgtccggtaagacggaagcgcgtctgacctttgtactctccgatacgctgcatcccgatgtgctggaagatctgctggcgcagttcgatcgccattttccgcataccgaatttgagtgcctgattggcgaagatgacgatgttatcgacctgctacaaaaggagcgggcgcaggtggggctgattgaggccagagataactacccgacagaaatcggcagcatccggctgccgatgcaaaccgaaatggctatttacgtggctccccggcatccgctggcggcccagggcagggtgacccgtgacgagctgtttagctggcgcgagctgcgcctgagcacctatctggaaaacacgacggaaccggcacgcgggctggtatggtcggcgcctaactatcttctgctgttcagcatggcggctcaggggctgggatggtgtattttgcccagcgcgctggtggaggagtttgccggtagcggcagtctggtggcgctggacattgccggttggccgcgggtgatatcgaccgatttgctgtggaataaaaaggcgccgccgggagaggcgggaagctggctgcgtcagcatctgcaggggcatcggcgtgaatag

SEQ ID NO: 175992 - DNA, 462 bp, Klebsiella oxytoca
atgcaacaagttaacgcccagcgcaaaacgctgacggaacgggttatccacgctatcagctttgaaggcctggcgacgctgatcctcgcccctaccgccgcgtggcttatgcagcgctcggtcgtggaaatgggcggactgagtatcctgctcgccacgctggcgatggtctggaacattatctataacgccctattcgaccgcctgtggccgacctcccgggtcgtgcggaacctgcgggtccgcgcgctgcacgctctcggcttcgagtcaggctttattataattggcgtcaccatggtcgcgctggtactgggcgtctcgctgatgcaggcgtttatgctggaaattggctttatgctgtttttccttccctacaccatggcgtttaactgggtctgggatatgctgcgcgaacgcgtcataaaggttcgccagcagcgaatcgccgcccgccagtaa

SEQ ID NO: 175993 - DNA, 1230 bp, Klebsiella oxytoca
atgtctaaaatttggtctaaagaagaaactctgtggagtttcgccttatatggcactgctgtaggcgctggcacgttattcttgccgatccaactgggatccgctggcgccatcgttctgttcatcaccgcgctggtcgcctggccgctgacctactggccgcataaagcgctgagccagttcattctttccgctaacatcgctccgggcgcggggatcaccggcgccgttaatcactattacggtaaaaagatcggcagcctgatcaccggtctctattttctcgcctttttcgtggtcgtgctgatttacgccgtcgccatcaccaactcgcttgcggaacagcttgccagacacgtgcccatcacttcgcaaatacgcgcgcttctcagtctgggcgtggtgctggtgctgaatctgatctttttaatgggccgccacgtcacgattaaagtcatgggctttttggtctttccgctgatcgcctgtttcctgtttctctccatctatttaatgggcagctggcagccggcctacctgaccagccagatgcagctgtcttcgcacacgttccaccaaatctggatctctattcccgtgatggttttcgcttttagccatacgccgatcatttcgacttttgctatcgatcagcaggagaaatacggcgagcaggccatgggtaaatgcaaaaaaatcatgaaggtggcctacaccctcatctgcgccagcgtgctgtttttcgtcttcagctgcctgctgtcgataccggccacctatattcaaaccgcgcgtgatgaaggggtcacgattctttccgcgctgtcgatgatgccgggttcaccggcgtggctggcggtcaccgggattattgtggcggtggtagcgatgtcgaaatcgttcctcggcacctattttggcgtgattgaaggcgccagcgaaatggtcaaaaccgctctcgcccaggcggggattcgtaaaagccgcgccttcaatcgggcgatgtcgatcctgctggtctcgacgctgaccttcgcggtgtgctttatcaatcccaacgccatctcaatgatttatgcgatcagcggcccgcttattgcgatgatcctgttcatcatgcccaccctgtccacgtatctttttccggcgctgaagccttaccgttcagtgggtaacttcatcaccctggtggtcggtttgctctgcgtatcggtgatgttttttagctag

SEQ ID NO: 175994 - DNA, 873 bp, Klebsiella oxytoca
atgtccagcgtaaaattatccggtaccgcgacgttaggcgatcgtcaggtttatcgcctgggatacggggcgatgcagcttgcgggacccggcgtcttcggtccgccaaaagatccgcaaaccgctatccgcgtcctgcaggaagcggtcgagtcgggagttaatcatatcgatacctccgatttttacggcccccacatcactaatcagcttattcgccaggcgctgcatccctaccccgacgatctgtgtatcgtgaccaaagtcagcgcccgccgggacgataaaggcaactggctacccgccatgtcgcccgcggagctcactcaggcggtagaggataatctgcgcaatctgggtctcgacgtgctggaggtggtgaatctgcgcagtatgctcggcactcacggcccggttgaggggtcgctggaagggcctttaaccaccctgctggagctgaaagaacgcggactgattcgccatatcggactgagtaacgtcaccgccagacaggtaagcgatgcgcaaaaaatgacgcctgtcgcctgcgttcagaaccagtacaacgtagcaaaccgtcaggatgacccgcttatcgacgagctggcggcgcagaatatcgcctgggtcccttttttcccgctgggcggctttaccccgctccaggcccgggagcttaatgaagttgccgcttcgctggatgccacgccgatgcaggtagcgctggcctggctgctccagcgctcgccaaatattctacttattccgggcacctcttcgctacagcacctgcacgaaaatcttgccgccgcggaattaacccttccggccgacgcgttagccattctggataacctccagcctcacgcctga

SEQ ID NO: 175995 - DNA, 702 bp, Klebsiella oxytoca
atgacagagggaacgataaagacgagtaagtatgaaatcattgctattttcagggaagagcttcgaaagcaggcggagatagaagtttttgttaataacaaaagcacgataacccagctgacgcgggtggattttgccgagtttcatatcaccaccacctgcaaaatccccgccgggcataaagttaaatttattctgcatagcgattcagggaaaatcgaattttgctctacgctaaagaaaatctatgccagcagcgaagggaaaggcaataaagtcgcgtttaccctgcctgaatgtatccaggtggtccagcgccgccgcgatccccgattccgtctgcgccacgagcatgaattcttctgtcacggcaggcacaaaaatggagaaaattatcttttcgaaatcaaagacatttcggatggcggctgcgcgctgatgacccaaagccctaatctgaaattcctcagccataacgccattctcaagaatgcgatcctcgccctcgccgaatatggcgaagttaccgtagatttagtcataaaaaacgttgtcatggtgactttagatgataacgagaagccggacagctactaccagatttcttgtcagtttaaatttcgtaacctcgataacaagaagagaattgagaaagtgctgctcgacttgattatggaagccaaaagaaaaaagagagtctga

SEQ ID NO: 175996 - DNA, 585 bp, Klebsiella oxytoca
ttggacagtatattactctacactgatgacaatatcattggacaagccattcacgattatatgatcgaacgcgccaggcgcatcacgaccctgaactttcaggatattgtcaaaggtatctgcgccccaccgaccgcgacggtcattatcaatatcattcacaaagatatctctgcggccaccacggtcgcattactcaacactctacgaaagcgcctgacgcactgcgcgctgctggtgctgattgtaaaaagcgagctctccagcctgtttcgggaactgattgatatggacaaccttatgattcttacagaaaaatcttctttgtcagactattcagctatcctcagcaaacccttgaccgccgaaggctgccaggcgttatgcacccaacgcaggctgaccgccagggagcttcaggtactggagttaatcatcgcctgcaacaacagcaaacgaatcgcagcgctccttgatattgaccacaaaacggtacacagccaccgggtacatattatgaaaaaattgggaatgaatagctcacgaataatgcataaaagcatagtcaatatgtatcactgctga

SEQ ID NO: 175997 - DNA, 717 bp, Klebsiella oxytoca
atgaacgcaactctgtttaccagccataatctatcacgtagcgatatatccgtgcgttatgtctttcaaaagatgttttccccaaaaggcacgctcgtcgccgttgaatgcctgagtcgttttgaccgcctggcgatatctccggaaaacttcttccgctatgccaatactggtttacgtgaaagcatttttatggaacaactggcgcttatcgaaaaacataaacagtggtttaataaaaacggcatctcggcaaccatcaatgttgatgaccatattcttagcgtattgctaaggccggagattaaaacgctggtcgaccatatcggctgcgttcattttgaagttaccgagaactccaacaaattattgaataatgctctcgccgcctggaatgatccgcaaagcaccacgctctggctcgatgatttcggttcaggcaacgcgggtattagcgctatttgcggttatcactttgattatgtcaaaatcgataaagattttttctggcatttaatgcataaagagtttggtcggccattaatggatgcgctggtcacgttcctttcccgtaaccaccataacgtgattattgagggcgtagaaagcgaagcgcataagaaatggttacagggtatggagtggtttgctattcagggccattactggcaggaagtcagcattgaacaactggtccaggaaaagatcgcagtttaa

SEQ ID NO: 175998 - DNA, 651 bp, Klebsiella oxytoca
atgagtgatgcagcacgattcaaaattagcaaacgactcattcagctgaccctgataagcggggcgctgacggcctcaacggcgtggggtttcgaaaccaattacgatcgcgggcgggtggattttgccggacgagtgaccgatatttcctgtagcgtggcgctcaacggcggtcacaacgcggggagcggcagcgtctggctggcgccggtcagcctggcggaagtgcacgatcgcggcgccggcgcatttatgaaaccgcagccctttaccctggagctctctaactgccagctacggtacgacggcggcgcggccgataaagatgagatccgcctggtcagcgtacgctgggttgatggatatatggtcaaggcggtcagcaatgaaaatgccggttatctggcgaatacgcgagcggacggggccagccatattttcctcgcgctctcaaccaacgacaataatacgttggataaaagcaataaaattgttccggccgatccccaacaaaaccgcgtaccgctggtagaaaaggcggtagatggcggcgtctttacttattacattggctacgtgacgccagcgccggaaaaagccaccagtggtccgttgaccagctgggcgacctgggagctggtttataattga

SEQ ID NO: 175999 - DNA, 996 bp, Klebsiella oxytoca
atgtcgctaatgaaaaaactgacgctttttattggcttaatggcgatgggaaccacgtcggcatgggcgtactgtacgcgtctgtcgcagccgaccgttaacctcgacatggtggtggggagggtggtggttccaccggacctgccggtaggatcggtgatcgtttcccgtaactggactatgtcggcgccgggcggggccagctatagctgcagcagcggcaataaccgctttgcggccaaaatcgtttccaccggcgcgacggatctgggaaataaaatttactctaccaacgtgcccggtatcggcctgcgctttagccgcggcggggcgacggtgaatattatctacccggatgtttactcgagctacgccagcaggaccacgaattactcgctggaaggctcacgctttacgctggtagtgattaaaactgccagcgtgaccgggagcggtactctggcggcggggaaatatacctcttatgactgggagaacggtaacaacccgattctggtgacgtacctgagcgccaacgcgatcaccgtggtgtcgccctcatgcactatcctgagcggcaaaaatatgaacgttgatgttggcaccattaagcgcagcgatcttaacggcgtcggcactaccgccggaggtaaggattttaatattgagctgcagtgcagcggcggattaagcgagtcgggctatgctaatatccagacctctttttccggtacgctggcgaccggcaccacgaacgcccgaggcgcgctgctgaatgaaaaatccggtagctcgctggcgaaagggattggtattcaggttttgaaagatggcgtgccgctggagttcaacaaaaagtacagcgtcggtacgctgcgcacgcaggagacccgctatatcaccctgcctctgcatgcgcgtttctatcaatatgcgccgaccaccagtaccggtgaggtggaatcgcacatgatctttaacctgacgtacgattaa

SEQ ID NO: 176000 - DNA, 2487 bp, Klebsiella oxytoca
atgaagcagaggtcaatctgcccgggaagattaagcacgacgattgcggttgcgctgtgctgctttccgccattttccagcggacaggaaaacccgggaacggtctatcagtttaacgatggttttatcgtcggtagtcgcgaaaaggtcgacctgtcgcgcttctcgaccagcgctatcagcgagggcgtctattccctcgatgtgtataccaacggcgaatggaaagggcgctacgacctgaaaatcactgccggtaaagatggcaaaatgggcgtctgctacaccaaagcgatgctgatgcagtacgggatctcgccagaaaagtttaacccgcagctcagcgaaaaagagggattctgcggacgcctgcaggagtggcgtaacgaagataatgttaaagacacgctgattcagtcctctctgcgactggatatttccgtaccgcaaatctatgaagatcagcgcctgaaaaactttgtcagcccggaattctgggataaaggcgttgcggcgctgaatttaggctggatggcgaacgcctggaatagccacacgtcgtcgaacaacggctctgataacagcagcgcgtaccttggcgttaacgcgggcctgtcgtgggacggctggctgctcaagcatatcggtaacctgaactggcagcagcagcaggggaaagctcactggaacagcaaccagacctggctgcagcgtcctgttccgcagattaattcgatagtcagcggcgggcagatttttaccagcggcgagttcttcgacacgattggcctgcgcggggtcaacctggcgaccgatgacaatatgttcccggacggcatgcgctcttacgctcccgaaattcgcggcgtagcgcaaagcaatgccctggtgacggtgcgccagggcagcaatattatctatcagactacggtaccgccggggccgtttaccctgcaggatgtctatccttccggctacggtagcgatcttgaagtatcggtaaaagaggccgacggttcggttgaggtgttcagcgtgccttacgcctcagtggcgcagctgctgcgtccgggaatgacccgctatgcgctttctgccggtaaggtcgacgatagttccctgcgtaataaaccgatgctttaccagggaacctttcaacacggtttgaataacctgttcaccggctataccggcgtcaccggctttgatgactatcaggccttcctgctgggaaccgggatgaataccggcatcggcgcgctctccttcgacgttacccactcgcggctgaagagcgatacccttgatgagcaggggcagagctatcgcgccacctttaaccgtatgtttaccgaaacccagaccagtatcgtgctggcggcgtatcgctactccaccaaaggctactacaacctgaacgacgcgctgtacgccgtcgatcaggaaaagaaccaccgcagcagctacaccgtatggcggcagaaaaacgggatgacgtttaccgttaaccagaatctgccggacggctggggcggtttttaccttagcggtcgggtggcggattactggaaccgttcgggaacggaaaagcagtaccagtttagttacaacaacatgtacggtcggctctcgtggtcggtcagcgcccagcgcgtctataccccggatagctccggccaccgtcgtgacgatcgcgtttcactcaactttagctacccgctgtggttcggcgaaaaccgtacggctaacctgacgtcaaacacctcgtttaataactcgcgcttcgccagctcgcagattggcgtcaacggttcgctggatagcgaaaataacctcaactacggcgtgtcgacaacgacctcgaccggcggccagcacgacgtggcgctgaacggcagctaccgtaccccgtggaccacgctgaacggcagctatagccagggcgaagggtatcgccagagcggcgtgggcgccagcggaacgctaattgctcatcggcatggcgtcgtgttctcgccggaaagcggcaccacgatggcgctgattgaagcaaaagatgccgcaggcgcgatgctgcccggttcgccggggacccgcatcgacagcaacggctatgccatcctgccgtatctgcggccttaccggattaactcggttgaaattgatcccaaaggcagcagcgacgacgtcgccttcggcagtaccgtggcgcaggtcgtgccgtgggaaggcagcgtggttaaggtctctttcgataccacggtgcagaacaacatcactctgcaggcgcgccaggcaaacggcctgccgttaccgttcgccgccacgatatatgccccatccgggaaagagattggcgtggtgggccagggcagcatgatgtttatcagcgacgccagcgcgccgcaggctacggtcaaatggagcggtggacagtgttcggtagagttaagtcagcaaaaaacaaaggaaacgctatgtcgctaa

SEQ ID NO: 176001 - DNA, 702 bp, Klebsiella oxytoca
atgaagcgtattgccctttttttctgtttcatttttagttttgcggcccatgccaacaatattattgttaacggcacccgttttatttacccaggaaatgaaaaagaaataacggtgcagctctctaacaccgccgaccgtccggcgctggcgcaggcctggctggacaacggtaatgccgatgcgacgccggataccattaccacaccatttattatcacgccgcctatttcccgcgttgatgcgaaaagcggccagaccctgcgtattaagctcggcagcaatgcgggactggctaaagataaagagacgctatggtggctgaatcttctggaaataccgccggtcgaggccagccagaaaaatgaaggacagaatattctgcagctggcgattcgttcgcgctttaagtttatttatcgtcctgccggtttaggcaatcgcgacgcggcggcagacaaattagcgctctccgctaacggcagcagcctgtcgatcggtaatccaacacccttttatatcaccgtaagccgtatctcccgtaacggcggcaaagcgctgaatagcaaaacggtcatgcttgccccgcagtccagtcagaccatcgccctctcttctgcggtgagcaaaggtgagaccctgaccgttaacaatattaatgattatggcgcagacgtcgcagtgaaagttaccgtcaaataa

SEQ ID NO: 176002 - DNA, 609 bp, Klebsiella oxytoca
atgaaaaaggttcttctctctgctgcaatggcgactgcgttttttggtatggctgcagcaaatgctgctgataccaatgtaggcggcggtcaggttaatttcttcggtaaagttaccgatgtatcttgtactgtttccgtaaatggccagggcagcgatgcaaacgtttatctgtcaccggtgactttaactgaagttaaagccgccgctgcggatacctatctgaaaccgaaatctttcactatcgatgtgtctgactgccaggccgctgacggtaccaaacaggacgatgtgagcaaactgggcgtgaactggactggcggtaacctgctggccggcgctactgctaagcagcagggctacctggcgaacaccgaagccgctggcgcgcagaatatccagctggttctgtccaccgacaacgcgaccgcgctgaccaacaaaatcatcccgggtgatgccacccagcctaaagcgaccggcgatgcttctgccgttcaggacggcgcgcgcttcacttactacgttggctacgctaccagcaccccgacgactgtcaccaccggtgtagttaacagctacgcgacttacgaaattacttatcagtaa

SEQ ID NO: 176003 - DNA, 723 bp, Klebsiella oxytoca
atgttaaaacctgttgagcggattgaagacgatgaatcgctggccctggcgatggcggcagtggcgtcggcaatggcggatgcctcgcggttgaagatactttgcgccttgatggatggccgggcgtggacggctaccgagctttccaccgtggccgacatttccccctccaccgccagcgcgcatcttagccggctggtcagcagcggtttgctgatgtgccttgcccagggccgccatcgctactaccgcctcgccggtagcgatgttgccggattgctggaaaatatgatgaccatggccggcaagcgtgcggtggcgctgtccaccgcaacgccggttaatttacgcgtcgcgcgtacctgttacgatcatctggccggcgaagtggcggtatcactgtatgattttctgctgcgcgaagcgtggatagcgcctgatggcactgctctgacgcccgtcggcgaagcgcagtttgcgcgcctggggataatgacgaagagcggctcccggcgcaaagcgtgctgcggctgcctggactggagcgaacgtcgctttcatctcggtggggcggcaggcgcggcgctgctgcagcacggtctgcagaaaggctggtttaccactaccccgggattccgcgaagtgacgattacgtcagcaggatggcgagcgctacatcagcattttcagctggcgaaaaatacccgatcagcgagtgattaa

SEQ ID NO: 176004 - DNA, 312 bp, Klebsiella oxytoca
atgattgcagtactctttgaagctgaggttaccccggcgagccaggagcgctacttaacgctggcggcggagctgaagccgctgctgagcgatattgacggttttattgccattgagcgttttcaaagcctgactgcggcaggcaaaattctgtcgctctcctggtggcgggatgaagatgcggtactggcgtggaggcgcaacctttgccatcaggctgcgcagaaagagggacgggagagcatcttcgcctgctatcaaattcgggttgcccgggtgctgcgcgaatatcgttctcaacatgccgattaa

SEQ ID NO: 176005 - DNA, 210 bp, Klebsiella oxytoca
atgaaaaacgtaaaattacttgccgctgccggtatgctgtctctggtctcttttgctagcttcgctcagcctgttagcgtaaccgcagatactctggacaacgccgaagccaaaatcgctgccattgctaaagaccagggtgagtcttaccacattaccgaagcttataccggtaaccaggtacatatgaccgccgagctgtctaaataa

SEQ ID NO: 176006 - DNA, 885 bp, Klebsiella oxytoca
atggcctttgtttcgcgcaaccttgttgtagatctattcttaaccgcgctggcgcccgccatctggggcagcacctatattgtcacctcgcagttcctgccgcccgatagaccgtttatcgccgcgctgctgcgggtgctgccggccgggatcgccctgctgatctggagccgtcgccttccgctgcgcggcgagtggtggaagctgattgtcaccgggatcctgaatatcggcgcgttccaggcgctgctgtttattgccgcttatcggctgccgggcggactggcggcggtgattggcgctatccagccgctgctggtgatgctgctggcatggtgcgtcgatcgtcagcgatcgccctggctcgcggtgctatcagcaatgacggggatcgtgggaatggcgatgttgctgctatcgccgcaaatgacgctcgatccgcttgggatcggcgcggcatttctgggggcgatgagtatggcgcttgggacctggctgtcgcggcgctgggcgatcgccttgccggttattgccctgacaggctggcagctgctgattggcggtattgtactggcgccgattgcgttattggtcgatccgccgctgcatcaggtaacgctgactcaggcggcgggttatttgtggctgtgcgttgccggggcaatgctcgcgtatggcctctggttccgcggtattggccgtctttctccggtagcggtatcggcaatgagcctgctgagtccggtgacagcggtactattaggctgggttttcctcggacaaaaaattgaggggctggcgctggcgggattggtgattgtgctattcagcgtgctgtcgattcagcgcgcgttatcgaataagagagctgcagcgggtcggtaa

SEQ ID NO: 176007 - DNA, 507 bp, Klebsiella oxytoca
atggacaaatcaccgcagaccgacgccgtggatcgcattcttgaacagtggaaacgggaacgccccgatctcgattgcactccaatgggaccgttcggtcgtctgaagcgctgcgcactgctgctggaaccgcgcattgaagcggcttttcttcgccatgatttagtgcgctgggagtttgacatgctggcgactttgcgacgggcgggcgatccgttcgtgctgtcgccaacccagctcttttcaacgttaatgatcacctccggcaccatgacccatcgtcttaaggcgctggaaaaacgagggtttattcgccgactgccaaacccggacgatgcgcgcagcatgctggtcgcgctgacgcctgaggggcggaagttaatcgacagggcggtagagagccacgtggaaaatgagcggcagctgctggatggcctttctgcggggcagcgccagcagcttgatgaagcgctgacggtgtttatgcgtctgctggaaaaagagtaa

SEQ ID NO: 176008 - DNA, 462 bp, Klebsiella oxytoca
atggatagcatcgatcgaaaaattcttgctgagctgcaggccgacgggcgactatcgataaccgagctggccgaacgggtgaatctcagtctttcgccctgccatcgacggctgcgcacgctggagcaggagggggtgattaccggctatcgggccaaccttgatccggccaaaatgggcttcaactttttggccatcgtcttcgcgacgctaaaagagggggacaaaaaagcggtaagcgcgtttgaggaagcggtcgaagagatcccgcaaatcgtgctggcgcagcgtctgtttggcgatccggactatctgatgcatgtggtgacgcgcgatcttccggccttccagaagctgtacgatgataaactctccgcaatgcccggcgtgcagcatttacgttcgacattggtcatgaagacggtcgtgcaggatcgcccttttccgctcggtaatgggtaa

SEQ ID NO: 176009 - DNA, 612 bp, Klebsiella oxytoca
atggaaatgagctttatcgccagcttttggctggtttcctttctgctgatcatcacgccgggggctgactgggcctacaccatcagcgcagggatcaacggtcggcgcgtgatacccgccgtcgccggactgatgtccggtcacctgctggccacgctgatcgtcgtcgccggaatcggcgtgttaatcgccggccacccgctggcgctatcgacgattaccctgctgggcgcgggctatctgatgtggctggggatcgctattttgcgccatccgccaacgccaggcacacagcaatacagcgcggatagctggaatcgctgggcgattaaggggctatgcattagcggcctcaatccaaaagtctttcttctgtttctggccctgctgccgcagtttaccgacccccagggaagctggtcggtcgcgcagcagatgtcggcgctgggcggtattcaccttatcacctgcacgctggtctatttactggtcggctacggcgccaaagcgctgttagcgacccggcctcaaatcgcgcaaaaggtcagcatcgcttcgggggtgatgatggtcgccatagccgccctgctgtttctggagcagctgaggtag

SEQ ID NO: 176010 - DNA, 606 bp, Klebsiella oxytoca
atgaaaagcaatgctattttaaaaaaaaggaacttcctgactcacaatgaaatagagtcattgctcaaagcggccaacagtggtgcacatgccacgcgcaattattgcctgacattattgtgttttattcacggattacgcgccagtgaaatatgccgcctgcaaatttccgatatcgaccttagttctaaatgtatctatattcaccggcttaagaatggattttcgacaacgcatcctttgctaaataaagaaatccgcgcattaaaaaactggctacaggtccgcgcctcgtacccgcagtccgacagcgaatggttatttctctcacgaaaaggtaatcctttgtctcgccagcagttttatcagattatttccgcctctggtgataatgccgggctatcgctcgaaattcatccgcatatgctccgtcattcatgcggcttcgccctggccaacatgggcattgatacccgccttatccaggactacctgggccaccgcaacattcgccataccgtatggtataccgccagtaacgctggccgtttctatggtatctgggacgaaagcagagacagacagcggagccctgttctgccgtaa

SEQ ID NO: 176011 - DNA, 627 bp, Klebsiella oxytoca
gtgaaccgacgtcgttttcttactggtaaagaagttcaggcgatgatgctggcagcccgccacgggcaaacgggagagcgggattactgtctaatcctgctcgcttttcgtcatggtatgcgcattagcgaattactcgatctgcactaccgcgacctcgatcttgtcgaaggccgcatcaatattcgacggctgaagaatggattctccaccgtacatcctctgatggtcgatgaatgtgacgctatcaggcgctggagtcaggtacgcggcgcctggaaaggcgcgcaaaaaaccgatgcgctgtttatatcgcgacgcggtacgccgctttcgcgtcagcaggcctaccgcatcatccgcaccgctggcgtagacgctggcacggctacccatactcacccgcatatgctgcgccatgcctgcggttacgaactggcggagagaggggccgacacccgccttattcaggactatctcggccatcgaaacattcgccataccgtacgctatacggccagcaacgccgcgcgattcgccggactctgggagcgcaacaacctgatggagtggaatttacaaaatcagagaatggaaaataagtgtttgataaataaaggaaaataa

SEQ ID NO: 176012 - DNA, 546 bp, Klebsiella oxytoca
atgaaaatcaaatcactggcaatcgttgttctgtcagccctgtctctgagctccgcggcggcgctggccgacaccacggtaaatggcggcacggtgcattttaaaggggaagtcgtcaacgcagcctgcgccattgacgcgggttcaatcgatcaaaccgttccaatgggccaggtacgttcggcgaaactggcgactgcgggcagcaccagcacggctgtcggcttcaatatccagctgaacgattgtgacaccaccgttgccaccaaggcctccgtcgccttcaccggcaccgcgattgacagcaccaacaccaccgtactggcgctgcaaagctcggcggcaggcagcgcgactaacgtcggcgtgcagatccttgaccgtaccggtacgccgctggcgctggatggcgcgtctttcggcgcacaaaccacgcttagcaatggtaccaacgtcatcccattccaggcacgctactttgcaacaggcgtcgcgactgccggtaccgctaacgctgacgccacctttaaagtgcagtaccagtaa

SEQ ID NO: 176013 - DNA, 747 bp, Klebsiella oxytoca
atgaaaaaggtgattttagcggcgttaattggactttcaggcgtggctcatgccgaatggaagcacgaagttactcaagacaaaatggggagaggtagcgatgagatcgcaaccgtcgtaagtagcaatgctttatctcttcagcctccttatgagggaaaacaaaatgcaacgttttcattgcgaagtcttagaggtgaaaataatgaatttgttgttgcagtagagaagggacaaataatttgcgaacaagatggatgcggattattagttagagtggatgatgaaaaagcatttcggcttattggatctcatcctaaagatggaagctcagatatggtcgttggttcaattaatacagaagatttaagaaaaataaaaaaggcaaaatcaattttaattgaattgactatttaccaaaatggcgagcatgtacttgagtttgatagtaaagataatccattcgtcggcaggaaaacttatcttatctctgagattagagagatgattgattctggaaaaccaccaaagcgcacaaaaacatcagaagttcctatggatatgcctaaatttgatatatgcaaaaaagtagcaaataaaagctctgaggatgggaaaatcaccgtcacagaggtgaacaaaaaggatgaattcactactgctacgtatggtgaagattctgttacgacgcttgcgtgtaagagaggtagcaaaacgtctatgctttcattttttagatatgattaa

SEQ ID NO: 176014 - DNA, 468 bp, Klebsiella oxytoca
atgatcaaacttgaaagggaaaagcaaaaagagcttctccagatactgtttaacgcttacccaaaccatctgcagaacaatgcatatgtagagttgaaatcaatgtttgatagtgatgatacctttgtagcaaacctgctttaccttgaagaacacgagctgattcacagcgggttacggcatcatcttagcggctatagtataaatcccggagcaatcatgatcactgctaagggcattgacttcattcaacaggacggcggactttctgcaatccttaacgtgcagacgatcaagtttcatcgtgatgctgtcgtagtgctcgaagacctcatcgcgctttcaaacatgagtgatgagcagaaggccaaggccaagtcgactctcggcgaaatgtctactgaagtgcttaaaactgtggtgcaagctgcaactaccgccgggttatcaaagctactcgggcaatga

SEQ ID NO: 176015 - DNA, 402 bp, Klebsiella oxytoca
atgaaacgtattacagcagtggcattgctttctctggcgttaacaggctgctataagacagcgccatctgagcaagaggcgatcgatacggctaaaaaagaagtgttgatggcagtctgcggcgacaaaactaatagttgcgtagatgtaagtggcgggaaggcgcatatcgcagatcgaagaaatgataataccaaccaagttactgtcaccttcaaaactataaaagctaatggtgatgcacaggaaccaagggctgtgaacgtagatgcaggaatggttgtctacgacttcgacgccaaaacaggtgaaacgtacattaaacagctttcactctggtccgatgatggaaaacactccattgaactgtgcggacatgattataagttttgtcgaaagtga

SEQ ID NO: 176016 - DNA, 570 bp, Klebsiella oxytoca
atgacaaacctcccctatgaatatttccttggtgccgatgatgacctcgtcgactttctcgaaaagcaaggcgaggaatgcataaaagaaattgagcaatcaaatgcaataaacaaagagaatggttataaactgctcggcatcctcatagtcggcgtcgggtcttcgtttttattgttgacgcaaaataaccagcctcgttttatgacgttgggtatcgggattttcatgttgtactgggctgcatgtgcaatttacttggtttcaggcgtgctgtctgtacaggtgcgcgcgctccttaactcagctccagcagacctttacactgaactttacaagtcgttggagccagcgcattacgaggagctggcgcagaagggatttagggcaaagagaacaccaatttcagttatccggcgaataagactggctaatctccatgataccgctgaagagttgtgtgagataaatgagcgcatcagaacaaggctggatagagcgaggatcgcaacaatcctcactccggtttgtgcattagctatttctactgtgggctatctttttttctga

SEQ ID NO: 176017 - DNA, 558 bp, Klebsiella oxytoca
atgtcatacccaacagtaattaacggacttgattttcgtgatctgatttttgtggccgataacgacccggtaactgactcgtttatggtggcgaaggcatttggaaagttgcctaaaaacgtaattcgcgacattgagcgaactattgaggcctgcccgccggagtttgatacaaaactcaattttgagctttgctataaaaacaatgagttgcagaacggtaagccgcagaagttctatcgtctccgcaaagatgggttgatgcttctggtcatgtcctacaccaaaaaagaggcgatgcgcatcaagatcgcctacatcaacgcctttaactggatgtacgcaatgcttcaggttggccggcgccagtttgaagaggagcgtaatgctgtgatgcttgagttcatgaaggaaaaggatgtcgccagtatgtctggtcgcctgctgcgtcgctgggggaaagagaagaaaccgcagttactttcacgcattgagcaactggacaagcaaggtcagttggcattgcccggctttccaggggtgcttaccagatcatga

SEQ ID NO: 176018 - DNA, 693 bp, Klebsiella oxytoca
atgacaccagttaaagagtttggcgaatgcctgattactgccggagacagggattattttttccggccgtcactgctggccatgtcgcgaattggcgaacctgctgaaattgttcagacgttctacgacctatgcaatgacgaagtgaccccgctgttaaggcgagctgctgaatcctacatccacaatgagtacgaccggctgcctgattgcgtgttgcagtatattcagagcggtctattgagccgcaagtcgattatggctgcccataccgtattgactgcctgctgtgctgacgatatcggcgagttgataggatggatgaagccaggtaaaggcagaaaacgcagttttgtctggcgccagggaagtatgccgccgcacaacatggttatagtcgcccaaagcctgatgatgcacggcattatcggcaaggcaaaagtgaggaagctccagcggcacgaatccagcgataccacatctgaattccgggcatcagattacatcatcgcagcgcgtaaccacttcggtatcagcaaggaagaggccggccaactgacgatgaccgagtttcagctaatgctcatcgctaaataccctgagcagaaagggtacacccgcgaagagtacgatcacgcagctgatgactactttgcgcgccgtaagcgcagacaggataaagccaaccaataa

SEQ ID NO: 176019 - DNA, 753 bp, Klebsiella oxytoca
atgcaaggctgctccaataacgaacaacttatcggtcgcgcgaagacgctggaactggcttacggctgttctgaccagatgccggcagaaggcgactggaaactcatgggtctgccgacttctgcaacgtgggatatgagcccggaggcgctgacgtctgatgcagacaatggcggattcagttcgaacctgattgccagcctggacccgacctattccattgagggagaagtgcgcgttcaggaccgtactgatgaattcggcattcagcagttcgtgaagtatatcgccgatgaagtccgagcccgacgccagcctgcggtatggatgcgtttccattggggcgatttctatcacattggctacatggtcccgaccggcgccagtgatggcggtggtgtgaaggagatcgtgacctacagctttgagttcaaactggctgacggtaacaccttccagatcaccgaagctgatgatggcattccggtaacaggcgtcacagtcgctccgactaccagcactgtagcggcaggttcaagtaccacgtttactgtcaatgtagctccggatgatgctgacaataaactgttcactgttacctcttctgtgccgtcgcgcgcgaccctagccttcaccggcaataccgtaactgtctccgcaccgtctggtgcaacagctggcactgcggtaattaccgttaagaccgtggatggcgaattcatagccactcacacagtaaccgtcaccgtgtaa

SEQ ID NO: 176020 - DNA, 390 bp, Klebsiella oxytoca
gtgaaccctccgatgcataagcgcgttcgtaacttcctcgttgatgccggcttaaccaccgggtacaccgttcagtcactgacatggaccgataccggaaagctggcggagcgattcatcgtattccggcccaacggcggaacggcagtagaccgcgatatggctgctgattattacgtcctggtcgatgtgataaccggtaaatctgccggtgactatgccaaatcagaggctgatgtgcaggccatcatcgattatgtgaagcagaacccaatgacgaatccctgccttggacagatatcaaaccttggcgggataccgtcaccggtaatgactgaagaagggcgcatggtgtggcgcttacagttcgcctgtctctttggcgggtaa

SEQ ID NO: 176021 - DNA, 408 bp, Klebsiella oxytoca
atgggcgttaagatccgcggtattgaacaagcaaagcgaaatctcgaccgtatcatcggagatgttcagggtaggaaggtggtcagtgctattaaagcagctttgataattatcgcgccagaagccgcaaggatgactcccgttgctaaatcttccttcctgatcaattcgcagttccaggaagtgatggtaaatggcacccgcattaccgggcgagtgggatatgcggctaattacgcggtatatgtccatgaggctaagggaacgctcaaaggtaaacctcgcccagcatcacagggcggtggtaattactgggacccggcaggagagcctcagttcctgaagaaagcaggtgatgaaacgcgttctgccgttgatgccgcaatcaaaaaggagctatccctgtga

SEQ ID NO: 176022 - DNA, 348 bp, Klebsiella oxytoca
atgtcttcggttgcttcatggtcatataccgcgacagcgacaatctggcggaatctcggcaacgatgaatatggcgattcgctaggcttctcgcctcctgagtcgattctctgtgattacgagggcggcctgtcaaagcgcatcggcaatcttggcgctgaaatcgtcgtaaagaacaccgtctggacggagttcgcgttggcgtccgcaggtgattacctgctgattggtgcatcgaccgagcctgacccggttgtggccggtgccgacgaggtgcggcaggttatccgctacgccgatacgttcgaacgagtcgcggatgattacgcaattctgacgggagtctga

SEQ ID NO: 176023 - DNA, 174 bp, Klebsiella oxytoca
atggcctggatttcagttcagcaacggctgccgcggaggttctcccgggtgtgggtgatgaccgataccggccagcaaacgacggcatacgtgaaaagcgacggcgaatggttcattaactgcgcccgcatacgggccacaggcgccgctgtgctgcgatggagggatggctga

SEQ ID NO: 176024 - DNA, 399 bp, Klebsiella oxytoca
atggtaactctcgaacaggcgaaggagtatctggagagccagggaattaccattcccgattttgttcttcaggctctcgtcgaccaggccaacagcattcaggagtgtctcgatgcgcattatccggcatctacagctctgctgattcagctctatctgcttgcgctcatggggctcgggcagggggataagtacatctccagccaaacggcaccaagcggggcgtctcgctcgttccgataccagtcgttcaccgatcgctggaaggcctcggttaaccttttgcgcggcctggacaaatacggatgcgcgacgtcacttattcctcccgacccaaccaatactgcatttgctggtatctggataggtcgtggcggctgcatgtgcgggagtaagtga

SEQ ID NO: 176025 - DNA, 285 bp, Klebsiella oxytoca
atggctaaataccaagtaaccagggcgtggcatggagtgaaggtcggtgatgtggttgaaattgagaaactgcatcctgcgctgaagcctcatgttatgaaactctctgacgctgtgctaaccccggcgacgccagaggctggcacggatgtgaaatcccgaaaagagattatcgcattacgcctcactgagttgggtatcgattttaaaggcaatctcggagctgaaaagcttggtgatcttctgccggaaggcgaactcgaaaagctgtttcccgctgaataa

SEQ ID NO: 176026 - DNA, 1104 bp, Klebsiella oxytoca
atgtacttcactaaagaaacgcttgccacgaatagccgcctgcgccttcactggaactctctgtgggctcagcgcaacatctgggataccgcgcataacatcatggttaatcagtaccgtggcgctatggatgcagaaacgctggcagccaatgcgctggcaggtgatgggctgggtcgtgatttctgggctgaaattgaccgcgaaatcgtccagtctcgcgatcaggtgatcggcatggaaattgtcaacgacctgatggctgtgcagaccattctgccgatcggcaagactgccaaactttacaacacgattggcgatattgctgatgatgtctctgtgagtcttgacggtcaggcgccgtattcctttgaccacactaattacggtagcgatggtgacccagttccgatttataccgctggcttcggtgttaactggcgtgttgccgcaggcctgaacaccgtcggcattgatctggtgctggattcgcagacagcaaaaacccgtaagttccataaacgccgagtgactggttatctggatggtaatccgaccattcaggttcagaactacccggcgcagggtcttcgcaaccaccgcaacaccgccaaaatcaaccttggatctggcgcaggtggcgctaacatcgacctgaccactgcaaccccggcgcaggcgctggcattcttctgtccaaccggtgcatttggtgtgactgcccgcgccaaccaggtcacggcctatgacgttttgtggctgtctcctgaaatcatggcgaacctctccaagccatacactattgaggtgggtgacggtactaacgcgatcatcagcggttctgtgctggatgctattcgcaagtttattccggtgaaagatatccgccagacttatgcgctgagcggtaacgagttcctggcttatgagcgccgcaaagatgtgatctccccgcttgttggcatggccgttggtgttgttccgctgccgcgtcctatgcctcagagcaactacaacttccagatcatgtctgcggaaggtttgcagattaaacgtgatgagcaaggtcgttctggcgtgctgtacggcgcaaatctggcataa

SEQ ID NO: 176027 - DNA, 459 bp, Klebsiella oxytoca
atggcacgttatcgtcgcgttaatattgacggtcagtctctgtacaagaccgaaacccgtaaagtggctgtcgcgtcattgccgggaactttcgttaccatcaacggtgacgatgagtttgcagtagccgcagcaacggttggtcgcctgtatgtgctcgacccagcattcagcgaaggactgggtattactgactctatccctgccggtcactccacatctggtaactacgtggaagaaggccgagaactggcaatcctgtgtcctgcgggaacctacgctaaagacaccccgattaagttgggcgcaaatggtcagggggcgattgccgactctgacaccgacaccgttctcggctatagccaggacgatgcaacaatcgctgccggtgctaccgattttatccgcgtgcgcttccgcgtaggcactgtggccccggcaactggcggcggcgagtaa

SEQ ID NO: 176028 - DNA, 1266 bp, Klebsiella oxytoca
atgcctatgcaggtcaatatcaccaccaaggtgaacagccagtctatccggcgcgaaacatataacggccgtgagcatcttgtgctgccgagttacacgcttccggcgaacgtcgtcatgaatggcggactgtacacgcaggaagaaatagatgcccactaccaagggcttgaaggcactctggcgccgctgggacatccgcaggttaacggccagtttgtatccgctttctcaccggagggcatcaatgccggccatatcggcgcgtggaaccgcaacgttaagaagtccggtaatcgcatctatctcgaaaagtgggtcgatgtggcccgcgctgaagagtctcaaggtggtaaggagcttcttgatcgtgtcgccgctattgagcgcggtgaagatgtaccgccgattcataccagcgttgcggcatttctcgatcagttggaaccgaacgagcagcagcgcgcaacaggtgccgactgggtggcgaagattcacagcatggaccatgacgcgattctcctacacgaggtaggggccgcgacccctgagcaaggcgtgggcctgatggttaacgccgacctggcacagccgctaaaagctaactctggcgcgctggtgggcgaatcttgccgggagcgagagcagcgactcgaccgggcagccaaagcgaagtttgcaccaggtgaaaacgaatatacctgggtggctgacttcactgactcgcaagcggtaatcatccgtaacggcggtaatgctgaggtgtttggctacaagtcagagggcggagttatcaccttcgacgataccggcaccgcagttgcacgacaggagtcgtgggtggctgtcgtcgccaataaactcaaatctctattcacaccgcaggaacagcctgcaccaaaccacaaaacggagggcgacatgcctttaaccactgaagagaaacaagagctgatcagcgaaatcggtaaaggcctggccgcaaacttcgccgaagccctgaacccgattaaggatgtgatcaccggcctacaggccaatcaggacaagcttactgaaacgctaactgcaaactctcgtgcggaagaaaaaataaagcgtgaagcagttgcgaaagttcacggcgagatcgtggctaacgctctttcaggcgaagcgctggatgcgatgtttaaaacaatcggtgaatccgcgccgctgggcaccaactctgcgcaacagcagaaagaaaccggtgcgccgaaccctgacgaatatttcaaataa

SEQ ID NO: 176029 - DNA, 927 bp, Klebsiella oxytoca
atggcgacgaagaagacgaagccaccaattctaccgcgtaactatcaggatccgacaggagcagatgcgctggaacgccgggcaatgaaagacttcgccaggcggatgaataagattggcaaagcgtacaaagcagcactcgacaaaataccttcctctctcgcagtaaacgccagatacgaataccagctaaacccaacgctactctccatcatcctgaatgatgccagttatctggttgatcaagtgcttctgaatggtaacgagtacgacctgtggttttatgagtatgtcgatttggcgtcagagaaaggcacaggacagtcgttctacaacctcagccagcagtcgccggtgtacgccgccggacgtgagtccctggcatccatccttgcaagcaacccgtaccagcaacgaatggcgttggtgcatgcccgtgtgtttgaggaaatgaaggggcttactgctgacgttaagcgcgacatggcacgagtgcttactgatggcgtagggcgcggccttaatccccgagacattgctcgcaacctcacagatcagactggcatcgagaagcgccgggcgaaccgtatagcccgcaccgaagtcactaccgcgctgcgtcgggctaagtgggatgaagatcaggaggcgaatgacctttacggccttaaaacccttctggttcacatctcggcgctgtcaccgaccacccgacatacccatgcagttcgtcacgcacacctctacaccaatgaagaggtccgcgactggtacagcgaggatgccaacagcattaactgcaagtgtactcagcagtcagtgttagtcgatgaagagggcaagccgatttatccggacaccatcaccaaacttaaacaggaatacaaaacgatgcaggcgcggggttacgcctgggcggagaaataa

SEQ ID NO: 176030 - DNA, 1350 bp, Klebsiella oxytoca
atgactgacaaattaactctcgccgtcaaccatgcgttgaacgatgcgcggatggcgcgcgcgcgtatggggctgatggcgccgacgatggggctggacaataagcgccattccgcatggtgcgaatatggcttccctgagcaggtaacctacgaaaatctctatgccctgtaccggcgcggtggtatcgctcacggtgccgttgagaagctggtgggcaagtgctggcagactaacccggaaatcatcgagggtgacgatgccgacgagagcaaagatgaaacctcttgggagaagagcgccaaaaaggttttcacaaagcgcctatggcgggcttttgctgaagcagaccgccgccgcctggtcggacgttatgccggtatccttctgcacatcaatgactccagaaagtgggaccagccggttgttcgtgggaagtcactaaaaaaggttacgatcgcatgggccggttcgttaactgtcagtcaatgggtaattgacgagaattcggcagactacggtcagccaaagcagtggaaatacgttgagagtctgccaaacggagggaccaatcagcgattcgtgcatcccgatcgcgtctttatcctgggtgactactcggatgatgccattggtttccttgagcctggctataacgcctgcgtcagcctggagaaggttgaaggtgggtcaggtgaggcattcctgaagaacgccgctaataagcagagcattaatttcgacaaagacgttgatttcaacaaccttgcttctttgtacggcgtatctgttgatgagcttcaggagagatataacgatgctgccagagagttaaacatcggtaatgacgttcttctgattactcaaggtgcccaggtaacgtcgatggtgtcggcagtttcagatcctgacccaacctataacgtcaacctgcaaacctttgccgcttctgtcgatgagccggtgaaaattctggtagggatgcaaactggggaaagggcgagcactgaagatcagaagtatatgaatgctcgctgccagtcacgccgcggtgacctgtcattcgaaattgaagacttcagtgacaagctcatagacctgaaaatcattgatgctgtcagcgagaagacggttatctgggatgacctaaacgagcagactggaactgagaagctcgccaatgccaaaaccatggcagagattaaccagacgttccagggaagcggagagaaccctgctttcagccgtgaagaaattcgcacagcagctggttatgaaaacgtagacgaattcccattaggagaagaggatggcgacgaagaagacgaagccaccaattctaccgcgtaa

SEQ ID NO: 176031 - DNA, 1479 bp, Klebsiella oxytoca
atgacgactgctgagcaaagggcatttgcccgtaaggttgaatgcgaagaggacgggctctattacgctcgctacttcttcaagcagcgcaccggtggaaagatgatagtcgcgcctcaccataaggtgattcagcaaacactggatcgcgtcattgatggtgagattcagcgcctgatcatcaacgtcccgcctgggtacacaaaaacggagctggcgaccatcaatatgatgggccgtggactggcgctgaactgccgggcccgcttcatgcacctgtcctattcgcacaacctggcgctgctaaactcttccaccgcgcgtggaatgattaagtcgcaggcgtatcagtcgatgtggcccatgtcgctacgcgatgacgctgacagcaaggctatgtggtggaccgaacacggcggcggcgtttatgcgtcgtcagctgccgggcaggttaccggttttcgtgccggacacatggagccaggctggcagggcgcgctgattatcgatgacccggtaaagccggatgacgcttattcggagatcgtccgcgacggcgtcaacaatcgatttaacgagacaatcaaatcacgactggcgatcgagacgacgccgatgattgtcatcatgcagcggatccactaccacgacctgagcggttatctgctgcggggcgggagtggagagaaatggcatcacctgaatctgccggtgattatcgacaatagtcagccatacgaagctcagtaccctgaaaactcacacgctataccgattgaccatggcttacctgacggctggctgtggccttttaagcacaatgaatcgcatcgtgtatcgctgttctcgcaccggcgcaccgcagaagcccagtacatgcagaagcctcgcaggtttaatgcagaaggcgctctgtggacagagttgatgatcagcgcggcacgcgaactgcaaattcatcacgataaggttcgcactgtcgtagccattgacccgcaggcaacaaacagcgacgaaagcgatgaaacaggtattgttgctgcaagctcatatggtgctggtgataaaaagcagttctctgtggatggcgattacagcggtaaatattcacctgctggatgggccaagaaagccatatcggcttatgagcaacacgaagctgacgcgatagttattgagacgaaccagggtggagatatggcggaggagacactccgcaacgccgggttcaaaggtcgcatcattcgtgtccatgccagcaaaggtaagtatgcccgcgcggagccgatatcggcgctctacgaacaggggcgagtggcaaatcacggcaatctctacgtgttggagaaccagctgatggaatacatccccgccaccgcgaagaaatcacctgaccgcctcgatgcgatggtttacgcactgactgaactgaatggatcgcaacctgtggggatgatgattccgaaacgccttcgctaa

SEQ ID NO: 176032 - DNA, 480 bp, Klebsiella oxytoca
atggcgacactgaaaggtgaggtcaaagccttcatcgttcagtcccttgcctgcttcgatactccatcccaggtggtagagctggtcaaaaaagaatttggcctaagcatcacgcgtcagcaggtcgaatcccacgacccgacgaaagcaaacggcagggggctggcgcagaaatgggtggacatgttcagtgccacccgagaacgcttccagaatgaaatctccgatattccgatcgccaacaaggcgtaccgccttcgagttctcgaccgcatggcaacgcgcgccgagggcatgaagaacctcgcgcttacggcagagatcatcgagcaggcggcaaaggaatgcggcgatgcctacaccaataagcacaagtttgaacattccggcccgaatggtggcgccatccagacgatcaccatgagcaaagaggaatacaaatccgcacggcaggagatgatggaggatgacgactgctga

SEQ ID NO: 176033 - DNA, 636 bp, Klebsiella oxytoca
atgtttggtcatgatgagagtaggccatatcctcccgtcaacttcactggcgaaagctggctaccgtatacgcggattatcccggccactgaaatcagagagtgggtaaatcagcacatcctcttagaagaaggtcgactccataaccctgaccatacgcacttgctcgatgctgatgtcgcgttcatgtgggcctccggcgctttcgagaagaaaggccgttatgtactcggtcaatgcgagcaggtaatgctacgcgccggaggctggcagaaagcccgtatggagcaacagatgcatgaatggttcggtcgcataccgaagttcatcatcaccctggctgctgattactgctcacaatgcagtgacctcgaattctgcgcgctggtagagcatgagctttaccacatcgcccaggccactgatgatttcggagcgcctaagttcaacaaagagaccgggcagccagtgctcacaatgcgcggccacgacgtcgaagaattcactggtgtcgtacggcgatacggtgccagcaaagaagtgcaggagctcgttgatgcggccaatgcgccagcagaggtggctcacatcgatatagccaggtcatgcggcacatgcatgctaaagctggcctaa

SEQ ID NO: 176034 - DNA, 513 bp, Klebsiella oxytoca
atggaaattacaacgattaatcagctaatcgcagcaggttcaggcctaataggtgcttgtataggcgcgggtatttctggctggatcaactataaaattagtcgcagtaatcatgatttagaaaagctgtcatttgctgcagggttcattgcggaagttgagtcattacaaaaagtaatgagagaaagaggttatttagagtccttcacttctttcgctaaccaccctgatgttatggctggtgcaaaggttcagtacgaaattttaatacctgataacttctcacggttttataacgccaacctaaataaagttggtttgctaggcgtggaaaggaccaagctattgatccaataccaccagatacttcaggcgttggcccaagactttaaaaagggttcctatgtcaatataaatgggtttgacaaagaggcaatcgatgaaagtgtccgcttcttcacccttgccttatctatcggagatcaacttgtgaattacgaaactcacaattag

SEQ ID NO: 176035 - DNA, 156 bp, Klebsiella oxytoca
atggcctcagtagacgaaaagacaaaactagctgaaattgctgcaagcatggcaatagagctaataaaagcgaaccctagtgggcacaataccgctgagcgtgtggctgacgcattcaaaactatatatacagcggtctacaataaggctggataa

SEQ ID NO: 176036 - DNA, 462 bp, Klebsiella oxytoca
atgagccgactaacagcaatcatcttcgctgtcgttatctgcctgttggtttcaatgtcctgggctatcaaccattaccacgacaacgccaccaagttcaaagagcagcgcgataaagccactgaacaactcagcatggcgaacgccaccatcactgacatgcagaaccggcagcgtgacgttgcagcgctggatgccaaatacaccggagaactgactgatgcgaaagaaaccattgagcgtctgcatagcgatgtcattgctggtcgtaagcggctgcagctcaacgcaaactgtcccgcgaacggagcgaccggcaccagcggcgtgggcgatgcttccggcccccgacttaatgacaccgctgaacgggattatttcaccctcagagagcgaatcgaaacagtgaccagccaggttaactacttgcaggactacatcaggcagcagtgtttgaggtga

SEQ ID NO: 176037 - DNA, 531 bp, Klebsiella oxytoca
gtggcacagttgaaactgagtaagaaaagcggcgctgcgggcattgcctgctccgtcggagcgatcatcgctattgttatgaatgcgggccatgtaaggactaacgagcgcgggctggagttaatcggcaatgctgaatcttgccgacgtgatccgtatgtgtgcccggcaggtgtgctgactgacggtatgggtaatacgcacggcgtgaagctcggcaccgttaagtctgaccagcagattgcagccgagtgggagcacaacatccttgatgctgagtcctgtgttaaccgctacggaaatggccgaaagctatctgacgatactttttcagcagttgtatcggtaacgtttcgtgctggctgcggaaacatgcgcacctccacgatgttctcacttctcagaagtgggggcatcacggcggcatgcaaccagttccctcgctgggtatggggtggcggcaaggttcttcctggcctggtaactcgcgccgggaaagaaaaggcgctctgcctggatggtgtgaaatga

SEQ ID NO: 176038 - DNA, 321 bp, Klebsiella oxytoca
atgcaacgtatgaacccaacaaatggacacgatctgccgtactggtggtcggcggccttgggtctgttctctttgcttagcctgcaggattacgtgtttattatcggcgcgctggtatcggcgttcttcacgataaaaacctattacgcaaaacggaaagaagagcgtgagcgtatggctgaggaaaggaaacgaacccagctgctggaaaactacttatctgatgtaggtaaaaaacctcactccgatcgtccggctgccgccgaggtggttacggaggcaatgcggagaatttccagtggcacagttgaaactgagtaa

SEQ ID NO: 176039 - DNA, 690 bp, Klebsiella oxytoca
atgacagcgcaatatttagaatttgttcgccagcagctgatagtggccaccgccgatctgagtggcgcgacgaaagggcagttggtagcctttgcggaaaacgcgatgtttgaggcgacggcgcgcagcagtaagcggatgaaggtagtcgacccggcaaccgggagaatggttaagccgagcaatccgccggtaccggggaaacagtcccgcgccaaaggctcagcaatcgccctcgttctgccagttgagtattctacagccagttggcgccgggctttgctgtcgttggatgagcatcaaaaagcctggctgctctggaactacagcgacaatatccgctgggagcaccaggagacgatcactcggtgggcgtgggagcaattcagccagcagttggccggcgtgcgcattgcaaagaaaacagttgatcgcctgcggcagcttatctggctggctgcccaggatgcgaaagcggtgctggcagggcgcgaccagtatcagtacggtgaccttgcggcgatggtgggggtgacgcctaagaactggtcggaaaccttcacagctcgctgggaggcgatgataggcatctttattgggctggatagtgatgcacttttgcaggttacgcgatcacgttcacaacaaaaggcgacaaatttagatgtaagtcttgcaaaactggattaa

SEQ ID NO: 176040 - DNA, 141 bp, Klebsiella oxytoca
atgagccgttacgctattgagcggatccgcgaccgctggcaaaagctccgcctgttccgggaccgcggcacggtattagttgactatcgcattttgaagaatttcgttcgcatctatcagaccttgggagagacagcatga

SEQ ID NO: 176041 - DNA, 645 bp, Klebsiella oxytoca
atggctaagttaccgcgccgcaagtgcgcccataaagcctgtcgacagtggttccatccggtgcgagacggacaggtggtttgcagcttcgattgcgccagcgcgatcggcaaagaacagaccgcaaaagcccgagaagccgctaagcagaaggaagcgctgcgccagcgcaccgaagagaaggcaggccgccagcggcgcaaggccaagcgcgaatcattcaagactaaaacccagtgggacaaagaggcccaatcggccttcaaccgctacatccggatccgtgatgagggaaagccgtgcgtcagttgcggcaatccacttatcggcaaaagcaactacctgaccggcagcgctattgacgccagtcattaccgttcccgcggcgcagcgtcgcaccttaaattcaacgtgttcaacgttcactccgcctgtacccgctgcaaccggcaattgagcggaaatgcagttgagtaccggattcgccttgttgatcgcattggcctggaacgcgtagagcgccttgaggctgataacgagccccgccggttcgacattccctacctgcagcgcatcaaatccatattcacccgccgagcccgagcgctggagaagcgccgcgtccgccatcaggaggctgcatga

SEQ ID NO: 176042 - DNA, 171 bp, Klebsiella oxytoca
atgtctactccactttcccgcgtcatcaccaacgaaatcttccgcgttccggcgcgccgccagcgcaagccgggggttaatccgtccgacatcccgacactgaaagactacaccgcccgcctggtggatcagaaatggctgcgtctcgcggcgaggagagcgcatggctaa

SEQ ID NO: 176043 - DNA, 456 bp, Klebsiella oxytoca
atgactctgccagtagacggcatcaaactccatcgcggcaacttcgcggccataggccagcagattcagccgttgctggatgccgggcaatgcttccgcctgcaggttaagccctggcgcgagaagcgcagcctgtcgcagaatgcgctcagtcacatgtggtacacggaaatcagcgaatacctgattaactctggacgtactgacgcaacccctgagtgggttaaacgcaacctcaaaaagacctacctcggatgcgaagaggtgacctacaccgacttcatcaccggtgagaaaaccaccacctgggagcctcgccacactggcgaccttgataccggtgaaatgcatatcttcctgctgaaggttgaaatgtggtgcgctcagttcggtctggccctgactatcccgaacggttgtgaataccagcagctgcgcgataagcaggaggcatga

SEQ ID NO: 176044 - DNA, 591 bp, Klebsiella oxytoca
atgcaagaaaatgacatcaaggatcagcaggaatctgaaatacaggctttcgatttttcaaaggaatttgacgctctgataaatgcaaaaggaaagattaccacttccatgctaacggcggttaatcgctactttttgtacttttctttctttgagtctttgcttcttgggtgctctggagggcaaaagaaaagttctgactatgcaaaggctctcatggaaagaggggtttatgatgaaagtataattagatcaacatttagcgtgtttgcagatagataccttactgatcggcgtaggtatgagagtctttgtggtgaagataggcatacacgcccagataccaaagaaaaatattacggcgttatgtgtgcgaaagcagatgatcttgttactcagtttgaattatgtttatttgtctgcttcagactgcggaacaatcttttccatgggccaaagtggagatatttccttgatgggcaagaagaactactcttgactgccggaacttttatacattcgattcttgataaagcccccagaagtgaagaaggttgggagtttcaggatattttgtcgccaacagaatag

SEQ ID NO: 176045 - DNA, 258 bp, Klebsiella oxytoca
atgtcgaattggaacattgcagccaaaccgaaagacgaacaggacaaggttaacgttgaccttgcggcctccggcgtcgcgtacaaagaacgactgaacatgccggtcatcgctgaagtggtcgccagagagcagccagaacacctgcgcgaatacttcatggagcgcgtccgctactaccgcgagcagagcatccagctccccaaagcatccgacccacgatacatcgaaatggcagaattaaatgcaagaaaatga

SEQ ID NO: 176046 - DNA, 336 bp, Klebsiella oxytoca
atgtttacatctgataagtatgacttcattacttttggcggatgccgtgatggttccattaagaatggagaatatgaaaaatttaaagagctcgattctgatggtcatgcgggacgcacgatgctatacgcaaaacctttagtcacgcacagagatccaacctcacataaaaaggtagagccaattacccttgaggaatttttggttaaagagcatttatcggttaatggtaatacatacctcatagcaacttatggggatgttgaaccattagatgatgagaggattgagcagctaatttccgtgtgggacccacagccatacgtttgtctctag

SEQ ID NO: 176047 - DNA, 300 bp, Klebsiella oxytoca
atgtactcccccaacgggaaaaaagacagcatccagatcatcccattgtcagaggtggcggcaaaggatgagtttctgaatatcaaaaacgtgagccaggatgacatgaaggcagcacatcgtgtaccaccgcagatgatggggattatgccgaataatgttggtggttttggcgatattgaaaaggcgagcaaagtatttgttcgtaacgaactactccctttacaaaaaaggatacaagaatttaacgactggttaggtgatgatatcttacatttttcgacatattattttgaataa

SEQ ID NO: 176048 - DNA, 933 bp, Klebsiella oxytoca
atgacaaatctagtaaaaatagaacgtttgtttaagcaattaacttgcccctcgattttaggggctggtaagattgcacacggaagagcaattgaaaagctggatgatttaaattttacattgacaaatgttgttccacctccacaccaaaagatttctctgcgaatgattgattccaaagagtttgcttattatatggcgggggaagccaataggttttttctcgcatcaatggtatcttggaacaggtcacagtctgaagaaaacgaaaatttatcatggcaagttgttgagcattattattctgcatattacgcagtacattacctcatccgtattgcagggttaagtttaacaaacgttgataagccgacattacgcactattcttaggtcaaatatgactgggaatgtatttaataatctagaaagtggtctgaatttaatgcgctatgatagcgcatgcgaaaatattactcttgaaaaaaaagataaaaaaggaggatctcatattgatgcttgggcatcatgggtttctgttgtggaacggcttattttagaaactaatgctgatattcaagaatatgctgaaacagcagtttccttatcagaacatttaggttttataaaaagagcaaacgatacatttagcccaacagtaataagaaatgaggtgaactatcaattttctaataacgcttggtgttttgatggtttaactaaggagaaaataaggcgagttagaaaagtaattaatgaaaacagccttttgttgagaaataacggagatatgcttgaaagtttaatttgtaataataacctgataatctcattggcaaagaaagtatttaagtcagcatcagaaaataattctaagagtatttgtaggctgttgctaactaaatataagcaaaaaatacccactctggtgtga

SEQ ID NO: 176049 - DNA, 981 bp, Klebsiella oxytoca
atgaaggaatcttttagcgcttcattaattattcaaggtaagcacaaattttacagcctaacgttgccaattgatgttatcgctggttgttgttcaccaaaccctcgttctgaagatccacaagatggatttcaacggagcttggatgaaacaagggcagagtcgattgcaaattatattattaacggtggggtaattccctctagtattatattgtctgcgcaaccatcttctgagtttgaatataatagtaaaaagaagacgttaagtttcaaaaatgatgtaaaatcatttctcattatagatgggcaacatcgtgcttatgggtttagaaaactatatgaacaaggttttgatgataggaaattacgaattcctgtagtgattttctctgagctaaatcctatagatgaagcaagattgtttattgatgttaacacgcttcaaaaacctgtcccaaaagaattgcttttggatataaagaaattagctgaaacagaaaatgcagaagaagagcttttagacttaatatttactttgtttgaaagcaattccactagcgctcttgctgggaagttgtctcgttttgagaaaaaaagacactttatttcaaaagttactttttatgaggcatttaagcttatattgaggtctttcgatatttcaagccctcaacgcctgtttgagattgtaaatgcgtatttatttgctgcacaagatctgctcaactctcagggagttaatttcgatgaggtaatcattaaacctacttccttcaaaattctagtagggcatagtaaagctgtaattgctatgatatttgacaactcaccagaatcttcgagtttaattagcgagcacaaaaaatatctcaagcggagtcttaatggaaatatagctacggttttaaataatagggccacagtaaaagcaatagaattactagacaacaagttgttaaaaagaaatattgtaatatga

SEQ ID NO: 176050 - DNA, 129 bp, Klebsiella oxytoca
atgaaacgtatatccggaactcaaatcgtcatcaattttatcggcagcaatcccggttgcactttttcagagatccgcaccggaacgggcctggactcttctgtcggtatcgtttatggagcgttttag

SEQ ID NO: 176051 - DNA, 732 bp, Klebsiella oxytoca
atggcaagcatggctgggggcaaccctgagcatagacgggttgtgaattcagacgctgagcgccttgttgacgcgctgttcatgcagctgaagcagattttcccggcagcaacgcaaaccaacctccgatccgatgctgacgagcgagtggctaagcagcagtggatagcggcattttcggaaaacggcatccgcacccgcgaacagttatccgccggcgtgcgccatgcaagagccagtgagtcgccgttctggccatcgccgggccagttcatcaagtggtgcaaggacagcggcacagtcctcggtatcaagctggctgatgtgatgggtgaatttcaacgttacaaccgcgagaaggggcttcacaccggaggcgcggaacgcttcccctggtctcacccggtcatgtactggattgtcaccgatacccggcgggcaatgtatcagcgacaactcagcgaggcggaaaccgagaaatatgccgccaaaaagctggaagactgggcgcttaaagtcgccgccggagagcaaataccttcaccggtactggcgctggagaacaaccaggaagctatcccgacaaaccatgtcagtcgccagcagggttttcatccggaaggcaaaagcttcggctgcatgcctggcgccgcatcactcggcgcgttaaccccagctcagtggctgcgggacgaatacctgattggcaaagaaaaggggctgattcaatga

SEQ ID NO: 176052 - DNA, 837 bp, Klebsiella oxytoca
atgtcaaataccgcaaaaattctcaactttcctgatgtagtttcgggaatacaggagctgcgagtggcagatctcgacgatgggtttacgcgcatcgccaatgagctccttgaggctgtcatgcatgcaggcttgtcgcagcatcagcttttggtgttcatggctgtcatgcgcaaaacatacggcttcaataagaaatctgactgggtcagtaacgagcagatttcggagctgaccggcattctcccgcataagtgctcagctgcaaaaagcgtcctggtcaagcgagggatattaactcaaaccggtcgtgttatcgggattaataaaacggtcagcgaatggtcatctttacctgtaaaaggtacagaaaaaaaaccttacctgaaaaaggtaaatttacctgaatcaggtaagaaaagtttacccgaatcaggtaacggctattacccaaatcaggtaaacacaaaagacaaacatacaaaagacaataaagacaatattaataaaccccctaaatccccccgggcggtttcgttcgatgcatccagtgttcagctgcctgactggttgtccgtggtcacctggtcttcatgggttgaataccgtcgtgacctgaaaaagccgatcaagtctcagcagaccgtaacgcaagccatcaatctgctcgaccgctgcaggctgaacggatacgcgccagaagaaattattaaccgaagcatcgccaatggctggcagggcctgtttgaacctgacgggcaggcgaaacgcagtcgcgattccgggcaggaaggcctccactggaacagcccggatgcatggagggatttcctgtga

SEQ ID NO: 176053 - DNA, 543 bp, Klebsiella oxytoca
atgcagtcacttgcgtatcaacacaataacggaatacacacgggagcgatgataaaccgcgctcaacctaaggctgcgccggaccacgacaagatccgtgatgcggtccgggcatggtcgtcggcgctggacaaccaggacgtggtatcagcgctgatcatcaacgaataccgggagcagggcgggaccgccatcagtttcccggaagacatcagccgggcgcgccagaagctgtttcgcttcctggataaccggtttgattcggagcagtaccgagagaacgttcgccaactgacaccggcaatcctggctgttctgccgctggagtttcgcaatcgccttgcacctcagaacgacacgatgtctctgattgcctctgcaatgaaagagtgtgcagaagcaaagcaggccgttctgctgggcgctccagagcaccagaaattgaaagaggtaagcgagggtatagcttcgctgttccgcctcatgccggagcaggtagggccgctgatgacgatggtgacatcgatgctgggggttatgtga

SEQ ID NO: 176054 - DNA, 234 bp, Klebsiella oxytoca
atgagcaatgaactacaccgctggcgcaaggcagccactaccgaagaatgggctcagctcgcaaagctggctaacaccacggcaggttatctggaccagatcgcctacggaaatcgccgggcatctccagaaatggcatctgctatcgagaaaggcacgaagaattttcaccaccaggctccggtcctcaaggaaagccttgtattcgcatcgccgcgtgatactgcggcctaa

SEQ ID NO: 176055 - DNA, 753 bp, Klebsiella oxytoca
atgctaaatactacgcaagcaacatttagcaatttgcacatttatcattttgctaaaagcggtaacaatgcagggatggaaaataaagaaatcagaaagtccaacctagaagcgctatatgagaagcgccagcacgagtctcgaatgaccaaagcgcaattcgccgagctcattgagacaagtccggcagcccttagccagcttctgggaccaaaccctaatcgcaatattggcgataagatggctcgaaaaattgaaagtgcgcttgatctgccttttggctggatggatgttttgcacgccagtgaagaaccttcgaacgtttcatatcgggggctcaacgaaacaaaaggaagttatcctgtaatcagctgggtaagcgcggggcaatggatggaagctgtagaaccttatcaccgaagagcgattgatcgctggtatgacacgactgttatctgttcagaagattcattctggctcgatgttaaaggggactcaatgacctctcctgccggcctaagcattccagaaggtgctgccatattggtggatcccgaagtcgagccgcgcaacgggaagttggttgtggcaaagctggatggcgataacgaagcgacctttaagaagcttgtaatcgatgcaggcaggcgcttccttaagccccttaacccctcatatccaatgattgaggttaatggaaactgcaaaatcatcggtgttgtggtcgacgccaagatactgaatatcccataa

SEQ ID NO: 176056 - DNA, 201 bp, Klebsiella oxytoca
atggagtttaagaaaggagatgttgttacgtggtcaagccaggccgcgggcagctggaagacgaaaactggtgtgattacggaagtgtgggaatacaaaaaacaaacgcgttacaccgtaaaagttgatccgaaggaagggtcgacggcgaaaccaaagttttactacccacgcacatcagcactacagaaagtgtcatga

SEQ ID NO: 176057 - DNA, 198 bp, Klebsiella oxytoca
atggaaactttattcgcgctcgtcctgaccgtggcaatgaccaacggtgattaccaggacgtcattctcggcgtttacgacagccagcaggaatgcagccaggcagctacagagcagaaagtaacagcggaatgctggccggtagaaagcatcctccgcaacggcgagttcccggcgaaagacatcgcgcagcactaa

SEQ ID NO: 176058 - DNA, 285 bp, Klebsiella oxytoca
atgaacgcatacctcacttacgaccgcatcgaagatcggcgctgggttgagcagcagctcgacgacgagaaagagaagtggatcgacgaccgggcgcagaaaatcatcgacatgatgccaaaagagccgtccggcctcttccacttcacgatcccgattgactccagtccatacgaagggcttcgcagcgataaagctggcgaggcctacaacgatttcatttcggcagttgcttacgcccaggcggaatacgactgggaacaccgtaccgggtgcccgttttaa

SEQ ID NO: 176059 - DNA, 846 bp, Klebsiella oxytoca
atggcaaacgaattaacaatcacggcgagtgcgctggcggaaaaaggtatcgacgtcgctacctggagcgcgctgaagaacagtatctaccctggcgccaaagacgaatcggtaatgatggcgctcgattactgccgtgcccgccagttggatccgttgctgaagcctgttcacctcgtgccgatgagcgtcaaagactcaagaacgggtaaaagcgaatggcgtgacgtggtaatgccgggcatcgggctttaccgcattcaggcggaccgctcaggtgattatgccggtgcccgcgaaccagagttcggtccagacacgacgcagacgctttctggtgtcgaggtaaccttccctcagtggtgcaaatacaccgtctacaagcgcatgcccagcggagagatcgtcgagttcagcgccaaagaatactggattgaaaactacgccaccggcggacgcgacaccacggcgccgaacgcgatgtggaaaaagcgcccatacggccagctggctaaatgcgcagaagcccaggcgttgcgtaaggcatggcctgagattggacagcagcctaccgccgaagaaatggaaggaaaatcactggatgttgatatccgtgacgtcactccccgcagcacaacagaatcacttccaccagcagcaagcgaagaaacgctccaggcgatcaccgatctcttaacagccctggataaagactgggagaaagacttcctcccactgtgcagcgacatcttcaaacggcaaattcttgaggcgtcagaactcactgaagaagaggcgcagaaagggtttggcttccttcagaaaagggctaaggcggcagcatga

SEQ ID NO: 176060 - DNA, 681 bp, Klebsiella oxytoca
atgacaccagaaattatccttgcccggaccggtattgacgtaaccactattcaacagggcgatgaggcgtggcaccggctgcgcctcggcgttatcacagcctccgaagtgcataacgtcatagccaagccaagatcggggaagaagtggacagacatgaaaatgtcctactttcacaccttgctcgccgaggtatgcacaggcgtggcgccagaggttaacgccaaggcgctggcctggggcaagcagtacgaggaggacgcccgcacgctattcgagttcactactgacgtgaaagtcacggagtctccgatcttgttccgtgacgagagcatgcgcaccgcgtgctcccctgacggcctttgcagtaacgatttcggcctcgaattgaaatgcccgttcacctcccgcgatttcatgaaattccgccttggcggtttcgaagccatcaagtctgcgtacatggcccaggtgcagtacagcatgtgggttaccggaaaagacgcctggttctttgccaactacgacccacgcatgaagcgcgaaggcattcaccatgtcgtcgttgagcgggatccgcagtacatgaccgatttcaacgaaatggtgccggagttcattgagaagatggacgaggcgctggcagagatcggcttcacgttcggggaacagtggaaatga

SEQ ID NO: 176061 - DNA, 429 bp, Klebsiella oxytoca
atgaaacgcacacccttttaccgccggcccgggcgaaccgggcaattctccggcctacgtgaacgcgttatctggatgattcagacgcgcggccgcccggtaaccggtagcgaaatcgctgagaagtttggcgtaacgctcatcgagtttaaccgggttgccaacggcattacccgcggctccggacagatagcgcagatcgttgagtctgataaatggcttaacgaggacggcatctgtgaccggacattcgacctcgtcacgaagcctaaggtcgtaacaccacagggtaaatcgcgcctgttcacccggcgcgccatagagcagtcgcaggaaggtaggcggcaggaatgcatcgaacgtgccgcacgccgtagcagactgattgctcagggcctctacatcgacgaaatggagtcagtgctatga

SEQ ID NO: 176062 - DNA, 165 bp, Klebsiella oxytoca
atgaaagcgtggtcactcgaagagctggcgctgctgtggcgacactcaaacgctgaagtcgctgagattaccggccgcagcatcgatgaggtcggagataagcggctgcaaaccaatattgagcgtaatggctgggatgttaacgatccggagcgtacatcatga

SEQ ID NO: 176063 - DNA, 2160 bp, Klebsiella oxytoca
atgaaatacggaagcgtgtgcagcggcatcgaagctgccagtaaagcgtgggaacctcttggctggaaacctgcctggttctctgagatcgaagccttcccctcagctgtcctcgcccatcactggccgaaagtaaccaatcttggcgacatgaccaaaatcgccgatgcggtacgcgctggtgaagttgaagcgcctgatgttctggtcggtggcacgccttgccaggcattcagcatcgccggcttacgcgaaggtctgtctgatgaccgcgggcagttaaccctctcttacgtggaattagccaatgcaatcgacgcaaagcgccgcgaacgcggtgaaccagaatcaatcatcgtctgggaaaacgtcccgggcgtgctcagcagcaaagacaatgccttcgggtgctttctggcaggacttgccggagaaagcagtgagttgcagccagcagggggaaaatggacgcacgcaggttgtgtgtctggaccagaaagggttatcgcctggcgagtccttgatgctcaatttttcggagtggcccaacgacgccgccgtgtgtttgttgtcgcaagcgctcgtgacggattcgatcctgcaaaaatattatttgagctcgacagcgtgcgccgggattctgcgccgagcagaacatcggaaacggaacctcccgtcaatgctggaaaaagcgctgaaaacggtagccactgggatgacccaacaaacccacatccaaccctaaaccaatctcataacatcggcggaatcggacaaagtaatcaggagattttcagtcaaagaggtagcggaattgtaggcgcatatcgaatgactgcatttggagaatatgctgatgatgagactgcatcgacagttaaggcgagggattataaggatgccactgacctagctgttatatcagttcatagaacacaagatcctgacaccttaaaaaatcttgctcacacactgggccgaaataacgggcaggaaaatgctttatttcttcagcctggaatcttaggggggcaacaccctaaagcggggatagaggtaggtatttgcccaactctcaccgaagcaatgggctctggaggtggccatatacctgtaactcacgacttaatggctgtccgtcgccttacacctgtcgaatgcgagcgccttcagggctttcctgataatcacactctgatcggctggcgcgggaaggatgctgatgaatgcccagacgggctgcgctacaaagctatcggcaatagcatggcagtaccggtaatgcgctggattggtgagcgcatcgccgccgagctgccagtcgaagcgcctgcaccgcgcaactggcagcgcccgttcctgaaatgggctggcgggaaatattccctgcttccggaactggatcgcctgatcccagccggtaaacgcctcgttgagccattcgttggtggcggctcggtatttctcaactccgaaaaacatgaatctttcctgcttgctgacgtcaatgcagatctgattaacctctatcagatgcttgaagttgaccacatcagagtatgctcgcttgccaaaatattgtttgagcgcgccaacagtgaggcggcgtacaaagagcttcgggatgagtttaataaccagcgcatgggcgcgccgaagcgcgcagcagcctttctcttcctcaatcgacactgctttaacggcctgattcgctacaaccgtgatggtttctttaatgttggctggggcaagtacgaagcgccctatttcccagagattgagataaaggcttttaagcagaagtcgcataaatgcgtgttcctgaatgctggatatcacaggaccctggcgctggccggtgaaggtgatgtggtttactgcgacccgccgtatgagccgttgcccggcaccgcaggcttcacaaactacgccgcaggcggtttctcatgggctgatcagatttcacttgcggaaagctgtgtagcagcccaccagcgaggcgcgaaagttcttatcagtaactcaacagcgccacgagtgcttgaactttatgagcaacacggattcacccttcaccatgttgatgcccggcgggcgatatccagcaagggcagcacacgtgagactgcgaaggatatcgtcgccactttggggatttaa

SEQ ID NO: 176064 - DNA, 219 bp, Klebsiella oxytoca
atgacaccagaaaaagacaacgccatccgcgcagcctgccgccgctgcaccgaagaaatccagcaggccatgcgcaagaatccaaagcctaactggaacgaaacggtgcctcccatcatcaacaagcatcacaagaaaattgaagctctgggagttagcttccttgagttcgtcgtatatacaggtcggcttaatcgccgcttcggagtggaatcgtga

SEQ ID NO: 176065 - DNA, 516 bp, Klebsiella oxytoca
gtgagttattcaacagttataaaagtttggccgggcgagaagtctgaagaagatgaagagctccgcaatggctggggaagcggccctgtcatctggaacgacatggcaatgaaatatcttggtctaccggcccatcagtacacgatgaaaatagatagcctttggcccctggctaaccgccttgatattccctatcaccatcgtgctgtcctcgctatgacatacgaccgtatgtatgtgaagcaggagcattactcgctggcagcagattgcattcgcaaatacctaactgacttcccagctgatgataaatatgtaaaccattggccccgcattgctgaaatttttgaaagctcacctgagtgcccggctattggtttatggctcacttcggtatgtgaaaacccatttcttggcgagtgggatgaggaaaccgaagattacaaacagcctgattggtctcgttactggagcctttttgatgaccttgacgcaagcgaaagtggtgtcgcatga

SEQ ID NO: 176066 - DNA, 216 bp, Klebsiella oxytoca
atggacatcatcgataccgcagcagagattgaagagcttcagcgtaacgctgccctttccgctcaccgagtgaaccgtaacgccgtatcagctgagcgttgtgaagaatgcgacgaaccaattcccgagccacggcgcgctgccgttcccggctgccagaactgcgcggagtgccagggcgttatcgaattgaggaataagcagaggggaatgtaa

SEQ ID NO: 176067 - DNA, 273 bp, Klebsiella oxytoca
atgatgaaagacattttgctttttggagcaggacatgatggtactaagcgacgcgttgagcacagtaaggatacttgttatttcaacagcaaggctgaaatgtcccctactggggcagacgtggttggctttaagataaagcatgttgcatataaaattagtactgcatacccagaaaaaggcggatttttgattggcgtatatggcgaagaaccgtcagatgaccagataattaaagcaatcttaaagtacaatcctctaccagtagattaa

SEQ ID NO: 176068 - DNA, 327 bp, Klebsiella oxytoca
gtgaaaccttacgaatcaaataaatcgcagttcaccagatatctgatccggcggctccacgctgaatggtcagaaaagaccttcggtaatgtcggtccagtcggcccgctgaagcacctttccaaagaggcgttggaagctgctaacgatcctggtgacctcagcgagtgggctgatatgcagttcctgctttgggacgcgcagcggcgcgctggcatcacagatgagcaaatcaccgcggcgctggaaaaaaagctaaaggtgaatatggcccgccagtggccggagccgaaagacggcgagccgcgccttcacatcaaaccatga

SEQ ID NO: 176069 - DNA, 273 bp, Klebsiella oxytoca
atggctaagcttctcaacttgcaggaatgggctgctgaggtctacacgactccaccctcactttctactctgcgtcgatggacgcgggaagggcgtatttatcccgcgccggagctgcacggaaaggaatataaagttcagcctgacgctatctacgtggatccgcgcaagaagaatctgcgcgctaaaccgaaacacaccaaactgccgtccggcggcaccttactggagagactgactcatggcgaaaaggccagtacgttacgacgctaa

SEQ ID NO: 176070 - DNA, 1086 bp, Klebsiella oxytoca
atggcgaaaaggccagtacgttacgacgctaaccttccacgtaacctcacctttcgcaagcgggacaacattttctcatggcgcaatccgatcaccggccaggaaatatcacttggccggatttccagaaaggacgcaatcagccaggcgatcgaggctaacaactttatccatcagaattacatcccctcctctctcctcgaccgtatcaaaaacgtaccaacctttactgtgtcggcatggcttgaacgttatcaagtgattcttgaacggcgagagctcaagaaaaacacacttaaggtgcgtcgtaatcaaatggcgacgatagatgatgagtttggtaaatacgcgctcgcagaggtcacaacaaaggatattgccgagtttctggaaacgtatgtcgcttgcggtaaaaaaagcatggcgtcagggatgaggtcaatcctgctggatatcttcagggaggcgatggtagaggggcatatagacaggaatccggttgaaccaaccagaacgccctcaccagaggtgaagcgagacagattgctcattgatacgttcatggcgatcagagaggaatcaaagaaacattctccatgggtgatcaatgcactggacctggctctggtaaccggacagcgaagagaggatgtcgccgcattcaggttttcagatgtgaaagatggccggctttatataactcagggaaagacagagcataaactggctatatctgttgatttaaggctggacgctgcggggttagtattgcaggatgtcatagaacggtgcagggaaaataacccgtctgacttcatgctttactctgctgtgcgtagagggggcagaaagccgggagctttaacacctgatggtttgactcaggctttctcagatgttagagatatgacgggaattaaatttggccctaacccgccatcgtttcatgagatacggagtctggccagccgactctacaaggatgagcgcggagaggattttgctcagcgattacttggtcacaagaatttaacaatgaccaaaaaatacctggactctcgcggggctgactatgatatggtttag

SEQ ID NO: 176071 - DNA, 339 bp, Klebsiella oxytoca
atgaaaaaaatcgttctgacaatgttgttattggcaagttctggcgctgcgctggcggcgccgcaggtgattaccgtgagccgctttgaagtcggtaaggagagctgggcgtttaatcgggaagaggtgatgctgacctgccgtccgggcaacgcgctgtttgccatcaatccgagcacgctggtgcagtacccgttaaacgacatcgccgagcagcagatgaaagacggtaagaccaacgcgcagccgatttctgtgatccagattgacgatccgcagcagccgggacaaaaaatgagcctggtgccatttattgagcgcgcgcagaaactctgctga

SEQ ID NO: 176072 - DNA, 870 bp, Klebsiella oxytoca
atgctgagtggagtctatgtcagcttacgctttatccattttatctcgctgatcgtcgctttcggctgtgtcctctatgggacatggtgggcgccggtaaccttgcgccgcttaatgatgcagcgtttctacccgctaatgcgccatttattgctggcgagcgcgctgtcggcgctgctgatgctgatggcgcagggtgggctgatgggcagcggctggccggacgtctggcagccggctatctggcaggcggttgccggaacgcagttcggtagcgtgtggatatggcagattttactcgcccttgtggcgctggcggtggtctggctgaagccccgacgatcgggacgtttgctgctggtcctgttttgcgcacagcttctgctgttggccggcgtcggtcatgccgcgatgaacgacggctggctggggatagtgcagcggaccaaccatgctattcatctgttctgtgttgccagctgggttggcggtctgctgccgtttatctactgtcttcgcctggcgcacggtcgctggcggcaggcggcgattgccaccatgatgcgtttttcacgctacgggcatctggcggttgctggcgctatcgccagcggcgcagtgaatgcgctgttgatccagggcgggctcatcagcgcctcgccctgggggcgtatgctgttgctcaaatgtgcgctggtggcggcaatggtggtaattgcgctggtgaaccggtatgttctggtgccacgcatgtcggcaggcggaacgcgagcggagcagcttatcgtgcggaccacgcagatagaaattgcgctgggggcgctggcgctatttgccgtcagcctgtttgccacctgggaacctttctga

SEQ ID NO: 176073 - DNA, 375 bp, Klebsiella oxytoca
atgccaatcatcgccggacgcgcgctgcgtctgtctctgtttctcgccggttgcctcagcgcagcaggcgcattcgcccacgcccatttgcaacagcagcttccggccgccggcgcggtggtggcggcttcaccccaggcgctgaccctcaacttctctgaaggcatcgaaacgcagtttagcggcgtgaccctcaccgggccgcagcagaagaccatcacccttggtaaacctgtccgcagcgacagcaataaggccgagctgacggtaccggttgagcaggcgctgacgccgggcgaatataccgttgactggcacgtggtctccgttgatggccataagacgaaaggacaatacacctttaccgtgaagtaa

SEQ ID NO: 176074 - DNA, 231 bp, Klebsiella oxytoca
atggaaaagaacctggctaaactatcccaggaggagatggacaaagtgaatgtcgatctcgccgcggcgggcgttgcgtttaaagaacgctacaatatgccggtggttgccgatttagtcgaaagagaacagcccgaacatctgcgcggctggtttcgcgaacgtctgattgcccatcgactggcctccgtttcgctctctcgcctgccctatgaaccgaaacagaaataa

SEQ ID NO: 176075 - DNA, 660 bp, Klebsiella oxytoca
atgctgcgcgtaatcgatacagaaacctgcggattgcagggaggcattgttgaaatcgcctctgttgatattgtcgacggacaaattaccaatcccatgagccatctggttcgccccgaccgccccatcagtccgcaggcgatggcgattcaccgtatcaccgaagagatggtcgccgataaaccgtggatcgaggagattgtgccgctgtatatgggcagtccgtggtatgtcgcccataacgccagctttgaccgtcgggtgttgccagagatgcagggcgaatggatctgcacgatgaagctggcgcgccgcctgtggccaggcatcaagtacagcaatatggggctatataagtcgcgcaagctcagcgtcacgacgccaccgggactgcatcatcaccgggcgctttatgattgctacatcaccgccgccctgctgctcgatattatcaacacctccggctggacgcctgaggaaatggcgaccattaccggccgcccggcgctactatccacctttaccttcggcaaatatcgcggcaagccggtttccgaggttgcggaaaacgatcccggctatttacgctggctgtttaataacctggagcgcatgagccccgagctgcgcctgacgctgaagcactatctcggggagtaa

SEQ ID NO: 176076 - DNA, 2115 bp, Klebsiella oxytoca
gtgaagcagcctgaaaattttagtactcaatacaagccgcagaagaataagcagatgccaccaaaagcgaaacggatcccccatgccatgacattacatggcgacacgcgaatcgataattactactggctgcgcgatgacgatcgcgcacagccggaagtgcttgattatctgcgccaggaaaatgagtacggtaaaaaagtgatgtcttcgcaaagtagcctgcaggacagggtactcaaggagattattgaccgtattccgcagcgcgaagtgtcggccccctatagcaaaaatggctatcgttaccgtcaggtctatgagcctggctgcgagtatgcgatttatcaacgccagccggtcgtaaaagaagagtgggatgaatgggaggtcctgcttgacggtaaccagcgcgcggccggcagcgaattttacaccctcggggggttaggggtttctcctgacaacaacatgatggcggtggcggaagactatctctcccgccggcaatatagcctgcgcttctaccctttaaacgacggcgatgaatttgcggaagttcttgagaacgtctcgcctgattttgcctggagtaatgattcgcagaccctgtggtacgtgcgtaagcatcccaccacgctgctgccgtatcaagtctggcgccatcgcctgggcacgccggccagtgcggatgttctggtgtatgaagagcaggacgatactttttacgtcagcgtacacaagacgacttcccagcagtttgtggtgatttatctggccagcgcgaccaccagcgaagtgctgctgcttaacgcggaaatgaccgacgccgagccggtctgttttctaccgcggcgcaaagaccatgaatatagcctcgatcactatcagcacgctttttatctgcgatccaaccgtgaagggaaaaacttcggcctttatcgcactaccctgcgcgatgagcagcagtgggagaccctgatcgcgccgcgtcaggaagtgatgctggaaggatttactctgtttaccgactggctggttgtggaagagcgccagcgggggctgaccagcctgcggcagatcaatcgtaaaacaagagagtcccagggcattgcctttgacgatccggcctatgtgacctggcttgcctataatccagagccggaaaccgctcgtctgcgctacggctactcctccatgacgacgccggatacgctatttgaactggatatgaataccggcgagcggcgggtactgaaacagcaggaagtcaaagggtttgatgccagccattatcgcagcgagcatttgtggattaaagcccgcgatggcgtcgaagtcccggtctcgctggtctaccgtcatgaacatttccgtaaaggcgccagtccactgctggtgtacggctacggctcctatggcgcaagcatggatgcggatttcagcgccagccgcctgagcttgctcgaccgcggttttgtgttcgctatcgcccatattcgcggcggcggcgaactgggccagcagtggtatgaagacggaaagtttttgtgcaagaagaacaccttcaacgattatctcgacgtctgcgatgcgctgctggcgcagggctatggcgatccgcgcttttgctacggcatgggcggcagcgccggcggcatgctgatgggcgtggctgtgaaccagcggccggagcttttccacggcgtggtagcccaggttccctttgtcgatgtcctcaccaccatgctcgatgagtcgattccgctaaccaccggtgagtttgaggagtgggggaatccgcaggatgaagagtattaccgctatatgaaaagctacagcccgtacgacggcgtgcaggctcaggcgtatccgcatctgctggttaccacgggcctgcatgattcgcaggttcaatactgggagccggcaaaatgggcggcaaaactgcgcgagctaaaaacggacgataacctgctgctgctctgtaccgatatggattccggccacggcggtaaatccggacgcttcaaaagctatgaaggcgtggcgttggagtttgcgtttctgattggcctggcgcaggggacgctgccgggccaggcggaggtatag

SEQ ID NO: 176077 - DNA, 681 bp, Klebsiella oxytoca
atggctaactggcttaatcaactacagtctttgctgggtcagcaagggcaatcttcttcatctgacgatcggtcacgcggcaaagacttcctgctgccgggcgcgcttggcggcctggccgggctgctggttgccagcaaatcatcgcgcaagctgttagccaaatacggcaccggtgcgctgctggtcggcggcggcgcggttgcaggcagcgtattgtggaataaatatcagcagaaattgcgtaccagcgggcagcagacatcggcggcgcccacgcccgcacctgcggcgtcctccgcgccagccgaacttgatgcccgcagcgaaaggctgattatggcgctggtcttcgctgctaaaagcgatgggcatattgacgaacgcgagcgggcaaatattgaagcgcagctgcgcgcggcgaacgttgacgtgcaggggcgggtgttaattgaccaggcgctggcgcagcccctcgacccgcagagcctggcgcagggtatcagcagcgagcaagaggcgctggaagtttactatatcagctgcgcggtcattgatattgaccactttatggaacgcagctacctgaacgccctcggcgaagcgctgaagctcccgcaggaagtgcgtgaagatatcgaacgggatatccaggcgcaaaaacaggccgtaacgctctaa

SEQ ID NO: 176078 - DNA, 363 bp, Klebsiella oxytoca
atggcggttgaaattaaatatgtagtgattcgtgaaggtgaggaaaaaatgtcttttgccagcaaaaaagaggccgatgcttacgacaaaatgctcgatctggcggaagtactgaacgactggctggttgagtgcccgcttacgctcgatgaagagcagcgcgatagcatggcgatgtggcttgccgagcgcaaagacaccctcaaccatattctgcgttccggtaagctgccggaagctgagggcagcgccgatgcgccagccgcgcgcgcagaagaagcagaagagggtgacaaacccgaagaggtcgtcgaatcggcagcctcggcaccggccaggccgcgcaaagcgaaagccgcctga

SEQ ID NO: 176079 - DNA, 1179 bp, Klebsiella oxytoca
atgactgtattaggtacggcgctgcgccctgcggcaacaaaggttatgctgttaggttccggcgagctgggtaaagaagtggccatcgaatgccagcgcctgggaattgagaccatcgccgtcgatcgttaccctgatgcgccggccatgcaggtcgcgcaccgctcacacgtcattaatatgctgcacggcgaagccttacaagcgctgattgagcaggaaaagcctgactttatcgtgccggaaatcgaggccatcgccaccgataccctggtggcgctggaacaggccgggcaaaaagtcgtccctaccgcgcgcgcggcgaagctcaccatgaaccgtgaagggatccgccgcctggccgctgaggaactgaagctgccgacctccgcctaccgttttgccgatagcgaatccgccttccgcgaggccgtcgccgagacaggactgccgtgcatcgtcaagccggtaatgagctcctcgggaaagggccagagctttattcgtacccacgaacagctggctgaggcctggcagtatgcgcagcagggcggccgtgccggggccggtcgcgttatcgttgaaggcgtggtgaattttgattttgaaattacccttctcaccgtcagcgccgtggacggcgtgcacttctgcgcgccggtcggccaccgccaggaagatggcgactatcgtgaatcctggcagccgcagcagatgagcgcgctggcgcaggaacgcgcgcaggacatcgcccgtcaggtggtgctggcgctgggcggttacggcctgttcggcgttgagctattcgtctgcggcgatgaggtgatttttagcgaagtctcgccgcgcccgcacgataccggtatggtcacactgatttcgcaggatttatccgagttcgccctgcacgtccgcgcctttctcggcctgccgattggcgcgattcgccagtacggcccggcggcctctgcggtcattctgccgcagatgagcagccagaacgtcaccttcagcaacctccaggcagcggtcggcgcgggtctgcagctgcgtctgttcggtaagccggaaattgacggctcacgtcgcctgggcgtaacgctggcgatagccgataacgtcgaagaagcggttgcgcgggctaaagcggcggcttcagcggtcgtcgtcgaaggataa

SEQ ID NO: 176080 - DNA, 642 bp, Klebsiella oxytoca
atgaaaaactggaaaacaactgcagaagcaatcctcacctccggcccggttgtaccggtaatcgtggtgaaaaagctggaacacgctgtgccaatggcgaaagcgctggttgcaggcggcgtacgcgtactggaagtcaccctgcgtaccgagtgtgcgatggacgctatccgcgcaatcgccaaagaagtcccggaagcgatcgtcggtgccgggaccgtcaccaacgttgagcagttgaaagaagtgaccgaagcgggcgcgcagtttgctatcagcccgggcctgaccgaatctctgctgaaagcggcgaccggtgaaggcaccattccgctgatcccggggatcagcaccgtatccgagctgatgctgggtatgcagtatggcctgaaagagttcaaattcttcccggctgaagcgaacggcggcgtgaaagcgctgcaggcgattggtggtccgttcgcgcacattcgtttctgcccgactggcggcatctctccggcaaactatcgcgattatctggcgctgaacagcgtactgtgcatcggcggttcctggctggttccggcggatgcgctggaagccggtgattacgaccgtatcaccaaactggctcgtgaagcggtagaaggcgcgaagtaa

SEQ ID NO: 176081 - DNA, 1812 bp, Klebsiella oxytoca
atgaattctgaaatgttacgggtaacaaatcgcatcatcgaacgttcgcgcgctacccgcgaagcctacctcgcgcggattaaccaggccaaaactgacaccgttcatcgcgcccagctggcatgcggtaacctggcccacggtttcgccgcctgccaggcggatgacaaagcctcgttgaaaagcatgctgcgcaataacatcgctatcatcacctcctacaacgatatgctttccgcccaccagccctatgagcgctatccggagattattcgcaaagcgctgcactccgcgaacgcggtaggccaggtcgcagggggcgttccggcgatgtgtgatggcgttacgcagggacaggacggaatggagctgtcgctgctcagccgcgaagtgattgccatgtccgcggcgattggtctgtcgcacaacatgtttgacggcgcgctctatctcggggtctgcgataaaattgttcccggcctggcgatggctgcgctctccttcggccatctgccgtctatctttattccttccggtccgatggccagtggcctggcaaataaagaaaaagtgcgcattcgccagctgtatgcggaaggcaaagtggatcgtatggcgctgctggagtccgaagctgcgtcttaccatgcgcctggcacctgcaccttctacggcaccgccaataccaaccagatggtggttgagtttatggggatgcagttgcccggatcgtcattcgtgcatccggatgcgccgctgcgcgaagcgctgaccgccgctgccgcccgccaggtgactcgtctgaccggcaacggtaatgagtggatgccgctgggcaaaatgtttgatgaaaaagtggtggttaacgggattgtcgcgctgctggcaaccggcggctccaccaaccacaccatgcacctggtggccatggcgcgggcggcggggatcatcatcaattgggatgatttctccgatctctctgacgtggtgccgctgctggcgcgtctctacccgaacggcccggcggatattaaccacttccaggcggctggcggggtaccggtgctggttcgcgaactgctgaaaggcggactgctgcatgaagatgttcacaccgtggccggcttcggcctctctcgctacaccctggagccctggcttaataacggcgaacttgactggcgcgaaggggcgaccgctccgctggacgaacaggttatcgccacctttgacaaaccgttctctcgccacggcggcaccaaagtcctgagcggcaatctcggccgcgcggtgatgaaaacttccgccgtgccggttgaaaaccagattatagaagccccggcggtcgtcttcgagagccagcatgatgtgctgcctgcctttgaagcgggcctgctcgacaaagattgcgtggttgtcgtccgccatcaggggccaaaagcgaacggcatgccagaattacataaacttatgccgccacttggtgtattattggaccgccgtttcaaaatcgcgctggtgaccgatggtcgactctccggcgcgtcaggcaaagtaccatcggcaatccacgtgacgcctgaggcgtacgatggtggcctgctggcgaaggtacgcgatggcgatatcatccgcgtcaatggtcagacgggcgagctaacgctgatggtcgatgacgctgagctggccgcgcgtcagccccatattcctgacctgagcggttcgcgtgtgggaaccggccgggaaatgttcggtgcgctgcgtgagaaactctccggagctgaacagggcgcaacctgcatcaatttttaa

SEQ ID NO: 176082 - DNA, 1476 bp, Klebsiella oxytoca
atggcggtaacgcaaacggcccaggcatgcgatctggtcattttcggcgcgaagggtgacctggcgcgacgtaaattgctgccttccctgtatcagcttgaaaaagctggccagatccaccctgatacccgcatcatcggcgtcgggcgtgccgactgggataaagacgcttacaccaaggtagtgcgtgaagcgatggaaaccttcatgaaggagaaaattgatgaaggtttgtgggagaccctgagcgggcgtctggatttttgtaacctggatgtcaacgataccaaagcgtttactcgtctgggcaaaatgctcgatcagaaagagcgggtgacgatcaactatttcgccatgccgccaagtaccttcggcgcgatttgtaaaggcctgggcgaagcgaagctgaacgccaagccggcccgcgtggtgatggaaaaaccgctgggtacctcgcttgaaacgtcccgcgagattaacgatcgggtgggcgagttcttcgaggagtgccaggtctatcgcatcgaccattatctgggtaaagagacggtgctgaacctgctggcgctgcgctttgctaactcgctgttcgtcaataactgggatagccgcaccatcgatcacgttgagatcaccgtagcggaagaggtaggcattgaaggtcgctggggctacttcgatcaggccgggcagatgcgcgacatgatccagaaccacctgctgcagatcctgtgcatgatcgccatgtccccgccgtcggatctgagcgccgacagcattcgcgatgaaaaagtgaaggtgctgaaatctctgcgccgcatcgaccgcaccaacgtgcgtgaaaaaacggtgcgtggtcagtacaccgcaggcttcgcgcagggcaaaaaagtgcctggctacctcgaagaagagggggcgaataaatccagccatacggaaactttcgtggccatccgcgtcgatatcgacaactggcgctgggcgggcgtaccgttctacctgcgcaccggtaaacgtctgccgaccaagtgttctgaagttgtggtgtactttaaaacgccggaactgaacctgttcaaagagacctggcaagagctgccgcagaataagctgaccattcgtctgcagccggatgaaggggtggatattcaggtacttaataaagttcctggccttgaccataagcacaatctgcaaatcaccaagctggatctgagctactcagaaacctttaatcaaacccatctggcggatgcctatgagcgtctgctgctggagaccatgcgcggtatccaggcgctgttcgtccgtcgcgacgaagtggaagaggcgtggaagtgggtcgattctatcaccgaagcctgggctgccgatcgcgattcgccgaaaccttatcaggcgggcacctgggggccggttgcctccgtggcgatgatcacccgcgatggtcgttcgtggaatgaatttgagtaa

SEQ ID NO: 176083 - DNA, 870 bp, Klebsiella oxytoca
atgaatatgctggaaaaaatccagtcccgactggaacaccttagcaaatctgaacgcaaagtggcggaagtcattcttgcaacccccgcgcaggccattcattcaagtattgctgccctggcgctggaagccggcgtcagcgagcctacggtcaaccgtttctgccgcagtctggaaacccgcggtttcccggatttcaaactgcatctggcgcaaagcctggcgcacggtaccctctatgttaaccgcaacgtcgatgaagacgacagcgttgagtcctatacgggtaagatatttgaatcggctatggccagtttagatcaggtccatcattctctcgatatgtcagcgatcaaccgggcagtggaccttctcactcaggccaagaaaatcgccttcttcggcctgggctcatcggcagccgtcgcccacgatgcgatgaacaaatttttccgctttaatgtgccggtgatttattccgacgacatcgtcctgcaacgcatgagctgtatgaactgtaatgacgatgacgtggtggtgattatttcgcataccggcaggaccaaaagcctggtagagctggcgcagctggcgcgcgaaaatgatgcgatggtgatcgccataacttcgccgggcaccccgctttcccgcgagtcgacgctggccattacgctggatgtcccggaagataccgatatctatatgccaatggtttcccgcttagcgcagctgacggtgattgacgtactggcaaccggctttacccttcgtcggggagcgaaattcagagataacttgaagagggtcaaggaagcgctgaaggaatcgcgctttgataaagagctcagcttacacagtaatgaccaataa

SEQ ID NO: 176084 - DNA, 1443 bp, Klebsiella oxytoca
atgtccagaaggcttcgcagaaccaaaatcgttaccaccttaggcccggctaccgatcgcgataacaaccttgaaaaggttatcgccgcaggcgctaacgtggtacgtatgaacttctctcacggcaccgcggaagatcaccagctccgtgcggataaagtccgtgagattgcggcaaaactgggccgtcatgtcgctattctcggtgaccttcaggggccgaaaattcgcgtctctaccttcaaagaaggcaaaattttcctcaatatcggtgataaattcctgctcgacgcgaacctgggtaaaggcgaaggcgataaagaaaaagtcggcatcgattataaaggcctgccggctgacgtggttcctggcgatatcctgctgctggacgacgggcgcgtgcagctgaaagtcctggaagttcagggcatgaaagtgttcaccgaagtcaccgtcggcggaccattgtctaacaacaaaggtatcaacaagctgggcggtggcctctctgccgaagcgctgactgaaaaagacaaagcagacatcatcaccgccgccaaaatcggcgtcgactatctggccgtctccttcccgcgctgcggcgaagacctgaactacgcgcgtcgtctggcgcgcgatgcgggctgcgatgcaaaaatcgtggccaaagtagagcgtgcggaagcggtatgcgatcaggacgcgatggatgacgtgatcctggcctccgacgttgttatggtagcccgcggcgacctcggcgtagaaattggcgacccggagctggtcggtatccagaaagcattaatccgccgcgctcgtcagctcaaccgctcggtcattaccgcgacgcagatgatggagtcgatgatcaccaacccgatgccaacccgcgccgaagtgatggacgtggcgaacgccgtgctggatggtaccgacgccgtcatgctgtctgcagaaaccgccgcgggccaatatccatctgagaccgttgccgcgatggtgcgcgtttgcctgggcgcggaaaagatccccagcctcaacgtctccaaacaccgtctggacgttcagttcgataatgttgaagaagccattgcgatgtcggctatgtacgcggccaaccacctcaagggcgtcactgctatcattaccatgacggaatccgggcgtaccgcgctgatgacttcccgtatcagctccggcctgccgattttcgcgctgtctcgccacgagcgtacgctgaacctgactgcgctgtatcgcggcgtgactccggtttatttcgatagcgcaagcgacggcgtcgccgccgcgcacgatgcggtaacgctgctgcgtgataaaggctatctggtgaccggtgacctggttatcgtcactcagggcgacgtaatgagcaccataggcagcaccaacaccacccgtattctgaccgtcgagtaa

SEQ ID NO: 176085 - DNA, 975 bp, Klebsiella oxytoca
atggaaacgaaaaaaaataatattgagtttattccaaaatttgaaaaatcctttttactgccgcgctactggggcgcgtggttcggcgtttttgccttcggcgccattgccctgacgcccgcgtctttccgcgatccgatcctgggtaaactggggcgttttgttggtcgtctggcaaagagttcgcgccgccgggcgcaaattaacctgctgtactgctttccggaaaaaagcgagcaggaacgtgaagaaataattgatgccatgtatgcctccgcgccgcaggcgatggtgatgatggccgagttaggcctacgcgatccgcagcggattctttcccgcgtcgactggcagggcaaagaaattatcgatgagatgcagcgcaacaacgagaaagttatcttcctggttcctcatgcctggggagtggacatcccggcgatgctgatggcgtccggcgggcaaaaaatggcggcgatgtttcataaccagggcaacccggtattcgattacgtctggaataccgtgcgtcgtcgtttcggcggtcgtatgcacgcgcgcaacgacggcatcaaacccttcattcagtcggtacgtcagggatactggggctactatctgccggatcaggatcacggggccgaacacagtgaatttgttgatttctttgccacctacaaggcgacgctcccggcaattggtcgtttaatgaaagtatgtcgcgcccgggttgtcccgctgttcccggtttacgatggcgaaacgcatcgcctgacggtgctggtgcgcccgccgatggacgatctgctggaagcggacgacaataccattgcccgacggatgaatgaagaggtagagattttcgttaagccgcataccgagcagtatacgtggatccttaaactactcaaaacgcgcaaacccggcgaaatcgaaccgtacaagcgcaaagagctgtatccgaagaagaaatag

SEQ ID NO: 176086 - DNA, 1323 bp, Klebsiella oxytoca
gtgcaacagatagcccgcgctgtcactcaggcatttaacaatctgccacgacctcaccgcgttatgctggggtcgcttagcgttcttaccttagcggtcgccgtctggcgaccctacatttaccaccatcccgaaacggctcccatctccagaaccatcgagctggaacaaagcgaaattcgttctctgctgccagaggcctcggaacctatcgatcaggcgcctcaggaagaagaagccatccctcaggatgagctggatgataaagcggacagcgattccggcggccatgaatatgtggtgtcgaccggggatacgctcagcagcattcttaatcagtacggtattgatatgggcgatatcgcccggctctcctcggcggataaagagctgcgtaatctgaaaatcggccaacagctctcctggacgctgacggcggatggtgatttacaaagcctgacctgggagatgtcgcgccgcgaaacccgtacctacgaccgggtggccaacggtttcaaaatgagcagcgagctgcaaaaaggcgactgggtcaataacgtactgaaaggtaccgtgggcggaagctttgtcgccagcgctcgcgatgccggcctgaccagcactgaaattagcgcggtgatcaaagccatgcagtggcagatggacttccgtaagctgaaaaaaggcgatgagttttccgtactgatgtcgcgtgaaatgctggacggtaagcgcgagcaaagccaactgcttggcgtacgcctgcgttcggatggcaaagactattacgcgatccgcgctgaggatggcaaattctacgatcgcaatggtacagggcttgcgaagggcttcctgcgtttcccgaccgcccgccagttccgcgtctcatcaaactttaacccgcgtcgtctgaacccggtcaccggccgcgtcgctccgcatcgtggcgtcgattttgcgatgccgcagggcaccccagtgctctcggttggcgatggcgaagtggtagtggctaaacgtagcggtgcggcaggttattacgttgccgtccgccacggtcgtacctataccacccgctatatgcacctgcgtaagctgctggtcaaacccgggcagaaggtgaaacgcggcgatcgcatcgcgctgtcgggcaataccggccgttcgaccggtccgcatctgcattatgaagtgtggatcaaccagcaggcggttaacccgttgacggcgaaactgccgcgtacggaagggctcagcggttctgaccgtaccgatttcctggcgcaggccaaacaggtgattccgcagctgcggtttgattaa

SEQ ID NO: 176087 - DNA, 960 bp, Klebsiella oxytoca
atgattagacgcattatgttacataaaaatacgcttctttgcgctggacttagcgccgcttttttgttcgctcatgcaccgctggcaagcgccgcggtcgtcacctcgcttaaaccgctgggctttatagcatcagccattgctgatggggtaaccgagacccaggtactgctgcctgacggggcatcggagcatgattattcactgcgtccatcggatgcaaaacgcttacagaacgcagacttagtggtctggattggtccagagatggaggcgtttatggataagtcaacgcaaagcattgcgccgaacaaaaaggtgacgattgccgagcttgacggcgtgaaaccgttactcatgaaaggcgtcgacgacgacgatgaccatcacggtcacgatcatggcgccggggaaaatagtgacgacgatcaccatcatggcatctataacatgcatctatggctttccccagagatagcgcgcctttcggcggttgcaatccacgataaattattggaacttatgccgcagagtcgagccaaacttgacgccaacctgaaggattttgaggcaaaattagccgcaaccgacaagcaggttgggaccgagctggcaccgctgaaagggaaggggtatttcgtttttcatgacgcctacggctactttgaaaaacactacggtttgacctccttaggtcattttactgtcaaccctgaaatccagcctggtgcgcagcgtttacacgaaatcagaacacagctggttgagcaaaaagcaacttgcgtttttgctgagccacagttcaggccagcggttatagaagctgttgccagggggacgtccgtgcgcatgggaaccctggatccacttggaatcggaattaagctgggtaaagagagttatccgcaattcctgagccagatggcaaatcagtattcaagctgcctgaaaggagaataa

SEQ ID NO: 176088 - DNA, 753 bp, Klebsiella oxytoca
atgacaaatcttgtaactctggaaaacgtcgcggtcgtctatggccaaaggcgcgtgctgtctgacatttcgctcacgcttaagccgggcaaaattttaactctgctgggccccaacggcgccggtaaatcgaccctcgtcagagtcgttcttgggctggtagcacctacagaaggggttatcaaacgcgagggacatctgcggataggctatgtcccgcaaaagctgcaccttgatgccacgatgccgctcaccgtcagccgctttatgctgttgaggccaggaacgcacaagcgcgacatactgccggcgctgaagcgcgtgcaggccggtcatctgattgacgcgcctatgcaaaagctttccggcggcgagactcagcgggtacttctggcgcgcgcgctgctcaatcaaccgcagctgctggtgcttgacgagccaacgcagggcgttgacgtgaatggtcaggtggcgctgtacgatctgattaatcagctgcgccaggagcttgattgtgccgtgctgatggtttcccacgacctgcacctggtgatggcgaaaaccgatgaagtactgtgtctcaatcagcatatctgctgctccggcgcgccggaagtggtctccatgcatccggaatttatctcaatgttcggccagcgcggcgcggaacagctgggtatttatcgccatcatcataatcaccgccacgacctgcaggggcggattgtactgcgtcggggaaatgaccgttaa

SEQ ID NO: 176089 - DNA, 786 bp, Klebsiella oxytoca
atgattgaattactgcttcccggctggctggccgggataatgctcgcctgtgcggcgggtccgctgggatcgtttgtcgtctggcgccgcatgtcctactttggcgataccctggcccatgcctctctgctcggcgtcgcttttggtttgctgctgaacgttaatcctttttatgcggtcatcgtggtgacgttgctgctggcgggcgggctggtatggctggaaaaacgtcctcatctggcggtagatacgctactcggtatcatggcccacagcgcgctgtctttgggcctggtggtagtcagtctgatgtcgaacgtgcgcgtcgatctgatggcctatctgtttggcgacctgttggcggttacgccggaggatttaatatccatcgcgattggcgtagcgatcgtgctggcgatcctgctctggcagtggcgtaatctgctatcgatgactattagtccggatctggccttcgttgacggcgttaagctacaaagggttaaactgctgttgatgctggtcaccgcgctgaccatcggcgtggcgatgaagttcgtcggggcgctgatcattacgtcattgctgattattcccgcagccacggcgcgtcgctttgcccgtacgccggagcaaatggcgggtattgcggtaggaatggggatgattgccgtcaccggcggactgaccttttcagcgttttacgacacgccagccgggccttccgtggtgctgtgcgctgcggtgctgtttatcatcagcatgagcaagaagccggccgcctga

SEQ ID NO: 176090 - DNA, 1011 bp, Klebsiella oxytoca
atgatagaagcagacaggctggtatcggcagacagcagcggctttgaagaggcggcggaccgcgcaatccgccccaaactgctggaagagtatgtaggccagccgcacgtccgttcgcaaatggagatctttatccaggcggcgaaactgcgcggcgacgcgctcgatcacctgctgatttttggtcctccagggctgggaaaaaccacgctggcgaacatcgtcgctaacgaaatgggcgttaacctgcgcacgacctccggcccggtgctggagaaagcgggcgatctggcggcgatgttgaccaaccttgaaccacacgacgttctgtttatcgacgagattcatcgcctttcaccggttgtcgaagaagtcctgtatccggcaatggaagattaccagctggatatcatgattggtgaagggcctgcggcgcgttcaatcaaaatcgatcttccgccgtttaccctgattggcgcgaccactcgcgccggctcgctgacgtcgccgctgcgcgaccgcttcggtatcgtccagcgcctggagttctaccagatccctgacctgcagcatatcgtcagccgcagcgctcgctatatggggctggagatgagcgaagagggagcgctggaagttgcgcgtcgcgcgcgcggtacgccgcgaatcgctaaccgcctgctgcgcagggtgcgcgattttgctgaagtccgctacgatggacgtatctcagaggatattgccgctcaggcgctggatatgctcaacgtggatgccgaaggatttgactatatggaccgtaagctgctgctggcggtcatcgataaattctttggcgggccggttgggctggataacctggcggcggcaataggtgaagagcgtgaaaccatcgaggacgtgctggaaccgtatctgattcagcaaggttttctacaacgcaccccgcgcggacgtatggcgacggtacgggcctggacccactttggcattacgccgcctgaaatgccttaa

SEQ ID NO: 176091 - DNA, 612 bp, Klebsiella oxytoca
gtgataggcagactcagaggcattattctcgaaaaacaacccccgctggttttactcgaaacgggaggcgtaggctatgaggttcatctgccgatgacctgcttctatgagctgccggacgtgggcaaagaggcgatcattttcacccactttatcgttcgtgaagatgcgcagctgctgtatggctttaacaataagcaggagcgcacgctgtttaaagagctgattaaaactaacggcgtcggtccaaaactggcgctggcaatcctttccggcatgtccgctcagcagtttgtcaatgccgttgagcgtgaagagctggcggcgctggtcaaactgccggggatcggtaagaaaaccgcggaacgcctgattgtcgagatgaaagaccgcttcaaaggactgcacggcgatctgttcactccggcagccgatctggttctgacgtcgccggccgggccgtctgacgatgatgctgaacaggaagcggttgctgcgctggtggcgctgggctataaacctcaggaagccagccggatggtcagcaaaatcgtgcgtccggatgccaacagtgaaacgctaattcgcgaagcgctccgcgccgcgttgtga

SEQ ID NO: 176092 - DNA, 663 bp, Klebsiella oxytoca
atgatgaaaatccgggtggtgaaatctctcttttttatgctgctaattatcgtcagtggatattatttactgaccgaatatcagtattaccatcagagttcgacggttttcggcacagtcgtcaatacccgcactgtcagcagcgcagagcggcgcctggccgacgcctgcaccacatttcgcggacgcgaagattgttccgcgctctttgagtatgatattacctggctgtcaggcggtcactcctaccgctatcacgttgcaaaggcctggtctccgcccgcagacagactttgtatgaatatcgtgcagggaaaacccgctattgccaaaccatgtgacgctctcttttttaacgtcagccggctcccgggtctgatagcaatctgggttatcgtggcttttattactttgacgctatttttataccgtaagcgttacgctatttctcgtcagtggcctgcgcagacgctttatcggatttatcaccgcaggcacaggctgatgctggaaaccccggatgaacaagaagcgctaaagttcatcaacagcggttatcgaataagcgaaactttccaccatcagaaagtcgttgggtcgggtcgtcaaagacgcgtcattcactacatcatctaccttgtgcggggtaaaaagagcgcataa

SEQ ID NO: 176093 - DNA, 522 bp, Klebsiella oxytoca
atggctattattctcggtattgacccggggtcgcgcgtcactggttatggcgttatccgtcaggttggacgccagttgagctacctcggcagcggctgtatacgcacgaaagtggatgatttaccgtcccgcctgaagcttatctatgccggtgttacggaaattatcacccagttccagccggactacttcgccatcgaacaagtttttatggccaaaaacgccgactcggcgctgaagctcggccaggcgcgcggagtggccatcgtcgcggcgacgaatcaggacctgccggtctttgagtacgccgccaggcaggtgaagcagaccgttgtcgggattggcagcgcggaaaagagccaggtgcagcatatggtgcgcacgttgctcaagcttccggccaacccacaggcggatgcggcggatgctttagctatcgccatcactcattgccacgtcagccagaacgcagctcagatcagtgaaagtcgcctgaacctggcgcgcggacgcctccgctaa

SEQ ID NO: 176094 - DNA, 741 bp, Klebsiella oxytoca
atggcaggtcatagtaaatgggccaacaccaaacaccgcaaagcggcacaggatgccaaacgcggtaagatctttacgaaaattattcgcgagctggtcaccgcggcccgtcttggcggcggcgatgcgggctcaaacccgcgtctgcgcgcagcgatcgacaaagcgctgagcaacaacatgacccgtgacaccctgaaccgcgctattgcccgcggcgtcggcggcgatgatgatgcgaacatggaaaccatcatttatgaaggttacggtcctggcggtacggcggtaatggttgaatgtctgtccgacaaccgcaaccgtaccgttgctgaagtacgtcacgcgttcagcaaaaccggcggtaacctgggcaccgacggctccgtttcctacctgttcagcaaaaaaggcgtcatctccttcgagcaaggcgatgaagatgcgatcatggaagcggcgctggaagcgggcgcggaagacgtggtgacctatgacgacggcgcaattgacgtctacaccgcctgggaagagatgggtgcggtacgcgatgcgctggaagctgccggtctgaaagcggacgccgctgaagtctccatgatcccgtcaaccaaagcggatatggacgcggaaactgcgccgaaactgctacgtctgatcgatatgctggaagattgcgacgacgtgcaggaagtttatcataacggcgagatctctgatgaggtcgccgcaaccctgtga

SEQ ID NO: 176095 - DNA, 444 bp, Klebsiella oxytoca
atgtcattcaagctccccgtttccgttctggtggtgatttatgccgaagatacgaagcgggtgctgatgttgcagcgtcgcgacgatcccgccttctggcagtcggttaccggcagcctggaggagggggaaaccgcgccgcaagctgccgcgcgtgaagtaatggaagaggtcgccattgacgttgcctgcgagcagctggctttggttgattgtcagcgaacggtagagttcgagatattttctcatttacgtcatcgctatgcgccgggcgttgagcgcaatacggagttttggttccgtcttgcgctcccccatgaacgccagattgtctttacggaacatctggactatcgctgggttgatgcgacggaagccgccacgttgaccaagtcctggagcaaccggcaggcgattgaagaatttgtaattaacgccaactaa

SEQ ID NO: 176096 - DNA, 1788 bp, Klebsiella oxytoca
atgcgtacagaatattgcggacagctcggtctgtcccacgtagggcagcaagtgactctgtgtggttgggtcaaccgtcgtcgtgatcttggtagccttatctttattgatatgcgcgaccgcgaaggcatcgtgcaggtgtttttcgatccggatcgcgcggatgcattaaagctggcctccgaactgcgtaatgagttctgcattcaggtcaccggtaccgtgcgcgcgcgtgacgaaaagaacgtcaataatgatatggccaccggcgccattgaagtgctggcaaccgacctgacgatcatcaaccgtgctgaagcgctgccgctggattccaaccacgtcaacaccgaagaagcgcgtctgaaataccgttacctggacctgcgtcgtccggaaatggcgcagcgcctgaaaacccgcgcgaagattaccagcctcgttcgccgttttatggacgaccacggtttcctcgatatcgaaaccccgatgctgaccaaagcgaccccggaaggcgcgcgcgactatctcgtgccttctcgtgtgcataaaggcaaattctacgcgctcccgcagtctccgcagctgtttaaacagctgctgatgatgtccggttttgaccgctactatcagattgttaaatgcttccgcgacgaagatctgcgcgctgaccgccagccggaattcacccagatcgacgtcgagacttcctttatgaccgccccgcaggtgcgcgaagtgatggaagcgctggtgcgtaatctgtggcaggaagtgaagggcgtggatctgggggattttccgatcatgacctttgccgaagccgagcgccgctatggttctgacaaaccggacctgcgtaacccgatggagctggtggacgtcgccgatctggtgaaagcggtggaattcgccgtctttgcgggcccggctaacgacgccaaaggccgcgttgccgcgctgcgcgtgcctggcggcgctgcgctgagccgtaagcaaatcgacgaatacggtaagtttgtccaaatctacggtgccaaaggtctggcatacattaaagtcaacgaacgggctaaaggccttgaaggtatcaacagcccggtggctaaattcctcaacgccgacatcgttgaagcgatccttgagcgcaccggcgcgcaggatggcgatatgatcttcttcggcgcggataacaaaaaagtggttgccgatgcgctgggcgcgctgcgtctgaagctgggtaaagatctgaacctgaccgatgaagagaaatgggcgccgctgtgggtgatcgacttcccgatgtttgaagacgacggagaaggcggcctgaccgcgatgcaccatccgtttacctcgccgaaagatatgaccgccgcagagctaaaagccgcgccggaagatgcggtagctaacgcttacgacatggtgattaacggctatgaagttggcggcggttccgtgcgtattcacagcggtgagatgcagcagaccgtattcggtattctgggaattaacgagcaggagcagcgcgagaagtttggcttcctgctggatgcgctaaaatacggtactccaccgcatgcgggtctggcttttggccttgaccgtttgaccatgctgctgaccggcaccgataatatccgtgacgttatcgccttcccgaaaacgacggcggcggcctgcctgatgaccgaagccccgagctatgcaaatcctgcatcgctgagcgagctcggtattcaggtggtggcgaaagaggcaaaagagtctccggagaataagtaa

SEQ ID NO: 176097 - DNA, 567 bp, Klebsiella oxytoca
atgttagaactcaatgcaaaaaacaccgcgctggtcattattgacctgcaggaaggtattttaccgtttgccggcggccctcatcgcgctgataaagtggttgagcgggccgcgaagctggcgaaaaagtgtcgccagcagggcgcccccgtagtgatggttcgcgtcggctggtcagcggatttcgccgaagcgctgaaacagccggtcgatgccgaggctggcgcccatacgctaccggaaaactggtggacctacccgctcgcgctggaaaaacaggaaagcgatatcgaagttactaaacgtcagtggggcgctttttacggcactgacctcgagctgcagcttcgccgtcgcggcatcgacaccatcattctgtgcggaatatccaccaacatcggcgtcgaatccacggcgcgcaacgcctgggagctgggatttaatctgattctggttgaagatgcctgcagcgcggcgtcggccgaacagcatcagggcagcatgacgcacatcttcccgcgtattgcccgcgtgcgcagtaccgaggaggtacttgccgccttatga

SEQ ID NO: 176098 - DNA, 819 bp, Klebsiella oxytoca
atgatctatattgggcttccccaatgggcgcacccgaagtgggtgcgcctgggtatcaccagccttgaagagtatgcccgccactttaattgcgtggagggcaacaccaccctgtacgcgttaccaaaagcggagattgtcagccgatggtatgaacagacccacgacgattttcgcttctgcttcaagtttccggccaccatttcgcaccaggcggcgctgcgcaactgcgacgacttaagccaggagttttttactcgtctggcgccgctgtcttcgcgcatcggccaatactggctacagctgccggcgacgtttggcccccgagaccttcccgccctctggcacttccttgatagcctgccgcgtgaattcagctacggcgtcgaagtaaggcatgcggaatttttcgccaagggggaagcggaacagcagcttaatcgcggcttgcatcagcgaaacgtcaaccgcgttatcctcgatagccgcccggttcacagcgccatcgcccgcagtcaggcaatgatcgatgcacaaaacaaaaagcccaaagtccccgtccatgcgctggtgacggcccggcacccgatggtgcgctttattggcagcgacgatatggcgcaaaatcgcgagctttttcgcgtgtggataaggacgctgccaaaatgggcgcaaaccacaacgccctacctgttcctccacacaccggatatcgcccaggctccgcagctggtcgacatcctgtggagcgatctgcgcgccgccctaccggaaataggtgatgcgccgtcaattccgcagcaaacctctcttttctga

SEQ ID NO: 176099 - DNA, 396 bp, Klebsiella oxytoca
atggtcagcgcgctgtatgcggttttaggtgcgttattgctaataaagttttcttacgatgtcgtacgcctgaggacgcaatatcgcgttggctacggcgacggtggttttagcgagctgcaggttgctattcgcgtgcacggcaacgcggtggaatacgttcccattggcctgatactgctgctgtttatggaaatgaacggcgcgcaaacctggatggtccacgtttgcggtattttgctgattgtcgggcgcctgatgcactcttatggtttccatcatcgcctgtatcgctggcgccgctccggcatgagcgcgacgtggtgttcattgttgctgatggtgctggcgaacttctggtatatgccctgggagttggttttctccgtccgttag

SEQ ID NO: 176100 - DNA, 744 bp, Klebsiella oxytoca
atgtctcaccgcgatacgcttttttccgcgccgattgccagtctcggcgactggacctttgatgaacgggttgctgaagtcttcccggatatgatccagcgctctgttcccggctattccaacattatttcaatgatcggcatgctggcggaacgtttcgttcagccggatactcaggtttacgatctcggctgctcgcttggcgcagccacgctgtccgtgcgccgcaacattgcccatgccggctgtaaaattatcgccgttgataactcaccggcgatggtcgaacgctgccgtcgccatattgacgcctataaagcgccgacgccggtcgaagttattgaaggcgatatccgtcacgtcactatcgaaaatgcttcgatggtggtgctgaatttcaccattcagtttctcgagccgggcgaacgccaggccattcttgataaggtttatcaggggctgaatccgggcggtgcgctggtgctatcggaaaaattcagcttcgaggatgacaacgtcggcgaacttctgttcaacatgcatcacgacttcaagcgcgccaacggctacagcgagctggaaatcagccagaagcgcagcatgctggaaaacgtcatgctcaccgattccgtggaaacccacaaagcccgcctgcgcaaggccggtttcgaacatgccgaattgtggttccagtgctttaacttcggatcgttaatcgccgtaaaatccggggaaccggcatga

SEQ ID NO: 176101 - DNA, 1023 bp, Klebsiella oxytoca
atgattgatttcagcaacttttatcaattgattgccaaaagcccgctgtcacactggctggagacgctacccgctcaggtcgcggcctggcaacgtgaagcgctgcacggcaaataccgggagtgggaacgggccgtcgagtttctgcccgagtttgcgccctaccgcctcgacctgctgcatagcgtcactgctgagagcgaaacgccgctcggtgaaggccagcgcctgcgcattgaaaacctgctgaagaatctaatgccctggcgtaaagggcccttctccctttacggcgtgaatatcgataccgaatggcgttccgactggaagtgggagcgcgtactgccgcacctttccgacctgaccggacggactattcttgatgtcggctgcggcagcggatatcacatgtggcggatgattggcgccggcgctcatctggcggtaggcatcgatcccacccaactgttcctttgccagtttgaagccgtacgtaaactgctgggcaacgaccagcgggcgcatctgctgccgctgggaattgaacagcttccggcgctgaacgcctttgataccgttttttcgatgggcgtgctgtaccatcgtcgttccccgctcgatcacctgtggcagctaaaagatcagctggttcccggcggcgagctggtgctggagacgctggtcgttgaaggcggcgaaaataccgtgctggtgccgggcgatcgctatgcgcagatgcgcaacgtctactttattccctctgccgccgcgctgaagcagtggctggagaagtgcggatttgtcgatgtacgcatcgtcgatgcgtgcgtgacctcgaccgaagagcagcgccgcaccgagtggatgaccaccgagtcgctggccgacttcctcgatccagaggacagtagcaaaacccgcgaaggctatcccgccccgctgcgcgcggtgattattgccaccaaaccggaaacggaacagtctctggcagcgaaaaaacgtgccgacaagcgggccggttga

SEQ ID NO: 176102 - DNA, 744 bp, Klebsiella oxytoca
atgagcttactggaagtctgttgttacagcatggagtgcgcgctggaggcccagcgctgcggcgccgaccgcatcgagctatgcgccgcgccgcaggagggggggctgacgccttcctcgggcgtccttaaaacggtgcgtgagtcggtgaccatccccgttcatccaattattcgtccgcgcggcggtgacttttgctataccgctggcgaatttgccgcaatgcttgatgatgtggctgcggtgagagatctcggctttcccggcatggtgatcggcatcctggacgctgacggtcaggtagatagggcgcgaatgaaaaaaataatggcggcggcgggaacgatggccgtcacctttcaccgtgcctttgatatgtgcgccaacccgcgccaggccagcgttgagctggctgagctcggcgttcagcggatcctgacttcgggccagcagccgtctgccgaaaaaggaatttcattaatcagggaacttatttcccaaagcgacactcctattattatggccggcgcaggagtgcgtgccgccaacctgccgctgtttttgcaggctggggtaaaagaggtccacagctcggcaggccagtggctaccgtccccgatgcgctttcgtaatcccgggttgtcgatgtctacggatgccgatgctgatgaatacttacgctacgccgtcaatggcgaagcggtagcggaaatgaagaagattatttccgcacagagagattaa

SEQ ID NO: 176103 - DNA, 570 bp, Klebsiella oxytoca
atggcgaactggcagcagattaatgaattaaacgatatttccgcggacctgccgcgctttaccgaggcgctaaacgcgcttgctcatcggcttggtctcgatattacgccacttgatgccgaccatatttccctgcgctgtcaccagaacgccacggcggagcgctggcgtcgcggctttgagcaatgcggcacgctgctgtcggaaaatgtcattaacggccgccccatctgcctgttcaggctggatgagccggtggtcgtggcgcactggcgttttagcattgttgaactgccgtggccgggcgaaaagcgctatccgcatgaaggctgggagcatattgaaatcgttctgcctggcgagcccgaaacgctcaatacccgcgccctggcgctgctttccgatgatggattgagccaaccgggcatttttgtaaagaccagcgcgccaaaaggagagcatgagcgcttgccgaatccaaccctggcggttactgatggcaaagtgacgatcaaatttcacccgtggtcgattgagcaaattgtcgccagcgaacaatcagaacgataa

SEQ ID NO: 176104 - DNA, 1734 bp, Klebsiella oxytoca
gtgaatattcaggctcttctctcagaaaaagtcagtcaggccctgatcgcagcaggcgcgtctgccgattgcgaacctcaggtccgccagtcagcaaaagtccagttcggcgactatcaggccaacggcgtgatggccgttgccaaaaaactgggcatggcgccgcgacaacttgcagagcaggtactgtctcatctcgatctgagcgggattgccaataaggtagagatcgccggccctggctttattaatattttcctcgatccggccttcctcgcggaaaatgtcagcagcgcgctgaaatcggaacgtctgggcgtggctcagccgccggcacaaaccgtggtggtcgattactctgcgccgaacgtggcgaaagagatgcacgtaggccacctgcgctccaccatcattggcgatgccgcggtgcgtacgctggagtttctcgggcataaagtgatccgcgctaaccacgtgggcgactggggtacccagttcggcatgcttatcgcgtacctggaaaaacagcagcaggagaacgccggtgaaatggcgctggccgacctcgaaggtttctatcgtgaagcgaaaaaacactacgatgaagatgaagccttcgccgagcgcgcgcgcagctacgtcgttaagctgcagggcggcgacgaatatttccgcgaaatgtggcgcaagctggtcgacatcaccatgtcgcaaaaccagttaacctataaccgcctgaacgtcaccctgacccgcgatgatgttatgggcgaaagcctttataacccgatgctgccgggtatcgtggccgacctgaaggccaaagggctggcggtagaaagcgaaggcgcgacggtggtattccttgatgagtacaaaaacaaggaaggtgaaccgatgggcgtcatcatccagaagaaggatggcggctacctttacaccactaccgatatcgcctgcgcaaaataccgctacgagaatctgcatgcggatcgcgtgctttactacatcgactctcgccagcatcagcacctgatgcaggcgtggactatcgtacgtaaagccggctacgtgccggagtccgtaccgctggagcaccacatgttcggcatgatgctcggcaaggacggcaaaccgttcaaaacccgcgccggcggtaccgtgaagctcgccgacctgctggacgaagcgctggaacgcgcccgccgtctggtggcggagaaaaacccggatatgcccgccgatgaactggaaaaactggcgaacgcggtcgggattggcgcggttaagtatgccgacttgtcaaaaaaccgcaccactgactatatcttcgactgggataacatgctggcctttgagggcaataccgcgccttatatgcagtatgcctatacccgcgtgctctccgtgttccgcaaagcggatattgatgaaagtgcgctagtggcggcgccggtagtcatcaccgaagaccgcgaagcccagctggcggcccgtctgctgcagtttgaagaaacccttacggtcgttgcccgtgaaggcacgccgcacgttatgtgttcttacctgtacgatctggcaggtctgttctccggtttctatgagcactgcccgatcctgagcgctgaaagcgaagagacgcgcaacagccgcctgaaactggctctgctgacggcgaaaacgctgaagctgggtcttgataccctgggtatcgaaaccgtagaacgaatgtaa

SEQ ID NO: 176105 - DNA, 1140 bp, Klebsiella oxytoca
atgaaagtttggcctgtcaaacatagcccactactgcgccagcctgagcgctttatcgcccgcaatgaactgcaggcgctgattcagaaggtcacgcaaaatctggtcaacattaaagatgaaagcgggcaatttttactgcggctggacgacgggcgcatcattgatacgaaagggtggaacggctgggagtggactcacggcgtcggcctgtacggcatctggcagtattaccagcagaccggcgatatcgcgatgcgcgatattatcgatagctggtttgccgatcgctttgccgagggggcgaccaccaaaaacgtcaacaccatggcgccgtttctcaccctcgcttatcgctatgaagagacgggcaacgccgcgtatctgccctggctcgatagctgggccgagtgggcgatgaacgagatgccgcgcacggagtctggcggcatgcagcacatcacgctggcggaagaaaatcatcagcaaatgtgggacgacacgctgatgatgaccgttctgccgctggcgaaaatcggtaagctgcttaatcgccccgaatacgtagaggaggcggtgtatcagtttctgctgcacgtgcagaatctgatggaccgcgagaccggtctgtggtttcacggctggaactacgaggggcgacataatttcgctcgcgcccgctgggcgcgcggcaatagctggctgacgatcgtgatcccggatttcctggagctggtggatttacccgaacacagcgcggtgcgacgttacctggtgcaggtgttggatacgcagattgcggcgctggcccgctgtcaggacgatagcggcctgtggcatacgctacttgatgaccctgactcctatctggaagcgtcggcgaccgccggttttgcgtatgggatcctcaaggcggtgcgcaagcgctacgtgagtcaggcgtatacggaggttgcggaaaaagcgattcgcggcattgtggcgaatatctctgcgcaaggggaactgctgcaaacgtccttcggtaccgggatggggtcggatctcaatttttatcgcgacatcccgctgacgtcgatgccgtatggccaggcgatggcgatcctatgtctgacggagtatctgcggaagtatttttga

SEQ ID NO: 176106 - DNA, 1584 bp, Klebsiella oxytoca
atgaaaacacgtaaaatcggtttggttaactaccttgcctatggatcgggcgattttcttggtgcgggaacaactgcactcacggcagcctggctgctctacttctacaccaccttttgcggactttcgcctatcgaggcgacgctcatttttgccactgccagagttctggatgcggtaatcagcccgctgatgggctttctgacggataactttggctcgacctggctgggaaaacgttttggcaggcgtaagttttttatcctgctcggcatcccttgcgtgtttagctactccattatgtgggtaggggatatggggttctggtactacctgctgacctatctgctgtttgacatcgtctataccatgattctggtgccgtatgaaacgctggtgccggaaatgaccgacgattttaaacagaaaaccaaattctccggcgcgcgtatttctatggcgcagatgtcggcgatcctggcttctttcctgccgggtattctgctgaccatcttcggcaaagacaacgccgtctctttcttctacgccagcctggtgttctcggtgctgtgcgcaatgatgttaacttttgtctggttctttacctgggagcgcccgcgtgaagagtggaccgaggctgcgctgcgcgccgaagaggagaaacagaacctgagcttgtctcagagtcttaatcgcctgtttattgaattaagttcgaccctgcgcattaaaattttccgtcagcatttggggatgtatctggggggctatatcgcccaggatgtcttcaatgcggtctttacttactatgtggtgtttgtcctgatgcaggaagcctcaatggcctccaacctgctggggaccatggcgatcttccagtttattgcggttattgcgatgatcccgctgtgtattcgcttcggtccggcgccatcgtaccgcatggtggtagtgctgttcgggctgagttcgctctcttacgcggtgctgtactacgctggcctcagcgatgtttattcgctgctgctgctgatttccgcagtggcgggtctgggccgcggcggcatcaactatgttccgtggaacacctatacgtatattgccgacgtggacgaagtgatcaccggccagcgtcgcgaaggcatctttgccgggattatgactctgacgcgtaaggcttcccaggccggggcggtgatgctggtagggatcatcatgcagatgtccggctttgtctccgggcagaaaacgcagccttatgaagtgagccataccattctgctgatcctcagcgtcggcactttgctggtgctggcctgcggcttcctcgtttccctgcgctttaagctcaatctgcaaacccacagcgtcctgcgtgcggaaacgctcaaaatgcgtgaatccggacgcgctcagccggaactggccagcgcccaggatcgtgaagtagtcgagatgctggccgggatgccgtacgactccctgtggggaaacaacaatattggttatctgaatcgtaataaacccgccgcgccatcgctgaagcagcgttctgccatgaattcgacatataacagaggttaa

SEQ ID NO: 176107 - DNA, 429 bp, Klebsiella oxytoca
atgccctactcacatctgctggtcgccgtggcgccaaccccggaaagccgggtcctcattcaaaaagccgtctccatcgcacgtccggtcaatgcaaaagtcagcctgattacgctggcgacggatccggagctgtataatcagtttgcggcgcccatgatggaaaacttacgcgaagtgatgcaggaggagacgcgcggatttctggccgagcttgcccgccacgccgactatcctatagagaaaatgaccattgccagcggcggaattgctcaccacgtgcaggatttttgccgacagcatcgcgttgacctggtgatttgcggtaaccacaaccagagtctgttttctcgcgccacctgttcggcaaaagatattgttggcagtagcggcgtcgatgtactgctggtttgtctggaaaaaggctag

SEQ ID NO: 176108 - DNA, 1425 bp, Klebsiella oxytoca
atgagtcgcttagtcgtagtatctaatcgtattgccccgccggatgacaaaaaggccagcgccggtggccttgccgtggggattatgggggcattaaaagcagccggaggtttgtggttcggctggagtggggaaatcggtgacgaccagcagccgttaaaaaaagtgactcagggcaatatcacctgggcctctttcaatcttagcgagcaggatcacgacgaatattacaaccgcttttccaatgccgttttatggcccgcattccactatcgtcttgacctggttgattttcagcgtgaagcctgggagggctatcagcgcgttaatgcgaccctggcggataaactgctgccgctgattgaacctgacgatatcgtctggatccacgattaccacctgctgccgttggccagcgaactgcgccagcgcggcgtcaataatcgtatcggcttctttttgcatattccgttcccgacgccggaagtgtttaatgcgttaccgccgcatgcggaactgcttgaacagctttgcgattacgatttactgggtttccagaccgaaagcgaccgactggcgtttctggattgcgtatcgatgcaaacccgcctgacgacgcgcgacggcaaaaagcatgtggcctggggaaaacctttccagaccgaagtctatccgatcggtatcgatccggaagagattgcgcgcagcgcaaaagggccgctgccgccgaagctggcgcagctgaagagcgagctcaaaagcgtccaaaatatcttttccgttgaacggctggactattcgaaggggctgccagagcgttttctcgcttatgaagctctgctggagaactatccgcagcatcacggcaagattcgctatacccagattgcgccgacttcacgcggggacgttcaggcctatcaggatattcgtcatcagctggaaaacgcagccggccgtatcaatggccagtatggccagctgggctggacgccgctttactaccttaaccagcactttgaacgcaagctgctgatgaaaatcttccgctactccgacgttggtctggttaccccgctgcgcgatggtatgaacctggtggcgaaagagtatgttgccgcgcaggacccgcaaaatccgggcgtgctggtgctgtcgcagtttgccggcgcggccaacgagctcccgacggccttaatcgttaatccttacgatcgcgatgaggtcgctgcggcgctggataaggcattaaccatgcctctggccgagcgtattgcccgccattcggccatgctggcggtgattaaggaaaacgatattcatcgctggcaggagcggtttattgccgatctaaaggagattgagccagggagcgaggagagccacttagagcgcaaggtcgccactttccctaaactcgcctga

SEQ ID NO: 176109 - DNA, 804 bp, Klebsiella oxytoca
gtggctgaccagatttatgtaccgcctgcgttaaccggaaactacgcttttttctttgacctcgatggtacccttgccggtatcaaaccccatcccgatcaggtggtcattccagccgatgttctgcagtcgctgcgccagcttgtgcagcagcaaaacggcgcggtggcattgatttcagggcgctcaatggttgagctggatgagcttacccgtccttaccggctaccgcttgccggtgtccacggggctgaacgccgtgacatcaatggtaaaacgcatattgtctctttaccggattcacttctgaaggcgctctctgcgcagttgacgacggaactggatgctttgccgggatgcgaactggaaagtaaggggatggcttttgctttgcactatcgacaggcgccggagcagcagcaagcggtgctggcgctggcgcaatctatcgtccagcgccatcccattctggccctgcagccgggtaagtgcgtggtggagatcaaaccgcgtggagtgaataaaggtgaagcgatagccgcttttatgcaggaagctccattcaaaggacgcaagccggtgtttgttggtgatgacttaaccgatgaagctggttttagcgttgtgaatcaattgaatggcgtatcggtcaaagtgggcggcggcgaaacgcaagcgcgttggcgtttgcctgacgtgcccgccgtccatctttggattagtaacatcgcgaatcatgggcaacaaccagatgcgctaaccgacaggagagatggctatgagtcgcttagtcgtagtatctaa

SEQ ID NO: 176110 - DNA, 981 bp, Klebsiella oxytoca
atgtcatcagttaccacttcaggtacttcccggtcggcttttagtttctcccgtatctgggatcagttcggcatgctggtcgttttcgcggtgctgtttattggctgcgtaatttttgtgcccaattttgcctcgtttattaatatgaaaggtctggggttggctatttctatgtccggaatggtcgcctgtgggatgctgttttgcctggcgtccggcgatttcgatctgtcggtcgcctcggttattgcctgcgccggcgtgaccacggcggtggtgattaatctgactgaaagcatgtgggttggcattggcgccggtctgctgcttggcgcagtgagcggcctggtcaacggttttgtcattgcccgcttaaagattaatgctctgattaccaccctcgccacgatgcagatcgtccgcggtcttgcctatatcatctccgacggtaaagcggtagggattgaagatgagcgcttttttaccctcggctacgccaactggtttggtctgcctgcgcctatctggttaaccgttgcctgcctgattgtattcggtctgctgctgaataaaaccacctttggccgaaacacgctggcgatagggggtaatgaagaagcggctcgtctggccggcgttccggtggtgcggacgaaaattattattttcgtcctttcagggctggtttccgcggcagcgggcattatcctggcatcccgtatgaccagtggtcagccgatgacgtccattggctatgagctgattgtcatttcggcctgcgtgctcgggggcgtatcgctgaagggcgggatcggcaagatctcctacgtggtagccgggatcctgattctgggaacggtggagaatgcgatgaacctgctgaacatttccccgttctcgcagtacgttgtgcgcggcgtgattttgctggctgcggtgatcttcgaccgctataaacagaaagcgaagcgtgcggtttaa

SEQ ID NO: 176111 - DNA, 1515 bp, Klebsiella oxytoca
atgcaacagtctaccccttatctctcattccacggcatcaccatgacattcccgggcgttaaagcgctgtccgatattagctttgactgctatgccggacaggtccacgccctgatgggagaaaacggcgccgggaaatccacgttgctcaaaatcctcagcggcaactacgtacccactgccggcagcctacagatccaaggccagcagatgacctttacccacaccaccgaggcgctgaacgccggggtggcgattatctatcaggagctgcatctgatcccggaaatgaccgtggcggaaaatatctacctcggccaattgccgcacaagggcgggattgtgaatcggtcgctgctgaattatgaagccggcctgcagctgcagcatctggggctggatatcgacccggaaacgccgttgaagtatttgtcgattggccagtggcagatggtggagatcgccaaggcgttggcgcggaacgccaaaatcatcgcttttgacgagcccaccagctcactgtcggccagggaaatcgacaatctgtttcgggtcatccgcgagctgcgccaggaagggcgggtgatcatttacgtttcccaccggatggaagagatctttgcgttaagtgacgccatcacggtcttcaaagatggtcgctacgtgcgcacctttgacaatatgcaagaggttaaccacgacgctctggtacaggcgatggtcggtcgcgagctgggcgatatctacggctggcagccccgtgaatatggcaaagagcgtttgcgcctcgatcgggtgaaggcgcctggcgtacggcaacccgttagcctttcggtgcgtagcggagaaatcgtcggcctgtttgggctggttggcgccggacgcagcgaactgatgaaaggcctgttcggcggcagcagaataaccgccggtcaggtttatatcgacggcgaggccattgatatccgcaagccggctcaggcgattcaggccgggatgatgctctgcccggaagaccgcaaagcagaggggattattccggttcactcggttcgcgacaacatcaatatcagcgcccgccgcaagcacattctcgcgggctgcgtcatcaataatgcctgggaagcgcagaacgccgaccagcatattaaatcgttgaatatcaaaacgcccggcgcagagcagctgattatgaatctctccggtggcaatcagcaaaaggcgattctcggccgctggctgtcggaggagatgaaagtcatcctgcttgacgagcccacgcgcggcattgatgtgggcgctaagcatgagatctataacgttatttacgcattagcggcatcgggcgtcgcggtggtctttgcctccagcgatttaccggaagttctcggcgtagccgatcgcatcgtggtgatgcgcgagggtgagattgccggagagctgctgcatgaacatgccaatgaacagcaggcattgagccttgccatgccaaaagtgagccaggcagtcgcctga

SEQ ID NO: 176112 - DNA, 981 bp, Klebsiella oxytoca
atgcacaaatttactaaagcgctggcggcgatcggtctcgccgcagttatgtcacaattagctatggccgagacgcttaggctgggttttctggtcaaacagcctgaagagccatggtttcaaacagagtggaaatttgccgataaggccggtaaagatttaggtttcgacgtcatcaaaattgccgtccccgacggtgagaaaacccttaacgccattgatagcctggcggctagcggagccaaaggctttgttatctgtacgcccgatcccaaactcggggcggccatagtcgccaaagcgcgcggctatgatatgaaagtcattaccgtcgatgaccagttcgttaacgccaaaggcaaaccgatggagagcgtaccgctggtgatgatggcggccagtgagatcggcgcacgtcaagggcaggagctctataaagagatgcaaaaacgcggctgggacgtgaaggataccgccgtcatggccatcacttccgacgagctggacaccgcccgtcgtcgcactaccggatcgatggacgccctgaaagctgccggtttcccggagcaacaaatctaccgtgtgccaacgaaatctaacgacattcccggcgcttttgatgccggtaactctatgctggttcagcatccgaacgtcaaacactggctgatcgtcggcatgaacgacaataccgttctgggcggcgtacgcgccaccgaaggccagggctttaaagcgcctgacgttatcggtatcggtattaatggcgttgatgcagtgaacgaactctctaaagcgcaggccaccggtttctacggctctctgctgccaagcccggatattcacggctataaaaccagcgagatgctttataactgggtgacaaaagatgtcgaaccgccaaaattcaccgcggtgaccgacgtggtgctgattacccgcgacaattttaaagaagagctggctaaaaaagggctgtaa

SEQ ID NO: 176113 - DNA, 558 bp, Klebsiella oxytoca
atgaaaaaagttgcggtgctgctggcgtcgggttttgaagagggagaggcgattgtggtggttgatatcctccgccgtctgcatctggatgtggagcttctctcctgcgccgaatcgcgcgcggtggtgagctaccacgatatcccaatggttgcggatagcactttagccgaacgcgcagggatgctgtacgacgcggtggttctgcccggcggtccgcagggaagcgtcaaccttgccgccagccaggacgtcgtagcgtttattacggcccacgataaagcaggaatgctgatctgtccgatctgttcggcagccgcaagggttctcggcggcaatgggctgctcagggggcgacgctacgtctgttcgggggagttatggcagaacgtggcggacggggagtatgttgatcaacccgtagtggaagacggtaatttgatcagcggtaaagggttaggccatgtttttgatttttcttttaccgttgccgctcgtttattgggggatgaggtgccggtacgcaatcatgcggagcatatttattgccgctggtaa

SEQ ID NO: 176114 - DNA, 543 bp, Klebsiella oxytoca
atggtcgttccaggaatggtgcaaaagctgaataaccaattgaatcttgagttccatacctccaacttgtatctgcagttaagcgagtggtgtattcagcagcggttgaacggtaccgccacttttctgcgtaatcgagcgcaatccagcataacgcagatgatgcgggtctttgattttatgaaaagttccggcgcctggcccgtggttaaagcagacgaagcctgcagcgcggaatgcgcctctcttgaagacctgtttagcaaaaccgttgctgattatcagcagcgcagcagcatgctttccggcctgacggcagaggcgaaggcgcaaagcgacgaatccaccctacgcttcctcgcgctgctggcgaaagaacagcagctggatggcatgctgctggagaccattctggatgaagtccgctgcgcggaccaggccgggaccagcgaacagcaaaccgatcgtcacctgcttgaactggtcagccaacagtacgccagcgtcatgtcggcaaataccggagcgcgcgataaagcgtaa

SEQ ID NO: 176115 - DNA, 1563 bp, Klebsiella oxytoca
atggcaagatatacggcttcagcctcaaacgggctgcagggaagaccgattttgttacgccatcagttagcctacggcggcggaaatttgctgggaagcggcgcactggcgatcagcggtgcctggctgctctatttttatacaaccttctgtgggctgacgctgatcgaagcctcctttattttctccgtcgccagcattatcgacgcgattagtaacccgctgatgggctacctcaccgataactttggcaaaacccggctcggtaaacgctttggccgccgtcgcttctttttattaataggcattccgctaatgatgttctacccgctgctgtgggtagaaggtctcggtttctggtactacctgtgcacctacgtcgtctttgaaatcatttatacctcgattatggtcccctatgaaacattggcgaccgaaatgactgatgatttctcactgcgttcgaagctcaccggttataaagcgatattcggcaaactggctaacttcctcgcggcatttatccccgggcagttcatcctgctttatggcaaagaatccgccaccccgtttttccttaccggactgacctacggtgtcattcttatcgtggccatctcctgtttgtggtactgcagctgggaacgaccgcgcgaagaggaaaaaagctcgggcgagaaaaaggggctactcaatacgctgcttatgctggccaaagatatgcgctcaaccttttatctgcgcgtattccgtaaacaccttggtatgtatctctgcggtttcggcgccgaatggctgtttgcgtcgatcttcacttacttcgtcatcttcgtgctgcaacacgatccggcgatggtggccgggctcaacagcctgaactcaattctgcagctggtatcaacggccctgtttatcggcctgtgcgtgaagaaaggcttcagtaagccgtatattctggcgctgagcgtggtcatctttgccgtgctgctctacacctcgctgtggttcttccacctgccttcaagcctggccaccatcctgatgtttggcatcacggtgctgttcggtctcggcaccggcggcgtctactacattccctggaccgtttacacctttttggctgatgtcgatgaaatttacaccggccgccgtcgcgaggggatctatgcaggcgccatgactttctcaggtaaaattttgcgctcgattatcgtctttacaatgggagctatcctcagcttctacgggttccagtcaaaggcgcacacgcagccggaaagtgcggtcaccgcgattgcggtggtattctgtgcaggggtgattttactggcgctggcagccatcgtgttcagtaaacagatgaagctcgatcgcaaggcgcacctggtggtgctacaggaagtcgcgcgcattaaagcgggaggcaaaattgccgacatcgcgccggacgttcgccttatcgtggaagatttagtgggccatcgttatgaagagtgctggggcaacagcaaactgttcaagaatgcgcaggagaacgtcattcaaaccgccgtgtcccattaa

SEQ ID NO: 176116 - DNA, 252 bp, Klebsiella oxytoca
atgtctcaacatcttaccgaacacgacgaactggtctctgacgttgttgcctgccagttagttatcaagcagatcctcgacgtcatcgatatcatcgcccctgtcgaggtgcgcgaaaaaatgactacccagctgaaagccatcgattttgccagccacccggcctcggctgacccggtgacgctgcgggcggtacaaaaagccatcgcgctgattgagctgaaattcaccccgcaggaagaagcgcactag

SEQ ID NO: 176117 - DNA, 1347 bp, Klebsiella oxytoca
atggagttcctcgacggcacagtcatcgccaccgccctgcccgacatggcgaaagacttcggcgtaacggcagtggatctcaacattggaattagcgcctaccttattacccttgcggtgctgatacccgccagcggctggatcgccgatcgcttcggcgcgcggaaaatctttagcctggcgctggcgatttttaccctcgcctcggtgttttgcgggttgtcgaccaatgtcgatgtgtttgtcgccatgcgtattcttcagggaattggcggcgcgctgatggtgcccgtgggccgcctggcggtgttgcgcaccacaccgaagcatcagctgattaaagcgattgccactctgacctggccggcgctggtggcgcctattattggcccaccgttgggcggatttatcaccagctacgccagctggcactggatcttctttattaacgtgccgcttgggcttgtggcgattgccctggcgctgcgcatcatcccggatattcgggaagaagagcgccgcccgttcgatctttccggttttcttgcgacctcggtggcgatggttagcctggttgccgccatggagcttctcggcgatcgtcagcctctgggctggcagaccctggcgctgctggcgttaggcctgggctgcatgcttttctcgttacggcacttccgccgcgctgaatggccgatggtgcgccttgatgcgctggagatccccaccttcagggtcaccatgtacggcggttcgctgttccgctcctccatcagcgccgttccgtttctgctgccgctgctttttcaggtcggcttcggcatggatcccttccactcggggctgctggtgctggcggtgttcgtcggcaacttcaccatcaagccccttacaacgccgctgattcgctggctgggttttcgccgtctgctgctgatcaatggcgcattaaacgtattatcgctgctggcctgcgcttttttaaccccgcatacgccggtttggctcatctttgtaattctctatctcggcggggtcttccgatcgattcaatttaccggcatcagcaccctcgcttttgccgatgttccttccggacaaatgagctatgccaatacgctgttcagcaccgcatcccagctggccgttggacttgggataacgcttggagcgataggtattcgtattggggaagagttcagtgaatggcttacgctttctcaccttccgggcatcagcttccgcctgtcgtttatctttattgcgctgatttgcctggtcggcatgattgatactctgcatctgacaaaagatgcgggtagcagcgtgtcgaacaaaaagaaatag

SEQ ID NO: 176118 - DNA, 639 bp, Klebsiella oxytoca
atgaaaatcgcactgatgatggaaaacagccaggcgaacaaaaacgccatcatcctcaatgaattaaacgccgttgctgacgagaagggcttcccggtttacaacgtcgggatgagcgatgaaaacgaccatcacctgacctatatccatctgggcattatggccagcatcctgctgaattcgaaggcggtcgactttgtggttaccggctgcggcactggtcagggcgcgctaatgtcgttaaatattcatccgggcgtcgtttgtggctactgcatcgaccctgcggacgccttcctgtttgcgcagatcaataacggtaacgcgctgtctctgccgtttgcgaaaggatttggctggggtgcagagctgaacgtacgctttatctttgaaaaagccttcaccggccgcaaaggcgaaggctatccgccggagcgtaaagagcctcaggtgcgtaacgccggcatcctgaacgcggtcaaagccgcggtggttaaggaaaactatctggatacgctgcgtgcgatcgatccggagctggtgaaaactgccgtttccggccctcgcttccagcagtgtttctttgagaactgccaggataaagagatcgaagcgttcgttcgccagatcatcggttaa

SEQ ID NO: 176119 - DNA, 498 bp, Klebsiella oxytoca
atgctaaaaactgaaatgatcgataagcttaatgcgcagatgaatcttgaactttattcctctctgctttatcagcaaatgagcgcctggtgtagttaccacagctttgaaggcgcggcggcgtttcttcgtcgccacgcgcaggaagagatgacccatatgcagcgccttttcgattacctgaccgataccggtagtctgccctgcatcacggctatcgcgtcgccgtttgctgagtatgcctctcttgacgagctattccgtgcgacctacgaacatgaacagttaattacgcaaaaaattaatgaactggcacatgcggcaatgaccagtcaggattatccgacgtttaatttcctgcagtggtacgttgctgaacagcacgaagaagagaagctgtttaaatcggttattgataaattaaccctcgcaggtaaaagcggcgaaggtctgtactttattgataaagagctggcaacgctcgacacgcaaaattaa

SEQ ID NO: 176120 - DNA, 240 bp, Klebsiella oxytoca
atgcaatcgattcatggtcacgaagtgctgcaaatgatgatcgcctcaggcgaaacttacaccgtggcgacgcttgaagcggcgatcgtcgcgcgtttcggtaaagaagcccgatttcacacctgctcggcggaaaatctgagtgcggcggaactggtggcgtttttgcagaaaaaaggcaagtttattgccgctgaagaagggtttaatacgcacgaaagtaaaatttgccgccattaa

SEQ ID NO: 176121 - DNA, 1212 bp, Klebsiella oxytoca
gtgaagaaccgcactctgggtagtattttaatcgtcgccggcaccaccatcggcgcagggatgttagccatgccgttggcatcggcgggcgtaggtttcggcgtgacgttagctttgctgataacgctttgggcgctaatgtgttataccgctttgctgctgctggaagtctatcagcacgtgccggccgacatgggtctgggttcgctggcggcacgttatctgggccgatacgggcaatgggcaaccggcttttgcatgctgtttctgctttacgcgctcacggcagcctatatcagcggcgccggcgaactgctggcctcaagcctcaatcagtggctggactggacgctgcctcctgcggcaggcgttctgatctttaccgctatcggtgggacggtcgtctgcatcgggacttcgctggtcgatctttttaaccgctttttattcagcgcaaagattattttcctcgccattatgcttgcgcttctgctgccgcacattcaccagataaacctgctgactctgccgctacagcaggggctggcgctgtcggccattccggtgatttttacttcctttggttttcacggcagcatacccagtattgtgagctacctgggcggcgatattcgcaagctgcgccgggtatttatcatcggaagctttattcctctggtcgcctatattttctggcagctggcgacgctgggcagcattgactctcctgcgtttaccgcgctgctggcgcagaatgccgggctcaatggcctgctggaggccatccgtgaagtggtggcatcgtcgcacgttgagctggcggtccatctgttcgccgacctggcgctggcgacatcatttctcggggtggcgcttgggttgttcgactatctggccgatctgtttcaacgccagaacagcgccggtggacggctacagagcggtctgattacctttttgcctccgctggccttcgcgctattttatccgcgtggcttcgtgatggcgttaggctatgcgggcgttgcgctggccgtgctcgcgctcatgctgccttcgctgctggtaatgaagagccgccaacagcaccctgatgccccgtggcgggtcgcaggcggttcagcggcgctgtggcttgtcctgctctgcgggatcgctatcgtagtgattcagtttgcgatagtcgcaggattactgccggcggtgggataa

SEQ ID NO: 176122 - DNA, 669 bp, Klebsiella oxytoca
atgaaaactggacccctgaacgaaagcgaagtggaatggctggatgatatcctgtcgaaatacgcggtagaaggcaccatcatggatgttgctgaactggatggcctactgacggccatactctccgggccgaccgagattgagcccgcgcagtggctgattgctatctggggcggagcggataatgtgccgcgctgggccaacgatcgcgagcgggatcgcttcgtcaacctgacgctgcagcatatgagcgatattgccgagcgtttaagcgactatcccgatcagttcgaaccgatgttcggcagccgggaagaggaggggcaggagctcaccattgttgaggagtggtgctttggctatatgcgcggcgtgggattaagcgactggtcagctctgcctgccgagctgcaggcagagctggacgccatcgctctgcacggtaccgaagagcgcttcgaggcgctggatgaactatccgcggaagagtttatcgccagcgttgagcgaattcgtcctgcggccctggcgctttacaactactggactgagcacgctcagcctgcacaagttcagcagcccatcaggaatgagagcaagattgggcgcaacgatccttgcccgtgcggcagcggtaagaaatataagcagtgctgtttaacgaagtaa

SEQ ID NO: 176123 - DNA, 888 bp, Klebsiella oxytoca
atgtttactggcctctgcgcttttcctctgactccgttacatccacatggcgttgatgaaacggcatttgcccgaattgtcactcgtctcgtcgaatctgaggtcgattccctcggcgtacttggctccaccggaagctatgcctggcttagccgtgagcagagaatgcaggtggtgcaccaggcaaaatcgcatgccggacccattccgctgatggtcggcataggggcgctggggaccgatcaggttctccgtctggctgaagacgcgcagatggcaggcgccagcgcgctgcttctgccagtaatggcttatcaacccctgacagacgaggagattttgactttttaccagaccgtcacccaacaggtctccgtccccgtctgcgtttacgacaatcccgttaccacgcatgtgacgacttcggatgaacttaaaggcgcgatcgccgcgctacccgggatcgcctcaattaaaatccccggccccgcgaaaaatgaaaccgtccgccggattcagagcctgcggcgccagctaccggcaggggtgagtattggcattagcggggacgcctgcgcggccgatggcctgaatgccggctgcgaagtctggtattcggtgtgcggcggccttttcccgcaggtcgccaaagagttaaccgcggcggcagcgcgaggggacgctgagcaggcgacggcaatcagcgccaggctcgcgccgctgtggatgttattcagtaaatatggtggcagtctgcgagtgaccgccgcagcggcaagtatcctcgggctgtgcggggaggattgcttaccgcgaccgctgctcccgctttcgtcggatgcctttagcgaaattgcggaaacacttcgcacgctgaagctcctgtag

SEQ ID NO: 176124 - DNA, 549 bp, Klebsiella oxytoca
atgcaatttaatatccctacgttgcttactctgtttcgcgtcattcttattccattctttgtactggcgttttatctcccgtttagctgggctccttttgcctgcgcgctgattttcttcgtcgcggcggtgaccgactggtttgatggctacctggcgcgtcgctggaatcagagcactcgtttcggcgctttcctcgatccggttgcggacaaagtcatggtggcgattgcgatggtgctggtggccgagcattatcatacctggtgggtaacgttaccggccgctacgatgatcgcgcgcgaaatcatcatctccgcgctgcgcgagtggatggctgaactgggtaagcgcagcagcgtagcggtatcatggattggtaaagtaaaaaccacggcccagatggcggcgctggtgtggatgctgtggcggccaaatatctgggttgaatgggcggggatcgggctattcctcgtggcggcggtgctgacgctgtggtcgatgctgcaatatctgaacgccgcgcgcggggatttgcttgatcagtga

SEQ ID NO: 176125 - DNA, 1833 bp, Klebsiella oxytoca
gtgagtgatgtttttgatgcaaaagctttcctgaaaaccgtaaccagccagccgggcgtctatcgtatgtatgatgctggcggtactgttatctatgtaggcaaagcaaaagatctgaaaaagcggcttagcagctattttcgcagcaacctggcttcgcgtaaaaccgaagcgctggtggcgcttattgcccagattgacgttaccgtgacccacaccgaaacggaagcgctgctgcttgagcataactatattaagctttatcagccgcgctacaacgtgctgctgcgcgatgataaatcctacccctttatttttcttagcggcgatacgcatccccgcctggcgacgcatcgcggagccaagcatgcgaaaggcgaatatttcggtccgttccccaacggctacgccgttcgcgagacgttagcgctgctgcaaaagatctttcctgtccgccagtgcgaaaacagcgtttatcgcaaccgctcgcggccgtgcctgcagtaccaaattggccgttgtctcgggccatgcgttgccgggctggtgagtgaggaagagtatgcccaacaggtcgactacgtacgcctgttcctggcgggtaaagacgatcaggtactgactcagctgattacccgcatggaaaaagccagccaggcgctggagtttgaagaggctgcgcggatccgcgaccagattcaagccgtccgtcgggtaacggagaagcagttcgtctccaataccggggacgatctcgatgttatcggcgtgtcgtttgatgccggaatggcatgcgtccacgtgctgtttatacgccaggggaaagtccttggcagccgcagctatttccccaaagtgccgaatggtaccgaactgggtgaagtggtggaaacgtttgtcgggcagttctatttacagggcagccagatgcggacgctgccgagcgagatcctgctggatttcaacctcggcgacaaaaccctgctggcagattcgctctcagaactggccggacgccgggttaacgtacagaccaaacctcgcggcgatcgcgcccgctatctgaaactggcgcggactaacgccgcgacggcgctgaccaccaggctttctcagcattcaacgataactcagcgcctgcaggcgctcgcgacgctactcaaactccccgccgttaatcggatggaatgttttgatatcagccatacgatgggcgaacagaccgtcgcgtcgtgcgtggttttcgatagcaacggaccgctgcgtgcggaatatcgccgctacaatatcactggcatcacgcccggggacgattatgcggcgatgaatcaggtacttcgtcgtcgctacggcaaggcaatagaagagagtaagatccccgatgtcatcctgatcgacggcggtaaaggccagcttggccaggcgaaaacggtctttgccgagctggacgtgccgtgggataaaagtcatccgctgttattaggcgtggcaaaaggcagcgatcgcaaagcgggcctggagacgttgtttttcgaaccggaaggcgagggctttagcctgccgccggattcccccgcgctgcatgtcatacagcatattcgcgacgagtcgcacgatcacgccattaccggccaccgtaaaaaacgggcaaaagtaaaaagcaccagcacgctggaaaccatcgaaggggtggggccaaaacgccgacagatgctgctgaaatatatgggtggtctgcagggactgcagaaggccagcgtcgaagagattgcgaaagtaccgggtatatctcacggtctggcagaaaagatcttctactcgttgaaacattag

SEQ ID NO: 176126 - DNA, 690 bp, Klebsiella oxytoca
gtggcgttatccctaattctggagaatattcctttgatcaacgtccttcttgttgatgaccacgaactagtgcgcgcagggatacgacgcattctggaagatataaaagggattaaagttgccggcgaggcctgctgcggtgaggatgccgtgaaatggtgccgcgcaaatcccgttgatgtagtcctgatggatatgaacatgccgggaatcggcggccttgaggctacgcgaaaaattgcccgttccgttgctgatgccaaagtgattatgctgaccgtgcatacggaaaatccgctgccggcgaaagtcatgcaggccggcgccgctggctacctcagtaaaggcgctgcgccgcaggaggtagtcaatgcgattcgctgcgtggcttcgggtcagcgttatatcgcatccgatatcgctcagcagatggcgctcagccagattgaaccggaaaaggccgaatcgccgtttgccagtttgtctgagcgagaattgcagattatgctaatgattactaaaggtcagaaggtcaacgagatctcagagcagttaaatctgagtcccaagaccgtgaacagctaccgctatcgcatgttcagtaaattgaacattcacggcgatgtggagctgacgcacctggcaattcgccatggcctgtgcaatgcggagtcgttagcaagtcagtga

SEQ ID NO: 176127 - DNA, 225 bp, Klebsiella oxytoca
atgagcacaccagatttttccactgcggaaaataatcaagaactggcacaggaagtttcgtgcctgaaagcgatgatgacgctgatgctgcaggccatgggtcaggcggatgcaggccgagtgattattaaaatggaaaagcaaattgcgcagatggaagatgtggctcaggctgccgtattctccagcaccgttaagcaaattaagcaggcatatcgtcagtaa

SEQ ID NO: 176128 - DNA, 780 bp, Klebsiella oxytoca
gtgttagttttatgtatttataataatgattatcactcaggagttatttggtcagttatgagggacaatgattttttcagctggcggcgggaaatgctgcaacaatttcagtcagcttctgcaggcgaaggagtttttcatctactccagcagcaggcacaagcgctggaatatgactacttcgcgctctgcgtacggcatcccgtgcctttcactcgccccagggtaaccctgcaatcgacctatcctccggcctggatgtcgcattatcaagccgagaattatttcgcgattgacccggtactgcgcaaggagaatttccttcgcgggcatctaccctggaacgataagctattccacgacacccctgaattatgggacggtgcgcgcgatcatggcttacgcaagggggtaacgcagtgcctgacgctgcctaaccatgcacacggattcttatccgtctcaggaaccagccacagccaggggccctttgaggaagatgaactggagatgcgcttaagaaccctgaccgaactgagtctgctgacgctcttgcggctggaggacgaaatggttatgccgccggaaatgaaatttagtcgacgtgaactggagattttgaaatggacagcggaaggcaaaacctcggctgaggtcgcaatgattctgtctatctcagaaaataccgtcaattttcatcagaagaatatgcagcgaaaattcaatgcgccaaacaaaacgcaaattgcctgctacgcggtagcgacgggattaatttga

SEQ ID NO: 176129 - DNA, 753 bp, Klebsiella oxytoca
atgagtgcgattgaagtaaaaaacctggtgaaaaaattccatggccaaacggtgcttcacggtatcgaccttgaggttcaacagggcgaagtggtggcgattatcggacccagtggttcagggaaaaccacgctgctgcgcagtattaatctgctggaacagccggaaaacggtaccattcgcgtcggcgacgtgaccatcgataccgcgcgcagcctcggtcagcaaaaagcggacatccgccgtttgcgtcagcatgtgggcttcgtgtttcagaactttaatctttttccccaccgtacggtgatggagaacatcattgaagggccggtgatcgtcaaaggggaggataaaaatgaatccatcgcccgggcgcgtgagctgctggccaaggtggggcttaccggtaaagaaaacagctacccgcgtcgtttgtccggcgggcagcagcagcgcgtggcaattgctcgcgcgctggcgatgcgccccgatgtcatcctgtttgatgaaccaacctcggcattggatcccgagctggtgggggaggtgctgaacaccatacgtcagctggcgcaggagaagcgtacgatggttatcgttacccatgagatgagctttgcccgcgacgtagcggaccgcgctatttttatggatcaagggcgtatcgttgaacagggagacgcgaaatctctttttgccaatcctcagcaggcgcgtacccgccagttcctcgaaaaattcctgatgcaataa

SEQ ID NO: 176130 - DNA, 669 bp, Klebsiella oxytoca
atgcaagagagtatccaactggttatcgattccgcgccttttctactgaagggcgcggtatttacgctacagctcagcatcggcggcatgttttttggcctggtgctggggtttattctggcgctgatgcgcatgtcacccgtctggccgattaaatggctggcgcggatgtatatctccatctttcgcggaacgccgctgattgcgcagctgtttatgatctattacggcttgccgcagttcggtattgagttggatcctattcccgcagcgatgattggcctgtctttaaataccgcggcctacgcggcagaaacgctgcgcgcggcgatcgcctccattgataaagggcagtgggaggcggcggcgagtattggtatgacgcgctggcaggcgatgcgccgcgcgattcttccgcaggccgcgcgggtggcgctgccgccgctttccaacagctttatcagcctggtcaaagatacctctttggccgcgactatccaggtgccggagctgttccgccaggctcagctaatcacctcgcgcacgctggaagttttcaccatgtacctggctgcttcgctgatttactgggtaatggcaacggtgctttctacgctgcaaaactattttgaaaatcagctgaaccgccaggagcgtgatccaaaatga

SEQ ID NO: 176131 - DNA, 987 bp, Klebsiella oxytoca
atgtcactgcaaaatttaacccttttcccgcgtctggagctgatcggcgcgccgacgccgcttgaatatctgccgcgcctttccgattacctcggtcgtgaaatcttcatcaagcgtgatgacgtcaccccgcttgcaatgggcggtaataagctgcgcaagcttgagtttctcgcggctgatgcgctacgggaaggtgcggatacgctgattaccgccggagccatccagtcaaaccatgtccgtcagacggcagcggtggcggcaaagcttggcctgcactgcgtggcgctgctggaaaacccaatgggtacccgggctgagaactatctgactaacggtaaccgattgctgcttgatctgttcaatacccaggtcgaaatgtgcgacgcgctgaccgatcctgatgctcagctggaagagctggcgacccgcattgaagctcagggctatcgtccctacgtgattccggtgggcggttcgaacgcgctgggcgcgctgggctatgtggagagcgcgctggaaattgcccagcagtgcgaaggggcggttgagctttcctccgtggtcgtcgcatccggcagcgccggtacgcatgccggtcttgcggtgggacttgaacagctgatgccaaatgtcgagcttatcggcgtaacggtgtcgcgcaaagtagccgatcagctgccaaaagtcgccgcgctgcagcaggcggtggcaaatagcctggagctggaagcaaaggccggtatccagctatgggatgattactttgcgccgggttacgggataccgaacgacgaaggaatggcggcggtcaagctgctggcgcagctggaaggtatcctgctggatccggtctataccggaaaggcaatggccggactgattgacggtatcagccagaagcgttttaaggatgaaggcccaatcctgtttgttcataccggcggcgcgcctgcgctgttcgcctatcatcctcatatctga

SEQ ID NO: 176132 - DNA, 801 bp, Klebsiella oxytoca
atgaaattagcacttctgggtcgtcaggcgctgatgggcgcaatggccgtcgttttaatggctggcgtcagcgcaaaaacctttgcggctgaaaacctgcttaatcaggtcaaagagcgtggcactctacgcgtgggtctggaagggacttacccgccgttcagctatcagggagatgacggtaagctgaccggtttcgaggtggattttgccaacgaactggcgaaacatctgggcgtaaaggctgaccttaaacccaccaagtgggacggcatgctggcttcgctggattctaaacgtatcgatgtcgtgataaaccaggtcaccatttccgatcaacgtaagaaaaaatatgatttctcgacgccctatactgtttcagggattcaggcgctggtgaaaaaagggaacgagggcgtgattaaaaccgccgctgacctgaaaggtaagaaagtcggcgtgggtctgggcaccaactatgaagagtggctgcgtcagaacgtccagggcgtcgacattcgtacttatgatgatgacccgacgaaatatcaggatctgcgcgtgggccgtatcgacgccatcctggttgaccgcctggcggcgctggatctggtgaagaaaaccggcaatacccttgccgtcactggtgaagccttctcccgccaggaatccggcgtcgcgctgcgtaaaggtaacgaagacctgctgaaagcggttgatggcgccattgcagagatgcaaaaagatggcagcctgaaggcgctatcggaaaaatggtttggcgctgacgtcacgaagtaa

SEQ ID NO: 176133 - DNA, 1488 bp, Klebsiella oxytoca
atgaaaaaccccacgttactgcagtgctttcactggtactacccaaccggcggcgaattatggcgtgaagtcgaagccctcgcgccaaaccttaacgaaatcggcatcaacatggtttggttgcctcctgcctacaagggcgcctccggcggctactctgtcggctatgattgctacgacctgtttgacctcggcgagtttgaccaaaaaggttcagttgccaccaaatatggcgataaagaccagctccttgccgcaatctccgcgctgcgccagcacgatatcgccgtgctgcttgacgttgtggttaaccacaaaatgggggccgatgaaaaagagccggtacgcattcagcgcgttgatcaaaacgatcgtacgcaaatctctgatgagattattgagtgcgaggcctggacgcgttacaccttccccgcccgcgccggtaaatactctgaattcatctgggactataagtgcttcagcgggatcgatcatatagagaatcctgatgaagatggcgtgtttaaactcgtcaatgactacaccggcgacggatggaacgatcaggtcgatgatgaaatgggcaacttcgactatctgatgggcgaaaatatcgattttcgcaatcgggcggttaccgaggagattaaatactgggcgcgctgggtaatggagcagaccgggtgcgatggcttccgtcttgatgcggttaaacatatccccgcctggttttataaagagtggatcgaacacgtccaggaggtggcgacaaaaccgctgtttatcgtcgcggaatactggtcgcacgaagttggtaagcttcagcagtatatcgccatggttgacggcaagacgatgctgttcgacgcccctctgcagatgaaatttcatgaagcttcgcggcagggtcgcgattacgacatgagccagatttttagcggcacgctggttgaagccgacccgttccacgccgtcaccctggtgaccaaccatgatactcagccgctgcaggcgctcgaggcgccggttgaggcctggttcaaaccgctggcgtatgcgctgattctgctgcgtgaaaacggcgttccctcggtcttttatgccgatctcttcggcgccaactatgaagataccggtggcgatggcgagagctacgctattgagatgccggtaatcgaacaactacacgaactgatcgacgcccgccagcgttttgcccacggtgtacaaacgctctggttcgatcatccgaactgtattgccttcagccggagcggcaccgaggatgatccgggctgcgtggtcgtactctccaacggcgacgatggggaaaaaacgctccctctgggcgaaaattaccgcaataaacgctggcgagattttctcggcaaccgcgatgaggttattgaaaccgacgatgaaggaaacgggactttcacctgtagtggcggcagcgtaagcgtgtgggtgattgaggaaacgctataa

SEQ ID NO: 176134 - DNA, 414 bp, Klebsiella oxytoca
atgaaaaagatggtactggctggcgcgctgctagccctgaccgggtgcgtgcaggttgatagctacagcgatgttgttaaagcgccggcgcctgcagggctggagggatactggcaatcggcaggcccgcagagtgaaatgatgagtcctgacgcgatagcgagccttatcgtgaccaaagagggtgatacgcttgactgtcgacagtggcaacgggtgatcgtcctgccggggaaattaatgaagcgtgatgatgtgatctataacgttacctccgcgttagatgtctatccgcttgagcgtgaaggcaatacgctgcgctacgatcgtatgacgcttaaacgggtggatcgcctcactccggagtgtgaactggcgtggaaaaaagcgtcggctgataaaagcggacggtaa

SEQ ID NO: 176135 - DNA, 624 bp, Klebsiella oxytoca
atgtcaacgattatcatggatttatgcagcttcacccggctgggattaaccgggtacctgacaagcaggggggtaaagaagcgtgagatcgcagaagtacagagtgcgtcaaacctgaaggcaatgtgtgaagccagccgccctgccgtagtatttatcaatgaggattgttttattcatcatgaagagagcaaccagcttgtccgacaaatcatcagccagtatcccgccacgctattcattatctttatgtcgcttgccaatattcatttcgaccattacctgctggtgcgcaaaaacttactcgtgtgctcgaaatcgctgaccgaaaaagaccttgatgacattctcgccaaccgtcttaaatatgagaactatcgtgctgcccggattaatattcccacgctgaccttaagccagaccgaatcaaatatgcttcagatgtggatggccggacacggaacctcgcacatatcagcgcagatgaacattaaggccaagaccgtgtcctcgcacaagggcaatattaaaaagaagattcaaacccacaataaacaggtgatttatcacatcgtccgcctgaccgaaaacatcacatccggaattcacgtcaacctgcgttga

SEQ ID NO: 176136 - DNA, 189 bp, Klebsiella oxytoca
atgcaggtaaacgatcgtgtcacggtgaagaccgatggtggcccacgtcggtcgggcgttgtgctggcaatagagtcgtttagcgaaggggtcatgtatctggtttcgctggaggattatccgctggggatctggttttttaacgagcacggccatcctgacggtatattcgttgagcgggaagagtga

SEQ ID NO: 176137 - DNA, 216 bp, Klebsiella oxytoca
atgaaaatcgccaaagagcacaaaggcacgggaagtgttgatgttgacgccctgctggcggcgattaatgaaatcagcgaaagtgaagtccagcgaacgcaagacgatcctcatcacgtcagcattgatggccggggttaccatacctggcgcgagctggccgaggcctttgaactcgatatccatgactttagcgttaccgaagctaatcgctga

SEQ ID NO: 176138 - DNA, 1668 bp, Klebsiella oxytoca
atggataagctgatgtgggtgaaaaagctgcgccagattttaagccccggatatgtggttaacctctgtttttttatcgtcttctgcttctctacgctgttgatatggcgtgagatcaaggttctggaagaagcctacgtcgctaaccagcgcaacaaccttgaaaacgtggcacatgaatttgacagcctgctgcaatttaatatcgacagaatgattttttttcgtaacggcatgcattccgcgctggagacgccgttagattttgccgtgctgcgcaaggccgaagagagttatttagcgaagcgacacgatccgatctggtcagttgagattcacaatcgacgaacgctgccggtctacggcgttgccgatgcctttatcgacggcgacgaacttctttcccgcgacactcccttttccgggaacgagctgatggctacccttgaactcggttatatgctgcgcctggccaataacaaccggggtttcgctaagcgtatgctgtacgtgtcgcgcagcggcttttttatcaccactgagccgctgaaaaattcgacgcaggcgctcgcgctctattcccaggctacgatcgatgtctggtttacccgccaaacgcagcgtaataaccctgctcgcggtatcgtatggcaaacgtttcccggcgatgaatcgccgcgtgaaataccggtcataacggcgtctattccgcttgatttccagcgtttctggctcggtgtcctggcgatggacttctcggtacaggagatgaaggcgtttctggtcaatgcgataaagacgggtgaggaaggcgagtatcagctttatgataatcaacttaatttgatagcttcttctgcgccgggcaacgtgctgacgctgctgtctgcgcatgaacaggagatgctgaagcgcgcttttgctggtgagaatcagggggggattcgcctggttacccgttatatcagctgggagaagatccgcaattttgatggggtgctaatccgtattcacactattcaggagggggtacgcggcgactttggcagcatcactattgccctgatgctgatgtggttaatgttcaccctgatgttgatgatctcgtggttcgttattcggcgaatggtgcgcaatatgagtatgctgcagacctccctcgaatggcaggcctggcatgatgcgttgacccgcctgttaaaccggggggcgttatttgaacgtgccacggcagctgctcgccagagcgaacgcctgaagcgtccagtggcggtgattcaactcgatcttgattactttaaaagcgttaacgatcggtacgggcatcatgcgggggatcgcgtgctgacgctggtggccagtactatcgccagccatattcgcgaaggcgattttgcagggagggttggcggagaagaattctgcatcgtcctgcctgataccagactaaaagaggcgacggccattgcagaacggatccgtatacgggtcaatagtcgtgaaattttactcggcaacagcgcctctttacgtatcaccgcgtcgtttggagtgagcagcagtgaggattccagcgactacagctttgagaacctgcagtcggtcgccgatcatcgtttgtatcttgccaagcaaaacgggcgcaatcaggtatgtgcggacgggtga

SEQ ID NO: 176139 - DNA, 180 bp, Klebsiella oxytoca
atggtcttgttggtcagtgatgaagtgagacgcaaaaacggcggcccccgcatggtcgttaccggattcgccagcggcatggtggaatgtcgttggtatgacggttacggcgtaaagcgcgaggcatttcgtgaggatgaacttatccgtggaggaggagggaagctgaaccgcacctga

SEQ ID NO: 176140 - DNA, 912 bp, Klebsiella oxytoca
ttggcgggaagtagtctattaaccttattggatgatattgccactttactcgatgatatttcggtcatggggaaactggcggcaaaaaaaacggcaggcgtattgggtgatgatttatcgcttaatgctcagcaggtaaccggcgtgcgggccaaccgtgaattgccggtggtatggggcgtagctaaaggctcattgatcaataaagtgattctggtgccgctggcgctgttgattagcgcttttatcccgtgggcgattacgccactgctgatgctgggtggcgccttcttgtgctttgaaggcgtcgagaaggtggtgcacactctgcaggcgcgtaaacataaagaggatccgcaggttcgccagcagcggcttgaagccctggccaatcaggacccgatggcgtttgaacgagataaggtaaaaggcgcggtgcgcacagattttattctgtctgcggaaattgtcgcgattaccctcgggattgtagctgaagcgccgttattaaatcagattctgattttgtccggcattgcgctgctggtgacggtgggggtgtacggtctggtgggggttatcgtcaagcttgatgatatgggctactggctggtggagaaaagcagtgcgctggcgcagtggacagggaaagctttactggcgattgcgcctcgtctgatgaaggtgctgtccatcgtcggcaccctggcgatgttcctggtcggcggcggcattgtggtccacggtatcacgccgctgcaccatgccattgaaaatctggctcaggggcagaatggcgtcattgcctcgctgctgccaacggctgcaaatctggtgctgggattcattattggcgccatcgtgctggccgtggtgaaagcgatagccgctcttcgcggttctacgaagtaa

SEQ ID NO: 176141 - DNA, 912 bp, Klebsiella oxytoca
atgtctacccgtcagctgttgccgctcatcggggcgttgtttgcgctgtatatcatctggggttccacctatttcgctatcgccgttggcgtcgccagttggcctccgctgatgatggctggcgtgcgctttctttccgctggcgcggtgctgctcgcctggttgctggccacgggccataagctaccgtcgcgcaaaccgctgctcaacgcggcgctgatcggcgttttgctgctggccgtaggcaatggttttgtgacgcttgccgaacaccagcacgtcccctcaggtattgcggcagtcatggtcgcgacggtaccgttgtttaccctatgttttagccgtttttttggtatagcgacccgcaagcttgagtggttagggatcgcgataggtctggcaggtattgttctgcttaacagcggcggcaacctgaatggtaacccctggggagcgctgctgattctgatcggctcgatgagctgggcctttggctccgtctacggttcgcgaatcgagctaccgaccggaatgatggcgggcgccattgagatgctggcggcagggatcgtgctaatgatagcgtcctcactgactggggaaaagttaacccagatgccatcatggtccggcatttttgccgtcgcctatctggctatcttcggatcgcttatcgccatcaacgcctatatgtatttaattcgtaacgtgacgccagccgtggcgaccagctatgcctacgtcaacccggtagtcgccgtcctgctgggcaccggttttgccggggaaagcttatctcccgtagagtggctggcgctcggcatcataatttttgcggtcattctggtgacgctcggcaaatacctgttcccggttcgtcgcgagattacgtcctgtaaggcgcagaagtaa

SEQ ID NO: 176142 - DNA, 495 bp, Klebsiella oxytoca
atggccgacgtccacgataaagccacccgtagtaaaaacatgcgcgcgatcggcacccgcgatacggcaattgagaaacggctggcggggctgctggcgcgtgccggtttttcctttaccgtacaggacgctgcgctccccggccgcccggattttgtggtatcagactatcagtgcgtaatctttactcacggctgcttttggcaccatcacgactgctatctgtttaaggtgcccgcgacgagaaccgaattctggctcgacaagatagccaaaaacgtggtgcgcgatcgccgggatatcgggcgactggtggagcagggatggcgggtgctggtggtctgggaatgcgcgctgcgcgggcgaaagaagcttaacgacgaagcgctgggcgaacgactggaagagtggatctgcggcggcgatcggtgcgcgcagatcgatactcaaggcataggtctgttagacgttacttctgcgccttacaggacgtaa

SEQ ID NO: 176143 - DNA, 696 bp, Klebsiella oxytoca
atggatctttatcaatggcagcaacgatttgaagcctggctaagtgaacatcactcgcaaggggatgccgctcacgatatttcacacttccgccgggtatgggccaccgcgcagcaactggccgaagagagtgatgctgatcggctggtgatcctcaccgcctgctattttcacgatattgtcagcctggcgaagaaccatcctgagcgtagccgctcttcggcgatggctgcggaacaaacgctgactatcctgcagtcagattttcccgattttccgccggagcgctacgcggcggttctgcacgccatcgaagcgcatagttttagcgcggggatggctccccgcagtgaagaagcgaaaattgtccaggatgccgatcggctggaggctttgggggcgattggcctggcgcgcgtattcgcggtatccggtgcgctgaacaatatcttgtttgatgccgacgatccctttgccgatcggcgtgaactggatgataaaaaatacgcgctggatcacttccagtgcaagctgctgcgtttaccggaaacgatgcagacagaaaagggtagggcgatggcgctgcacaatgcgcgctttctggttcagtatatggctaagctcagcgccgaacttcgcggagacccgatgtcccttgatgacaaggttttgcagcgctttaatccactagcataa

SEQ ID NO: 176144 - DNA, 282 bp, Klebsiella oxytoca
atggaagagaaagcgaaaagaagtcctggcgggaagctggcactatgggcgttttacgctttttgcggctatttcctgtgggcgatggcgcgttactggtgggttgtcgggcagatccaaagcgtacccggcgcgacgattgacggtgagctcggttcaacggcagggaaatggatcggcgcgctgctgggatttctggtattgggcattgtcggcgctattctcggcgcaattgcctggtatacgcgtcctgatccgcagatgtatgaacatcacgagtaa

SEQ ID NO: 176145 - DNA, 1056 bp, Klebsiella oxytoca
atgaaaagaaaagtactggcaattctggttccagctttattagtcgctggcgcggctaatgcagcagaaatctataataagaacggcaacaaactcgatttctacggcaaaatggttggcgagcacatcatgacccatgatggcgacaacaacaactccgacgatacctcctatgcgcgtttcggcattaaaggcgaaacccagatcagcagcgaactgaccggttacggccagtttgaatacaatatcaaagcagacaaaccagaaggtcagcaggctgatgatacccgtctggcgtttgctggtctgaaattcagcgactacggctcatttgactatggtcgtaactacggcgtggtttatgacgcggcaggttacaccgacatgctggttgaatggggtggcgatggtttgatcgcaactgacaatttcatgactcagcgtaccaacggcgtagcaacctaccgcaacaccgatttcttcggcatggtagatggcctgaactttgctctgcagtatcagggtaaaaacaacgacactgaccgcgctaaagccaacggcgacggcttcggtttctccgttaactataacatcgacggcttcggtttcgttggcgcatacagcaactctgaccgtactgatgaacaggctgcggaccgcagaggcgaaaacgctgaagtctggagcctcgccactaaatatgatgctaataacgtctacgcatctgtcatgtacggtgagtcccataacatgactcacatggagtatggtggctttgctaacaagactcagaatattgaagccgttgttcagtatcagtttgacttcggcctgcgtccgtccctgggctacgtctatgccaaaggcaaagacctgaacggtaaccgtgatgccgatatcatgaactacgttgaactgggtacctggtactacttcaacaagaacttcaacgtttacaccgcatacaaattcaacctggtggatgacgaagattcttatatcactggcgcatcaactgacgatcagttcgctgtaggtatcacctaccagttctaa

SEQ ID NO: 176146 - DNA, 372 bp, Klebsiella oxytoca
atgagcgcacgttccagttatacaacccgaacggagggctataacgtgggatttccgtcgccagcagcagactatgtagaagtacgactgaccgtcgataaactctgcggtaccagcccaaatactaggctcgttcagacagaaactggttacaccgtagtcgatgtctccggtaaaccaaagcaaggagataccgttttaattcaatacggcggaggcacagattttgcaaaaattatgggccgggcatttattacaagagacggtgaggctctggaaggagaggctttggatgatgttacagttgtcggggtagtgacattcgttatcaatcggacagggaaggatgatgatgattatccagtaatatga

SEQ ID NO: 176147 - DNA, 240 bp, Klebsiella oxytoca
atgccgcgtttatacgaaatcgagacggcctgccgtaaggcaatagatatcctgcctaacggaaagcgcatcctcaccaccaggcgatttctgcaggaactggagagatataactggcactggtcgccacggcaggctaaccagtggatagagcattatgtgacgacattccgggatgtctcaacgcaggaaggcgatgagcgcacgttccagttatacaacccgaacggagggctataa

SEQ ID NO: 176148 - DNA, 312 bp, Klebsiella oxytoca
atgacagccgccatttgttatttccgcagcctgaccgacagcatcgataccagtacgccagcagggcgattcttcttccacgtcatgagcgccctggcggagatggagcgcgagttgatagtggagcgtacccgagccgggttagccgcagcgagggagcaggggagagtcggtggccgtcgcagggtaatgactgaagatgtggtggagcagtgccgcagaatgctggagaacggcgctacccggcagcaggtggctgatgtgacaggcgtggacgtgaaaacaatctacaagtacctcccggcgacttga

SEQ ID NO: 176149 - DNA, 324 bp, Klebsiella oxytoca
atgtccgggtggtgcatcaggcggctggacaaatccacggtcggctcgtcaatccagccaatgatatccggcggcgcgccggcctctaccgccgcgcgcagcacgatctccgccgcacggttggtggcgtttttcgcccgcgggtgcggggagaaaacgatgccgttgcgggttttgaggctaatcagcgacttaaaaatggcggtggaggtcggattggtggtggggacaatcccgcagatcaggccgatgggttcggcaatggtcatggtgccaaaggcgtcatcttcagacagcaccccgcaggttttctcatctttatag

SEQ ID NO: 176150 - DNA, 210 bp, Klebsiella oxytoca
gtggtttttgatgactttatcttccacgatgcccatgccggactcggcaaccgccattttggccagcggaatgcgggcatcggcggcggccagcgcggcggcgcggaagattttatcgaccttctcctgagaaaagctggcataggcctgttgcgcctttcgtactcgcgcgaccagggcatcgaggtcgtcattactggtgatgagtga

SEQ ID NO: 176151 - DNA, 552 bp, Klebsiella oxytoca
atgacaaagcagcccgaagactggctcgacgacgtccctggtgatgacgtcgaagatgaagacgatgaaattatctgggtcagtaaaagtgaaattaagcgcgacgccgaagaactgaagcgtcttggcgcggaaatggtcgagctgggtaaaaacgcgctcgataaaatcccgctggataccgacctgcgcgacgcgattgagctcgcccagcgtatcaagaaagaaggccgccgccgccagctgcagctgattggtaaaatgctgcgcagccgtgacgtcgagccgatccgtcaggcgctggacaagctgaagaaccgccacaaccagcaggttgcgctgttccataagcttgaacagatccgcgatcgtctgattgataatggtgatgacgccgttgcggaagtgctgaacctgtggcctgaggccgaccgtcagcagctgcgttcgcttatccgcaacgcgcaaaaagagaaagaaggtaataaaccgccgaaatccgcgcggcttatcttccagtatctgcgtgaactggccgaaaacgaaggctaa

SEQ ID NO: 176152 - DNA, 1353 bp, Klebsiella oxytoca
atggcattagcgatgaaagtcatctctcaagttgcacaacagcgtaagacgctggaagaggccgtgaccacggcgctggaactggcggcaggcaaatccgacggcgcggaagtctccgtcagcaaaaccaccggtatcggcgttagcacccgctacggcgaagtggagaacgtagaattcaatagcgatggtgcgctaggcatcaccgtttatcatcagaatcgtaaaggcagcgcctcttcgaccgaccttagcccgcaggccattgcccgcacggtgcaggcggcgctggatattgcccgctacacctcgccggacccgtgcgcgggcgtggcggataaagaactgctggcttttgatgccccggatctggacctgttccatccggcggatgtttccccggatgaagccattgagctggcctcccgcgcggaacaggcggcgctgaaagctgataaacgcatcagcaataccgaaggcggtagctttaacagccattacggcatcaaagtgtttggtaacagccacggcatgctgcagagctactgctcgactcgccattcgctctccagctgcgtgattgctgaagagaatggcgatatggagcgcgattacgcttacaccattggccgggcgattggcgatctgcaatcgccggagtgggttggcgaagagtgcgcccgccgcaccctgtcgcgcctggccccgcgtaagctatcgacgatgaaagcgccggtgattttcgccaatgaagtggctaccggtttgtttggtcatctggtcggggcgattgccggcggttcggtttaccgtaaatccaccttcctgcttgatgcgctgggaacccagatcctgccggactggctgaccattgaagagcatccgcatctgctgaaggggctggcctctacgccgtttgatagcgaaggcgttcgtacggaacgccgcgatatcattaaagacggcatactaacccagtggctgttgaccaactactcggcgcgcaagctgggattgaaaagcaccggccacgcgggcggcattcataactggcgtattaacggtcgcggcctgagttttgcaaagttgcttaaagagatggggaccggtcttgtcgtcacggaactgatggggcagggtgtaagcggcgtcaccggcgactactcacgcggcgcatccggcttctgggtagaaaacggcgaaattcagtatccggtcagtgagataaccattgcaggaaatctgaaagatatgtggcgtaatatcgtgaccatcggcgacgatatcgaaacgcgcagcaacattcagtgcggttctgtactgctgccggagatgaagatcgccggtcaataa

SEQ ID NO: 176153 - DNA, 387 bp, Klebsiella oxytoca
atgcgtaaaaaactgttagcgatgctggccgtatcggcttttgcgcttggttcggcatcggctttcgccgatctgggcgaagatatggatacccttgccgagaacctgcaagtggtgcagaaaacttcagatgccggtgagctgaaagcggcgctgaataagatgcgtacagcggcggttgacgcccagaaagagacgccgccgaagctggaaggtaaagcggatgacagcgcggaaatgaaggactatcgtcacggttttgatgtgctgatcggccagattgacggcgcgctgaagctggctgacgaaggtaaagtcaaagaggctcaggccgcagcggaagagtttaaaaccacccgcaatacgtatcataagaagtatcgttaa

SEQ ID NO: 176154 - DNA, 339 bp, Klebsiella oxytoca
gtgaataacggagcggtaacacacgtcccagaggagcaggccacgctaaccgaacagctggccgacaggatgctgcagcaggttttcgcgctattaagccgccgcaacatcgttcccaacgacgttcaggagcaaatgctgacttcccacgttcgggcgatggcccatcggtcaatcagcggcgagccgctgccggaagtggatgccagcctgttcgaagagatctcagaagattcaatgatgctggcccgcgaagtggtcgcgcagttcggcaatctgccagatgaagaagcctggctgctgtccgtccacttcgaagtcgcgaaagataacctgtaa

SEQ ID NO: 176155 - DNA, 363 bp, Klebsiella oxytoca
atggaacaaatcaccgttgttattggcgatcgcctgggtaaaggtcaaaaagttgccgcaggtgcggaaaaagctggcgctcgcgccgttgtcgttccgggcgttgctgcggatatgaaactgggcgacatgatgaaagccgaaaacgctaccttcggtatctctttctgcggcagcggcggcgcaggggcaatcaccgcgcagaataagcatggctacaaagcaaaatatggcatgcgttccgttgatgagggcgtcaccgcgatcaacgaaggctacaacgtactgggcttcggctttatggataaagaagaactgggcgaacgcctggtggaagcctggaagaagaaatacggcgcgtga

SEQ ID NO: 176156 - DNA, 300 bp, Klebsiella oxytoca
atgaaagagcaattcaccaccacggtgagcgttaccggcaaaggcgagagcaaaacgcgtgctttcgccgatgccctgaaccatgtccaggcggcggtgatgaaaacgtcgccgcacatcttactgcgtattgaaccacaggatgtggaggttgttcatgcgcgtgaagcggtacggaaagaggcatttttattcttctttctgcgccgtgagcgacggacctacagcgtggagctgaacgttaccgtcaccgtgaccgccattaatctcgataaagtggatttcgtcacgcaaacctga

SEQ ID NO: 176157 - DNA, 777 bp, Klebsiella oxytoca
atgttcctgataattttaataaaatcgctcatcatcggcggcctggtcggcgtcggcgtaggcgccggagcggcacgcatgtttcatgcgcccaccacgcaggggatgggggcgtttcgtaccttgggcgagctgaattcatgtgaaggcgatccggcttcacacttctcttttggtctgggcttcttcttcaacgcctgggcctcttccgtcgcggcaggctccttcactcaggacgttgaccaccgcatcatccccaactggggggcggcagcgctgatgatcaaaaaccgcaacgtcggcgagacgctgcacgatccgaaaaagatggccatcgcttgcggcattatcggcatgatcgttgtggctttcctcaacctgaccgcctcttcagtaccggaagcgctacaggtgacggcggtcaaagtgctggttccggcggcaaacctgctggtgaacacggtgatgccggtcatcttctggctggcggcgattgatgccggcaaaaagtcgggcttttgggcgacgattttcggcggcgcggcgcagctgattatgggtaacgccgtcccgggtctggtgctgggcatcctgatcggcaaaggcgtggaagagagcggctggcaccgcgtcaccaaagtgatgatggtagcaatcgtcgcgctgttcgttctgagcggcttcttccgcggtttcgacatgaagatgattgaatccttccatctgaccgtgccgaactggctggaactgatccacaactcgctcagcggtaaataa

SEQ ID NO: 176158 - DNA, 645 bp, Klebsiella oxytoca
atggaacaaaataaaggtttttggtatgccgactggtcgttcccgatctttgttggtctgctctccgccggcgtttttgccgggacgcatatgtactacctctacggcatcggcgcgtttaacgaagtcgccttcgtggcgatgctgaaagcgggaattgataccggtgcctacggcgcggtcgcggcgttcggcgccagcttcctgttcgcgcgtattatcgaaggctcactggtggggattctggatatcggcggggcgatccagaccggcgtcggcttaggcgttccggcgctgctgctcggcgcgggctttgttttcccggtcgccaactttgccgcctcactggtcactggcctggtgctggggctcgccattggctacatcattatcctggcgcgcaaattcaccatcaaccagagcgactccacctacggcgcggacgtcatgatgggggccggtaacgcctcaggccgcttcctcggaccgttgattatcctcagcgccatgaccgcttctattccaatcggcatcggttccctggtgggcgcgctgctgttctacatctggcagaagcctatcaccggcggcgcgatacttggcgccatgcttcttgggtcaattttcccggtggcgattagttaa

SEQ ID NO: 176159 - DNA, 1134 bp, Klebsiella oxytoca
atgtttgatttactcctgcgccgtgcgcgcctcgtcgacgataccctgaccgatatcgccatccgggacggtaaaatcgcggcgcttggcgagattagcgcgcctgcgcgcaaaacccttgaactggacggccgctattacgtcagcgcaggctggattgactctcacgttcactgctatccgaactcgccgatttaccatgatgagccggacagcgtgggggttgctaccggcgtgaccaccgtgattgacgcgggcagcaccggtgcggacgacgttgatgacttctaccaactgacccgcaaagccgcgaccgaggtttatgccctgcttaacatttcccgcgtcgggctgattgcccagaatgaactggccaatatggcgaatatcgacgcagaggcggtgaagcaggcggtcaaccgctacccgaactttatcgtcggcctgaaggcgcggatgagcagcagcgtggtgggtgaaaacggcattacgccgctggcgcgcgcaaaggcaattcagcaggaaaacggcggcctgccgctgatggtgcatatcggcaacaatccgcccgatctggatgaaatcgccgctctgttgacctccggcgacattattactcactgctataacggcaagcccaatcgcattctgacgccgtccggcgagctgaagagttcgattacccgcgcgctacagcgcggcgtgcgccttgatatcggccacggcaccgctagctttagcttcgaagtggcgcgccgggcgattgccatgggcattctgccgcacaccatcagctccgatatttactgccgcaaccgtatcgacggtccggtgcgctcgctggcgctggtgatgtcgaaattcctcgctatagggatgtcgctgccgcaggttatcgactgcgtgaccgccaacgccgcggaaggcctgcatctttcccataaagggcggctggaagtgggctatgacgctgacctgacgctgtttactctcgcgcagatgccaacggtgctggtggatgctgaaaaagagagccttcaggccgacaagattctgctgccgcttgccgccattcgcgcgggcaagggctatctgaccgaacaagggagcgcggaaaatgccttcgatttttga

SEQ ID NO: 176160 - DNA, 1119 bp, Klebsiella oxytoca
atgccttcgatttttgagaaatatgatttaaagcgggtcattaacacctccgggcgcatgaccattctcggcgtctcgacgccgcgacaggaagtcgtggaagccgcgatggcggggatgaaccagtacttcgagatgaaagatctggtcaataaaaccggcgcgtatattgcgaagctgctggacgtggaaggggcgaccgtggtctcctgcgcctcggcgggcatcgcccagtcggtggcggcggtgctggtaaaagacagcgactggctgctggaaaacctgcacgtgacgccgattgaaaacaacgaaatcgtgctgcctaagggccacaacgtcaactttggcgcgccggtgggcaccatggtagcgctgggcggcggcaggctggtggaagcgggctacgccaacgaatgttctgccgggcagctggcggcggctatcaccccgcgcaccgcggccattctgtatatcaaatcccaccactgcgtgcagaaaagcatgctcaacgtggcgcaggcggcagcggtggcgaagagccataatctgccgctgattgtcgatgcggcggcggaagaagacctccaggcctactatcgcgccggcgcggatctggtgatttatagcggcgcgaaggcgatagaagggccgaccagcgggctggttatcggcaaaacccaatacgttgagtgggtcaaacgccagtcgaacggcattggccgggcgatgaaggtgggtaaagaggggatcctcggcctgacctgcgccattgaacactatctgacggcgagcaaagagagcggtgaagagatggtggcgaagatgacgccgtttattcagcagcttaatacgctcgatggcgtcaccgcgcgcgtggtctgggacagcgccggccgcgatatcgcgcgggcggagattaagtttgatgaagcggtgaccggcgtcaacaccggcgatctggtcaatgcgctgaagcagggcgaatacgccatctacttccgtggctataaagcaaatgaaggcattattgaagctgatgtccgcagcgtgaacgcgcagcaactggagattgtctcccgtcgcatcgcagaggttttgaagaaggagaaaaacgcatga

SEQ ID NO: 176161 - DNA, 741 bp, Klebsiella oxytoca
atgaaactgacccctaatttttatcgtgaccgcgtctgcctgaacgtgctggcgggaagcaaagagaacgccagcgagatttatgaggcggcggaaggtcatgtactggtgggcgtgctctccaaaaattacccggacgtcgccagcgcggttgccgatatgcgtgaatacgcgcagcggattgataacgcgctctccgtggggctgggcgcgggcgacccgaaccagtcggcgatggtcagcgaaatttcgcgtcaggtgcagccgcagcacgtcaaccaggtatttaccggcgtggcgaccagccgcgcgctgctgggccagaacgaaaccgtggttaacggcctggtgtcgccaaccggtacgccgggaagggtgaagatctccaccggcccgctcagcagcggcgcgccggacggcatcgtgccgctggaaaccgcgattgccctgctgaaagatatgggcggcagttcaattaaatactttccgatgggcgggctaaagcatcgtgacgagtttattgcggtggccgaggcctgcgcccgtcatgatttctggctggagcccaccggcgggatcgatctggaaaactacggcgagatcctgcagatcgcgctggacgccggcgtgagtaaaattatcccgcatatctacagttcgattattgataaagccagcggtaatacccgcccggcggacgtgcgtcagctgctttcgatcaccaaacagttagtacaatag

SEQ ID NO: 176162 - DNA, 1152 bp, Klebsiella oxytoca
atgccaaccgctcgtcacctgcttgttgcttcaatctctctgctcgccgccggcgccgctgcgcaaacccagtacgcctgggtcggtacctacaaccccaatggggaaggcctgtatcgctttaccatcgataaccagactggggagctgcgcgataaagcgctggtcgctaagctacccaacctggcccagctcaccgtttcggcggatggcaaaaccctgtacgccgccagcgaagtggaaaagggtgtggtgcaggcgtggcgcatcggcagtaacggcgaactgcgtgagctgaatcaggtcgcttccggcggcgccgggccggtttatctctccctgacttccgatggacgccatctgctggtggcaaactacgtcagcggcagtatcgccgtgctgccggtgaaagaagatggtaacctgggcgaggcggtggacgtgcatcaggatcaaggccctgcgggagcggaacgcccggcggcagccgtcgaaggcagttttgccattagcgatcataacggcccccacgcccatatgatcgccgccgatcccagcggtaagttcgtttactccaccgacctcgggctggatcggatctatcagtaccggctggataacgccaccgggaagctaacgccgaacgatccgccgtttattgcggcctcatctcccggcgccggaccgcgccattttgtgtttacgccgcagggcgacgggctatggttaattaacgaagaggcgtcgacgctcactttctatcatctcgataagcaaagcggcctgttgcgcgaggggaaaacggtctcggcgctggcggaagcgtataagggcaccagttttgccgccggtctggttctgagccgcgacggcaagcagctgtacgttgctaatcgactgcataacagcatcggccactttacggtgctggccgacggcagcctgcgccatcaggacgatatctggacccgcggcgactatccgcgcacgctgacgctcgacagtcaggggcagtggctgtacgtcatgaaccagcgtagcgacaacatcacccgctttcgcgtcgcgccgaaggatggcaggctgacgttctctccggactataccccggttggcagcccgtcgcagatggtgatatccgctcaaccctga

SEQ ID NO: 176163 - DNA, 1911 bp, Klebsiella oxytoca
atgcgatttcccaatcaacgtttagcgcagctgtttaccctgttgcaaaacgaaacgctgccccaggaggagctggcgcagcggctgtcggtttctactcgcacggtgcgcgcggacatcaccgcgttgaatgcgctgctgcagcactatggcgcgcagtttatcctcacccgcggcagcggttatcagctggtgattcacgattcgtcgcgctatcagacgctggaagagagtgcgccgaaagcgcagcatatcccgcgaaccgcggcggatcgcatccactttttgctggtgcgctttttaacttccgctttctcaatcaagctggaggatctggccgatgcgtggttcgtcagccgcgccaccttacagggcgatatggttgacgtacgcgagcgctttcagcgttatcagctcacccttgagacccgaccgcgtcacggtatgaagctgttcggcagcgaggtctccattcgcgcctgcctgaccgatctgctgtgggagctaagtcagcaggggccgctgaacccgcttatcggtgaagaagcgtttgatgccagcgtaccgacgctgctggctggcgtgctgcaggaaacgctaacccgccatcacgttcgcctgaccgacgccggggagcgctttatttgcctgtacggcgcggttgccgtgcgccgagtgagcgaaggatatcctttagccgattttagcgccgaggatgtcgcgcaaaacgtacgcgatgccgcccgcgagctggcaaatacgatgcagcagctggcgggcaaaccgcttgctccggcggaagaggagtggctgtgcgtccaccttgccgcccgccaggtgcaggatgtcgatccggggactatcagcgccgacgacgacgaagcgctggtgaactacatcctgcgctatatcaatcagcaatataactataatttgctggaggatgcccagctgcatgcggatttgctgacccatattaagaccatgatcacccgcgtgcgctaccagataatgatccccaacccgcttctggaaaatatcaaacagcactaccccatggcgtgggacatgaccctggcggcggtatccagctggggaaaatataccccctacgccatcagcgaaaacgagatcggctttctggtgctgcatatcggcgtcgggctggagcgccattacaatatcggctaccagcgccagcctcaggtgctgctggtctgcgataccagcaacgcaatggtgaggatgattgaagccatcctgcagcgtaagtatccgcagctggaaattgccgccaccctctcgcagcgcgaatatgaacagcgggaagagatcgcggaagattttgtcatttccaccgtgcgcatcagcgagaaagataagccggtagttaccattgcgccatttcctaccgactaccagctcgaccaaatcggcaagctggtgctggtggaccgcacccgtccctggatgctgaataagtattttgatgagactcactttcaggtgatagataccccgatggatcagcagacgctgtttgctacgctgtgccagcagctgcagcaggaggggtttgtcggggcggagttccatgattcggtcgcggagcgtgaggctatcgtcagtaccatgcttggcgacgggatcgcgctacctcacgccctcgggctgctggcaaaaaagaccgtggtttataccgtgattgcgccgcacggcatcgcctggggcgatgaaaccgcgcatatcatcttcctgctcgccatcagtaaaagcgagtatgaagaggcgatggcgatctacgatattttcgtcaccttcctgcgcgagcgcgcaatgacccgccttgctgccacccgcagctttgctgagtttaaagcggtggccatggagtgcgtcagccggttttga

SEQ ID NO: 176164 - DNA, 465 bp, Klebsiella oxytoca
atgaattaccatcagtactacccggtagatattgttaacggtccgggcacccgctgcaccctgttcgtttccggctgcgttcacgagtgccccggctgctacaacaaaagcacctggcggctgaactccggcatgccgtttaccgccgagatagccgaccgcatcattgctgacctcaacgatacgcgcatcaggcgccaggggatcacgctttccggcggcgacccgctgcacccgcagaacgtgccggagatccttaagctggtgcagcgcgttcgcgccgagtgccccggcaaagatatctgggtatggaccggctacaagctggacgaacttaacgacgcgcagatgcaggtggtggatctcatcaacgtactggttgatggcaaatttgtgcaggatctcaaagacccggcgctaatctggcgcggcagcagcaatcaggttgtgcatcacctgagatag

SEQ ID NO: 176165 - DNA, 2139 bp, Klebsiella oxytoca
atgacaccgcatgtgatgaaacgcgatggctgtaaagtgccgttcaagtcagagcgcattaatgaagcaattctacgtgcagctaaagcagcgggagtcgatgacgcagactattgcgccaccgtcgcagaagtcgttagccagcaaatgcagggccgcacccaggttgatatcaacgagatccagaccgccgttgagaatcagctgatgtccggcccttacaagcagctggcgcgtgcctacattgaatatcgccacgaccgcgatagccagcgtgaaaaacgcggtcgtctgaaccaggaaattcgcggcctggttgagcagaccaactcggcgttactcaacgagaacgccaacaaagacagtaaagttattcctacccagcgcgatctgctggcgggtatcgtggctaaacactatgcgcgtcagcacctgctgccgcatgatgtagtgatggcgcacgagcgcggcctgatccactatcacgatctcgactattcgccattcttcccgatgttcaactgcatgctgatcgatcttaaaggcatgctgacgcagggttttaaaatgggcaacgccgagattgagccgccgaagtccatctctaccgccaccgcggtaacggcgcagattatcgcgcaggtcgccagccatatttatggcggcacgaccatcaaccgcatcgatgaagtgctggcgccgtttgttaccgaaagcttcaataagcaccgtaaaattgccgaagagtggcaaatccccgacgccgaaggttatgcccgttcccgcaccgagaaagagtgctacgacgccttccagtcgctggaatatgaagtgaacaccctgcataccgccaacggtcagacgccgttcgtcaccttcggtttcggcctcggtaccagctgggaatcgcgtctgattcagcagtccattctgcgcaatcgcatcgcgggactcggtaaaaatcgcaaaacggcggtgttccccaagctggtcttcgccattcgcgacggcctgaaccataagtttggcgacgcgaactacgacattaaacagctggcgctggagtgcgcgagcaagcgcatgtatccggatatcctcaactacgatcaggtcgtgaaggtgaccggctcgttcaaaaccccgatgggctgccgcagcttcctcggcgtgtgggaaaacgaggacggcgaacaggtgcacgatggccgcaacaacctcggcgttatcagcctcaacctgccgcgtattgccctggaagcccgcggcgacgaagctgtgttctggaaacttctggatgagcgtctgcagctggcgcgtaaagcgctgatgacccgcatcgcccgtctggaaggagtgaaggctcgcgttgcgccgattctgtatatggaaggggcctgcggcgtgcgcctgaaagcggatgacgacgtttcggagattttcaaaaacggccgcgcgtcgatttctcttggctatatcggtatccatgaaaccatcaacgcgctgttcggcaataagcctatgtacgatagcgaagcgctgcgtgaaaaaggcgtcgccatcgttcagcgtctgcgcgaagcggtagaccagtggaaagacgagaccggctacggctttagcctgtacagcacgccgagcgaaaatctctgcgaccgcttctgccgtctggacaccgctgagttcggcgtgatcgaaggcgtcaccgacaaaggatattacaccaacagcttccacctcgatgtggagaagaaggtgaacccgtacgataaaatcgattttgaagcgccttacccgccgctggctaacgggggctttatttgctacggcgagtacccgaatattcagcacaacctgcgggcgctggaagacgtgtgggattatagctatcagcacgtgccctattacgggaccaatacgcctatcgatgagtgctacgagtgcggttttaccggtgagttcgagtgtaccagcaaaggcttcacctgcccgaaatgcggcaaccacgatgcctctcgcgtgtcggtaacccgccgggtatgcggttatctcggaagcccggacgcccgcccgttcaacgccggcaagcaggaagaagtgaagcgccgcgtgaagcatctgggcaacgggcagatcggttaa

SEQ ID NO: 176166 - DNA, 744 bp, Klebsiella oxytoca
atggatatcgtaggacagttacaggaaggcatgactcgcttaagcgctcaggaatcgaaggtcgcggcatttattctgcagaatttaagttttaccgccagcgcctcgattgatgaactggcggcgcgcgctggcgtgagcgcagccacgattacccgctttgcccgctccgtaggctgcgaggatattcgtgatttgcgtaagcagctggcgcaggcttgcgaacggcgcaccggttggctaaacgaagagagcgccgcgctgcccgccgcgtggcgcgacaaattaagcctgattagcacaagtctggaacaacagctggtaagcacccccgaatctacgctgcaaaagctgcgcacgcgtctgcaaaatgcccgcgccgtacactgtttcgcccttggcgcacaggatattgcgctggccacgctgctccagcaccagttgctctccatcgggatcgtgatgaatctctgccaggacagcgccctgatgcgcatgatagccagtacccttagtgacgatcatcttctgctggtgctggcaaccggcgaggccgatgcgattttgcagggcgcgaccctgctggcccgggtacaagaagcgacaattttcgccctcactcccgccgaccattcattaagcaatatggcctccgcgctgctgcccctgcccgagaatgcacaagccgcccgctacgccctgctgctgctggtcgacctgcttaacgacgcgctgctcgcctga

SEQ ID NO: 176167 - DNA, 309 bp, Klebsiella oxytoca
atgccacgtattgtcctgtgctgcgccgctggaatgtccaccagcatgctggttaacaaaatgaaagccgaggcgcaacagcgcgcgctggcgctggagatttacgctgtacccgtcgccgagtttgagcgcgagttgcccaatgccgacgtgattttgctggggccgcaggtgaaatatgaagcggcccggttgacggagcttgctgccccgcacggaaaagccgtggcggtgatcgacatggcggattacggcatgatgcgcggggccgccgtactggataaagcgctcgctctgctgaaccactaa

SEQ ID NO: 176168 - DNA, 1308 bp, Klebsiella oxytoca
atgcaagcattgaaaatagctgtaatcggcggcggcagcagctatacgccggaacttatcgaaggcatcatccttcgccatcagcagattccggtcacggagctggcgctagtcgatgttgacgccgggcgcgagaaagtggcgattatcgccgcgctgacccagcgtatgtttaagcgccatggcctcgaacaggttaaggtcagcgtgcatttcagcctggatgaggccattcgcggcgctaaatttgtgctgactcagctgcgggttggtcagctggcggcgcgggcggcggatgagcgtctggggctgaagtatcagctgctgggccaggaaactaccggcgtcggcggatttgccaaagcgctgcgcactattccggtgattttacaggttgcccgcaaggtggaagcgctggcgcccgatgcctttatcctcaattttaccaatccggccgggattgtgacggaagcggtgagtcgctacagcagcgccaaaatcatcggcctgtgcaacgtgcccatcaatatgcagcatatgattgccggaatgctggacgcaaaagaagaggaggttcggctgagcttcgccgggctgaatcatatggtctgggtacacaaggtgatgcaggggcgggaagaggtgaccagcaaggtcatcgacatgctgtgtgacggtcaatcgctctcgatgaacaatattcaatcgctgccgtggccggcggagtttctgcgggccctgaaggcgatcccctgtccctatcatcgctattactggctgacgccggcgatgctggcggaagagattgaagcggcaaaaaccaaaggcacccgcgcagagcaggtgatgaaggtggaacaggagctgtttgatatctatgcccggcccgatctggatgaaaagcccgaacagctgagcttccgcggcggtgcgtactactccgaagtggcggtggagctgattaacgccatctacaacaatcttggcaaggagatggtcgtcaacacccgcaacaacggcgcgattcacggcttcgatgatgatgcggtggtggaaattaacagcattattgacgcgcagggcgcacgaccgctggcctttggcgcgctgccgccgatcatgaacggactgacgcaacaggtgaaagccttcgagcgcttgacgattgaggccgcggtccacggctgccgggatagcgcgctgctggcgctggtgagtaacccgctggtcgggaatgtgaccgatgcccgggcgctgcttgatgaggtgttaaccatcaaccgcccctggttaacgcagtttaactaa

SEQ ID NO: 176169 - DNA, 1356 bp, Klebsiella oxytoca
atgtctcgtacttcatttattgaacgctatgtcattcccgccgcgctgaaaatcggcgggcagaagcatgtcctgtcggtacgtgacggcattatccttaatatgccgtttatgctgatcggttcgtttttcctgatattcgcttatctgccgatccctggttacggtgagctgatggccagcgtgtttggcgatgcctggcgcgataagatgctgtacccggtcaaagcgacctatgacatcatggcgctgctctccgccttcggcattgcctaccggctggcggagaaatatcgcaccctggatccgctaagcgccggggcgatgtcgctggtggcgtttgtgatgacaatcccccaggtgacgctctttacgccggcagacggttcagcggcgcaaatcgtcaaagacgtgctgccggtggggatgattggcagccagggactgtttgtggcgattgtgatttcgctgctctctacagagatttatcgcctggtggccagccgtaatctggtgatccgcatgccggacggcgtaccgcccgcggtggcgaaatcttttctcgccctgatccccggtttctgcgtgctggccgtggtgctggcgctgcgcctgatcgttgaagcttcgccgttcggcgatatcaatagcatgattaccacccttatcggtattcccatgtcgcacgtcggcggttcgctgccggggatgattatctcggtgatcctgattggtatcctgtggaccctggggctgcacggcgacaccattgtgctggtgtttattcgcccggtctggctgtcgaatatgtcggaaaacctggaagcgtttcagaatggactgccgatcccgcatatcattacccagcagttttatgatctgtggattgcgcccggcggtaccggtgcgctgctggggctggtgatttttatgctgctgcgcagccgtagccagcagatgaaacagctgggaaaaatcgccgcgccgggggcgctgtttaatatcagcgagccgatggtattcggcattccgctggtgatgaacccgtactttttcctgccgtttattttgacgccggtcctgctggtgattgtctcgtataccgcgatggccaccgggctggtaatgaagccggcggggattgcgctaccgtttaccacgcctatttttatgagcggctatctggcgaccggagggcatatttccggcgcggtgctgcaggtggtgaacctggcgatctcgctggtgatctactatccgttcttcctggtatgggatcgcctgaaggcgaaagaagagcaggcgtccgcgcagccggaggccagcgcgacgctgtcggcggctgaccgtatttaa

SEQ ID NO: 176170 - DNA, 1656 bp, Klebsiella oxytoca
atgaatacccttcccctctggtggcaaaacggcgttatttatcaaatctatccgaagagtttccaggatacgaccggcaccggtaccggcgatctgcgcggcgtcacctcccgcctcgactatctgcaaaagcttggcgttgacgctatctggctgacgccgttctatgtctcgccgcaggtggataacggctacgatgtggccaactataccgctatcgaccctgcctacggcacgctggacgatttcgatgagctggtggcgcaggcgaaggcgcgaggaattcgtatcgtgctggatatggtgctgaaccacacttcgaccgagcatgcctggttccgggaagcgctcagcaaagagagtccgtatcgccagttctatatctggcgcgacggcgagccgaccaccccgccgaacaactggcaatctaagtttggcggcaacgcctggcagtggcacgccgaaagcgagcagtactatctgcatctgtacgccgttgagcaggcggatctgaactgggaaaaccctgccgtgcgcgcagaactgaaaaaagtctgcgaattttgggccgatcgcggcgtcgacggcctgcgcctcgacgtgatcaatgttatctccaaagaccagtccttcccgtccgataccgctggcgatggccgccgcttttataccgacggtccgcgagcgcacgaatttttgcaggagatgagccgcgatgtcttcaccccgcgaaatctgatgacggtgggcgaaatgtcctccaccacgcttgaacattgccaaaaatatgcggcgctcgacggcagcgaactctcgatgacctttaacttccaccatctgaaggtggactaccccggcggagagaagtggacgctggcgcgaccggattttgtggcgttgaaatcgctgttcaggcactggcagcagggaatgcacaatcgcgcctggaatgcgctgttctggtgtaaccacgatcagccgcgcatcgtctcccgtttcggtgatgaaggggaataccgcgtcccggcggcgaaaatgctggcgatggtgctgcacggcatgcagggcacgccctatatttatcagggcgaagagattggcatgactaatccgcactttacgcgcatcaccgattatcgcgacgttgagagccacaacatgtatatcgaacgcgcggctcaaggccgggacgcggatgaactgttggcgattctggccagtaaatcgcgcgataacagccgcacgcccatgcagtggaaccgcggtgaaaacggcggattcaccgcaggcgagccgtggattgcgctgtgcgacaactatcgcgagattaacgccgaagcagcgctggcggacccggaatccgtgttttatgcctatcagcagctgattgcgctgcgcaagagcacgccggtgctgacctggggcgattaccaagacctgctgccggaacatccgtcgctgtggtgctaccgccgtcagtggcagggacaaacgctggtcgtcgtggcgaacctgagccgcgagttccagcgctggcagccggaagccatgagtggcgactggcggacgctcatgagcaactacgcggaagcggcgaaccgccctgccgatatgaccctgcgcccgtttgaagcggtatggtggctgcaggagtaa

SEQ ID NO: 176171 - DNA, 1419 bp, Klebsiella oxytoca
atgagtaaagtaaatcagcaggacatcgataaacttatcgaactggtgggcggacgcgataatatcgccaccgtcagccactgtattacccgtttgcgctttgtgctgaataatccagccattgccaaaccgaaagaaattgaacaactacgcatggtgaagggctgctttaccaacgccggtcagttccaggtggtgatcggtaccgaggttggcgactactataaagcgctactggcgaccaccggccaggccagcgcggataaagagcaggccaaaaaagccgcacgccagaatatgaagtggcatgaacagctcatttcacatttcgcggagatcttcttcccgctgctacctgcgctgatcagcggcggcctgatcttaggcttccgcaacgtgatcggcgatctgccaatgagcaacggccagacgctggcgcagatgcatccgtcgctgaaaaccctttatgacttcctgtggctaattggcgaggcgatcttcttctacctgccggtgggtatctgctggtctgcggtaaagaaaataggcggcacgccgatcctcggcatcgtgctgggcgttacgttagtttctccgcagctgatgaacgcctacctgctgggtcagcaggtgccggaggtatggaacttcggcctgtttacgattgagaaagtcggctaccaggcgcaggtgattccggccttgatggcggggctggcgctcggctttattgaaacgcggctgaaacgcatcgtgcctgactatctttacctggtgatcgtgccggtctgttcgctgatcctggcggtcttcctcgcgcacgcctttatcggaccggttggccgcatgattggcgacggcgtggcctgggccgtgcgtcatctgttaaccggcagctttgcgccgattggcgccgcgctgttcggcttcctgtacgccccgctggtgatcaccggagtccatcagaccacgctcgccatcgatatgcagatgattcaaagcatgggcggtacgccggtatggccgctgattgcgttgtccaacatcgctcaggcgtcggcagtggtggggataatcatcgccagccgtaaacagaacgaacgcgaaatctccgttccggccgccatttccgcctatctcggcgtgacggaacccgctatgtacggtatcaatctgaaataccgcttcccgatgctttgcgcgatggtcggctccggtcttgccgggctgctgtgcggactgaacggtgtgatggccaacggcatcggcgtcggtggcctgccgggcattctctctattcaacccacctactggcaggtttacgcactggcgatggccattgccgtgattgtgccgattgtcctgacgacggtcgtttaccaacgcaaattccgccagggcaccttacagattgtctga

SEQ ID NO: 176172 - DNA, 948 bp, Klebsiella oxytoca
atgcaaaaccggctgaccatcaaagatatcgcgcgcttaagcggcgtcgggaaatcgacggtatcgcgcgtgcttaataacgaaagcggcgttagcgaacgtactcgccagcgagtcgaagcggtgatgcagcagcacggtttttcaccctctcgttctgccagggcgatgcgcggccagagcgacaaagtggtggcgattatcgtcacgcgtctggattcattgtcggaaaaccttgccgtccagaccatgctgcccgccttttacgagcagggctacgatccgattatgatggaaagccagttctccccggcgctggtagaggagcatctcggcatgctcgcccggcgcaatatcgacggcgtggtgctgtttggttttaccggcatccatgaagagatgctcaccccgtggcgggagacgctggtgctgctggcccgcgacgcgccgggcatcgcctccgtgtgctatgacgatgaagggtcgatcaggatgctgatgcagcgcctgtacgatcgcgggcatcgccacattagcttcctcggcgttccgcacagcgacgtcaccaccgggcagcgccgccaccaggcctacctcgatttctgccgtcaaaagcacctctcgccccttgccgcgctgccaggcctgggcatgaagcagggctacgaaaacgtcgcctgcctgctgtcggctgaaaccagcgcgctggtctgcgccaccgacaccctcgcgctgggggccagcaaatatctccagcaacagggtatcgatcatctccagcttgccagcgtcggcagcacgccgctgatgaagtttctccacccggagatcctgaccgtcgatcccggctacgccgagtccggacgccaggcggctaagcagctgatcgagcagatcgccggcagtcgggagcctcgtcaaatcgtcattcccgccgtactgaattaa

SEQ ID NO: 176173 - DNA, 2709 bp, Klebsiella oxytoca
atgttgaaaaattttacccgccagctgttcgcccagcttggccgccatttaccgcatcgtttagtccagcgcgatccgcttcctgatgcccgcaatatggcgagcgcgccaatccccgattctcttggcaagcagtgcctgaacgtcgcggcaatggatgataatgaaatctggcgcgctttcgccagccatccggaagggctcaatgcaggcgaagtggcgcagaaaatcgcccggtatggcgaaaaccagatcccggcgcagaagccgtcaccctggtgggtgcatctgtggagctgctatcgcaaccccttcaacctgctgttgaccgtcctgggtatcgtctcctactcgacggaagatctgtttgccgcggcggtcatcgccctgatggtggggatctccacgctgctgaactttatccaggaagcccgctcgaccaaagcggcggacgccctgaaggcgatggtcagcaataccgcgacggtactgcgggtggtgaatgagcagggtgaaagccgctggtgcgagctgcccatcgaccagctggtgccgggggatatcgttaagctatcggcgggagacatgatccccgcagacctgcgcgttattcaggcgcgcgatctgtttgtcgcccaggcatcgttgaccggtgaatcgctgccggttgaaaaagtcgcccatacccgcgacccgctgcagacgaacccgctggagtgcgacactctgtgctttatgggcaccaacgtggtgagcggttcggcgcaggcgattgttttcgccaccggcggcggtacctggtttggtcaactggctggccgcgtcagcgagcaggaaagcgagccgaacgcctttcagaaagggatcagccgggtcagcatgctgctgatccgctttatgctggtgatgacgccggttgtgctgctgattaacggctataccaaaggcgactggtgggaggcggcgctgttcgcgctctccgtcgcggtgggtctgaccccggagatgctgccgatgatcgtcacctcgaccctggcgcgcggggcggtgaagctgtcaaaacagaaagtgatcgtcaagcacctcgacgcgatacagaactttggcgcgatggatattctgtgcaccgataaaaccggtaccctgacgcaggataaaatcgtgctggagaaccacaccgatgtctccggcaaggtgagcgaacgcgtgctgcatacggcctggctgaacagccactatcagaccggactgaagaatctgctcgataccgcagtgctggaaggcgttgaacaggagtcggcgcgcgggctggcggaacgctggcagaaagtggatgagatcccgttcgattttgagcgtcgccgcatgtcggtggtggtgcaggagcagagcaacgttcatcaactgatctgcaaaggggcgctgcaggagatcctcaacgtctcgacccaggtgcgctataacggcgacatcgtaccgctggacgacaccatgctgcggcgcatccgtcgggtgaccgacagcctcaatcgtcagggattgcgcgttgtggcggtggcgacgaagtatctgcccgcccgcgaaggcgactaccagcgcgcggatgaatccgacttgatccttgaaggctatatcgcctttctggatccgcctaaagagaccacagccccggcgctgaaagcgctgaaggccagcggtattacggtcaaaatcctgaccggagacagcgagctggtggcggccaaagtctgccacgaagtaggtctggatgcgggtgaagtggtcatcggcagccaggttgaagcgctgagcgatgatgaactggccgagctggcaaaacgtaccaccctgtttgcgcgcctggcgccgttgcacaaagagcgtatcgtgactctgctgaaacgcgaaggacacgtggtgggatttatgggcgacggcattaacgacgccccggcgctgcgcgcggcggatattggtatttccgtcgacggcgccgtggacattgctcgtgaagcggcggatatcatcctgctggagaagagcctgatggtgctggaagagggagttattgaaggccgccggaccttcgctaatatgctcaaatacatcaaaatgaccgccagctccaacttcggcaacgtgttcagcgtgctggtggccagcgccttcctgccgtttctgccgatgctgccgctgcatctgctgatccagaatctgctgtacgatgtctcccaggtcgccattccgtttgataacgttgacgatgagcagatccgtaaaccgcagcgctggaacccggcggatctcgggcgctttatggtcttctttgggccgatcagttcgatattcgatattctgacgttctgcctgatgtggtgggtattccacgccaatacgccggaacatcagaccctgttccagtccggctggtttgtggtgggcctgctgtcacagacgctgatcgtgcatatgatccgcacgcggcggatcccctttatccagagccgcgcggcctggccgctgatcgtgatgacgctgctggtcatggtggttggggtagcgctgccgttctcgccgctggcggggtatctacagcttcaggcgctgccgttaagctacttcccgtggctgattgctatcctggcgggctatatgaccctgacccaaatggttaagggcttttacagccgtcgctacggctggcagtga

SEQ ID NO: 176174 - DNA, 387 bp, Klebsiella oxytoca
atgtctaaaactatcgcgacggaaaatgcgccagcagccatcggcccgtacgttcagggcgttgatctgggtaacatgatcatcacttccgggcagatcccggtagacccgaaaaccggcagcgtgccggaagaggttgcagctcaggcgcgtcagtcgctggagaacgtgaaagctatcgtcgaagccgcgggcctgaaagtgggcgatatcgttaaaaccaccgttttcgtgaaagacctcaacgatttcgcaaccgttaacgctgcgtatgaagccttcttcaccgagcacaacgccaccttcccggcgcgctcctgcgtagaagtggcgcgtctgccgaaagacgtgaagattgagattgaagcgatcgccattcgccgctaa

SEQ ID NO: 176175 - DNA, 1455 bp, Klebsiella oxytoca
atgcaactgaagaaattatcgatatataccgccgcattattatttaccacctcggcgttggctcatggctacgtggcgtttccgcccagtcgggcctatcaatgtaatacaggcaaaaacagcgactgcggttcagtacagtgggagccgcaaagcattgagcaaacgagcggttttcctgaaggcgcaatgccgccggacggtcaactggccagcgcgggtaaagccaacttctcgcagcttgatagccagagcccgactcgctgggctaaaagcgcaataaagagcggggaaaataacttcatctggcaccattctgccccccataaaactaccaactggcgttattacataaccaaacagaactgggaccaaaataagccgctgacgcgcagcgattttgaaagtaagcccttctgtcaaattgacggtaacggcatgacgccggctattgaggtcacccactcatgtaatgtgccagagcgtaccggttatcaggttatttatgcagtctgggaaatcgccgatacggcaaatagtttttatcaggccattgacgtcgattttggcggtaccggcgatgacgctgagaacggttccctctggacaacgcagcttaccggtcagctgagcggaaaagatcttcatgctggtgataaagtcattgcccatttctttaatgccagcggagaggttcattcgctgcaaacggaattgaccattgccagcgaagcgcaagggaaatccagccaatggtcttacgatttggcggaagtcattaataccgcacaccatgatagcctgcgtgccggagtaaaagacggcagtggcaacattaatcccatctatggcgttaaccaggtgtatgcgccgcaaggcagcgcgttgcaaagcgtcacgctgagttatagcgaatcgcaagcggacgataccgcgaaagaatccctgagcctcagcaacgtcgccgcaacccccatcgaaaacggcaaagcaacggtgactttcaacgccgcggccaaaggcgaaatgcatctcaccgccgtcgtcagcgatcatgcgggtgcagagaaagggagtctccagcaaacgatagataatcgctctctggcgttatcgattccactgaccaacgttcaggcaggccatcatatgctgcgctactcagccagtaatgcgcagggcgccatcatcagccagggtgtgatcaacctgatgctggaagagaagagcgaaccaacgccagcgcctgcgggaaactacgattataccttcccggataacctgaaaagctatacggcgggaacgaaggtcatgcagcctaaaaatggcaaagtgtaccaatgtcgtccgttcccctacagcggctactgcgtgcagtggagccaacacgccagccagtacgagccgggggttggctctgactgggcgatggcctggaccgaagtcgcccaataa

SEQ ID NO: 176176 - DNA, 462 bp, Klebsiella oxytoca
atgacacacgacaataaattacaggtagaagccatcaaacgtggcaccgttatcgaccatatcccggcgcaggtcggttttaagctgctgacgctgttcaaactaaccgaaacggatcagcgcatcaccatcggcctgaacctgccgtcaggcgaaatgggccgtaaggatttaatcaaaattgagaacaccttcctgaccgatgagcaggtcaaccagctctccctgtatgcgcctcaggccacggtgaaccgcattgatgagtatgaagtcgttggtaaatcccgaccgaatctgccggaccgtatcaataacgtgctggtatgcccgaacagcaactgcatcagccacgccgagccggtgtcctccagctttgcggtgaagaaacgtgaaaacgatatcgcgctgaagtgcaaatactgtgaaaaagaattttcacatcatgtcgtgctggcaaactaa

SEQ ID NO: 176177 - DNA, 936 bp, Klebsiella oxytoca
atggctaacccgctattccaaaaacatatcatttccataaacgatctcagccgcgaagaccttgaactggtactggcgaccgctgcaaaactgaaagcaaatccacagccggagctgctcaagcataaagtgattgccagctgcttttttgaagcgtcgacccgcacacgcctgtcttttgaaaccgccatgcaccgcctgggcgccagcgtggtcggtttctcagacagcagcaacacctcgctgggcaaaaaaggcgaaaccctggccgacaccatctcggtcatcagcacctacgtcgatgctatcgtgatgcgccacccgcaggaaggcgcggcgcgcctggcgaccgagttctccggcggtattccggtactcaacgccggcgatggcgctaaccagcatccgacgcagaccctgctcgatctcttcaccattcaggagacgcagggccgtctggaaaatcttaacgtggcgatggtcggcgacctgaagtatggccgtaccgtccactccctgacgcaggcgctggcgaaatttaacggcaatcgcttctactttatcgcgccggacgcgctggccatgccgcagtacattctcgatatgctcgacgaaaaaggcattgcctggagcctgcataacgcgattgaagaggtgatggaagaggtggacattctgtatatgactcgcgtacagaaagagcgtctcgacccgtcagaatatgccaacgtcaaggcgcagtttgttctgcgcgccgccgacctggaaggcgcccgtgagaatatgaaggtgctgcatccgctgccgcgcattgacgaaattaccaccgatgttgataaaacgccgcacgcctggtacttccagcaggcgggcaacggcatcttcgcgcgccaggcgttactggcactggtactgaatagcgatctggcactgtaa

SEQ ID NO: 176178 - DNA, 453 bp, Klebsiella oxytoca
atgatcgttggaaatattcaccatctgcaaagcgggttgccggagcctctgcgcaaagctattgaatacgtgaaagcccaagtcaccgacgcgacgccgctgggtaaacatgatattgacggtaacaatctgttttatctcatttctgaagatactaccgagccgatggccgaccgccgcgccgagtatcacgcccgctacctggacatccagattgtattgaaaggtcaggagggcatgacctttagcgttctccctgccggcgagccggataccgactggctggcggataaagacatcgctttcctggctgaaggggcgcaggaaaaaaccgtgattctcagcgaaggcgactttgtcgtgttctatcccggcgaagtgcataagccgctatgcgcggttggcgcaccggcgaaggtgcgcaaagcggttgtgaagatgctgatggtttag

SEQ ID NO: 176179 - DNA, 975 bp, Klebsiella oxytoca
atgaatactaaagaaataattaatgccgttgcgaaagagatagaagataaaggcggaatccgccaggtgttccttgtggcctgcggcgggtcattagtggatatgtatccggctaaatactttcttgatagcgaggcgacaacgcttcatgtcggcatgtataccgccaatgagtttgtctacgcgacgccaaaaacgttgggggtgaattcgctggttatcgtctgttcgcacgggggcaacacgccagaatccgtcgctgcggctaagcttgcacagcagcatcaagcgcatactattacgctgactcacaacgctcaggcacagctgatcgaatacgccagccacaacattctctatgcctggggtaacgataccaatgtggtcgataatccgatggcgattatcctcaatctgtgcgttgatacgctgcagcaggttgaaggtttcgataattacgctgatttccaacagggaatggcccaaattaacggcgtcattgctcatggccgtcagcaggttgcggatcgctgccagcgttttgcccaaaaatatcaggatgaaaaactcttctatatcctctccagcggagcttcttacggccatgcttatggttttgctatctgctcactaatggaaatgcaatggctacatgccgcacctattcactccggtgagtacttccacgggcctttcgaagttacggataaagagacgccgtttattttattaatgaacgaaggccgtacgcgggcgatggatgagcgagctttggtcttcctcaccaagtacgcagagaaagtggaagtcgttgatgctaaagaactgggtatcggggttctccctccgtcagtcgtggagtttttcaacccggtgctgttttacagcatcatgtgtgaatatcgttctgcgcttgccgacattcgtcagcatccattggatacccgccgctatatggggctggtggaatactaa

SEQ ID NO: 176180 - DNA, 834 bp, Klebsiella oxytoca
atgatgaatgtgattggaattggcgataacgtcgtcgataaatacgcccatactcagaccatgtatcccggtggaaatgcgttgaactttgccgcttatgcggccatgttgggacacaatgcggcctatctggggatttttggtaatgatgccgctgcggagcacgttatgcaggtgctggataaagttggcgtcaagtggccccactgtctgcaggtggccggggagaacggctgtgcgcagctgaaaatcgaagagggagaacggatatttcttggttcgaacgccggggggattcgtaagacaacttcgatggattttatttttcagcatgagcaatacctgcgtgagtttgatctgatccatagcggttgttacagctacatggagacgcaattacctcagttacgcaagctcaacattcctgtctctttcgatttttcagatgactttgtactggagcaggcgctgccgctgtgccgctacgtcgacttcgcattcttctcatgcgctgactacagcctggcgcaaacgcgtgaaattgtgcaacaggcgcaggccagcgggagtcgcattgtctgcgcgacgcgtggggatgaaggcgcgattttatttgacgggcaggattggtatcagcaggcgcccgattacgtcactccagtcgatacaatgggcgcaggtgatgcttttattaccgctttcgtttgccattttctggcccaacctacgggtaacaagcgcgaagcgattaccaatagcctgcaaaaagcagcagctttctcggcacaaatttgcctgaaagaaggggcgtttggctacggggctcactactaa

SEQ ID NO: 176181 - DNA, 1566 bp, Klebsiella oxytoca
atgcatagtgaagctgctgatttgattttacgttctgatgctatttttactgctgccagaaatgagctatttagcggatatgtcgtcattaaaaatggcgctatcgcggcgatgatagcgaatggggaagatattcaaccctggagaggtgaaagtactcgctttatcgaacttggcgatcgcctgatttgtccgggattttgcgataatcacacgttttttaccggctatatgagcatgcggcgtggcgtcgatctccatgccgcccgcgacagtaatcatgctcttgaactactacaggctgcagaaaatcttctccctgaggggaaaagcctctatggctggggctggtctgttgcccgttggggagcggtgcctgatgccaggttactggatgacgctttcccgcagaggccggttgtcgccattaacgatgacaaaagctattgctggatgaaccgtgccgccgtggagctttatggctttaccgctgaagagtgcagcgcggaggcgagaatcgcattattggatgagatgctggctgataccgcacagttaaaaaaagaaatgcgggcatttatgacccgacttgccggacagggaatcacggcgataaaagacgtttgtttcaacgatgcgccgcggttgatgaatgcctgggatgaactggaaaaagaggatgcgctgtcgctgagggtgagcattgtttctcagcccgtatctgcgcctgtcgatcttgctttcggtgaacaggcccgacgccgctttcattcgccatggctgcggtttcatggttttaaatttatggtcgatggcgttattgccgatcataccggcgatatgatttacccctatgccgatcgtcccggcacgaacaatgaaaggcccgttgactatgatgccctgcgccagcaggttttgctggctgatgctcgtggattcaactgctgtatgaatgcggagggcgatgccgcaattcgccgctgtatagatatttttgccgaatgccgtcagcgtcacccgcagagtgtgatcagacattctctgagcgatctggaatgcccgcatccaaacgatattcccagaatggctgagctcggcctctttgccgaagtttatgcacaaattctgctccttaatccctgcgaagccgaagcctatatgcgcgaacgctatggagaagagcgcgaagcgcaattctacgattatgccgcactattcggggctggcgtaacggtcactattggtaccgatctgcccctgtttattccttctgttcctgacgcgatgtatgccgcctgctgtcgtcagttccctgatggttcacccgtaaatggctggtaccgcgaacgcggaatgacacgacagcagctcttaacggcctggacgttgaatagtgctcgacatcacggcatggaagatatgaccggtagccttgagccggggaaacgtgcggatgtcgcggtttttgaccgtaatttgttgagctgcccgaatgatgagttacggacttccaccgttgtactgaccctggtggatggccgtattacccatgaccttctgtga

SEQ ID NO: 176182 - DNA, 1419 bp, Klebsiella oxytoca
atgcgtattgcaaaaataaagtgggcgatgccacactgctacgctctgattttcttcattattatattagtagcgctgctgacatggtgtattcccagcggcagttttgattatcactcagtgactttacccggcggtgaaacgaaaacattagtgatcccggggtcttatcatctgctggaaaaagtcagcagcgagggcgatttacgtcagggtattgccgccgtactggccgcgccgatggagggaattatcaaggccgccgacgtagtggcatttgtactcattgttggtggtgcttttggcgttattttacgtactggcgctattgagcgggggctggtggcgctggctgaacgtctggctggtaaagggattctggttatccctatcgcaatgaccttgtttagcctggggggcgcaacttttggtatgagcgaggaggtgatccctctttatgcgatctttatatctctcatgtttgcgctgggttatgactcaatgaccgcgatcctgattctttttctgggaacccagattggctatgttggcgcaatgaccaatccgttctctgtactcattgcccagggcgtagcgggtattcagggaaatccgcagctttggctgcgtgccatcgcatggctggtcttcacattgctggcgatgacttacaccatgtggtacgcacgtcgtgttaaacgcactccacaaaagtcgccggtatatgagaatgattgccgcaaccgtgagcagtttttgtcgatacaggatacgtcggtccatttttccatcgccgatcgagtgattatcatcgcttttgtgctggcgctgaccatcatctcatgggggttaatcacgcgtggctggtacatggttgagatcggctccgtgttcctggctctggggctattttctgggatcgtcgggcgcatgggtattagcgggatggccgacagctttgtcgaagggtgtaaagagtttgtttacgccgccgtagtgataggactcgcgcgcggtattttggtggtggcggagaacggacgaattatcgacacgttgctctttggcttgtcggaaatgctggaagggttgccgcagtacgcattcaccactctgatgctattagggcataacgtcatcaccttttttgtcccctcctcttcgggcgaggctgcgctcactatgcccgtgctggcgccattaggcgatttagtgggtatcaataaagaggcgatggtaatggcttatcaatttggcaatggcctgacgaacctggtttctcctaccggtggtgtattgctggccgggctgtctattgcgcgcattggatttggtcagtggttaaaggcgattgcgccgctgtttccggtgctgtggatagtcagcgccgtgtttgctgcgatttcggcctgggtctaa

SEQ ID NO: 176183 - DNA, 726 bp, Klebsiella oxytoca
atgtcgaattttggactgcaacagaatacttccgtaccgttatacaggcagcttaaagataaaatcctcagcgatatctcgtccgggaaactcgctgaaggagagaaaatccccaccgagattgagctcagcgaactttacaatatcagccgcattacggtgcgcaacgcagtgaaagagctggtagccgaaggctatttggtgaaaaagcaggggaaggggacttttgtctgtctgcctaaaattgagcgtaaagttgtgcacctgcttagctttactgccgcatgcgatgctaaccatctaccaacccacagcgtagtgactcgtcgtgagattctgccggactatcgtaatgcgcgtcagcttcttgagcttgagagggatgattccgtgctttatatccaacgcctcaggatcgctggcgatgcgccgttaatgttagagaataattactactctctgaaacgattaggatttttacagcaggaagatctcagcgggtcgctttatcagctattgcgtgataaatacgccatcgtgcctacctatgcgggtgaaacgacggtagagatggtgcgcgcgcattctgacaacgcaccgctgctgcagcaaccgcccggcgaaccgttattcctgatgaaaacgctgattctggatagccagcatcagcctattcactatggagaacagtatattgtcgccgagcgttacacgtttagtttttga

SEQ ID NO: 176184 - DNA, 1005 bp, Klebsiella oxytoca
atgtccgcgttttatcagaagcattttttaaagttgctcgattttacccccgccgaaatcaccgctctgcttgagctggccgccaggcttaaagctgataagaaaaacaatatcgaaattcagcatctcgccggtaaaaacatcgcgctcatcttcgaaaaagactctacccgcacccgatgctctttcgaagttgccgcatttgaccagggcgctcgcgtcacctatctcggaccaagcggcagccagattggccacaaagagtcgattaaagacaccgctcgcgtattggggcgcatgtatgacggtattcaatatcgcggccatggccaggaagtggtggaaacccttgccgagtatgccggcgttccggtgtggaacggcctgaccaacgaatttcaccccacccagctgctggcggatttactgactatgcaggaacacctgccgggcaaagcctttaacgagatgactctggtctacgctggcgacgcgcggaataacatgggtaactccatgcttgaagccgctgcgttgaccgggctggatctgcgtctggtcgcgccaacggcctgctggccggaagagaagctggttgcgcagtgccgcacgctggcgcagaaaaacggcggcaatattacgctaactgaagatatcgctgcgggcgtgaagggcgcggactttatctataccgacgtctgggtatcgatgggcgaagccaaagagaagtgggcggagcgtatcgcgctgctgcgcgggtatcaggtgaaccgcgagatgatggcgctgactggcaacccacaggtgaagttccttcactgtctgcccgcgttccacgacgaccagaccacgctcggcaaacagatggcggcggagtacggcctgcacggcggaatggaagtgaccgacgaggtatttgaatccgcggcgagcatcgttttcgatcaggcggaaaaccgcatgcataccatcaaagcggtgatggttgcgacgctttcccactga

SEQ ID NO: 176185 - DNA, 420 bp, Klebsiella oxytoca
atggctaacccggaattactggaagaacagcgtgaagaaacgcgtctgattattgaagaactgctcgaagacggcagcgatcctgacgcgctgtacaccattgaacaccatctttctgccgatgatttcgaaacgctggaaaaagtggcggtcgaggccttcaagctgggttatgaagtgactgagccagaagagctggaagttgaagagggtgataccgtgatttgctgcgatatcctcagcgaatccgcgctgaatgccgagctgatcgatgcccaggttgagcagctgatgaccctggcggaaaaatacgacgtcgagtacgacggctggggtacctactacgaagatcctaacggggaagaaggcgatgacgacgaagatctcgttgatgaagacgacgacggcgtccgccactaa

SEQ ID NO: 176186 - DNA, 759 bp, Klebsiella oxytoca
atggattacccgcaaatactcgctccgattttaagctttctgcattgcccaacacctcaggcgtggattgatgaagcccgtaaaccggaaaacctcccgctgctgttgaccgaccatatggtgtgcgaactgaaagcggcgcaaaacgccatgctgctggtgcgtcgatacgtcgcggataaagcaggcgcggatgaactgctggcctgcctgaagccgtacgaggactttacctaccgctgggggccggaaccggatttcgtcgcgctgcataagcagataaataaaagcgctatgccgcagaccgacgatccctggggacgtcagctactcgacagcatgatcctgctaatcaaagaagagctgcatcacttctggcaggtgagggaaattatgctttcccgcgatatcccatacgtcaaaatcaccgccagtaactatgctcgcgggctgcgccgggaagtgcgttcgcatgaaccggtcatgttgatcgataaactcatctgcggagcctatattgaagcccgctcctgcgagcgttttgccgcgctggcgccatggctggatgacgatctgcaaaagttttatctgtcgctgctgcgctctgaagcgcgccactatcaggactatctggatttggcgcagaggattgccggggacgatatcagtgaacgcgtacgccagcttggcgaggcggaagcggtgctcattaacgcgcccgaggcggagtttcgctttcacagcggcgtgcccgcctga

SEQ ID NO: 176187 - DNA, 1023 bp, Klebsiella oxytoca
atgaaaaaactctccctcctgctcaccagcagcatgatacttgccggcatggcttccagcgttaacgccggcgaactcgctggcaataccgaaggcgctcagatcatccgcgtggaaaaaacccggggccgtatcgatgcgctcaacgatatcgtatatagccaggtaaaaagcaccgtcgccgttcgtcaactgcatatgtctttgctggtgccgcgtgacggcgatctgaaaccggcaatcgtctatttccccggcggcggtttcaccagcgcggcctggaataagtttatcgagatgcgtatggcgctggcgtcggcgggattcgtcgtcgcggcggcggaataccgtacggttcccgataccttcccggccccgattatcgatggtaaagccgccgttcgctatctgcgcgaacatgcagcggaatacggtatagatccgtcgcgtattggcgtgctgggggattccgcaggcggctatatggcgcagatgctggcgcttaccaatggcgacaaaacgttcgatcgtggcgataacctggcgcagtcatcggacgtgcaggccgccgccacgctgtacggaatttcgaatctgttgaatatcggcgaaggttttccgcaggcgattcaaaaagtgcaccagtcacctgcagtcactgaagcgctgctggtccacggtagcgcctttcgcgactggccgggagcgacgattgccagtgacccgcaaaaagcgctggctgccagcccgatgggccatattcgcggtaaaaagccgccatttttaattatgcacggcagcgccgacactctggtttcaccggtacaaagtcaacagctctatcgcgcgctgaagaaagagggtaacccggccgattacgtgctgctggaaggcacggagcacggcgatgacagctggtatcagaagccggttattgaacgggtagtgaactggtttaaaaccaccctcggcgcgcccaaagccgccgcgacagcagaaaaagataaaaacgccaatctgtaa

SEQ ID NO: 176188 - DNA, 504 bp, Klebsiella oxytoca
atgaatacgagcgcaaccctaccgctaaccctgcgccgcatcacggctaatgataatccggcgatagccgctgttatccgccaggtttccgctgaatatggcctgaccgccgacaaaggctatacggtagccgatccgaatctggatgaactctatgagctatatagccagccgggcgccgcctattgggtagttgagcaaaacggtcaggttgttggcggcggcggggttgcgcctctgacctgtagcgagcccgatatctgcgaactccagaaaatgtattttatgacctccgcgcgcggccaggggctggcgaaaaagctggcgctgatggccctggatcacgcccgccagcagggattcaaacgctgttatctggaaaccaccgctttccttaaagaagcgatcggtttatatgaacaccttggcttcgagcatattgctgagccgctgggctgcaccggccacgttgactgcgaagtcaggatgctgaaagtgctgtag

SEQ ID NO: 176189 - DNA, 2856 bp, Klebsiella oxytoca
atggaaaagacatacaacccccaagatatcgaacagccgctttacgagcactgggaaaagcagggctacttcaaacccaatggcgacgaaagccaggaaagtttctgcatcatgatcccgccgccgaacgtcaccggcagtttgcatatgggtcatgccttccagcaaaccatcatggataccatgattcgctaccagcgcatgcagggtaaaaataccctgtggcaggccggtaccgaccacgcgggtatcgctacccagatggtggttgagcgtaagattgccgccgaagaaggtaaaacccgccacgactacggtcgcgacgcctttatcgataaaatctggcagtggaaagcggaatccggcggcaccattacccgtcagatgcgccgcctgggcaactccgtggactgggagcgcgagcgcttcaccatggacgaaggcctgtccaacgccgtaaaagaagtctttgtccgcctgtacaaagaagatctgatctatcgcggcaagcgtctggtcaactgggacccgaaactgcgtaccgccatctccgatctggaagtggaaaaccgcgagtctaaaggctcgatgtggcatatccgctatccgctggccgacggcgcgaaaaccgctgacggtaaagattatctggtcgtcgctaccacccgtccggaaaccgtgctgggcgataccggcgtggccgttaacccggaagatccgcgctataaagaccttatcggcaaattcgtcattctgccgctggttgaccgccgcattccgattgtgggcgatgaacacgccgatatggaaaagggcaccggctgcgtgaagatcaccccggcgcacgactttaatgactatgaagtgggcaagcgtcatgcgctgccgatgatcaacatcctgacctttgatggcgatatccgcgaaaccgcggaagtttacgacaccaaaggcaacgagtccgacgtctactcaaacgccatcccggcggagttccagaagctggagcgctttgccgcgcgtaaagcggtggttgccgccatcgacgcgctgggcctgctggacgagattaaaccgcacgatctgaccgtaccatacggcgaccgcggcggcgtcgttatcgaaccgatgctcaccgatcagtggtacgtacgtgccgacgtgctggctaaaccggcggttgaagcggtcgagaacggcgacattcagttcgtgccgaagcagtacgaaaacatgtacttctcctggatgcgcgatattcaggactggtgtatctcccgtcagctgtggtggggtcaccgcatcccggcatggtacgacaacgacggcaacgtttacgttggccgcaccgaagaagaagtacgccaggaaaataacctcggcgccgacgtggcgctgcgccaggacgaagacgtgctggatacctggttctcctccgcgctgtggacgttctccactctcggctggccagaaaacactgatgccctgcgccagttccatccgaccagcgtgatggtttccggcttcgacatcatcttcttctggattgcccgcatgatcatgatgaccatgcacttcatcaaagatgaaaacggcaagccgcaggtgccgtttaaaaccgtctatatgaccggtttgatccgcgatgacgaaggccagaagatgtccaaatcgaagggcaacgttatcgacccgctggatatggttgatggcatctccctgccggagctgctggagaaacgtaccggcaacatgatgcagccgcagctggcggagaaaatcgccaaacgcaccgagaaacagttcccgaacggcattgagccgcatggtaccgacgccctgcgctttaccctggcggcgctggcctctaccggccgcgacattaactgggatatgaagcgtctggaaggttaccgtaacttctgtaataagctgtggaacgccagccgctttgtgctgatgaataccgaagatcaggattgcggctttaacggcggcgaaatgaccctgtcgctggcggaccgctggatccttgcggaattcaaccagaccatcaaagcctaccgcgaagcgctggacggcttccgcttcgatatcgccgcaggcattctgtacgagtttacctggaatcagttctgcgactggtatctggagctgaccaagccggtaatgaacggcggttccgagtctgagctgcgcggcacccgtcacacgctggtgaccgttctggaaggtctgctgcgcctggcgcacccgattattccgttcatcaccgagaccatctggcagcgcgtgaaggtcatttgcggtatcactgccgataccatcatgctgcagccgttcccgcagtacgatgcgtctcaggttgacgaagcggcgctggccgataccgaatggctgaagcaggcgatcgtcgccgtgcgtaacatccgtgcggaaatgaacatcgcccctggtaagccgcttgagctgctgctgcgcggctgcagcgatgccgcgattcgtcgcgtgaacgataaccgcagcttcctgttgaacctggcgcgtctggaaagcatcaccgtgctgccggccgatgataaaggtccggtttccgtgaccaaaattatcgacggcgccgagctgctgatcccgatggctggcctcatcaataaagaagatgagctggcgcgcctggcgaaagaagtgagcaaaatcgaaggcgagattagccgtatcgaaagcaaactttccaacgaaggctttgtggcccgcgcgccggaagcggtgatcgccaaagagcgtgagaagctggaaggttatgcggaagcgaaagcgaagctgattgagcagcaggcggttatcgccgcgctgtaa

SEQ ID NO: 176190 - DNA, 444 bp, Klebsiella oxytoca
atgaaaaacgcaacgttctatcttctggacaatgatacgcaacaggatggcctgagcgccgttgaacagctggtgtgtgacattgccgcagaacgttggcgcagcggtaaacgcgtgctcatcgcctgcgaagatgagcagcaggccattcgtctggacgaagcgctctgggcacgccccgcagaaagtttcgttccgcataatctggcgggggaaggtccgcgcggcggcgcgccggtggagatcgcctggccgcaaaaacgcaacagcagcccgcgggatattctgattagcctgcggctaaactttgcagattttgccaccgctttcacagaagtgatagacttcgtcccttatgaagactctttgaaacaactggcgcgcgaacgctacaaagcgtaccgcatggctggtttcaacctgaacacggcaacctggaaataa

SEQ ID NO: 176191 - DNA, 1512 bp, Klebsiella oxytoca
atggagttcagtgtaaaaagcggtagcccggagaagcagcggagcgcctgtatcgtggtcggcgtctttgaaccacgtcgtctctcccccatcgccgaacagcttgataaaattagcgacggttatatcagcgccctgctgcgtcgcggcgagctggaaggcaaacctggccagactttattgctgcaccatgtgccgaacattctgtcggagcgcattctgcttattggctgcggtaaagaacgcgagctggacgagcgtcagtataagcaggttattcagaaaaccatcaatacgctgaatgatactggttcaatggaggccgtctgcttcctgaccgaactgcacgtcaaaggccgcaataactactggaaagtgcgtcaggccgtcgagaccgccaaagagacgctatacagcttcgaccagttaaaaaccaacaaaagcgagccgcgtcgcccgctgcgtaaaatggtcttcaacgttcccacccgtcgcgagctgaccagcggcgaacgcgctatccagcacggtctggcgatcgccgccggcatcaaagcggcgaaagatctgggcaacatgccgcccaacatctgtaacgccgcgtatctggcctcccaggcgcgccagctggccgatacctatagtaagaacgtcattacccgcgttatcggcgagcagcagatgaaagagctgggaatgaactcttatctggcggtcggcaacggctcgcagaacgaatcgctgatgtcggttatcgaatacaaaggtaacccggcagaagacgcgcggcctatcgtgctggtgggtaaaggcctgacctttgactccggcggtatctccatcaagccttcagaaggcatggacgagatgaaatacgatatgtgcggcgcggcggcggtgtacggcgtgatgcgcatggtggcggaacttcagttgccgttgaacgttgtcggcgtgctggccggatgtgaaaacatgcctggcggccgcgcctatcgtcctggcgacgtgttgaccacgatgtccgggcaaacggtggaagtgctgaacaccgatgccgaaggtcgcctggtgctgtgcgatgtgctgacttacgttgagcgtttcgagccggaaacggttatcgacgtggccaccctgaccggcgcctgcgtgatcgcgctcggccaccacatcaccggcctgatgtcgaatcataatccgctggcccacgagctgatcggcgcgtccgaactggcgggcgatcgcgcatggcgtctgccgcttgccgacgagttccaggaacagctggagtcaaattttgcggatatggccaatatcggcggccgtcctggcggagcgattaccgcaggctgcttcctggcgcgctttacccgtaaatacaactgggcgcatctggatattgccggcaccgcctggcgttccgggaaggccaaaggcgcgaccggtcgtccggtggcgatgctgtcgcagttcctgctcaaccgcgccggatttaccggcgaagagtaa

SEQ ID NO: 176192 - DNA, 1098 bp, Klebsiella oxytoca
gtgataatcataagatatctggttcgtgagacgctgaaaagccagttggcgatcctattcatcctgctactcattttcttctgtcagaaactggtcaggatcctcggcgccgctgttgatggcgatatcccgacaaatctggtgctctcgctgttagggctgggcgtacctgaaatggcgcagcttattctgcccctgagtttattcctcgggctgctgatgacgctgggcaaactgtataccgaaagcgaaatcacggtgatgcacgcctgcggcctgagtaaggccgtgctggtgaaagccgccatgatccttgcgctctttacgggcattatcgcggcggtcaacgtgatgtgggccgggccctggtcgtcccgtcatcaggatgaagtgctggcggaagcgaaagcaaaccccggcatggccgcgctggcccagggccagttccagcaggccagcgacggcagcgcagtgctgtttattgagaacgtcaacggcaaccgtttcagcgacgtcttccttgcccaactgcggccacgaggcaacgcgcgcccttcggtggtggtcgcggataccggcgagctctcgctgcgtaaagacggttcgcaggtggtgaccatgaatcagggcacccgctttgaaggcaccgcgatgctgcgcgacttccgcattaccgactttaaaaactatcaggcgattgttggccatcaggcggtggcctccgatccgaacgataccgagcagatggatatgcgcaccctgtggcgtaccgataccgatcgcgcccgggcggagctgcactggcgcttcacgctggtggcaacggtattcatcatggcgctaatggtggtgccgctcagcgtggtgaacccgcgccagggtcgcgtgctgtcgatgctgccggcgatgctgctctatctggtgttcttcctgctgcaaacgtcgattaaatcgagcggcggtaaaggcaaaatggatccgatgatctggatgtgggcggtaaacctgctctatttcgcgttggccgtgctgttgaacttgtgggatacggtgccgatgcgccgcttccgtgcccgttttaacaaaggagcggcgtga

SEQ ID NO: 176193 - DNA, 1083 bp, Klebsiella oxytoca
atgcaggcgtttggcgtacttgaccgttatatcggtaagacgattttcaataccatcatgatgaccctgttcatgctggtttccctgtcgggcatcatcaagtttgtcgaccagctgaaaaaggccgggcagggcaactatgatgcgttaggggccggaatctacacaattctcagtgtgccgaaagatatccagatcttcttcccgatggcggcgctgctcggcgcgctgctggggttgggcatgctggcgcagcgtagcgagctggtggtgatgcaggcttccggctttacccgcctccaggtggcgctgtcggtgatgaaaaccgcgattccgctggtgctgctgaccatggcgatgggcgagtgggtagccccgcagggcgagcagatggcgcgcaactatcgtgctcagcagatgtacggtggttcgctgctttccactcagcagggcctgtgggcgaaagacggccataactttgtttatatcgagcgggtaaaaggtaacgatgagctgggcggagtgagcatctacgcgtttaacgaccagcgccgtctgcagtccgttcgctacgccgcttcggcaaaattcgataccgaaaataagctctggcgactgtcgcaggtggatgaatccgacctgaccgatccgaaacaggtcacggggacgcagaccgtcagcgggacctggaagaccaacctgacgccggataagcttggcgtggtggcgctggatccggatgcgttgtcaatcagcggcctgcacaactatgttacctatctgaagtccagcggtcaggatccgggccgctatcagctcaatatgtggagcaaaatcttccagccgctgtcggtggcggtgatgatgctgatggcgctgtcgtttatctttggcccgctgcgtagcgtgccgatgggcgtcagagtcgtgaccgggatcagcttcggctttatcttctacgtgctggaccagattttcggcccgctcaccctggtctacggcatcccgccgataatcggcgcgctgttgccgagcgccagcttcttcttgctgagcctctggctgatgatgcgtaaatcctga

SEQ ID NO: 176194 - DNA, 1503 bp, Klebsiella oxytoca
atgagctcaccgctgctgattgcacgcacgctggaaaaacagctgcatttattgcccgctatggcgaaccgccacggcttaattaccggcgccacggggaccggtaaaaccgtcacgctgcaaaagctggcggaatctttctcggaaatcggcgttccggtatttatggccgatgtgaaaggcgaccttaccggtatcgctgaggcgggccaaagttcggaaaaactgcaggcgcggctggaaaaaatcggcgcaacggactggcagccgcatgctaatccggtagtgctatgggatatctttggcgagaaaggccacccggtccgcgccacggtttccgatctcgggccgctgctgctggctcgcctgctcaacctcaatgaggttcagtccggggtattgaatatcatcttccggatcgccgacgaccgcgggctgctgctgctcgactttaaagacctgcgcgcgattacccaacacattggcgacaacgccaaagcttttcagaaccagtacggcaacatcagcagcgcctccgtcggggcgattcagcgcggattgctgaccctggagcagcagggtgcagagcactttttcggcgaacccatgctcgatatccaggactggatgcgcgttgatgcgcagggtaaaggggtaattaatatcctgagcgcggaaaagctctatcagatgccgaagctgtacgccgccagcctgctgtggatgctttccgagctttacgaacgtctgccggaggccggtgaccaggaaaagccaaagctggtctttttcttcgatgaggcgcatctgctgtttaacgatgcgccccaggtgctgctggataaaatcgagcaggtcatccgcctgattcgttctaaagccgtcggagtctattttgtttcacaaaacccggcggacattcccgatgcggtgctgggtcaactgggcaatcgggtgcagcacgccctgcgcgctttcacgccgaaagaccaaaaagcggtaaaaaccgccgcgcaaactatgcgcgcgaatccggcgttcagcaccgagcaggcgatccaggagctgggcaccggcgaggcgctgatctcctttcttgatgagaaaggcagcccctcgatagtagagcgggcgatggttatcgcgccctgctcgcgcatgggcccggtcaccgatgacgaacgtaacggactgcttaaccactcgccgctgtacggaaaatatgaagaagagatcgaccgtgaatcggcgtttgaaatgctgcagcagggcgtgcaggccacaactgagcagcagcaatccccgcccgcaaaaggccagccaaacggcgatgacgacggcctgctcggcgggctcaaagatatcctgttcggcactaccgggccgcgcggcggcaaacgcgacggcattgtgcaaacggcagcgaagagcgcggtacgtcaggtcaccaggcagatagtcaggggaatgctgggaagcttacttggcggacggaaacgctaa

SEQ ID NO: 176195 - DNA, 822 bp, Klebsiella oxytoca
atggctattgcagcacagcgtttctgtatcaaccgcaagattgccccttccctcagcattgaggccttcttccggctggtgaacagcctcgggctaaacaaagtcgagctacgtaacgacctccccagcggaaaagtgaccgacgacctgagccaccagcaggttcgtgaactggctgaccgctaccatattgagatcctcactatcaacgcggtttatcctttcaactgccgcaccgcagaggttcgcagcctgacggagtccctgctaaaagaggccaaagccgtcggcgcgaaatcgctggtgctgtgtccactgaacgatggtaccgaggttccggcgagcgaaacccttaacgccctgcgcgacctggcgccgctattcgccttctatggcattgagggactcgtcgagccgctcggcttcccgcaaagctcgctgcgctcctcggcgcaggcgcaaacgctgattcacgacgcacgggtgccgtttaagctgctgatcgatacctttcaccatcatctttatccacaggcggagcaggagtttagccaggtggatatcggcgaaatcggcctggtgcacctttccggcgtagaagatacccgcccgcgcgaaaccctgaccgacaacgaacgcattatgctgaccgaaaaagaccagctgcaaagctgcgagcaggtcaaaaacctggaggcccgcggctatcagggcgtatatgcgttcgagcccttctcaccggagctggcaaactggagcgaagacgatatccgccgcgaaatcgagcagagtatcgcgttaattcagcgccactgcgcctga

SEQ ID NO: 176196 - DNA, 1506 bp, Klebsiella oxytoca
atgactatcacaggaaactttattggcgggaagaccgttaccagcggcagcaacaatacaatgccggttttcgaccccgcgacgggcaaagtggtccgcgaagtcacgttatcgaccgcgcaggaagtctccgatgcgattcaggtggcgcatgatgcttttgatggctggtcgcgtaccacgccgctgcgccgggcccgcgtgctgtttaattttaaaatgttacttgaacagcacgctgaagagctggcggggattatcgtcagcgaacacggtaaagtcttttccgatgcgatgggcgaactgacgcgcggcatggaagtcgttgagtttgcctgcgggattccgcacctgatcaaaggcgagttctcatcggatgtcggcaccggcgtcgatagctattctctgatgcagccgctgggcgtagtggcgggcattacgccgttcaacttcccggcgatggttccgatgtggatgttcccgctggcgctggcctgcggcaacagctttgtccttaagccgccagcgctggcccctggcgctgcggtgcgcctggcggagttgctgaaagaagcggggctgccggacggcgtctttaacgtggtgcactgcagcaatgaagatgctgagcagctgtacaaggatccgcgtattgcggcggtaagctttgtgggatcttccggcgtggcggagcatatttataaaaccgccagcgcttatggtaagcgcgttcaggcatttggcgcggcgaaaaaccacgcgattgtgatgccggatgccgatcttgatgccaccgtgaatgcgataatgggcggcgcgttcggctctgcgggcgagcgctgcatggcgctgccggtggtcgtcgctgtgggcgatgaaacggcagataaactcattgcgcgcctcaagccgctggtggagtccctgaaggtcggcccgggctgtatgcgcggaaaagaagagaacgaaatgggtccggtcgtctcagaggcgcatcagaaaaaagtgctgggatatattgataaaggcgtcagcgaaggggcgacgctggtagttgacgggcgcaagctgcgagttgccggtttcgaagagggttactacgttggcggaacgctgttcgacaacgtgacgccggaaatgactatctggcgcgaagagatttttggcccggtactgggtattgtccgcgtggcggactaccacagcgcgctggagctggtaaacagccatgagttcggcaacggcagcgccgtctttaccagcaacggccacaccgcgcgtgagtttgtacatgatgtccaggccggaatggttggggtcaacgtgccggtacccgttccaatggccttccatagctttggcggctggaaacgctccgtatttggcgcactgaacgtgcatgggccggatggcgtgcgtttctatacgcgtatgaaaaccgccaccgtccgctggccgcagggtcagcaaaccgtatctgaattcagcatgccgacgttaggctaa

SEQ ID NO: 176197 - DNA, 810 bp, Klebsiella oxytoca
atgtctttactggctaaagcaaaaaaagaagggcagattcagcacatcaccccgctgagcgcggggtggaagtacattggttttgatgtctggatgttaaagaaagggcaaaccgttaccctggaaagcggcgatcgcgagctgtgcctggtgctggtcgccgggctggcttcggtaaaaacctcgcaggccgattttccgaatctgggccagcgtatgtcgccgtttgagcggaccccgccctggtcagtttacgtgccgccgcaggataaagtcgaagtgacggcagattctgaccttgagctggcggtatgcagcgccccgggtaaaggaactttaccggctcgagttatctccccgcaggacgtgggcgtagagcatcgcggtaaagggcgtaaccagcggctggtgcacaatattctgccggatagcgcgcaggcggactgcctgctggtggtagaggtttacactgacgaaggagcgaccagctcatggccgtcgcacaagcacgacacggcgctgccgggtcaggaaactcagttggaagagacctactaccaccgtttcgatccgccgcagggttttgccttccagcgcgtctataccgatgaccgtagccttgatgcctgtatggctccctacaaccacgatgtggtcatggtaccgcgcggctaccatccggtagcggcgatcgccgggtatgacagctattatctgaacgtgatggccggtccggatcgcaaatggatgtttacctgggaagaggatcacgcgtggatcaacagccctgattatccccgccacgattaa

SEQ ID NO: 176198 - DNA, 858 bp, Klebsiella oxytoca
atggccaataatccgacccaacttaccatcttgcaggatgaaatcaggcgtcgctacgatacgttaagcaaacgcctgaaacaggtagcccgctatattctcgataacagcaatagcgtggctttcgataccgtggcctctatcgcgcaacaagctgacgtccccccttccacgctgatccgcttcgctaacgcctttggttttagcggtttcaacgaaatgaagcagatgttcaagcagcacctgatggaagagactgctaactataccgagcgcgcgcgtctgttccgccagaccaccacggatgacgcaaccccgccggaaacgccgaccgaaatcctgaatatgttcactatggttaatactcaggcgctgcagcagctggcgatgcagacctccggcgaggatctgcagcgtgcggtcgcgctgttggcggaagcggaaaatatctacgttatcggcctgcgccgctcttttagcgtcgcctcctatctgacctacgccctgcgccatctggaccgtaaagcgttcctgattgacggtctgggcggcatgtttaccgaacagctcagcctggtcgggccgaaagatgtcgtcgtggcggtgagcttctctccgtatgcgcgggaagtggttgaactggtggagctcggcgcgcagcgtaaagcacgtcagatagcgattaccgacagccaggtcagcccgctggcggccttcagcgacgtctgctttgtcgtgcgcgaggcgcaggttgatggtttccgctcgcaggtggcctccctgtgtctggctcagacgctggcggtctcgctggcgctgaacagcagcaaggatgcagaaacgaagcagctggcttaa

SEQ ID NO: 176199 - DNA, 1914 bp, Klebsiella oxytoca
atgaatgcagcagtaaagcgactcgacgtcatctgtattggccgggtggcagtcgatctctatgcccagcagattggcgcgaggctggaagatgttgccagtttttctaagtacctgggtggctcttccggcaacgtcgccttcggcaccgctatacagggattaaaatcggcgatgcttgcccgcgtgggcgatgagcacaatggtcgttttttacgcgaaacgctcagccgcgccggcgtcgataccgaatatctgatcaccgataagcagcgcctgacggcgttagtgatgctggggattaaagatcaggagacatttccactcattttttaccgcgataactgcgccgatatggccctttcgccagaagacattaaggaagagtacatcgcctcctcccgggcgctggcggtaaccggtacccacctttcgcacgccaacacgcgtgaagcggtgctgaaggcgctggagtacgcccgccgtcacggcctgcgtacggcgctggatatcgactatcgtccggtgctttgggggttaacctctttaggcgacggcgaaacgcgtttcattgagtccggtcaggtgaccagccagctgcaggaagtcctgcatctgttcgatttagtggtggggactgaagaggagtttcatattgccggcggcagtaccgatactctgaccgcgctgaaaaacgtgcgtaacgccacgaaagcgacgctggtttgcaaacgcggtccgatgggctgcgtggtgctggaaggcgacattcccgacagctgggatagcgtgccgctgcagcagggcgtgcgcgtagacgtgcttaacgtcctcggcgctggcgatgcctttatgtccggcctgctgcgcggctggcttaacgacgaaggctgggagcaggcctgtcgctacgctaacgcctgcggcgcgctggtggtttcacgtcacggctgcgcgcccgcgatgccaaccaaagccgaacttgacgactatctgtcgcgagcagaatctgtcccgcgtccggatatcgacgctcgcctcaaccatctccatcgcgtcacaagccgccgccaggcgtggccggagctgtgcattttcgcctttgaccaccgtaagcagctggcagacctggcgctggaaaccgggcgtgatgaatcctgtattccgcagctgaagctgctgctgctggcggccgcggaagccgccgcagacgaagccggtcttgacggccgcagcggcattctcgccgatggcacctacggccagcgctcgctcaatgccatcaccggcaagggctggtggattggccggccgattgaaatgccaagctcgcgcccgctgcgcctggaacatggcaacatcggttcccagcttatcgactggccgctggagcacgtcgtgaaatgcctggtcttctaccacccggccgacccggccgagctgcgcgccgaacaggatgcgctgctgctggaggtctggcaggcgtgcaacaagtccgggcatgagctgctgctggaaattattctgccggaaaacggcccggataaagatgaacgccactaccacgacatgctggagcacttctatcagctgggcatccagccggactggtggaagctgccgccgctgtcgagcgcggaatgggaaaggattggcaaactgatcgcgcgcgaagatagctggtgccgcgggatcttaatcctcggcctggacgccccttcggaccgtctgcgcgccggttttgccgaagcggcgaagcatccgatgatcaaaggttttgccgtaggacgcaccatttttggccagccttcacggcgctggatgcagggagagctcagcgacgaggcgctgattaacgaagtgaaacgcaactacctcacgctcatcggctactggcgagaagcccgcggctga

SEQ ID NO: 176200 - DNA, 1941 bp, Klebsiella oxytoca
atgggcaaactgagactgacaatggcgcaggcgctggtgaagttcctggataaccagtacctggaagtcgatggcgaagagcataagttcgttaaaggcatctttgctatctttggccacggcaacgtgctgggaatgggccaggctcttgaacaagatagcggtgaaatgcgggtctatcaggggcgtaacgagcaagggatggcgcatgtcgccaccggttttgccagacagtccctgcgtcgtcagattattgcctgtacctcctccattggccccggcgcggcaaacatgattaccgctgccgccaccgcgaccgccaaccgcatccctctgctgctgctgccgggagatgtgtttgcgacccgccagcctgacccggtattacagcaaattgagcagagccacgatctcagcattaccactaatgacgcgtttcgcgcggtgagtaaatactgggatcgcatcacccgtccggagcagttgatgagcgcctgcatcaacgctatgcgcgtgttaaccgacccggcggaaaccggtgcggtcacgctctgtctgccgcaggatgtccagggcgaagcctgggattatccgcagtccttctttacccgtcgggtacaccgccttgaccgccgtccggccagcgccgcacagctggcggatgcggtggcggcaattaaagccagccgtaagccgctgatcgtctgcggcggcggggtgaaatactccggcgccggcgaagcgttgacccattttgccgaacgctacggcgtaccgtttgccgaaacccaggcgggtaaaggcagcgttgtctcttcgcatccgtataacgtgggcggcgtcggcgaaaccggctgcctggcagcgaacctgctggcgaaagaggcggacttagtcatcggtctcggcacgcgtttcagcgatttcaccacctcgtcaaaatggattttccagcacccgggcgtgcgcttcctcaatattaacgtcagcaacttcgatgcctggaagctggatgggattccgatgctggcggatgcccgcgaagccctcaccgccctcgatgacgccctgtccggcgaatcctggcaagcaggctggggcgagcagattgaaagcgtgcagagccgccagctgaaagagacccagcgcgtttaccaggcggtatggcaggaaaccgctttcgtcccggaaatcgacgaccatctggatcgggaatcggtgtatcgcgaatttcgccagataaccgactccaccctgacgcaaagcagcgtccttggggtactcaacgaaacgctgccggcggatgcggtgattgtggcggcggcaggtagcctgccgggagacctgcagcgcgtctggcgcaaccgggccaccaacacctatcacgttgaatacggctactcctgcatggggtatgaagtcagcgccgcgctgggcgtgaagttagcccaaccgcaaagcgaggtctattcgctggtgggcgacggctcattcatgatgctgcactccgagctggtgacctccctgcaggagcgcgcgaagatcaacatcgtactgctcgacaatatggccaacggctgtatcaacaacctgcagatggaacacggtatggacagcttcggcaccgagttccgcttccgctgcgccgagtcgggccatctacagggcggcctggtaccggtagatttcgccaccgtcgctgccggctacggctgcaaaacctggcgcgtcacgacgctagaagaactacgccacgcgctggacgccgcgcgccgcgaaaccgtcagcaccctgatagacattaaagtgctgccgaaaaccatggtgcacaaatatggcagctggtggaacgtcggcgtcgcgcagtcagcgctctccgagcggatccgtaaggttgcgcaaatgatcaatgaaaaacgcgctcaggcgcgggattactaa

SEQ ID NO: 176201 - DNA, 1014 bp, Klebsiella oxytoca
atgtcactcaaattaggtgtcatcggtgccggcgctatcggtaaagaacatatccgtcgttgcactcaggtactgcagggagccacggtagtggcggtttcggatatcaacgaagagaacgcgcgcgccgcggttgcgctgccgggcgtgcatgccgaagtgtacgccgacggtcatgacgtgattaaggccagcgatgtggatgccattctggtcacctcatgggaccccacccacgaagagtacacgctggccgccatcgccgccgggaagccggtgttctgcgagaagccgctggcgatgagcgcggaaggctgccgccgcatcgttgatgcggaaatgaaagccggtcgccgcctggtgcaggtcggatttatgcgtccttatgacgaaggctatctggcgctgaaaaaagtgatcgatgacggcgatatcggcgcgccgctgatgctgcgctgcgcgcaccgcaaccagtcggtaggtgaggattacatcaccaacatggcgatcaccaacaccctgattcacgagctggatgtactgcgctggctgctgaatgacgactatgtttccgtgcaggtgcgctttccgcgctccacttcccacacccatgcgcgcctgaaagacccgcagatcgtgtcgtttgaaacgaaaaaaggcacgctgatcgacgtggaagtctttgtgaactgtcagtacggctatgacatccagtgtgaagtggtgggggaaaccggtattgcccgcctgcctgagccgtcggctgtgcagatgcgcaaagccgctaacctgtcgaccgctatcctgaccgactggaaggatcgcttcatcaaagcgtatgacgttgagctgcaggcctttatcaatgatgttcaggccggccagctgcacggcccatcggcatgggatggctacgcggcatccgttgcagccgatgcctgtattaaagcccagggcaccagcgagccggttgaggtgacgctgcctgagtgccctgatttctacaaacgctaa

SEQ ID NO: 176202 - DNA, 885 bp, Klebsiella oxytoca
atgaaaattgcttttgacgttgatgtcattaaagacctcggggtcacccgaatggtccatcaggtggcggagtggggctacaagtacattgagcaatcgccgcacccgcagatcaacccgttctacaagcacccgcgcgccagccgggaaattatggctgagtacaagcaggcgctgcgcgataccggcgtagagctctcttcgtttatctgcgtctaccgctggtccggtccggatgagctgcgccgtcaggcagcagtaaaaaactggaaacggctgatcgaaatcgcggttgaaatgggtgtacaggtgatcaacaccgagttctccggcgatcctaaccagccggagatttgcgatgagatgttctatcgctccatggaagagctgctgccgatttttgagcgcgaaggcatccgcgttgaaattcaggcgcatccgtgggacttctgcgaagagaacaacgaaaccgtcgatatcgtgaagtcgttccgcagcgataacgttaagtacgtttacagcgtcccgcacaccttcttctatgacaaaggggtgggtgacgttgagaagatgctgcgctatgcgggaagcgatctctcccatgtgctgatcgcggatacccgcaaccatacaaaacactgccgctatatcgttaacccaccgggcgtagatgccgtcgttcaccagcacgtgggcgtcggggaaggggatgttgatttcgacgcgctgttccgcaccctgcgcgatatgaaatttgccgagcagaccttcaaggtcggcggtgagcctatcgtggccacctcgctgttcggctacccggaaaaaatgaaataccaggcagtggaaacccgtgaactcatcgaacgtgaattgctgcgccggtag

SEQ ID NO: 176203 - DNA, 900 bp, Klebsiella oxytoca
atgaacaaagataacgtaaaactggctatcgccccgattggctggactaacgacgatatgccggagctgggcagcgagaatacttttcagcaaatcgtcagcgaaatggcgctggcgggttttaccggcagcgaagtcggcagcaaatatccacgcgatccggcggttctcaagccgatgctggatatccgcggcattcagatttgcaacgcctggttcagcaccttttttgctaacggccagcgggaaaaaaccattgatgaattcgttaaccacatgaatttcctgcatgctatgggcgcgaaagtgatcggctgctcggagcagagcggcagtattcaggggctggaaaagcctatcctggagaatgagaaaccgtgctttagcgaagaagagtggcagcgggtggcggaaggctataacaccctcggtcgtctggcggcggaaaagggcatgcaggtctgtctgcaccaccatatgggtaccggtattcagacgacggcagagatcgacaagtttatgtcgctggtggatgacaaggtcttcctgctctacgacaccggacacgcctggtattccgaaggcggcgaagagccgatgctggcgattctgaaaaaatatctgccgcgcattaaccatgttcacctgaaagacgtacgtccgccggtgatcgagcaggtgcgccgcgaaggactctccttcctggacggcgtgaagaaggggaccttcaccgtgccgggcgacggcgtcattgatttccgtccagtgtttaaactgctggacgagcatggctataaaggctggatggtggttgaggccgagcaggatccggcgctggccaacccattcgaatacgccgtaaaagcgcgtaaatacatccgcgagacggcaggaatctaa

SEQ ID NO: 176204 - DNA, 1500 bp, Klebsiella oxytoca
atgtctaaggaacaatatcttacactcaataaagcgtcgggaccgaatagcaataccccgacaacgccctttgtaaaagttgtcgccctgatcgcgacgcttggcggtttactttttggctatgataccggggtgatttccggtgccttactctttatgggcaccgagcttcatctcactccctttaccaccggtctggtcaccagctcgttgctgttcggcgccgcctttggcgcactgctatctggcaatctggcgaatgcggcgggcagaaagaaaattattctgtggctggcggtgctttttgccatcggcgcgataggtacctctatggcgccggacgttaactggatgattttctttcgtcttattctcggcgtcgcggtcggcggggcggcggctaccgttccggtctatattgccgagatagctcccgcgaataagcgcggacagctggttactttgcaggaactgatgatcgtatccggtcaactgctggcctatatttctaatgccacgttccatgaagtctggggcggggaaagcacctggcgctggatgctggcggtggcgacgctacccgccgtgctgctctggtttggcatgatgtttatgccggattcaccgcgctggtacgcgatgaaagggcgcctggcggaagctcgtcgcgtgcttgagcgcacccggcataaagatgatgttgagtgggagctgctggaaatcaccgaaacgctggatgaacagcgcaatctcggtaagccccggttcagcgagattatgaccccgtggttgttcaagctgtttatgatcggtattggtatagcggttattcaacagcttaccggtgtaaataccattatgtactatgcccccacggtactgacctcggttggtatgactgataatgccgcactgtttgccactatcgccaacggcgtagtctcagtattgatgacattcgttggcatctggatgcttggcaaaattggccgtcgcccgatgaccatgattggtcagttcggctgcaccgcctgcctggtctttatcggtgcggtcagctatctattgccggagacggttaacggccagcctgatgcgctgcgtgcctatatggttctggcagggatgttactgtttctgagctttcagcagggggcgctgtcaccggtgacctggctgcttatgtcggaaattttcccaacccgtctgcgcggtatttttatggggggggcggtattttcaatgtggattgccaacttcctgatctccctgttcttcccgatactgctggcgtggttagggctttcaggcaccttttttatcttcgccggtattggcgtatttggcgcgatattcgtcattaaatgcgtaccggaaactcgccaccgtagtcttgaacaaatcgagcactatctgcgggataagctggacaccagtgaagaagggcaggccgccagggcccggcgaatagtggctgaatcgcaggcgaataaagtgtaa

SEQ ID NO: 176205 - DNA, 1311 bp, Klebsiella oxytoca
atgtttaaacctctcaccgctctcgcggttgggctcagccttgccctgagcggcgcggcgctggcgaaagagaagatcgacttcatgtttccggcgccggtagacggcaagctgaccatggagatgacccgcgtcattaagcaattcaacgagtcgcagcaggatgtcgaagtgcgcgggatctttaccggcaactacgacaccaccaagatcaaagccgaatcagcgcagaaagccgggcagccgcccgcgctggtgattatgtccgccaacttcaccaccgatctggcgctgaaagatgagatcctgccgatggacgaactgttccagtatggcgatcaaaaagcgggggattttctggtgaaggcgttctggcccgccatgcataaaaacgcccaggtgatgggcaccacctatgcgatcccgttccataactcgacgccgatcctctactacaacaaaacgatgttcgatcgggccgggatcaaacagccgccgcaaacctgggccgagctgctggcggacgccagaaagctgaccgacgaaagcaaaggccagtgggggatcatgctgccgtcgaccaacgatgattacggcggctggatcttctcggcgctggtgcgcgccaacggcgggaaatactttaacgaggactatccgggcgaagtctattacaacacgccaaccaccatcggcgccctgcgcttctggcagaacctggtctataaagacaaagtgatgccttccggggtgttgaattcgaaacagatcggcgccagcttcttctccggcaaagtcggaatggcgatgctgagcaccggcgcgctgggctttatgcgcgagaacagcaaagattttgagctgggcgtggcgatgctgccggctaaagagcagcgggcggtaccgatcggcggcgccagcctggttagcttcaaaggcatcaacgacgcgcagaaaaaagcggcgtatcagttcctgacgtatctggtgagcccgcaggtcaacggcgcctggagtcgctttaccggctacttctccccgcgtaaggccgcctacgatacgccggaaatgaaggcgtatctgcagcaggatccgcgcgcggctatcgccctcgaacagctgaagtatgcccacccatggtactccacctgggagaccgttgccgtgcgtaaggcgatggaaaatcagctggccgcggtggtcaatgatgccaatgttaccccggaagccgcggtgcaggcggcgcagaaggaagccgatgcgttgatgaagccctacgtcgataaaaccgcgctggcggaagtgaagtag

SEQ ID NO: 176206 - DNA, 1074 bp, Klebsiella oxytoca
atgcttagtctgcaaaacatcagtaaacagtttgacggtaaaccggccctcagcgccctgtcgctggatattcgcgaaggggaattcgtggtgctggtgggcccgtccggctgcggtaaaagcaccctgctgcgcctgctcgccgggctggagccggtcagcgagggggagatctggctgcacgatgagaacatcaccgaaatgtcgcccagagagcgtaatttcgcgatgatcttccagaactatgcgctgtttccgcacctgtcggtgcgcgacaacatcaccttcggcatgaaggtgcgcaaagaggagaagaccagctggcagccgcgggtggataaagtcgcgcagatgctgcagctggataccctgctcgatcgcaaaccggcgaagctctccggcggccagcggcagcgggtggcgatggcgcgggcgattgtgcgcaatccgcgcctgttcctgatggatgagccgctctccaacctcgacgcccgcctgcgtagcgaagtgcgcgacagcattatggatctccaccagcagctcagaaccagcaccgtctacgtcacccatgaccagacggaagcgatgtcgatggccgaccgcatcgtggtgatgaacggcggccacgtacagcaggtcgggcgaccggagtatctgtacgccaacccggccaacctgtttgtcgccgggtttatcggatctccggcgatgaatctgctctcactgccctgcgctgatagtgaggtattactgggtgagctgcgctatccgctgccgccgcgctaccgtgaagaatcccgagtgtggttaggcattcgcccggaacatatcagcgaccgcgtggaggagaaccatctgcgcttgcccgccaccgtgctgcaacgagaactgatgggagccgattatttgctccacgtcagtacccccatcggcaccttacgctttagccgtcgtcatcgcggcgcggtgccggagaaaggcgattcgctgatcctcggcttttcacctgccgatgtgcatctttttcatgctgagaaacagcataatttactgatggagacagaccatgtttaa

SEQ ID NO: 176207 - DNA, 825 bp, Klebsiella oxytoca
atgctgttagcgcaaatttccgatacccatttccgcagccgcggccagaagctgtacggctttattgacgtcaacgccgccaatgccgacgtcgtctcccagttgaacgccctgcaggagcgtccggacgcggtggtggtgagcggcgatatcgtcaactgcggccgcccggaagagtatgaggtcgcccgtcagatcctcggcagcctgaactatccgctgtatctcattcccggcaaccacgacgataaagcgctgtttctggagtacctgcatccgctgtgcccgcagctcggccgcgacgcgcaaaacatgcactacgcggtagacgattttgccactcgcctgctgtttatcgactccagccgggcgggtacgtcgaaaggctggctgaccgaggaaaccatcaaatggctggaagcccagctgtttgatggcggcgataaaccggcgacggtatttatgcatcatccgccgctgccgctgggcaatgcgcagatggatcctatcgcctgcgaaaacggccatcgtctgctggcgctggttgagcgtttcccgtcgctgacgcgcattttctgcggccataaccacagcctgaccatgacccagtatcgccaggccatcatctccaccatcccgggaaccgtccaccaggtaccctactttcatgaagatacccgaccgtactacgacctctctccggcgtcgtgcctgatgcatcggcaggtcgacgagcagtgggtgagctatcagcatcctctgacccactacgccggcccctggatgtacgacgaaaatatcagctgcccaacggaagattgctaa

SEQ ID NO: 176208 - DNA, 888 bp, Klebsiella oxytoca
atgagcgctgaaatctcgccgctggcgctgcgatcgcacagcgcatcgcgcccgctctggctgcgcctgcgccgctcgcagccctttacgctcacggtattaatgtgctgcctggcgctgctgtggatgagtccgtttttatggatgctggcgacctcgttcagcgccacgaccttcggcgaggatatggcctcgctgctgccccgtatgccgctgacgctgaataacttccgcgatgcctgggccagcgccgactggctgagcctttacgccaacacccttatcttcaccttcggcaccttcttcgtgcagctgttgaccatcaccaccgccggctacgtcttcgcctgccacgagtttcgcggcaagaagacgctgttcctgatgttcctcgtccagctgatgatcatgccggtggtgatgatggtgccgaacatgctgaccctgaaaaccttcggcctgctcaacaccctcaccggggtgatgatgccctacttcacctcggcgttcggcgtgttcctgatgcgtcaggcgtttctggccatacccaaagagctggaagaggcggcgctgatggagggctgtcgctggtggcaggtgctgttccgcgtgctgctgccgatgtcctggccgtcggtgctggccttcgccaccgtcagcattacctaccactggaacgagtatctgtggccgctgatgatgctgaacgacccggacaaacaggtgctgaccgtggggctggtctcgttcgccatgggcgccgaatccggcggtcagtggggcatcatcggcgccggcacgctgatggtctgcctgccgctgatgctggcgtttatcctcttccagaaacagttcctgcgaagcttcggcttctccgggatcaaataa

SEQ ID NO: 176209 - DNA, 873 bp, Klebsiella oxytoca
atgagaaaaacctggcttccctggctgatactgtcgccttccctgctgtttttattactgtttacctggtttcccctcgggcgatcgatttatgacagcctgttcgatacccgcatggtcagcgacggcggccagtatgtcgggctggagaactttagtcgtctgttcgccgacaacgtcttctggcagtcgctggtgaataacctgctttatatcctgctgacggtggtaccgggcgtgaccctcgccctgctgctggcggtcgccctgaccgagaatcaccgcgtcaaccgctggctgcgcaccgccttcttcttcccgatgattatcccgatggtcagcgccgccgcgctgtggctgtttatctttatgccgggccttggcctgctcgaccactatctggcgaagctgttcggcccgatgaacaacaactggctggggcgcagcaatagcgcgctgctggcgctggcgctgattggcgtgtggaagttcgccggttattacatgctgtttttcctcgccgggctgcaaagcattccggcctccacgcgcgaagcggcgatcgtggaaggcgccacccgcacgcaggtattctttaaggtcacgctgccgctgctgcgcccgaccctgagctttgtgataaccacggcgctgatctactccatcacccagatcgaccacgtggcggtgatgacccgcggcgggccggataacgccacgacagtactgctctactacatccagaacctcgcctgggacacccatgatttaggtaaagcttccgccgccaccttcctgacgctggccgggctgtttgccttctcgctgattaacctcaaactgctggagaaaggagcgcactatgagcgctga

SEQ ID NO: 176210 - DNA, 1020 bp, Klebsiella oxytoca
atgagcactattaaaagttacgccgccaaagaagcgggcgccgatctgtcgctgtgggagtacgatgccggcgaccttaagccggaagatgtcgaagtgcaggtggagtactgcgggatctgccactccgacctgtcgatgatcgacaatgaatggggcatgtcgagctatccgctggtggccggtcacgaagtgattggccgggtggcggccctgggcagcgcggcgcaggataaagggctgaaggttggtcagaaggtcggcattggctggacggcgcgcagctgcggccactgcgacgcctgtatcagcggcaaccacgtgaactgtctggaaggctcggtgcccaccatcatcaaccgcggcggcttcgccgataagctgcgcgccgactggcaatgggtgatcccgctgccggaaaacgtcgatcttgaatccgccgggccgatgctctgcggcggcattaccgtcttcaaaccgctgctgatgcatcacgtcacggccaacagccgcgtcggcgtcatcggcattggcggcctcggccatatcgccatcaagctgctgcacgcgatgggcgcggaagttaccgcttttagctccaatccggcgaaagagcaggaagtgctggcaatgggcgccgatcgcgtagtgaacagccgcgatcccgaagccttaaaggcgctggccggccagttcgacctgattatcaacaccgtcgccgtcgacctcgactggcagccgtactttgaagcgctggcgtacggcggcaacttccacaccgtcggggcagtgatgaagccgttcccggtccccgcttttaccctgattggcggcgaccgcagcatctccggctcggccaccggcaacccgtccgagctgcgcaagctgatgaaattcgccggacgcagcaaagtcgcgccgaccaccgagctgttcccgatgtcgcagatcaacgaggcgctgaagcacgttcgcgagggcaaggcccgctaccgcgtggtgctgaaagccgacttctga

SEQ ID NO: 176211 - DNA, 579 bp, Klebsiella oxytoca
atgacaattaactactaccagcagaacgctgacagctttgtggcttcaaccgtcgctgtcgatatgacctctctgtacgcgccttttatcggggcgattgaaccgaacgggctgctcctcgatgcggggtgtggctcaggacgcgatgccaaagcctttgccgatatgggctaccgggtcgaggcgtttgacgcctcaccagccatggtcgagcgggctgcgcaacacagcgggctggtcgtgcgtcaggcgacctttcaaagcatcagcgaaagtgcgcggtatgacggcatctggtgctgcgcttcactgctgcacgttcccgccgcggagctgccgggagtgatgcacaaactggctacggccctcaaacccggcggcatctggtacgtctcatttaaatacggttcaggcgagcgagaaaaagaggggcggcggtttaccgatctcgatgaagcagggctgacgacgctggtcgaaccgctggcggatatccgtcttgccaatatgtggcagacggtagataagcgcccggagcggagcgaaatctggctcaacgcgctgttgctcaaaagctga

SEQ ID NO: 176212 - DNA, 1014 bp, Klebsiella oxytoca
atgcgcttctatcagatcgaaccgacgctggagaactactggcgcggcattattctttttggcaaaaacgtcgcctcctataagtttgcgctggcgcatgcgctgtacgacatccgccgcgacggtagcgatctgatacgcctcgaggagctggcggtgccgttcagccagcatctgtgtcgccatcttgagcaggcccccaaacagatcacgtcgccaaaaagccagtttctcagcgcctgtagccgcttcaatcgccaggagataacccaggatcagctcatcgcggcaacggttaagctcggctttagcgtggtgctggataaatttcataacgtgaatcagggcgaaatcgccaggcgcttttttatcgacgagcgtaaaacgcatcagggtatccgtctgaccgacgacttttattctctgacggagcgccagcagtaccagaacctgatccacgaaacggacgcccgctggcgtctggtggagcaggcgtgggcgatgaatatcgccagcaacctgatcgccgtggaatatgatgccgctgaacagcagctctttagcactctgaatacccgtcgggttgccatctccagctgtcgcgacagcctgaacggctaccaaaaaggccgctgcttttactgctatgcgccgatcagtctcgaaagcggagatgagaacctggccgatgttgaccactttatcccgtgggcggcgcgcggcgaggtggcgaatatcaacggcgtctggaacctggttctcgcctgcaagagctgcaaccgcggggagaaaggcaagtttatgcgggtaccgtcggcaaaactgttgcgccgcctgcgcgacagaaacgaatattttattaccagccaccttcccttgcgtgaaaccttaatccgtcagaccggcaacacgaccgcccgccgcgatgacttcctcgccaaaatctggaacactgcgcgcattacgctccttcatgaatgggaacctcaggccgccggaacggatatattctga

SEQ ID NO: 176213 - DNA, 1251 bp, Klebsiella oxytoca
atggctctcaccgatatcaaagttaggactaccaagccctccgacaaacccttcaaactcacagatgggcagggtatgcacctgctgatcaatcctaacggctcgaagtactggcgattacagtaccgtttcgacggcaaacagaaagttttagcattgggtgtttatccaatggtctctcttggtgaggcccgcaggaagcgagatgaagccaaaaagttggtatctgatggtatcgacccttctgagaagaaaaaagccgacaaaatcgagcagagcgaagctcttacttttgaatctgttgccagggactggcataaggcttgtaaaagaaaatggtcagattcccacagcgagagagttctaaaaagcatggaagatggtctctttactgcaatcggtaaaagaaaaatatccgagcttaataccagagatcttcttgcacctatcaaggctgttgaagcttccgggcgattggaagttgcttcccgcctacagcaaagaacaacagcagtaatgcgatatgcggtccagaatggactgatagattacaaccctgctcaggagatggcaggagctattgccgtagccaaaagaacccacaggccagctttgccattcgaacgattctcagaactcttagaacgaattgataacttcaaaggtaggaaactcacgaagttagccgtaaagctggcattgctcattttcattcgttccagtgaactcagatttgcaagatggtcggaaatcgatttcgagaatgctatgtggactattccctctgaacgagaaccattaccaggagtgaagcattcgcaccgtggttctaaaatgcgaactccacacctagttcctttgagttgtcaggcattggctgtgttgacggaaattaaagagatcagcggtgatcatgaactcgtgttcattggcgaccatgatttcagaaagcctatgagtgaaaatacggtaaacaaggctttgaggtctatgggctatgacacaaccgtggaggtctgtggacatggattcagggctatggcttgtagtgccttgattgaatccggtttgtggtcgaaagatgctgttgaacggcaaatgagccatcaggagcggaactcagttcgtgctgcctacatacataaagcagagcaccttgatgagagaaagcttatgttgcagtggtgggccgattaccttgacatccttagaatacgacaagtttcaccatttgattttaaaaagacttaa

SEQ ID NO: 176214 - DNA, 810 bp, Klebsiella oxytoca
atgaaagtagtaagcccttatgaagaattaaaaagctggtttagtctcgaaaactatgagcagttaaaatcactaacaatcaaagaactgcatactgagcttgcctttagagaagcgattttcgacagtgtaaattttggatgggaagatgataatcaaaatttaaggtctatccttgaaggtaatcctattttaagcagacaagataataatcatggccattttggcaagggccaaagacatgttgctcaggttagctttggtgatataaaaaaattagagaacaagttaatgatgtttagcatggatttttttgaagaaaatggcgatttcaaaaaagaattgaaaaagaaaccaataacaaaaactatgagagacttttttttgaaccaaaatagcagcaagatgtatgtttcatttgatttaggaatgtccagcgatgaagaaattataacagccttacaaacgatgctacccattctcaggaaagaatatgaaattgagccagtcaaaacagaaaaaattggactggcaaagataagaaaacttgtcgattacaatattatcccaatgatggatctattgatttgggcaaaatttaaaaaagtaaaaatctcaaatatggtcttgtctcgtgtcttgtatcccgactttacaagtgagatcagaggagaagatcacattaaagatacagacaggcctgttgcagagaagtcattgaatggagaaataacccgtagtctcgaatactttatcagcaaaaacagccatctcctcaacataccgatttctgaactcggctctttctag

SEQ ID NO: 176215 - DNA, 207 bp, Klebsiella oxytoca
atgaatacaatcaatcaaagcttaattcgtttaccagaagtcttgaaacgaactggtttcggcaaagcctggatctatcgtctgatcagtgaaggtcggtttccggcaccagtgaagatcggtgttcgtgccgttgcttttgtcgagagtgaagttgacgagtggattcaatcagttatcgaaacaagtcgaaataatgttgcttag

SEQ ID NO: 176216 - DNA, 315 bp, Klebsiella oxytoca
atgaatatcgaagaatttgtgagtgaagataaccatatgtgcaatttaggcgatgatcttttttacaagatcttcgaacccggagcaatttatgatttacccaataacgaatttaataaagaaatcatttactggctcagtcagtaccttgtaggaaacttgagagagcccttagactcgatctctgagcttgatattttcgagcagttttatgtttacgagacatggttctcgctaattaaatgtcccgttgaaatgagaaatctttcaaagcgaataattcaataccagattgggctgaaaactcttttgtaa

SEQ ID NO: 176217 - DNA, 1203 bp, Klebsiella oxytoca
atgtgcagtatttgtgtagattcgtttatgttggaaaatggtgagaggtattgccatgttgtaaataaaaaaactggtgagccattgtattatccaaatttgtatataacaacacaagtcagaaatcggtcagagtctatatcaacaatgaaagttattgctggtagcatttcaatgttatatcgattctttatgaggaaagagatcaatattgatgaaagaattcagaaaaggatatttctggttcctcatgaaattgatgatttgattgagtttacttcattcaattttaaaagtggtggagataatgatttttacgtttcaaatgtcaaaaaaccaactaaatattttcgtattacaacaatagctaactatctggaatggctatgtaaaatacttctttctcatacaggtcagaaagatacaatcaaacagatacttgttttcatcaacaacataaaaagaaagaaaccaagaaacaatgacaaatatattatggatatcgaaaagagcttagacaaagctcaactggattctttgtttagcattctttcgccaggaagtaacttgaatccgtttacggaaacagtacaaaaaagaaataacctaatgttcctattattacattgctttggcatgagagccggtgaacttttgaatctgcgaattggtgacatagatttttcagaatcaacaatagcaataaggaggagagcaaatgataaaacagatccacgagtttatcagccattagttaagacttgcgagagaaaattaattgctgacacaaaactcatatatgaaatttcagattatattttgaatgatcgtaggaaagttaaaaattctaataagcatgattttctgtttattacctataaggaagggaagacccaagggcaacctctgtcattttcctcataccataagatagtgagtgttgttcgtaattcatcctcacttctaagtggattaacaggtcataaactacggcacacatggaattatgagttctcaaaaacaatagacaaggcccaagatatatccgatgaaaaagaacagcaaatccgttcttatctcatgggatggcgacctggttcagatacttcaataatttataatcgcaggcatatttttgagctatcgaaaaaaactgcacttgaacaacaagagcaactattcaaaggaggatttgatgaataa

SEQ ID NO: 176218 - DNA, 1311 bp, Klebsiella oxytoca
atgaataatttaattaaatttaactctgataaaatgtctttgcatgaacataaaatcgtcacttcgattgaaaacgatggaatcaacattagagaattgatatgtgtcatgaatgaaaaattggtttgtggatttgtatatacagtacaatattattttaatagcaacagctatttgtatgtaaaaagtattgttagaaatatggagagtcttatccgtaaactatctcctactcatattgatgataaggttctaattgaatatcaaaataagcaatcatcaaaagccccagcatcatttcgtgttttacgaccatttttgattaaatggtttgagtttggatatcctggaatagatgaaagtgctgtagaattgttaaagcattttgacctaaaaataaaaaaagctggtcagtctgtgttacaagatgatccaacagggggcccactaactaaagaggaacatacttccttgatcagggctatgaatcatgcatatagaataggtgtactgtcactgtcagattatgcaatatcactattaatgagtctgacaggtagaagacctcagcagttagttatgttgaaacataaagaccttcttcaaaataacttagataatggtaaagtggaatatataatttcagtaccacgagttaaacaaaggggtaaacaactacaatatcgaaaagtgccaataatctcagaggttgcatcaattgttcagcttcaagctgatcattccgtgagacttgttgagctaacccttggtaaaacccttgatgatcatgccaaaggcaaggttccagttttcttgaacgaggaaaaactgcttgatttagccataaaagattctaactttctggagtctaataaaatatatgcaaaaccaacaattgctaatgtagcactaaagaatattgttaataatgggaatgtaatttcaaatcgtacaggttctctactcaatgccactcctcgcaggcttcgctatacgatagcaactatgctggctagggagggacatagtgccaatactatagctgaattgttggatcattcttctacttcaagtacgggcatttatattaaaaatcttgccgatagtgctgaaaggattgattccgctgtttcagaacaattgtcattcgtcgctgatatttttatgaatggaataagatctaataagataagggattttaaattttgctcttcgagaaaatgtcaaagtcagaatttaaatgtaaattttccttgtgaagaatgtgctttctttatgccagttgatattggtgaggtaaatgctcaatga

SEQ ID NO: 176219 - DNA, 1875 bp, Klebsiella oxytoca
atgaacaatgttattttatttaagtctaaaaaacaacttacggcagaaaacaattataatgaattcatacaattttgtcgctatcaactatctgggctaacccaaactcaggattgggaacaatatgtttggaaagggtatgtaacctttagaaaaataggggttggacataaagtatttaactccaaagatgcaatgcatgaagattttctcgactttgcaaaagcatatattagatatcagcactcattgaaacccttgaaaaattatggggccataatgatggctttgagatgtctcgaacaggctcttttgcaggttctgagcaatgctctcatttataatgttacagccgttgtttttgatgaggcaatgcagatcggaagtagatattttgaaggtaatgttctcgctcaatgtgggatacagcttgaaaaattatcaaagtttctatgtgaacataaccttataaaattagggtacatatcctggagaaatcatgtgaagcagaaggtaaaaaacaactatcttcctaagattgaggactatcacagaaacgataagttaccagatgaaaaggcattacttgctattgctgatattttttctaaaaatgatgagctactgagtccaagggataaattcaccagttcagtatttgcacttctgctttgttgtccgagcagaatttctgagattttagccttacctgctgattgtgagattacacaaatagatggcaagggtatcgaaagatatggtctgagattctattcggttaaggggtatggccctaatatcaagtggattccacaggttatgataccagttgcgaagaaagcgattagaagattgctttccttatcacaaaatgcaagggcatttgctcaatggtgcgaaaaacaccctgataaattttaccgacatgaactttgcccaaaagttgatgaaaagttaaagttgacagtcgaacaagtttgtcttgcacttggataccctttatatgatcataaatcatgcgttttaaaaattaaaagaacgagtttggatggtggggaaagttgcttaaattccaatgattataactattcattgagtgatctatgggaaatgattagctctggttttagcagagactttccttggtatgatgaagaaaaatctataagatttagcaatgctttatgtttactgaatcctcgccaattttctttatcacaaatgagcgatatctattcattttataaacctactaaaggattcttttttagagacatacaagataaaacaagtcatgagtctggatttaaaaatattttcgcccgatacggatattatgatattgaaggaaaaccactacttattcggtcgcaccaaccacggcaccttttaaacacaatagcccattatggtgaaatgtctgaactggatatagctaaatggtctggtcgtatcaatgcaaatcagaacagagtttataaccatgtgtcagaagaagatatgttagataaaatcaaagctattaaattaaacaggagtaattattgtcaaaggaaatcaactccctcaattggatcgccagttgactttgataacctttatcaaggggcaattcacttaacagaatttggttgctgtgtgcataactatttggttcaaccttgttctaaaatcaatcagtttgtggaatataataatgaaacactgaacatgaaatcagtagatagaattagactgcaatctgtccgagagaaagtaatacaattgataaatataactcaaatcgcgtttgaaaatggtgactatggggctgataaatggttgcaacatcacaaaaaaaatttggaaagaattaataaacttttaaataattga

SEQ ID NO: 176220 - DNA, 387 bp, Klebsiella oxytoca
atggcaaaacatttaaacaggagtgaaataaaggcaattacacacatgatactgacttgggacggcaaaatcacatggagtgatttatgtgaatcagtttataagaatttaaacagaactatcacaaggcaatctttaagtgctcataatgaagttgttgaagcatataaaacaaagaaaaatttgtctaatttgaaaaagtcaggcttaaagaaaccggctaacttaactatcgcggcacaacaaataataaaccttaaagccgaaaatgaaatgttgaaaaaacagaacaatagatataaagagcaatttagctattggcagtacaatgcttacagacacggtcttactatggaacagttgaataggccatttaataaaaaataa

SEQ ID NO: 176221 - DNA, 426 bp, Klebsiella oxytoca
atggacaagaacattatttatccagagtttaccctggaagagcaacttatcattatcgtcgataagtatatttcaaaaagataccagcccgcagataaaagtttctcatatcaactttacctaatttttgtgggataccatttaaaatatttctaccctaaaaggatttattccaaatctaatcgtaatattgataatattatgacaatgtttagttctgtatacaaatgtcttacaagtactttgttacagcgattaaacaataaggaagctgttatcagagagctaaactcccttgttaattacattgataataaccagaaccaggcagaagatatttataatacttttaaagcacaatatgaaatgaaagtaattgagggagagttaacccatgaagttcgcgtgagaaccgtcaggttatag

SEQ ID NO: 176222 - DNA, 315 bp, Klebsiella oxytoca
atgaaaacatactcaattctcgcagttatcctttctacttttctattaacagcctgtaattccgaaccttctgaaaaagacatatacaatgctttcaaaagtgttgtagatagatcaaatgcaagtatgaaagctctgaactcaagtattcccgaaaaagatcttttaagaatagattatgttaagaaactaagttgcacagaagaagcaaacaatgtttataactgcattgtcgatgcctcgattagcaatatgaaacagacaaagcctgttaagcttgtgaaagctgatggtgtctggaaagaagttcagtag

SEQ ID NO: 176223 - DNA, 387 bp, Klebsiella oxytoca
atgaaccgatttataacgtcctctttttttattattgtcttcctgctttctggctgttcaacatcaggcaaccagaaccttaaaaacgaaacacctcaaagcctccagtcaaagatcattaaaaacaaaacaactaagacggaattactcactaaattaggtgagcctgacaccagaacgactcttgacgatggcaacgagcaatggagatatttcatgtataacaatcagttcaatgcctcgacttttatccctgttgtcggtttgctaactggcggctcccagactcagtctaaaactctcgaaatagacttcaatggagaaaccgtaagcaagtggacattctctactgataataacaatacaaaatctggcattcttaattaa

SEQ ID NO: 176224 - DNA, 1200 bp, Klebsiella oxytoca
gtgaagggtatgcggaagatcaagaggggtaagagcttcgctggtgttgttcgttatgtattgcaaccgggagcacatcataaaagcgatccagtcgtaattggcggtaacatgttaagtggatctgttcttgaactgatttccgaattcaatgacacaaaacagcttcggccagatgttcagaaaccggtttggcacaactcacttcgcttacctgatggtgaatcattatcgaatgaccaatgggtaaccatagctgacgactatatgaagaggatggggttcagtgatactcatcttcgttgctatgtgcttcatgacgacggaggccagcatatccacattatcgcaagcagaatcgacatgctcggtggtaagctttaccttggcaggaatgagaaccttatcagtactaggatcatcactgaactcgaaatcgatcatgctcttacagtgaccaaggcagcatcatccctctcaaatacaaaaccaaagcggaagagaatctctcgcaacgaacagatgttatcagaacgaactggccttccctcccccaaagaagctctccaacagatacttgataaaagtttggcagatacacctgatcttttaacttttatcaagaggctggaagaagcagaagtcggctggacggcgaatgtcgcttctaccgggaaaatgaacggcttctcattttcttaccgcgatattgctttcaaagcttcgcaattgggtaaaagctattcttgggcaaatctcagtaatcggcttaactacgaccccgaccacttagaagctatgcgaaccggcataccaccaaaagaaccccttgctcctgctcctgctcctgctcctgctcctgctcctgctcctgctcctgctcctgctcctgctcctgctcctgctcctgcaacagttttgataaacactgagagaaaggaaagtatcagtgaaaaaatttctgaactcgaactacgacttaaagaagacagaagaaacgaaatcgtagaaaagattcttcaaaaaaactcagtacaacagcaaaagcatctcaggcttatcggctggattccatttctcagaaggctcgcagagcttctcagaagctatgggaagagcattcttcacaaaacccatatgaccttctcaaatatctccgcaatgaaacctttaaacaaggcgagaaaaatccgtttatag

SEQ ID NO: 176225 - DNA, 438 bp, Klebsiella oxytoca; identical to SEQ ID NO: 85077

SEQ ID NO: 176226 - DNA, 909 bp, Klebsiella oxytoca; identical to SEQ ID NO: 85078

SEQ ID NO: 176227 - DNA, 609 bp, Klebsiella oxytoca
atgagtaataaaattaacatattatgtattgtgaaagcacacttcaatacattgaaagatatttcaaagaaaggaatatcaaagttagatattactacgtttattattatgccaatatcactgtctctcttttcggcttataaaaacttcaatcttaataaagaccttgattcccttttagtgaattttggagctatttttacggctttattgctttctgttattgtattgatttatgatcaagagaatagaactatagaaaaggttagaaataatgccgatagtgttggtgaggtttctcaaaataaattacttttattgaaggaactatatcataacatttcttatgcgattctatgctcactcgccttggtagttttaacttttatacattcaactcttcctccagtgactccagaaataatagataacagccgggtttttatagattacaaaattagaggttttagtataaactttagttttacatttacatgggcaacaacaataatatctccattgataatatttgtaactgcaaatatcgtccttacaatagtaatgatagtaaaacggctttatctcattttgataaataatacaaactga

SEQ ID NO: 176228 - DNA, 132 bp, Klebsiella oxytoca; identical to SEQ ID NO: 85081

SEQ ID NO: 176229 - DNA, 315 bp, Klebsiella oxytoca; identical to SEQ ID NO: 85080

SEQ ID NO: 176230 - DNA, 870 bp, Klebsiella oxytoca
atgaaaagtcgcaattttatatctctgaactttttactcaaacacgaagacatttgcgatttagataatgttcttcatttggaaaagctaataggccaacattctccacgagatatcacagaagtcgtttctacatctaattggtatgaaatggcacctgaaattactgtctttgacattttatcaaatgaaatcagtgatatgcaactccgctccgctattattggaaaattaagtcaagtattcggtctttatgccactgatgatattgataataataatgctactgagtgtgcattaaaaaaatatgatgattctttttattattctatcatatcacctgttgataccattaaagacttagaagaatgtgagactgtttcaacaccagatgattataatcgtatacatgaaaagcacttgtcattatgtccagaatcaaatgaagattatgcattaagatgtgtgtatatttttgataaagttaaattctccgataatttctctaatacactttcaactttaggtaacaatcaggggattactgatttctctataccaattacgaaagctcttaccatcttaaatagattagacccagccataagaaatattcaagaagcaatgcattggatacatacagaatcagggtttgaatgttctccacagggagcaaataagggacacctctttactactatccaacttgatgatggaactgaaaggcagatcaattgtgagttccatatgaagataaatgcaagtaaccttgctgataatttaaaacaccattcaagaatttattttggattaatgccagtaggtcaatgtaagcatacctatttattacattgcggtgaacatttataa

SEQ ID NO: 176231 - DNA, 1101 bp, Klebsiella oxytoca
atgataattaataggattcatttagaaaatttcaaatgtttcatcgattgcgacattgagattaaccaactcaattttctagtcggtattaatagtgtaggtaagagtagtattattcagtcaatacttttaccgcttcaatccgtccatgatacagacatagagttaaatggcccattaattaatcttggtgaccataatgacatacttaacattgaagctgccgatgatagtattcgtataaatatacaaaccaatgatgaatcttgtacctggggatttgaaaaaggttatgtcaataacggactgccaaaattcagtctaccgttacttcatggcgaaaattcgtgggttaaagaattaaaaaataactttcaattcatatctgctgaacgttggggaccgcgcgataatgttcctgtaattcaaagtcaccgtaagggttggttaggtaagaatggagagcatcttattgattatttatattcattgataaacgaagcaactgcaagcgagattaacttgcctgagaacgatcctcgtattcatgccgaggcttcaagctcaacgataatttcatcaattgaagcatggcttggggaaatttctcctggtgtagcattcgatattaatgtctataaagaggctcatatagggtggggaatgttcaactatggaggcgactctaaaaaatatagagcaggtaatataggattcggaattagctattcattaagtattattgcagctattataggtgcaaaaaaaggagatgtcttattaattgaaaaccccgaagctcatattcatcccagaggtcaaagcaagctggggcagttgatagcttgtgcagcagaagctggtatccaattattagttgaaacccatagtgagcacatcattaatggagcaaggatagcggttcgcaaaaatatattgcaacacgataaattatttatttattatttcgaaaaaccattaaatacaatctcaccaataataaaacaaataaaatcggataagagagccagcttagatcaatggccagaaggtttcttcgatcaaactgttatcgacatggaaacgataatcaagggctga

SEQ ID NO: 176232 - DNA, 1911 bp, Klebsiella oxytoca
atgaatctaaaggaattacttaacgacatcttgaaattaattgggcttactttagccccagttaactctaattcagaaacaattactttaattgaactggacaaagattccggtaaatattatgtcaaaccagtgtctggaaaaaaagtatctagaaacatccatgagtttgaacatattttaaaagatcttttagagtttggctatgctaatgtggagtcttcgttaggtggaagtggtagcagtcgccatcatccagagacaattttatctaaccttccttatatagaacattttaaatataagaacaaaaaacatattcttttattagataatcctactcatgattatggaacattaaaagaagccagtggtattgagttaagaaaggttaaagcagctttaacagctaaagacactcttaattattatgaaatacacaaaaaacttaatcagattaacaatcaaataagttattctttgcaagaagtcagcacaaaatatcccggtgagattagacaggaaggaattacagaatgtttacaatcattaaccttacttgaagagagtttttcccaaatatttttcaaaacaaataaaagggtagaaccattattcgaggattccttatccctcaattcacaaactgacaatgataacttggaagaggatttagataatgatgaagaggataccgattataacgaaaaagccagttttgatcgtaaaaatttaaagatcagacagctcactatgagcttcagtttaatttatgatcgcattcagtataatgaaattgagttacagccagattttcagagaaaggaacgagtatggagccagaaagaaaaaagtttacttatagagtccatacttttggggctaccaataccaatgttttactttgctgaaagggaaaatggtacttggttaatcgttgacggtcttcaacgaacaaccacaattttcgactatatgcgcggtaaatttattttaacagatctaaaatattttaatgacccaaatgattctgtttacaaaaaatcatttcaagatctacctcgacaatatcaaagaaagatccgtgaatatcaaattaatggacatttgatatctgttgaaaagaacgattttgaaatggtcagagaattattccagagaataaacacctacggtcgagcattaagcccgcaagaaataagatgtgcattgaaccccggaagttcgataccattcatccgatatttagcagaaacaccagaatttatagattcaacttttggcaaagtcaatccaaaacgaatgaaagatatggaatatgttcttggaattatttcattcattctttttagctaccgagactataaatataacagggaagatgattttcttgttcatacaatgaaatatctaaataagtttaattttaaacttaacgggacattctctgatgaagaagggcatagtctgccacaatggaaaaatgatgagtgttcggaagttttttacactcttttcgagaaattcaagaaaggaatttcaatttccaacaatattttcggtacccatcgattcaagaaaaagaactctccatcgataaataagcaattgctaatcatgatggtttcagtttttgcattactcgacgacgatattgttgctgaattaataagcactaaaaacgaatttatagccaaatttgatggtctaattagtggtgacatccccagctatgtcgattggatttctgaaagctataacgacagtgataaagactttgattatgcaattagccagtccactggtaaaaaagcgactatcttatatagatttgataactttatttctttaatccaagatattacaaataaagaagtgttaattgagggtgttattaaaaatgataattaa

SEQ ID NO: 176233 - DNA, 1149 bp, Klebsiella oxytoca
ttgactaaatcggttctttcattttttactggtgtcgggttactcgatatgggtttccgatcagccgattttgacatcgtctggcataatgaaatcaacaccgatttcatcactggttttaagcatggtcatagcaaactgtatggagttaatccacaagacatcaatcttttcgaaggctccatagaaacaataagtaaatcaattgtcagagaaaatgtatcgtctggattaatagataataatgattttggtatcattggcggccctccatgcccggatttctctaatgcaggtaaaaacttaggtaaagatggtgaaaatgggaaacttacaggtatctttgtagatatcataaatgattttcaccctaaatttttcacattggaaaatgttaaaggtttaattcagaaaagcacacacagaaaatatcttgctgacttgttatataaattatctaaagaatactgctttgatattaaggtactaaactcattagattatggcattcctcaagatcgagaaaggctatttgttgttggtttcaaaaaaagcttcatttttgacaaactgggttatgcaagcttgattgaaattgagaaaattaatttacaactaataattgagctaaaaaaagaaaaaagctcaagtttagaaaagtttaactggtttagctggcctgtaaatcctctttatacaaatgcaaggggaagatttacttggccccaaagaacaccttatggcggaaatccaaccaaacctgatgatttacctaatagcttgcttgtacaagatgtcgttttcacctcatctatagaaaaccttccaaatcaaaacgacgtttttaaagcgtatagcgataaattcaatataattgatgagggcgatataacaggcaaaagttttaaacggttacacagatggcgattcagccctactgcagcttatggtaacaatgaggttcatttacacccctataaaccaagacggttgtcagtacgtgaagtcatgcggatacaatctgtgccggataaatttgagttacctgataacatgactctttcaagcaaatttaagactatcagtaacggtgtgcctgttgttcttgcaaaagaaatagcacaaagtatatctaacttcattgagtaa

SEQ ID NO: 176234 - DNA, 294 bp, Klebsiella oxytoca; identical to SEQ ID NO: 85067

SEQ ID NO: 176235 - DNA, 726 bp, Klebsiella oxytoca; identical to SEQ ID NO: 85068

SEQ ID NO: 176236 - DNA, 126 bp, Klebsiella oxytoca
atgttcgagtccggccttcgcaccaaatcccccaatcagtccactaaaatacttttttgtatctgcatttcatcatttgaaaacctcctgttgaggcctctgttcttctggctccgatgcggctag

SEQ ID NO: 176237 - DNA, 435 bp, Klebsiella oxytoca
atggagacttaccgattacatcgcggcaggcttatcgaccatatccagcttgtggtaaatgatttcgaggccagcaaagcgttttatacagccgtgctggcggtccttgagatccctgtcgtgaatacctacgacgattatttttgggctgatgagcttgttgtttcatccattaatagccccggttccgcaggtaagccgacaggacggcatcacctggctttccaggccagggatcgtgagacggtggatgctttttaccaggcagcgctggcacacggcggcagtgataacggagcgcccggtgagcgaacttatcacccgggctactacgcggcctttgtactcgatcccgatggtaacaacatcgaagcggtttaccatggcgaggctgaacgcagtgcggcatcggtggagattggcttcagtctttaa

SEQ ID NO: 176238 - DNA, 324 bp, Klebsiella oxytoca
atgactaatgctgattgtattgtagattcgtttgatccagaagtgtcgccgaaaaataagcgtcagttgacggtgagttatgtgagacgtttgccagatcgtcgtcttgttccggcgctgatcatgaagggccagtggctggcggcggcagggttttcgaccggcacccgggtggaggtgcgggtgatggatggctgcattgtgctgacggcggttgagccggaaccggagctggaagccgcgatgcgcagggtggagaagctgtcggccaggaagcagaagcaggtcagagagtttatcggggtgattgggggacggggttga

SEQ ID NO: 176239 - DNA, 795 bp, Klebsiella oxytoca
atgaagctattcagaatattcagcgttctgccgtcgctattttttaccgccgcgtgcgctgccgggttatcccacgtagataattgtgaagtgggctgtccgaccggtggaagcgaccagacgctggttcgcgaagcctatacgctcaataacaacagccaccgcaaattcgctaattgggtggcgtataaaatcaccaaagccagcctggccagcgggcgttcgcgcagctggaagcgcgatccggatttacccgctgcggatacccttgcccccgcggcatataaaggggccagcgcagcattggcggtcgatcgcgggcatcaggcgccgctcgccgggctcggcgccagcgcagactggccggcgttaaactatctttctaatatcaccccgcaggcctccgacctgaatcagggggcgtgggcgcggctggaggataaggagcgcgccctcgccgagcgccgcgacgtggcggcggtgtggtccgttaccgggccgctgttcgaacggcatatcgctaccctgcccgccgcgcccgaggtggagcttcccagcggctactggaagattatttttatcggctccagtccggataaaggcgaatacgcggcgtttttgctggatcaggcaacgcccaaaagcgccagtttttgtgattatcaagtgacggtggaggagattgagcggcggactcatccggcgctctcgttctggtccgccctgccggcaggtatcgcccgccgcctgaagtcccggaaggggacgctggctaaagagatggggtgcccgtaa

SEQ ID NO: 176240 - DNA, 1032 bp, Klebsiella oxytoca
atgaaaaaggaactctggagaggcgtgctggcactggccgtacttagcctccccgcgatggctaaaacaggcgtgtcattcagccacaaagactgggaagtggtgtgtgataacacgctgacctgccgggcggcgggatacagcgctgaagaaggaagcggaggttcggtgctgctgacccgccaggccggagcgggcaccgccgtctcgggagagctgatgctggcggaggtgaccgacagcgacgttctgccgggcaaactgacgctgtggatcaatggccagccggcaggcgatgtgaagccagcaaaagagagctggccgctgtcggagaaacaggcccgggcgatcgttaacgccatcaaaggcagcgggaaggtcgaatttacaggcggggaggcgccgtttgagctttccggcgaaggcgcttacgcggtactgctgaaaatggacgatgttcaggggcgaatcggcacgccgggcgcgttgaccaaaaaaggcgacgggccggaaagcagcgtccgggcggcgattcccgccccggtcattcaccgggtcatgcctgagaaggcgcaggagagagcgttaaccgcgcctgagctggcggtgctcaagccgaagcttctggccacgctaaataacgatgattggtgcgatcgcctccagactgaggagggtgagaaggctgaaactattagcctgacgccgctggatcacgcccattctctgatttcgaccttgtgctggcgggcggcctataacgagggatatggctattgggttgtggatagcaaacttgagggcaatccgacgcttatcacggtctccggttctgagtatggtgacggcgagatttttatgagccagaaagggcgagggctcggcgattgctgggggacggcaagctggctctgggatggcacaacgttccgcaaaagccgtgaagcgaccaccgggatgtgccgctatcttcgcctcggcgggacatgggatctccccacctgggtgaccgaggttaaaccggtaaagtga

SEQ ID NO: 176241 - DNA, 1014 bp, Klebsiella oxytoca
atggccaaaaccgttgagcaagtcgccagggcgctggaaatctcgattaccaccgtgcgcctggtgctgggtggcaaagctgagcagtatcgcatcagcgccaaaacgcagcagcgtattaatgattacatcgccgaaaacgggctggtcgttaaccatatcgcccgcagcctgaagctcaataaaaccgagaccttagggctggtgatcccgcgtttatccaacctgtttttctccaccctggcggaaaagctcgaagcctgctgccgtcaggcggggtatcagctaatgattgcctgcacctacagcgacagcgagcatgaaaacagtctggttgaaggactgctggcgcgcaacgttgacgggctcttcgtggtgccctctacccgggaaacgcagctgcatcaccagaaggtagcgcgcaagcggccgctggtgctgctcgaccgcgattttggcgagagcgacgtgtcgctggtggtgagcgataactacaatggcagcaaaaagctggtgcaggcgatgacccaggcggtggacgtctcgccgattttttttatcgccggggatacccagcagccgtcgatccagcgtcgtctgcagggctacctgagcgagctgcccgccgggaaggagtggatattgtccgccagtcataaccgtcaggaagagggcaagcagctgatgctcgattttctccgtcagcatcgcgaaccgccgaaggcgtttatcgcctcctccctgcccattctggaagggacgctgagcgcgctgcgggaaacctacggctttattccgtcggatattcccatcggcaccttcgatgaacaccagatgctgggatttctgccgaacgcagtatggtcgatgcgccaggatgaggacgcctgggcacagcacgcgtttcatctgatgcagcagaagctgcagggggaaaatgccgatgtgaagatcaccgtcccgatgaccctgattcatcgcccgctgtcggtagagaagcagcggagccagtaa

SEQ ID NO: 176242 - DNA, 432 bp, Klebsiella oxytoca
atgccggacaatgacgcgttctgtccccaggtccgtctgaacgatagcgttgtatgccagcaggtcgcgcggtttttacaggagacggaaagcgatgcgcgaacccgggggctggcagtggcggttgtcgggccggagggcgagctcatcgcctttggtgcgcacgctcgctgcccgccgctaccgcgccagctggcgcagcgcaaggcctggagcgccctgcgctttcgccgtccgacggcaacgctggcgcaagaggtcagcgccggcgccctgcagctggcggtatttaacgacccgcagctgctggcgatgccgggcggcgagccggtgatcgtcgacgggctggccattggcggcgtcgggatcagcggcctgccgccagagctggacgccgggctggcggcgcggtttgttcagcgattgacttga

SEQ ID NO: 176243 - DNA, 912 bp, Klebsiella oxytoca
atggtaagcgataaatggcagcgttttcgcggcattatctccgcggtggtgacgccgatgcacgccgatgagtcggtgaactacgcggcgctggacgcgctcgcccgcgcccagctggcgcgcggggttgaaggcttttactgctgcggctcctccggggagggaccgttgctgcgtttcgatgagcgcaggcaggtgctggcgacgctggtgcagtcggcgggcggtcaggtgccggtgatcgcccacgtcgggacgccacgcacccgggacgccgtcgagctggcgaagcacgccgagcaggacggcgccagcgcggtgtcgctggtgccgccctactactacaaatatagccgcgaggagattatcgcctactaccgtcgggtgctggacgccatttcgattccggtgattttatataatattccgcagtttaccggcgtcgagctggatgcccagagcgccgacgcgctgctcggcgaagagcaggttctgggggtgaagcatacttcgcataacctctattcgctggaacgcatgatcgcccgctacccggagaaagtcttttttaacggtttcgatgagatcttcctttccagcctcgcggcgggcacgacggccacggttggcaccacggttaacctgcagccggagctgtttctcgccctgcgcagcgctttccagcagggcgacatcgcccgggcgcagcgcctgcagcagcagatcaacgaggtggtggagcagctggtcgcgcgcggcgtgttccagtcggcgaagtatcttaccgcgaaagagaccgtcgataccggccccacccgcgagccgtttgtggcgctgacggcggcgcagaaaggcgagctggatgacctctatctgcgcttaagggggtatatcgccgatgccggacaatga

SEQ ID NO: 176244 - DNA, 828 bp, Klebsiella oxytoca
atggaagacacgttattctcggttaaagacaaggtcatcattgtgaccggcggccttggacagctgggggcgcagtatgtgaagacgttacacgaacgcggcgcgaaggtggcggcgctggccacccgcgtcgatgccgcgcgcgtcgaccgcgtgctgggggcgattaaggactccgaccgcctgctgtgcgcggaagtgaatattaccgataaagccagcattaaccgggtgctggacagcattgaagcgaagtggggcgtgccggatggcctggtcaacaacgcgggcgtcgatacccagcccagcgcgccgccggaagtctccgggccgtttgaggagttcccggaagaggtgttccgcgaggtggtggaagtgaacctggttggcaccttcctgatgacccagcaggtcggcaaacgcatgaagcaggccggcaaaggcggctcgatcatcaacgtcggttcgatctacggcgtggtctctccggtgcaggatatctacagctacaaaaaagaggacaccggcattccgttcgtcaaaccggtggcctattcagcggcaaagtccgggctatataactttacccgctactgcgccacctactgggggcgcgacggcattcgcgtcaataccctgaccctctccggcgtcgagcgcagcgatcaggacccgcgctttcagaaaaactacacccaccgtattcccatcgggcggatggcgaaagcccacgagtacaacggcgcggtggtgtttttgctctccgacgcctcggtctatatgaccggttccaacgtggtggtggatggaggctggaccgcatggtaa

SEQ ID NO: 176245 - DNA, 1104 bp, Klebsiella oxytoca
atgaacagcacaaaaatgcccgtgattgaaaatatcgaactgatgaccgcccgcgttccgctgccggaaggcccgtggggagatcaaattcaccacgtcaccgatatcgaagtggcgatagttgacgtctacggttctaacggccacgtcggcaccggctttagccacacttccggctggtgcgggaaaaccatctctgcgttgattgccgagattatcccggacgttattggccagccactctccccgcgcggcctgtggcatcgctcgtataaacacgtacacgacgtcggcggcgcgggcgtcaccacccatgccctggcggcgctggatattgcctactgggatctgttaggtaaaaccctcaacgcgccgattatcgacattcttggccgcgtgcgcgatcgcgttccgctgtacggcagcggcatcaacctgcatctgtccattgaggaagtgatcgaccaggtcaagcgctggaaaagcaccggctatctggcggcgaaagtgaaagtgggcaaaccgacgctggaagaggacgtggagcggctgcgtaagattcaggaggcggtgccgggcttcccgctggcggtggacgccaaccagggctggaacttcccgcaggcgctgcgcgcattcaagctgttcgagccgcttaacctgctgtggattgaggagccgctgccctccgacgatatcgccggccacctgcggctgcgcgagcgcagcgccacgcccatcgcgctgggagaaaacgtctataacttaaatcagtttacgcagtacatcgagagcggcagcgcggattacatccaggcagatctcggccgcgtcggcgggatcaccggctatctggatatcgccgccgtcgcccgcgcgcacaacctgccgatgacgccgcattttgtcatggagctcagcgccagcctgctggcaacggtgccgaatatctcatacgccgagatgaccgacggcgggcgctggaaagatctgcgcatcatcgccgaagcgggcgaagaggtggacggctactacgtgccgagcgaacggccgggccacggcattattctcgatcgtgattacctcgcaacccacaaaatctaa

SEQ ID NO: 176246 - DNA, 1452 bp, Klebsiella oxytoca
atgtatcagcagcaacatattgaatttattatccagaaggcaaagaaacggctcgatcagcaggaggcccccggctgcaccaaagcgggatggctaatgatcaccgcattattaattgagtcatgggatatttattccatggcgtttattttattcgccctgaaagatatttatgagcccagcagctggctgcttggttttaccgccgccggcacccagcttggcgcggtggtcggcgcgctgctcggcggctggctgaccgataagctcggacggcgcaaaattttcctctggtcgatgatcctgttcgcgatcttcgccgttcttcagggcctggcgcccaatatgtactggctggcgattattcgctgcctcgccgggatcccggtgggcgcggacgtggctaacggctttacctacatcatggaggtgatgccgaagggcaagcgcgaagtgatggctaaccgctggcagtttatgttcgcgctggggattatcgccgccattctgctggtcaccacgctggtggcgcttgatgttcacccggatatgatctggcgcatcgtgctggcggtcccggcgatcccagcctgcctgctgctgtttatgcgtcgggagctgccggagacgccggcgtggttcgtcgaacgcggccgctttatcgaagcgaaacaagcctcccgtgactattacggcgaacaggatggccgtctgctggacgatattctgcccaacgaaaacgtcaccatcgccgacccgacgctcaaagagacgctgcacgatctgttccgtcgtccctttacccgccgcaccaccctgttcggctggttctcctgcgccgtacagtcgtttgaaaactacgccttctccttcttcctgccgctgatcctcgtcaccatcgggatttccgggcagatccagaataacctcgccctgctggcggtgaactgtatcgccgcgctctcggcgtttgtcggcccgctgctgttgccgaagctcgggcataagggactgagcaaatacggcttcctgctggtcaccatcggcatctcaatttcggcgtggggcgtctacagcagcagctttggttttatcattttcggcgcggcgctgatgctgtggggccattactgggattccgaaagcggcatgacggtgatctcgctggtggcaaaaccgcgctatcgcggcgtggcctccggcatcggctataccatcgtcaaggtcaccgccttcgtcaccaccctggtcttcccggccctgtttgaagcggtcggcgtaccggtcgcctcaatgattatcgcgatcgcgccgttctgcgccttcctcgcctcgatcttcctgctgccggaagtcttcggtcatgcggtgggcgacgagaacgatcgagaacatgatgccagcccggcaatcgccctggaggggcatgaatccccggcctccaaacattaa

SEQ ID NO: 176247 - DNA, 1650 bp, Klebsiella oxytoca
atgttgaatttaacgttacccgccgaagccgggcttattaccccgcagccaggcgaagtcttgatggtcaccaatgcggatctccgcgaaccggctaacgtcacctgctggcccacgcagaagctgtttgaacagcgtctggaaacggcgctggaaacattaggctaccgcatgcgccgcgcccatccggtcaacgaacgccgcggccacgggtttatcagcagccagaaagagggtagcgagctgttcgccgggatcgatccggatgcgccgattattgtcctgcttaccgcctggcaatactcccatcaccttgcgccttcgctggtacatcatcgcggtcctattttgctgctcgccaattttgacggcacctggccgggcctcgtcggcatgctctgtatggcaggctgcctcaccagcctggagcgcaactactcgcggctgtggtcggaaaccttcgccgacgaggcgtttattcgcggcctggacacctggctgcgcgacggccatctcagccataagctcggctatctgcatccggttgcgcccagcgcgccgctgctggccagcgaagccggacagattggcgtgaaggttgggcagtcgatcctcaaacacaaggccattgtcggcctgttcgataccttctgtatggggatgatcaacggcgtgttcccgcaaaaagcgatgatcgacgtagggatgccggtggagtcgctgtcgcaatcggcgctgctggttgaaatgaacaaagtgccgaccgacctgcgcgaagcctgtctcgactggtatgagacccgcggcatgcgcttccggttcggcgccgacgggacgaaggatctgacccgggagcaggtgctggaacagtgcgcgatgatgatcgccatggcgcgcttcgtgaagcgcttcggcctgacggcggtgggcgtgcagtatcagcaggggctcaaagacagctgcgccgcctcggattttgccgaaggcgccatcggcaacgcggaacgtttcccgatcccggatgagaacggcgagatcgtctgtccggacgcgccgatcccctgcatcaacgaggtggatatgggcagcgccatcccacaggtgatgctggcgaagctgctcggcgcactgggcatggcgagcgaaaccacccttcacgatatccgctggggtagcgaatacaacggcacgttctactgggatctggagatctccggcgcggtgccgttcgcccatctgaagggcgggatagccggggccaccggctatcgccagccggcgatgttcttcccctacggcggctcgaccattgccggtcagggcaaagccggacgctttatctgggcgcgagcgcattacgaaggtacccaggtgatcctgcatatcggcaccggcaccgccgtcgaactgccgcatgacgaattcgaacgccgccgccgggcaaccaactacgagtggccattactcaacgccgttctcgacggggtttcgcgcgacgatttaatggcgggccaccagagcaaccatctcagtctggcttatgtagaagaggaggtattatccgaagtgctgaacgcctttattgcccaggcgctgacgcaaaatatgaaagtctttatcgcaggcgatgcgcatttattaatgaaataa

SEQ ID NO: 176248 - DNA, 1368 bp, Klebsiella oxytoca
atgatgaccctgcttacctcgcccgccattgcccctgcaaaaaatgaacaaacatcgcaacaaacccatgaaagaagaaagctgctcaccgtgctgggctccggtctttctggcacaacgattgagttctatgacttttttatctacggcaccgccgccgcgctggtgtttccgtcgctgttttttcctaacctctcgccgctgatggcgctgctggtatccttcctgacgctgtcgattaccttcgttagccggcccatcggtgccatcgtatttggccactatggcgataagatcggccgcaagaaatcgctggttctgtcgctgatgattatgggtatttcgacgtttttcataggattaatccccagctacgacaccataggcaacgcagcgccgttgatacttatctttttgcgcctctgccagggctttgccatcggcggcgaatggggcggggcgacgacgctgatcaccgagtatgcgccgcgccatcgccggggcttttttggcacctttgttcagttgggcaacgtgcttggcctgtttatcgccaccggcgtttttgcgctggtggtgatgctgccggaggatgacctgatgtcctggggctggcgcgtgcctttcctgttaagcatcgcgctgctgtttgtcgggatgtttatccgctcaaggatcgaagagacgccggtgtttcaggagaatcagaagcagcagcagaacgcgccgaaaacggccgagcagaagtttcctgttctcaccgtgctcaaacatcaccgtaaagcggtattcctggcgatgggtatgcgcatgggggagattgttctgggctggctgacggtggcgttctttatgtcctatgtgacaagggaactcaactttactcgcgaaacggcgctgaacgggctgctgctggccagttttgtcggcatttttacctttccgttcttcggctggctttccgataaaattggccgccgaccggtctatctggccggcgccgcgatcacgctgatctttgccttcccgctgttctggatgatcgactccggctcggtgaagatgtttatgttcgccaccaccttctgctattccgtggggctgggcatgatgttcagcgtccagcccgccttcttttcggagctttttgacaccagcgtgcgctacaccggcgtgtcgctcggcttccagctggcgaatatcgtcggcggcttaacgccgatgatcggtaccttactgctggtgtggtccggtggcgcatcatggcccatctcgctgtttctcgcctgcatggcgctgattaccatcctgtgcgtctgcgtgacgcgggaaagctataacgatgagcttaatgaggtgaagaagtag

SEQ ID NO: 176249 - DNA, 1314 bp, Klebsiella oxytoca
atgctgctggctattcccgccagcgcctggtcagcttcgaccactaacagcctgaaggagcgcgattatatcgataccgtgctcgacgatccgttattcagccagtctcatctgaatttatcctttaaaaactactggaaatatcttaaggaagaagagaccgagccgaagaaagtccataatgcctggggtcagggcgtcgccgtcgattatcagtccggctattttgccgatattattggctttgatgccacatactacggggcggtaaagctcggcgccagcgattactttaactcccgcggcgtactctataacaacggcagcggaaataacaaaagcaacgctgaaggcttttccaaatttggtcaacgcaatatcaagctgcagtatcgcctggcggacactcatctgaacgcccgctggggctggcagacgatgaaaaactttggcgtcatctccaactcgacccgcctctctccaaccacctacctgggctggaccggcgcggtgaactacggtcccttcacgctgcgcggcgcgtacatcgaaagcgcgatggatcgtaactcgccggataagaaacgcttccagaccaacagcggacagtacattaaccatatcgccagcggcgatattctgtggcaaagcgagcacctgaacatgcagtacggctatggtgaaagcgacaactatctgcgccgccatattctgtttaccaatattaagccgataaaagcgctgaacatcggtactcaggtctacgccactcacgcgctggacgagtataaagcgatgccggcaaataagcgtgactttgacgatgatgcctggcacatcgccatggatgtgaagtggcaggcggacaactggagcactaagtggggtctgggttataccgatgcgaataaggccaatgaagtgggcttctacccgcgccatatgagtaaaaactcgcgcgggacctttatctcaatggcttacgccggcaacgactatatgcgcgacggtgaactggttctctctaatatgtcggactataacctgacgccggagctggctatcggtctcgccggcaacatcgcccagtttaactaccgcggcaaccacgtccgtaccggggaaattaacgccttcagccgctgggtgccgacgcacccgagactgaaaaatctcaccgtctgggcgatgttcgggccgggctggtcctataagatgaatggcaaaacgccggtgcttaccgacggccattacagccgggccaactcgctctcttcggaagtgattatcgaatataaatttaatctgttctga

SEQ ID NO: 176250 - DNA, 780 bp, Klebsiella oxytoca
atgaagaagtggcttatagcattaatgatagcggcaggtgcggcaacctgctcggcagcggaagttaaaaacgacgatggcgtgaatatctatttcgctcgtcacggcaaaacgctgctgaatacgtttgaccgcgtacagggttgggctgactccccgcttactgaagacggcattcgcgtcgcacgttatctcggcgagggactaaaaggcattccatttgatagcttctattccagcgatgccggacgtcagcgtgaaaccatgcaggtgatacttaagcaagccggagtaagtgattacaaacttactgagctaagcggcctgcgggaagccttcttcggcggttttgaaggcggctataacaaagatatggccgacgccggcgccaaacagctggggcttaaagatggcgctgcgctgttcagccaaatgaaagcgggcaccctggccgttgataccaaccagaatgcgctggctgcagccgatcccaaaggcatggcggaaaactatcagcaggtaaaaacccgcacccaggcagcgctgcataccatcattgaaaacgcgcaggcccggggcgataaaaacgtgctggcgatttcatccggtaccgcaatgcagatcatgatttccgacttaacggacgataacgcgaaaaacaaaccgcttgccaatgccgcggtggttaaaattgtttataaagacggcaaatataccgttcctgaaatcggcactatgaaatatgtcgaagccggaaaacaggctctcgataaaaaataa

SEQ ID NO: 176251 - DNA, 876 bp, Klebsiella oxytoca
atgagaacgaaaattctgactgccgccattctggcgttatctgccgctggcgtacaggctgctgaaaaaccgctgaaaatactgttggttaacgacgatggctgccagtctgtgggaaccacatcgctgcaggaaaaactggcggccaaaggatatgacgtctggatggtggcgccggcaacgaatcagagcgggatcgggtcggcaatcacctttaagacgggtaaggtctttgatgtcaaaaaagccgctgacaaacgctactgcttcccgggaacgccggccgacgcgctggatttcggcctgtggggcgtgctgaaagacgcgccgccggatctggtgatctcgggcgttaacgacggccccaataccggtatggcgcaggttaactccggtaccgttagcgctgcagcccgcgccattcgctatggcttcccggcgattgccgccagtattggctaccgattcacggaagaagagatgaagaacaaatggccgagcacgcataagtactggcctgactcggtggattacgttgtctcgctggttgataaacttaacgccgcgcataaaccgggaagcccgattttgccgcaagggtccggtttgagcattaactatccgccgctgccgtcggctgaaattaagggcgttcattatattgagaatgaacagttccccgcgccgcagattggttatgaactgctggcggacggcactgcaaaacagacgatgaatccggaagcgataaaaccggcggaaggggataatgactcgggctggctcaacaaaggatatattacttacaccctgtttgatggttcatggaacgcgccgcagttccaggcgcagtatgagacgctgctcggaaaataa

SEQ ID NO: 176252 - DNA, 1125 bp, Klebsiella oxytoca
atggcttatcaactcaacattaactggcccgagtttttagaaaagtactggcaaaagcagccggtggtattaaagaaggctttcgccaatttcgtcgatccgattaccccggatgaactggccgggctggccatggaaccggaagtcgatagtcgactggtgagccttaagaatggtcaatggcaggccagcaacgggccgtttgaacattttgatggcctgggcgaaaccggctggtcgctattggctcaggcggtaaaccactggcacatgcccgccgctgagctggtgcgccctttccgcgtactgccggactggcgtttagacgacctgatgatctccttttccgtaccgggcggcggcgtgggcccgcacatcgaccagtacgatgtctttattattcagggcatgggtagccgccgctggcgcgtgggcgataagctgccgatgcgtcagttctgcccgcatcccgcgctgctgcacgtcgacccgttcccgccgattattgatgaggatctggagcccggcgatattctgtacattccgccgggattcccgcacgacggaatcactcacgaaacggcgctgaactactccgttggcttccgcgggccaaacggccgcgatttgatcagcagctttgccgattacgcgctggaacacgatctcggcggcgagcactacagcgatccggatttaacctgccgtgaacatccgggccgggttgaagagtatgaactggaacgtctgcgcggcatgatgatcgagatgattagccagccggaagatttccgccagtggtttggacgttttgctaccacgccgcgccacgagctggatattgcgccagctgaaccgccttatgcagaagaagagattgtcgacgcactggagggaggcgaaatgctgactcgcctgagcggcctgcgggtactgcacatcggcgatagcttctttgtgaatagtgaacagcttgagccaaccgaacctgcggcactggacgcgctttgccgctataccctgctgggtaaagatgagttaggtgaggccgcactgcgcaatccggcctttatcgccgagctgacccgtttgattaaccagggctattggttcttcgacgaatag

SEQ ID NO: 176253 - DNA, 855 bp, Klebsiella oxytoca
atggctaccaaactgcaggacgggaatacaccttgtctggcagctacaccttctgatccacgtcccaccgtgctggtgtttgattccggcgtcggtgggctgtcggtttacaatgagattcggcagcttttgccgaatctgcattatatctacgctttcgacaacgttgctttcccctacggcgagaaaagcgaagagtttattgttgaacgcgttctggagattgtcactgcggttcagcagcgttaccccctggcgctggccgtcattgcctgtaataccgcaagtaccgtttccctccccgccttgcgcgacaaatttgcgtttccggttgtcggcgtggttcctgcgataaaacccgcggcaagattaacggcgaatggcgttgttggtctgctggcgacgcgcgggacggtaaaacgtccttatacgcgcgaactgattgctcgttttgcgaatgaatgcaaaatcgaaatgctgggatcggcagagctggttgagctggcagaagccaagctgcacggcgagccggttccgctggatgagctgcgacgtattctgcgtccctggctgcgaatgcaggagccgcctgatacggttgtgttgggctgtacgcatttccctctattacaagaggagctgcagcaggttctgccggaagggacaagaatgatcgactccggggcggcgattgcgcgtcgaaccgcctggctattagagcatgaagcgcctgatgcaaaatcgggtgatgccaatattgcgtactgtatggcgttaacggctgaaactgaacagcttttgagcgttttgcagcgttacggcttcgaatcgctggaaaaactaccgctttcatag

SEQ ID NO: 176254 - DNA, 1857 bp, Klebsiella oxytoca
atgattaaaaaagcttcgctgatgacggcgctctccgtcacggctttttccggctgggcgcaggacagcaattcagatacgttagtggtgacagcaaatcgttttcaacaaccggtcaataccgtactggctcctaccgacgtcgtcacgcatgaggatattcagcgctggcagtcaaaagatctcaatgatgttatgcgtcgtttgccgggcgtggatatcgcgcaaaatggcgggatgggtaacagctcttcactttatgtgcgtgggacagaaggccgtcatgttctggtgctgattgatggtgtgccgatggcgcgtgcggggatctccaacggtatcgatttggggcagatcccggtgtcgctggtgcaacgcgtggaatatattcgtgggccgcgctccgcagtgtatggttcaggtgcgattggcggcgtggttaacattatcacgatgaccgaccaggatcgttcacagatcaatgcgggcatgggtagcaatggctatcagacgtatgacggcacgataaacaaacgctttggcgacacggtagtgaccgcagcgggcgcttaccagactaccaaaggctttaacatccagcctgattccacctatagcggcgacagcgatcgcgatggctaccgcaataagctgttctggggcggtgtgcagcacaagtttgatgataacttctcgggtttcttccgtggctatggctacactgcgaacagcgattacgatcagggcgggtatggttatgccggcggtaacgacgaagcccagaactacaatcaatcgtgggatatcgggctgcgctttaactcgggtatttactcttctcaactgatcgcaaactatcagcatcttaaaagctacaactacagcaatgacctgggacgctatgccggtgatgcgacgctggataatatggaacagcgttacattcaatggggtaacaacgttgaggtggggcatggcgcggtaagcggcggtgttgactggaaacaggaaaagctgacctcaagcagtaccacgttgtcggattcctacaagcgtgacaccaccgggctttatctgactggacagcagcagctcgatagcgtgaccctggaagcatctggccgtgaagatcacgatgagcagttcggctggcacggtacctggcagacggcggcgggctgggagtttgttgaaggctatcgggcaacgctttcctacggcaccggattccttgcgccatcgctcggccagcaatatggcgcgacgcgttttgcctcctcttacgggccaggtattgctgctaacccggatctgaaaccggaagagtctaaacaatgggaagcgggtattgagggtttgacggggccgctagactggcgtctgtcggcgtaccattatgaaattcaaaacctcatcgactacagcaataatcagtatatcaacgtcaagtctgccaccattaaagggctggagtggaccggcaacctcagtaccggcccggtggaccatcatctgacgcttcagtatgttgacccacgtgatgaccaaacggataaagttctgtatcgccgtgctaagcagcaggtgaaatacgaactgacgggacaggtcttcgatctcggctggaacgtgatgtatcagtatatcggacagcgctacgataatgattacgacaacaaccgtgatgtaaaacttggcggcgtgagcctgtgggatatcggattgtcatatccaatcacctcacacctgacagttcgtggtaaaatagctaacctgttcgataaagattacgagacagtttatggctaccaaactgcaggacgggaatacaccttgtctggcagctacaccttctga

SEQ ID NO: 176255 - DNA, 1101 bp, Klebsiella oxytoca
atgacccccgaacaccttcctaccgaacaatatgaagcgcagctggcagagaaagtcgtccgtttgcagaaaatgatggcgcctttcagcgccccggttccggaagtgtttcgttcgccggtcagccactatcgcatgcgcgcagagttccgcctgtggcacgatggcgatgacctgtaccacattatgtttgatcagcagaccaaatcccgtattcgcgtcgataccttcccggccgccagtgaactcattaatcaattgatgactgccgtgattgccggcgtacgcgataacccggtactgcgccataaactgtttcaggtggattatctgaccaccctaagcaaccaggcggtgatatcgctgctgtatcataaaaagctcgacgacgagtggcgccagcaggcggagcgtttgcgcgatgcgctgcgggcgcaaaacctgaatgtgcatctgattggccgcgcaacgaagacgaaaatcgagctggatcaggattatattgatgaacgcttaccggttggcgggcgtgaaatggtctatcgccaggtagagaatagcttcacccagccgaacgcagcgatgaacatccagatgctggagtgggctattgataccacgaaaggcgcaaccggcgacctgcttgagctgtattgcggcaacggcaacttttcgctggcgctggcgcgtaatttcgatcgcgtgctggcaacagagattgctaaaccatccgtcgcagcagcgcaatacaacattgccgcgaaccacattgataatgtgcagattatccgcatgtcggcggaagagtttactcaagcgatgaacggcgtgcgggagtttaatcgcctgcagggcatcgatctgaagagctatcagtgccagacgattttcgtcgatccgccgcgcagcgggctggatagcgaaacggagaaaatggtgcaggcgtatccgcgtattctgtatatctcctgcaatccggagaccctatgccagaacctggaaacgctcagtgatacccacgagatcacgcgcctggcgctgttcgaccagttcccgtatacccaccatatggaatgcggcgtactgttaacgaagaagtaa

SEQ ID NO: 176256 - DNA, 360 bp, Klebsiella oxytoca
atgaaacactcagtacaagatagaggcacgctgctgctggcgctgatcgcaggtttatccattaatggaaccttcgctgcgctattcagttcaattgtccctttttccattttccctgttttgtcgctggtgctgacggtttactgtctgcatcagcgctatcaaaatcgtagtatgcccgtgggtctgccggggctcgccgccgcctgttttattctcggcgtgctggtttatagcaccgttgtgcgcgcggaatatccggacatcggctctaacttcttcccggcggttctgtcggtgattatggtgttctggattggctacaaagtgcgcaaccgcaagagcgcgatcgctgaataa

SEQ ID NO: 176257 - DNA, 636 bp, Klebsiella oxytoca
gtgatgggcgtaagagcgcaacaaaaagaaaaaacccggcgttcgctggtggaagcagcatttagccagctaagtgctgaacgaagttttgccagcttgagcctgcgcgaagtggcgcgggaagccgggatcgccccaacgtccttctatcgccatttccgcgatgtcgatgagctgggtttgaccatggtggatgaaagcgggctgatgctgcgtcagctgatgcgtcaggcgcggcagcgtatagccaaagggggcagcgtcattcgtacctctgtttccacctttatggaattcatcggtaacaacccgaatgccttccgtctgctgctgcgtgaacgctccggtacatccgcggcgtttcgtgccgccgtggcgcgtgaaattcagcatttcatcgcggaacttgccgactatttagaaatcgaaaaccatatgccgcgcgcctttaccgaagcgcaggctgaagctatggtcaccatcgtatttagcgccggcgccgaggccctggatgtaggtccggagcagcgtcggcagctggaagagcgcctggtgctgcagctcagaatgatctcgaaaggcgcgtattattggtatcgccgtgaacaagaaaaaatttcaaatcattccgaataa

SEQ ID NO: 176258 - DNA, 1401 bp, Klebsiella oxytoca
atgtcacactcttgggattatgatgcaattgtgattggttccggtccgggcggagaaggtgccgccatggggctggtgaaacagggagcacgcgttgccgtcatcgagcgctaccataacgtcggcggcggttgtacccactggggtaccatcccgtcaaaagccctccgccatgccgtcagccgtattatcgagtttaaccaaaaccccctctacagcgaccattcccgtcttcttcgttcttccttcgccgacatcctgaaccatgccgacagcgtcattaaccagcaaacccatatgcgtcagggtttctatgagcgcaaccactgtgaaatcctgcagggcaacgcccattttgtcgatgaacacactatcgcgctggaatgccacgacggtaccgtggagacggtgacggcggaaaagttcgtcattgcctgcggttcacgcccctatcacccggcagacgtcgactttcatcatccgcgcatttatgacagcgactcgatccttagcctgcatcacgaaccgcgccatgtgatcatttatggcgccggggtgatcggctgcgaatatgcgtcgatcttccgcgggatggaggtcaaagtggatctgatcaacacccgcgatcgtctgctggcgtttctcgatcaggagatgtctgattcgctctcctatcacttctggaacagcggcgtggtgattcgtcacaacgaagagtacgaaaagattgaaggcgttgatgacggcgtcatcatgcatctgaaatccggcaaaaagctcaaggcggactgcctgctctacgccaacggccgtaccgggaataccgactctctggcgctggaaaatatcggtctgcagaccgatagccgcggtcagctaaaggtcaacagcatgtaccagaccgccctgccgcacatctatgccgtcggcgatgtgattggctatccgagcctggcctccgccgcgtacgatcaggggcgcattgcggcccaggcgctggtgaaaggcgaagcatctgcgcatctgattgaggatatccctaccgggatttacaccattccggaaatcagctcggtcggcaaaaccgagcagcagctgacggcaatgaaggtgccttatgaggtcgggcgcgcgcagttcaagcacctggcgcgagcgcagattgtcggtatgagcgtcggtacgttgaagatcctgtttcatcgcgaaacgaaagagatcctcggcattcattgtttcggcgagcgcgcggccgaaattattcacatcggccaggcgataatggagcagaaaggcggcggtaacaccattgagtacttcgttaacaccacctttaactatccgacaatggcggaagcctatcgggtagctgcgttgaatggcttaaaccgcctgttttaa

SEQ ID NO: 176259 - DNA, 918 bp, Klebsiella oxytoca
atgaatattcgcgatcttgaatatctggtagcgctagctgaacaccgccacttccgccgtgcggcggattcttgccacgtcagtcaacctacgcttagcgggcagatccgtaagctggaggatgaactcggcgtgatgttgctggagcgcaccagccgtaaggttctgttcacccaggcagggctgctgctggtggatcaagcgcgtaccgtgctacgcgaagtcaaagtgcttaaggaaatggcgagccagcagggagagaccatgtccgggccattgcatatcggactgatcccgaccattggcccttatctgctgccgctgattatccccatgctgcaccagacctttccgaagctggaaatgtatctgcatgaagcgcaaacccatcagctgttggcccagcttgatagcggtaagctcgactgcgcaattctggcgctggtcaaagagagcgaagcttttattgaggtgccgctgtttgatgagccaatgatgctggctatctatgaagatcatccgtgggcaaaccgcgagtgcgtgccgatgtcggatctggccggtgaaaaactgctgatgctggaagatggccactgcctgcgcgatcaggcgatgggcttttgctttgaagccggcgccgatgaagacacccacttccgcgcgaccagtctcgaaacgctgcgtaacatggtggctgccggtagcggcatcaccctgttgcccgccttagccgtgccgcaggagagaaagcgcgatggcgtggtctatgtgccttgcattaagccggaaccgagacgtaccgttgggctggtttatcgcccgggttctccgctgcgtagccgttatgaacatctggcggaggccatccgcagtaaaatggatggccatttcgacgcggcgttaaaacaggcggtttaa

SEQ ID NO: 176260 - DNA, 1374 bp, Klebsiella oxytoca
atggcactttggggtgggcgttttactcaggcagcggatcagcggttcaaacagttcaacgactctttgcgctttgactatcgcctggcggagcaggatatcgttggctctgttgcctggtccaaagcgctggtgacggtgggcgtactgaccgctgatgaacagcagaagctggaagaggcgctgaacattctgctggaagaagtacgggctaatccgcagcagatcctcgaaagcgatgcggaagatattcatagctgggtagaaggtaaactgatcgacaaggttggccaactgggcaaaaagctgcacaccgggcgcagccgtaatgaccaggtcgcaacggacctgaagctgtggtgcaaagataccgtggtggagctgctgtcggcgaatcgtcagctgcaaagcgcgctggttgagacggcggaggctaatcaggacgcggtcatgccgggctatactcacctgcagcgcgcgcagccggtgacgttcgctcactggtgtctggcctatgtcgaaatgctggcgcgtgatgaaagccgcctgcaggatgcgctgaagcgtctggacgtcagcccgctgggctgcggcgcgctggcggggaccgcctatgaaatcgatcgcgaacagcttgccggctggctgggtttcgcaacggcgacccgcaatagcctggacagcgtgtccgatcgcgatcacgtcctggaactgctgtccgatgcctcaatcggcatggtccacctgtcgcgttttgccgaagatctgatcttctttaataccggcgaagcgggctttgtggagctttctgaccgcgtgacgtcgggttcatccctgatgccgcagaagaaaaacccggatgcgctggagctgatccgcggtaaatgcggccgcgtgcagggtgccctgaccggcatgatgatgacccttaaagggctgccgctggcctacaacaaagatatgcaggaagataaagaaggcctgtttgacgcgcttgatacctggctcgactgcctgcatatggcggcgctggtgcttgacggtattcaggtgaaacgcccgcgctgtgaagaagccgcgcagcagggatacgcgaatgccaccgagctggcggactatctggtagctaaaggcgtaccgttccgtgaggcgcaccatattgtgggtgaagcggtagtagaagccattgcccagggcaaaccgctggaagatctccctctggccgatttacaaaaatttagcggcgttattgctgatgacgtctatccgattctttcgctgcagtcgtgtctggataagcgagcggctaaaggcggcgtttctccgcagcaggttgctcaggcgattgccgacgctaaatcgcgcctggtttga

SEQ ID NO: 176261 - DNA, 774 bp, Klebsiella oxytoca
atgaatcctttaattatcaaactcggcggcgtcctgctggacagcgaagaagcgctggagcgcctgtttactgccctggtgaactaccgtgaatcacatcagcgcccgctaattattgtgcacggcggcggctgcgtggtggatgaactgatgaagcagcttaatctgccggtgaacaagaaaaatggtctgcgggtcaccccggcggatcagatcgacattattaccggcgcgctggcgggaaccgccaataaaacgctgctggcgtgggcgaagaaacacggcctggcttccgttgggctattcctcggcgatggcgatagcgtcaaagtgacgcagcttgatgaagagcttggccatgtcggatttgctcagccgggttctccggcgctgattaacacgctgctggcgggcggttatctgccggttgtcagctccatcggcgttaccgatgacggtaagttaatgaacgtcaacgccgaccaggcggcgaccgcgctggcggcaacgcttggcgcagacctgattctgctgtcagacgtgagcggcattctcgatggcaaaggtcagcgtattgctgaaatgaccgccgggaaagctgaacaactgatcgagcagggcattatcaccgacggaatgatcgtcaaagtgaatgcggctctggacgcggcgcggacattaggccgcccggtcgatatcgcctcctggcggcacgcagagcagctccctgcactgtttaacggtacgccgatcggcacgcgtattctggcataa

SEQ ID NO: 176262 - DNA, 1005 bp, Klebsiella oxytoca
atgttgaacacgctgattgtgggcgccagcggttatgccggcgcagagctagtggcctatgtaaatcgccatcctcatatgaccataaccgctttgacggtctccgcgcaaagcaatgatgcgggaaaattagtttccgatttgcatccgcaactgaaagggattgtcgatctgccgctgcagccgatgtctgatatcagcgagtttagcgccggagtcgatgtcgtttttctggctaccgcccatgaagtgagccacgatctggcgccgcagtttctcgcggcgggctgcgtggtgttcgatctctccggggcgttccgcgtgaatgacggcgccttctatgaaaaatattatggtttcactcatcagcaccctgaactgcttgaacaggcggtttacggcctggccgagtggagcgtcgaaaagctaaaagaagcaaatctgattgccgtacccggctgctacccgacggcggctcagctatcgttaaaaccgctgatcgatgcgggactgctggatcttaaccagtggccggtgatcaacgcgaccagcggggtcagcggcgccgggcgtaaagcctctctcggtaacagcttctgcgaagtcagcctgcaaccctacggcgttttcaatcaccgccatcacccggaaatctccacccacctgggcgcggacgttatttttaccccgcatctgggcaattttaagcgtgggattctggaaaccattacctgccgtctgaagcccggcgtcagtaaagaacaggtcgcggcggtgttccagcaggcctatgcggataaaccgctggtacgtttatacgatcgcggggtccctgcattgaaaaatgtcgtgggtctgccattctgtgatatcggttttgcagtccaggatgaacatatcatcgtggtggcggcggaagataacctgctgaaaggtgcggccgcgcaggccgtacagtgcgctaacattcgtttcggcttcgctgagacgcagtctcttatttaa

SEQ ID NO: 176263 - DNA, 1152 bp, Klebsiella oxytoca
atgaaaaacaatttaccgccctttatcgagatttaccgcgcgctgatcgccacaccttccatcagcgcaaccgaagaggcgctggatcaaagcaatgagtctttaatcaatttactggcgggctggttccgtgatatcggctttaatgttgaagttcagccggtgccggatacgcgtaataaattcaacctgctggcgagtaccggccacggcgcaggcggcctgctgcttgccgggcacaccgataccgtcccgtttgatgatggccgctggactcgcgatccttttaccctgaccgagcacgacaataagctatacggcttgggcactgcggatatgaaaggcttcttcgcctttattctcgatgccctgcgcgacgtcgatgtggctaaactgaaaaagccgctctatattctggcgacggccgatgaagagaccagcatggccggcgcgcgctatttcgccgaaacgacccaactgcggccggactgcgccattatcggcgaaccgacttcgctgcagccggtacgcgcgcacaaaggccatatctctactgccgttcgcgttcaggggcagtctggccactccagcgacccggcacgcggcgtcaacgccattgagctaatgcacgatgccatcggccgcatcatgcagctgcgcgatgacctgaaagagcgttatcactacgccgcatttaccgtcccgtatcccacacttaaccttggggccattcacggcggcgatgcctccaaccgcatttgcgcctgttgcgaactgcatatggatattcgcccgctgcccggaatgaccctcaacgatcttaacgggctgctgaacgaggcgctggcaccggtgagtgagcgttggccaggtcgcctgaccgttgctgaactgcatccgccgatccctggctacgaatgcccaccggaccataagctggttgaggtagtcgaaaaactgctcggcgcgcagaccgacgtggtcaactactgcaccgaagcgccgtttattcagaccctctgtccgacgctggtattaggcccgggctcgattaaccaggcccaccagccggatgagtatctggaaacgcgctttattaagccaacccgcgagctcattacccaggtggtccaccatttctgctggcattaa

SEQ ID NO: 176264 - DNA, 2652 bp, Klebsiella oxytoca
atgaacgaacaatattccgctttgcgtagtaatgtcagtatgctcggtaaggtgctgggcgacaccatcaaggatgcgctaggagaaaacattcttgatcgtgtcgaaactatccgtaagttgtccaaatcttctcgcgctggcaatgaagccaaccgccaggagctgctcaccacgctgcaaaacttgtccaacgacgagctgctgccggtggcgcgcgcctttagccagtttctgaacctggctaataccgctgagcaataccacagcatttcgccaaaaggcgaagcggccagtaatcctgaagtgattgcccgcaccctgagaaagctcaaagagcaaccgaatctcaacgaaacgattattaaacaagccgttgaatccctgtcgctggaactggtgctgaccgcgcacccgacagaaatcacgcgtcgtacgctgatccacaagatgggcgagatcaacaactgcctgaagctgctcgataataacgatattgctgactatgagcgccaccaggtcatgcgccgtcttcgccaactgattgcccagtcctggcataccgatgaaatccgtaagcatcgccctaccccggtggatgaagccaaatggggcttcgcggttgtcgaaaatagcctgtgggaaggtgtaccaaactacctgcgtgagctgaatgagcagctggaagataacctcaactatcggctgccggtagattttgtcccggtccgctttacctcgtggatgggcggtgaccgcgacggcaacccgaacgtaaccgccgacattacccgccacgtcctgctgctcagccgctggaaagccaccgatctgttcctgaaagacgtgcagctgctgatttccgagctgtcaatggtcgagtgtaccgacgagcttcgtgaactggcaggcgcggaaggcgcgcaggaaccctatcgttacctgatgaaaaaactgcgcacgcagctgatggagacgcaggcctggctggaagcgcgcctgaaggggcagaagctgccgaaaccggcgggccttatcacgcaaaacgagcagctatgggaaccgctctacgcctgttaccagtcgctccaggcctgcggtatgggaattatcgccaacggcgagctgctcgataccctgcgccgcgtaaaagcctttggcgtaccgctggtgcgtatcgatatccgtcaggaaagcacccgtcacaccgaagcgctgggcgagatgacccgctacctcggcatcggcgactatgaaagctggtcagaagctgacaaacaggccttcctgatccgcgaactgaattccaaacgtcctctgctgccgcgtcagtgggagccgagcgaagaaacccgcgaagtgcttgagacctgcaaagtcatctccgaagcgccgcgaggctctattgcagcctatgtgatttcgatggccaaaacgccgtcagacgtcctggcagtacatctgctgctgaaagaagccggtatcggctttgcgctgccggtcgctccgctgttcgaaaccctggacgacctgaataacgccgacgacgttatgacccaactgctgaatatcgactggtatcgcggctttatccagggcaagcagatggtcatgatcggctattccgactcggcgaaagatgcgggcgtaatggccgcctcctgggcgcagtaccaggcgcaggacgcgttaattaaaacctgtgaaaaggccggcattgagctgacgctgttccacggccgcggtggttctatcggtcgcggcggcgcgccggcgcacgcggccctgctctctcagcctccgggaagcctgaaaggcggcctgcgcgtcaccgaacagggcgagatgatccgctttaaatacggtctgccggaagtcaccatcagcagcctgtcgctctacaccagcgcgattctggaagccaacctgctgccgccgccagagccaaaagcgcaatggcgcgacattatggccgagctgtccgacgtctcctgcgagatgtaccgcggctacgtgcgtgaaaataaagatttcgttccttacttccgttccgctacgccggagcaggagctgggtaaactgccgctgggctcgcgcccggccaaacgtcgcccgaccggcggcgtcgagtcgctgcgcgccattccgtggatcttcgcatggacgcaaaaccgcctgatgctgccagcctggctgggtgccggcgctgcgctgcaaaaagtcgtcgaaggcggcaagcagagcgagctggagagcatgtgccgcgactggccgttcttctctactcgtctcggcatgctggagatggtctattcaaaagccgatctgtggctggcggaatattacgatcagcgtctggtgaaacccgaactgtggaagctgggcgaagagctgcgcgaactgctgtctgctgacatcaacgtggtgctggccatcgccaacgattcccacctgatggccgacctgccgtggatcgcggagtccatccagctgcgtaatatctataccgacccgctgaacgtacttcaggccgaactgctgcatcgttcacgcctggcggaagagaaaggtgaaaaaccggatccgcgcgttgaacaagcgctgatggtcaccatcgcaggcgttgcggctggtatgcgtaacaccggctaa

SEQ ID NO: 176265 - DNA, 648 bp, Klebsiella oxytoca
atgacccgaaagatttccgcgcttatgcttggtatgagcctggtcctggcgagcagccaggctgttgcccacggccaccatagtcatggcccggcgctgaccgaagcagagcaaaaggcgagtgaaggcatttttgccgaccaggatgtaaaggacaggacgctgagcgactgggacggtatctggcagtcggtaaatccctatctgctgaacggcgatttagatgccgtgctggagcagaaggccaaaaaagccggtaaaagcgtggcggaatatcgggaatactataagaagggctatgccaccgatgtggaccagattggtatcgaagataacgtcatggagtttcacattggaaaaaccgtgaatacctgtaagtacgcctattccggttacaaaatcctgacctacgcatccggtaaaaaaggcgtgcgctacctctttgaatgccagcaggcggattcaaaagcgccaaagttcgtccagtttagcgatcacaccattgcgccgcgcaaatcccaacatttccatatctttatgggcaatgagtcgcaggaagcgctgctgaaagagatggataactggccgacctactacccttacgcgctgcataaagagcagattgtcgacgaaatgctgcatcactaa

SEQ ID NO: 176266 - DNA, 408 bp, Klebsiella oxytoca
atgaagtttataattaaatcacttacctgttttatattacttagcccttttgtttctgccgcagccactgcatccgataaatggtctggttgtgcgcaaaaagaatatcaaattcaaaaacagctggagtatgccaaagcttacggaaatatacatagaatcagggggctggaaagcgcgctgacaaaagtacaacgctactgcacagacggtaaacttacttctgagtggcaagagaaggttgcagacaaggagagtaaggtccgcgagcgcatggaagaactacgccacgcccaggcttcaggcgatccagaaaaaatcagaaaaaaagagaagaagctacaagaagccaaaaatgagcttatggaagtacaatctggcctcaatcagtcactgaccaggcaataa

SEQ ID NO: 176267 - DNA, 864 bp, Klebsiella oxytoca
atggataacggcatcaatcaggttattgattcttttattaaaggtcaggcggtaatcggcaaagtccatttttccacagagtccagaccggcttctgaaaaaacgctatgcgtcgattttccgcgcctcgaaatcatgcttgagggtcagcttcaggatccggcgattaaagccgattgcgcccggctcatgccgcacgatgtgctctatattccggctggtggatggaacgctcctcaatggctggagccctccacgctgttaaccatcctgttcggtaaacaacagctggaattcgccctgcgctgctgggacggcggcgcgcttagcgtgctggataaacagcaggttccgcgccgcggcccccgggtcggatcttttcttctgcaggcgctaaatgaaatgcagatgcagccgcaggaacagcacacggcccgctgtatcgtcaccagcctgctcagccactgcgccgatctgctgggcagtcaggtgcaaacgtcatcgcgcagccaggcgctgtttgaagcgattcgtaagcatattgatgcccactttgccgatccgttaacccgggagtcggtggcgcaagcgttttatctctcgcctaactatctttcccatctgttccagaaatgcgggccaatggggtttaacgaatacctgaatcatattcgcctggaacaggccagaatgctgttaaaaggccacgatatgaaagtgaaagatatcgcccatgcctgcggttttgccgacagcaactacttctgccgcctgttccgcaaaaacaccgaacgctcgccgtcagagtatcgccgtcagtatcatagccagttgacggaaaaaaccgcttcgccggaaaactag

SEQ ID NO: 176268 - DNA, 663 bp, Klebsiella oxytoca
atggaactctatctggacaccgcaaacgtagcagaagttgaacgcctggcccgtatttacccgctggcaggcgtgaccaccaacccgagcattatcgccgcaggcaaaacgccggtttgggatgttctgccgcgcctgcaaaaagccgtcggcccggaaggtattttgttcgcccagaccatgagccgcgacgcgcagggcatggtggaagaagccaagcgcctgagcaacgccgttcccggtatcgtggtaaaaattccggtgactgccgaaggcctcgctgcgatcaaactgttgaaaaaagaaggtatccccacgcttggtacggcggtctatagcgcatctcagggcctgctggctgcgctggccggagcaaaatacgttgcaccttacgtaaaccgcgtcgacgcccagggcggcgacggcatccgcatggtccaggagctgcaatctctgctggagctgcatgcgccggaaagcaaagtgctggccgccagctttaagacgccgcgccaggcgctggattgcctgttagccggttgcgaagctattaccctgccgttagatgtagcgcaacaaatgctcggcacccctgcggtagagtcagccattgagaagtttgagcaggactggaataacgcttttggaactctgaacctgtaa

SEQ ID NO: 176269 - DNA, 1104 bp, Klebsiella oxytoca
atggatcgcattattcaatcacccggtaagtacattcagggcgcggacgcaatttctcgccttggcggatacctcaaaccgctggctgagcgctggctcatcgttggcgataaatttgtactcggttttgccgaagaaaaactgcgtaaaagcctggcagatgccgatctggttggcgaaatcgcgccgtttggcggcgaatgctcacacaatgaaatcaaccgcttgcgtgatattgccggttccgcccgctgcacagccgtgctgggtatcggcggcggcaagacgctggataccgcaaaagcattagcacactttatgaatctgccggtggtgattgccccgacgattgcctccaccgatgccccctgcagcgcgctctctgtcatctataccgatgacggcgagtttgatagctacctgatgctgccgcgcaacccgaatatggtcattgtcgatacgcaaatcgttgccggagccccggcgcgcctgctggcggccggtatcggcgacgcgctggcgacctggtttgaagcgcgtgcctgctcccgcagcggcgccaccaccatggcgggcggcaaatgtactcaggcagcgctggcgctggctgaactgtgctacaacacgctgattgaagaaggtgaaaaagcgatgcttgcggcagagcagcacgttgtgacgccagcgctggagcgggtgattgaagccaacacctacctgagcggcgtcggctttgaaagcggcggcctggcggctgcgcacgctatccacaacggcctgaccgcgatcccggatgctcaccactactatcatggtgaaaaagtagctttcggtacgctcacgcagctggtactggaaaacgcgccggtagaagagatcgaaaccgtagcggcgctgtgccatagcgtcggactgcctatcaccctggcgcagctggatattaaagccgatatcccaggcaaaatgcgtaccgtagcggaagccgcctgcgcagaaggcgaaaccatccataatatgcccggcggcgcaacgccggatcaggtttatgccgcgcttctggttgccgaccagtacggtcaacgcttcctgcaagagtgggaataa

SEQ ID NO: 176270 - DNA, 771 bp, Klebsiella oxytoca
atgcagtcatcagatcgaagaatgagcatttacgctattctgcagcaggacaaaaaagtcgtcgtcaatgagctcgccgcaaagttcgctgtcactaaaatgaccatccgtcgcgacctctccttctttgaaaaacaaggtattgttaaaacgacctacggcggagcctatttgaccagcggcgccagcgccggtcacagctttctgctgaactcgattcaaatggatgatgataagcatctcataggccagaaagccgccgaactgattgaagatggcgatacccttattatcgactgcggcgctactccgctggcgctcgctcagtttattttagataaaagaatcatggtgataaccaattccttcccggtcgttaatctgctgaaaggacgaaaaaatattaaattgatcgtggcgcctggcgaatatgacgaggaggctcagggaatgatttctttcagtaccgccgacttctttcataacatccatgccgacaaggtcttccttggcactcagggaatcaacgacgagggcgagctgacggtagcaaccatggccggcgcgcacgtcaagcaaacgctgatgcgggccggaagacagaaaatcctgctggcggacaaaacgaaatttggccaaacgtttcttgcgggttacggccgtctggcagaccttgacttcgccgtttgccagtccggtctttccgccgatattctctctctgatggacaggcaaaacgtacagctactgctggctgaaaatcgcttctga

SEQ ID NO: 176271 - DNA, 903 bp, Klebsiella oxytoca
atgattatggcagggaaaaatagcccgttggccttcggcggcctgattgtgctgacgcttatctggagctacagctggattgcgatgaagcaggtgacgctctatatcggcgcgttcgattttaccgcgctgcgctgtattttgggggcggctttgctgtttatcgttttgctgctgcgcggtcgcggaatgcggcccacgccatttggctacacactggcgattgccctgctgcagacctgcgggatggttgggcttgcccagtgggcgctggtcagcggcggggccgggaaggttgcggttctaagctataccatgccgttttgggtggtcatgatggcggcgctatttttaggcgaacgcatgcggcggctgcagtatgccgcgataggcgtggcggcgctgggtttattgctggtgctgcagccgtggcagctcgatttttcgtcgatgaaaagcgccctgctggcaatcctctctggcataagctggggggccagcgcgattgtggttaagcggatgtatgcccgctatccgcgcgtggatttactggccttgaccagctggcaaatgctgtatggcgcgctggtgatgagcgccgtcgcctggctggtgccgcagcgcagcattgactggcagcctggggttttttgggcgttgggatatagcgcgattctggccacggcgctggcctggtgcctctggttatttgtgttacgtaatttgcccgccagcgtcgcggggctgagcaccctggcggtcccggtctgcggagtcctgttttcatggtggctcttaggggaaaacccgggtccggttgaaggcgccggtattgtgctgattgtcctggcgctgaccctaatcagcctcaggaagcgtgacgctcgggggcaggacgcataa

SEQ ID NO: 176272 - DNA, 888 bp, Klebsiella oxytoca
atgagcttttttcacgccaatcagcgggaagccctgaatcagagcctggcggaagtacagggccagattaacgtctcctttgaattctttccgccgcgcaccagtgaaatggagcaaaccctctggaaatccatcgatcgcctcagcatcctgaagccgaagtttgtctccgtaacctacggcgccaactccggtgaacgtgaccgtacccatagcattatcaaaggtattaaggagcgtaccggacttgaggccgcgccgcatctgacctgtatcgacgccagccgtgatgagctgcgtaccattgccaaagattactgggatagcgggatccgccatattgttgcgctgcgcggcgacttgccgccgggcagcggaaagccggatatgtatgccgctgacctggtgactctgctgaaagaggtcggggattttgatatttccgtcgcggcttatccggaggttcatcccgaagctaaaagcgcgcaggcagacttgctcaacctgaagcgtaaagtcgaagccggagcaaaccgcgcgattacccagttcttcttcgatgtggaaagctacctgcgtttccgcgaccgctgcgtctccgcgggtatcgatgtcgaaatcattccgggtattctgccggtctctaactttaagcaggcgaaaaaatttgccgacatgaccaacgtgcgtatcccgacgtggatggcgaaaatgtttgaaggtctggacaatgaccccgaaacccgccagctggtaggggcgaatatcgcaatggatatggtgaagattttaagtcgtgaaggggtgaaagatttccacttctataccctgaaccgcgcggaaatgagctacgcgatttgccacacgctgggcgtgcgtccggcgtaa

SEQ ID NO: 176273 - DNA, 906 bp, Klebsiella oxytoca
atgacaaattcacgtttacagaatctggatattcgcctgctgcgctacttcgccgtggttgcggaggaaaacaacatcagccgggcggcgcagcggctatttatttcgcagccgccgctgagccgtcatatccgccatctcgaggcgcagctggggctgacgttatttttgcgccataccaaaggcctgattcttaccgaagagggaaggcgagtgctggacatggtccggccgctgctggcgcttcaggaacgcactctggcagcgctgagccagctctcggcacactcgcagcagcctcttcgtctgggcctgacgatcgcttttgaacaaggagttttcgccgccgcagaagctgctttgggcgaacataaccgcgctttgcatattacccgtcagccctcgccggcgctggctcagcgggtgcgcaagggtacactcgatgcggcgctgatcgccctgccgctgaataccgatggccttcacctgcgcgctttatcgtattatgaaccgctcatcgcggccctaccggcagcctggccagaggtcggtcaggcggatctggcgttaagcgcgctcaatcaccggccgctgttttggtttaaacgcgagcgtaatcccgatttttttgactatacgcgacgcatttttgaccgggctggctatacgcccgcctacgtggaggagcccgccgagcacgatgttctgctggcgcggattgcgcgtggggaagggatgattttactgccggcatccttttctgctattcagcgtcagggtgtggttttctgtcctcttcaggatgccagtcagcagcttccgctcaggctgggcgtggtcacgatgccggcaaataagatgttgttggaagagttgaccgcagtacttgaaaaatcattgccttag

SEQ ID NO: 176274 - DNA, 402 bp, Klebsiella oxytoca
atgaccagcgaacgttttactatcggacaagaaatgctacagcgcgtggatggcaaggggggcgatgccgtcgtcaatagcctgaaggatattgcccccgatttcgcccgctatctgattgagtttcccttcggcgatatttacgccaggccagggctcgatttacgcagccgggaaatcgcgaccatcgcggcgcttacggctctcggcaacgccgcgccgcagctaaaagtgcatatcgccgccggattaaatgtcggtctgacgcaagaagagatgacggaagttatcatgcaaatggcggtctatgccggattcccggcggccctgaatggcctgtttgccgctaaagaagttttcgcagcgcagcgatcggcaggccggactaaccgcccggcctga

SEQ ID NO: 176275 - DNA, 1557 bp, Klebsiella oxytoca
atgaaattaaaaacaattagcgccgccctcctgctgactttgcctttctgggcctgcgccaaagatgtcaccctcatttacaccaacgatctccatgcccacgtcgaaccctataaagtgccgtggattgccgacggtaaacgggacatcggcggctgggcgaatatcaccacgatggttaagcaggaaaaggcgaaaaatagcgcgacctggttttttgatgccggcgactattttaccggaccctatatcagcagcctgacaaagggcaaagcaattatcgatatcatgaacaccatgccctacgatgcggcgacgataggtaaccatgagttcgatcacggctgggacaatacgctgctccagcttagccaggcgaaattcccgattgtgcagggcaacattttttatcagaacagcgataaagcgttctgggataagccctataccattatcgaaaaagagggcgtgaaaatcggcgtgatcggcctgcacggcgtttttgcctttgacgatacggtatccgccgcaacgcgggtgggtatcgaagcgcgcgacgaggtgaaatggttacagcactatatcgatgaactgaaaggtaaagtggatctgaccgtagctctgattcacgaaggcgtcccggcacgccagtcgagtcagggggggaccgatgtacggcgtgcgctggataaagatattcagaccgcaagccaggtcaacgggctggacattttgattaccggccatgcccatgtcggcacgccggaaccgattaaagtcggtaatacgttaattctttctaccgatagcggcggcatcgacgtagggaaactggtgctggattatcaggaaaaaccgcatcagttcaccgtgaagaacttcgagctgaagactatctatgccgatgagtggaaacctgacccgcagacgcagcaggtcatcgacggctggaataaaaagctggatcgcgtggtgcagcaggttattgctcaagcgccggtcgagcttactcgcgcttatggcgtctcttcaccgctgggcaaccttgccgcggatgccttgatgcaggcggcaggtaaggagacgcagctggcgttaactaactcaggcggtattcgtaatgaaattcccgccggggcagtgagcatgggagccgttatcagtaccttcccgttccctaacgagctggtcaccatggatttaaccgggaagcagctacgtagcctgatggagcatggcgcgggattaagcaacggcgtgctgcaggtctccagaggcctggaaatgaactacgacagcagtaaaccggtgggccagcgcgtcgtatcgtttttgctcaatggtcagccgattgaagatgccacggtttatcatattgccaccaacagcttccttgccgatggcggcgatggttttgccgcgtttacccaagggcaagcgcgtaatacttccggcggctactacgtttcaaatgcggtagtggactacttcaaagccggaaataaggtgacggacgagcagcttaacgacatgcgtgtcgtcgatgtgaagaaatag

SEQ ID NO: 176276 - DNA, 1137 bp, Klebsiella oxytoca
gtggagactctttttaccattaacgcctgtaaaacctacggttgccgtaacctgggtttatcctctgcggccgactaccgttttccggactatcggctgggttatcccgcgctgtactgcgcagcctgcggcagctatccaccgctgtttaatgatgatgagttccgaccctggctggccgcctatctgacggataacgcccggcgctctggctatttttgcccggcctgttatcggcgagatataattcgctatggctacaatccgaagggaacccagcggcttcagtgccgccgctgtgaaaaagtctggacgccaaaacatcaccatagcccggtaatggagtacccgcagcatatctgcagcgtaccgttgattgtgccgtttcagggtcatgaggccgggcagaaactctatctcttactcagcttcgacgtcgtacgcggcaacgttctccatctttcgtcgaacttcacgccttttccggttggcgcatcactacgctatcgctggcggggaagagaagcgcctcagggcattgcgggcgatatcgttcagcgaatctctcagaccgaagcgggctttttacagcgcagtcaattcgatgagatacagtacggcagcgccgcgccaaagcgtcattcccgcggcgccattctgcgcccggtcatcgccgcacacggtcatttcaagctgctcagccatcgttttccagcgataaaaacgcacatcattgctcatgaatgttttttacgcggcgcggcgatcgttgcctgggcgcctctgtttcgccagcagaaaggagagctgtggtatgtggaggaagagataaacaaccccgccagttcggcaccgtggcggctgcagggcaaaacgcatcatggctggtggcaaaatccgtggcagctctggacgcagggagagaaccgaaaaatggtctgccagcttgccggaacgccggacgagaacgcctcgccccctgacctcgcggccagccgacgcttcacaacctggctggaaaagagacccgagttcacgcaaagcgccctgttttcagcagggcgggtgacgcaaatactggtctcattggctcaagagtataacgcgacgcttacagcagctgcgccagacgattga

SEQ ID NO: 176277 - DNA, 2433 bp, Klebsiella oxytoca
atgagtgtgattgcgcaggcaggggcgaagggtcgtcagctgcacaaatttggtgggagtagtttagcggatgcgaaatgttacctgcgcgtcgcgggtatcatgacggagtattcgcaggcgggcgatatgatggtcgtctccgccgccggcagtaccaccaaccagttgatcagctggctgaagctcagccagaccgatcgcctctctgcgcatcaggtgcaacaatcgcttcgtcgttatcagatggagctgatttccggactgcttgctccggacgctgccgacgcgctaatcgccacgtttattctggatcttgaacgccttgccgggctgcttgatggcggcgtaacggacgcggtctatgccgaagtcgtcggccacggcgaaatctggtcggcccgcctgatggcggcggtgttgaatcacctgggcgtagaagccgcctggctggatgcgcgtagcttcttacgcgccgagcgctccccacagccgcaggtggatgaaggtttatcctatccgcttttgcagcagctgatagcgcagcatccgaataaacgcctggttgtaaccggctttatctcgcgtaacaacgccggggaaaccgtactgctcgggcgtaacggttccgactattccgccacccagatcggcgcgctggccggggcgtcccgcgtcactatctggagcgacgtggccggggtctacagcgcggatccgcgcaaagtgaaagatgcctgcctgttaccgctgctgcgtcttgatgaagccagcgaactggcccgtctggcggctccggtactgcacgcccgtacgctgcagccggtttccggcagcgatatcgatttacaattacgctgtagctacaccccggatcagggctctacgcgcatcgaacgcgtactggcttccggtaccggcgcgcgaatcgttaccagccatgatgatgtctgcctgattgagttccaggtgcccggcggccaggatttcaaactggcgcataaagagctggacgcgattttaaaacgcgctcagctgcgtccactggcggttggcgtacatgccgaccgtaagctgctgcagttctgctacacctctgaagtcgccgacagcgccctgaagctgctcgacgaagcggggttgccgggcgagctgcgcctgcgtcagaagctggcgctggtggcgatggtcggcgctggcgtgacccgtaacccgctgcactgccaccgcttctggcagcagctaaaaggccagccggtagagttcacctggcaatcagaagaggggattagcctggtcgcggtgctgcgcgccgggccgacagaaagccttatccagggcctgcatcagtcgctgttccgcgcggaaaaacgcattggtctgatactgtttggtaaaggcaacattggttcccgctggctggagctgtttgctcgcgagcagaccacgctttccgcccgcaccgggtttgaattcatccttgccggcgtcgtggatagccgccgcagtctgctcaattatgaagggctagacgccagtcgcgcgctggctttctttaatgatgaggccgttgagcaggatgaagagtcgttgttcttatggatgcgcgcgcatccgtatgatgatttagtggtgctggatgtaaccgccagcgagcagctggccgatcagtacctcgattttgccagccatggcttccacgttatcagcgcgaataagctggctggcgccagtagcagcagtaaatatcgccagatccacgatgcgttcgagaaaaccgggcgccactggctgtacaacgccaccgtcggcgccggtctgccggtcaaccatacggtgcgcgatttgattgatagcggcgataccattttggcgctgagcggtattttctccggcactctctcgtggctgttcctgcagtttgacggcaccgtaccgtttactgatctggtcgatcaggcctggcagcaggggctgacggaaccggacccgcgcgtcgatctttccgggaaagacgtcatgcgtaagctggtgatcctggcacgagaagcgggctacgacatcgagccggatcaggtgcgcgtagaatcgctggtgcccgcccactgtgaagaaggttcggtggatcacttcttcgagaacggtgaagcgctgaacgaccagatgctgcagcgtctggaagcagcgcgcgagatggggctggtgctgcgctacgtggcgcgttttgacgccaacggtaaagctcgcgtcggcgtggaagcggtgcgcgaagagcacccgctggcggcgctgctgccgtgtgataacgtctttgccattgagagccgctggtatcgcgataacccgctggtgatccgcggcccgggcgctggtcgcgatgtgaccgccggggcgatacagtcggatatcaatcgtctggcgcagctgctgtaa

SEQ ID NO: 176278 - DNA, 1161 bp, Klebsiella oxytoca
atgacgcgtaaacaggccaccatcgcagtgcgcagcggtttaaatgacgacgagcagtacggttgcgttgtcccgcccattcatctctccagcacctataacttcaccggatttaacgaaccgcgcgcccacgactactctcgtcgcggtaatccgacacgtgatgttgtgcagcgcgcgctggcggagctggagggcggcgcaggggcggtcctgacgaataccgggatgtcggcaattctgctggtgactaccgtcttcctgaaaccgggcgatctgctggtggcgcctcacgactgctacggcggcagctaccgtctgtttgatagcctggcgaagcgcggctgctatcgcgtgctgtttgtcgatcagaatgacgaacaggcgctgcgcgccgcactggcggagaaaccgaagctggttctggtcgaaagcccaagtaatccattgctgagagttgtggatattgcgaaaatctgcggtctggcgcgtgaggctggagcggtcagcgtggttgataacaccttcctgagcccggctttgcagaatccgctggcgctgggcgccgatctggtgttgcattcatgcaccaaatatttgaacggtcattctgatgtggtggccggggtggttatcgccaaagatccggcgaccgtcaccgaactggcatggtgggcgaataatatcggcgtcaccggcggggcgtttgatagctatctgctgctgcgcggtttacgtacgctttctccgcgtatggaagtggcgcagcgcaacgcgctggcgattgtcgactacctgaaaacccagccgctggtgaaaaaactgtaccatccgtccctgccggaaaaccaggggcatgagattgcggcgcgtcagcaaaaaggctttggggcgatgttaagcttcgagctggatggcgatgagcagacgctgcgtcgtttcctgagcgggttatcgctgtttacgctggcggaatcgctgggcggcgtggaaagcctgatttctcacgccgcgacgatgacccatgcgggcatggcgcctgaagcgcgtgcggccgccgggatctcagaaacgcttctgcgtatttcgaccggtattgaagatggtgaagatttaattgccgacctggaaaatggcttccgggcagcaaacgaggaataa

SEQ ID NO: 176279 - DNA, 318 bp, Klebsiella oxytoca
atggctgaatggagcggcgaatatatcagcccatacgctgagcacggtaagaagagtgaacaagtaaaaaaaattacggtttccattcctctgaaggtgttaaaaatcctcaccgatgaacgcacgcgtcgtcaggtgaacaacctgcgtcacgcgactaacagcgaactgctgtgcgaagcgttcctgcatgcctttaccggtcaaccgttgcctaacgatgaagacctgcgtaaagagcgcagcgatgaaatcccggaagcggcaaaagagattatgcgcgaactgggcatcgacccggatacgtgggaatactaa

SEQ ID NO: 176280 - DNA, 393 bp, Klebsiella oxytoca
atgaaatactgcgtactggcgctgagcctggcgtcggcctttccggcgcacgcctgggtgccgcaaaccggcgatatcgtttttcaaatctcccgcctatcgcaaagcaaagccattcagctggcgacccattccgcttacagccacaccggtatggtggtgatcagtaataaaaaaccttacgtctttgaagccatcgggcccgtggtttacacgccgctgcaaaagctgagcgagttcgacctcggatcgccgctcgttcgtgccagactcagagagcgttacggtcaggcgatcccgatggacgaaaccgtcatctcgccgcaggcgctatttgacgcgccgcagctgggaaccgttgaaaaaactggcctctgttcccgaggtaattga

SEQ ID NO: 176281 - DNA, 666 bp, Klebsiella oxytoca
gtgaaaaatctgcttgttgcctggatagtcttcctgctttacggctgcgccacctatcctcaggccatcaaaccgatgccagaaaaaccgtcgtccgggccagaaatctatctcgtcaatcacggctggcacaccgggatcatcctggccgccaatgacgtgaacaaaattctgccgcagcttaaagtacgctttcctcagcgggaacagtggtatgagatcggctggggcgataaaggtttttatcaatcgcaggagataaccacccgacttacgctgcaggctatgttctggtcatccggcgcggtaatgcacgtagtcgccttttcaggagcgcccgaaagctatttttccgcaagcgcaatgacggcattaagccttaccccgggccagaataatagcctgctgcgctacatcggtcgcagctttgcccgtaatgaacgaggggagctgataccgttgaaaaaagggatctacggcgacagccagttttacgcagcaaacggccgctacgggatatttaatacctgtaataaatggacggcaaagggactggaaagcgcgggaatggccatgaacacttcgttaaaactgacggcgggaagcgtgatgaaggcggtagaagagaataaaagctgtctgaatcgatactgctatcctctgtaa

SEQ ID NO: 176282 - DNA, 216 bp, Klebsiella oxytoca
atgaaaaaagatattcatccgaaatacgaagaagttactgcttcctgctcttgcggtaacgtcatgaaaatccgttctaccgtaggtcacgacctgaacctcgacgtgtgcggtaaatgccacccgttctacactggcaaacagcgtgatgttgctaccggtggtcgtgttgaccgcttcaacaagcgtttcagcgtaccgggtaccagcaagtaa

SEQ ID NO: 176283 - DNA, 2196 bp, Klebsiella oxytoca
atgcccgtcgctcatgttgccctgcccgttccgctgccccgcacttttgactatttgctgcctgaaggtatgccggtcaaagcgggctgtcgcgtgcgcgttccgttcggcaagcaggagcggataggtatcgtgacggctgtcagcgaacgcagcgagctgccgcttgacgaactcaagccggtggccgaagttcttgatgccgagccggtcttctcctcttcggtctggcggctgctgctgtgggcggcggactattaccaccaccccatcggcgatgtactgtttcacgcgctaccgatcatgctgcgccaggggaagcccgccagcgcggcgccaatgtggtactggtttgccaccgaacaggggcaagcggttgatatcaacagccttaagcgctcgcgcaaacagcagcaggcgctggcggcgctgcgtcagggaaaaatctggcgccatcaggttgccgaactggaatttaacgatgccgcgctgcaggcgctgcggggtaaaggccttgccgaactcgccagcgaagcgcccgctatcaccgactggcgaacaggcttctcggtgcccggagagcgcctgcggcttaataccgaacaggccaccgccgttggcgcgattcatagcgcctcggaccgtttttccgcctggctgctggccgggatcaccggctccggcaaaacggaagtttatctgagcgtccttgaaaacatgctgtcgcaggggcgccaggcgctggtaatggtgccggaaatcggcctgacgccgcagacaatcgcccgtttccgccaccgttttaacgccccggtagaggtcctgcactccgggctgaacgacagcgagcgcctctccgcgtggcgaaaagccaaaaacggcgaagcggcgattgtgattggaacccgctcgtcgctatttaccccttttaaagacctcggggtaatcgtgatcgatgaagagcacgacagctcttacaaacagcaggagggctggcgctaccatgcgcgcgatctggcggtctggcgcgcccacagcgagcaaatcccgatcatcctgggcacggcaaccccggcgctggaaacgcttcataacgtccgccagggcaagtatcgccagctcaagctgaccaggcgcgcgggaaatgcgcggccggctcaacagcatgtcctggatttaaaaggccagcagctgcaggccgggctgtccccggcgctgattagccgcatgcgccagcatctgcaggccgataaccaggtcattctgtttttgaaccgccgcggattcgcgccggcgctgttgtgccacgactgcggctggatagcagagtgcccgcgctgcgacagctactacacgctgcatcaggctcagcatcatctgcgctgccaccactgcgacagccagcgcccgatcccgcgccagtgcccctcctgcggctctacgcatctggtgccggtaggtttgggcactgagcagcttgagcaggcgctgggaccgctgttccccgatatcccgatttcccgtatcgacagagataccaccagccgcaaaggcgcgcttgagcaatatcttgccgatgttaatcgcggcggcgcgcgcattcttatcggcacacagatgctggcgaagggtcaccacttcccggatgtcaccctggtttccctgctggacgttgacggtgcgctgttctccgccgatttccgctcggcggaacgcttcgctcagctttatacccaggtatcgggccgcgcaggccgtgccggcaaacagggcgaggtgatcctgcagacccatcatcctgaacatccgctgctgcaaacgctcctctataaaggatacgacgcgtttgctgagcaggcgctggcggagcggcaaagcatgcagctgccgccgtggaccagccacgtgctgattcgcgccgaagaccataacaatcagcaggcgccgctctttttacagcagttgcggaatttactgcaggccagcccgctggcggataacaagctctgggtgctcggtccggttccggcgctggcgccaaagcgcggaggccgctggcgctggcaaatactcctgcagcatccgtcgcgtagtcagctacagcatatcgtcagcgggacgctggcgttgatcaacacgctgccggaagcgcgaaaagtgaaatgggttctggatgtcgatcctattgaaggttaa

SEQ ID NO: 176284 - DNA, 1029 bp, Klebsiella oxytoca
gtgaagcccaaaaaacagatcgttgccgccaccatgaaagacgtcgcccagaaggcaaacgtctccacggcaaccgtatcccgagcgttaatgaacccggataaggtttcgcagagcacgcgcaaccgggttgaacaggccgcgcttgaagtcggctatttaccgcaatcgctcgggcgcaacatgaaacgcaacgagtcgcgcaccattctggtgatagtgccggatatctgcgatcccttctttagcgagattattcgcggcattgaagtcaccgcggcggagcaagagtatctggtactgattggcgattgcgcccatcagaatcgtcaggaaaagacctttattgacctgattattaccaagcagatcgacggcatgctgctgctgggctctcgtctgcccttcgatgcgggcgtagaagaacagcgcaatctgccgccgatggtcatggccaatgaattcgctcccgagctggagctgccgacggtgcatatcgacaacctcaccgccgcgttcaacgccgttaactatctgcacgaactggggcatcgccgcattggctgtatcgccggtccggaagagatgccgttatgccattaccgcctgcagggctatgtccaggcgctacgccggagcggaataaccgtcgatccgcactatatcgcccgcggtaattttacctatgaagccggcgccaacgccctggagcagttgctgacgctcccggaaccaccgacggcgattttctgccatagcgatatcatggcgctgggcgcattatcgctggcgaagcgtcgcggcctgaaagttcctgaagatctgtctattattggttttgataacatctctttgtctgaattttgtgatccgccattgacgacggtctcgcaaccacgttttgatattggccgcgaagcgatgctacttttactggatcaactgcacggccacagcgtcagcagcgggtcacgattgctcgactgcgagcttatcgttcgcggcagtacgcgcaaaatccgaacataa

SEQ ID NO: 176285 - DNA, 855 bp, Klebsiella oxytoca
atggtggcgatcgccgcggcggtgctggtggcctttatcggtggactgtacttcatcacgcaccacaagaaagaagaagctgaagcgctgcagaatcgccaggcggcgggcaatggcttgccgccgaaacccgaagaacgctggcgctatattaaagagctggagagtcgccagcccggcgtccgcgcgcctacggaacccacggcaggcggtgaagtcatgaaaccggagcagctgacggacgagcagcgccagctgttagcgcaaatgcaggctgatatgcgtcagcagcctacgcagctgaccgaggtgccgtggaatgaacaaaccccggcgcagcgccagcaaaccctacagcgtcagcgtttagcgcaacagcaggtgcagcaacagcagttagcgcaggcccagacgcaggtacagcaaccgcgtacgcagcctcgggccgtcgagcaggccaaaccggtacagcagcagccgaagcaaacggcatcgaatcagcagccgtatcaggatctgctgcaaacgccggcgcataccagcaccgcccagccaaaaacgcaggccgccgcgccggtaacccgcgttgaagaagcgcctaaaaccgctaccgcggagaaaaaagacgatcgcagctggatgatccagtgcgggtcctttaaaggcgcagagcaggcggagaccgttcgcgcgcagctggcgtttgaaggcttcgcctcgcatatcaccaccaataacggctggaaccgcgtagtgattgggccgctgaagggcaaagaaaacgccagcaatatgattgaacggctgaagatggccggacacgcaaactgcattcgtctcgccgccaggggttga

SEQ ID NO: 176286 - DNA, 531 bp, Klebsiella oxytoca
gtgactacaattgtaagtgttcgccgtaatggccatgtcgttattgccggtgatggccaggctacgctgggcaacaccgtaatgaaaggcaacgtgaaaaaagtgcgccgcctgtacaacgacaaagtgatcgccggctttgcgggcggcaccgctgacgccttcacgctgttcgaactgtttgaacgtaagctggaaatgcatcagggccatctggtgaaagccgccgttgagctggcgaaagactggcgtaccgaccgcatgctgcgcaagctggaagccttgctggccgtggctgacgaaaacgcatccctcatcatcaccggtaacggtgacgtggtgcagccagaaaatgatttgattgctatcggctccggcggtccttacgcccaggccgcggctcgcgccctgctggaaaataccgatatgggcgcacgcgatatcgcagagaaagcgttgaatattgcaggtgatatctgcatttataccaaccacttccataccatcgaagaattaccgtctaaagcgtaa

SEQ ID NO: 176287 - DNA, 1335 bp, Klebsiella oxytoca
atgtctgaaatgaccccacgcgaaattgtcagcgaactggacaaacacattatcggccaggacgcagccaagcgctccgtcgccatcgctctgcgtaaccgctggcgtcgtatgcagctcaacgaagagctgcgtcacgaagtcacgccaaaaaacattctgatgatcggtccgaccggcgtcggtaaaacagaaatcgcccgtcgtctggcaaagctcgccaacgcgccgttcatcaaggtggaagccactaaattcaccgaagtgggctatgttggtaaggaagtggactcgattatccgcgatctgaccgatgcggcgatcaaaatggtacgcatgcagtccatcgataaaaaccgctaccgtgccgaagagctggcggaagagcgcatcctcgacgtgctgatcccaccggcgaaaaacaactggggccaggctgaacagcctcaggaaccctccgccgcgcgccagtctttccgtaaaaaactgcgcgaagggcagctcgacgacaaagagattgagatcgacctcgccgccgcgccgatgggcgtagaaatcatgtcccctccgggcatggaagagatgaccagccagctgcagtcgatgttccagaacctgggcggacagaagcaaaagccgcgtaagctgaaaatcaaagacgcgatgaagctgctgattgaagaagaagcggctaagctggtcaatccggaagagctgaagcaggatgccatcgacgccgttgaacagcacggtatcgtgtttatcgatgagatcgacaaaatctgtaagcgcggcggcaactcgtccggtcctgatgtctctcgtgaaggcgtacagcgcgatctgctgccgctggttgaaggctgcaccgtttccaccaagcacggcatggtgaaaaccgatcacatcctgtttatcgcctccggcgcgttccaggtagccagcccatccgacctgattcctgaactacagggtcgtctgccgattcgcgttgagctgaaagcgctgaccacccacgacttcgaacgtattctgaccgagccgaacgcgtccatcaccgtacagtataaagcgctgatggccaccgaaggcgtcaatattgaattcacggatgacggcatcaagcgtatcgcgcaggctgcctggcaggtcaacgaaaccaccgagaacatcggcgcgcgtcgcctgcataccgtcctggagcgtctgatcgaagatatctcctacgatgccagcgaaatgaatggccaaaccgtcaccattgatgcggaatatgtcggtaagcatctggatgttctggtggcagatgaagatctgagtcgttttatcttataa

SEQ ID NO: 176288 - DNA, 927 bp, Klebsiella oxytoca
atgaccgaacacgctatcactcgcactcaggcctggctggaaagcctgcgccccaaaacgttgcctctggcctttgccgccattattgtcggctccgctctggcctggcatcagggaagtttcgatccctgggttgccctgctggcaatcattaccgccggtttactgcaaatcctctccaatctggccaatgattatggcgacgcggtaaaaggcagcgataagcccgaccgtatcggcccccttcgcggcatgcagaaaggggcaattacccaggcgcagatgaaacgcgcgttgatactcaccgtagcgctgatttgcctttctggcctggcgctgctattcctggcctggcaaaccatggccgattttatcggttttatggtgcttggcggactctcaatcgttgctgcaattacctataccgtcggcacccgtccttacggctacatcggccttggcgatatttcagtgctgattttcttcggctggctgagcgtcgtgggaagctggtatcttcaggcgcacagcgtggaagcggtcattttcttacccgccacggcctgcggtttgctggcgacggcggtgctgaatattaacaatctgcgtgatatcgacagcgatcgtgaaaacggtaaaaacacccttgcggtacgcctcgggccggttaacgctcgtcgctatcatgcctgcctgctgcttggcgcgctgctatgcctggcgctgtttaatctgatctcactgcataatccgtggggctggctgttcctgctggccaccccgctgctggttaagcaggcgcgttatgtcatgcgcgagcgcgatccggtcgccatgcgcccaatgctggaaagaaccgtaaaaggcgccctgttaaccaacctgctgtttgttatcgggattatttgcagccgactcgcggcttaa

SEQ ID NO: 176289 - DNA, 486 bp, Klebsiella oxytoca
atgaaatacgatacttccgagctttgtgacatctaccaggaagatgtcaacgtcgtggaacctctgttctccaactttggggggcgctcgtcgtttggtggacaaatcatcacggtaaaatgtttcgaggataacgggttgctctacgatatgctcgaacagaacggtcgtggccatgtcctgttagttgacggtggtggttccgttcggcgcgcattgattgacgctgacctggcgcgtctggccgtacaaaacgagtgggaggggctggtcgtctatggcgcagtgcgtcaggttgacgatctggaagatctggatatcggtatccaggcgctggccgccattcccgttggcgccgcaggggaaggcatcggcgaaagcgacgttcgcgtcaacttcggcggcgtcaccttcttttccggcgaccatctctacgccgataacactgggatcatcctttcggaggatgctctggatatcgagtag

SEQ ID NO: 176290 - DNA, 963 bp, Klebsiella oxytoca
atgattaagaaaatcggtgtgttgacaagtggcggtgatgccccgggcatgaacgcagcaattcgcggcgttgtgcgcgcggcattaacggaaggtctggaagtttttggaatctatgacggttacctcggcctgtatgaagatcgcatggttcagctcgaccgctacagcgtttccgatatgatcaaccgcggcggcaccttcctgggttcggcgcgttttccagaattccgcgaagaacatattcgcgccgtcgcgattgaaaatatgagaaagcgcggcctcgatgcgctggtagtcatcggcggtgacggttcttatatgggcgccgtacgcctgactgagatgggcttcccttgcatcggtctgccgggcaccatcgacaacgatattaaaggcaccgactacaccatcggtttctttaccgctctgagcaccgtggttgaggctattgaccgcctgcgtgatacttcctcctctcaccagcgtatttccgttgttgaagtgatgggccgttactgcggcgacctgaccctggcggcagccatctccggcggctgcgaattcatcatggttcctgaggttgagtacactcgcgacgatctggttgctgaaatcaaggcgggtatcgcgaaaggtaaaaaacacgcgattgtggcgatcaccgagcatatgtgcgacgtcgacgagctggctcactatattgagaaagagaccggccgtgaaactcgcgcaaccgtactgggccacattcagcgcggcggctccccggttccttatgaccgtattctggcatcccgcatgggcgcgtacgcgattgacctgctgctgcagggattcggcggccgttgcgtcggtattcagaacgagaagctggttcaccacgacatcatcgacgctatcgaaaacatgaagcgtccgtttaaaagcgactggctggattgcgctaagaagctgtactaa

SEQ ID NO: 176291 - DNA, 897 bp, Klebsiella oxytoca
atgaatcaatcctatgggcagctggtgagtcgcgcggcgattgcggcgacggtgatggcctctgcgttacttttaattaagatttttgcgtggtggtataccggctcagtgagtattctggcggcgctggttgattcgctggtggatatcgccgcctcgttaaccaacctgctggtggtgcgttattcgctacaacccgccgatgaagaacatacctttggtcacggcaaggcggaatcgctggccgcgctggcgcaaagcatgtttatttccggatcggcactgtttctgttcttgacgggtattcagcatctcgtgcggcctgagccgatgaacgcggcgggtgtcgggatggtagtgacgctggttgcgctgataagcacgctggtgctggtgacctttcagcgctgggtggtgagaaaaacgcaaagtcaggcggtgcgggcggatatgcttcattatcagtctgatgttatgatgaacggcgcaatcctggtggcgctggccctctcatggtacggctggcatcgtgctgatgcgctgtttgcattaggtataggcgtctatattttatatagcgcgctgcgcatgggttatgacgccgttcagtcgttattagaccgcgcgttacctgatgaggaacgccaggaaattatcaatatcgtgaccgcatggccaggcgtcagcggggcgcacgatctacgtacgcggcagtcagggccgactcgctttattcagattcatttggaaatggaagataatctcccgctggttcaggcacatgtgattgccgatcaggtggagcaggcgctgttgctccgattcccgggttccgatgtgattatccaccaggacccctgttcggtggtgccgttagcgcagcagggtgttttatga

SEQ ID NO: 176292 - DNA, 504 bp, Klebsiella oxytoca
atgcgcaatgttatcgctgccgtcatggcctcaacgctggcgctaagtgcatatagccaagccgctgaagtcgtcaccagcgttaactggctccccggagacgaaggggtccagcgcagcagccagagccatatgtttgacggcataagtttaactgaacaccaacggcaacagttacgagatcttatgcagcgggcacgccacgaaaggccacccgttaatgttagcgaaatggagacaatgcatcgccttgtcaccgcagaaaattttgatgaaaacgctgtacgcgctcaggcagataagatggcgcaggaacaggttgcccgccaggttgaaatggcaaaagttcgcaaccagatgtaccacctgttaacgccagagcagcaagcggttttaaacgctaagcaccagcaacgaatgaaccagttgcgtgaggttgcaaggatgcaaaaaggctcagcgatgatgctttcgagtagtagcaataccctgcaaccccagtaa

SEQ ID NO: 176293 - DNA, 699 bp, Klebsiella oxytoca
atgaataaaatcctgttagtagatgatgaccgggagctcacctccctgttaaaagagctgctcgatatggaaggttttaatgtgctcgtagcccatgacggggaacaggcgctggcccttctggacgacagcatcgatttacttttgcttgatgtgatgatgccgaagaaaaacggtatcgatacactcaaagagttgcgtcagacgcaccagaccccggttatcatgctaacggcccgcgggagcgagctggatcgcgttctcggcctcgagctgggcgcggacgattatctgcctaagccgttcaacgatcgtgagctggtagcgcgtatacgcgctattctgcgccgatcgcactggagcgagcagcagcagacaaccgaagccggttcaccgacgctggaagtggatgcgctaagccttaaccccggtcgccaggaagccagcttcgatggcgtgaccctggaactgaccggcaccgagttcaccctgctctatcttctggcgcagcatcttggccaggtggtatcgcgtgaacatcttagccaggaagtattaggtaaacgcctgacgccattcgaccgcgcaatcgatatgcacatctccaacctgcggcgtaagctgccggagcgcaaggacggccatccgtggtttaaaacgctgcgcggacgcggctatctgatggtatcggcttcatga

SEQ ID NO: 176294 - DNA, 1374 bp, Klebsiella oxytoca
atgattggaagtttaaccgcacgcatcttcgctattttctggctcacgctggcgctggtgttgatgctggttctgatgctgcccaagctggactcgcgccagatgaccgagctgctggagagcgagcaacgtcagggcatcatgattgaacagcacgtcgaggccgaactggcgaacgatccgccgaacgacctgatgtggtggcgtcgtctgtttcgcgctatcgataagtgggctccgccgggccagcgtttgctgctggtcaccagcgagggtcgcgtcatcggcgcggaacgcaacgaaatgcagattatccgcaactttatcggccaggcggataacgccgaccatccgcagaaaaaacgctatggtcgtctggaaatggtcgggcctttttccgtcagggatggagaagataactaccagctctatctgattcgccctgctaatacctcacaatcagacttcatcaatctgctgttcgaccggcctttgttgctgctcatcgtcacgatgttagtcagcgccccgctgctgctatggctggcgtggagcctggcgaaacccgcgcgtaagctcaaaaatgccgccgatgaagtcgcccagggcaacctgcgtcagcatccggagctggaagccggtccgcaggagtttttagccgccgggaccagttttaaccagatggtgaccgcgctggagcgcatgatgtccagccagcatcgtctgctgtccgatatctcgcacgaactgcgcacgccgctgacccgcctgcagttaggcaccgcattgctgcgccgccgcagcggggaaagcaaagagctggagcggattgagatggaagcgcaccggctggatagcatgatcaacgacctgctggtgatgtcgcgcaatcaggccaaaaccgcgctggtcagcgagacggtgaaagccaaccagctgtggggcgaggtgctggataacgccgcctttgaagccgaacagatggggaaatcgttcaccgtcgagtatccgccaggaccctggccgctgtacggtaaccccaacgcgctggaaagcgcgctggagaatatcgtgcgtaacgcgctgcgctactcgcataccaaaatttcggtaagcttctcggtggataaagatggcatcacggttaacgtcgatgatgacggcccgggcgtaagtccggaggatcgcgagcagattttccgtccgttctaccgtaccgatgaggcgcgcgatcgcgagtctggcggtaccgggctggggctggcgattgtcgaagcggcaatccagcagcatcgcggttgggtgaaagccgacgacagcccgctgggcggcttgcgcttaaccctgtggctgccgctgtacaagcgtacctga

SEQ ID NO: 176295 - DNA, 675 bp, Klebsiella oxytoca
atgcactatccggtgaatgtctttgtgggcaaggtaagggattacgacggcagccgtccaagcgccatcggtaaaattcagatcgacggtgaactgaccctcggcgatttggggctggagggcgatgagcaggcggagaagaaaattcacggcgggccggaccgcgcgctgtgccactatccccgtgaacactatgcccactgggcccgtgaacttccgcagcaggcggatcttttctgcgccccggcgtttggcgaaaatctctcgaccgaagggctgacggaaaaaaatgtctatattggcgatatcttccgctggggagaggcgctgattcaggtgacgcagccgcgatcgccgtgcttcaagcttaactaccattttgccgtcagcgacatggcgcagcttatgcagaatagcggcaaaaccggctggctgtatcgggtagtggcgggcggacgagtgtccggcgatgcgccgctggcgctggtttcccgcctcagcgacgttagcgttcacgaggcgggagctattgcctggcaaatgccgttcgatgacgagcagtatcaccgcctgctatcggcggcggggctgtcggtaagctggagccgtaccatgcagaaacggcgcctgagcgggaagatcgaaaataattcgcggagattgtgggggaaatag

SEQ ID NO: 176296 - DNA, 621 bp, Klebsiella oxytoca
atgagttatacactgcctgccctgccgtacgcttatgacgccctggaaccgcattttgacaagcagacgatggaaatccatcacactaaacaccaccagacctacgttaataatgccaacgcagcgctggaaagcctgcctgaattcgcgaacctgtccgcagaagagctgattaccaaactggatcagctgccggcagacaaaaaaaccgtgctgcgtaacaacgccggcggccacgctaaccacagcctgttctggaaaggcctgaaaaccggtactaccctgcagggcgacctgaaagcggctatcgagcgtgatttcggttccgttgacaactttaaagcggaatttgaaaaagcggctgctacccgtttcggctccggctgggcgtggctggtgctgaaaggcgacaagctggcggtggtttctaccgctaaccaggactccccactgatgggcgaagcaatctccggcgcttccggcttcccgattctgggcctggacgtatgggaacacgcttactacctgaaattccagaaccgtcgtccggactacattaaagcgttctgggacgtggtgaactgggacgaagcctcagcgcgttttgccgccaaaaaataa

SEQ ID NO: 176297 - DNA, 1035 bp, Klebsiella oxytoca
atgaatcacgcgattacgatgggtattttttggcatttgataggtgcagccagtgcagcctgtttctatgccccgttcaagaaagttaaacattggtcctgggaaacaatgtggtcaatcggcgggatcgtctcctggctgatcctcccctgggccatcagcgccatgctgctgcccgacttctgggcctattacggttcttttaacgcctccacgcttctgcccgttttcctgttcggcgccatgtggggcatcggtaatattaactacggcctgacgatgcgctatctcggcatgtcgatggggatcggcatcgccattggtattacgttgattgtcggtacgctcatgaccccgattctcaatggtcagtttgatgttctcattaacactaaaggcggccagatgacgctgctcggcgtgctggttgcggtgattggcgtgggcatcgtcacccgggcaggccagttgaaagaacgcaaaatgggcatcaaggccgaagacttcaatctgaaaaagggcctgctgctggcggtgatgtgcggcatcttctccgcaggtatgtcgttcgccatgaacgccgccaagccgatgcacgaagccgccgccgcgctcagcgtcgacccgctttacaccgcgctgccaagctatgtggtgatcatgggcggcggcgcgctggttaacctcggcttctgctttatccggctggcaaaagtgaagaatttgtcgataaaagccgacttctcgctggcaaaaccgctcattatcagcaatatcctgctttccgcgttaggcggcctgatgtggtatctccagttcttcttctacgcctggggccacgccagcatcccggcgcagtacgactacatgagctggatgctgcatatgagcttctatgtgctgtgcggcgggcttgtaggcctgatcctcaaagagtggaacaacgccggtcgtcgtcctgtgggcgtcctcagcctcggctgcgtggtgattatcatcgccgccaatatcgtcggtctgggaatggcgaactag

SEQ ID NO: 176298 - DNA, 849 bp, Klebsiella oxytoca
gtggcaggtcagctgattcttcgcaaagatgaattttttgcctcccccgctcaggcggtggcggtagcggatcgctatccgcaaaacgtcttcgccgagcacacccatgagttctgcgaactggtgctggtgtggcggggaaacggcctgcacgttcttaacgatcgcccgtggcgcattacccgcggcgatctgttctatatccgcgcggaagataagcactcctacgcctcggtaaacgatcttgtcctgcaaaacgtcatttattgcccggatcggctgcggcttaactttgactgggcggcgcacattccgggtctgttcggcaccccgtgggttccgcactggcgaattggcagcagcggaatggcgcaggtcagacaggtgattacccaactggagcatgagagcagccgcagcgatgcgcaggccaataatatggccgaactgctgtttgcgcagctggtgcttattcttcagcgctatcgctacgccaccgataatctggcggcaactcaaagcgaagcgctgctcgataagctgctcaccgagctggcgggcagcctcaatcgtcccttctttcttgaccgtttttgcgagcgggaagggtgcagcgagcgcgcgctgcgccagcagtttcgtcagcagacggggatgactatcaaccactacctgcgccagctgcgtatttgccacgcgcagtatctgctgcagcataccgaacggctgattggcgaagtggcgatgcagtgcgggtttgaagacagtaactacttttcggtggtgtttaaccgcgagataggcatgacgccggggcagtggcggcagcgcagtcgcgccgccgcctga

SEQ ID NO: 176299 - DNA, 837 bp, Klebsiella oxytoca
atgactatgttgcacagtgtggatttctttaagtccggcgtttcagctgtcgccattgagccgcggctcccgcaatccgcttttcctgagcatcatcatgattttcatgaaattgttattgtggagcacggcaccgggattcacgttttcaacggccagccctataccatcagcggcggatcggtgtgctttatccgcgatcacgatcgtcatctctacgagcacacggataatttatgcctgactaatgtgctctatcgcgcgccggacgcatttcgctttttgtccggcctgaacgaactgttgccgcaagagcaggaggggaactatctctcacactggcgggtgaatcagaatgcattgcagcaggtgcggcagattgtggagcagatggagaacgttggcgcggatgcggatatgcacgccatcgccagccgcgagattttatttatgcagctgctggtgcacctgcgtaaaagcagcctcgctgaaggcgcagccaacaatgacgcgcggctcaaccatttaatggcctggctggaagatcattttgctgaagatatctgctgggaagaggtggcggcgcggttttcgctctccttgcgaactctgcatcgtcagttaaaacagcaaaccggactgacgccgcagcgctacctgaatcgggtgcggttgatgaaagcgcgccatctgctgcgccacagcgatgacagcgtgaccgatatcgcctatcgctgcggattcggcgacagtaaccacttttcgacgctttttcgccgtgaatttgactggtctccgcgcgatattcgccaggggcgcgacgccattcttcagtaa

SEQ ID NO: 176300 - DNA, 1467 bp, Klebsiella oxytoca
atgagttttcgtcattgtgtcgccgttgatttaggcgcctccagcgggcgggtgatgctcgccggttatcaacccgggcagcaaacgctggcgctgcgtgaaattcaccgttttaccaatagcctgcagaaggtggatggtttcgactgctgggatctcgatagcctggaaggggaaattcgccgcggtctggagaaggtctgcgaacagggcatcctgatcgacagcatcggcatcgatacctggggcgtggattatgtcctgctggataaagcgggccagcgcgtcggcctgccggtttcctatcgcgattctcgtacccaggggctgatgcgccatgccgaagagcagctgggccgggcggagatctaccgccgcagcggcattcagtttctgccgtttaacaccctttaccagctccgcgcgctggttgaacaacagccggaactggtcagccaggccgcgcatgcgctgctgatcccggactactttagcttccgcctgaccggcaacctgaactgggagtacaccaacgccaccaccacgcagctggtcaacattaacagcgataactgggatgaagagctgctgaactggagcggcgcgccgcgcgaatggttcggtacgccgacgcaccccggcaacgttatcggccactggatatgtccgcagggcaataacatcccggtggtcgccgtcgccagtcacgataccgccagcgcggttatcgcctcgccgctggccagcaaaaacgccgcgtatctctcttccggcacctggtcgctgatgggctttgaaagcaaaaccccctgcaccagcgatgcggcgctaaaggccaatatcaccaacgaaggcggggccgaaggccgctatcgggtactgaaaaatattatgggtctttggctgctgcagcgggtgctcaaggagcaaaacgtcagcgacctgccggcgctgatcgcacgcaccgctgcgcttccggcctgccgctgcgttatcgactgtaacgatgaccgctttatcaacccggacaacatgagcgcggaaatccaggccgcctgccgcgaatccgggcagccggttcctgccggcgacgccgagctggcccgctgcattttcgacagcctggcgctgctctacgctcgggtgcttaacgaactggcggcgctgcgcggtcagccgttcagccagctgcatattgtcggcggcggctgccagaacgaactgctcaatcagctttgcgccgacgcctgcggcatcaccgtggtcgctggcccggttgaggcctccaccctgggcaatatcggcattcagctgatgaccctggacgagctgcacaacgtcgatgaataccgtcaggtcgtgcggcaaaactacgccctcaccacctttacccccaatcatgaaagtgaaattgcccgctttagcgcgcagtttcagccacaacagaccaaggagctttgcgcatga

SEQ ID NO: 176301 - DNA, 1260 bp, Klebsiella oxytoca
atgaccactcaacttgaacaagcctgggaaattgccaaacagcgctacgccagcgtcggcgtggatgtcgaggaggccttgcgccagctggaccgcctgcccgtttccatgcactgctggcaaggcgacgacgtcgtcggtttcgaaaacccggaaggaagcctgaccggcggtattcaggccaccggcaactacccggggaaagcgcgtaacgccagcgagctgcgcgccgaccttgagcaggcgttgagcctgatccccgggccaaaacgcctgaacctgcacgccctctatctggaatccgacgcgccggtagcgcgtaatgaaattaagccagagcactttaaaaactgggttgtgtgggcgaaagccaacaagctggggctggattttaacccctcctgcttctcgcatccgctgagcgctgacggctttacgctgtcgcacgccaacgatgaaatccgccagttctggatcgatcactgcaaggccagccgccgcatttccgcttacttcggcgaacagctgggcacgccgtcggtgatgaatatctggatcccggacggcatgaaggatattaccgttgaccgcttcgcgccgcgccagcgcctgctgaacgcgcttgatgaagtgatcagcgagaagctggacccggcgcaccatattgacgccgtagagagcaaactgttcggtatcggcgcggaaagctacaccgtcggttccaatgagttctatatgggctacgccaccagccgccagactgccctgtgcctggatgctggccacttccatccgacggaggtcatctccgataagatttccgccgccatgctctatatcccgcgtctgctgctgcacgtaagccgtccggtacgctgggacagcgaccacgtggtgctgctggatgatgaaacccaggccatcgccagcgaaatcatccgccacgatctgttcgaccgcgtgcatatcggtctcgatttcttcgacgcctcgatcaaccgcatcgcggcgtgggtgattggtacccgcaatatgaagaaagcgctgctgcgcgctctgctggaaccaaccgagcagctgcgtcagctggagctcgacggcgattacaccgcccgtctggcgctgctggaagagcagaagtgcctgccgtggcaggccatctgggaaatgtactgtcagcgtcacgatacgccggcaggcagccagtggctggataacgtacgcgcttatgaaaatgcggttctgagccagcgcgggtaa

SEQ ID NO: 176302 - DNA, 831 bp, Klebsiella oxytoca
atgcagaccattatcgacgcctggttcgtccagggcatgattaaagccacttccgacgcctggctgaaaggctgggacgagcgcaacggcggcaacctgacgctgcgcctcgacgaagcggatattgaaccctacgcggcggatttccacgctaaaccgcgctatatcgccctgagccagccgatgccaacgctggccaaccagccgtttatcgtcaccggttccggtaaattcttccgtaacgtccagctcgacccggcggcgaacctcggcgtggtgaaagtcgacagcgacggcgcgggataccatattctttggggtctgaccaacgatgcggtaccaacatccgagctaccggcgcacttcctgtcgcacagcgagcgtatccgcctgaccaacggcaaagaccgggtgatcatgcactgccacgccactaacctgattgccctgacctacgtgctggagaacaacagcgatctgttcacccgtaagctctgggaaggcagcaccgaatgcctggtggtcttcccggacggcgtcggcattctgccgtggatggtgccgggcaccgacgaaatcggccaggccaccgctgaggcgatgcagaaacactcgctggtgctgtggccgttccacggcgttttcggcagcggccccaatctggatgaaaccttcggcctgatcgataccgccgagaaatccgctgaggtgctggtgaaagtctattcaatgggcgggatgaaacaaaccatcacccgcgaagagctggtcgctcttggcaaacgcttcaacgttcaaccgatgcagtccgcgttagacctttatcaataa

SEQ ID NO: 176303 - DNA, 987 bp, Klebsiella oxytoca
atgaaaacaaagacaagcttgatcctcaccgttgccatcctggcgttgtccggttccgctttagccgaagtcaaaatcgccctcgtggcgaaatcattgggaaatggattcttcgaagcagcgaacgtcggcgcgcaggaagcggccaaagagttaggcgatgtcaaagtgatctataccggcccgaccaccaccaccgccgaagcacagatcgaagtgctgaatggtttgatcgcccaaggggtggatgcgatcgccatttccgctaacgatcccgatgccgtggtgccggtgctgaagaaagcgatgcagcgcggcattaaggtggtctcctgggactccggcgtcgcgccggcgggacgccagatccatcttaatccgtccaataacgccttgattggcgaaaccaacgttaagctcgccgccgatgcgctgaaggcgctgaacgtggaaaaaggcgatgtggcgattttaagcgccaccccaacctccaccaaccagaacatctggattgaggagatgaaaaaggtgctgccgcagtatccgtccgtcaatctggtgaccgtcgcctacggtgacgatctgtcggataaaagctaccgcgaagcggtgggcctgctgaagtcatatcctgacctgaaagtgattgtttcgccttcgtcggtggggatcgttgccgccgcgcaggcggtgaaagatcagggcaaaatcggcaaggtctacgtgactggcctggggctgccatcggaaatggcgggggcgattaagtccggcgccagcaaaagctttgctatctggaatccgatcgaccttggctatgccgccacgtatctggccgacgatttagtcaaaggcacggcgaccaaaaccgaagccaatatgggcaagctgggcaaagtgaagctcgacgccgacggtagcggcgcgatggccgaaccgttcgtctacgatgcgagcaatatcgataagttctcgaagattttctaa

SEQ ID NO: 176304 - DNA, 1512 bp, Klebsiella oxytoca
atgtcagcatccaccccactgctgtcgcttaagggcatcaccaaggttttccccggcgtgcgcgcacttgagaacgtacagctcgatctctggcccggcaaagtcaccgccttaatcggcgaaaacggcgcgggcaaatccacgctggtcaaagtgatgaccggtatttatcagcccgaagagggcgagattctctataaagcgatccctatccagctgccgaccccggagtcagcgcacaaggtcgggatcaccgccattcatcaggaaaccgtgctgttcgacgagctgtcggtcactgaaaatattttcgtcggccagtatctgcatcgcggtctgctgaagaggctcgactggcccgccatgtaccgcaaagccagcgagattctcacccgcctggaggtgcagattgacccgcgcgcgacgttgaaaaccctcagcatcgcccagcgccatatggtggccatcgcccgggcgctctcctttgaagcccaggtggtgatcctcgatgagccgaccgccgcgctctcacagcatgaaattctggagttttatcaaatcgttgagcgcctgaagcaggacggcaaagcgattctttttatctcgcataagttcgatgagattttcgagctggcagactactacaccattctgcgcgacggcgtttacgtcagctccggagcgataaacgacatcaccgaagagcggatggtggcgatgatggtgggccgcgcgattacccaaacctacccgaaagttgactgtaccccaggggaaacggtgctggaggtgcaagacctctgtcaccccaccgagtttgcccatatcaatttcagcctgcgcaaaggggagattcttggcttttacggcctggtgggcgccgggcgcaccgagctgatgcaggcgctctccggggtctcgaccccctcctccggcaacatcgtactgaagggcaaagcgatgcgctttcgccagccggccgacgccatcaacgccggtatcgtctgcgtgccggaagagcggcagaagcaaggagcgattatcgccctgccgatcgcccagaacatcagcctgccgcagctcagcaaactcaaccccaacggcgtactgaacgacgcccgcgaatggcggctggcggatgagtacgcttcgcgcttacaggtcaaagcttttagctggcggcaggcggtggaaaccctttccggcggcaatcagcaaaaagtggtgatcggcaaatggctggcgacccatcccgaggtgattatcctcgacgaaccgaccaaaggcatcgatatcggttccaaagcggcggtgcaccagtttatgtccgaactggtcagccaggggttggcggtcattatggtctcttcggagctgccggaagtgatgggtatggccgaccggattatcgtgatgcacgaggggctgatggtggccgagtatcgcgccggtgaagcgacggcagaaaccatcgtcagcgccgccagcggcgtgaatcaggaggcagcgtaa

SEQ ID NO: 176305 - DNA, 1005 bp, Klebsiella oxytoca
atgggcaaacagctgcttaaacaccgcgaagcgctgctggcggcggtgatcattttgatgatcggcgctatcggcagccgggcgccgtcgttcgtctcgccgggcaatctggtggagatgtttaacgacaccgccattctgatcatcctcgccctcgggcagatgatggtgctgctcaccaaaggcatcgatctgtcgatggccgccaatctggcgctgaccggaatgatcgtcgctctgctcaacgcccactatccgggtatcccggtggcggcgctgctggcgctggcgaccctgcttggcctgctgatggggatgattaacggcctgctggtctggcggctcggtattccggccatcgtggtcacgctgggcaccatgagtatttatcgcgggattatctttctgctttccgagggtagctgggttaactcgcaccagatgagcgccgattttctcggcctgccgcgcgcctcgctgctgggaatgccgctgctgagctggtgcgccatcgccgcgctgctgctggtaggctatttcctgcgctacagccgcaccggccgggccttgtacaccgcgggcggcaacgcgacggcggcgtactacaccgggattaacgccgggaagatgcagtttgtcagcttctgcctctccggcgcgctggccggcttctgcggctatttgtggatctcacgtttcgctgtcgcctatgtcgatgtcgccaacggttttgaactgcaggtggtcgccgcctgcgtcatcggcggcatcagcaccatgggcggaaccggtcgcgtgctcggctgcctgtgcggggcgctgttccttggagtgattaataacgcgctaccggtgatcggtatttcgccgttctggcaaatggccatttccggcgcggtgatcgtcattgcggtgctgcttaacgaacgaggcaataaaggccacggacggttaatcctgcgcgacgcggcattagcccgacagaaacaggcggtgaaatcatga

SEQ ID NO: 176306 - DNA, 1005 bp, Klebsiella oxytoca
atgagcaaaatgatgatgtctgaagagatgaaaagcgtcccggccgcgccgtcgccgctgcgccgcttgctgtgctgggaaggttttctgctggcggtaaccctggcggtatttatggttaacgccctggcatccccctggttccttaatatctggaatctgtcggacgccacgtttaacttcaccgaaaaagcgatcatcgtgctgccgatggcgatgctgattatcgccagagagatcgacctttcggtagcctcgacgatggcgctgagctcaacggcgatgggcttctgcgcggcagcgggtatggatacgccgctgctggtggccgtcgggctgggcgtggggctgctgtgcggcctgttcaacggtatcctggtgacgcgctttaacctgtcgtcgattgtgatcaccatcggcaccatgagcctgtatcgcgggataacctacattctgctgggcgacaaggcgctcaatcactacccggacagcttctcctggtttggccagggctacgtgtggggcgcgctctcttttgagtttgcgctgtttatccttcttgctgccgcctttaccttcctgctgcataaaaccaactttggccgccggacctacgccatcggcaataacccgaccggagcctggtactccgggattaacgtcaagcgccacaacctgatgctgtttgcgctggttggactgatggccggcctggcggcggttctgctgacctcaaggctcggtagtacccgcccgacgctggcgatgggctgggagctggcggtcgtcacgatggcggtactcggcggcgtcaatattctcggcggttccggcagcatggtgggggtgattatcgccgctttcctgatggggctggtgacgtttggcctgagcctgctcaacgtgccgggcatcgtgatgtcgatcatcatcggcgcgatgctgattgtggttatttcgctgccgattattacccggcggattttgcaacgaagacggatttaa

SEQ ID NO: 176307 - DNA, 1149 bp, Klebsiella oxytoca
atgagttttatgttggcactacccaaaatcagcctccacggcgcgggcgcaatcggtaatatggttaagctggtggcaggtaaagggtggggtaaagcgctgatcgtcaccgacggtcatctggtcaagatgggtctgctcgacagcctgtttaccgccctggatgaacagcaaatgtcttatcatctgtttgatgaggtgttccctaacccaacggaagcgctggtgcaaaaaggctacgcggcgtatcgcgaggccgggtgtgattaccttatcgccttcggcggcggcagcccgatcgataccgctaaagcggtgaaaatcctcaccgccaacccggggccatcgaccgcctactccggcgtcggcaaagtgaaaaacgccggggtgccgctggtagcaatcaacaccacagcaggaacagccgcggagatgaccagcaatgcggtcattatcgacgccgaacgtcaggtgaaagaggtgatcatcgaccccaatatcattcccgatattgccgtcgatgacgccagcgtgatgcttgatatcccgccgtccattaccgccgccaccggcatggacgcgctgacccacgccattgaagcttttgtttccgttggcgcgcacccgctgaccgatgccaatgccctggaagcgattcgcctgatcaaccaatggctgccgcaagccgtggacgacgggcacaatcttgaagcccgcgagcaaatggcgtttggccagtatctggcgggcatggcgtttaacagcgccggtcttggcctggtgcatgcgctggctcatcagccgggcgctacccacaacctgccgcacggcgtgtgcaacgccatcctgctgccgatcatcgaaaactttaatcgcccgaacgcggttgcccgtttcgctcgcgtcgcgcaggcgatgggcgtcgatacccgcggcatgagcgatgaggcagccagcatggaggccatcaacgccatccgcgcgctgagtaaacgcgtcggcatcccgcaaggctttagtcagcttggcgttagcaaagccgatatcgaaggctggctggacaaagcgctggccgacccgtgcgcgccgtgcaacccgcgcaccgccagccgcgacgaagtccgcgaactgtatctggaggcattatga

SEQ ID NO: 176308 - DNA, 315 bp, Klebsiella oxytoca
atgatccgcaaagctttcgtgatgcaggtaaacccggacgcgcatgaagagtatcagcgccgccataatcccatctggccggagctggaagcggtgctgaaagcccacggcgcgcaccattacgcgatttatctcgataaagagcgccatctgctgttcgccacggtggagattgaatccgaagcgcgctggaacgccgtcgccgggaccgaggtgtgtcagcgctggtggcagcatatgcgcgatgttatgccggccaatccggacaacagtccggtaagcgcggagctcaaagaggtgttttatctcgattaa

SEQ ID NO: 176309 - DNA, 1365 bp, Klebsiella oxytoca
atgacgcataataattattatgacgtgacgcagtggcatatcggtaatccgtataaggatatcggcgaagttatcaacagtattattctcgatattaaaaatcggcaaaccgcaaccgacatgaataatggtggaaaacccggcgccgctatctatatcccgcccggcgattatcatctgacgactcaggttttgattgatatcagttatttaaaaataatgggcgccggacacgggtttgtctcttcaagtattcgctttaatacggcggctgacgagtgggcgaatttgcatgatatatggccgggtggtagccgtatcctggtcgatctttgcccgcagcccggtgatgaagaacacgctggcgctgcattttacgtgaaacgcagcggagcaccgcgaataagttcagtggcgtttgaaaacttctgtattgatggcttgcattttattgatgatgggctgggaaacaacgatccggaaaatagctatattaacggcaaaaccgggatttatatcgccagcgctcaggatgctttccggattaccggcatgggatttatctatcttgagcatggtctcacgacgtacaatagtgatgctatggcgatccataataactttatcgccgaatgcggcaactgcatcgagcttcgtggcgctggacaggcttctaaaataaccgataacctgattggcgcaggctataaaggctattcgatttatgcccaaaactttggtgggttattaatttctggcaataatatctttccgcgtggcgccagcagcgttcatttatctggcgttgttcgttctaccgtgaccggtaatcggttgcactcattttatccagggatgttggtactggagaataacagtgcggagaatctcatcgcggccaatcattttttccgcgatcgcgaaccctggccgccgatgcagacctatgacaacggcctggatgatgcctatggtctgctgcatatcaatggtagtcataattcgttgattgccaatcatatttccgaaacgattgatatccagtatctcaagccgctgggaataaaaccggtcatcatccggctggtttccgggaaagggaattatattgcgaataaccatatcgtggcgaccacggagacgtcagcggcgcaggcgcagccctccgaagaggatgcctgctttgcggcgcaggtcagcgctttgctgacgacggccaggttaaaggagcttgatgcggttgccgtgcaggtagaaaaagaatccgcgcaaaacacgatactggatagcggaagcgacgatcgggtgctgatggacagggcggtaaacgccttcagggccacgcccgttcccggaacgatgtaa

SEQ ID NO: 176310 - DNA, 1389 bp, Klebsiella oxytoca
atgtctgctaccgcaatggaaaggccgagcgcttatgaaaagctggggctgagggagaagatcggctacggcatgggtgacgccggatcaggaatgatatggagcgtgctggcactgtatctgacctggttttataccgacgtgtatggcttaagtgccggagttgtggggaccttattcctggttatccgtatctttgacgcttttagcgatccgctgatgggggccatctgcgaccgcaccgtgacccgttggggtaagttccgcccatggttattatggatggcgtttccgtttgggctgggtgcggtgctgatgttcactacgccagaactaagcatgaatggcaagattatctatgcctgggtcacctatttaatgatgtcgctgatttataccgcgatcaatattccctattgctcggttggcggcgtgattactctcaatcagaaagagcgtatgggctgcctgtcatggcgttttttccttaacggactggcaacgttaattatctcctcatctattttgccgttaacggactggctgggtaatggcgaccgcgcctccggtttccagctgacgatgatgattatgggcggtgcggcaaccctgatgttcctcttctgcttttccagcataaaagagcgcgtggtgtcggttaaggaaaacgagtcattaaagaaagacctgcgggatattatcaagaacgatcagtggctattgatgatctctataacctttctaaatgttttcccggccttcatccgcggcggcgtcaccatttattatgctacctatgtgatgaaggcctctgtcggatttatcacattgtttatggcgctgggtgtggcctgtaatatgctgggcagcgtgcttgccaaaccgctgaccgatcgctttgataaactcgcgctgttccgcattattaatattattctcggtgttctgtcatttgcgctgtggtttatcgatccgcaatccctgaccccgctgatggcgttattcatcattattaacgttctgcatttaattcagtcaggcccgattctgtgggcgatgatgtccgacgttgatgactacggtgactggaagttcggcaagcgcctgaccggtatctccttcgcgggtaacctttttatgctgaaaatgggtttggcggtggccggcgctatcgtcgcgtggattctggcgtttaccggctatgtcgctaatgagccgcagcaaaatgcgcagaccattcagggcatcatcatgatgttctcactactgccgatggtgagctatttcatcagcgcgtatctggtgcgctacttcaagctgaataacgcgttccttgaaaaaatcaaagccgatcttgcaaaacgtgaactggaaaaaggacgcgattaa

SEQ ID NO: 176311 - DNA, 1011 bp, Klebsiella oxytoca
atggcatcgattaaagacgtagcaaaaagagctggggtctcgacggcaaccgtatcacgagtcctgaataatcatcccagcgtggtcgcggaaacgcgtaaggcggtgcgggaggcgatggattatctttgctatgttcccagcaaaagttcgtttcaacttagcggtaaatgttccggactgattggtgtggttgtgcctaatctggtcaatcctcacttctgtgaactgttggcgacagtggaagaagaggcccggtacatcggtaaatcggtgatcgtcaaaacgcaccagaatcaaccgcaacaagataagcatattattcataccctggtggggatgggcattgacagtttgctatgggtgccgacagaagcagaagccggtctttcagaatggttaactattacccgaatcccggttgtcgtcgttacgcaggtgtcccggttctttaattctgtatcgattaatcaggatcgcggggctgaaagtattgcggagcatttcatacacaccggacatgttgcatttggttttgttgcccaggaaggcgttgataaccgcaaggtatcgtcgtacagcaaaaaaatagcgagtcatggtttaaagcttgccaaagataattcgttctggataacaaaaggtgagggtgagaaggtctcaggtcatatatgcattcttgatgatattattgagaaactcagcgagccgaagcgaacctgtacatgtctgttagtttataacgatattgcggcaaactatcttatcgatgggctagaagcaaaaggcatcgccgttccagaagatattgcgattgccagttttgataataccttgctggcgcaaacaaaaagaattaccagcgttgcgcagccggtaagtgaaatcgctcatctcgctttccagatggtgaaatatcaacagcagccggacagtattgaaatgcacgaaattgtctctcggttaattattcgtgagagcagcgtaaaaattaatattactaccctgtaa

SEQ ID NO: 176312 - DNA, 1380 bp, Klebsiella oxytoca
atgaataaaacagcattatcgatagccataggtttgtctttgataaccggttcagcggtagcgaaaaataatcatctgacgctggaacaaaggatggagctgcttgaagcgcggcttgccgccgctgaaagccgggcggcggtggccgaaggccaggtgcgggatttacaggcgaagcagaattccgctatacaggcggcgcaaaccagcgtagcggttaaaagcatggccccgaccgctgagagtaaaaaaaatatttcagttcctgagctgaaattatccggctatggcgatctgaaaatctacggcgatgtcgaattcaatatggatgcggaaagcaaacatgggttgctggccatgaccaatgccgacgttggcagcgatacaacctatgataagtgggatttaaatggccgcattctgctcggttttgacggtatccgtaaaatggaaaacggctattttgccgggttctctatccagccgctagcggacatgaccggttcgatgaaccttgatgatgcggttttcttctttggtcaggagaacgactggaaggtgaaagtggggcgttttgaggcgtacgatatgttcccgctaaatcaggataccttcgttgagcactcaggaaataccgctaacgacctgtacagtgacggtcatggctatatctatatgatgaaagagggacgcggtcgttctgacgcaggcggtaacttcttgctgagtaaacagttagataactggtattttgagcttaatacactgttggaagacggtacttcgttgtataacgacggcggttatcacggtcgcgacatggagcagaaaaagaacgtggcgtacctgcgtccggtggtgtcctgggcaaaggatgaattttccgttgcggcggccgtggaagcgaacgtggtacagaatgcctacggctataaaaatacgcagggtcacttcgtcgatcagtctgaccgcaccggctatggcctgaccatgacctggaacggcctgaagagcgacccggcggacggtgtggtagtaaacctgaataccgcttatatggatgccaataacgagaaggatttcacctccggggtgaacgcgctatggcggcgctttgagctgggatatatctacgcgcataataaaatcagcgattatgccggcgtgatttgcgagaacgactgctggattaagaaccagggcacttacaatattcatactttgcacgcctcgtatcaaattccgaacgtcatgaacatgcagaactttaatatttatctcggcgcttattactcctttctcgacagcgacgacaagctgagtcagggggatgatgacgatcgctacggcgcgcgggtgcgctttaagtattttttctga

SEQ ID NO: 176313 - DNA, 594 bp, Klebsiella oxytoca
atgatggatatgaaagaaagaatgaacagcggcgagctctatattgattcaggatatggcttaccgcagcagcggttgatggggaaggcgcgagcctatgagtacaaccactcccatccgtttaaccaggaattaagaaatgacattattcagcggatgtttgcccgcgtgggtaaagaatgctggatagaaccaccgattaattttgcctacggaactcacatctccattggcgataatttttacgctaactttaatctgacgctggttgatgatactgagatcaccattggtaataacgtgatgtttgcgccaaatgtgacgatttcaaccgccggccacccgatccatccggatctgcgccacacccagcagcagttctctttgccggtggttattgaagacggcgtctggctgggcaccggggtgattatcaatcctggcgtcactatcggaaaaaactcggtcattggcgccgggagcgtggtgaaccgttccataccggcaaatgttgtcgccgcaggcgtcccttgtcgggtattaagagacattaccgatgaggataaaaataaatatcagctgttcgcaggctga

SEQ ID NO: 176314 - DNA, 1308 bp, Klebsiella oxytoca
atgacgacgggccgcgcggcggccctttttgaggaatacaccatgaacccgaccgtctgtacccataaaaacaaccccaatttctggattttcgggctgttcttctttctctactttttcattatggccacctgctttccgtttttgccgatctggttatcggatgtcatcggcctgaataaaaccgagaccgggattgttttctccagcctgtcgctgtttgctatctgttttcagccgatactgggcgtgatctccgataagctggggctgaaaaagcatctgatgtggattgtcaccgtgctgctggtgctgatcgcgccctttttcctctacgtttttgcgccgttgctgaaaaccaatatctggctcggcgcgctgagcggcggagcctatattggctttgtgttctccgccggcgccggggcgatggaggcctatatcgaacgcgtgagccgcaatagcgggtttgaatacggcaaggcgcggacttttggctgcctcggctgggccctgtgcgccaccacggcggggatgctgttcagcgttaacccggagtgggtgttctggatgggctctgccgccgcgctggtactggttgtgctggtggctatcgctaaaccgcaggccagtcagagcgcacaggtgatggattctttaggggccaatcgtccggcggtggatttaaaaactgccgtgagcatgttccgccagcgcaaaatgtggatgtttattctgtacgttatcggcgtcgcctgcgtttatgacgtcttcgatcagcagtttgccaccttctttaaatccttttttgccacccctgaatcgggcacccgcgcttttggttttgcgaccaccgccggggaaatatgcaacgcgattattatgttcagctcgccgtggattattaaccgcatcggggcgaaaaatacgttactgattgccggaatggtgatggcggcaaggatgatcggttcatcgtttgccacgacagctgcggaagtggtggcgctgaaaatgctccacgcgctggaagtgccgttcctgctggtaggggcctttaaatatatcaccggcgtatttgacgtccgcctgtcggcgacgatttatctggttggcttccagttttccaaacaggtggcggcgatcttcctctccgcttttgctggcaacatgtatgaccgcatcggcttccaggacacctatatgatcctcggcggaattgccctggccgttacgctaatatccgcctttaccttatcgggtaaggcaaagccggaaaagattagcgatagcgctatgacggtttag

SEQ ID NO: 176315 - DNA, 2124 bp, Klebsiella oxytoca
atgtctgattcgattttacgcctgcaaagcgcagcggctgatgtggtgatcaaaacccgcccgttcgccgaaattatctactgggggccgcatttaagccatttttcgccgcaggatgccctgagcattgcccgcccggtggccaatggtcgtcttgatgtggattcaccggtgaccttaatggctgagctgggtcacggcctgttcggcgcgccgggcatcgaaggccaccgtcaggggctggacgcttcgccgatgttcaccacgaccgaggtggcgcaggatgggcagaatttaaccatcatcagtgaagatgctcaggcaggcctgcggttatgcagtgaaattcagcttgataacagcggcgtgctgagcgttcgccatggcttgaccaacctgcgtccgcagccgtggcaggtagatcgcctggccgtcacgctaccggtcgccgagcgcgcccgcgaagtcatggcctttcatggccgctggatccgcgaattccagccccatcgtctgctccttgaacatgacagcttcgtgctggaaaaccgtcgcggacgcacttcccatgaacattttccggcgctgattaccggcagccaggcctttagcgagatgcagggggaagtatggggcgtgcatctgggctggagcggtaaccatcgcctgcgggcggaagtgaaaaccgatggccgtcgctacctgcaggcggaagcgctctatctggcgggcgaaatggcgttggcggagggggaaaccctgtggactccgcacctctacggtagctattcagcgcaggggctgaacggcatgagccagcagttccatcgttatctgcgcgaacggattattcgctttccgggcaacaaaccgcgcccggtgcatctcaatacctgggaagggatctatttcgaccacgacccgcagtacatcatgcgcatggcggatgaggcggcggaactgggcgttgagcgctttatcattgatgacggctggtttaaagggcgcaacgacgactgggcggcgctcggcgactggtatcttgatgagcaaaaatatccgcacggtctgaccccggttatcgaccacgtaaaatcgctgggcatggagttcggcatctgggttgagccagaaatgattaatcctgactccgatttatatcgcgcgcatccggactgggtgctggcgctgccgggctatacgccgcttcccgggcgccatcaatttgtgctgaatctgaatatcccggaagcctttgattatctgctggagcggatgagctggctgctgggcgagcacgcggtggattatgtgaagtgggatatgaaccgcgaactggtacagcccgggcataacggtaaagctgccgccgatgcgcaaacccgccagttctatcgcctgctcgatacgctggtggctcgcttcccgcatattgaatttgagtcctgctcctccggcggcgggcgaatcgactacgaagtgctgaagcgcagccatcgcttctgggcttcagataataacgatgccctggagcgcaacactatccagcgcggcatgagttacttcttcccgccggaagtcatgggcgcgcatatcggcaaccgccactgtcacgccaccttccgccagcacagcattgcgtttcgcggcctgacggcgctgttcggccatatggggcttgagctggacccggtaagcgctgacgaacaagagcgtgccggctaccgcaaatacgcggcgttgcataagcagtggcgcgatgtgattcatcacggcgtgcagtggcgtatcgatatgccggacgccacgacgctggcgcacggcgtggtaagcgaagaccggagccaggcgattttcctcgtcagccagctggcgatgccggactacaccctgatggcgccgctgcgcgtgccgggactggaagcgggagcgcgctaccaggtcacgctgctcgaccatccgaatattcagattacgggagagggcggccacaccatgcgtaagctgccggaatggatgacgacgccgcagaccgtaagcggcgagtggttgcaactggcggggctggcgctgccaatccttgacccggaaagcgccattttgattggcctgcaacgcgtgtga

SEQ ID NO: 176316 - DNA, 996 bp, Klebsiella oxytoca
atgtcgctgaaagccattgctaaagaacttgggatctcggttacaaccgtcagccgcgctttgaacggctatgacgacgtgtcgcaggagacgcgcgcccgcgtcgaggccgaagcgcagcgtcgcggctatcggccaaacacctttgcgcgccgcctgaaaatgggcaaaatcgacgccgtcggcctcgtttttcccgtgcgtcccgcgccgttgaataacaacgtcttccttgagatggtcggcgagattagccacgagctggcgcgctatgagatcgatttactgctgatagccgatgacgaacaggccgataaacacggttatatgcgtatggtgcagagtcgtcgtgttgatgcgctgattgttgcccatactctggacgatgatccgcgcctgattcagctgctctcttccggctttccttttctcgccctggggcgcagccgtctgccacagccctatgcctggtttgatttcgataaccatgcgggaacgtaccgcgcaacccgccatctgattagccaggggcaccagcgtatagcgctgctgagcgaaaataacaatcaggcgtttattacgcagcgccgcaatggttacctgcaagccctgcgtgaagcggggctggcggaaacctggctgcgcagcgtgtcgcccacccgccgcggagggtttcaggcgacgatggagctgctgcgtctgcccgaaccgcctacggcgatagtcaccgattgcaacacccacggcgacggcgcggcgatggcacttgcccagctcgggcgtcttaccggctccgatcgcgtctcactggtggtttatgatggtttgccgcaggacagcatcatcgaaactccggtgggcgcggtgatccagtccacccggcagggcgtgggccgccagatagccagcatggttcgccgcttaatcgccggcgacgatctcgcctctctccaggtgctctggcagcctgaatttatccccggcgaaactgcctga

SEQ ID NO: 176317 - DNA, 549 bp, Klebsiella oxytoca
atgactcagccaattagcctgattgccaaaagcctggttcgtgaacgcgcgcgcaccggtctttcccttgctgaagttgcgcgacgggcgggaattgccaaatcaacgttatcgcagctggagtccggtaacggtaacccgagtctggaaacgctgtgggcgctgtgcgtggccctcgatattccttttgcccggctgctggagccgcaggtcaacaccacccaggtgatccgccgcggcgaggggacgaaagtgattgccgagcaggcaaactatcaggcgattttactcgccgcctgcccgccgggcgcgcggcgcgatatctatctcctgctgacccagccgggggctgaccgtatctctcaccctcatccaccgggttccgtggaacatattattatcacccaggggcgggcgcgggtcggcctcacggaggcgccggaagagttgggagagggggattacatctgctatcccgccgatcgggagcacgttttccaggcgctggaaccggatacccaggcgctattggttgccgagcagaactag

SEQ ID NO: 176318 - DNA, 690 bp, Klebsiella oxytoca
atggaaattcgttcgatatggctaaagagtatgaaacatcacttcgccagtcttaaaggcgacaccctcagagcaattgttttagtctgcctcgcagtgggcatcgttggtatgtcctatggctcgctggccatcgcctacggtttcccgatttgggtgccctttgtgctttcggtcagcgtcctggcgggcgcctcggagtttatgtttatcggcattgtcgccagcggcggaaatcccctggcggcggcggcggccggtttactggtcaacgctcgtcatattcccttcggcgtgacggttcgcgacctggtcggccagcgcgccgccagcttcctcggctgccatattatgaacgatgaaagcgtggtgtttggtctgtcgcagaaaacccccgagcagcggcgggcggcctactggctgtgcggtctgggcgtggcgctgatctggccattgggcgcgctattgggcgcgggggtcggcaaactgctcccggctccggaaaccattggcctcgatgcggtctttccggccattctgctggcgctggtggttccggcatttaaaaatcgcaccaccctgatccgcgcctgcagcggagcagctctgtcgctggccgccgtaccttttgcgccggttggtctgccggttttactgtcgctgtttggcctgctgacgaggagaaaataa

SEQ ID NO: 176319 - DNA, 324 bp, Klebsiella oxytoca
atgggcaatatgacgctatttatcgccggtatcgcgattctgtcgctgggcacttacttaatgcgcttaggcggagcgaagctcggcagccggctggccttttctgagcgctcacaggcgctactctccgatgcggcaacggtgctgctcttttccgtcgcgctggcaaccaccttctacgaaggtgaacattttgccgggatggcgagggtgctgggcgtgggctttgcggtatttcttgcctggcgtaagatgccgctgatcgtggtgattatcgccgctgccgtggtgacggcgctgctgcggatggcgggtttacgataa

SEQ ID NO: 176320 - DNA, 1035 bp, Klebsiella oxytoca
atgaaaaggaatttattggcggcagcaataagctgcgtcttattaatggggcttgttggatgcgacgataataaattacccgaaagcgctcctgctcctgcagcagctccggctagtccatccgcatcttcaggtgcagataacaaggaagttaaaaacgccagcccagaccgcattattagcgaaaagatgagcgtatatattgagtgttataatgatatcgatgaagatatttatcgtagcattaaatactatgctcgctggttagacgatctaaaggtcggtcccaccggaaaagaaaagagtgttggcggtatcacggatgtttccgcagagtttgataagtgcctggccaatatgacgcacgtttcgagtttaaagccgtcgctggatcctatcgataatctcgctttaccttatattaattcatccattaagctggcagaagtcatcaataagatgaataaatattacgaacagcaagattataaagatgatgctttcgctaaaggcaaagcgctgcatactcagtttattcaggcattagccgcgttcaaacccgcatcagatgcttactcagaagcgattcatgaaattaataaccgccgtcaggaacagcagttgaaaacgattgaggccaaagaaggcaagtcttttgattactattcgctatccattatgttgaccagcaaaaaggttaaccaggcgcttgaggcggataaatttgataccgatgctgcgatgaaactcgtccaggatctgggtgaacaaattgagcaattgaaatcaaaacagggcgaaaccaaaaaaggtccccggatgcgtgagatcagagccccgacgtttatcgaagcggcggaaaagtaccttctggatgccaaaacgcgcgtccgccgcgttcgcgacaacacacccctgacgtctggggaagccatgttgatggatggcgccccgcaaatggtggatggctcttttgaacatctcatggcgagctataaccagctcgtaagatggtttaatacattgagtgattaa

SEQ ID NO: 176321 - DNA, 552 bp, Klebsiella oxytoca
atgaacagatatctcacacccggctgcaaaacggtaattttaattaacggcattcccgcctcgggtaaaagcaccgtcacccggcagctatcggcagcgtttaatctgccgcagctggccatcgacggtattaaagagccgtttatggcgtgctttaccgggatcgatcggtccttcaaccggcagttgggctgcgccgcgtatgaagtgatatggtcgattgtcggtcagtcaccggcaggctgcatctggctcattgacgcctggtttggctttcaaccgcgcgacatgctgcagcagctgctacaacaagcgggcgttgaaaaggttctggaggtctggaatcacatcccgcctgagcttgcggtggcgcgctatgccagccggttacacgatcgtaagccggggcatccgggcgaagagtatctgccggaactggctcggctggcgcagcaggcggaaccaatgcggctggggccggtattgaccgtggatcagcaaaaaccgctggatatcgagcgcgttattctttggattgcagcacagatttag

SEQ ID NO: 176322 - DNA, 438 bp, Klebsiella oxytoca
atgacgataaaagaactgcttattgaggccgatgcgattcaggtcggcgtcacggagtccgactggcagaaggtgatccaactggcggccagcccgctggtggcaaagggatatatctcggcagattacggtcaggcggtgatcgataataccctgcatcatggcgcctattacgtttttgatgagggcatcgccatcccgcatgccagaccggagtgcggcgtaaagcgcaactgctttagccttgttgtgctggataagccaattcagtttgctgatagcgagaaggcggatatcgtcattatgttcggcgcgcaggacagcaatgcccatatagaagaggggattcgtgcgattgtcgctctgctcgataataacgagaccatggagaagctgcgggccgccagcagcaaggaggaggtcgttgcgttgctatga

SEQ ID NO: 176323 - DNA, 270 bp, Klebsiella oxytoca
atgtttgaatctttgaaaaccctgtggaaaaaagagagtagcccgctgcaggattatgacgcacagtcccgccagctggcgggggaaatcgccaggctggaaggcgaattacagggcgacccgggaaatggcgaagtacagaaagcattaatgctggtttataaccgggcgctgtcggtatatgccaaaagccatacgcatcgccaggaaatagatgcgctttttgtgcgcattgatgagttacgtaatgttattcgccgtaatatatag

SEQ ID NO: 176324 - DNA, 843 bp, Klebsiella oxytoca
atgagtctgtataacttcaacgcgattctgcgcattgcccgggaaaggaattttaaagccattggctcatttaatttgcactgtattgaaatgctgcccgccttttttaaagcggcgcagataagcgatagcccattaatgattcaaatctctaccgggacggcggaatatctcggctatcgtttactggtggatgccgtgcgctcgctcgcggaaagtgaaaacgtgccgacctgtctgcatctggatcactgctctgatatcagcgccattgaaacggccatggatgccggattttcatcagtgatgtatgacggctcccatctggggctggaggagaatatcggcaatacgcgtatcgtggtggagatggcgcgcccgcggaatatcacggtagaaggcgagctgggggcaataggcggctcggaagatggcaaagccgttgccgcagaagatatttgtttcaccacggtggaagacgccaaacgctttgtgaaggagacgcaggtggatatgctggcggtctccgtaggcacggtacatggcctctataccggcaaagcgcagatccagcatcagcggctgaaagagattagcgccgccacaggcgtaccgttagtgctccacggcggtaccggcgtcagcgatgatgatatgcgcctggccgtaacggaaggcatcaacaaagtgaacgtcggtactgaaatgaacgttcagtgggtcgatcaatgtaaaaccacttttgaaaaaggcaaagttaacgacagcgtgcgcaaattcttaattccggcgaataatgcggtcacccaggtattaatggaaaaaatcgcgctgtttaaataa

SEQ ID NO: 176325 - DNA, 1368 bp, Klebsiella oxytoca
atgaatagctttgtagagtttatcgtcaaagatttgctcggccaggcttcgatattaattgcatttattgcgatgctgggcctgattttacaaaaaaaatcagcgggcaaaacggcggagggaacctttaaaacgctgctcggtttcttaataatgatggccggaatcaacattattgtcgccacgctaacgttccttaacgatatcttcacccagggattcggcatgaaaggctacattactgatgttgccgccatcgccgggttagccaaccgtgaattaggttccgaagtggcgctgaccctgatggtcatttttgccgttaacattattatcgcccgcctgacgccgctcaaatatatcttcctgaccggccaggctctgctgtggatggcgaccatcggcgcggtaataggctataaagccgggctgaccggactgtcgctgattttaaccggcggtattttcggcggcgtaatggcggtattgatgcccgctcttgcgcagccggtggtcagacgtattaccggttccgatgatgtggcgctggggcacttctgcaccatcggctatctggtgcaggcggcggtggctaaagtggtcgggaaaggttcccgctcaaccgaagatcttgagctacctgataactttaagttcctccaggatacctaccttgcgatggcggtggtaatggtgccgatgtacctcattcccgcgcttgccgcaggcccggaatatatcgctcagttctccggtggtattaactacctgatgtacgcctttatgcagtctattcagtttgtggcgggggtattcgttctctatagcggcgtgcgcttattgcttaacgagctggtgccggcattccgcggcatcgccatgcgcattgtcccggacgcaaaacccgcgctggattgcccggtactgttcccctatgcgcccaatgcggtgattgtcggcttcctggcaacgaccgtcggttccattatcggcatgctggtattcccgatgtttggtctggcgatgatcctgcccggcctgttaaccaacttctttgccggcggtacggcaggcgtgtttggcaacgcgctgggcggccggcgcggagcgatgattggcggcgtcattcacggcctgtttattacctttctgcccgccattttagtgccgatgctggaaagctacggctttaccggcgtcactttcagcgattctgacgtcattagttccggtctggtattgggccacgccttccagaataactggctatttgttgctctgttcattgtttttgttgccgcactggcatggttcgtaaacggtaaatcagctaagccaaaaggggaaaatattcatgagtctgtataa

SEQ ID NO: 176326 - DNA, 315 bp, Klebsiella oxytoca
atgctgaaaattctttgcgtatgtggctgcggcctcggttctagctttgccatcgaaatgacggcgaaggcggttttagagaaactggaaattccggcgcaaattgaacataccacaatttccgaagccggggcgtttaaatcagacatgattctgacgcaaaaaacctttgccgatatattaaccgcagatgccagtgaggaggaaattaaacgtgtggtggtactgcataaactgacggacaaagatgaggttgaagccaaaatcgtcgcattcttaaaagagcgtaacctgaaggtggcagattatgaatag

SEQ ID NO: 176327 - DNA, 981 bp, Klebsiella oxytoca
atgaaaattggcattgttattagcggtggcgatgtttctggaattaataactttatatttcagattgccagactggcgagcgccgatatcaccgtttttaacgggggcatacccgggttattggataaaaatcatcacgaagttgcgtggcgcgatctggttgatttctccataacgtctattccgatcatcacatccggtcggaccagccgcaagctgttgcgcagtgaatatgaaaccatagctaaaaaaattaaatcattgcgtatcgatgtgctgattatggccggcggcgacggcagcctgcagtttctcaatacgctgagtgaatttgatattaactgctttggcgtcgggatgactatcgataatgatgtatacggcagcgattatacgattggtttttctacggcctgcgagcagattattaaagaagtttcccgcttaagaaataccggaagagcattaccgggtcgggtatttatggttgaaatattaggaggctattgtggagagttaacgttgcaatccgctattaaatctaatgctgatattgccctgattccggaatcacagatgccgttagaagcgctggccgagcgggtgaagcacaagctaaaacagcaaaatagcgtggtgatcctctgctctgaaggctacaccagagagtattctcccggttttcagggggccattgataccatgattaagcagctcgaaccgcaaattggcgtacgcatccgcaaaaccatcgtgggctacggtttacgcagcggcgacccgacctgcgaagaaatctatcaggggacgattatggcctgcgaagtggttcgctgcattcagtccggcatgaaaaataaagccattataattaattccagtaacaaacctattccgattgatttagtcagtatgaaaaaacgtctggtcgataccgaaggacaccattataaacttgccaaacaactcaatattatttga

SEQ ID NO: 176328 - DNA, 141 bp, Klebsiella oxytoca
atgtcgataaatttagtcacacctaatattgacaccgggtttattatcacgttttttgtgatcaatctctcctttataaaaggcgatcgccttaacaattatttttttattttcttaaagatcattaagttgcctgaatga

SEQ ID NO: 176329 - DNA, 213 bp, Klebsiella oxytoca
atgaaaagcatcaaaacttttgtcgctgttatcgcactttccgcttcttttggttcctttgctgcagaaaccgtcaccgctaccgcagcaacgatggacggtgcggaagcgaagatcgccgctcaggcccaggccgcaggcgcgtcgtcttacaaaattaccgaagcgtttaccggtaaccgcgtgcacatgaccgctgaactgaataaataa

SEQ ID NO: 176330 - DNA, 837 bp, Klebsiella oxytoca
gtgaacaagaagcctcttgaacaaatcgaaaatgtgatcgatatcacaggttatcgccaggtatcgctctggaagcgcccaaatttgcaacatccccagccagacgagttagctgaagaggtacccgttgcgctggtttataacggcatctcgcacgtggtgatgatggcgacgccgaaagacctggcgcaattcgccgtcggcttttccttatccgaagggattatagagaaccggcgcgagatttatggcatcgacgtcgttcaggcctgtaacggcctggaagtgcaaattgagctctccagccgccgctttatgggattgaaagagcgccgtcgtgcgctagccggccgcaccggctgtggcgtatgcggcgtggaacagctcaacgatatcggtaagcccgtgcagcctctgccttttacccagacgttcgatctggcgaacctcgatcgcgcgttggcgcatctgcgggattttcagccgataggctgccttaccggctgcacgcatgcggcggcttgggtaacgctttccggcgagctcgcgggcggccacgaagacgttggccgccacgtggcgctggacaaactcctcggacaccgcgcggaagatgatggcgcctggcaaaacggtgcggcgctcgtctccagccgcgccagctatgaaatggtgcagaaggcggcgatgtgcggggtggaaattctttttgcggtctctgccgcgaccacgctggcggttgaagttgctgagcgctgtaacctgacgctggtgggcttctgcaagccgggtagggcaaccgtatacacgcatccgcagcggttaattgcaggttaa

SEQ ID NO: 176331 - DNA, 588 bp, Klebsiella oxytoca
atgcaggtcagcagaaggcagttctttaagatctgcgctggcggtatggcaggaaccacggcagcggcgctgggctttgcgcccggtttagcgctagcggaaacacggcagtacaagctgctgcgcacccgcgaaacccgtaacacctgcacttactgttccgttggctgtgggctgttaatgtacagcctcggcgacggcgcaaaaaatgccaaagcgtctatcttccatatcgaaggtgatccggaccatccggtcaaccgtggtgcgctctgccctaaaggggccggtctggtagactttatccactccgaaagtcgcctgaaatttccagaatatcgcgcgccaggctctgataaatggcagcaaatcagctgggatgaagcattcgaccgtatcgctaagctgatgaaagaagaccgcgacgccaactttgtcgcgcagaatagcgaaggcaccaccgtcaaccgctggctgaccaccggtatgctgtgcgcctccgcctccagtaacgaaaccggttatttaacccagaaatttacccgcgcgctcggtatgctcgcggtcgacaaccaggcgcgcgtctga

SEQ ID NO: 176332 - DNA, 2415 bp, Klebsiella oxytoca
atgaccaaccactgggtcgacattaagaacgccaatcttatcgtggtgatgggcggcaacgccgctgaagctcacccggttgggttccgctgggcgatggaagccaagatccacaatggcgcgaagctgattgtgatcgatccgcgctttacgcgtaccgcgtcggtggctgatttctataccccaattcgttccggtactgacattaccttcctgtcaggcgtcatcctgtacctgttgaacaatgaaaagattaaccgtgaatataccgaagcctataccaacgccagcctgatcgtgcgtgaagattacagctttgaagacggtttattcagcggctatgacgccgaagcccgcaagtacgacaaaacgtcctggaactatgagctggatgaaaacggctttgctaaacgcgataccacgctgcagcatccgcgctgcgtctggaatttgctgaagcagcacgtttcccgctatacgccagaagttgtcgaaaatatctgcgggacgccaaaagcggacttcctgaaagtctgcgagtacattgcggaaaccagcgctcctgataaaaccgcgtctttcctgtacgcactgggctggacgcagcactccatcggcgcgcagaacattcgcaccatggcgatgatccagctgctgctcggtaatatgggcatggcgggcggcggcgtaaacgccctgcgcggccactccaacattcagggtctcaccgacttaggattgctgtcgcagagcctgcctggctatatgacgctgccgagcgagaaacagactgacctgcaaacctacctcgccgccaatacgccgaaaccgctgttgaaggatcaggtgaactactggggtaactacccgaaattcttcgtctcgatgatgaaggccttctttggcgataaagcaacggcggaaaacagctggggctttgactggctgccgaagtgggacaaaggatacgacgtcctgcaatacttcgagatgatgaatcagggtaaagtgaatggctatatctgccagggctttaacccggtagcctcgttcccgaacaaaaacaaggttgttgcgtcgctgtcgaaactgaagttcctggtgaccatcgatccgctcaacaccgaaacctccactttctggcaaaaccacggggagtcgaacgacgtcgatccggcgaaaatccagaccgaagtgttccgcctgccgtccacctgcttcgccgaagagaacggttccatcgttaactccggccgctggctgcagtggcactggaaaggcgctgacgccccggggattgcggccaccgacggtgaaatcctcgccggtatcttcttacgcctgcgcaagatgtacgccgaacagggcggaccggcgccggaaccggtgctgaacatgacgtggaactacgccacgccgcatgaaccggcatcggaagaagtggcgatggagagcaacggcaaggcgctggctgacatcaccgacccggcaaccggtgctgtgatcgtcaagaaaggccagcagctcagttcgtttgcgcagctgcgtgacgacggcacgacctccagcggctgctggatcttcgccggcagctggacgcctgacggcaaccagatggcccgtcgcgataacgccgatccatctggccttggcaataccctcggctgggcatgggcgtggccgcttaaccgccgtatcctgtataaccgcgcctccgctgacccgcagggtaaaccgtgggatccgaagcgtcagctcctgaaatgggacggcgcgaagtggggcggcgtggatattccagactacagcgccgcggcgccggacagcgatgtcgggccgtttatcatgcagccggaagggatgggacgtctgttcgctatcgataagatggcggaggggccgttcccggaacactacgagccgtttgaaacgccgctgggcactaacccgctgcacccgaatgtcgtctctaacccggccgctcgcgtctttaaaggcgaccttgagcagatgggcaaagcggaaaaattcccttacgtcggtaccacttaccgtctgaccgagcacttccactactggaccaagcacgcgcttctcaacgccatcgcgcagccggagcagtttgtggagatcggcgagaagctggcgaacaagctcggcatcgcccatggcgataccgtgaaggtctcctctaaccgcggctatattaaagccaaggcggtggtgaccaagcgtattcgcacgctgaaagcggacggcaaggatatcgatactatcggtattccgattcactggggctacgaaggcgtggcgaagaaagggtttatcgccaataccctgacgccgtttgtcggggatgcgaacacgcagacgccggagttcaaggctttcctcgtgaacgtggaaaaggcgtaa

SEQ ID NO: 176333 - DNA, 903 bp, Klebsiella oxytoca
atggcttatcaatcgcaagacattatccgtcgttccgcgactaacggcttcacccccgcgccgcacgcgcgggaccatcaggaagaggtggcgaagcttatcgacgtcacgacctgtatcggctgtaaagcctgtcaggtggcctgctccgagtggaacgacattcgtgatgaagtgggtcataacgtcggggtgtacgataaccccgccgatctgaccgccaaatcctggaccgtgatgcgcttctcggaagtggagcagaacgacaaactggagtggctcatccgtaaggatggctgtatgcactgcgccgatccgggctgcctgaaggcctgcccggcggaaggggcaatcattcagtatgccaacggcatcgtcgacttccagtctgagcagtgcatcggctgcggctactgcattgctggctgcccgttcaacgtgccgcgtctgaacccggaagacaaccgcgtctataaatgcacactgtgcgtggaccgcgttaacgttggccaggaaccggcctgcgtgaaaacctgcccgaccggtgctatccactttggctccaaagaggatatgaaaacgctggcaggcgagcgcgtcgccgagctgaaaacccgcggttatgacaacgcaggtctgtacgatccggcaggcgttggcggcacgcacgtgatgtacgtgctgcaccacgccgacaagccgaatctctatcacggcctgccggaaaatccggaaatcagcgctaccgtgaagttctggaaagggatctggaaaccgctggccgcggtcggatttgcggccaccttcgccgccagcatcttccactacgtcggcgtcggtccgaaccgcgcggaagaggaagaggacaatctggatgaagagaaagacgaggtgcgcaaatga

SEQ ID NO: 176334 - DNA, 636 bp, Klebsiella oxytoca
atgaaaagacgtgacaccatcgtgcgctacaccgcgccggagcgaatcaaccattgggtcaccgccttctgcttcgtgctggcggcggtgagcgggctgggctttttcttcccgtccttcaactggctgatgcaaatcatgggcacaccgcagctggcgcgcattctgcacccgtttgtgggcgtgatcatgtttgcctcgttcatcatcatgttcttccgctactggcaccacaacctgatcaaccgggacgatattttctgggcgaagaatattcgcaagattgtcgtcaacgaggaagtgggcgataccggacgctataacttcggccagaaatgcgtgttctgggcggcgattatcttgctggtgctgctgctggtcagcggggtgattatctggcgtccgtactttgcgccggcgttctccatcccggttatccgcttcgcgctgatgctgcactccttctctgcggtggcgctgattgtggtgatcatggtgcatatttacgccgcgctgtgggtgaagggcacgataaccgcgatggtggaaggctgggtcacgaagacctgggcgaagaagcatcatccgcgctggtatcgtgaagtccgcgaaaagcaggataagcgccagtcgtaa

SEQ ID NO: 176335 - DNA, 930 bp, Klebsiella oxytoca
atgagcattcgtatcatcccgcaagatgagctggaaaagagcgagaaacgcgcgacggatatgattccaccgttgttgtttcctcgactcaaaaatttatataaccgtcgtgccgagcgcctgcgcgaactggctgaaaataatccgctgggggattatctgcgctttgctgcgcttatcgcccacgcgcaggaagtagtgctgtacgatcatcccctgcagatggatctcaccgcacgcattaaagaagcgaacgatcagggcaaaccgccgctcgatattcacgttttaccgcgcgacaagcactggcacaagctactgcattcgctgattgccgaactgaagcccgagatgagcggcccggcgctggcggttatcgagaatctggaaaaagcgtcagagcaagagctggaactgatggcaagcgcgctatttgtctccgattttgcctccgttagcagcgataaagcaccgtttatttgggccgcgctatcgctctattgggcgcagatggccagcctgatacccggtaaagctcgcgccgaatacggtgaacagcgtcaattctgcccggtttgcggctcgatgccggtctccagcatagtgcaaattggcaccactcagggcctgcgctatttgcactgcaacctgtgtgaaaccgagtggcacgtggtgcgcgtgaaatgcagcaactgcgaacagacgcgcgatctgcactactggtctttagataacgagcaggcggccattaaagctgaaagctgcggcgactgcggtacctacctgaagattctttatcaggaaaaggatcccaaagtagaagccgtggccgacgacctcgcctcactggtgctggacgcacggatggaacaagagggctttgcccgcagctccatcaacccgttcctgttcccgggagagggggagtaa

SEQ ID NO: 176336 - DNA, 918 bp, Klebsiella oxytoca
atggcgcttgaaaagggtattgcaatacaggtgcgggagtttatcgaggcgggtcgcccctcatcgcgcgatcagagtattgatgaccggagacgcggctatatcgccagcacggtactggctggggagcaagaaaagcgcgttcaggtagaagatatcgagctcgaaggcatgacatttcgcattgtctcccccctcaacgcctcaggcgctctccctgcggtcatctattttcacggcggctgctttatcagcggtggtttcgctacccatgaccatcagctccgtcagctggcttaccacagcggctgccgggttatcgccgtgcaataccggctggcgccggagcacgcttttcccgccgcccatgacgatgcggaaaaaggcgcactgattattcaccgccacgcgccgcagttaggcatcgacgtttcgcgtattacgcttgcgggcgatagcgccggaggtcatctggcattggtcaccgctctgcggctgaaaaccacccgggcatggcaacccgcgcagcttgttttgatttacccgatgctggatgccaccgccagtatgaagagctatatcgataacggtaaagattacattatcaccgaagacactctgctcagcggctatgaaatgtacctttcgtcgacgacactccaccacccggaagccagcccgctatggcgtaaagactttaacggcttaccgccggtgcatattctgacggcagaatacgatcctttgcgtgatgaaggcgaagcgctttaccagcgtctgcttaaacagggcgtagagtgcacctgtcagcgctatctcggagtgattcacggcttcttccaactgggcggtatcagcccagcggcagccagcgcgatgagagatatcgcctggcgggtaaaatcaccgggccagtag

SEQ ID NO: 176337 - DNA, 942 bp, Klebsiella oxytoca
atgtatcaccttcgcgtaccgcaaacagaagaagagttagagagctactaccagttccgctgggagatgctgcgtaagccgctgcatcagccgaaagggtccgagcgcgatgcgtgggatgcgatggcgcaccatcaaatggtggtcgatgaagagggtaatctggttgccgttgggcgactgtatgtgaacgcggaaaacgaagcctcgatccgttttatggccgtacatccgtcagtacaggataaggggctgggaaccctgatggcgatgacgctggagtccgtcgcccgtcaggaaggcgttaagcgcgtgacctgtagcgcccgtgaagacgcggtagaattctttgccaagctcgggtttgtgaaccagggtgaaatcacgacgccgaccaccacgccgattcgtcattttttgatgattaagccaatagcctcgctggacgatattttacatcgcggcgactggtgcgctcagctgcagcaggcctggtatcagcacatccctcttagtgaaaaaatgggcgtgcgcattcagcagtataccgggcaaaagtttatcaccactatgccggaagccggtaaccagaacccccaccatacgctgtttgccggcagcctgttttcgcaggcaacgttaaccggctgggggcttatctggctgatgctgcgcgagcggcatcttggtggcacaattattctcgcagatgctcatattcgttacagtcagcccattagcggacgccccagcgctgttgccgatctcggctcattaagcggcgatctcgatcgcctggcgcgtgggcgcaaagcgcgggttcagctgcaggttgagctattcggtgacgatcggctcggcgcggtttttgagggtatctatatcgtgcttcctgcgaagccgttcggctcttatgaagagggtggcaacgaagaggagtag

SEQ ID NO: 176338 - DNA, 438 bp, Klebsiella oxytoca
atgattgcattaattcaacgcgtatcccgagctagcgttaccgtggaggatgaagtgacgggcgaaatcggtcccgggcttctggtgctgttaggcgtcgagagagacgatgatgagcaaaaggcgaatcgcctgtgcgaacgcgtgctgggataccgtatttttagcgatgctgaaggcaaaatgaatcttaacgtgcagcaggctggcggcagcgtgctggtggtttcacagtttacgctggcagcggataccgagcgcgggatgcgtcctggattttctaaaggcgcggcaccggataaagcggaagcgctgtacgagtatttcgttgagcgctgccgccagcagaaaatgaatacgcagaccgggagatttgctgccgatatgcaggtttctctggtgaatgatggtcctgtgaccttttggttgcaggtatga

SEQ ID NO: 176339 - DNA, 861 bp, Klebsiella oxytoca
atgctaaaaaccgttcatcaaaaaacagcgcgccatctgcggccgctggtggcctggctgaagctgctatggcggcgtattgatgaagatcatatgacgaccctggcgggaaacctggcctatgtgtcgttactctccctggtgccgcttatcgccgttatatttgcgctgtttgcggcctttccgatgttttctgatgtcagtatccagattcgacactttatttttgccaattttattccgaccaccggcgatgtgattcagggctatatcgagcagtttgtcgccaactccagtcggatgaccgccgtgggcgctttcggcctgattgtgacatcgctgctgctgatgtattccattgatagcgcattgaatactatctggcgcagcacccgaacccggccaaaaacctactcctttgccgtctattggatgatcctcacgctggggccgctgctggcgggggccagccttgcgatcagctcctatctcctgtcgttacgctgggccagcgatctgaatagtgtgattgacgatgtgctgcgtatttttccgctcattttatcgtgggtggcattctggctgctgtacagcattgtgccgacggccgaggtccgtaaccgcgatgcgataatcggttccctggttgcggcgctgctctttgaggcggggaagaaagcttttgctttatatatcactgcgttcccgtcctatcagctgatttatggcgtgcttgccgtggtacccattttgttcgtctgggtgtactggacgtggtgtatcgtcttgcttggcgctgaaattactgtcactctcggtgaataccgcaaactgaaaaaagaagaaacagaacaatcatga

SEQ ID NO: 176340 - DNA, 600 bp, Klebsiella oxytoca
atgctctatatctttgatttaggtaatgtgattgtcgatattgacttcaaccgggtgctcgggacgtggagcgatttaacgcggatccctcttgcgacgctgaagcagcatttcactatgggtgaagcgttccatcagcacgagcgcggcgaaattagcgatgaggattttgcggcggcgatgtgccacgaaatgaacatgccgcttagctacgagcagttctcccacggctggcaggcggttttcgtcgccctgcgaccggaggtgacggcaattatgcaaaaattacgcgagcaggggcatcgagtcgtggtcctgtccaatactaaccgtttgcataccaccttctggccggatgaatatccagaaatacgcgccgtggctgaccatatctatctctcccaggagatggggatgcgtaaacccgaagcgcggatctaccagagcgtgctcgaatcggaaggtttctccgcagaggatacggttttcttcgatgataacgccgataatattgccggtgctgatcagttaggtatcacgtcaattctggtgaccggaaaggagacgataccgaactactttgcgaagcagctatgctaa

SEQ ID NO: 176341 - DNA, 1824 bp, Klebsiella oxytoca
gtgatcgaaaatctgcgtaatatcgccatcatcgcgcacgttgaccatggtaaaactaccctggttgataagctgctacagcaatctggtacgttcgacgcgcgtactgaagcacaagaacgagtgatggactccaacgatttggagaaagagcgtgggattaccatcctcgctaaaaacactgctatcaaatggaatgattaccgtatcaacatcgttgatacccctgggcacgccgacttcggtggtgaagttgaacgtgtcatgtccatggtagattctgtgctgctggtggttgatgcctttgatggtccgatgccgcagacgcgcttcgtcaccaagaaagcttttgcccacggtctgaagccgattgttgttatcaacaaagttgaccgtcctggcgcgcgccctgactgggttgtcgatcaggtattcgacctgttcgttaaccttgatgctaccgacgaacagctggacttccctatcgtttacgcttccgcgctgaacggtatcgcgggtctggatcacgaagatatggctgaggatatgactccgctgtatcagactatcgtcgatcgcgtaccggcaccgaacgttgaccttgatggcccgctgcagatgcaaatctcccagctggactacaacaactacgttggcgtcatcggtatcggccgcatcaagcgcggtaaagtgaagccgaaccagcaggtcactatcgttgatagcgaaggcaaaacccgtaatggtaaagtcggtaaagttctgacccatctgggtctggagcgtatcgagagcgacatcgctgaagcgggcgatatcatcgcgatcaccggtctgggcgagctgaacatctctgacaccatctgcgatacgcagaatgttgaagcgctgccggcgctgtccgtcgatgagccgaccgtttccatgttcttctgcgttaacacctctccgttctgcggtaaagaaggtaagtacgttacctctcgtcagatccttgaccgcctgaacaaagagctggtgcacaacgtggcgctgcgcgttgaagaaactccggatgcagacgcattccgcgtttctggccgtggtgaactgcacctgtccgttcttatcgaaaacatgcgtcgtgaaggtttcgaaatggcggtttcccgtccgaaagttatcttccgcgaaatcgacggccgtaagcaagagccgttcgagaacgtgacgctggacgtcgaagagcagcaccaggggtctgttatgcaggcgctgggtgagcgtaaaggcgacctgaaaaacatgaatccagatggcaaaggccgcgtacgtctcgactacgtgatcccaagccgtggtctgatcggcttccgttcagaattcatgaccatgacctccggtaccggtctgctgtactccaccttcagccactacgatgacgttcgtgcgggtgatgtgggtcagcgtcagaacggcgttctgatctccaacggtcagggtaaagcggtggcgtttgcgctgttcagcctgcaggatcgcggtaagctgttcctgggccacggcgcagaagtttacgaaggccagatcatcggtattcacagccgttctaacgacctgacggtaaactgcctgactggtaagaaactgaccaacatgcgtgcgtccggtactgacgaagcaacggttctggttccgccggttaagatgaccctggagcaggctctggagttcatcgatgatgacgaactggttgaagttacccctacttccgttcgtatccgtaaacgtcatctgaccgagaacgaccgtaaacgcgcaatgcgcggcgcgaaagaagagtaa

SEQ ID NO: 176342 - DNA, 1410 bp, Klebsiella oxytoca
atgtccgctgaacacgttttgacgatgctgaacgagcatgaagtgaagtttgtcgatctgcgcttcaccgataccaaaggtaaagaacagcacgtaactattccttctcatcaggtaaatgccgaattcttcgaagaaggcaaaatgtttgatggctcctcgattggcggttggaaaggtattaacgaatccgacatggttctgatgccggatgcaaccaccgcgctgatcgacccgttctatgaagaaccgactctgatcatccgctgcgacatcctggaacccggcactctgcagggctatgaccgcgacccgcgttccattgctaagcgcgctgaagagtatctgcgctctaccggcctggctgacaccgtactgttcgggccagaaccagaattcttcctgttcgatgatatccgttttggtgcgtccatctccggttcccacgtcgctatcgatgatatcgaaggcgcatggaactcctccaccaaatacgaaggcggcaacaaaggccaccgtccgggcgtgaaaggcggttacttcccggttccgccggtagactcctctcaggatatccgctccaccatgtgtatgatcatggaagagatgggcctggttgttgaagctcaccaccacgaagtggcgactgccggtcagaacgaaatcgccacccgctttaacaccatgaccaaaaaagcggatgaaattcagatttacaaatacgttgtgcacaacgtcgcacaccgtttcggcaaaaccgcgaccttcatgccaaaaccgatgtttggcgataacggttccggtatgcactgccacatgtccctgtccaagaacggcgtaaacctgttctccggcgacaaatacgcgggcctgtctgaacaagcgctgtactacatcggcggcgtaattaaacacgctaaagcgattaacgccctggctaacccgaccaccaactcctacaagcgtctggtcccgggctacgaagcgccggtaatgctggcttactctgcccgtaaccgttccgcgtctatccgtattccggttgtcacctctccgaaagcgcgccgtatcgaagtgcgcttcccggacccggcggctaacccgtacctgtgcttcgccgcgctgctgatggctggccttgacggtatcaagaacaaaatccatccgggcgaagccatggataaaaacctgtacgatctgccgccggaagaagcgaaagagatcccacaggttgcaggctctctggaagaagcactgaacgcgctggacgcagaccgtgaattcctgaccgccggcggcgtattcaccaacgacgctatcgatgcttacatcgccctgcgtatggaagaaaacgaccgcatccgtatgactccgcacccggttgaattcgagctgtactacagcgtctga

SEQ ID NO: 176343 - DNA, 1050 bp, Klebsiella oxytoca
atggcaacaggcacactgcccgatgctgggcagatccttaactctttaatcaacagtatcttactggtcgatgatgacctggcggttcattacgcgaacccggcggcgcagcagctgctggcgcaaagttctcgtaagctattcggcacgccgctgccggaactgttgagttatttctcgctgaatatcggcctcatgcaggagagcctcgctgcggggcagggttttaccgataacgaagtgacgctggtcattgatagccgctcgcatatcctttccctgacggcgcagcgcctgccggaaggctatattctgctggaaatggcgccgatggataatcagcgtcgtctgagccaggagcagctgcagcacgcacagcagattgccgcacgcgacttagtgcgtggtctggcccatgagattaaaaacccgctgggcggtttgcgcggagcggcacagctgctgagcaaagcgctgcccgatcctgcgttaatggaatataccaaagtcattattgaacaggccgatcggttaagaaatctggtcgaccgtctgctggggccgcagcatcccgggatgcacgtgacggaaagcatccataaggtcgctgagcgggtagtgaagctggtgtcgatggagctgccggataacgtcaaactggttcgcgattacgaccccagcctgccggaactcccgcatgaccctgaccaaatcgaacaggtgttgctgaatatcgtccgtaatgcgctgcaggcgctgggacccgagggcggcgagatcactctgcgcacccgcacggccttccagttaaccttacacggcgtacgctaccgcctcgctgcgcgcattgacgttgaagataacggcccgggaataccgtctcatttacaggacacgctgttttatccgatggtgagcgggcgcgaaggcggtaccggactcggtctgtctattgcccgcagccttatcgatcagcactccgggaaaattgaatttaccagttggccagggcataccgaattctcggtgtacctgcctattcggaagtag

SEQ ID NO: 176344 - DNA, 1410 bp, Klebsiella oxytoca
atgcaacgagggatagcatggatcgttgacgacgatagctccatccgttgggtgcttgaacgcgcgctcaccggggcaggcttgagttgtacaacgtttgagagcggtaacgaggtgcttgatgccctcacgaccaaaaccccggatgtgctgctgtctgatatccgcatgccgggaatggatgggctggcgctgttaaagcaaattaaacagcgccatccaatgctaccggtcatcataatgacggcgcattcggatcttgatgcggcggtcagcgcctatcagcaaggcgcctttgattatctgccgaaaccgtttgatatcgatgaagcggtagcgctggttgaccgggcaatcagccattaccaggaacagcaacagccgcgtaatgcgccgattaatagcccaacggccgatatcatcggcgaagcgccggcaatgcaggacgtctttcgcattatcggccgcctgtcgcgctcttctatcagcgtgctgatcaacggcgaatccggtaccggcaaagagttggttgcccatgctctgcatcgccacagcccgcgcgccaaggcgccgtttattgcgctgaatatggcggcaatccctaaagacttgattgagtcagagctctttggccacgagaaaggcgcttttaccggcgccaataccgtgcgtcagggacgttttgagcaggcagacggcggtacgctgttccttgacgagattggcgatatgccgctggacgtccagacccgtctgctgcgcgtcctggccgatggtcagttttaccgcgtgggcggctatgcgccggtgaaagtggatgtgcgtattattgccgccacccaccagaaccttgagctgcgcgtccaggaggggaaattccgtgaggatttgttccatcgcctgaacgtgattcgcgtccatctgccgccgctgcgcgagcgtcgggaagatattcctcgcctggcgaggcatttcctgcaaattgccgctcgtgaactgggcgtggaggccaaacagctgcatccggagacggagatggcgttaacccggctggcgtggccgggcaacgttcgtcagctggaaaacacttgccgctggctgacggtgatggccgcgggtcaggaagttctgacgcaggatctccccagtgagctgtttgaaaccgcgataccggataatccgacgcaaatgctgccggatagctgggcgacgctgctggggcaatgggccgatcgcgcgctgcgctccggtcatcaaaacctgctctcagaagcgcagcctgagatggagcgtacgctgctgaccaccgcgttacgccatactcagggacataaacaagaggcggcgcggctgctagggtggggccgtaacactctgacgcgtaagttaaaagagttgggaatggagtag

SEQ ID NO: 176345 - DNA, 1374 bp, Klebsiella oxytoca
atgtctgtgcagttaatcgactgggatctggccctgatccagaaatataattattccgggccgcgttatacttcgtatcccaccgcgctggaattttctccggaatttggcgctgctgaatttgatgcggcggttgcccgctatccgcagcgtcctctatcgctatacgtgcatatcccgttttgccataaactctgctatttctgcggctgcaacaaaatcgttacccgccagcagcataaggctgaccagtatctggatgtgcttgagcaggagattattcatcgcgctccgctttttgctggccgcaaggttaatcagctgcactggggcggcggtacgccgacgtatctgaacaaagcgcaaattagccgcctgatggggttgctgcgtacgcatttcgattttaacgcggatgcagagatttccattgaagtcgatccgcgtgaaattgagcttgatgtcctggatcatttacgcgccgaaggctttaaccgcctgagcatgggcgtgcaggacttcaacaaagaagtgcagcgtctggtgaaccgcgagcaggatgaagcatttatcttcgcgctccttaatcacgcgcgtgatatcggctttacctcaaccaatatcgacctgatttacggtctgccgaagcaaacgccgcagagcttcgcttatacgctacagaaagtggcggagcttaatcccgatcgtctgagcgtatttaactatgcgcatctgccaacgctgtttgctgcacagcgcaaaatcaaagatgccgatttgccctcagctgaacaaaagttggatattcttcaggagacgattgcttcgttaacctctgcgggatatcagtttatcggcatggaccactttgcccgccctgatgatgagctggcgatagcccaacgggaaggtattctgcatcgcaacttccagggatataccacccagggagacaccgacctgctggggatgggcgtgtcggcgatcagtatgattggcgattgctatgcgcagaaccagaaagagttgaaacagtattatcaacaggtcgatgaaaccgggacggcgctgtggcgcggtattgcgttgacgcgcgatgactgcattcgtcgtgatgtcattaaggcgctgatttgtaacttccgtctcgactttgcggcggtagagaaacagtgggcgctcatctacgatgactactttgccgaagatatgaaattgttggcgccgctggctaaagacgggctggtggatgtggatgagaagggcattcaggttacgccgaaaggccggctgctgattcgcaatatctgtatgtgctttgatgcttacctgcggcagaaagcgcggatgcagcagttttctcgcgtgatataa

SEQ ID NO: 176346 - DNA, 240 bp, Klebsiella oxytoca
atgctttcaccgcaggctgagctggatttgctggagaacgatgagcgcctggatgcgctgctggaacgccttgaagagggcggcaccctgaatgctgaagagcaaacctgggttgatgccaaactggatcgcattgatgagctgatgcagcagctgggcctctcctatgatgatgacgaagatgaagaagaggaagagcgcaaagaagatatgatgcgcctgctgaagggtggaaactaa

SEQ ID NO: 176347 - DNA, 633 bp, Klebsiella oxytoca
ttgaccaactggaattatcaactgacgcattttgtcactagtgcgccggatatccgccatcttcctgccgataccggtattgaagtggcatttgctggccgctctaacgccgggaaatccagcgctctgaatacgctgactaaccaaaaaagcctggcgcgcacgtcgaagacgcccgggcgtacgcagctgattaacctgtttgaagtcgctgagggcaaacgccttgtcgacctgccgggctatggttacgcccaggttccggaagagatgaagatcaagtggcagcgcgcgctgggtgaatatcttgagaaacgcctctgtctgaaagggctggtggtgctgatggatattcgtcatccgcttaaagatctcgatcagcagatgatccagtgggccgtcgaaagcgatatcccggtgctggtactgctgactaaagccgataagctcgccagcggtgcgcggaaagcgcagatcaatatggttcgcgaagcggtcatcgcctttaacggagatgtgcaggtagaagcgttttcttccctgaagaagcaaggtgtggataaactgcgtcagaagctggatagctggtataacgatatcccaccgcaggaagaacccgaagacggcgaataa

SEQ ID NO: 176348 - DNA, 2790 bp, Klebsiella oxytoca
atggttcagatcccagaaaaccctctcatcctcgttgacggctcttcttacctttatcgggcataccacgcgttccccccgctgacgaacagcgcaggcgaaccgacaggcgccatgtatggcgtgctgaatatgctgcgaagcctgatcctgcagtatcaaccgacccatgctgtcgttgtgtttgatgccaagggaaagactttccgggatgaactgtttgagcactataaatctcatcgtccaccgatgccggacgatctccgtgcgcagatcgagccgctgcatgccatggtgaaagcgatgggccttccgctaatggccgttcctggcgtggaagcagacgatgtcatcggtaccctggcccgtgaagctgaaaaagtagggcgtccggtgctgatcagcaccggtgataaagatatggctcagctggttacgccgggtattacgctcattaataccatgactaacaccatccttggccccgacgaagtcgtgacaaaatacggcgttccaccggaactgatcatcgattttctggccctgatgggtgactcctcggataacattccgggcgtgcctggggtgggggagaaaaccgcgcaggcgcttctgcagggactgggtggtcttgatacgttatatgctgagcctgaaaaaatcgccggattgactttccgcggcgcgaaaacgatggcggcaaagctggaacagaataaagaggtggcttacctctcttatcagctggcgacgatcaaaacggacgttgaactggatttgggctgtgaagatctgctggttgaacaacctgttgcggatgaactgctgacgctgtttaaaaaatatgaatttaaacgctggatcactgatgtagagtccggtaagtggatgcaggcaaaaggcgctaagtctgcggccaggccgctggcagcggctgccgaagtggccgaggcagaagaagaaaccgcgacagtgctctccgctgaaaactacgtcaccattctggatgaacaaacattgctcacctggattgaaaacctgaagaaagcgccgctttttgcctttgataccgaaaccgacagcctggataacgtatccgccaatatggtgggcctctccttcgccattgaacctggcgtggcggcctatgtaccagtcgcccatgattatctggacgcgccggatcaaatccctcgcgaccgcgtcctggaattgctgaaaccgttactggaagatggcaaggttctgaaggttggacaaaacctcaaatatgaccgcgggatcctggctaactacggcattgaactgcgcggtattgccttcgataccatgctggagtcctacattctcgacagcgtggcgggccgtcatgatatggatagtctctccgatcgctggctgaagcacaaaaccattaccttcgaagaaatcgcggggaaaggtaaaaaccagctcacatttaaccaaattgcgctggaagaagcaggccgctacgcggcggaagatgcggatgtcaccctgcagctgcacctcaaaatgtggcctgaacttcagcaaaatgaaggtccgctgaacgtctttaaaaatattgaaatgccgctggtgccggtgctatcccgcgtggagcgtaacggcgtgaagattgatccggccgtgctgcatgcgcattctcaggagatagccaagcgcctgattgaactggagaagaaggcgtacgatattgcgggtgaagagtttaacctctcgtcgccgaagcagctgcaaacgatcttgtttgaaaaacaaggcattaagccgctgaagaaaacccctggcggtgcgccttctacctcggaagaggtgctggaagagctggcgctggactatccgctgccgaaagttatcctcgaatatcgtggactggcaaaacttaaatccacctataccgataagctgccgctgatgatcagcccgaaaacggggcgggttcatacttcctatcaccaggcggtgaccgctacggggcgtttgtcgtctaccgacccgaacctgcagaatattccggtacgcaacgaagaagggcgacgtatccgccaggcgtttattgcaccggaagattatctcattgtctcggccgactactcgcaaattgaactgcgcatcatggcgcatctctcccgcgataagggcctgctgaccgcatttgcggaaggcaaagatatccaccgcgcgacggcggctgaggtctttggtttgccgctggagagcgttagcagcgagcagcgccgtagcgcgaaggcgatcaactttggtctgatttacggcatgagcgcattcggtcttgcgcgacagctcaatatcccacgcaaagaagcgcaaaagtatatggatctctactttgagcgctatccgggcgttctggagtatatggagcgtactcgcacccaggccaaagagcaggggtacgttgaaacgctggacggtcgtcgtctctatctgccggacatcaaatccagcaatggcgcgcgtcgcgctggcgccgaacgtgcggcgatcaatgcgccaatgcagggtaccgcggccgatatcattaaacgcgcgatgatcgcggtagacggctggctgctaagcgaaaaacctcgcgtgcggatgatcatgcaggtgcacgatgaactggtctttgaagtgcataaggacgatcttgaagcggtcgcgaaaaagatccacgaactgatggagagcagtacgacgctggcggttccgctgctggtggaagtcggtagtggagaaaactgggatcaagcgcactaa

SEQ ID NO: 176349 - DNA, 900 bp, Klebsiella oxytoca
atgccgagattactcgccgcgataacgctcccgctgagtatcgccctgactatcatagtcaccgtcatctgctccgtgccaatcatcatcgccgggctgattaaacttcttgtgcccgttcctgcggtctggcgctcgatatccgttttttgcaatttcatgatgtactgctggtgtgaaggactggcgtggctgctgcgccttaatccctgtcttaaatgggatgtacagggccttgatggtctgagtaaaaagaactggtatctgcttatcagcaaccatcacagctgggccgatatcgtggtactttgcgtcctgttccgcaaacatattccgatgaataaatatttcctcaagcaacagctcgcctgggttccgtttattgggctggcctgctgggcgctggatatgccttttatgcgccgttattcccgaggctatttactccgccatcccgagcgccgtggcagagatgttgaaactactcgccgctcctgcgagaaattccgcgcgcatcccaccactatcgtcaactttgttgaaggttcacgttttactgaagaaaagcgacagctaacccgttcgccataccacaatctgttagcgccaaaagcggcaggtatcgcaatggcattaagcgtgctgggctcgcagtttgataagctgttgaacgtcacggtgtgttacccggaaaataaccaaagaccgttttacgatatgctgagcggtcgattaacgcacattgtggtgcgaatccatcttgagcccgtagctgaagagctgcatggcgactatgtaaatgataaaaactttaagcgacgctttcagcgttggctaaatacgctctgggaagagaaagatcggcagctaacggaaatcatgcagcaggcaaagaagtga

SEQ ID NO: 176350 - DNA, 624 bp, Klebsiella oxytoca
atgaaaaaaatttggctggcgctggctggtatgattctggcttttagtgcatccgctgcccagatcaccgacggtaagcagtatattaccctcgataaacccgttgctggtgagcctcaggttctcgagtttttctcgttctattgcccgcattgctatcagtttgaagaagtccttcacgtatcagataacgtgaagaaaaagctgccggaaggcgtcaaaatgacaaaataccacgttgagttcctgggcccgctaggcaaggatctgactcaggcatgggctgtggcgatggcgctgggcgtggaagataagatcaccgtcccaatgtttgaagcggtacagaaaaaccagaccgtccagaccgtggccgatattcgtaaggtcttcgttgatgccggcgtcaaaggtgaagattatgatgcggcctggaacagctttgtggtgaaatctctggtggctcagcaagagaaagccgcttctgatttccagctgcagggcgtgcctgctatgtacgttaatggtaaataccagcttaatccgcagggtatggataccagcaacatggacgcatttgttgcccagtatgctgataccgttaagcagctggttgataagaaataa

SEQ ID NO: 176351 - DNA, 987 bp, Klebsiella oxytoca
atgcacgataaggctttcacttttcagacgcttcacccggataccatcattgatggtttatttgatttgggtatgcgggtagattccggtcttactccgcttaatagctatgagaaccgagtttaccagtttcaggacgaagatcgtcgccgctatgtggtgaagttttatcgtcctgagcgctggtctgccgaacaaatcctcgaagaacaccacttttcgcttcagctcgttgaggacgacatgcccgttgcggcgcctttgtcgtttaacgagagcacgcttcaccaacatcagggattctttttcgccgtcttccccagcctgggtggacgtcagtttgaggcggataatctcgatcagatggagtgggttgggcgttatcttggccgtatgcatcaaacgggacgcaaacagcgctttgtcgctcgtccggagataggcaccaatgagtatcttctggagccccgacaggtctttgagctctccccgctgattcctgctggcctgaaagatgcctttctcagcgctaccgataaactcattgacgcggtaatggcgcaatggcacggacgcgccaatattttacggttacacggtgattgccatgcgggaaacatcctctggcgcgatggccccttgtttgttgatttagatgattcacgtaacggccctgctatccaggatctgtggatgctgttgaacggtgataaacccgagcagcgtatgcagcttgagatgattattgaagcgtatgaagagtttagccctttcaatacggatgagattgctctcatcgagcctttacgtgcaatgcggttagtttattatctggcgtggttgttaaggcgctgggaagatcccgctttccctaaaaatttcccatggttgaccggggaagattactggcgcgggcagacaacaacttttcttgagcaggtaaaggttctgcaagaaccgcctcttcagttaacgccaatgtattaa

SEQ ID NO: 176352 - DNA, 270 bp, Klebsiella oxytoca
atgaaatgtaaacgcctgaatgaagtgattgaactcctccagccggcctggcagaaagaacctgaactgaatttgatgcaattcttgcaaaaactagcgaaagaagcgggttatgctggcgaattgagcgatctttccgacgatattctgatctaccatttgaaaatgcgcgactcggcaaaagaggccgttattccgggtatccagaaagattatgaagaagattttaaaatcgccttgctacgcgcccgcggcgtgattaaagagtaa

SEQ ID NO: 176353 - DNA, 582 bp, Klebsiella oxytoca
atgcagggtgaggtaataaccggcgtcgtgctggcggggggaagaggcacgcgcatgggaggaatagataaaggattacagctgctgaatggtaaggccctgtggcgtcatgtcgccgatacgctgcagcctcaggtcgccaggctggtgattagcgctaaccgcaatcttgattgctggcgaagcagcggctacccgattattaccgactcgctgaacgactttcccgggccgttggccggcatgcattccgtaatgcatcaggtcgagggcgaatggtttctgttttgtccgtgcgatacgccatttatcccatcatttctggcgactcgcttaatgcagcacaaaacatcagccctggccgtttgggtacacgatggtgaacgagaccatccggccattgctctggtaaatcgcaaggtgatcggcgaactggaaacgtatctggccgcaggagagcggcgggtaatggtatttctgcacaaaattggcggtcatagcgtcgattttagcgatgtaaaatcagcatttataaacgttaatactctcgacgatttgcaacatatgcaggtaccattatga

SEQ ID NO: 176354 - DNA, 507 bp, Klebsiella oxytoca
atgatcccacttttagccatcgccgcctggagcggtacaggtaaaacaaccttattgaaggctctgattccggcactgcgcgcagaaggtttacggccagggctaattaaacatacccatcacgatatggacgtggataagccgggtaaagacagttatgaactgcgtaaagccggagcggctcagaccattgtcgctagttcgcagcgttgggcattaatgacggaaacgccagataagccttcactggatctggcatggctggtcagccgaatggatgcctcaacgttggatttagtcctggttgagggttttaaacatgaacccgtgcccaaaatcctgctttatcggcacaacagcgggcatagtatagaagaattagtgtttgacgataatgtgattgctatcgccagcgataggccggtcgagacgtcgctgccactgttagatttaaacgatgttccgcagatagccgcttttattatgcagtggttaaaaggggtttag

SEQ ID NO: 176355 - DNA, 240 bp, Klebsiella oxytoca
atgttgcagcgaactttagggagtggatggggcgtgttgatccctggcgtagtgcttgccgccctcgggtttgccgatttgtcggtagatgcctggcgtggattggtcactttgggaatgctgatgtcagcgatgatgatttggcaccggcagctacggcattttgttttgctgccatcatgcgtggcgctgatcggtggaataatgctgatattgctgaatttgaggctgatgggataa

SEQ ID NO: 176356 - DNA, 1047 bp, Klebsiella oxytoca
atgactgcacaatcctggcgatcccattacgaacagaaatatcagtattccttacggctatttttactgcttaatttggtttcatcctttttatctctggtcagcccgctctttaccgtcattacatttaccccaccttgctttttgatcgtggcctgcagcgcggttctgctgctatggcactggaaattcgcccagcacaaaataaatattccgcttatttcactgatatttggtctgctgtgggcatggcatgtagccctaaaagcaatggtgatgggccccccacattttaactacctggtcatcgcgttattaagcgtgctatttatcggcaccattgctttttccagcaatatcattgcctttacgttgcactcgttacccacctacgtgacctgcctgtttctcggcggaggcgaacagtggttgcgcatgtcctggtgctttgtgttgccgattgcagggatcgccctgcaaagcctgatgcaaaaacgcagcgatgttttcacccagggcctcatggataaactgttgaaagaacgtaatacccttaacgatctcagcatgttggatcctctcaccggcttgtataaccgtcggggcttacaaaatcgtctggacaccattctttctttggatagtagcgagcattacgtcctgctgctggatattgatcatttcaaagcctataacgaccactatgggcatatgatgggcgaccaggccttaattcaggtctccgcagccattcgtaacgccgtgcgctcgcgcgatattgtggcccgctttggcggcgaagagtttatggtgctcttgaccagcagtagtgcggaaaacgcccttcaggccgcggagcgaatcaggcagcgggtctacgatctgaaaatcccgcatatgttcaatgaaagcgtcgcgaccaatgtcaccattagtatcggcatgacgccgctcgtagatgccgatatcgatagcgccctgaaacgagcggataacgcgctctatgaagccaaaaatatggggcgaaacattattctcgccagctaa

SEQ ID NO: 176357 - DNA, 789 bp, Klebsiella oxytoca
atggcttaccgttcacttgcattcaataatgacctcatctggcgggccccgctgccttcggctgagcgcaaactggcgaatgcattacatgacaagatcgctgcgctacgtccccatctgcttgattttctgagactaaatgaagaagccccccatcatgcgctgacgcttacagagtggtcgcagcccgcaatgctaagttccctgttggcgacctggtccgaccatatttatcgtaaccagccggggaaaccccgtgagcagaaaccgctgctttccctgtgggcacagtggtacatcggtttgctggttccgccattaatgctggcgctgttgagtgaagagcgcgcccttagcctggcgccggagcattttcgcgtcgagtttcacgaaaccggccgtgcggcccgtttctggattgaggtacattcggcgggcgcctcgccggaacaatctgcgcaatcaaggatggaaaagctgatcgctacggctctccaacctgtcgttcaggcgcttgaagccacgggtgatatcaatggcaaacttatctggagcaatacgggttacctgatcaactggtatctgggtgaaatgaaaaccctgctcggagatgaaaaaattgccgctctgcgtcagcactgcttcttcgaaaaacagttttctgatggccaggataatccgctctggcgtacggtcgttttgcgggaagggcagctcgtccgtcgaacctgctgccagcgctatcgcctgccggatgttcagcagtgcggggactgcacgttgaaataa

SEQ ID NO: 176358 - DNA, 1344 bp, Klebsiella oxytoca
atgtctgctaaccatgctgcatttaatctgatatttcgctttgtagagaattacatcagccctgtcgccggacgcatctcgtcccagcgtcacgtgatggctattcgtgatggtttcatctccgcgatgccgtttatgattgttggttcatttcttctggtatttgcttacccgccgttttcgccggataccacctggggatttgctcgcgcctggctggatctggcaaaagagtttgaagggcgtattctgacgccgttcgatatgacgatgggcatcatgtctatctacatctgcgccgcgatcgcctataacctcggaaagcattacgaaaaaagcaatcagctcgatcccttcatgtgcgccatgctgtcgattatggcctttctgctggtggcggcgccaaaaacgaacggtaacctgccggtagatagcctgggcggaacggggatttttaccgcgattctggttgccgtttactgcgttgagatgatgcgctttcttaaagcacataatattggtattcgcctgccggatcaggtgccgccgatgatcaaaaactcttttgatctgttgatcccggtactggtggtcgtcctgacgctttatcctttgagtctgcttatccagcatcatttcgatatgctgatcccccaggccattatggctatttttaaaccgctggtttccgcagcggattcgctgccggcgattttattggcggtactggtggggcacctgctatggtttgcggggatccacggtgccgctattgtttccggtatgctgcagatgttctggctgactaaccttggaatgaaccagcaggctctggctcagggggctccgctgccgcatatttttatggaggcgttctggacattcttcattgtaattggcggttccggggcgacgatggggttagtattctgctatttgcgtagccgctcggcgcatctgcgttcaattggtcgtcttagcgtggtgccaagccttttcaatatcaacgaaccggttatctttggcacccctatcgtgatgaacccggtgttctttattccctttctgctggcgccgatggttaacgccgtactggcgtgggcggcaatgaagctggatcttatcggccgggtgatttcggttgttccgtggacggctccggcgccgatcggcggcgcgtgggcgctgggatgggatttccgggcggcgattctggtcgtcgttctcgcctgcgtttccgcgattatctacttcccgttcttcaaggtgtatgagaaacagctgctggcgcaggaggccgaagaggcacagcgcatggcggaagagagtcaacaaacggcataa

SEQ ID NO: 176359 - DNA, 459 bp, Klebsiella oxytoca
atgagtctgcagtccgtgcggcagttttttgctgaccgcgcccccgatatcgaaatcatcgaacttaatcagagtacggccacagtagcgttagccgcggcggcgcataacgttgaacccggacaaatagcaaaaaccctctctttaaaaataaaggaaagggtcgtacttgttgtcgcaaaaggcgatgcacgcctggataataaaaaactcaaggaagcattcggcgctaaagcgcgcatgctgagtagcgatgaggtcattacgttaaccggacaccccattggcggcgtttgcccttttggcctggaagttccgctggcagtgtattgcgatatttcattaagacagtatccggaagtgcttccagcagcaggttcaatacatagcgccgttcgcatttcacccgagcgaatggcgcagctgacggatgctacatggattgacgtttgtctttaa

SEQ ID NO: 176360 - DNA, 681 bp, Klebsiella oxytoca
atggaaaaagacctcacagcacgatatgtcgctatcgtagagaaatgtgcgatgacggaagtggcccttcgccacattttaattaatgaaagtggtaagaattatcgcattcaattctttaaagatactcaggcattaaagcgggagttccagtctaaagatttttcagcgattattttttctctttcaggtaaccgccgatcccggcttgaaagcttactctttcttcatgagattgcacgctactgccctgaaatgcaaagaattgtcttagccaatgatgaagctgaaatgcgtctggttagccatctgacgccttcacgcctgcacggcattttgaataaatcagcctgtcggctacagctgcaggaacatctgctgcagcttctcgaacgcagcggtccgccaaatgaaagctcgctaaaccaaaagcagggcatgtgtagtcaaattctgagcccgacggaacataccatcctgcgctatatgtcttatggctattcgttgcctgagattgcgacacagctggagcgcaatattaaaacgattcgggcgcataaatttaatgccatgaccaagctgggcgtcagttctgatatgggactactgagcgcggctgatatattaatgcgcttatcggcaaacaatgatgatgccagggtaatgcgccttgcccagtag

SEQ ID NO: 176361 - DNA, 723 bp, Klebsiella oxytoca
atgttaccaggacagggtaagttcggcattattatcagcagaataccggttatgcagtccggcttgaaggccattgttggggagcatctacccgattatgaattgagtttttgccgttctcaggatgagctcaccctgctgcaactgcggcgcgcagtactggttattgcagatttatccggtgaaatagagaatccaagaaatatttgtgaacactactactccttaatgacgcaatacagggatatacactgggtctttatggtaggaagtgcctgtttcccattagcggttgaattattaatgcggcctgaaagcacattaatttcagacagtgagccggtaaaacgtctcatcgaagtggttcgcgcgggtggacttgccgccgagcgaatcagccagacattgttctctcctgaagtggaacacatcggtgacgaacagcaaaaaatggtcattctgacgctctctgagcgaaaagtgttgcggcttctcgctaaaggatggggaattaatcaaattgctgctttattgaagaagagcaataaaaccataagtgcgcagaaaaatagtgctatgcgccgcttatctttgcgtagcaatgcagagatgtatgcctggattaatagtgcacagggaatgaaggagctgaatatttattcagcctatggagagcaaactgaatggaaaaagacctcacagcacgatatgtcgctatcgtag

SEQ ID NO: 176362 - DNA, 870 bp, Klebsiella oxytoca
atgcaggcagtgagtaccattcccgttttcaaactgtatggcgaagagcagggctggccgacgcccgatctgctgcactgcgagtcgatactccagcggagccatctttatgaatggcatatccgcctgcatcagcacgcagagctggtgcagctgctatatctgcacaaagggcaggcggaaattgaaatcgaaggtacgacgaccgtgatgagggagtcctgtattcagatcgttccggcgctgtgtattcatggttttcgtttttccccgggtacggaaggctacgtcttgtcgctggcgctgccgctgctcggaagtctcgaaagtcagtttgccagtcagttggatgtactcggccagccgcgatgcgtgccggtcaaggcgtcgcggagccatattcgggcgctgttcaccgctttgcgcgaagagtatcgcgaagagtatgacgcgcgtgaaatgatgctgcattccctgctgggagcgctgctggtgtggttgaaccggcagcatcgcccgcagccgataacggcagacaaagctgagcgcaagcgtagcgtcatgcgtcatttttctcgactgatagaaagtcattatcgcgaacatatgcccttagccgcttatgcaaagctggcgggcgtttctgcaacgcatctgaattatttatgccatgaattctacggctgcagcgcgctgggagtattacatcaaagattgatgcttgaggcgcgtcgcaatctgcaatacaccagcatgacgattgcacaactttctgattatttaggatttactgatgcagcctatttttctcgtttctttcgccgttataacggtgaatctcccaaagtatttaggaacaaaataaaatga

SEQ ID NO: 176363 - DNA, 1185 bp, Klebsiella oxytoca
atgaaaacacaggtggcgattatcggggctggcccatccggactcctgctggggcagttgttacatcacgccgggattcaaaccgtcatccttgagcgacagactcctgagtacgtgctggggaggatccgcgcgggcattctggaaagcggaacggtagagctgctgcgcgaagccggcgccgcgcggcgaatggaggctgaaggtctggtgcatcatggcgtcgaatttttgtttgagggcaagcgggtaccggttgcgctgacggaactgacggcgggcaaaagcgtgatggtttatggccagactgaagtgacgcgggatttgatggccgcgcgggcggaatgcggggcggcgacgatttatggcgtcagcgaagtcacgattaatgaggcaaagagcggtcgaccatcggtctcttttatcagcaatggcgaacactgccgcttagagtgcgactttatcgccggctgcgatggctttcacggcgtgtcccgtcaaagtattcctcctggggtgctgaaagagtacgaaagcgtctggccgtttggctggctggggctgctggccgatacgccgccggtgaacccggagcttatttacgcgcaccacgaacgcgggtttgttctttgtagtcagcgctcactaactcggagccgttattacctccaggtcccgctcagtgaaaaggttgaggcatggtctgatgagcgtttctggaatgaactcaaacgccgcctccctgaagagctgtccagcaagttagtgactggtcactcactcgagaagagcatcgcgccgctgcgcagctatgtggtggagccgatgcagtacggcagattgtttctggtgggggatgcggcgcatatcgtaccgcctaccggggcaaaaggattgaatctcgcggcgtccgatgtgaactatttatggcgcatcctccgtgaatattatcaccatggtcgcgttgacctgctggcgagctactctcgttttgcgctggatagggtatggaaaggcgaaagattcagctggtttatgacccgtctgctgcatgatttcccgcaacaaagcgagttcgatagaaaaatgcaggcggcggatcggcgttattatcttggctcacgcgccggattaaccacgatcgctgaaaactatgtcggtttgccgatggagcgcgtggcataa

SEQ ID NO: 176364 - DNA, 777 bp, Klebsiella oxytoca
atgcaagcagatcgggcaactcagcgcgcaatcacgcgattgtgcattcaatgtggtcttttcttattacaacacggagcggaaagcgcgctggtagaggagctttcaacccgcctgggcctggcgctggggatggatagcgtggaaagcgccatctcttctaatgcgattgttctcaccaccatcaaagatggcgagtgtctgacgtcgacgcggaaaaacagcgatcgcggcatcaacatgcacgtcgtcacggaagttcagcatattgtgattatggcggaacataaactgctggattataaagacgtcgaaaaacgcttcgcccagatcaagccgctgcgctatccacgctggctgctggttttaatggtcggcctctcctgcgcctgcttttgcaagcttaacaacggcggctgggacggcgcgctggtcactttctgcgccagcacggtagcgatgtatattcgccaggtcctgactcatcgctccatgcatccgcaaatcaacttctgcctcaccgcctttgtcgcaaccaccatctccggactgatgctgcgcctgccggctttcgccagcacgccgacgatcgcgatggccgccagcgtgctgctgctggtacccggctttccgctgatcaatgcggttgccgacatgtttaagggacatatcaacaccggcctggcgcgctgggcaatcgccagcctgttaaccctcgcgacctgtattggcgtggtgatggcgatgacaatgtgggggctacgcggatgggcataa

SEQ ID NO: 176365 - DNA, 474 bp, Klebsiella oxytoca
atgggcataatcatttatctctacgaactggcgctggatatggtgctggccgccatccctgccgttgggtttgcgatggtattcaacgttccgcagcgagcgctgcgctggtgcgccctgttgggggctatcggccacggctcgcgcatggttatgatgacggcaggttttaatattgaatgggcgacgtttatggccgccctggtggttggcagcatcggcatccagtggtcgcgctggtatctggctcacccgaagattttcaccgttgctgcggtaatcccgatgttcccgggcatctccgcctataccgcgatgatctctgcggtgaaaatcagccattttggttactcggaagagatgatgattatgctgttaagcaattttcttaaggcttcgtctatcgttggtgcattatccatcgggctttctattccgggactttggctgtatcgcaagcgtccgcgcgtctag

SEQ ID NO: 176366 - DNA, 540 bp, Klebsiella oxytoca
atgtcttcacgaatattaactaccgattttagcggtctggatgacttcatgcaggatcacgcggcggtgctggcaaaatccaccgccggcgccgtcgccgtatttgccaacaacgcgcccgcattctatgcgctgacgccggagcgtctggcgcagctgctggagctggaagccaaattatcgcgccctaatagcgatattgcgctggatgcgcagttttttgacgagccgacgacggcccccgttgcggtaccgatgggtaaatttccgatgtatgccgactggcagccggatgccgatttccagcgtctggccgcgctgtggggcatcgccctcagccagcccgtcacgccggaagagctggcggcatttgtcgcttactggcaggcggaaggtaaagtctttcatcatgtccagtggcagcagaagctggcgcgcagcgtgcagattggccgggccagcaacggcggccagccgcgacgggatgtcaacgcgattagcgaacccgataaccatattccacgaggattccgaggatga

SEQ ID NO: 176367 - DNA, 744 bp, Klebsiella oxytoca
atgagcatgaaaaatgtcggcgatttaatgaagcgcctgcaaaagatgatgccagcccatgtcgaacccgcgttcaagacaggtgaagagctgctggcgtggcaaaaagaacagggcaagctgcgctctgaggcgctggaacgcgaaaaccgcgccatgaaaatgcagcgtacctttaaccgctccggcatccgcccgctgcaccagaactgttcgctggataactaccgggttgagtgcgagggccagatgattgcgctgtccagagcgcgccagtacgttgaggagttcgacggcaatatcgccagctttatcttctccggaaagccgggtaccggaaaaaaccaccttgccgccgctatctgcaacgagctgctgctgcgggggaaatcggtattgattatcaccgtcgccgatattatgtcagcgatgaaagataccttcggcaaccgggaaaccagcgaagagcagctactcaccgatttgagcaaggtcgacctgctggtaatagacgaaatcggtatgcaaacggaatcacgctacgagaaggtcatcattaatcagattgtcgatcgccgctcttcgtcaaagcgcccaaccggtatgctgacgaacagcaccatggacgagatgaacaaactacttggcgagcgcgtaatggaccgtatgcggctgggcaatagcctgtgggtcaattttaactgggaaagctaccgcgatcgcgtaaccggaaaagagtattaa

SEQ ID NO: 176368 - DNA, 495 bp, Klebsiella oxytoca
atgaaatctgcaaaaacgttgttccgcacggcgatagtggccggcgctttattcaccttcggcgcccacgccacctcctggcaggattctctctccagcgccgcaaaccagctcagcagccagaacggtagccagcaaagcggcgggatgtccctctcttcgctgaccggtttgctcaacggcggcaaccagtcgttgacctccagcagcatgaataatgccgcagggattatgtcttattgcgcgaaacagaagctggcttcagtcaccaatactgaaaacatcaaaaatcaggtgctggataaactgggtctcagcacgccggaaaaacaaaaagaagacaccagctatcttgagggtcttcagggtttgctgaccagcaaagatggccagcagctgaatctgaacaaccttggcagcagcccgctggcggaaaaagtcaaaaccaaagcctgcgacctggtcttaaaacagggcgtgagcttcctctcctga

SEQ ID NO: 176369 - DNA, 2292 bp, Klebsiella oxytoca
gtgtcagagttgttatccatcgccctgtttcttgcctcggtgatgatttatgcattaaaagccggtcgtaatacctggtggttcgccgccacgctcacggtgctgggcctgttcgttattctgaatattaccctctacgccagcaattacttcaccggcgatggtatcaatgacgcggtactttatacgttgaccaacagcctgacgggcgctggcgtgggcaaatatatcctgcctggcgttgggctggtcgtggcgctggtcgcggtatttggcgcactcggctgggtgctccgccgccgccggcatcaccctcatcactttggctacagcctcgtggcgctggttctggcgctggcttcagtggatgccagccccgcttttcgccagattagcgagttggttaaatcccagtcccgcgatggcgatcctgacttcgtggcttactacaaagagccatcaaaaagcatcgccaatccgcaactgaacctggtgtacatctacggcgaaagtctggagcgcacttattttgataacgacgccttcccggacctgacgccggagctcggtaaactcaaaagcgaggggctggatttcagcaataccgcccagctgcccggcaccgactacacgattgccggaatggtcgcctctcagtgcgggatcccgctgtttgcgccgtttgaaggcaacgcctcggcctcagtttccagctttttcccgcagaatatctgccttggggatatcctgaaaaactcgggttatgagaactacttcgtacagggcgcgaatctgcgcttcgccggaaaagatgtcttcctgaagtctcacggcttcgatcatctgtacggcgcggaagagctaaaaaccacggttgccgatccggcctatcgtaacgactggggcttctacgatgatacggtgcttgatgaaacctggaaaaaattcgaagcgctttcgcagtccggtaaacgcttctcgctgtttgctttgacggtcgatacccatcatccggatggtttcatctcccgaacctgccagcgcaaaagctacgacatggacggcaaaaagaacctctcctttagcgccgtctcctgcagtcaggagcacattgcggcgttaatcgagaagattaaagcttctccgtggttcaaaaatacggtcatcgtagtgtcatccgatcacctggcgatgaaaaacagcgcctgggattatctgaataagcaggatcgcagcaatctgtttttcgtcctgcgcggcgatcaaccccagcaggatacgctggccgtcaaacgtaataccatggataacggcgcgacagtgctcgatattctcggcggcgataactttattggccttggccgcagcagcctttccggagagtcgctctccaccgtgttcctcaatatgaaagagaaagtgctggcgtggaagccggatatcatccgcctgtggaatttccccaaagagatgaagaacttcaccgttgatgcgcagaaaaatatgatctccttctccggcagccatttccgcctgccgctgctgctgcgcatctccgacaaacgcgttgagccgctgccggaaagcgaatactccgcaccgttgcgcttccagctggccgatttcgcgccgcgtgataatttcgtctgggtcgaccgctgctacaagatgggtcagctgtggtcgccggaagtggcgctctccaccgactggtgcgtatcgcagggccagctgggaggcgaacagaaagtccagcgcgttgacaaagcccagtggcagggtaaaaccgcgttcaaagatacccttatcgatatggaacgttataagggcaacgtcgatacgctgaagatagtcgataacgacattcgctataaagccgacagcttcctgttcaacgttgccggcgcgccggaagaggtgaagcaatttagcggtatctctcgaccggaaacatgggggcgatggtctaacgctcagctcggcagcgaagtgaaaattgaatataaggagccgctgccggagaaattcgatctggtgattaccgccaaagcctacggtccgaatgccaataagccgattccggtacgggtaggcagcagcgaacaaacgatcgtcctggctaatgatgtcaccaccactaccctgcatttcgataatccgtcgcgcagcagtacgttgacgattgcgccgccggacccgcagtccacgaacgagggcaatattctcggccactccccgcgtcagttgggcatcggtatggttgaaatcaaagtggtgaaaagcgaagggtaa

SEQ ID NO: 176370 - DNA, 927 bp, Klebsiella oxytoca
atgaaaaaacggatgacctcaacgccgcatgatgcggtttttaagcgatttcttcgctacccggaaacggcgaatgattttctcacgctgcacctgccggaagcgatccgtcagcggtgtgatttttctaccctgcggctggaaccggcgagctttgtcgatgaagatctgcgcgcctggtactcggacgtactatggtcggtacaaaccccctgcggcctgggatatgtgtatgtggtgatagagcatcagagctcgccggataaccatatggcttttcgcctgatgcgctatgcgattgccgccatgcagcgtcatctcgacgccgggcacaaaacgctaccgctggtggtgccgatgcttttttatcacggtgcgaccagcccctatcccttttccctgaactggctggacgaatttgccgacccgcagatggcgaggacgctgtatgcctgtccgtttccgctggttgatgtgacggtgataccggacgatgaaattgttcagcaccggcgggtcgcgctgctggaactgatgcaaaagcatattcgccagcgcgatctcagcgggattacggagtcgttggcgacccttgtcatgctgggatacactaaccgcaggcagttgagagtgctgtttcattatatgctgcagtacggcaacaccgccgatccgagcgtgtttctccgccggttggcccgccgtctgccacaatatgaggagaggttgatgtctatcgctcaaaaactcaagcaggaagggatacaggaaggccggcaggaagggcgcctggaaggtctgcaggaagggagccggcgggaagcgttgcgcattgccggcagtatgctgcaaaacggtttagataccgagacggttcagcggattaccgggctctcagcggatgagttaaagccgctgcatagctaa

SEQ ID NO: 176371 - DNA, 1011 bp, Klebsiella oxytoca
atgttgggttttaatcaggacgagtacctgaccagtgctcgcgaaatcatcgctgcgcgcaaacaggcggaagccgtcgccgacgatatttatcacagcggctgcagcgccttatttttcgcctcggtaggcggttctttagctccgatgatggcaattaatgagtttgctaaagaattaaccggcgtgccggtttatcttgagcaggcggcggaattaatccatcgcgggcataaaaaattaaataaagatgcggtggtggtgacgttatccaaatccggcgataccaaagagtcggtggccattgccgaatggtgcaaagcgcaggggattcgcgtcgtggccattacccgtaatgccgattcgccattagctgaggcggcgagctggcatattccaatgtgccacaagaacggcgtggaatatgaatatatgctgctctactggttattcttccgcgtcatttatcgtcacggcgatttcgcccattacgatcgttttgccagccagctggagttgctgccggaaaatcttctgcaggccaaacgccagttcgatccgcaggcggataaaattgccgctcagtatcacggctgcgactatatgatgtggatcggcggggcggaaatgtggggcgaggtttatctgttctcgatgtgtattctcgaagagatgcagtggaagcggaccaagtcggtgagttcggctgagtttttccacggcaccctggagttactggaaaaagaggtccccctgttcctggtgaaaggcgagggtaaatgtcgggcgctggatgagcgcgttgagcgctttgctgagaagatcaccgaccacctggtggttatcgacccgcgtgactatccgctgaacggtattgatgatgctttccgctggatcatggcgccgtgtgtcgtttctactctgctggtggaccggctggcggcccacttcgaacatcataccggacacgaccttaatatccgtcgttattatcgtcagtttgattactaa

SEQ ID NO: 176372 - DNA, 1062 bp, Klebsiella oxytoca
atggtagcaacgatgatgacctatatcagcgaggagtcggcctgtctgacgcagatcctgcgcgactaccggcaaaagctggcggcgattgagacttttgcccgccagcacccggtgcgccgcattctgctgttggcgaccgggtcgtcgctgaacgccgccctgtgcgcgcgctatttctttgagcagcgcttcggcgtcctggttgagattaaagagccgtacaactttacgcactacgaggcggtcgatccgcataccgatctggtggtggcgatttcgcagagcggtaaaagcgcctcaacgctggaggcgatgcgtaaggtacaggcattgagcctgccggtttttgctctgacctccgatccgcaaagcccgatagcccgggcctgcgacgggatactggatatcaacaccgggattgagagcgtggggtttgtcaccagagggtttagcgcgacggtgctgaatttgctgctgatggcgctgaccatcgcccgtagccagggaaaagccagcgaggccgaggagcagcgctatcttgccgaactgcagcggctggcggcggcgatcccggatgtcattgaccgcacctcgcggtttatcgacaggcatggcgaagcgctgcggggcggcgagcgctttgtcgccaccggctatggtgctctggttggggttgcgaaagagtttgaaactaaatttaccgaaacggtgcgcgtgccttccagcggctttgagctggaagcttatatgcatggtccctatctggaggcgaattgccgccatgtgatgctgtttattgaagatgcgccggatgggcggacccgggcgctgcgggactatatggcgccgtccattgcccgcgcctttacgctgacgctgagcgacgaagaggatgcgcagacgctggcgctaaactgcccgtgtgaacatcacctggcgccgctgctgctgattgttcccgtccagatgctggcctggcataccgccggactgaaaggcatcgatctggctaaacgtatttttgacgattttgaccgcgtcttaaaaagtaaaatctga

SEQ ID NO: 176373 - DNA, 852 bp, Klebsiella oxytoca
atgacgacgaagatgatttctgaagaaactctgcagccgcaggcgcaggaagaggcccgtattacgccgcgcgatctacgccgggtcttctggcgctccttccagatggagttctcctggaactatgagcggcagatgaatcttgcctttgtttacgcgttgattccggtgctgaaaaagctctatccgcgcaaagaggagttggccggggcgttaaagcgacatctggtatttttcaataccacgccgcatatcgtcaccctgctgctggggatcaccgcggcgatggaggagaagaatagccagcagaagaacatggacgccaacgcgattgataacgtcaaagcgtcgctgatggggccgctggccgggctgggggactccttcttctggggcacgctgcgcctgatcgccaccggcatcggcaccagcctggccctgaaaggcaacattctcggtcccatcctgtttctgctggtgtttaacgtgccgcacatcctggtgcgctggttctttacccgctggggctatgtgctgggcaccggggtactgcagcgcatccagaagagcggaatgatggagagcctgacctacggcgcgtcgattatcggcctgatggtggtcggggcgatgaccgcttcaatgattgatatcaccatccccatcgcattcggcgccggagaggcgaaaacccaggtgcaggacattatcaacgacattctgccctgcatgttgccgctggtaagtttcggcatcgtttactggctgctggggcgcaaggttaaaccgctctctattatcggggggatggcgctggtgggcattctgggttcgtggattggcttgttttaa

SEQ ID NO: 176374 - DNA, 780 bp, Klebsiella oxytoca
atggtagaggctctcttactggggctggtggcgtttatcgcgcaatcggaatatgcattaggaacgtcgctgatttcgcggcctatcgtgaccgggctgctgaccgggctggtgctgggggatgtacaaaccggcgtcatcatgggcgcgacgcttgagctggcctttattggctctttctcggtcggcgcatcgattccgcctgatgtagtaaccggcggtattctcggcgtggcgttcgccattacctccggcgcgggaacggaaacggcgctgctgcttggactgcccatcgccaccctgacgctgatcctgaaaaacgtctatctggggatgtttattccgatgctcagccagaaggctgacggctatgcggagcgggcggatacccgcggcattgaacgtatgcatttgattgctggcttcgggctgtcgctgatgctcgccacggtggtcaccgtgtcattcctggtcggcagcaatgcggtgaaatccctgcttgacacgatcccggaatttatcaaacacgggctcagcgtcgccaccggcatcattccggccctcggcttcgcaatgctcgccaggctactgattaataagaaagttgcgccgtactttttcctcggtttcgtgctgatggcctacctgaaaattccggtaaccggcatcgccattctcggcgctattgtggcggtggtcatggttaacgtcaccgcgttgagctcacctcgtacgacgacagaacaaggagtcagcgatgacgacgaagatgatttctga

SEQ ID NO: 176375 - DNA, 471 bp, Klebsiella oxytoca
atgattacgctattaagggttgaccatcgattacttcacggccaggttgccttttcctggacgcagtatgtcggcgctgattgcattttaattgccaacgataatgtcccagatgatgagctacggaaaacgacgattaagctcgctaaacccccttcagtcaaactggtgattaaaaatattaacgacgctattgaatcgataaaaagcggcgtgaccgacaaatataatctgtttatcgtcgtggaatcggtaaatgatgcctggcggattgccagcgccgtcgaggaaattaaaagtattaatctcggcggaattaaagccaaagagggcagtaaaaatatctctaaggcgattaatttactcccggaagaaatagagcaactgcagcaactggttgggaaaggcgtcgaagttgagattcgccaggtccctaacgaccgcaaacagctttttgcggaatgcgtttaa

SEQ ID NO: 176376 - DNA, 423 bp, Klebsiella oxytoca
atgaaacgacactatatttttgccagccatggcacctttgctaacggtttgctgaactccgtggagctgatcctcggtaaacagccggatattcataccctgtgcgcctacgtcgaggaggaggccgacctcacgcagcaggtggagacgctgctggcgcgttttcccgcccaggatgagctgattgtgattacggatattttcgccggtagcgtcaataatgaatttgtgcgctttctatcgcgcccgcactttcatttattgtccggcttaaatctgccgttgattattgatttgctcatttcagctggcgaagagaataccgaaaaattaatttctgaagcattaataagcgccaaagagagcattcagtactgcaatcagacgattgccagtgcgatgactattgataaagacttctga

SEQ ID NO: 176377 - DNA, 2766 bp, Klebsiella oxytoca
atgcgtaaaacggaactattggcttttctgcaaaatcagaccgatttttttgatccggataacctgagcgaggtcttcaccgccggctacctggcccggcgttttgccatgcaaagaaataccgccagccactatctgaatcagctggtggcccaggatgtgctggtaaagattaatacccgtccggtctattttctccataaagccgccttctgccagcagtttttccccctttcccgcagcgagtacgccagcatggcggagctgctcgcggagagcgatcgacagccggagcaggcggatcatttttcattgcttaccggccatgacggtagcctgcgcaagccgatcgaacagatgaaaaccgcgctgttttatcccaacggtggcctgccgctactgatcgtcggcgacagcggaactggcaaaagctatatggcggagctgatgcatgagtttgccatcgcccagggattgctgccgcccgatgcgccctttgtcagcttcaactgcgcccagtatgccagcaacccggagctgctggccgccaacctgtttggctacgtgaaaggcgcgtttaccggcgcgcagggcgataaagccggggcgtttgaagcggcaaacggcggcgtgctgtttctcgatgaagtccaccgcctggatgcgcagggacaggagaagctcttcacctggctggatcgcaaagagatctatcgggtgggagaaacggcgcaggggatgccgatatccctgcggctggtgtttgccactaccgaagatattcacagcacgtttctgaccacctttattcgtcgtatcccgatcctcgttagcctgcctgatttacagacccgcagccgccacgagaaagaagcgctcacgctgcagtttttctggcaggaggcgcgcacgctcgccgcccggctgcagctgacgccccggcttttgcaggtgctgacgcactacgtatatcgcggtaatgtcggtgagctaaaaaacgtgattaagtacgccgttgcgtcagcctgggccagggctccgggcagcgagaagctgaacgtcacgctgcacgatctgccggaaaatatcatggccgcgacgccggcgcttagtgaaccgatgggccatgaagagccactgcttatcgaaccgcagaccagcctggtctggctgctgcgcgcgcgcgacccggttcaggggctgatttatgatactcagtgccgcgttctcgcgctgtatgaggcggtgctgagtaaaaaaaggctctgggaagaagcgcaaaaaagcatgggcgaggagattgaaaccctcttcgatcggctgatatttgataatcacgatacccagagttcgcatatgctgctgctgataacgcatcaggtgcgggaggaattttatcgccttgaaaagcgcttcaatatccagtttaacggcaactgtatttatgctctaagccactacctgattcatcgttcccgccaggcgcagtcgacgatgagcaacgagaaaagccgccagctggaggatttcctggcgcaaaaatatccgttgctgtatcgcttttgtgaagagatcctcgccgcgctggcgctgaagctggacattgaaccccgacgtattgacctgttgttactggtgctgtggttacagaaaaatggcgccattagccagcagcaggtgacccgggcaattatcctcgcccacggttacgccaccgccagcagtatcgctaacgtggcgaaccggttgctgaaaagccagctgtttgagtcattcgatatgccgcttgatgtcacgccggaggctattgctaaccaggtgatggcctatattgagagtcacgcgctggcctccggactggtcatcctggtcgatatgggttcgctgaacgccattcatagccattttaaccgtcggctgacgacgccgatggcgataattaataacgtctcgaccgggatggcgatgtacgtcggcgagcgaattttgcagggcgacatgctggaagatatcgtccgggagatccgcggtgacctcgcgatcgagcatcagctctattacccgcaagcggacaaaccgcgggcgattcttacgacctgcgccaccggcctgggagcggcggcgaatctgtcggcgctgttaaaagccagtatccctgaagcgctggggatcgatattgtggcatgcgatgtggagacgctcgccgatcccgcgcggcggcagccgatgctgagccgctatgaggtgctggcgatcgtcggaaccctggacccgcagcttgccgatctgccgtggatttcgctggattcgttaatctccggcgaagggagccgcccgctgatgcgcatcttcggcgagctggccaccgctgagcaggtcagcgaaatcaataacctgatcctgaagaatttctcgctgcgccgggtgatcgagtcggtgacgatcctcgataccggtaaagtgatcaatcaggttgagcagtttttactgcgctatgagcatctggccggctgcgatgtgcctaacgatcgcaaggtagcgctgtatgtgcatatcagctgtctgatagagcgcctgatccgcaacgcctcgccatcccattattccggaaggcagtgtccgcagagcgagctggcgacgctccgcgaggcttttagtgtcatagagagtggatatagtgtcaaaatccccgccgtagagctgtactacattcacgatattctgacgcgggaaactgaatttattcaggaagatcaagagttttaa

SEQ ID NO: 176378 - DNA, 1446 bp, Klebsiella oxytoca
atgaaatcgttaaacagacaagattttcccgggccgcactacccgacgcgcgtgattcagttcggcgagggcaacttcctgcgggcgtttatcgactggcagctggatcggctgaatgagcaaaccgatctggcggcaggggtgaccattattcgcccgatcaacaccgagtttccgccgtcgctcaatacccaggatggactttacaccacggtgatccgcgggctggacgaacgtggcgaggcggtgagcgaagcgcggattattcgctccgttaataacgagatcaacccctggcaggattttgctggctatctggcgctggctcgtaatccggcgattgagttcgtattttcaaataccactgaagcgggtattagctatcatgccggggaccggcctgacgataagccgccggtcagctttccggcgaagctgacccagctgctgctcgaacgtttccgccatttcaacggcgcagcggataaggggtggacgattatcccctgtgagctgatcgactacaacggcgaagcgctgaaggcgctggtgctacgctacgccgacgagtggcaactgcccgcggcttttcgcgactgggttgagaccgccaatacattttgttcaacgctggttgaccgtatcgtcaccggttatccgcgcgaggaagcggcaaagctggaggcggaactgggctaccatgatgctttcctggataccgccgaatactattggttattcgtcatccagggatcgcaggcgctggcggagacgctgcggctagatcgctacccgctcaatatccgtatcgtagaggatatccggccctacaaagagcgcaaggttgccattcttaacggcgcgcataccgcgctggtgccggtggcgtggctgtgcggtgtcgataccgttggcgaagcgatgcatgatcaggccatacgccattatgtgcagcaaactatcgacgaggagattatcccggcgctggatttacccgccgatgagctacggcagtttgccgatgccgtgaccgggcgctttcttaatccctggattcgccatcagctgctctccatcgccctgaacggcatgactaagtttcgtacccggatcctgccgcagctgctgacgaatattcgccggcacggcacgatcccgccgcggctaacgtttgccctggcggcgctcatcgccttctatcgcggccagcgcgagggacagacctatccgctgcaggatgatgacgtctggctaacccgttttgccgaaggatgggcgcaggtggcgcgcggccgcccgctgcatgaactggtcacggaagtcctgcaggatgcagcgcactggggtgaagatctgacgaccgttccggggcttgccgatcaggttacgcggtatctggaaatgattttgagcgtggggatgcgggaggccctgaggcggctgtag

SEQ ID NO: 176379 - DNA, 1023 bp, Klebsiella oxytoca
atgacgtcgatgaatacattagtttgtcaggaacctaaaatattgcgctgggaaaaacgccagattcccattcccggtgatgatgaagtgctcattaaaataaaaacggtggggatttgtggtacggatattcacgcctggggagggaatcaacctttttttagttatccacgcgtgctcggacatgaaatatgcggcgagattatcggtctcggtaaaaatattcttaacttgaaaagcggacagcaggtagtcgtcataccttacgttgcctgccgtcagtgtccggcctgtttgagcggcaggactaattgctgcgagaaaatttcggtgatcggcgtgcatcgggacggcgggtttagcgagtacctctgcgtgccggtaaaaaatctgctggtggtggatgacgtcgagccggaagccgcagcgctgattgagcctttcgccatcagcgcccacgcggtgcgtcgcgccgctatccagccgggagagcaggtgctggtggtcggcgcgggacccattggtctcggggcggcggctatcgctaaagccgacggggcgcaggtggtggtggcggataccagcccggcgcggcgcgaccatgtggcgcagcaccttggtctggccacgctcgacccttctgacccgcaattcaccgagcagctgtgtgacatgtttggtggttcgctggcgcagaaggtgatcgatgccacggggaatcagcaggcgatgaacaacacggtaaatttaatccgtcacggcggcagcatcatttttgttggcctgtttaaaggtgaactgcagttcccggacccggagtttcataagaaagagaccaccatgatgggcagccgtaatgcgacggaagaggatttcgccaaagtcggacgtctaatggctgagggaaaagtgaccgccagaatgatgctgacccaccgttacgatttcaggtcgctggccgagatttacgaaagcgaagtgattaacaatcgccagcttattaaaggcgtcattcatttttag

SEQ ID NO: 176380 - DNA, 915 bp, Klebsiella oxytoca
atgagccgctcgcaaaaccttcgtcacaacgtcattaaccaggtcattaacgatatggcgcgcggctttcttccgtcgccgctgccctcacaaagcgcgctggcggagatgtacaacatcagccgcaccaccgtgcgccatatcctcagccacctgtgcgagcggggcgtattgcgtcagaacgctcgggattatcagatccttcgccagccggagatgcaggacggcttcgatggctccagcgcctcgctggccgagcagaaccgtctctttgagcaggcgtttttcaccatgattaaccagcgccagctgcgcgccggagagatgttttccgagctgcagctggcgcgtgctgccggcgtcagtccggtcgtagtgagggaatttctgttgaaattcagccgctacaacctgattgaaagcgaaaagcgcggccagtggaacatgaagaaatttgagcaatcctgggctgagcagctgttcgagctgcgggaaatgctggaaacccacgcgcttcagcatttcctcaatctcccggacaacgacgcccgctggctgcaggcgaaaaccctgcttgagcgccatcgcgcactgcgtgacagcatcggcgacagctttcgtatgttttcccagctcgatcgcgactttcactcgctgctcctgtccgcggctgagaatatatttttcaatcaatcgcttgagattatttccgtgattttccactttcactatcagtgggatgagagtgaccttaaacagcgtaatatcatcgccattgatgaacatatgaccatcctgagcgcgcttatctgccgcagcgatctggacgccaatctggcgctgcgtaaccacctgaactcggcgaagcaatcgatgattaactcgctcaggcagagcgaatccctggctcattaa

SEQ ID NO: 176381 - DNA, 1362 bp, Klebsiella oxytoca
gtggaatcacgaaatataactatcgacccgcagacaacctttgataaaggaaaggcggagactgccagcgttccgttaaataatacgttaacgcgcagcgcgcgcattaaaaaaattcagacaacggcaatgatcctgttatttctggcggcggtgattaactacctcgacagaagttcattgtccgtcgcgaacttaacgattcgcgaagagctggggctcagcgccaccgaaatcggcgcattgctgtccgttttctcgttggcctacggcatcgcccagctcccctgcgggccgctgctggaccgtaaaggcccgcgcatcatgctggggctgggcatgtttttctggtcgctgttccaggcggtctccgggatggtacatagctttacccagttcgtgctggtgcgtatcggcatggggatcggcgaagcgccgatgaacccgtgcggcgtcaaggtgatcaacgactggtttaatattaaagagcgcggccgcccgatgggcttctttaacgccgcctcgacgattggcgtcgcgatcagcccgccgatccttgccgcgatgatgctgatgatgggctggcgctggatgttcattaccatcggcgtgctggggatcttcgtcgctatcggctggtatatgctctatcgcaaccgggaggatgtccccctcaccgccgatgagcaggcctaccttaatgccggaagcgtcaacgttcgccgcgacccgctgagctttgccgaatggcgcagcctgtttaaaaacaaaaccatgtggggaatgatgctgggcttcagcggcatcaactataccgcctggctgtatctggcctggctgccgggctacctgcaaacggcgtataacctcgatctgaaaagtaccgggtttatggccgccattccttttctgttcggcgccgccggtatgctcatcaacggttacgttaccgactggctggttaaaggcggcatggcgccgatcaaaagccgtaaaatttgtattattgccgggatgttctgctccgccgcgtttacgctgatcgtgccgcatgccaccacctctatcgctgcggtgctgttaatcggcatggcgctgttctgcatccactttgccggtacttcctgctggggattgattcacgtcgcggtggcatcaagaatgaccgcgtccgtcggcagcatccagaacttcgccagctttatctgcgcctccttcgcgccggtagtgaccgggtttattgtcgataccacccactcattccagctggcgctggtgatctgcggctgcgtcaccgccctcggcgcgctggcctatatcttcctggtccgtcagccgattagcgacccgcgtaacggctga

SEQ ID NO: 176382 - DNA, 837 bp, Klebsiella oxytoca
atggagcttaccgccgtttccgccactcagtttagcgtcgcgcagctgacgacgatcctttgcgactgtttcgaagattacctggttcccgtcacgctgtcggtagaggtttttgtccagcgttttagcgccgaagggctgagcctgctggattcctgcgtctggctggatggtgatgtccctgcggcgatggccgttgtcgcccggcgcggcgatgaagccaggctggcggcatttgcgatgcgacccgcgtatcgcggaaagggcgtcggacgccggctgatggggtcgctgctggatgcattgcgcgagcagggcgtacggcggatgtggctggaggttattcgcgataaccacgctgcggtagcgctgtatcactcgctgggcttcgaggtgcggcacgggctgtgcggctatctgagcgcgcagaccgcgagcgaggagtcatccgtattgcaggagtatgacgtgctggcgctgacgcgcagggccggcgccgagcttaatggccagctgccgtggctgatggacccgctcaccttcagcaccctgccgtgccgggcgctgagcctccatcagcaggctttcgccgtgctggcgaccttatccagcaggccgcagctgcagtttttatgggtcgagcccgccgcacgcgggcgcgggctggggcgggaaatgctgatggcgcttgcccgacagtttccagggctcgggacctcggtgaccatcccggaacgctttacgcccctgttccagaccgccggctatacgcctggggtattaaaacagtatgaaatgagcgcaacgctgagcgccctgccatcagcagggcgttaa

SEQ ID NO: 176383 - DNA, 534 bp, Klebsiella oxytoca
atgaaaactaacactataaccgccgccgcgacgttacgcctgactgaggagagagacatccctcttctgcccgccattgagcgctcggcggcccaggcttttcgccagattccggcgctggcctggctggcggaaagcgaagtgataagccccgagcgccaccggctgttccttgaaactgaccacagcctgctggccgtggccgatgaccaaccgataggcttcctgctgagcgaaccgctggatgatgcgctgtttatcgtcgagatcgccgttcatcaggcatggcaggggcgaggcattggccgcatgatgctggagcaggtcattgagacagcccgccaggcggcttatccggcggtcacgctcaccaccttccgcgatgtgccctggaacgcgccgttttacacgcgactggggttttcaatgttaagtgagcgaagactaccggcgggactggcggcgaaaagggagctggaaacggaacacggtctgccgccggagacgcgctgcgccatgcgcctaacgctgtag

SEQ ID NO: 176384 - DNA, 906 bp, Klebsiella oxytoca
atggtacaaagtatcattgataacttacctgttgatacccgtatgtcctggtcaatcgatatcatttcctgcataaccgatcgctttgtggaactcacggcgaccgaaaagcgcatcgcgcagttcattctcgatgatgtcgcggcggcggcggagctgcccatcgcggagatggcgcgtctgacccacaccagccaggcctccgttacccgctttgcccgggcgctcggctgtaaagacgtccgcgagctgaagatgaggctcgcgcaatctctggcggtcggacagcgatttatcctcgatgtcccggaccttgagggcgtacaggggatctacgagtcgatcattggcgtgctggaaaccaaccgccgggcgctggacattgaagcgctgaagcgtgcggtgagctggctgagcgacgcgcggcagatcctggcgctcgggatgggcggcggctctaccatctgcgctcaggagatccagtatcgcctgtttcgcctcggcctcccggttgtcagccagaacgacggtctgctggtgcgcatgatgagctcggcggtgacgccaaaggatgtggttatcgtgctgtcgttgggcggctatacccaggaaatcatcgagagcgcggcgattgccaggcagtacggcgcaaaggtcattgccatcacccccgccggaacgccgctggcggagcaggcggatctggtgctgccgctgctggtgcgcgaaaacgactacattttcaagcccagcacttcacgctatgcgatgctggcgatggttgacgtgctggccaccgaactggcgatggccaacaaaactcaggcaaaaggcagattgcgccggattaagctggcgctcgacagccaccgcggcggcgtcgatcgccagccgctgggcgattaa

SEQ ID NO: 176385 - DNA, 603 bp, Klebsiella oxytoca
atggacaagattaaactggtggcgattttacgcggtattcgccccgctgaggcagcggagcatattgagacgctgatagaggcaggatttcgctatatcgaaattccgctcaattcgccggactggcagcagagtattccgcagatggtcgcgcgctttggcgagcaggcggtgattggcgcgggaacggtacttaaggtggaacaggtcgattttctggccgatgccggagcgaagcttatcgtgacgccgaatactgagccgacgacgatccgccgggcggtggcgcgcggaatgcgggtttgcgccgggtgcgccaccgcgaccgaggcgtttaacgcgctggatgccggggcgcagtggttgaaaattttcccgtcttccacttttggcccggactacattcgggcgctgaaagcggtgctgccgtcggaggtgccggtgctggcggtcggcggcgtgacgccggagaatctggcaagctgggttgaggcagggtgcgccggcgctggcctgggaagcgatctgtatcgcgccgggcaggccgtggaacgtacccgtcagcaggcggagaggtttatcgccgccgcccgctgcggttaa

SEQ ID NO: 176386 - DNA, 873 bp, Klebsiella oxytoca
atgaaggactatattgccgtcgactggggctctacccagctgcgcggctggctgattcgcaatggccagtgcgtcgaaacaaagcagctgccgctgggtatcacccgcctgaacggacgagcgcctgccgacgtattcgcggagcatttggccccctggcgcggcgcggaggcgctgccggtgctgatggccgggatgatcggcagcgatgcgggctggcaagcggtgccgtatctggactgtccggcagcgatcgacgcgccagggcagcagctatgcgccgttgctgaaggcgtgtggattattcccggcctcaagattgaacaggacggggatttcaacgtgatgcgcggcgaagagacgcagctgctgggggcctggcagctggcgccggcggagtgttacgtgctgccgggcacccactgcaaatgggtacaggtggcgaacggcgcggtgcgtcattttgccacggcgatgaccggtgaactgcatcatctgctgatgacgcaatcgctgatcggcaaagggctgccggtccagcagccggacgagacggcgtttgaacgggggctggaaaaaggactggcgcagccgtcgctgattagcgaactgtttgtcgccagggccgcccgggtgctgggaggtctggccgcgacctcggtcagcgactatctctccgggctgctgattggcgcggaagtggcgaccctggggcagcgttaccgtacctctggcgtcacgctggttggcgacccggcgctgaatgcccgctacagtcgggcgatgaaggcgcgcggaatgacggttaacagctgcagcggcgatgaggcgctgctgagcggcatggcgaggataatgcatggacaagattaa

SEQ ID NO: 176387 - DNA, 1485 bp, Klebsiella oxytoca
atgaatagtcatatctttttagtcggctttattatttacgcgctggccatgatttggcttggctggtacgtgtcgcgtaatcaaaaaagcggagaagattttttactcggtggccgttccttaccgctgtttctgaccctgggctctaccgtggcgaccatggtgggcaccggttcaagcatgggcgctgttggcttcggctacagcaacggctgggccgggatgctgtacggcgtgggcggggccatcggtattttgctggtggcctggctgttcgccccggtgcgcaagctgcgctttatgaccatgagcgaagagctctcttattataccggcggtagtcatttaattaaaaatatcgtcggcataatgatatttgtggcctctattggctggctgggggcgcatattcttggcggcagcatgtatttatcctgggcgacgggaataaatctgacgctagcgaaaattattatcgctctggcctttgcgatttacgtcatcatcggcggttattctgcggtggtgtggacggataccattcaggcattaattctgtttttcggttttatcctgatggcgattctggcggtggttcacgtcgggggatgggatgccatcgtccaggcgatggatcccaaggcgatgagcctgtttgcggtcgataagctgggggccattccggcgctatcgctggcgatggtcatcggcgtcggcgtgctggcgaccccttcctatcgccagcgtatttactcggggaaagatgtctcttcggtgcgccgctcgtttgtctataccggcgtgctgtatctgtttttctcggtgctgccggcgattatcggcatggcggcatggaccatgaaccccaatctcgagaacagtaattacgccttcctgttcgccaccagcttcttaccggcgatcctcgggctggtggtgctgattgccgggctttcggccaccatgtcctcggccagttctgacgcgatagccgccgtggccatcatgatgcgtgatgtttataccctcatcaccgggaaaatgcccccggcggataaagcgataacgctctcccgctggatgctggcgttcgttatcggcctggcgatgatcttcgccctgacctcgaacgatatcatcagctatatcaccaaaatgatctccatgctgatgtccggtctgttcgtctgttcgattctcggccgcttctggctgcgcttcaactggcagggcgcgtttaccgcgctgctgagcggcatgctggtttctcttgtggttctgatgaaagccgactggctggcttactgggggaacccgtgcattccgtcggtcgtcggcagctttgttttcgcgatttttgtcaccctattgacgccagccagcaaagttagccgtgagcaggcgctggaaatgatcacgcaggagcgtgaagggcaggcgatgccggcgaagacgacggtgcaggtctcaggagaagcacaatga

SEQ ID NO: 176388 - DNA, 393 bp, Klebsiella oxytoca
atgagcattaaacgttatggcgttgagggcggtaccgggaccggtgggcagcatctgccgttcgcgcgcgcggtggaggcggggggctggctgtacgtttccggccagacgccgatgaaggagggtgaagtggtggaagggggcatcgttgaccaggcgcgtctggcgattcagaactgtgtggatatcatgaccgaagcgggctacaccctggccgacgtggtgcacgtcaaggtgatcctcaccgatgcgcgctattttcagtctttcaataaagtattccgcgagttctttggcgacaatccgcctgcccgtatctgctgcgtcgcggacctggtagtggattgtaaagttgaagtggatgtgacctgttataacgcggctcgcgtataa

SEQ ID NO: 176389 - DNA, 1440 bp, Klebsiella oxytoca
atgaaagttaactggcttttcaaaaacgtcacggtcattgacggcagcggcggaccacagtttcgcggcgacgtggcggtgaagggcgatcgaattgtggatatggccccggcgctgaacctggcggcggagcaggtgattgacgggcaggggcgcgtgctggctcccggatttatcgatgtgcatacccatgacgatatcaacgtcatccgtatgccggagtatttaccgaagctgagccagggggtgacgacagtgattgtcggcaactgcgggatcagcgcggcgacggcgaccatgcgcgacggcgtaccggacccgatgaatcttctgggtgaggcggagcactttgtttatcccaccgttgacgcttatgcccacgcggtggcggcggcgaagccgtcattaaacgtcggcacgctgattggccataccgcgctgcgtaataaccatatggacgatctgttccgcccggcgacggagatcgagattgccggaatgcgggtgcagctgcgcgacgcgctgcgtcagggcgcgctggggctgagtagcgggctggcctacgccagcgcgtttcagtccaccactgaagaagtgatggcgctggccgaggagctggcggcagaagggggaatttataccacccacctgcgttcggagttcgaaccgattctggaggcgctcgacgaggcgttccgcattggccgccacggtaacgtaccggtggtggtatcgcaccataagtgcgccggcgcgaaaaactggggtcgcacgaaggagacgctggctttcttcgatgagatgcgccagcgccaggagatcgcctgtgactgctacccctattctgccagctcgtcgacgctggatatgaagcaggtcaccgatgagttcgatatcgtcattacctggtcggaggcgcagcccgagcaggccggaaaaaccctgcagcagattgctgacggctggcaggttagcctgcacgaggcggcggcgcggctgatgcctgcaggcgccatctactacaacatggacgagcaggacgtgcggcgggtactgcgttatccggtgaccatgatcggctcagacggtctgccgaacgacccgatgccgcacccgcggctatggggcgcgttcccgcgggtcctgggccactactgccgagatgaacggctgtttccgctgaccaccgctatccacaaaatgaccggtctgtcggcggcgcgtttccagctggcagagcgtgggctggtgaaagtgggctattttgccgatctggtgctgtttgatccgcagacggtgcgcgatgtcgccagcttctccgacccgaaacaaccggcggacggtatcgaggcggtgatggttaacggcgtgatgagctacggcagcgataaaaagattaccgggcgcgcagggcgtttcctgcgccgccgaatggactaa

SEQ ID NO: 176390 - DNA, 1215 bp, Klebsiella oxytoca
atgaaataccattccgatacgcttattccgcacaaagccgccataatgtccgcaccggccaatctgctggcggaggaggtttgccttccggccgcgctgctgaaaaaaacggcgctggaaaataacatcgcctggatgcagcgttacgccgacgcgcgcggcgtctcgctggccccgcacggtaaaacaacgatgacgccgtggatttttcaggcgcagcagcgggcgggcgcatggggaatcggcgtcggcagcgcctggcaggccagcgcggcgatggccagcggcgttgagcgcgtcctgatggtcaatcagctggtcggcagggcgaatatgcgggcggtatcgcgcctgaaagcgcattaccgggcggcggagtttatctgctgcattgatagcctcgccaatgcccgcgcgctgtcgactttcttcaacgaacggcggcaaacgctggacgtgctgattgaacagggcgtggccggtgggcgctgcggctgccgcagcgttgaggatgcgctggcgctggcgcaggccgcggcggaacttccgggcctcaggctgcgcggtctcgaactttatgaaggggtgttacacggcgacgatccgcagccgcaggtggaggctctgctgcgccaggccgccgatttggcctgccggatggaacatctggttgagggggaatttgtgctgaccggagccggtaccgtctggtacgacgtggtgtgcaatatctggttggcggcgaagaaaccggcgcgctgccgaatcgttatccgccccgggtgctatatcacccacgaccgcgggatctacgatatcgcgcagaaagcgctggtggcccgcgatccgatcgcctgcgatctgggcggtgatttaacctcagcgctggagctgatggcgatggtccagtcggtgccggaagccgatcgcgcggtggtgaacttcggcaagcgcgactgcgcctttgacgccggcctgccgcagcctatggcccgctatcgcaacggcgcgcagctatccgcggaggggatcgagagcgtggggattatggaccagcactgtatgctgcgcctcgcgcccggcagcgacgtgcaggtcggcgatattctggtgttcggtacctcgcatccgtgcctgacgtttgataaatggaaaaccctgctgctggtggacgagcagtataacgtgctggaagagctcgataccttgttctga

SEQ ID NO: 176391 - DNA, 438 bp, Klebsiella oxytoca
atgcatgattcgttaactatcgcgctgctgcaggcgcgggaagcggcgatggcccactttcggcccatcgttaaacgccacaatctgaccgagcagcagtggcgtatcgtgcgtatcctcgccgaacatccgtcgatggattttcacgatctggcctttcgcgcctgtattttacgtccgagcctgaccggtatcctgacccgtatggaacgcgacggcctggtgctgcgtttaaaaccggtaaatgaccagcgcaagctctacgtttcgctgacgccggcgggttcgacgctttatgaaagcgcccaggcccaggtggaagaggcctatcgtcagatcgaagcccaatttaccgtcgaaaaaatgcgtcagcttaccgcgctgctggaggagtttatcgccctggggaatggagcgcagggagagggagaggaataa

SEQ ID NO: 176392 - DNA, 633 bp, Klebsiella oxytoca
atgaaaggtaccatcttcgccgtggcgcttaaccaccgcagccagctcgacgcctggcgcgaagcgtttcaaaaggccccctataaaacgccgccgaagaccgcggtctggtttatcaaaccgcgcaacaccgttatcggcgatggcgagagcattccctacccgcaaggcgaaaccgtgcagagtggcgccaccgtggcgctgatcgtcggtaaaaccgcgcgcaaagtcgctgcagaagacgccgcggcttatatcgccgggtacgcgctggcgaacgacgtcagcctgccggaagagagcttctatcgtccggccatcaaagccaaatgccgcgacggcttctgtccgcttggcgcactcgcgccgctcagcgatgtcgataacctgaccatcatcaccgaaatcaacggtcgcgaggcggacagctggactaccgccgatctccagcgctccgccgccgagctgctgagcgccctgagcgaattcgccaccctcaatcccggcgatgcgattctgatcggtacgccccactcccgcgttacgctgcgccccggcgatcgcgtacgtattctcgccgagggcttcccggcgctggaaaacccggtgattgatgaaggagagctggcatga

SEQ ID NO: 176393 - DNA, 765 bp, Klebsiella oxytoca
atgaggcaagcacgtattgagtggcagggacagcggcacgatgtccaggtgaatgaacgtggtcaggtccagctcgccaacggcagtctgcttaaggaaggcgagtttcgttggctgccgcccgccgacggcaccctgttcgcgctgggcctgaactacgccgatcacgccagcgagctggcgtttacgccgccaaccgaaccgctggtgtttatcaaagcgcccaacacctttataggccataggcaagagtcggtgcgcccggataacgtcgagtacatgcactacgaggctgaactggtggtggtgatcggcaaaaccgcgcgtaaggtcgccgaagccgacgccatggagtacgtagccgggtacaccgtctgcaacgactacgccatccgcgactacctggaaaactactatcgccccaacctgcgggtcaaaagccgcgacaccctgacgccgataggcccgtggatcgtcagcaaagaggcgatccccgatccgcacaacctggcgctgtgcacctgggtcaacggcgagctgcgccagcagggcactaccgccgatctgatcttcagcattccgttcctgatcgcttacctcagcgaatttatgaccctgcagccgggcgacatgatcgccaccggcacgccgaaggggctgtcggacgtggtgccgggcgatgaagtgatcgtcgaagtggaaggcgtcggccgtctggtcaaccacatcattagccagcaggcatatgaggagaagctgtcatga

SEQ ID NO: 176394 - DNA, 1467 bp, Klebsiella oxytoca
atgaaaaaaattaaccactggatcaacggcaaaaacgtcgccgccgcggagtatttccataccactaacccggccaccggcgaagtgctggcggaggtcgcctccggcggggctgacgaggtgaatcaggcggtggcggcggcaaaagaggcgtttccgaaatgggccaatctgccgatgaaagagcgcgcgcgtctgatgcgccggctgggcgatctgatcgaccagaacgtcccggagatcgccgccatggagaccgccgacaccggcctgccgatccaccagaccaaaaacgtgctgatcccgcgcgcttcgcacaacttcgaattcttcgccgaagtgtgccagcaaatgaacggtaagacctatccggttgatgacaagatgctcaactacaccctcgtgcagccggtcggcgtctgcgcgctggtgtcgccgtggaacgtgccgtttatgaccgcgacctggaaggtggcgccgtgcctggcgctggggaataccgcggtgctgaaaatgtccgaactgtcgccgctaaccgctgaccgtcttggcgagctggcgctggaagcgggtattccggcgggcgtactgaacgtggttcagggctacggcgcgacggcgggcgatgcgctggtacgccaccatgacgtacgcgcggtatcgtttaccggcggtaccgccaccgggcgcaacatcatgaaaaacgccgggctgaaaaagtactccatggagctgggcggcaaatcgccggtgttgattttcgaagacgccgatattgagcgcgctctcgacgccgcgctgttcaccattttctcgatcaacggcgaacgctgcaccgccggctcgcgcatcttcattcagcagagcatctaccccgagttcgttaaacgctttgccgaacgcgcgaatcgcctgcgcgtcggcgaccctaccgacccgaacactcaggtgggtgcgctgattagccagcagcactgggagaaagtctccggctatatccgcctcggcattgaagaaggagcgaccctgctggccggcggcgcggataagcccgccgatctgcctgcccatctgagaaacggcaacttcctgcggccaacggtgctggcggacgtcgataaccgcatgcgcgtggcgcaggaagagatttttggcccggtagcctgtctgctgccgtttaaagacgaggcggaaggtctgcgcctggccaacgatgtggagtacggcctcgcctcttatatctggacccaggacgtcagcaaagtgctgcgcctggcgcgcggcatcgaagccggaatggtgttcgtcaacacccagaacgtccgcgacctgcgtcagccgttcggcggcgtgaaggcctccggtaccggccgtgaaggcggcgaatacagctttgaagtgttcgctgaaatgaaaaacgtctgcatctcgatgggcgaccatccgatcccaaaatggggagtctga

SEQ ID NO: 176395 - DNA, 858 bp, Klebsiella oxytoca
atgggaaagttagcgttagcagcaaaaattactcacgtaccgtcgatgtatctctctgaactgccgggtaaaaaccacggctgccgccagggagccatcgatgggcataaagaaatcggcaagcggtgccgcgagctgggcgtggataccatcatcgtctttgatacccactggctggtcaacagcgcctaccacatcaactgtgccgaccatttccagggcgtctacaccagcaacgagctgccgcattttattcgcgacatgacctatgactatgacggtaatccggagctcggccacctgattgccgacgaagcggtcaaactcggggtccgtgccaaagcgcacaacattccaagcctgaagctggagtacggcaccctggtgccgatgcgctacatgaacagcgataagcatttcaaagtggtctctatctcggcgttctgtaccgtccatgattatgccgatagccgcaagctgggcgaagccattcttaaagcgattgagaaatataacggcaccgtggcggtctttgccagcggctcgctgtcgcaccgttttatcgacgaccagcgcgccgaagagggaatgaacagctatacccgcgagttcgatcaccagatggacgaacgggtcgtgaagctgtggcgcgaaggcaaattcaaagagttctgcaccatgctgccggagtacgccgactactgcttcggtgaaggcaatatgcacgacacggtgatgctgctgggcctgctgggctgggacaaatatgacggcaaagtagagtttattaccgaactctttgccagctccggcaccggtcaggtcaacgccgtcttcccgctgccggaaacggcgtaa

SEQ ID NO: 176396 - DNA, 381 bp, Klebsiella oxytoca
atgccgcattttatcgctgaatgtaccaacaacatccgtgagcaggctgatttaccgggtctgttcagcaaagtgaacgccgcgctggcggcaaccggcatctttcctatcggcggcattcgcagtcgcgccatctggctggatacctggcagatggccgatggccagcatgactacgccttcgtgcatatgacgctaaagattggtaccggacgcagcctggagagccgtcaggacgtgggcgatatgctgttcacgctgatcaaagcccattttgccgcgctgatggagagccgctatctggcgctgtcgtttgagatcgatgaactgcacccgacgctgaactacaagcagaacaacgtacacgcgttgtttaaatag

SEQ ID NO: 176397 - DNA, 804 bp, Klebsiella oxytoca
atgctcgataaacatacccatagcctgatcgcccagcggctgaaccaggcggaaaaacagcgtgaacagatccgcgctatttcgctggatcacccgacgatcaccatcgaagacgcctacgcggtacagcgcgaatgggtaaatatgaagatcgccgaaggccgcgtgctgaaagggcataaaatcggtctgacctcgaaagcgatgcaggccagttcgcaaatcagcgaaccggactacggcgcgctgctggacgatatgtttttccacgacggcggcgatattcctaccgaccgctttatcgtcccgcgtatcgaagtcgagctggctttcgtgctggccaaaccgctgcgcggccccaactgcaccctgttcgacgtctacaacgccaccgactacgtgatcccggcgctggagctgattgacgcccgctgccacaacatcgacccggaaacccagcgcccgcgcaaagtcttcgacaccatctccgataacgccgccaacgccggggtgatcctcggcggccgtccgattaaacccgacgagctggatctgcgctggatctccgccctgctctatcgcaacggcgtgattgaagagaccggcgtcgccgcaggggtgctgaatcacccggccaacggcgtggcctggctggcgaacaagctggcgccttacgacgtccagctggaagccgggcagattattctcggcggctcctttacgcgtccggtaccggcgcgcaaaggcgacaccttccacgttgattacggcaccatgggcgcgattagctgccggttcgtctag

SEQ ID NO: 176398 - DNA, 792 bp, Klebsiella oxytoca
atgaataacgcctttaaagacgccataaaagcgggtcgaccgcagattggcctgtggctgggactgaccagcagctacagcgctgagctgctggccggggccgggttcgactggctgctgatcgacggcgagcacgcgccaaacagcgtgcagacgatactgacccagctgcaggcgatcgccccttatcccagccagccggtggtgcgcccctcgtggaacgacccggtgcagattaaacagctgctggatatcggcgcgcaaaccctgctggtacccatggtgcagaacgccgacgaagcgcggctggcggtgaaagccacccgctatccgcccgcgggtattcgcggcgtcggcagcgccctcgctcgggcctcgcgctggaaccgcgtcccggattatctccatcaggctaacgacgcgatgtgcgtgctggtgcaaatcgaaactcgcgaagcgctcagcaatctgccgcagatcctcgatgtcgagggcgtggacggcgtgtttatcggcccggcggatctgagcgccgacatgggcttcagcggcaaccctcagcacccggaagtacaggccgccattgagcacgccatcgggcaaattcgcgcagcgggcaaagcgccggggatcctgatggccaacgaacagctggcgaagcgttacctgcagctcggcgcgctgtttgtcgccgtcggggtcgataccaccctgctggcccggggggcggaagcgctggcggcacgatttggcgcagaaaaaaccgccgagggttcgtcaggcgtctattaa

SEQ ID NO: 176399 - DNA, 1377 bp, Klebsiella oxytoca
atgagcgatacatcatctgccatcccggaaaagttcgatccggctaatcagcacaagcagctgacggcgcagcagcagtcggttatcaacaagctctttcgtcgcctgatcgtgtttttgttcgtgctgtttatcttttcgtttttagatcgcatcaatatcggctttgccgggctgaccatggggcaggatctgggccttaacgccaccatgttcggccttgccaccaccctgttttacgcgacctacgtcattttcggcattccgagcaacgtgatgctcagcatcgtcggcgcccgccgctggatcgccaccatcatggtgctgtggggcatcgcctccaccgccaccatgttcgcgaccgggccgaatagcctctatatcctgcgcatgctggtggggatcaccgaggccggttttctgcccggcattctgctctatctgacctactggttcccggcctttttccgcgcccgcgccaacgcgctgtttatgatcgcgatgccggtaaccaccgcgctggggtcgattgtttcaggctatatcttgtcgatggacggcctgttgaacctgcacggctggcagtggctgttcctgctggaaggcttcccgtcggtgctgctcggtattatggtctggttctggctggatgattcgccgtcgaaggccaaatggctgaccgcagaagataaaaaatgcctgcaggagatgatggacaacgaccgcctgacgctggtccagccggaaggggcgatcagccatcacgccatgcagcagcgcagcctgtggcgggaagtgttcacgccgatcgtgctgatgtacaccctggcctacttctgcctgaccaatacgctcagcgcgatcagcatctggacgccgcagatcctcaaaagctttaacgaaagcagcagcaatatcaccatcggcctgctggcggcgatcccgcagatttgtaccattctgggaatgatctactggagccggcactccgataagcaccaggagcgtaagcaccacaccgccctgccgttcctgttcgccgccgcaggctggctgctggcgtcggcgaccgatcacaacctgatccagctgctcgggatcgtgatggcttcgaccggatcgtttagcgcgatggccattttctggaccacgccggatcagtcgatcagcctgcgcgccagagcgatcggtatcgcggtgatcaacgcgaccggcaatatcggatcggcgctcagcccctttatgatcggctggctgaaggatattaccggcagcttcagcagcggcctgtggttcgtcgccgccctgctgatcattggcgcagtcattatctgggcgattccgatgaaaggatcgcgtccgcgcgcgacgccgtaa

SEQ ID NO: 176400 - DNA, 891 bp, Klebsiella oxytoca
atgtgccagagtcctgttgccaatatcgatattaataaagagtacgatgagagtctgggaacggaggaggtacattaccaatcctttgcccggatggcggagttttttggccgcgatatgcaggcgcaccgtcacgaccagtattttcagatgcactttctcgataccgggcagattgagctgcagctcgacgatcatcgctattcggtgcaggcgccgctgtttgtcctgacgccaccctcggtgccgcacgcttttatcaccgagtccgatagcgacggtcatgtgctgacggtgcgcgaggatctggtctggccgctgctggaggtgctctatcccggcacgcgggaggctttcggtctgccgggcatctgcctgtcgctggccgataagcccgaggagttggcggcgctggcgcattactggcggctgattgaacgggaatcgacgtcgcagctgccggggcgggaacataccctgatgctgctggcgcaggcggtgttcaccctgctgctgcgcaacgcgaaacttgacgatcatgcggccagcgggatacgcggcgagctcaagctgttccagcggtttaaccagttgatcgatagccactaccaccagcactggacggtgccggattacgccagcgagctgcatctgaccgaatcaaggctaaccgatatctgccgccgcttcgccaaccggccgcccaagcggctgattttcgacaggcagctgcgcgaggccaaacggctgctgctattttccgacaacgcggtaagcgaaatagcctggcagctgggctttaaagatccggcctattttgcccgcttttttaaccgcttagtcggctgctcgccgagtgcctatcgggcgcagaaagtaccagtgtcgtaa

SEQ ID NO: 176401 - DNA, 1563 bp, Klebsiella oxytoca
atgaaacctgaaaatttccgtgcagacgctaaacgcccgttaactggcgaagagtacctgaagagcctgcaggacggccgcgaaatctatatctacggcgaacacgttaaggacgtgaccacccacccggcgttccgcaacgccgccgcctccgtcgcccagatgtacgatgcgctgcataaacccgagctgcaggataccctgtgctggggcaccgataccggcagcggcggctatacccacaagttcttccgcgtcgcgaaaagcgccgacgatctgcgccagcagcgcgacgccatcgctgaatggtcgcgcctgagctacggctggatgggccgtaccccggactacaaagccgcattcggctgcgcgctcggcgcaaacccggcgttttatggtcagtttgaacagaacgcccgtaactggtacacccgcatccaggaaaccggcctctactttaaccacgccatcgtcaacccgccgatcgaccgccataagccagccgacgaagtgaaagacgtctatatcaagctggagaaagagaccgatgccgggatcatcgtcagcggcgcgaaagtggtggccaccaactcggcgctgacccactacaatatgattggcttcggctcggcgcaggtgatgggcgaaaacccggacttcgcgctgatgtttgtcgcgccgatggatgccgaaggcgttaagcttatctcccgcgcctcctatgaactggtcgccggagcaaccggatcgccgtacgactatccgctctccagccgcttcgacgaaaatgatgcgatcctggtgatggataatgtgctgatcccatgggaaaacgtgctgatctaccgcgacttcgatcgctgccgccgctggacgatggaaggcggtttcgcccgcatgtatccgctgcaggcctgcgtgcgtctggccgtgaagctcgactttatcaccgccctgctcaagcgctcgctggagtgcaccggcaccctggagttccgcggcgtacaggcggatctcggcgaagtggtagcctggcgcaatatgttctgggcgctgagcgactcgatgtgcgccgaagccacgccgtgggttaacggcgcgtatctgccggatcacgccgcgctgcaaacctatcgcgtgatggcgccgatggcctacgccaaaatcaaaaacattattgaacgcaacgtcaccagcggcctgatctatctgccgtccagcgcccgcgatctcaacaatccgcagatcaacgaatatctggcgaaatacgtgcgcggatcgaacggcatggatcacgtcgagcgtatcaagatcctcaaactgatgtgggacgccatcggcagcgagtttggtggtcgtcacgaactgtacgaaatcaactactcaggtagccaggatgaaattcgcctgcagtgcctgcgtcaggcgcagagctccggcaacatggacaaaatgatggcgatggtggatcgctgcctgtccgagtacgaccagaacggctggacggtgccgcatctgcacaacaataccgatatcaacatgctggataagctgctgaagtaa

SEQ ID NO: 176402 - DNA, 513 bp, Klebsiella oxytoca
atgcaattagatgaacaacgtctgcgttttcgcgatgccatggccagcctgtcggccgccgttaacgtcatcaccaccgaaggcgaggcgggccgctgcggtatcaccgccaccgcggtctgttcggtgaccgatacgccgccgtcggtgatggtttgcatcaacgctaacagcgcgatgaatccggtgtttcagggcaacggcaagctgtgcatcaacgtgctgaaccacgagcaagaggagatggcgcgccacttcgccggtatgaccgggatgacgatggacgaccgtttcggcctcagctgctggcaaaaaggcgcgctgggccagccggtgctgaaaggctcgctggcgagtctcgaaggcgagattagccaggtacagaccatcggcagccacctggtctatctggtagaaatcaggaatataaccctgagccagcagggccacgggctgatctactttaagcgccgcttccatccggtgatgatggagatggaggtcgtggcgtag

SEQ ID NO: 176403 - DNA, 1221 bp, Klebsiella oxytoca
atgttaaagaattatatcaaagaagcgcttgctatacagcaggaagaaggggatgcttcggatgaagcattgaagaaatatttggcagggataaattcatataatctaaatcaagatcaggaatacgactttctgtatgcaaattatcaggcgatgtggatttactctaatttaggtgagtcgggaaaagctctgcctctggctaaacagtgtatggcgttgatgactgataccataagtgcgggtgcgatatttcattatactgatatggggcggttttatgaggaagtgatccgctatgcgacaaacaatatagcatggtatgcatacgaacactccgatagtaaagatgaactagaacgcgcgctggaaaccatatctcttggctgtaattatattgacagccctgattacttttacgctttcgatactaaagtccgtatcttacttaaattgggccgaaaagaagacgcttttaaaatcgtttttacttgtctgcagcaacttcccgacttctctgatttttctgatatcaagaaacaaaaggagtatcaggactggaaaaataacttcgatacaggaactattgaatattctgagcaggaaatggcgtttctacaaaaagcagccagaattaccactcattttaaatcactgacttcgaaagaatcgttaaagtcccccttgaaggaagagtcgatccccgacaagcaaatcgttcttatcaaggaggcaagaggtaaatacgcatttaccgaaaatttttacgacgatgatgattgctttttattgtacaagggtaacctgcatattaaacaaaacctcgatgaagaatggtatgaaaaacagcttgaagatatcacatggcaaaatgatctattcggcatcctgattgatggcaatctcactgtagaaggcgatatcgccctcgaccgatgtattctttcagtcgtcaacgatgtcacctgcgattgtctgtattccggtgatggccatacattaatacagggggatgcgtatattaaatacggaatttacggtgcgtataacgatggttcgctggaggtaaaggggatacttactacaccctatttactggcctacgatcactgcatgcccaggaagtctgacgttggagaatctatttatatagaagttggtgacttatctgaaactaagaatatacgtatcggtgaaagctatggtagcggatggggttag

SEQ ID NO: 176404 - DNA, 2151 bp, Klebsiella oxytoca
atggatactaaaaagttattcaagcacataccctgggtgattcttggaatcatcggggcattttgcctctcggtcgtcgctctgcgccgcggtgagcacgtcagtgcgctgtggatcgtggtggcgtcggtttccgtctatctcgtcgcctaccgttattacagcctgtacattgcgcaaaaggtgatgaagctcgatcctacgcgttcgacgccggcggtaattaataacgatggcctgaactacgttccgaccaaccgctacgtgctgtttggccaccactttgccgcgattgccggcgccggtccgctggtgggcccggtgctcgccgcgcagatgggctacctgccgggtaccctgtggctgctggcgggcgtcgtgctggcaggagcggtacaggactttatggtgctgtttatctcctcgcgtcgtaacggcgcctcgctgggtgagatgatcaagcaggagatgggtccagtaccgggctccatcgcgctgttcggctgcttcctgataatgatcatcatcctcgcggtgctggcgttaatcgtggttaaagcgctggcggaaagcccatggggcgtgttcaccgtctgctcgaccgtgccaattgccctgtttatggggatctacatgcgcttcctgcgcccgggtcgggtaggcgaagtgtcggttatcggcatcgttctgctggtggcgtctatttacttcggcggcgtgattgcccacgacccttactggggcccggcgctgacctttaaagacaccacgattacctttaccctgattggctacgcgtttatctcggctctgctgccggtatggttgattctggcgccgcgcgactacctggcgaccttcctgaaaatcggcgtaatcgttggcctggcgctgggtatcgtgatccttaaccctgacctgaaaatgccggcggtgacccagtacattgacggtaccggtccgctgtggaaaggcgcgctgttcccgttcctgtttatcactattgcctgcggcgcggtctccggcttccacgccctgatcgcttccggcaccacgccgaagctgctggctaacgaaaccgacgcccgttttatcggctacggcgcgatgctgatggagtccttcgtggcggtgatggcgctggtggcggcatcaattatcgaaccgggtctctacttcgcgatgaacactccgccggcgggtctgggcatcaccatgccgaacctgcacgaaatgggcggtgaaaacgccgcgctgattgccgcccaactgagggatgtcaccgctcacgcggcagcgaccgtcagctcctggggcttcgtgatctctcctgaacaaatcctgcaaaccgcgaaagatatcggcgaaccgtcggtcctgaaccgcgcaggcggcgcgccgacgctggccgtgggtatcgctcacgtgttccacaaaatcatcccgatggcggatatgggcttctggtaccacttcggtattctttttgaagcgctgtttatcctcaccgcactggatgccggtacccgcgcaggccgctttatgctgcaggacctgctgggcaactttgtaccgttcctcaagaaaaccgactcgctggtagcaggcattatcggtactgcgggctgcgttggtctgtggggctacctgctgtatcagggcgtggtcgacccgctgggcggcgtgaagagcctgtggccgctgttcggcatctctaaccagatgctggccgccgtggcgctggtgctcggtaccgtggtgctggtcaaaatgcagcgcaccaaatatatctgggtcaccgtgatcccggctgcatggctgctgctgtgcaccacctgggcgttgggcctgaaactgttcagcaccaacccgcagatggaaggcttcttcttcatggctcagcagtacaaagagaagatcgcttccggcggcgaactgaccgcacagcagattgccaacatgaaccatatcgtggtgaataactacaccaacgccggtctgagcattctgttccttgtcgtggtctacagcatcattttctacggcatcaaaacctggctcaacgtacgcaacaataaagtgcgtaccgacaaagagacaccgtacgtaccggtaccggaaggcggcgtgaagacctcttcacatcactaa

SEQ ID NO: 176405 - DNA, 204 bp, Klebsiella oxytoca
atgtttggtaacttaggtcaggcaaaaaaatatctcggtcaggcagcgaaaatgctgattggcattccggattacgataattacgtcgagcatatgcagaccaatcatccggaccagccgtacatgacctatgatgaattctttcgcgaacgccagcaggcccgctacggcggcgacggcaaaggcggcgtgcgctgctgctaa

SEQ ID NO: 176406 - DNA, 957 bp, Klebsiella oxytoca
atggcaccgattgcagttaccctattaaccggttttcttggcgccggtaaaaccaccctactgcgccatatcctgaacgaacggcacggctttaaaattgccgttatcgaaaacgaatttggcgaagtcgccgtcgatgaccagcttatcggcgaccgcgcgacgcagattaaaaccctgaccaacggctgtatctgctgtacccgctccaacgaactggaagacgctctgctcgatcttctcgacagccgcgatcgcggagaaattgattttgaccgactggtgattgagtgtaccggcatggccgatcccggcccgattattcagaccttcttctctcatgatgtactgtgcgaacgttacctgctggatggggtgattgcgctggttgatgcggcgcatgctgaccagcagatgaaccagttcaccattgcccagtcgcaggtggggtacgccgatcgtatcctgctcaccaaaaccgacgtggcggacgacagcgacaagctccgcgagcggctgacgcgcatcaacgtccgcgcgcccatttaccgcgtcatccacggcgatatcgacctgaatctgctgtttaacaccagcggttttatgctggaggagaacgtggttagcagcaaaccgcgcttccactttatggccgacaagcagaacgacgtatcgtcaatcgtagtggagctggattatccggtagatatcagcgaagtctccagggtgatggaaaatctgctgctcacttttgccgaacagctgatgcgctataaagggatgctgtggatcgacggcgaaccgaatcgcctgctgtttcagggcgttcagcgcctctacagcgccgactgggaccgaccatggggcgatgagcggccgcacagtaccctcgtctttatcggcatcaatctaccggaaaaagaaattcgcgcggcgtttgccagcttgcgcaaatag

SEQ ID NO: 176407 - DNA, 1371 bp, Klebsiella oxytoca
atggcttatcagacggtgaatcctgccaataatcagcttatcaaagcgtatccggcacacagcgatgctgacgtggaagcggcgctgcaaaaggcggatgcgctttatcattcgcagtgggccaagggaaatattgaccaacggctaccgatcctgcacaagctggcggacctgatcgacagccgggttgaagagctggccaaaatcgccagccaggagatgggtaagcttatcgagcaaagccgcggtgaggtcaaactgtgcgcgcaaattgcccgctactacgccgataacgcaaaacagtttctggcgccggtaaaatatccgtcagaactgggtgaagcctgggtcgaacaccatcccatcggcgtactgatggcggtagagccgtggaacttcccttattatcagctgatgcgcgtgctggcgccgaatctggcggcaggaaacccggtgatcgccaaacatgccagcatcgtcccgcactgtgcggaaaccttcgctcagctggttcgtgaggccggcgcgccagatggcgcatggactaacctgttcatttctcaggatcaggtagcgaagattatcgccgacgatcgcgtacagggtgcggccctgaccggctcggaaaaagccggtggcgtggtagcggcgcaggcggctaaacacattaagaaagcgacgcttgaactgggcggcaacgatgtatttgtcgttctcgacgatgccgatctggagaaagcggtgaagaccggcgtgcaggcgcggctcaataatgccgggcaggtgtgcaccgcggcgaaacgttttatcctgcatgaaaaaattgccgacgctttcctcagccagtttacgcaagccttccgcgaggtgaaaattggcgatccgctggacgaaagtaccacgctgggcccgctctcctcaaaagacgcgctggaaacgttgaccaaacaggtggacgaggcggtgaaaaatggcgcgaaactgcatctgggcggcaaacctgcgcagcgagaaggcagctttttcgagcccaccatactgaccggcattacccgcgataatccggcttattttgaagagttcttcggtccggtcgcgcaaatctacgtggtgaaagatgacgatgaggcggtgaaactggccaacgattcgcattacggcctcggcggagccgtgttcagccaggatatcgacagggcgaaacgcatggcttcgcggattgaaaccgggatggtctatatcaactggttaaccgataccgcgccggagctgccgtttggcggcgttaagcgctccgggttcggccgcgagctttccgatcttgggattaaagagtttgtgaatcagaagctggtggtggttcgccgctaa

SEQ ID NO: 176408 - DNA, 939 bp, Klebsiella oxytoca
atggaaaagggtactacgtccacgccgcacgatgcggtattcaaacagtttctacgtcatgctgacaccgcgcgggatttccttgatatccatctaccgccagcgctacgaaaaatgtgcgacctggatacgttaacgcttgcgtccggtagctttattgaagagaacctgcgggcatactactccgatgttctgtgggcgctgaaaactgccgcgggagaaggctatatctatgtggtcatcgaacatcaaagctccccggatgcgtttatggccttcagactcatgcgttatgctattgccgcgatgcagcgccatctggataacgggcataaaacgctgccgctggtgatcccgatactgttttatcatggcgtcgccacgccatacccctggtcgttatcctggctcgacatgttcgccgacccagccctggcaaaacagctttataccggaccatttccgctggtggatattaccgtcgtacctgatgacgaaattgtgcagcatcgaagagtcgccctgctggagctgatgcaaaaacatattcgtcagcgcgatctgctgggtattgtggagcatctgacggccattttgcttaatggatacgctaatgacaggcagctgaaaacgctgtttaattatctgattcactcgggcaaagcgcttcggttaggtaagttcatccgcgaagtggcccagcgggtaccgcagcacaaggagaagctaatgactatcgccgaaaggttacgtgaagtagggcgcaggcaggggaagcgggaaggccttgagaaaggtcgtctggagggggttgaagaggggcagcgcgccgaagcgctgcgtatcgcccaaacgatgctcgccgaaggtatggcgttggagacggtgctaagaattaccggtttgccggaggcggcgcttgcggtcaggcatcattag

SEQ ID NO: 176409 - DNA, 816 bp, Klebsiella oxytoca
gtgagccatacgcgcgacattcagcaaactttctggcgtgacgaacagcttccctggctggagctgcgcagcacatggcttagccgccaggcctataaacggcatcgtcatccgcagctctccattggggcgattatcgagggggaaacgcgctgtatctgcagcgggcaggagtatctgctgcgccctggcgacctgattattatccccgcgcaggcaccccacagctgtaatccgcgcgacggccagccgcgcagctaccatatgctctatctcgagctaagctggtgctggcaacagctgacagacggtgtgcatcaggcaaggttgatcacatcatcgcccgtcattcgcgatgccgggctctttgcgcagtatctgcagatcgtggagcagatgaggcagcagcagaccatgcagctccctgcaagcgtcgctcgtctggttcatactctaccgctgcgcccgcatgcgcctcaggcgctaagcgagaccagcgcccgtcttttcacccgcctggcaaccgatctgcaggctccgccgacgctggatagcctcgccgacgagtttgcgctgcgtaaagagacgctgatccgcaccttcaagcaggagaccggcctgacgcccgccagttttatcaatatcgcgcgtattgaattcgctaaaacgcgcctgcgcgcaggggataatattgccgatgtgggctaccaggccgggtttgccgatcagagtcactttcataaaacctttgtcagctataccgctgccacgccgcgccagtatgcgcagtcccgatcaataacagacaataattag

SEQ ID NO: 176410 - DNA, 642 bp, Klebsiella oxytoca
atggacatactcgctacgctctttccttccgccttccccgcgctggcgctttctcattttgtcgccctgctaagccccgggccggatttttttctgctggtgggctacgccatccgctatcgcctgcgcggcagcgtcggcctgtgtatcggcattgccgccggaaacggtctgtatattattctggcggtaatcggctgggggatcctgcgccacgcgccgctgctgtttacggtgattgagctgctgggcgcggcgtatttactgtggattggcagtctgctgataagaagccgtcctaccacgctggcgctggatggcgccccggtttcgcgcccgtcgctggtgaaacagctttttctcgggctgggttcttcgctgctcaatccgaaaaacgccctgttctacctcgcgctgatgacctccctgttgggaccgaacgtcacgctggtgcaacaggccgtcagcggggcatggatgatcagcgtggtgttgatatgggatctgttgctggttacgctgattgcgctaccgtcggtgcagcgccgcctttccgccgtcgtctggcgagtcgagcgcacggccggcgccatactgatggcttttggcggctggattgtctggcaatttatttttaattaa

SEQ ID NO: 176411 - DNA, 435 bp, Klebsiella oxytoca
atgattggtatatttaaatatgcagcaaaaaaagacatggtattaggtattagcgatcagcaaaccggggctcgggccgttatattaccgatgtcctcaccgctaaataaaattctgtggacggttgatgacaggaccggcgagatcgctctggccgccagcgaggagctgctgctgggtatccacggggatcaaatgggttcaggcgcagcgattgaactccaggcgcgggggagtaaagcgacacagcggtgggatttagtcagctcacgtcgctttattaaaagcaaacaaaacccgagctttgttattgacagcgtcaaccgcggcacgcaccaggggaatccgattatactttacgaatttaatggttcggaagcgcagcagtgggtatttgtgccgatggatatgttaacggcaaatagcctggaataa

SEQ ID NO: 176412 - DNA, 1290 bp, Klebsiella oxytoca
atgcttagacctatggaaaaactcgctgaactgaaacgcgccaagctgctggcgctctcgctgctgctgattgcagtcgccatttttatcactaccctcgtgctgccgccgacgccatgggtcggtgcgctaaaggctatttccgaagcggcgatggtgggcgcgctggcggactggttcgcggtggttgcgctgtttcgccgcattccgctgccgttcgtgtcgcgacatacggcaattatcccgcgtaataaagaccgaattgccgacaatctcggctatttcgtgcaagaaaaatttctcgacacgccctcgctggtcgcgctgatccgccgctacgaaccggcgctgatgctcggcaactggttcagccagccggaaaacgcgcgtcgggtcggccagcatctgctgcaggtgatgagcggctttctggagcttaccgacgacgcgcgcattcagcgcctgctgcgtcgtgcggtgcataaagcgattgataaggtcgatttaacccaaaccagcgccatgatgctggaaggattgacgcgcgataaccgccatcagaagctgctggattcgctaattagccagctgatcgccctgctccagcgcgacagctcgcgggcgtttattgcccgcggtatcgtgcactggctggagaccgagcatccgcttaaagccaggctactgcctaccgaatggctgggcgagcacagcgctgaaatggttaccgatgcggttaacacgctgctcgacgaagtcagtcaggatcgcgctcatcagatccgccaggccttcgatcgcgcggcgctcaagctgatcgataacctgaagtccgatccgcagatggcggaaaaagcggacagtatcaaagcgtatctgaaaaatgatgagacgtttaaccgctatctgggcgaagtgtgggccgacctgcgcggttgggtcaaaaacgacgtcaatagcgaggattcacgcattaaacagcgcattgccgaagccgggcagtggtttggcgaaacgctgctccacgatgaggcgctgcgcgaatcgctgaacgaacatctcgagcaggcggcgcaccgggtggcaccggagtttgccaccttcctgacgcgccatatcagcgatacggtcaaaagctgggattcccgcgatatgtcgcggcaaatcgaactgaatatcgggaaggatctgcagtttatccgtattaacggcacgctggttggcggcaccatcggtctgctgctgtggctgttttcacaaattccgtcgctgctgcatttacatatttaa

SEQ ID NO: 176413 - DNA, 1245 bp, Klebsiella oxytoca
atgttgcaatggatgacccgttttttcgcccgccattccgccacgctgttcttcccggcggcgctgatcctgtatgactttgccgcctatctgaccaccgaccttattcaaccggggattatccacgttgtgcacgattttgacgccgacgtggcgctggctcccgcctcggtcagtctgtatatggccggtggcatggcgctacagtggctgctcgggccgctctccgatcgtatcggccgccgtccggtgctgctcaccggcgcgctgatctttaccctggcctgcgtagcgaccctgttcaccacctcaatggagcagttcctcgcggcgcgctttgttcagggcaccagcatctgctttatcgccacggtcggctacgtcaccgtgcaggaggcattcggccagacaaaagccattaagctgatggcgattattacctcgatcgtgctgatcgcgccgatcattggtccgctttccggcgccgcgttgatgcatttcgtgcactggaaggtactgttcgggatcattgcggcgatggggtttattgcctggctgggtctgctgctgaacatgccggaaaccgtccggcgcggcgacgttcccttcagcgccagcggcgtactgcgcgattttcgcgatgtcttccgcaaccgcattttcctgttcggcgccgccacgctctcactcagctatataccgctgatgagctgggttgcggtctcgccggttatcctgattgacgacggcggactgaccaccgccgagtttgcctggacccaggtaccggtcttcagcgcagtgattattgccaacctgtcggtagcgcgctgggtcaaagaccccacccgcccgcgctttatctggcgcgcggtgcccatccagatgaccgggctggcgatcctgattttcggcaacctgctgtggccgcacgtctggctgtggtcggtgatcggcacctgcttttacgctttcggcattggcctgatcttcccgacgctgttccgctttaccctgttttccaacgatctgccaaagggcaccgtttccgcgtcgctgaatatcgtgatcctcagcgtcagcgcactttctatcgaagcggcgcgctggctgtggtttaacggcggcaggctgccgttccatctgctgggggtaacggcagggatcgcggccgcgtgctgtctggcggggctgttaagccggatacgccagcgtcctgaagccatgctggcacagcaggagtag

SEQ ID NO: 176414 - DNA, 627 bp, Klebsiella oxytoca
atgtcaccggatgtggctaagacagtgattgaatatctcgagtcgtttgacgatgttgacctgaaaatcaaagcgattaacgagctgaagagcctgatccaccagcacagcccgttctgccgcgagccggtggactgcgtgctgtgggttgaagccaaaacggttgaggcgaatgactacaatccgaacgtgatggcgacggtggaaaaaaagcttctggaacgatctatcgaactggatggttttacccaaccggtagtggtggctcgccagcagcgacggcacctggtggtggatggttttcatcgccacctgattgggaagagccgcccggagctgagccggcgtctgcatggttatctcccggtgacgcttatcaatgccgagcgcgaggggcagaaagagcgtatcgccgccactattcgccataatcgcgccaggggtaaacatcagatcgcggcgatgtccgatatcgtccgcgatttacatcgtcagggctgggacgatcggcgcatcggcgaagagctcggtatggatgctgatgaggtgctgcgtctgaaacagatcagcggcctgacggagctgttcgccgacgagagctttagcgaagcctggaccgtggagtag

SEQ ID NO: 176415 - DNA, 1212 bp, Klebsiella oxytoca
atgaaacgcgtaaaactggatatgaatgtttttgacgctgctctgatgcgcctggattgggtatttgataccttcgagcaggtctgtttatctttttccggcggtaaagattcaacggtattatttcatctggcggcagccgttgcgcgtaaaaaagggaaaaaatttgcggtgctgttcgtggactgggaggcgcagtatttattaaccatccagcacgtgcaaaatatgaaagagcgctatcaggatgtagtgagccgcttctattgggtggcgctgccgatgacgacggtgagcggcgtatcgcagcatgagcctgaatgggtcgcctggcgggacggggttgaatgggtcaggcagccgcccgaagatgccatcaccgatgccggtttttttcctttttatcagccggaaatgacctttgaagcgtttattccggccttttcccactggctggccgcggggagaagtcttgcttcgcttatcggcatccgcaccgacgagtcgctgcatcgctacatggcgcttacctcgcagaccaaactgcgctttgaggaagataagccgtggacgaccgcctcgccggagggatttagctatacctgctatcccctttatgactggcggacccgcgacatctggatctttaatcataagtcacgactcccctacaacccgctttatgacctgatgtatcgcgccggggtgccgctaaaaaatatgcgcgtctgcgaacccttcggccccgagcagcggcgcgggctgtggctgtatcacattcttgagccggagacctgggagcggatgtgccgacgcgtatgcggcgcgcacagcggtgcgatttatgccaacgccagcggcgactactttgcgctgaagaccaaaatccgcaaaccggcgcattttagctggcgtgagtacgcgctctttctgctcgacagcatgccggaaaaaaccgccgagcattaccgtaataaaatcgctatttatctgcactggtaccagacccgcgggtttcccgacgatatccccgatgagcaggaaaaagatctcggctatcgcgatatcccttcatggcgccgcatctgtaagacgctgctgaaaaacgatttctggtgccggatgctgtcgttcagcccgacgcagcctaagcactatgagcgctactgtcgactgatgagtaacaaacgtaaagagtggaggacgctctga

SEQ ID NO: 176416 - DNA, 240 bp, Klebsiella oxytoca
atgagcgatatagatctcagcccgccgcaacgcgatctgctacgcgaaaagctgtataaatactgccaggagaattttgaactggaactggagcaatttgacgcggaattttttgtcgactttatcgcgaaagagctgggtccaatgttttataacgccgggattgatgcggccatcgccacccaccttgcatggagcgatcgaattcaggaagagatggatctgaaaaaagtctattag

SEQ ID NO: 176417 - DNA, 1152 bp, Klebsiella oxytoca
atgtcgcttatcaccgatctacccgccatttttgaccacttctcttcagcccgccagcagggtttcctcacggtcatggagcttaaagagcaaaatattccgctggttggcacctactgcacctttatgccgcaggagatcccgttggccgcgggcgcggtggtggtgtcgctgtgttccacctccgacgagacgattgaagaggccgaaaaggatctgccgcgcaacctctgtccgctgataaaaagcagctacggttttggcaagtccgacaaatgcccctacttctacttttccgacctcgtggtgggcgaaaccacctgcgatggcaaaaagaaaatgtatgaatacatggctgaattcaaagccgtgcacgtgatgcagctgccgaacagcgccagcgatgatgcctcgcgagcgctgtggaaagcggaaatcctgcgcctgcaaaaggcggtggaagatcgctttggtacgccgatcaccgaagccgccctgcgcgacgcgattatcctcaagaaccgcgaaaggcgggcgctggcgaacttttatcgcgtcggccagctcaatccgcccgcgctcagcggtagcgatattttaaaagtggtctacggtgcgacctttcgcttcgataaagcggcgctaatcgatgaactcaacggcatggccgatcgggtgcgtctgcagtggcaagaggggaaacggctggaggcgcggccgcgtattctgatcaccggctgcccgatcggcggggcggcggaaaaagtggtgaaggccattgaagacaacggcggctgggtggtcggttttgaaaactgcaccggcgcgaaagccaccgagcgctgcgtggaggagactggcgacgtttacgacgccctgaccgataagtatctcgctatcggctgctcctgcatctcgccgaacgaccagcgcctggatctgctcagccagatggtggacgagtatcaggcagacggcgtggtggatgttattttgcaggcctgccatacctatgcggtggaatcgctggcgataaaacgccacgtgcgccagcagcacaacatcccctacatcgccattgagaccgactattcgacggcggatatcggtcagctcagcacccgcgtggcggccttcattgagatgctttag

SEQ ID NO: 176418 - DNA, 768 bp, Klebsiella oxytoca
gtgacagttaccgtagggattgattccggatcgaccgccaccaaaggcatcctgctcgacgacggcgtgattcagcgccgctttctctgcccgacgccgtttcgccccgccgacgccatcgttgaggcgtgggaaacgctccgcgctgggctaagcgagcccccctttttaaccttaaccggctacggacgccagctggtggatttcgccgataagcaggtcaccgagatctcgtgccacggactcggcgcacgcctgctggccccgcagactcgcacagtcatcgatatcggcggccaggacagtaaggttatccagctggacgaggcgggtaatctgactgatttcctgatgaatgataaatgcgcggcgggcaccgggcgctttctggaggtgatttcgcgtacgctgggggccagcgtcgagcagctcgacagcatcaccgatggtattgagccccatgcgattaccagcatgtgtacggtatttgccgaatcggaggtcattagcctgcgttcggccggggtgccgccggaggcgatcctcgccggggtgatcaacgccatggcccgacgcagcgccaattttatcggccgtctgtcggcgcagggcccgctgctgtttaccggcggcgtcagccactgtgcggccttcgcgcggaggctggaggggcacgtgggtatggaggtacagacgcatcccgacgcacagtttgccggggcgatcggcgcggcgctgatcggtttacgtcagaggagccgccggtga

SEQ ID NO: 176419 - DNA, 255 bp, Klebsiella oxytoca
gtgacggaatatctgtttttatttcactcaacggtgggggtggtgcgaatgcgcaaagccctgcaggcggcgggcatgaccttccgggtgaaggacattccgcgccagctgcgcggcggctgcgggctttgcatctatctgagctgtgagccgggcgaggagcagaggtggattctccccggccagacggaagctctgtttcgcgtggccggggatgattatcagctgctggctcagtttccgcagcaggcgtaa

SEQ ID NO: 176420 - DNA, 1104 bp, Klebsiella oxytoca
gtgtcgcgaactttagagcatttcaattatctgcaccaaattcctgaactgggctttgaggagtacaaaacgtcggcatacatcggcgatgcattagaagccgcggggtttcaggtgcagcgcaacgtcggcggtaccaccggcattgttgcgctgctggatagcggtaagccggggccggtcgtggcgctgcgggcggatatggatgcgctgggccatatgattgatggccgcctggaggctcgccatacctgtggccatgacgggcactcttcggtggtgttgaccgccgcggaagagatcctcgccgaggggctggtaaaacgcgggaagctgaaaatactctttcagcctgccgaagagctgggtacaggggcgatcgcgctgacggaagcgggcgtgctggacgacgtggagatgctgttcggcttccacctcaggccgctggaggagtgtccgaagggcaaggcggcgccggcgatgtactactccgcctcggcgacggtgatggccgactttcacggcaaagccgcacatgccgcccggcctcatctgggcgttaacgcgctggatgccgcgtcgcacgcggtgcaagcggtaaacggcattcatctggcgccttcgctgacctggagcgcaaaagcgactcgcttcctgtgcgatgcgggggtaaccaattcggtgccggcgaaagcgcacgtgtgctgggatttgcgcagcgcggaaaatgacggtatggcgatgctgaaagagcgggtggtacgggcgatagagagcagcgcggccgcttacggcgccaccgtcgatatccagatcgtcaaggagatgcctgccgcgattatcgatgaacaggccacggctatcgtcagccaggcgattcgggaaacgtttggcgaagccggcttaacggcagcgaagagtacgccgggcagcgaggactttttccactacctgcgcctgcgtccacaggtgaagggcgggttctgggggctgggctgcgacctgctgccggggctgcatcatccggagatgcacttcgatcgcgcagcgctggcggatggcgtgcgggtgtttaaatcctgcattcgccagatgctgggatga

SEQ ID NO: 176421 - DNA, 468 bp, Klebsiella oxytoca
atgaataattcggcaaaaatctccagtaacccgttcgatattttcgttatcggcgcgcgtaaaggatttaatatcgccatcaacaatctgatgccgaatgtattaatggcttacgtgatcgccgagatgctgaatttgctcggcgtgatgcagataatcggccacgtctgcgcgccgctgatgggcctgttcggcctgccgggcgaagcgattaccgtgctgctgacctcctggctttccgcctcggcgggaaccggcgtggcggtgagcctgttgagcaaaggcaccctcaacgtggcggatatcacgattctgatcccggcgattttccttatggggtcgcagcttcagtacatggggcgcctgctcggcgtggcggatgtcccgaaaaaatattggccgctgctgatggcggtgagcattatcaatgccgtcatcgccatgctggtcatgcgcgtgattgcataa

SEQ ID NO: 176422 - DNA, 684 bp, Klebsiella oxytoca
atgagtgaaaataaaacgttggaatgttcctccgacgaaacgacaaatgagtggaaagtcgggcccggggcctggatttcactggtcatcgtattattagttttctccgggctgctgtttaaagtggaggggatggcctggctgggggcatttgactttaccactctcggcggtgcgttcggcaccatgaaaacgccggaaaccaacacctttatcggcagcggcggcatcagcgccaaggccggttttctatttgcgctatcgctggtgcccacggtgatgctggcgctggggctgctggagatatttacccattacggcgcgattcgcgccgcgcacaaactgctgacgccgctgctgcgcccgctgctcgggatcccgggttataccggactggcgctgattaccgatttacagagtaccgatgctggtgctgcgctaaccaaagagctgtatgacagcaagaaaataaaccgtaaggatctggtcattatgggggcctggcaatattccggcgccggtctgataaataactatttctcgattggttcagcgcttttcgcttcgttaaccattcctatcattattccgctgctattaatgtttgtgctgaaattcgtcggcgcggcaatcacccgtctggtactgaatactgcttataaaggcgattttgaaaatgaataa

SEQ ID NO: 176423 - DNA, 915 bp, Klebsiella oxytoca
atgttgcatgagaggcctatgagctatctgtatgaagtcgggattcagggaggcattcgccgggccgccgatatgctggggattaatccgtcagtcatcagccgccagatagcgcagctggaacgggcgctggagctacctctgctggagcggcagggacgaaacgtggtgctcaccgaagcagggcgtctgctggcggaggactactacgaaagccgtcagcgccgggaaaagctggaaagtcacctgaaggatttacgccatatgcgcggcgggactatctcggtgaggattggcggcgggctggtcaccacctttattgaatcagtgatgagcaccttttctcagtcctggcctaacgtgttcgtggatattattgtcggcagcatgcaggagatgctcaacgatatcgccagcggcgaagcggatatggcggtcgccttcggccccatcggcaaccctgagcttaaacgccacagctttcagtggggccccatctgtgcggtggtctctcctgagcatcccatcgctgccctgcccgccgtcactatcgatgagctcacgcactatcgcctgatcgcgctcaccgacagctttggcctgcagcgccatatgaacgccatgtttaaaactgcaggacggcagtttcacccggcctatcgctgcaacctcttttcgaccgccatgagcctgagccaggcgggattaggcgtctcttttatgaccgcatacgccgcccgggaggcgatcgcccacggtattctgcgggcggttcctatcgaccatcctattgccagcagcgcccagtgccatctgctacgcaactccgatcgccgcttttccccggcggcgcatcatatgtggcggctgttgcataacgcttttcgcgatgcgcagcgggcgctggcggcctga

SEQ ID NO: 176424 - DNA, 1065 bp, Klebsiella oxytoca
atgtctattaataccctggcgcgggtcttcaccccgcacggcaacatcgtctatacggcgaacgattttcgccagaccttgcgtatcgccgtggccggcactatcgcgctgagcatttcaactttttatgacgtgcagtacggcgtcttcttcgtggtttatccgctgatgctgctgtcgctggtgccggtgtttaaccgccacgtggcgcggcagtttgtgttcagtgcggcggtgaactgcgtcgaaatggtgttaatcgtcggctatttatcgcagtggccggtcatcatgacgctggtggtgtttggcctgtacgtgatgcgctttcgctttatgagccaggggccgctgtttctgctggggtcgatgggcgtggtgtgtcaaagcacgatgctcaactttatgagctatcccaccagcaactggcacacgctgatgttctccaatatggaggcctgcgtgatggcggtggcgctcagcgcgctgctgaactacttcatcccggacgttgaaccgcgcaagccgccgccgcgcattgaaaaagatgccgcgcgtatccgccacgaatcgctgctttccggcagcgtggcgacgatgatctttgtgatttttcaggtctgcgatctgagcgactcgctgtcggcgctgatggcgggcatcttaattctgttcccgatgcactatcgcggcgcggtgatcagctcgatctggcgcgtggtgggggtggtgctggcctgcctttatatcctggtggtgcagctgattatctacgacttcagcaaccatatggtgctgatgatgccgttgattgggctggggctggcgtttagcgcccggctgcacgtgatggagaaggtgggggcaggcgttggcttcgccagcatcaccactatcggcatcatgttcggccagaacctgcatccggaccaggacctggtgttcagcgatctgtaccgcattacctcggtgaccgtggcgctgatcgttacgctgaccatggtctttcttatgcatcggctgctgaactgctttgcgccaacccggttcgtggtgaccgaataa

SEQ ID NO: 176425 - DNA, 1068 bp, Klebsiella oxytoca
atgatgacccctgaacagaaatttgcccgctgggtaagggtgagtattgccgccttcctggtcatattcgcctggtttatcgttgccgatatctggatcccgctcacgccggattccaccgtgatgcgcgtggtcacgccggtctcgtcgcgcgtctccggctatgtctcccatgtctatgtgcataacaacagccaggtgaagaagggcgatctgctctatgaactggatccaacgccgtttatcaataaagtggaagcggcgcagatcgcgcttgaacaggcgaaactcagtaaccagcagctggacgcgcagatcgcttctgcccgcgccaacctgcgtaccgcccagtacaccgcgcgtaacgataaggtcacgttcgatcgctatcagcgcctgagcaccatgcagaacgtttcccagtcggatctggataaagtgcgcaccacctggcagaccagcgaacagtcggtgagcgcgctgaatgccagtatccagaatctgctgatccagcgcggcgagcgcgatgatgggcgcaacgtgacgctgcaaaagtatcgcaatgcgctggaagaagcgcagcttaatctcggctggacgaaggtccgcgcggagactgacgggatggtgagcaacctgcagcttaatccaggtctgtacgccactgcggccacgccgctgctggcgctggtgagcaaccagaccgatatcgtcgccgatttccgcgagaagagcctgcgccacaccggcgtgaataccgatgccgcggtggtgttcgatgcgctgccgggcaaagtcttcccggcgcacgtcaccagcagcgatgccggtattctggctggacaagaagaagttaacggccagctatcgcagccggagcaatccacccgctgggtgcgcgacgcgcagcgcatgcgcattcacgtcgctctggacgagccgctggataagccgctgcccaccggcgcccgcgccacggtacagctctataacagcgatggcccgttcgcccgtaccttcgccggcgcgcagatccatctggtgagcttcctgcactatgtctattaa

SEQ ID NO: 176426 - DNA, 465 bp, Klebsiella oxytoca
atgaccgaagacgacctgtttgcccgccgcccgatgggcatgcgcatggcgatggtggtgcgccagtggcgcgcgattattgattctgccattaccgataccggcctgacccagtcaagctggacggtgctgatgcagctgcatcaactgggggataacgtctcggtcagcgagctggcggaggtgcagggcattgaactgccgccgctgatgcgcaccctcacgcagctggaaaagcagggctatctgctgcgttcaacatcgccttatgacaaacgcatacgcctgctgacgctgacggcggaaggccgcgctattctggagaagctgaaccgcgtgattgaggcctatcaacagcgcgtcaccgaaaccctccctgaagcgcagctcgccgcctttagcgccacgttaaatcaaatcgcctgcaatctgcggactatccgcgaagaagataacaagatctaa

SEQ ID NO: 176427 - DNA, 165 bp, Klebsiella oxytoca
atggaatttcacgaaaatcgggcaagacagccgtttatcggcttcgtatttctggcgcgtgcgttcaaaaagtggtggcttcgtgagcaaacgcgcagaacattgcagcgtatgagcgacgaacagctaaaagatgtcgggctgcgccgggatcagatcaattaa

SEQ ID NO: 176428 - DNA, 1425 bp, Klebsiella oxytoca
atgacccgctatcaacatctggccagcctgctggcagaacgcatcgaacaggggctgtatcgccccggcgaaaagctgccgtcggtgcgcagcctgagccaggagcacggcgtcagcatcagcaccgttcagcaagcctaccagacgctggaacagcagcagctgatcgtaccgcagccgcgttccggctattttgtagccccgcgtaaagcacagccgccggtgccgccgatgtcgcggccggtccagcgcccggtagagatcactcagtgggatcaggtgctgaccatgctcgacgcccgccacgataaatcgattatccccttcggcggcggctcgccggacgtcacccagccaagcctgaagcctatctggcgcgagctgagccgggcaattcagcacaaccttagcgaagttctgaactacgacgagctggccgggcgtcgcgagctgcgcgaacagatcgcccgcctgatgctcgacggcggatcggtggtcaccgccaacgatctggtacttaccagcggctgccacagcgcgctgtcgctggcgctgctgtcggtgtgtcagcccggcgatatcgtcgccgtcgaatccccttgctactacggcaccatgcagatgctgcgcggattagggctaaaaaccatcgagatccccaccgatccggaaaccgggatcagcatcgaggcgttagagctggcgctggagcagtggccgatcaaaggggtgatcctggtccccaactgcaataatccgctgggatttatcatgccggatgcccgcaagcgggcggcgctgtgcctcgcccagcgccacgatatcgttatctttgaggatgatatctacggcgagctggcaaccgaatacccgcgccctcgcacgatccattcctgggatatcgacggccgggtgatgctctgcagttcgtttaccaaaaccatcgctcccggcctgcgcatcggctggattgcccccggccgttattacgatcgcctgctgcagatgaaatatgccgccagcggtaccaacgtcccctccacccaactggcggcctgtaactttattcgcgaaggccactatcaccgccacgtgcgaagaatgcggcagatctaccagcgcaatatggagatctacacctgctggctgcgggagtttttcccctgcgggatctgcgttacccgcccgaaaggcggctttatgctgtgggtcgagctgccggagcaggtggacatggtctgcgtcgcgaagcagctgtgccggctgaaaatccaggtcgcgccgggatcgctgttttccgcatccgggaaataccgcaactgcttaaggatcaactgcgctctgccgccgatagataaacataaagaggtgatggtgcagctgggcatggcggtgaaggtggcgatggagtgggcgccggagtga

SEQ ID NO: 176429 - DNA, 912 bp, Klebsiella oxytoca
atgaaaataaccaaagaccaggtggtctacgccatgtcgcgcgataacgctcctgtcgctaccgtcagcagcggaagcgaagtgctgtttgaaacgtgcgactgcttctccgaccaaatcacctccgccgatgccgtgttcaacgaactggactggcagcgtatcaacccggcgaccgggccggtctacgtcgagggcgccgagccgggtgatgcgctcaaggtcaccatcaagcgcattaccctgacgagcaatcaggcggtgatggtcaccgcaccgcagctcggagtgattggcgatgagcttgatgccccgaaggtcaccattgtcccgattgaaaacgaccatgccgtgctgcccggcaacgtgcgcgtcccgctcaacccgatggtcggcgtgatcggcgtcgcgcctgccggggaagccatctcctgcggcacaccggatagccacggcggcaatatggactgcaaaatgattaccgccgacagcaccctatggctgccggtcaacgttcccggcgcgctgttcgggctgggggatttacacgccgcgatgggcgatggcgaagtttcggtttgcggtctggaaatccccggcgaagtgctggtcgaactgacggtggttaaaaaccgtcgcctgccgctgccgatgctcgaaaacagcgagaccctgtttaccctcgcttcggcacagacgcttgatgatgccgccgccctggccacccgtaatatggcgcattttatcgccgacaatacctccctgacgctggctgaagcgatcagtattctgagcatcgccggcgacctgcaaatctgtcaggtggtcgatccgctgaaaacctgtcgctatgccttaccgaaatcagtggctgaacagctctccctgagcgtcgaaggggagcatgcatga

SEQ ID NO: 176430 - DNA, 1344 bp, Klebsiella oxytoca
atgagcgttgaacaatttggctataagcaggagctgcatcgggcgctgacgttccgcgatctgctggtctacggcatgatatttatggtgcccatcgcgccgtttggcgtctttggctacgtctgggacggcgcgcagggcatggtggcgctggcttatctcatcggtatggtggcgatgttctttaccgccatgagctactggtcgatgtcgcgcgcgttcccggtttccggctcggtatacgcctatgcccagcgcgggattcatcccattgtcggcttttttgccggctggctgatcctgctggactatattctggtgccgtcgctgctctatatcgtcagcgcagcggcgctggcgcccatgctgccgggcgtgccgggctggctgtggattgtcggctttatcgcgattaacagcctgattaacctgcgcggcattacctttaccgcacgcgccaataacacgattctgatcgcggagatcgtggtgctgtcggtgttcgtcgtcctcgggctgattgcgctctactccggcgccggggcgggccatctgaccctcgacccgctctacaacgccgataagtttagcctgccgctggtgatgggcgcggtctccatcgccgtgctctcgttcctcggcttcgacgggatctccacgctgtccgaggaaacaaaaggcggcgtagataccgtgggtaaggcgtcgctgggcgctctgatgctggtcggttcgctgtttatcctgcaaacgtggatcgccgccgatctggcgcaggggatgacgttcagcagccttgataccgccttctacgataccgcgaatctggcgggcggcggctggctgaagtatgtcaccatgtggtcgacggtgatctcctgggggattgccaacgccctggtggcgcaggccgccgtgtcgcgcattctgtttgcgatggcgcgcgacaagcagctgccgcagctgctggcgaaagtgcacccgcggctgaaaacgccttacgtcagcaccctgtttgtggcgctgatttcgctggcttccggcctctggttctacggcgatatcgataacctcagccgtctggtgaacttcggcgcgctgatgggcttcctggtgctgcatattgcggtcatcaaccactatctgatccgcaataagtcacgcaatctggtgatgcacctgctgttcccggtgattggcctgtgcattatcggctttgtgatttatgagatggacgtgcaggccaaggtgcttgggctgagctggctggcggttggcgtggtctattacctgctgatgcgcctggtgctcaagcgcaatgtggaactgaagctggaaggctag

SEQ ID NO: 176431 - DNA, 444 bp, Klebsiella oxytoca
atgttaagcggattaaaccatctgactctggcggtcagccagctggcgccgagcgtggcgttttatcagcagctgcccggaatgacgctgcgcgcgcgctgggataacggcgcgtatttttcctgcggcgacctctggctgtgcctgtcgctggaccctcagcggcgcgttaccccgccggaggagagcgactacacccactatgctttcagcattgcggaggcggatttcgcgctttttgccgggcggctgaatgcggctggcgttccggtttggaaaaccaataaaagcgaaggcgcgtcgcactattttctcgatccggacggccacaagctggagctgcacgtcggcaacctcgcccagcgcctggcggcgtgccgggcgaagccctataaaggtatggtgttttttggcgaggacgaacaggcggccgggaacccgtag

SEQ ID NO: 176432 - DNA, 909 bp, Klebsiella oxytoca
atggttaatctccagcgtctggatctcaatctgctacgcacgcttcacgtcctgcttagcgaaaataacgtcacccgggcggcgcagcgcctcaacctgtcgcagccgtcggttagcgtccaactggcgagactgcgggaaattttcgccgacccgctgctgctgccggggccgcgcggaatgcagcccaccgcccgcgccgatgagctgcgcgggccgctgcgcgatgcgctgctggcgctggagctggcggtggcgccggttcagccttttgacccgaccacggcggcgcagacctggcgggtggcggcgaccgactatatggcgtcggcgattttgctgccggcgctcaacgcgctgcgcatcgcctctccggccagccgtctggcgctgtttgagctgcagccttcgcggctggttcagcaggcggatcgcgacgaagtggttctgttttttcacacgcgcgatggtgcaccgcccgcgctgcatcagcgtttgttgttccacgaacgctacgtgcttgccgggcgggccgggcacccggcgctgcagtcggcgttaactctggcgcagttctgccagctggaacaggtgattgtctcgccggacggcggaggattcagcgccgcgaccgatagcgcgctggcgaatctcggtctggcgcggcgagttgtcctttccgtgccacatttcctgtttatgctggagacgctgcgcaatagcgagctggtggcggtgctgccggagcggctggtgagcggagctgcgggtctgacggtggtcgaaccgccgctggcggtcgccggatttgatatgttgatgctgtggcacgagcgctggcatcgcgacccggcgcatcggtggctgcgtcagcaaatcgtaacgtcattagaggagaagccatgttaa

SEQ ID NO: 176433 - DNA, 783 bp, Klebsiella oxytoca
atgaaaatattactggtttacgcccatcctgaaccgcgttcgcttaacggcgcgctgaaagattttaccgtgcaacatctacaaaacgccggtcacgacgtgcaggtgtccgatctctacgccatgcgctggaaggcgggatttgatgccgacgacagcagcgccccgccagtgggtgcaagctggcgggcgacgcgagattcgcaatatgccttcgctcacggcacgcagagcgcggatatcgtgggcgaacaggagaagctgctgtgggccgatacggtgattttccagttcccgctgtggtggttttcactgcccgccatcatgaaaggctggattgatcgggtttacgcttacgggtttgcctacggcgtcggcgagcatagcgatacgcactggggcgatcgctacggcgaaggcacgttcgcgggtaaacgggcgatgctggtcgttaccgccggcggatgggcggagcactatgctccgcgtggaattaacgggtctatcgacgacattctgttccccattcagcacgggatgctgttctatcccggatttgaggtgctgccgccggtggtgttctaccgcaccgacaaactcgatgaacagcgcttcgccatcctgcgcgaggagctggcccggcggctggataccctctctgaaacgccgcccattcccttccgccgtcagaatcacggcgactatttgatcccctctctgaacctgcgtccggagctggcgcctggagaaaatggcctcgctatccacgtgaagcctatgtga

SEQ ID NO: 176434 - DNA, 585 bp, Klebsiella oxytoca
atgattcgggccatgaatatggaagcccaacatcgtaaaaaagatcctgtccgcctgcataagcagttgctggaatccgcagccactatcgccggtcgggacggtatcgcctcgctgtcgctgaacgccgtcgcgcgcgaagcgggcgtcagcaaaggcggcttactgcaccatttccccaacaagcaggcgctgattttcgctctctttgcccgtctgctggcgattatggaagaagcgatttcagagcttatggccgcggataacgtctcttatggccgatttacccgcgcctatctgcgctatctgtcggcgccggaactcacggacacccaggagagccgccagctgatggtgctgtcgctggccatgccggatgaaccggtgctgcgaaaatgctggcgcgactggatgctggaccatctggcgaaaggggatgaactggacaatagccataccggcacgctggtgcgctatgcggcggacggcatctggctatcggaattaaccgaggggcgcaccatgagcccgaggcaccgccagtcgctggtcagcgatttgacgaagatgacgcttcctgcgtga

SEQ ID NO: 176435 - DNA, 801 bp, Klebsiella oxytoca
atgcgctataacatccatggccgtcttatttatgatgcaatggacggcacgctaacgttaccgggaagcgatgaggcggacagccagctgtccatcaccgccaacgcgctgctgtggttcttcctgcgccacaccgaggtggtcagccgcgacgaagtgcttaaaaaagtctgggatgacaatgggttaacctcatccaacagcaatctcaatcaatatctgagcatgctgcgcaaaacctttcgccactacgatatcgacaacattatcgtcaccgtatcgcgcggattgctgcagctcaatccggacctcgctatcgagatgctcgacgccagcccggagccggaaccggcgcctgcggcagaagctgagccagatctggccaccgccccggcagaacagaagaccgtttccagtcgccacgcgcgcggcacctgctggtatctggccggcggctgcctgctcaccatcgccctgctgctggtggtctgcagttttctcggcggcagcacagcgcaccccattaccctgacgcaaatacgccacagccagtgcgaactgctggccagcgatgagatgctgcgatccgttgccgaaagcgcctacggcaagaattttgatgctgtacgccagcgcctgaagctggagtgcaagcccggcgaacgctttgtcttcttctatggcgaccggctggaaaccaacggtctgggccgggtgttcctcgcccactgcgcgatgcatgaagataacccgttcagctactgcgataactatttttattattcatggaagccgcaatga

SEQ ID NO: 176436 - DNA, 519 bp, Klebsiella oxytoca
atgagaatcgccccgcgcccctttttcgccctctccagcctggtgtttattgccgccgccgggttctgcgcctggaagctgctgccggtcgaaaacggcggggtaatgagctgttcgacaaaagcgattatgcgctttgagaacatggagaaggagaacgttaacggcaatatccatttcaactttgccgccaacggcaaagggtcgatggtcgttgaaggctacaccgattccgccgccggctggctttacctccagcgctacgtcaaattcagctacaccagcaagcgcatctccaccaccgagcgccactatcgcatcagcaagtgggaatccagcgcctcgtccatcgatgagtcgccggacgtgatcttcgactattttatgcgcgagatgtccgacagccacgatggcctgttcctgaacgcacagaagctcaatgagaaagccattcttctcagctctatcaactcaccgctctacgtctgcacgctgaagtccggcagcaagcttgactaa

SEQ ID NO: 176437 - DNA, 279 bp, Klebsiella oxytoca
atgggtgatgcattagggcttatcgaaaccaaaggtctggtggcctgcattgaagccgcggatgcaatgtgtaaagccgccaacgtcgagctgattagctatgaaaacatcggctcggggctggtgaccgtcatggtgaagggcgacgtcggcgcagtgaaagcggctgtggattccggcgtggaatccgcgcagcgcatcggtgaagtggtgacctcgctggttatcgctcgtccgcataacgacatcaacaaaatcgtcattaaacacaaggcctga

SEQ ID NO: 176438 - DNA, 285 bp, Klebsiella oxytoca
atgggtgatgcattaggtctgatcgaaaccaaaggtctggtggcctgtatcgaagcggcggatgccatgtgtaaagccgccaacgttgaactgattggctatgaaaacgtcggctccggcctcgtcaccgcgatggtgaagggcgacgtcggcgcggtgaaagcggcggtggattccggcgtcgaatccgcgcagcgcatcggcgaagtggtgacttctctggttatcgcccgcccgcataacgacatcaacaaaatcgtctcgcattacaaaatcatagattaa

SEQ ID NO: 176439 - DNA, 279 bp, Klebsiella oxytoca
atgaaagaagcgctagggcttatcgaaaccaaaggtctggtggcctgtattgaagcggcggatgcgatgtgcaaagccgctaacgttgagctgattggctatgaaaacgtcggctccggcctggtcaccgcgatggtgaagggcgacgtcggcgcggtgaatgccgcggtagattccggcgtggaagcggcaaaacgcatcggcgaagtcgtcacctctcgcgtcatcgcgcgtccgcataacgacatcgaaaaaatcgcggcgcagcacaaagcatga

SEQ ID NO: 176440 - DNA, 1605 bp, Klebsiella oxytoca
atgattgaactggataacgatttgcagtcccggcagaacgcccgggaactggtgcgcaatgccaaaaaggcgcaggcgattctggccaccttttcgcagcagcaaatcgacgccatcgtgaaaaacgtggcccaggaagcagcgcatcatgccgaagcgctggcgaaaatggccgcggaagaaaccggttttggcaactggcaggacaaagtgctgaagaaccgcttcgcctcgctgcgcgtctacgacgccatcaaagatatgaagaccgtcggcatcattcatgacgatccgctacaaaaagtgatggacgtgggcgtgccgctgggggtgatttgtgcgctggtaccgtcgaccaacccgacctccacggtcatctacaaaacgctgattgccctgaaggccggcaacgcgattatcttctccccgcatcccggcgcccgccagtgcagctggaaagcgattgaaatcgtgaagcgcgcggcggaagcggcaggggcgcctgccggtagcgtcgacgccattagccaactgaccctcgaagccacctcagagctgatgcacagcaaagacgtgtcgctgatcctggcgaccggcggcgaaggcatggtgcgcgccgcctacgcgtccggcacgccgaccattagcggcggtccgggtaacggcccggcgtttatcgagcgcagcgccgatatcccccacgcagtgaaagatatcatcaccagtaaaaccttcgataacggcgtgatctgcgcctccgagcagtcgattatcgtcgaacgctgcatctacgacgaagtgcatcgcgaactggaagctcagggcgcgtacttcatgaacgaaaacgaagcggcgaaaatggcggccctgctgctgcgtcccaacggcaccatcaaccctaaagtggtgggtaaaaccgcgctctatctgagccagatggccggtttctgcgtcccggccagcacccgagtgctgattgccgagcagaccacggtatcgcataccaatccctactcgcgggaaaaactgtgcccggtactcggcctgtacgtcgaagaggactggaaagccgcctgtcaccgagtcgtggaactgttgaccaacgaaggcctcggccacacgctggtgatccacacccgcaatcaggacgtcatccgccagttctgcctggaaaaaccggttaaccgcattctgatcaacaccccggcggcgctgggtggcatcggcgcgaccaccaatatcactccggccctgaccctcggctgcggcgcagtcggcggcggctccagctcagataacgtcggaccgatgaacctgctcaacatccgcaaagtgggctacggcgttcgctccatcgatgaactgcgcgcgccgggtagccgcccggaaccgcagccgaccatcgtcagcccggcgtccggcccgaaccgcagcatcttcgacgatgaacgttttaacgccccagcgaccgccgccaccgcagcccatccggccagcgccgacgatcgctttgcggctgccgccgccatcggcgcggaaagcgagattaatgagcaaaacgtggaacgcgtcatccgccaggtgctggaacgcctcggtaagtaa

SEQ ID NO: 176441 - DNA, 258 bp, Klebsiella oxytoca
atgattctcgcaaaggtagtcggacatgtcgtcgccacgcagaagtgcgatgagctacggggcagcaacctgctgctgatcgtcaaattggatgatgaccagcagccgatgaaagaccagacctgggttgccgttgatagcgtcggcgccggtatgcacgacatcgtgctggccgaagagtacctggcgctcaacaaagagcgctacaaagccatgtcggtggtcgccattgtcgagaacgtgtttcgggacgcttaa

SEQ ID NO: 176442 - DNA, 1155 bp, Klebsiella oxytoca
atgagtgaatttttgctgaaaccccggattcgctttggtcaggatgcgcttgccatcctgaacgagctgcccgcccgcaacgtgctgctggtcaccgaccaggcgatggttaagtttggcctcgccgatcgcgtcacgcagatcctccatgcgcgcggcatcgctttccaggtctgggacgacgtggtggccgacccggatatcgccaccgtggtgcgcggtatgaagcggatggatacccgctatccggatctggttatcgcgctgggcggcggttcggtgattgatgcagccaaagcggttattttcgccctggcgcaaacccgtccggacgctcaccgcgagccgccctgctttgtggcgatccccaccaccagcggcaccggctctgaagtcaccgccttttcagtggtaaaagcacacgccgagaagctggtactggtggacccgtcgctgctgccggatatcgccattcttgacccggcgctggtggcctcggtgccgccggcgatcaccgccgataccggtatggacgtgctgtgtcacgcgctggaagcctatgtctccctcgccgccagcgacttttccgatgcgctggcggagaaagtggtgcagcaggtatttcgctttctgccggcctgctggcgcaacggtgccgacctgctggcgcgggaaaagatgcacaacgcttcctgcatggcgggcatggccttcaccaacgcctcgctgggcattacccacagccttgcccacgcgctcggcggcgtgtttcgcgtcccccacggtcgcgccaacgccctgctgatggcggacgtggtggcctggaacgccgattatcacgggctgtgcgataccgatgccgcccgcaaatatgcccgattagcccatctgctggatctgcctgcggccactacccgccagggcgtcgccagtctgctggtcgccattcaggcgcttaaagacgaaatgagcatgccggccggcatccgcgataccggcgtccttgcagacgagtttgaacaacggctggcggagatggtcggccaggcgttacgcgacagctgtaccccgacgaacccacgcgcgccggatgctcacgcactgaccgaactctatcgccgggcatggaccggcaacgcagttcagggccactga

SEQ ID NO: 176443 - DNA, 3387 bp, Klebsiella oxytoca
atggcacactacagcttaacgccgcgcgtcaaagtgttggcagaacgtttactctcacaaaaaagcaccctgtgcaccgaacatgccaccacgctcaacgcccttgatggcgatatcgccggggttcccgccgccgtcaaaccggcgcgccgtttctatgaactgatgcgccagctgccgctgtgcatcagcgccgacgagctgatcgtcggcaaccagacccgcaaaccgcacggggcgattttccacgacgagagcgccgcccgtcgcccgtccgcgttccagtttctcaatctgaatagcgatctcgactccccggattacaagctggtggtcgaaaaaggcgtactggcgataaaacatcagctggaagagaaaacccgcgcgctgggcagcgccgtcagccgcagcggcatggacgaagtcaacggctgccgtgcggccatctacgcctgcgatgccctgctggcgctggcgcaaaacctggccaacagcgcggaacagctggccgccgcggaaaccaacgcttaccgccgggcggaactgctggacagcgccgccattctgcaccatgttccggcgcatccggcgcgcagcttcaaagaggcgtgccaggccttttatctgttccagctggcgctccagctggataacggcagctacgccgtcaacccggaaggcgccgacaaagccctgctgccttactaccagcacgatatcaacaacggcgcgctctccccgcagcaggcgtatgaaatcgtcgaatcgctgtggttcaagctggcggaactgtgcgaagtgcgcgccgcctgcgcgatcgacggttatccgatgtttgacgccatgctgcacggcgcaagccttgagaatgcgcgcatcaacgaactctccgacatgttcctcagcgcgcagcaaaacctgagcgccctgaatctgccggtgcgtctgttcaagggagtacaacacgtttccgccgccccgtttgccgccgccggcgatacgccggcagcagaagggctgactccgcgcatgcagcgcctgcgcaaccactacctgaccgtgcgcccgagcgtctctatctatcgcgcgctggcctttaccgaagtggtcaaagccaaccccggcatgccgacaattctgctgcgcgccaaagccttccgccacgcctgcgaaaccgcgccgattctgattcaggatgatgagctgatcgtcggtcatccatgcggcaagccgcgcgcgggcgccttctcgccggatatcgcctggcgctgggtgcgcgatgaactcgataccatgagcacccgtccgcaggatccgtttgagatcagcgaagcagataagaaaaccatccgcgaagagatcgtaccgttctgggaaggccgctcgctggacgaaatctgcgaagcccagtaccgcgaagcgggcgtatgggcattcagcggcgaaaccttcgtcagcgacctctcctaccaccagatcaacggcggcggcgacacctgcccgggctacgatgtgctgctgtttaccaaagggatgaacggcattaaagccgacgccgaggcgcatcttgccagcctgagcatggaaaacccggaagatatcgaccgtatttactactacaaggcggccattgaaacctgcgaaggggtgattaactacgcacaccgcatcgccgcccgcgcccgcgaactggccgccgttgaacagaacgcccagcgccgcgccgagctgctgaccatcgctgaggtgaaccagaacgtgccggcgaacccgccgaaaacgctgcaggaggcactgcagagcatctggaccgtggagtcgctgtttgaaattgaagagaaccagaccgggctgtccctgggtcgcgtagaccagtactgctacccgatgtttgaagccgatatccacgaaggccgcctgactcacgacaccgcgctggagctgctgcaggcgtttatcatcaaatgcgccgagctgatgtggatgtccagcgagcttggagcgaaatatttcgccggctatcagccgtttatcaacctgaccgtcggcggtcagaagcgctccggcggcgatgcctgtaacgacctgacttatttgatcatggacgccgtgcgcttcgtgaaggtttaccagccgtcgctggcctgccgtattcacaaccagtcgccgcagaagtatatggaaaaaatcgtcgacgtcgtcaaagcggggatgggcttcccggcctgccacttcgacgactcccatatcaagatgatgctgcgaaaaggcttcgatttcgaagacgcccgcgactactgcctgatgggctgcgttgagccgcagaaatccggccgcatctaccagtggacctccaccggctacacccagtggcccatcgccattgagttcgttttaaaccgcggtcggatggtgctgtttgacagctatcaggggctggataccggcgacctgcgcgacctgcacaccttcgaagcgttcgacgcggcggtgaaaaaacagattgcccatatcgtacgcctgtcggcgatcggtacggtcatcagccagcgcgtgcaccgcgacgtggcgccgaagccgctgatgtcgctgctggtagaaggctgcatggaaaaagggaaagacgttgccgccggcggcgcgatgatcaaccacggcccggggctgatcttctccggtctggcgacctacgtcgattccatggcggcgattcgtaagctggtgtttgaagataagaaatacacccttgagcagatgcgcgacgcgctgctggcgaacttcgaaggctttgaaggcctgcgtcgcgactgcctcaacgcgccgaaatacggcaacgatgataactacgttgaccagtatgcactggatatcaccgagtggaccgagcgcgagtgccgtaagtacaagatgctctactccaccctgagccacggcaccctgtccatctccaacaacacgccgatcggtgagctgaccaacgccacgccgaacggtcgcctggcgtggatgccgctctccgacggcatcagcccaacccagggcgcggataagcagggtccgacggcgatcatcaagtcggtgagcaagatgaacgtcgaaaccatgaatatcggcatggtgcacaacttcaagttcctcaaagggctgctggataccccggaaggtcgtcacggcctgattaccctgctgcgcaccgcgtcgattctcggcaatggccagatgcagttcagctatgtcgataacgaagtgctgaaaaaagcccagcaggagccggaaaaataccgcgatctgatcgtccgcgtcgcgggctacagcgcctacttcgttgagctgtgcaaagaagttcaggacgagattatcagccgtacggtaattgagaagttctga

SEQ ID NO: 176444 - DNA, 987 bp, Klebsiella oxytoca
ttggacacggatgtcccgatcgtatttctggaggtaaatgtgagcgcaaaacaagaattaaccgggcgaatattcaatattcagaaatattcgatctatgacggcgatgggatccgcacgctggtttttttcaaaggctgcaatattcgctgcccgtggtgcgctaacccggaagggctgaatagccagtttcaggtgatgttctcccaggacaaatgcattaactgcggcgactgcgtcaacgtctgcccggcgggaattcattatcgggcggaagaaaacggcgaaatgaagcacttcgtcaaccgcaataaagactgcatcggctgccgcaagtgcgaagagatatgcacgcagaacgcgctggatattatgggtaaagatgtcaccgtcagcgaactgatggagatcatcatgcaggactacgacttttatatctcctccggcggcggcgtcaccatcggcggcggagaaatgagcctgcagaccgattttgccgtcgcgctatttagcgaatgcaaaaagatgatgctcaataccgcggtggaaacgcagggcactacgccgctggctaattatcaaaagctggcgccggtgaccgacaccttcttattcgatattaagcaaattaatagcgagcaccataaagcgttatttggcattggtaacgaaggcattcgccgcaacctggagtggctggtggattccggcgctaacgtcattatccgcatgcccctggttcgcggctataacgactcgttcgatgccattaccggggccattgattatgtacaaaagctggcgaagcgcggaaatatccgccgcatcgatatgctgccgtaccaccagctcgggcgcaaaaaatatgagcgcctcgatatgccctaccccatcgcccgggacccgacatattccgccgaagagttagaccggctggaaacgttcttcacgcagtttgattttgatattcgcttagtccgccattaa

SEQ ID NO: 176445 - DNA, 429 bp, Klebsiella oxytoca
atgaaaagtttaggcgtaattgaaacgcgagggttagttgccgccgttcaggccgtagatgccgcctgtaaaagcgcaggagtgacctgctttggctaccgcaaagtcggatcggggctggttagcgtctgctttgagggggagatcagcgcgattcacaccgccatcgaacgcggcgtggccgtcgcagagcttatcgacccgcaggtgaaatccctgacgatcgctcgtccggaacgcagcgtcgtggaagccctcagcaccctcaaaggccatccgccgcgtgcggaagctgccgctgcagccccgcttgaggctgaaatcgtcgcacccgccgctgtggaaacaagggaacccactgagcccgccgccgcgcccgcggcgacggaagataaaaacgcggcgataaggaaagggaagaaggcatga

SEQ ID NO: 176446 - DNA, 621 bp, Klebsiella oxytoca
atgatcgacaccctgctccatgaaaaaatcgccgcccgcctgagccacgttgcgccggctatcccggtcggcatctctaaccgtcacgtccatctggcgcagcaggacgtcgaagcgttgtttggcaagggctatgtcctgacgccgtttaagccgctgcgtcagccgggacagttcgccgcccaggagtgcgtcactgtggtcggtccgaagggctcgctcacccacgtgcgcgtcctcggcccaacccgcccggtatcgcagctggaaatctcccgcgccgactgctttaccctcggcatcaaagcaccggttcgcgaatccggccagctggagaatgcgggcagcgcgctgctgatcggcccggcaggccacgttgaactgcggtctcaggtgatctgcgcctggcggcatatccatatgtcgccgcaggacgcccgccagctgaacgtcaccaacggtcagaaggttagcgtccgcagcaacggtgaacgccagctgaccttcgatgaagtagtcgtgcgggtacgcgaagacttcgcgctggagtttcatattgataccgaagaggccaacgccgccggcttgaaaaacggcgcgcaggtcgcgctcatcggctaa

SEQ ID NO: 176447 - DNA, 687 bp, Klebsiella oxytoca
atgaccaaccaacagatggaagcgctggttgaacgcattatccagcgtctgcggccgccggtactggtaatggtgaccgccgcggcgggctaccggcacgctattcgccagcggctggccggctgcggcgagagcctgcacctggcgctggatagcggcattgacgacggcgagcagtggcagagtatcggtaaaacgctaccggcggctgactggcaatatgggctgccgtccgctgcgtataaagcgctgctgctgccatttctcgactacccgctggcggcggatctggtgaatggttctctgcacagtccccttgcccgccgcgtgcacgatgctctgctgagcggtctgccggtgctggcgctgcgctatcactgcgatcccgccagcgagcttaaccagctgcggggcgcgcagcctgataccgcttacgccgggcatatgcaggccacgctttcccgcctggccgaatgcggcgtcacgctgtgcaccatgaacgaattgctggagaagctggcgtcgggtcgcgaagcaacggtggcgccggcgagcggtccgcgccgttatctcactgtcacagacgtggtgaataatccggcgctggccggtgcgcctcaagcgcagttaaccgatgccgctatcgattttttaaaaaacagaaaaaaagaaccttaccttaaatag

SEQ ID NO: 176448 - DNA, 417 bp, Klebsiella oxytoca
atgtcttcaaaaacaaagtgttggctatggatgctgctggttatcgtttccgaaacctcagccacctccaccctcaaaatgttcggcagcagtgaagggataaccaaaatgctgctgctcgggctgctggtgctgctgtattgcacctgctactactcgctgtcccgcgcggtgaaagatattcccgtcggtctggcttatgccacctggtccggtaccggcatcctcgtggtatcgacgctgggaatggcgttttacggccagcacccggataccgccgccattatcggcatggcggttatcgccagcggtatcgtgatcatgaatctgttttccaaaatgggtagcgaagagagcgaggaagcgcccgcagaaccctcggctgcttcatcgctggacaaaaaagtcgccaactaa

SEQ ID NO: 176449 - DNA, 330 bp, Klebsiella oxytoca
atgtttaacctcggatttttatggctggcgctgtctatcggctccgaaatcaccggcacgtcgatgatcaaaaagaccaacggcttcagtaaactggcgccgtcggtgctggtggtctgcgcctacggcctgtgctacttcgccctcacccgcgcgatgagcactattccggtcggcgtcgcctactcgttatggtgcggctttggtatcgtcggcgtcacgatttgctcgatgatcctctataagcagaaaccggatattccggccatcctcgccatggtgctgatcatctccggcggcatcattatgaacgtcttttccagcatgtaa

SEQ ID NO: 176450 - DNA, 1389 bp, Klebsiella oxytoca
atgaaacgtatccctgagccgttccgcattaaaatggtcgaaaatattcgtatgaccacctttgacgatcgcgtcaaagcgctggaagaggcgggctataacccgtttttgctcaatagccaggacgtgtatatcgacctgctgaccgactccggcaccggcgcgatgagcgaccatcaatgggccgggctgatgatgggcgacgaagcctacgccgggtcgcgtaactatcagcatctgtgtgaaaaggtcaaagagattatcggctatccgtataccattcccacccaccaggggcgcggcgcggagcagattctgttcccaagcctgattgctcgccgcaagtcggcgcatccggtgtttatttccaacttccacttcgatactaccgccgctcacgtggagcttaacggcgcaaaagccattaacgtggtgacgccgaaagccttcgacacgacctcgtggtacgactggaaaggcaactttgatattgatttactgaaagcgaccatcgccgagcacggcgcggaaaacgtggcggcgattattactaccgtcacctgtaacagttccggcggccagccggtatcgctggcgaatatgcgcgaggtgtatcaaattgcgcgccagaacaatattccggtggtaatcgactcggcccgcttctgcgaaaacgcctggtttattaaacagcgcgaagagggctatgccgataaatcggtgaaagagattattctcgagatgtaccagtacggcgatatgctgaccatgtccgccaagaaagacccgatggtgaatattggcggactgtgctgcttccgcgatgacgaagagctcttcaacgaagtgcgcattcgctgcgtgccgatggaaggctttgtcacctacggcggcctggcggggcgcgatatggaggcgctggctatcggtctggaagaagggaccaacgaggattacctcgcttatcgcatcaatcaggtggagtacctcggtgaacgcctgcgcgaaggcggcattccgattcagtatccgaccggcggtcatgcggtgttcgtcgatgctaagctgctgctgccgcatattccgccggagcagttcccggcgcacgcgctaaacaacgagctgtatctggaagcgggcattcgcagcgtggaaatcggctccctgctgctgggacgcgacccggaaaccggtaagcagaaggcgtcgccgatggagctgctgcgcctgaccattccgcgtcgggtttataccaacgatcatatggactatatcgctgatgcgctgatcgccgttaaggcgcgcgccgccacgattaagggcctgacctttacctatgaaccgccggtactgcgccacttcgtcgccagactgaaaccggtgaaataa

SEQ ID NO: 176451 - DNA, 1257 bp, Klebsiella oxytoca
atggctacattatcagtctcaaaagcggtctcaactaatacaccatcgctgattggcggagcgatgattatcggcggcacgattattggcgcaggcatgttttctttaccggtggtgatgtccggtgcctggtttttctggtcgctgctggcgcttatctttacctggttttgcatgctgcattccgggctaatgatcctcgaagccaatctcaattatcatattggcgccagcttcgacacgattacgaaagatttactgggaaacggctggaatattatcaacggtctgaccgtcgcctttgtattatatatcctgacctacgcctatatttccgccagcggttcggttattcagcatacttttgcgcagatgaacctcgcggttcccgcacgcctgggcgggctggcgttcgcactgatcgtcgcctttatcgtctggctgagtacgaaagcggtaagccggatgacgactatcgtgctgggcgccaaaattctcaccttctttatgacctttggcggtctgatgtggcacgtggagcccgcgattctgtttaaccgcgcggaggtcaatgcgtcctatctgccctacgttctgatgacgctgccgttctgcctggcctcctttggctatcacggcaacgtccccagcctgatgaagtactacggtaaagacccgcttatcattcgccgctgcctgctgctcggcacgctgatggcgctggtgctgtatatcatctggctggtcggcacaatgggcaatattccgcgcccggcgtttatcgctatcgccgaaaaaggcggcaacatcgacgtgctggtgcagaccttaagcggcctgctgaacagttcgactctcgatttattgctgaccgtcttttccaacttcgccgtcgccagctcattcctgggcgtaacactcggcctgttcgattacctggcggatctgtttaagtttgacgatagccggctggggcggtttaaaaccgcgctggtgacctttctgccgccgatcgccggcggtctgctgtggcctgacggttttatctacgccattggcttcgccggtctcgccgctaccgtctgggccgctatcgtccccgccctgctggcgcgcgcctcgcgcaggcgtttcggcagcccgaactatcgggtctggggcggcaatgccatgattatcctgattttatgcttcggcggcgccaacgcgataattcatgttttatccagttttaacctgctgccagtttatcgctaa

SEQ ID NO: 176452 - DNA, 1008 bp, Klebsiella oxytoca
atgaacaccagccaaacgatcctgaccggcgaccgtcctaccggccagctgcacctcggccactacgttggttccctgcgccagcgcgtgctgctccagcacgaccatcagcagtttatcctcgtcgcggacctacagggactgaccgacaacggcagtaacccacaaaaaatcagcagcaatatccttgaggtgatggccgattatctcgccgtcggtatcgatccgcagaagaccaccatttgcctgcaatccgctctgccggcgctggccgaactcagcgcgctgtatatgaatatcgtcaccgtcgcccgggttgagcgcaatccgacggtgaaaaatgaaatcgcccagaaggggttttcccgctcgctgccggtgggatttttagcctatcccataagccaggccgccgatatcaccgcctttaaggccgaactggtgccggttggcgacgatcagctaccgatgattgaacagaccaacgagatcgtgcacaaaatgaatagcctgacgacgacgccgatcttacagcactgcaaagcgctgctcagcgacgtcagccgcctgccgggcatcgatggcaacgccaaaatgtcgaaatcgctgggcaacacgctcaccctttcggccagcgaagaggagatccatcgtgcggtcagcgctatgtataccgatccgaatcacctgcgggtcgccgacccgggtcagacagaaggcaatgtggtctttacttatctcgacgcctttcatgctgataaggccttcgttgccgagatgaaagcccactatcggcgcggagggctgggagacaggcagtgcaaaaacgcgctggagacctgcttacaggagctgctggcgccgatacgcgagcgtcgggcgacttatattcaggataaaggcatgctgctggcgctgctgcgccggggaagcgaacgggcgcacgaactgacacaacggacgctgcatgaagtaaaacgcgggctggggctgccggtgctgttttga

SEQ ID NO: 176453 - DNA, 1398 bp, Klebsiella oxytoca
atgaaagatgaaagccaaaaatatatctcgattatttttaaggagtggttgccgctgtacgacagcctgacgccggaagtgagggcggtacttaaaaatattgccgggcagcaggcggaggcgttagcgacccgtttttatgattttattttccaggatcctgacatcgcgcggcaccttagctatgacttagttcaggaacggctcagcagctcgctggccggatgggtgaaagatatcctgatgtgcgataaggaaaatttgcaggcgctggcggagcggcagtatctgatcggcagcattcattcacgcatcggaatcccggcagaggcggtacttcgcggcgcgcgccagctgaaagccgggctgattgaaaatatccgcgatagtcacttcgatcgcgagaccagcgtcgccgccatctactacgccatcatggccattaatatggcggtagaaatgatgtgccatgcctataccctgtcgcactatcgggcgacgaaaaatgaagaggcctaccgcctgtatagcctgatggataacgtgccgctggaatatggcaaacagcaggcttcgctctccggatgggaaaataccgctatttttaatattgtcagcgataataagacggatattaacggggcgttattatctgattcggaatttggcctgtggttccgccataaatgcgtgcgttattttaacaaaaatccgcaaatgcaggaaatcgccgatttaattagcaaggtggatgcgctgttatccgcctggaaatcctcatctgacggttctgtgtataaaaatacgcaggctctgctgcaggggatccatatccattgccagcagatcggcagccagctgggcgtgctgtttagcagcctgtcgcagatgcaaagcggtaaagatacgttgaccagcctgctgaaccgccgctatctgccggtggtgcttaagcatgaagtaacgctggcgatggaatatgaactgccgatgacggtggcgattatcgatatcgaccactttaaagagatcaatgatagctggggtcatatggtcggcgaccgggcgattaagcacgttgcggagctgctcagcgataatattcgctccagcgattatatcttccgctacggcggcgaagagtttctgctggtgctggtggagaccggcgccgcggaagcctttactatcctcgaacggctgcgtaaaaaaatcagccagctggcgtttagcgttggcgctgacaatgagatttcgattaccgccagcatcggctacgccgtccactccggtcatccggattacaatctgctgctgcgcgatgccgacagcgcgctgtacgtcgccaagcgcaatgggcgcaactgcgtgaagatgcatgaaggcgacgggaattaa

SEQ ID NO: 176454 - DNA, 1068 bp, Klebsiella oxytoca
atggacaaaatcaaacgacgttgggttggatacgttattggtttagcagtggtgattgccgctgcggcatggtggatgctgcgcccgccgggggttccggcaggatttgccagcagtaacggtagaatcgaagctacagaagtcgatattgccaccaaaaccgccggacgtatcgataccatcctggtcaaagaggggcagtttgttcgtcagggcgatgtgctggcgcgtatggacacccgagtgctcaacgaacagcggctggaggccgccgcgcaaatcaaggaagcagagagcgcgattgccgccgcgaaagccctgctcgaccagcgtcaaagcgaaatgcgcgccacggaagcggtggtgaagcagcggcaggcggagctgaactcctcggctaaacgccacgtccgctccagcacgctctcgcagcgcggtgcggtctccgcccagcagctggatgacgaccaggcggcggcagaaagcgccagggcggcgctggaatccgcgaaagctcaggtctctgccgccagggccgcgattgaggcggcgcgaaccagcatcattcaggcgcaaacccgggtcgaggccgcccaggcgaccgaacggcggattatcgccgacatcgacgatagcgagctgaaagcgccgcgcgatggccgtattcagtaccgcgttgccgaaccgggagaggtactggcggcgggaggccgggtgctgaatatggtcgacttgtccgacgtttatatgaccttcttcctgccgaccgagcaggcgggtctgctggcgctgggcagcgaagcgcgaattatccttgatgccgcgccgaatctggtgattcccgccaatatcagttttgtcgccagcgtggcgcagtttacgcccaaaacggtggaaaccagcgatgaacggctaaagctgatgttccgcgtgaaagcccgcattccgccagagctgctggcagagcatctggagtatgtgaagaccggcctgcccggtatggcatgggtccgtctggataaccagcaggcgtggcctgaagcgctgaaggtgaggttgccgcaatga

SEQ ID NO: 176455 - DNA, 2730 bp, Klebsiella oxytoca
atgaaaaccgtcgcccgcctggaaaacgtcagccagcactttggcgcaaccgtcgcgctgaaggacattacgctgagcattcccgcccgctgtatggtgggcctgatcgggcctgacggcgtgggcaagtccagcctgctatcgttgatctccggcgcgcgagtgattgagcacggtaacgtcatggtgctcggcggcgatatgagcgatgtgcgccatcgccgggacgtctgcccaaaaatcgcctggatgccgcaggggctaggaaagaacctctaccataccctgtcggtctatgaaaatgtcgatttctttgctcgtctgttcggccatgataaagccgaacgcgacatccgcatcaatgagttgctccagagtaccggcctggcgccgtttcgcgaccgtcctgcgggaaaactctccggcgggatgaagcaaaagctcggcctgtgctgcgcgcttattcacgacccgcagctgctgattcttgatgaacctaccaccggcgtcgatcccctctcgcgagcgcagttttgggatctgatcgacagcattcgccagcgtcagccggacatgagcgtgctggtcgccaccgcttacatggaggaggcggaacgttttgactggctggtagccatgaacgcgggggaagttctggcaaccggcagcgccgatgagcttaaagcgcatacggcaagtcagacgctggaacaggcgtttatcgctctgcttcccgaagcccagcgcctggcgcataaagaagtgatcatcccaccgcgcaatgccgatgaaagcgaaattgcgattgaagcgcgcgggctgacgatgcgcttcggtcaatttgtcgccgttgatcacgtcaactttcgcatcgcccgcggcgagattttcggcttcctcggatctaacggctgcggcaaatcaacaaccatgaaaatgctgaccggactgctaccggccagcgaaggcgaggcgtggctgtttggacaaccggtcgatcccagagatatcgaaacccgccgccgcgtcggctatatgtcgcaggccttctctctctatagcgaactgaccgtacggcaaaaccttgaactgcatgcccgcctgttccacattccggatgcggagatccccgggcggatcgccgaaataagccagcgctttatgctggaagaggtagaggataccctgcccgcttcgctaccgttaggtattcgtcagcggctctcgctggcggtcgcggtgattcatcgcccggaaatgttaattcttgacgaacctacctccggcgtcgatccggtggccagggatatgttctggcagctaatggtcgatctggcccgtcaggatcgggtgaccatttttatctccacccactttatgaatgaagcggaacgctgcgatcgcatttcgctgatgcatgccggaaaagtcctggccagcgatacgccgcaggcactggtcgaacagcgcggttcggccacgcttgaagaggcatttatcgcctggctacaggaggcggcagaggcgacgcagccgccagatgcgcaggctacagcggttcccgcgatagaacacaaaaccgaaagcagtgtgccgcgtcaggcgttcagcctgcagcgtctgtttagctacagtcgccgcgaggcgcttgagctgcgccgcgatccggttcgatcgaccctggcgctgctcggcacggtgatcctgatgtttatcatgggttacgggatcagtatggacgtcgaagatctgcgatttgcggtgctcgaccgcgaccagaccgtcagcagccagggatggtcgcaaaatatcgccggctcgcgctacttcatcgaacaaccaccgctacaaagctatagtgaactggacagaagaatgcgcaacggcgagctggcggtggctatcgagatcccgcccaactttggccgcgatatcgcccgagggacgccggtgcaaattggcgtctgggtggacggcgcgatgccgaaccgcgcggagaccgtacgcggctacgtgcaggccatgcatctggcctggctgcaggagatggccggccgccaggctagccccaatcgcgatacttcactgatttccattgagacccgctaccgctataacccggatgtgaagagcctgccggctattgttccggcggtgatcccgctactgttgatgatgatcccggcgatgctcagcgcgctcagcgtggtccgcgagaaagagcttggttcaatcatcaatttatacgtgacgccaaccacccgcagcgaatttctgctgggtaaacaggtgccgtatatcgtactggggatgtttaacttctttctgctctgcgcactgtcggtctttgtctttggcgtaccgcacaaagggagttttctgacgctcaccctggccgcgctgctctacgtcactatcgccaccggacttggcctgctgatttcaacctttatgaaaagtcagattgcggcgattttcggcaccgcgatcattacgcttatcccggcgacgcagttttccgggatgatcgaccccgtcgcctcgctggaagggcctgggcgctggattggccagatttatccaaccagccactttctgacgattgcgcgaggaacgttttccaaagcgctgaatctgaccgacctgtggggatcctttattccgctacttatcgcggttccgctggtgctgggcctgagcgtgtggctgttgaaaaaacaggagggataa

SEQ ID NO: 176456 - DNA, 1125 bp, Klebsiella oxytoca
atgcgcggactacgcaatatttataatttgggaatgaaagagctccgtagcctgctgggcgataaagcgatgctgacgttaattgtcttcgcttttaccgtctcggtttactcctccgcaaccgtcatgccgggttcgctgcatctggcgcccatcgctattgccgacatggataagtcgcagctttcatcgcgtatcatcaatggtttttaccggccctggtttttgcctccggagctgattacagctgatgagatggacgccggactggatgcggggcggtatactttcgccatcaatattccgccggattttcagcgcgacgttctggccggacgccagcccgagctgcaggttaacgtggacgcgacgcgaatgagccaggcgtttaccggcaatagctatatccagaatattgtcaccggcgaggtgaacagctttgtcgcccgctaccgggacaacggcacgctgccagttgagctggccgtcagaatgcgttttaacccgaatctggagcaggagcgtttcggcgccgtcatggcaatcattaacaatatcaccatgctggcgatcgtgctgaccgggtcggcgctgatacgcgagcgggaacatggtaccgtggagcacctgctggttatgccggtcacgccgttcgaaatcatgatggcaaagatatggtcaatggggctggtggtgctggtggtttccgggctctcgctgatgctgatggttcagggggttctgcaggtaccgatagagggctcaataccgctatttatgctgggggtagccctgagcctgtttgctaccacctcaatcggcatttttatggggacggtggcgcgttcaatgccgcagctggggctgctgatgattctggtgcttttgccactgcagatgctatccggcggctccacgcctcgcgaaagtatgccgcaggcagtacaggacattatgctcaccatgccgacaacccactttgttagtctggcgcaggctattctttatcgaggcgctgatttctctatcgtctggccgcagtttctgacgctgctggctatcggtggcgtgttttttactatcgcgctactgcgttttcgtaagacgatcggggaaatggcctga

SEQ ID NO: 176457 - DNA, 318 bp, Klebsiella oxytoca
atgaaaattctgattaactggcctcctttgcgccaactgataaattatatccaggagcgttttacctttctggttttgctctgctggccggcgattatctggctggtttgttggctgctcgtatggctaacggagagcgtaatgacgatgctgggcaagtcggtagaccactcatttaccgtgaatttacagccttttatgacgctaagtacgctgctgcgaatctccgttagctgggtgctgctgctatttatcctgttcagcatggcgatgggattcacctggctcctgcggcgctttatgaaccgtaagaaatag

SEQ ID NO: 176458 - DNA, 534 bp, Klebsiella oxytoca
gtgaaaactttgattctcttttccacccgcgacggacagacgcgcgagatcgcctcgtttttggcctctgaactaaaagagcaggggatcgattcggacacggttgatctcaaccgcactaacgaggtggagtggcctttatacgatcgcgttgtgataggcgcatcaatccgctacggtcattttcatccagcgctggaacggtttgtaaaaacgcatcttcaatcgctacaggcactgccgggggcttttttctcggttaacctcgtggcgcgtaagccagaaaaacgaacgccgcaaactaatagctacacgcgcaagtttctgctcaactcgccctggcagccccagcattgcgcagtgtttgccggtgcgctccgctatccacgctatcgctggtacgatcgctttatgatccgtcttattatgaagatgaccgacggcgagaccgatgtcagtaaagaagtggtctataccgactggcagcaggtaggcagatttgcgcgggaaattgcgcaaatgaccagcaaatag

SEQ ID NO: 176459 - DNA, 1452 bp, Klebsiella oxytoca
atgcattttcgcgcgataacccgaatcgttggactgttggtcattttgttttcggggacgatgatccttccgggattaatagctctgatatatcgtgatggtgcggggcgggcgtttacccagacctttttcgttgccctggccatcggttcgctgctgtggtggcctaatcgtcgtgagaagggagaactgaaatcccgggaaggatttctgattgtggttctcttctggaccgtgctgggtagcgtgggggcattgccgtttatctttgcggagcagccgaacctgacggtgacggatgcattctttgaatctttctccggtctgacaacgacgggggcaaccacgctggtggggctcgattcgttaccccatgctattcttttctaccggcagatgctgcagtggtttggcgggatggggatcatcgttctggcggtagcgatactgccgatactgggcgtcggggggatgcagctgtatcgggctgaaatgcccggaccgctgaaagacaacaagatgcggccgcggattgcagagacagcaaaaacgctgtggcttatttatgtcctgctgacggtggcctgcgcgctggccctgtggtttgccgggatgccggcatttgacgccatcggccatagcttctctactatcgcaattggcgggttctccacccatgatgccagcgtgggttactttaatagcccaacaattaactccattattgcggttttcctgctgatttctggctgtaactacggcctgcacttttcattacttagcgggcgcagcctgaaagtgtactggcgagaccctgaattccgtatgtttatcggcgtgcagtttacgctggtggtggtatgcacccttgtactgtggctgcatgacgtctatagctcggcgttaatgacggtcaaccaggcgtttttccaggtggtgtcgatggcgacaacggcgggcttcacgaccgacagtattgcgcgctggccgctatttttgccggtgctcctcctctgttcggctttcatcggcggctgcgccgggtccaccggcggtggactaaaggttatccgtatcctgctgctttttaagcaaggcaaccgcgagcttaaacgtctggtacaccctaatgcggtctacagtattaaactgggaaaccgtgcactgccggagcgtatcctcgaagccgtctggggattcttctccgcgtatgcgctggtgtttatcatcagtatgctggcgataattgctaccggcgtggatgatttctcggcctttgcttcagtcgtcgccacgctgaacaaccttggaccgggactgggcgtagtggcggataactttgccacgatgaaccctgtcgcgaaatggatcttgattgctaatatgctgtttggtcgtctggaagtgttcaccttactggtgctatttactccgactttctggcgcgaataa

SEQ ID NO: 176460 - DNA, 615 bp, Klebsiella oxytoca
atggaaagctggttgataccggccgagccggtcaccgtcgttgaagagatcaaaaagagccgctttattacgctgttggcccataccgatggcgtagcggcggcaaaggcgtttgtcgagtcagtcagggcggatcacccggatgcgcgtcatcactgcgtggcgtgggttgcagggccgccaaatgattctcagcagctgggtttttccgacgatggcgaaccggcgggaacggcggggaaaccaatgctggcgcagctaatgggcagcggcgtcggcgagataaccgctgtcgtcgtgcgctactacggtggtattctgctgggcaccggcggcctggtgaaagcgtatggcggcggtgtacatcaggcgctagcgcagctcacaacacagcgcaagacgccgctcaccgcatatactttgcagtgtgaatacgggcagttggccgggattgaaacgctgttggctcagttctcaggaaaaattgtcgaaagcgaatatcaggcgtctgttcagctgcgcgtggcgcttccccaggctgaagtggcgctattttcagcaaagctggctgattttagtcgcggttcgttgcaattactgaagattgacgaataa

SEQ ID NO: 176461 - DNA, 1332 bp, Klebsiella oxytoca
atggaatctctggccggtctctataaaaatcatatcgttaccttacaagaacgcacccgcgatgttctggcccgctttaagctggatgccctgttgattcactccggtgaactggtcaacgtctttcttgacgatcatccgtatccatttaaggtcaacccacagttcaaagcctgggtaccggttacgcaggttccgaactgctggctgctggtggacggcgtcaacaaaccaaagctgtggttctatctgccggttgattactggcataacgtagaaccgttgccgacgtcattctggaccgaagaggtggaggtgatcgccctgccgaaagcggatggtatcggcagccagctgcctgccgcgcgtggcaatatcgcttatatcggaccggtaccggaacgtgcgctggggctggatattgcggcggataaaatcaacccgaaaggggcgatcgattatctgcactactatcgctcttataaaactgactatgagctggcctgtatgcgtgaagcgcagaagtcggcggttaacggtcatcaggctgctcatgaagctttcctctccgggatgagcgagtttgatatcaaccaggcctatctgaccgcgaccggccatcgcgacactgatgtgccgtacagcaatattgtggcgctgaacgagcatgcctccgtactgcattacacaaagcttgatcatcgcgcgcctgcagagatgcgtagcttcctgctggatgcgggcgcggaatacaacggctatgcagccgacctgacccgtacctgggcggcgcatggcgataatgactatgctcagttgattaaagacgttaatgatgaacagctggcgctgattagcaccatgaaggcgggcgtgagctacgtggattatcatgtccagttccatcagcgcatcgccaaactgctgcgtaaacatcagatagtcaaagacatgagcgaagaagcgatggtggaaaatgacctgaccggaccatttatgccgcacggtattggccaccccttaggtctgcaggttcatgacgttgctggttttatgcaggatgataccggtacccaccaggccgcgccggcaaaatatccttacctgcgctgcacgcgcgttctgcagccgcgcatggtgttgacgatcgagccgggtatctactttatcgaatcgctgctggcgccgtggcgcgaaggacagttcagcaaacactttaactggcagaaaattgaagcgctgaaaccctttggcggtatccgtatcgaagacaacgtcgtgatccacgaaaacagcatcgaaaatatgacgcgcgatctgaaactggcgtaa

SEQ ID NO: 176462 - DNA, 2190 bp, Klebsiella oxytoca
atgctctacaaaggcgacaccctgtacctcgactggcgggaagacggcattgccgaactggtattcgatgcccccggctcggtcaataagcttgataccgcaaccgtagccagcctcggtgaagcgctggacgtgctcgaaaaacaaaaagatctgcaagggctactgctgcgctctgagaaagcagcctttatcgtcggtgcggatatcactgaatttctttccctgttcctggttccgcaagaacagttaagccagtggctgcatttcgccaatagcgtatttaatcgcctggaagatttaccggttcccactatttctgccgtcaacggctatgcgctgggcggcggctgcgaatgcgtgctggcgaccgattatcgcctggcgacgccggatttgcgcattggcctgccggaaacgaaactgggtatcatgccgggctttggcggctcggtgcggatgccgcggatgcttggcgcggacagcgcgctggaaatcattgccgcaggtaaagacgttggcgccgaacaggccttaaaaatcggcctcgtcgatggcgtggttaaacatgaaaaactgctcgatggcgcgatagcaattctgcgtcaggccattaaaggtgacctggactggaaggcgaagcgccagccgaagctggagcctcttcacctgagtaaaattgaagccgcgatgagttttaccatcgccaaaggcatggtggcgcaaaccgccgggaaacactaccctgcgcccattactgccgttaaaaccattgaagccgccgcccgctttggccgcgaagaagccttgaatctggaaaacaaaagttttgtcccgctggcgcataccaacgaggcgcgggcgctggtaggtatcttccttaacgatcagtatgttaaagcgaaagcgaagaagctgactaaagataccgacacgccaaaacacgcggccgtactgggcgcggggattatgggcggcggcattgcataccaatcggcatggaaaggcgtgccggtagtcatgaaagatatcaacgacaaatcgctgacgctcggcatgaccgaagcggccaaattgctgaataaacagcttgagcgcggcaaaatcgacggtctcaaaatggctggcgttatttccactattcagccaaccctggattacgccggctttgagcgcgtggacgtcgtggtcgaagccgttgttgagaatccgaaagtgaaaaaagcggtgctggcggaaacggaagacaaagtccgtccggatacagtgctggcatcgaatacctccaccattcccatcagcgagttggccagcgtactgaagcgcccggaaaacttctgcggaatgcacttctttaatccggtgcaccggatgccgctggtcgagatcattcgcggtgaaaaaagctcggacgaaaccattgcgaaagtggtcgcctgggccagcaaaatgggtaaaacgccaattgtggtcaacgactgccccggtttctttgttaaccgcgtgctgttcccctacttcgccggtttcagccagctgctgcgcgacggcgcagacttccgcaaagtcgacaaagtgatggaaaagcagtttggctggccgatgggcccggcctatctgctggacgtcgttggcattgataccgcgcatcacgcgcaggcagtcatggcggcgggcttcccgcagcggatgcaaaaagattatcgcgatgcgatcgatgcgctgttcgacgctaaccgtttcggccagaaaaatggcctcggcttctggcgctacaaagaagacagcaaaggtaagccgaagaaggaagaggatgccgcagtcgatagcctgctggaggaagtcagccagccaaagcgtgatttcagcgatgaagagattatcgcccgcatgatgatcccgatggtcaacgaagtggtgcgttgtcttgaagagggcattatcgccagcccggcggaagccgatatggcgctggtctatggtctcggcttccctccgttccacggcggcgcgttccgctggctggataccctcggtagcgcaaaatatctcgatatggcgcagcagtatcagcacctcggtccgctgtatgacgtgccggaaggattgcgcagcaaagcgcgtcataacgaaccgtactatcccccggttgagcctgcccgtgcgccaggcgagctgaaaacggcttaa

SEQ ID NO: 176463 - DNA, 1164 bp, Klebsiella oxytoca
atggaacaggttgtcattgtcgatgcagttcgtaccccgatgggccgttcgaagggcggcgcctttcgccatgtgcgcgcggaagatctctccgcgcacctgatgcgtagcctgctttcacgtaatccatcccttgaagcaagcgccattgatgatatttactggggatgcgttcagcagacccttgaacagggtttcaatattgcccgcaacgcggcgctgctggcggaaatcccgcattccgtgcccgccaacacggtcaatcgactgtgcggttcttccatgcaggcgcttcacgacgcggcccgcatgatcatgaccggcgatgccagcgtatgcctgattggcggcgtagaacatatgggccacgtcccgatgagccacggtgtggattttcacccgggcctgagccggaacgtcgctaaagccgccgggatgatggggctgaccgcagaaatgctggcgcgcctgcacggtatcagccgggaaatgcaggatcagtttgcagcccgctcccacgcccgcgcctgggccgcgacgcaatctggcgcattcaaaacggagattgttccgaccggcggtcacgacgccgacggcgtactgaagtcatacagctatgatgaagtgattcgcccggagacgacggtagaagcgctggctgcgctgaggcccgcgttcgatcccgtcaccggtaccgtaacggcgggtacctcttctgccctctccgatggcgccgcagccatgctgttaatgagcgaaagccgcgcccgcgagctgggcctgaagcctcgcgctcgcgtgcgttcgatggccgtcgtcggctgcgacccgtcaataatgggctacggcccggttcccgcgtcaaaactggcgctgaaaaaagccgggctcaccaccagcgatatcgatgtattcgagatgaacgaagcttttgccgcgcagatcctgccgtgcattaaagatctgggactgatggaacagatcgacgagaagatcaatcttaacggcggcgcgatcgccctgggccatccgctcggctgttcaggcgcgcgcatcagcaccacgctcatcaaccagatggagcgcaaagatgcgcagttcggcctggcgacgatgtgtattggtttaggtcaggggatcgcgacggtattcgagcgggtttaa

SEQ ID NO: 176464 - DNA, 312 bp, Klebsiella oxytoca
atgaaaacactccctttcatacttctgctcaccgcattctctggcgctgctcttgccagcgaacaggataacgctcaggcatgcctctcatggggaatcaataaaatggcgcagaatccggaaagcgagcggctcaaggacttgaccatcaccaatattaataccgaacgctatgatgagaagataggcagccagcatatcgcgacgcagttagccgccacgctggaaaaagaagggaaccccgtagggaaaatgctctgtttgctggaaaacgatcgaccgctgtacgtttactttagcgatgcgcgctag

SEQ ID NO: 176465 - DNA, 702 bp, Klebsiella oxytoca
atgacaaccttaagctgtaaagtgacctcggtggaggcgattaccgatactgtgtatcgcgttcgattagtgccggaagcggcgttttctttccgggctggtcagtatctgatggtcgtgatggacgaacgcgataagcgcccattctccatggcttctacgccgtcggaacaggagtttatcgaactgcatatcggtgcatctgaacttaatctgtatgcgatggcagtgatggatcggatcctgaaagagcgtgaaatcgaggtcgatctgccgcatggcgaagcctggctgcgcgatgatgaagaacgcccgctgattttaatcgctgggggaacgggcttctcttacgtgcgttcgattttgcttaccgcgctggcgcgcaatccaaaccgcgatatcgctatctattggggcggacgcgaagcgaagcatctctatgatctggcggaactggaagcattaagcgtgcagcatccgggcttacgcatcgagcccgtggttgagcagcctgacgctgagtggcgtggccgtaccggaaccgtactcaccgcggtcctgcaggattacggtacgctgggcgatcatgatatctatattgcaggtcgcttcgagatggctaaaattgcccgcgatctgttctgcaacgagcgcggcgcccgcgaagagcgtctgtttggcgacgcgtttgcctttatctga

SEQ ID NO: 176466 - DNA, 1470 bp, Klebsiella oxytoca
atgaaataccacgatctacgcgaatttctgacattactggagcagcagggggaattgaaacggatttccctgccggtcgatcctcatctggaaattaccgaaattgccgatcgcaccttgcgtgctggcggtccggccctgctatttgaaaatcctaaaggctacgcgatgccggtgctgtgtaatcttttcggcacgccgcggcgagttgcgctggggatggggcaggaggatgtcagttctctgcgcgaagtgggtaagctcctggcattcctgaaagagccggaaccaccaaaaggtttccgcgatctgtttgataagctgccgcagttcaagcaggtgctgaatatgccgactaagcgtctgcgcggggcgccatgccagcaaaaaattattcagggcgatgatgtcgatctggcccgcatcccgatcatgacctgctggccggaagatgccgcaccgctgatcacctggggcctgacggtgacgcgcggcccgcataaagagcggcaaaatctgggcatttatcgccagcagctgattggcaagaacaagctgattatgcgctggctatcgcatcgcggcggcgcgctggatttccaggagtggtgcgcagcgcgccctggcgagcgtttcccggtctccgttgcgctgggtgccgatccggcaaccattctcggggcggtgactccggttcccgacaccctctccgagtatgcatttgccgggctgctgcgcggtacgaaaaccgaagtcgtgaagtgcatctctaacgatctggaggtgcccgccagcgcagagattgtgctggaagggtatattgaagtcggtgaaatggcgccggaagggccgtatggcgatcatacgggctactacaatgaagtggataatttcccggtctttaccgttacccatattactcagcgtgaagacgctatctaccattcgacctacaccggacgtccgccggacgaacccgcggtactgggcgttgcgctgaacgaagtcttcgtccctattctgcaaaagcagtttcctgagattgtggatttctatttaccacctgaaggctgctcctatcgcctggcggtggtcacgatgaagaagcagtacgccggtcacgcgaaacgcgtcatgatgggagtctggtccttcctccgtcagttcatgtataccaagtttgttatcgtctgcgatgatgatgtcaacgcgcgtgactggaatgatgtgatttgggcgattactacccgtatggacccggcgcgtgatacggtaatggtagaaaatacgccaattgattatctggattttgcctcaccggtttccggtttgggttcaaaaatggggctggatgccacaaataaatggcccggtgagacccagcgcgagtggggtcgtccgattaagaaagatcctgaggtgacggcgcgcgttgacgccatctgggatgaactggccatcttcaaataa

SEQ ID NO: 176467 - DNA, 489 bp, Klebsiella oxytoca
atgcaagcctggtatttactttattgcaaacgtgggcagcttgagcgcgcccaggaacatctcgagcggcaggccgtcaattgcctgatgccaacgatcgaactggaaaaaatcgtccgcggtaaacgcacgacggtcagcgaacccctgttcccaaactatctgtttatcgagtttgacccggaagtgattcataccaccaccatcagcgcaacgcgcggcgtgaacagctttgtgcgtttcggcgcgctgcccgcgatcgtgccgtctgcggttattcatcagctctccatctacaaaccggaaggtattaccgacccggaaacgccgcatgaaggcgacagcgtgctgatcaccgatggcgcctttgagggtctccaggctatctttaccgaaccggacggcgaagcccgctctatgctgctgctgaatctgcttaacaagcaggtattacaaagcgtcaaaaatactgacttttataaaatctga

SEQ ID NO: 176468 - DNA, 783 bp, Klebsiella oxytoca
atgtttgatatcggcgtgaatctgaccagctcgcagttttcccgcgatcgggacgaggttattgcccgagcccgggcggcgggagtcacaggaatgctgttgacggggaccaaccttcatgaaagcgcgcaggcgcagcagctggcgcatggttattccggatgctggtcaacggccggtgttcatccccacgacagccgcagctggacggaatcggccgcggcagcggtctacgagctggcccgcgagccagaggtcgttgcgattggcgaatgcgggctggatttcaaccgcaacttttcaacgcctcacgagcaagaggcggcgtttagcgcccagctggcgctcgctgcggaactgtcgatgccggtatttttgcactgccgcgatgcgcacgaccgtttcctggccctgctaaccccgtggcttgataagcttccgggggccgtggtgcattgctttaccggtagccgcgaagagatgcgcgaatgcgtggagctgggattatttattagcattaccggctgggtatgcgatgagcgtcgggggctggagctgcgggctctcctggccgatatcccggccgatcgcctgctgattgagaccgatgcgccgtatctgctgccgcgggatatgcagccaaaacccgcttcccgccgcaacgagcctgcatatctgccgcatattctgtctcgtatcgcggagtggcgcggagaagaagcgccgtggctggaagagattaccgatgctaacgtcagaaggctctttggcgtgcgtttttag

SEQ ID NO: 176469 - DNA, 774 bp, Klebsiella oxytoca
atgggcgtagacgatactcaaccgctaattacgcatctgattgagctgcgcaagcgcttaatcaacagcattcttgcgattctggtcattttcctggcgttggtttatttcgccaatgacatctatcagctggtttctgcgccgcttattcggcagatgccggttggcgcgactatgatcgcaacggatgtggcctcgcctttcttcacgccgatcaagctgaccttcatggtatcgataattttgtcggtgccggtcattttgtatcaggtttgggcctttgtggcgccagcgctgtataagcacgaacgtcgattggttatgccgctgctggtctccagtacgttgctgttctatatcggcatggcttttgcctactttgttgttttcccgctggcgtttggttttctgacccatgcggcgccggaaggcgtacaggtctcgaccgatattcgcagctacctcgactttgtgatggcgttgtttatcgcctttggcgtctcatttgaggttcccgtggccatcgtcctgttgtgctggatgggcgtcaccacgccggaagacctgcgtaagaaacgcccctatgttctggttggcgcatttgtcgttgggatgctgctgacgccgccggatgtgttctcgcaaacgctgctggcgattccgatgtactgcctgtttgaagtcggggtcttcttcgcgcggttctataccggtaagcgcctgacgcgtgacgaggatgccgcagccgaagaggcgcagggcaaagaagaataa

SEQ ID NO: 176470 - DNA, 540 bp, Klebsiella oxytoca
gtgttcgatatcggttttagtgaacttctgctggtattcgtgattggcctcatcgttttggggccacagcgactaccggtagcggtaaaaacggtagtcagctggatccgtacgctgcggtcgctggcggctaccgtacaaaatgaaataacccaggaattaaaactgcaggagtttcaggaaagccttaagaaggtggaaaaggccagtctggataacctgacgcctgagctaaaagcatctatggatgagctgcgagaagcggctgaatctatgaagcgatcctattccgcccacgatcctgaaaaagccagcgacgaagccaacacgattcataacccggttgtaaaagggagtgaagagcagcgcaaggacgtgacgccagcaacggctgaacatcaggccagcgcgcctgagcacgtacctgaacccgtgtctgaagagctccccgtttcgcagagtgaaatcccggcagagaaagtaaaagttgccgtggcggcttccgattcctcctcccccgtatcgagtgataaacagtaa

SEQ ID NO: 176471 - DNA, 252 bp, Klebsiella oxytoca
atgggtggtatcagtatttggcagttactcattgttgtcgtcattgtggttctgctttttgggacaaaaaagctgagctcgctcggttccgatttgggggcgtcgatcaaaggttttaaaaaggccatgagcgacgacgataaaccggaaaaatccgcgccggatgcagatttcgcggcaaaaacccttgctgataagccggatgacgcaaaaaaagacgagactaaacgccacgacaaagagcaggtgtaa

SEQ ID NO: 176472 - DNA, 1641 bp, Klebsiella oxytoca
atgacgccaggagaattacggcgcctgtatttcatcgtccacacctttttgagctacgggcttgatgagctcattcctaaaatgcgtatcacgctgccgctgcgaatctggcggcggatgctgttctggatgccaaaccgccataaagaacgtcctcttggcgagcgcctgcgtcttgcgctgcaggagctggggccggtgtggatcaagtttggccagatgctctcgacccgtcgcgacctgttccctccccacattgccgatcaactggccatgctgcaggatcgcgttgcgccttttgatggtctgcaggccaaaaagcaaattgagcaagccatgggcggcctgccggtagaagcctggtttgatgatttctctgttgaaccgcttgcttccgcttctattgcccaggtgcataccgcgcgcttgaaagagaacggcaaagaagtggtcattaaagtgatccgcccggatatcgtgccggttatcaaagcggatatgaagctcatctaccgccttgcccgctgggtgcctcgtctgttaccggacggtcgtcgcctgcgcccgcaggaagtggtgcgtgaatacgaaaaaacgctgctggatgagctcaacctgctgcgtgaatcggctaacgctattcagctgcggcgcaactttgaagatagcccgatgctttatgtcccggaagtttactcggactactgcagtgaaggcatgatggtgatggagcggatttacgggatccccgtttccgacgtcgccgcgctggaagcgcaggggaccaacatgcagctgctggctgagcgcggcgtgcaggtcttctttactcaggttttccgcgacagcttcttccatgccgacatgcatccgggcaacattttcgtcagtcgtaaccacccggaagacccgcagtatattggtatagactgcggtatcgtcggctcgctgaacaaagaagataaacgctatctggcggaaaactttattgccttcttcaatcgcgactaccgtaaggttgcggaactgcacgttgattccggctgggttcccgcagataccaatgtcgaagagttcgaatttgccattcgtaccgtctgcgagcctatttttgaaaaaccgctggcggaaatctcgtttggccatgtgttgttgaacctgtttaacacggcgcgacgtttcaatatggaagtgcagccgcagctggttctgctgcagaagacattactttacgtagaaggagtaggtcgccagctctatcctcagttagacttgtggaaaacggcgaaaccgttccttgagtcgtggattaaagatcaggtgggcattccggctctggtgcgggcttttaaagagaaggcgccgttctggattgagagaatgccggaaatacctgagctggtgtatcagagcctgcagcaaagcaagcagttacagaatagcgtcgataccatcgtgcgcgacatccaggtgcggcacgtgcgccaggggcagtcccgttatctgtttggtataggcgcggttttattactgagtggtacgctgctgttcatccaccgccctgagtggggcatgatgcccggctggctgatggccgctggcgtcgtaacctggcttatcggctggcgtaagacgaactga

SEQ ID NO: 176473 - DNA, 606 bp, Klebsiella oxytoca
atgcctttcaaaccactggttaccgccggtcttgagacggttctgaataccttcctctggcgcgatcgggcgttgaaacctgcccgtcagcgtctgctggggaaagtgctgcgtgtcgaactgcaggagctctccgaacccgtggtgctggtttttagcgagcgccaggtcgatgtgctgggggcgtgggaaggcgaggcagactgcaccgtgcgtactcgcctgagcgtgcttccgcagctacgtaatcgccagcagcttaccgcgctgattcgcagcggcgatcttgaagtgcagggcgatctgcaggtggtacaaaataccgttacgctgtgcgatctcgcggagttcgatccggctgaactgctcgccccgtataccggggatgtggttgcggaaggctttagtaaagtattccgcggcggtgctcgttttcttctgcgtggtgctcagcgccagcagcgctatgttgcggaagcgattaccgaagagtggcgcctggcgccgggtccgctggagctggcctggtttgctgaagaaaccgcagccgttgagcgagcgctggccgcgctggaaaaacggctggaaacgctggagggcaaatga

SEQ ID NO: 176474 - DNA, 756 bp, Klebsiella oxytoca
atggttgaggattcacaagaaacgacgcattttggctttcagactgtcgccaaagagcagaaagctgacatggtggcgcatgtatttcattctgtggccgcaaaatatgacgtaatgaacgatctgatgtcgttcggtattcatcgtttgtggaagcgtttcaccatcgactgcagcggcgtccgccgtgggcaaaccgtgttggatctggccggaggaaccggcgatctgacggcgaaattttctcgcctggtcggcgaaaccggccgcgtgatgctggcggatatcaacgactctatgctgaaaatgggccgtgaaaagctgcgcaatatcggcattgtcggcaacgtggaatacgtccaggcgaacgccgaagcgctaccttttgcggacaacacctttgactgcattacgatttctttcggtctgcgtaacgtgacggataaagaaaaagcgctgcgctctatgtaccgcgtattaaagccgggtggccgtctgctggtgctggaattctcaaaaccgattattgagccgcttagcaaagcctacgacgcctattccttccatatcctgccgcgcgtaggcgagctggttgcgaaagacgccgaaagctatcgttatcttgctgaatctattcgaatgcatcccgatcaggacacgctgaaaggcatgatgcaggatgcaggatttgaaaacgtcgactactacaacctcacggcaggcatcgttgcgctacaccgcggttataagttctga

SEQ ID NO: 176475 - DNA, 1449 bp, Klebsiella oxytoca
gtggatatctcaattattattagtgccgtcgtggcgctggccgtggggctgattgtcggctggctggcgaccaaagcgcacgccgatcaaattcgcgccgatctcatcgaagagcggcgcgagctggatattgagctgagcgccacccgccaacggctggtacaggagtctcactggcgcgaagagtgtgaactgctgaataacgagctgcgcagcctgcgcgaaatcaacgcctcgctggaagctgacctccgcgaagtgaccactcgtcttgaatccactcagctgcatgcggaagacaaaatccgccagatggttaacagcgagcagcggcttagcgagcagtttgagaatctggcgaaccgtatttttgagcacagtaatcgccgggtagatgagcagaaccgccagagcctgcatggtctgctgacgccgctgcgcgaacagctggatggctttcgtcggcaggtgcaggatagctttggccaggaagcgcgggagcgtcacaccctggcccatgaaatccgcaatcttcagcagctaaatgcgcagatggcccaggaagcgctaaatctgacccgcgcgctaaaaggcgataacaaaactcagggcaactggggcgaggtggtgttgacccgcgtactggaagcatcggggctgcgggaaggccatgaatatcaaactcaggtgagcatcgaaacggaaaaccgcgcgcggatgcagcctgatgtgatcgtccgtttgccgcagggaaaggatgtggtcatcgatgccaaaatgaccctggtggcctatgagcgctacttcaacgctgacgaagattacacccgagaggcggcgctgcaggagcatattgcttccgtacgcaaccatatgcgcctgctgggacgcaaagattatcagcaactgcctgggctgcgctcgcttgactatgttctgatgtttatcccggtggaaccggccttcctgctggcaatcgatcgccagccggaactcattagcgaagcgctgaaaaacaacatcatgctggtgagcccgaccacgctgctggtggcgctacggaccatcgccaatctctggcgctatgaacatcagagccgtaacgcgcagaaaattgccgaaagagcggggcgtctgtatgacaagatgcgtctgtttgttgacgatatgtcggccattggccagagcctggataaagcccaggataactaccgtcaggcgatgaaaaagctcgcctccgggcgaggtaacctgctggtgcaggcggagtcatttcgcgggctgggggtggaggttaaacgtgggattaatcctgacttagtcgaacaggcagccgcgcaggatgaagaatacttccttacagatgacggtaacgcgcaggaagataaagacttttctgccgataaggccgttgccgctgcgtatgagaaccgtcctcagccgcgttga

SEQ ID NO: 176476 - DNA, 762 bp, Klebsiella oxytoca
atgtccaagtctgatgtttttcatctcggcctcaccaaaaacgatttacaaggggctacgctggctatcgtccctggcgatccggagcgtgtggaaaagatcgccgcgctgatggataagccggttaagctggcatctcaccgtgaattcaccacctggcgcgccgagctggatggtaaagcagtgattgtctgctctaccggtatcggcggcccatcgacctctatcgccgtggaagaactggcccagctcggcatccgtaccttcctgcgtattggtaccaccggcgccattcagccgcacattaacgtaggtgatgttctggtgaccaccgcttctgtccgcctggacggtgctagcctgcactttgcgccgatggagttcccggcggtggctgattttgaatgtactaccgcgctggttgaagcggcgaagtctattggcgcgactacccatatcggcgtgaccgcctcttccgacaccttctatccgggccaggaacgttacgataccttctccggccgcgtcgttagccgctttaaaggctcgatggaagagtggcaggcgatgggcgtaatgaactatgaaatggaatccgccactctgctgaccatgtgcgccagccagggcctgcgcgccggaatggttgccggggttatcgtcaaccgtacccagcaggagattccgaacgcggaaaccatgaagcaaaccgaaagccacgcggtgaaaattgtcgtggaagcggcgcgccgcctgctgtaa

SEQ ID NO: 176477 - DNA, 813 bp, Klebsiella oxytoca
atgacgacaatcaagccaaccggctttgcacctgcagccacgccgcacgcctcaactgccgttcacacatcagatgagaacatcgtctccggggagacatccatcccttcgcagggagataacatgccggcattccatgcccgcccgcgcagcgtcgacggttcgctgccggtggttatcgtggttcaggaaattttcggcgtgcatgaacatatccgcgatatctgccgccgtctggcaaaggaggggtatctggctatcgcaccggagctgtacttccgccagggcgatcctaacgattacagcgacattccttctctgttccaggggctggtcacaaaggtgccggattctcaggtgctggccgacctcgatcacgtggctagctgggcctaccgccacggcggcgacgcccaccgtctgctcattaccggtttctgctggggcgggcgcatcacctggctgtacgctgcgcataacccgcagctaaaagccgccgtcgcctggtacggcaagctggtcggcgaaaaaacgcttaattcgccgaagcatccggtcgatgtcgccgtcgatctgaatgcgccggttttagggctgtatggcgcaaaagatgacagcatcccacaggatacggtagaaaccatgcgccaggcgctacgggcggccaacgccacggcggaaattgtggtttatccgcaggccggccacgcttttaatgccgactatcgcgccagctatcatgaagagtcggcgaaagacggctggcagcgaatgctggcgtggtttgcgcagtacggcggtaagcgggggtaa

SEQ ID NO: 176478 - DNA, 690 bp, Klebsiella oxytoca
atgattgaacgccacgagcaaaagaagtatttacgttttgccattaatctgggcaacccggttcttacgatactgtcgccagatggatcgccgggggggataaccgtcgaactggcaaagaaactggcgactgagagccagcgtgaagcgcggttggtgacctggccaacggccgggcaggtcgtggatgcggcgctgatggatcaatgggatatcgcttttctggctatcgacccggcgagggaagataagcttcgctttacgccctcctacatcacgatcgagagttcgctgatggttaaaaaagagagcaagattcaatcggttcaggagatggaccgcgaaggttcagtaatcaacgtgggcaaaggtgcggcctacgagctgtatctgattcgcacgctgaaacatgcgacgctgcgccaatatgccacttcgcaggatgctatacaggcgttcatcaacggcgaaggtgatatggtggccggtattcgtcagcctctggagaaagccgcgcgggataatccacagtttcgcgttttacccgatagttttagccagatacatcaggcgatatgcgtgccgcgcaatgcgacacagcactatgaatttatttgccgctgcctttcttcatggatagcggacgggactattgccgggatggtgagtcaccatatcggcaatagttga

SEQ ID NO: 176479 - DNA, 1293 bp, Klebsiella oxytoca
atgattcatggctgccacgtgatggcaaagccgagcggctcggtgtgtaacatcgattgcacctactgcttttatctggaaaaagaagcgctttatccggaacggaataaaaactggcgcatgtccgatgagacgctggaaaactatattcgccagcatattgccgcccagtccggcgatgcggtgacctttgcctggcagggcggcgagccgaccatgatggggctgccgttttttcgccgggtcgttgagctgtgcggccagtacgccaacggtaagaagatagaacatgcgctgcaaactaacggcgtcctggtggacgaagagtgggcgcgtttttttgccgaacagggttttctggtgggtttgtcgatagacggcccggcgcatctgcataaccagtaccgcgttaaccgcgccggaaagggtacccacgaaaaggttgttgcggcgatggcgctgctgaaggcgcataacgtcgagttcaataccctgaccgtcgtcggcaagcataacgtcgatcatgcccgtgaagtgtatgatttcctgctggcggccggttcgcgctatatgcagtttatcccgctggtcgaacggatgagcagcgacgcctcggcgccgctccagctggtgctcccgggtgagagcgcggcgcggctggcgccctggacggtaccctcctggcagttcggcgagtttcttaaccaaattttcgatatctgggtgcgtcgcgacgtcgatcgcgtctacgtgcagatgtttgacgttgccctggcggcatggaccggtcagccgccggtgctttgcgtacattcgccaacctgcgggcacgcttttgcgctggaatcgaacggcgatctgtataactgcgatcactttgtttatccggagcataagctgggtaatattcatcagcagagcatccgcgagctgaataatagcgagcaggccatcgcctttggtcaggcaaaacaagagacgctaacggcggattgccgcagctgcgagtttcgctttgcctgccacggcggttgtccgaaacatcgcttcgccgtttccccgagcggtcgccccggccatagctacctgtgcgcaggctaccagcactttttcaaacacgtgacgccgtatatgaacgtctggcggcagcttctggaaaacggctatccgctcccggccatgatgcagtggctggcgcaagaagagcagcagccgaaaacggcttcccgcaacgacccttgcccctgcggcagcgggcgtaaatataaaaaatgctgcggcgcgcagcattga

SEQ ID NO: 176480 - DNA, 723 bp, Klebsiella oxytoca
atgaaagaagaactggactattctcgcggcgcgaaaccattgtacgcccagcttcacgatatcctgctggaaaagctgagaaccggggcctacaaaaagaatgatgtcctgccgaccgaagccgagtttgaagaactgttcggcgtcagccgcatcaccgcccggcgcgcgctggccgagctggccgcgaaagggctggtaaaacgccaggctggaatcggcactatggttatcagcacctcagagaaacagggcgtcaaaacccgtatccggctggttgatggccagcagcagcactctatttcgcgacataatctgacactcgagcagctgttgccgccggcggaagtggcgcaggccttcgctctcccggcggggcagaaaattcagcgtctcacccgcacgatctatcgacaaaatgaactgcccgcgcaggtaaactatatctggctgacgccgcgtctgggcgagctgactttagacgcgtttaaagaaggtttgtatagtgcgctggaacagcgcggcgagaatattgacagctataaagacaccattaccgccgagctgccgacggcccaggactgcgacattctgcaggttgccgcaggcgagccgctgctggtgaagactcgccagggatttaacgatcgcggcgagctggtggaatataccatcgcccgccatatcgccagctgctatcagtacattgtagagaacagttaa

SEQ ID NO: 176481 - DNA, 1746 bp, Klebsiella oxytoca
atgaaagcgataatgttgatgtttgattcgctgaataagcgcctgctgtcggcctacggcagcgacagggcgatcacgccgaatttccagcggctgagggagcgtacggttcgttttgacaacggctatgtcggcagcatgccctgcatgcccgcacgccgggagctgcataccggacgctataactttttacatcgcggctggtcgccaatcgagccgttcgatgattcggttcccgagctgctgaagaagaacggtattcacacccacctggtgacggatcacaaacactactggcgcgacggcggagcgacctatcactctcgctacagcacctacgagtttgtgcgcggtcaggagggcgatgcctggaaaggggtggtggataagccgcaatatcgctacgaatccggcgagccggaggagatcaaacagcggcggatcgccagccggattcagcatcagatcaacgtgcagtttatgcagaacgaagaggatcatcatctggcgaagacgatcggcaaagggctggggtttatcgacgccaaccatgccagcgataactggtttctgcagctggagtgtttcgacccgcatgagccgtttttcgtgccggaaaaatatctcaagatgtacggcattgacgatcctgcgcagttcgacggctggccgccttactacttcgtcaccgaaagcgacgaacgcaagagcatgatccagaaatactatatggcgctgctgacgatggtggatgcgtacgtcggtaaggtgctggactatatggatcgttacgatctctggcgcgacacgatgctgatcgtcaacaccgaccacggttttttgctcggcgagcacgagtggtgggggaaaaatattatgccgctgtataacgaagtggcaaatattccgctgtttatctggcatccgcagtatggcggcgcgggcgagtctcgtcaggcgctggcgcagaccatcgatatcgccgcgacgctgctggattgttttggcctgaataaaccggcggatatgcagggcgtgtcgctgctgcccgcgctgcgcgacgataccccggtccgcgactatgctctgtttggctatcacggttgccatattaatattaccgatggtcgctacgtctatatgcgctcgcccgttgagcaaggcgtcgatggcctgttcgaatacaccctgatgccgacccgtatcaatcgtcgcttcacgccgcaggagctgcgcgaaacgacgctgcatccgccgtttcgctttaccaagggctgtccggtaatgaaaattcccgctgagtcggtgatgacccgcggcgccgatcgcttcggtcatcgactatatgatttacacaccgatccgacgcagcaaacccagtgccgggatgaacacgcggcgcggcggctgcgggagcagatgatctgcatgatgaaggagaacgatgcgcccgctgagctgtacgcgcgctatggcctggatgatgcgcaaagcccgctgctggggctggatccgcacctgctaccggagctggccgcctttacgccgcaggtgcgctacggcctgtttgcgctactgcagcatctggagggcagcgggcagcatgttctggctgacaaactgcgggccgcctgtcagccggactgggcgcggcaaaatttgtgggctttcgtgcagaacgaggttccggaggagcagcatcagagcgtgtactataagatggcgttagaaatgcgacttgattaa

SEQ ID NO: 176482 - DNA, 1416 bp, Klebsiella oxytoca
atggactacaaccaggtggcaaacgcgattgtggggcactgtggcggcttagctaattttctgcatgtgaccaactgtatgacgcgcgtacgaatgacgataagcaatcaaacacgagtcaatatcgccgcgcttaaaagcattgaaggcgtactcggggtcgttgaggacgataccctgcaggttattgtcgggccgggaaaatcgtcgaaggtcgcaaatgtgattaacgatctgcttaagggccagcctgcggacgctactccgttaagcaacgttgagcaaaaagctcagctggcgcgggaaaaggcgaaaaaacagacccgcaccaaagttatccttaagcatattgccaatatttttgtgccgatcctgccatcgttgattgccgccggtatcctgatgggaattaataacgtgctggtgaactcagccgcttcctgggcgctggcgcatcatgtggcggcgccgggagacctgtcgcctacccaggcggtgctcgatcaacggcatatgctcggcatcagccagttccttgatatcgtctctaaagcgctgttcggcttcctcgccatttataccggcgtgacggcggcgaaggagtttgacggaaacgcggtgatgggcggcctgctgggggcgatcaccatcgtgccgcagattaccgcgctggggctgatcccggggcagggcgggctgattggcgtcattctttgcgcctggctaatgtgcctgctggaaaaacgggtgcggcgctttgtcccggatattgttgatgttgtggtcacgccaactatcgtgttggtggtgatggcagcggcgctgctgctggtgattatgcccgtggcgggcgtcatttctaacggtattctgcacgggctaaacggcctgctctctaccggcggcattgcggctgggtttgtcctctccgcgcttttccccttcctgatttcgcttggtctgcatcacggcctgttccctattcatctggagatgattaacgcgaccggccacgcgccgctctttgccatccagattatgtccaacgccgggatggtgggtgccgcgacggcggtgctgctgctgacgcgcgacccgatgatgaagaaaatcgctaaaggggcgatcccgacctccattctggcggtgggtgaaccgaccattttcggcgtcaatattccggcaggatttgcctttataaccggctccatcggcgctggtttcggcggaatgatggtggtgctgctgggcgtctcaaccaacggcgttggcgccgccgggctgtccgcgctgccgctcatcgccgacggcaaatatttgcagtacatcatctcatggttaaccggctgcgctgcagccttcgtgctgacctatatcgtcggcaaagtacgcggttacgataaagaaacggcgtga

SEQ ID NO: 176483 - DNA, 2262 bp, Klebsiella oxytoca
atgacaattattaatcacaccctcggtttccctcgcgttggcctgcgtcgcgagctgaagaaagcgcaagaaagctattgggcgggcaatatcagccgcgaagaactgctggccgttggccgggaactgcgcgctcgccactgggaacagcaaaagcaggcgggcgttgatctgctgccggttggcgatttcgcctggtacgaccatgttctgaccaccagcctgtggcttggcaacgtgccggctcgtcatcagaacaaagacggctccgttgatatcgatactctgtttcgcatgggtcgcggccgcgcgccgaccggcgaaccggccgcggcggcggaaatgaccaaatggtttaacactaactaccactacatggtgccggaattcgtgaagggccagcagttcaaactgagctggaaccagctgttggatgaggtggacgaagcgctggcgctgggccacaaagtgaagcccgtcctgcttgggccagtcacctatctgtggcttggtaaggtgaaaggcgagtcgttcgatcgtctgaacctgctgcacgatattctgccggtttaccagcaggtgctggcggagctggcaaaacgcggcattgagtgggtgcagattgatgaaccggcgctggtgctcgagctgccgcagacgtggctggacgctttcaaaccggcttatgaggcgcttaatggccaggttaagctactgttgaccacctactttgaaggcattaccgataacctcgacaccattaccgcgctgccggtgcagggtttgcatgtggatctggtccatggccaggatgatgtcgtcgaactgcataagcgcctgcctgccgactggctgctctccgcgggcctgatcaacggtcgcaacgtctggcgcgccgatctgagcgaaaaatacgcgcaggttaaagggattgtcggcaaacgcgagctgtgggtcgcctcttcctgctccctgctgcacagcccgatcgatttgagcgtggaaacgcggcttgatgccgaagtgaagagctggtttgccttcgccctgcaaaaatgccaggaactggcgctgctgcgcgatgcgctgaacagcggcgacaccgctgcgattgctgactggagcgcaccgatccgggcccgtcgctattcaacccgcgtgcataacgcggcggtagagaagcgtctggcagccataaccgctcaggacagtcagcgtcaaagcggctacgaagttcgcgccgaagcgcagcgcgcccgctttaagctgccggcctggccgaccaccaccatcggttctttcccgcagactcccgagatccgcggcctgcgtctggacttcaaaaaaggccatctcgacgctaaccgctaccgcaccggcatcgctgaacacatcaagcaggcgatcgtcgagcaggagcggctggggctggacgtgctggtacacggtgaggccgaacgtaacgacatggtggaatattttggcgaacatctggacggctttatcttcacccagaacggctgggtacagagctacggttcccgctgcgttaagccgccggtggtgattggcgacgtcagccgtccggaggcgatcaccgtcgagtgggcaaaatacgcacagtcgctgaccgacaaaccggtaaaaggcatgttgaccggtcctgtgaccattctttgctggtccttcccgcgcgaggacgtcagccgtgaaacgattgcgaaacagattgccctggcgctgcgcgacgaagtggcggatctggaagccgccggtatcggcatcatccagattgacgaaccggcgctgcgcgaagggctaccgctgaaacgtagcgactgggaggactatctggcgtggggtgtggaagcttttcgcatcaatgccgcggtggcgaaagatgacacccagatccatacccatatgtgctattgcgagttcaacgacatcatggactctatcgccgcgctggatgcggacgtgattaccatcgaaacctcgcgctctgatatggagctgctggagtcgtttgaagagttcgactatccgaatgaaatcgggccgggggtgtacgatattcactcgccgaacgtcccagacgtggagtggatcgaggcgctgctgaagaaagccgcgcagcgcatcccggcagagcgcctgtgggtaaacccggactgcggcctgaaaacccgcggctgggcggaaacccgtgctgcgctggccaacatggttaaagccgcgcagaacctgcgtcaggcatag

SEQ ID NO: 176484 - DNA, 954 bp, Klebsiella oxytoca
atgatcgaaattaaacacctgaaaacgctccaggcgttgcggaacagcggttcgctggcaggcgcagcagcggccctgcaccagactcaatccgccttgtcccaccagttcagcgatctggaacagcgccttggcttccgtctgtttgtgcgtaaaagtcagccgctgcgctttacgccgcagggtgaaatcctgctccagctggccaaccaggtgctgccgcaaatcagccgcgccctgcaggattgcaatgagccgcagcaaactcgtctgcgtatcgccatcgaatgccatagctgtatacaatggctcacgccggcgctggagagcttccgcgcccgctggccgcatgtggaagtggactttcagtccggcgtgatcttcgacccgcagccgggcctgcagcagggtgagctggatctggtcatgacctccgatatcctgccgcgcagcggtctgcactattcgccaatgtttgatttcgaagtgcgtctggtgatggcgccggatcatccgctggcgacaaagacgcgcattgcgcctgaggatttagcaaccgagatgctgctgatttacccggtccagcgcgctcgtctggatatctggcgtcacttcctgcagcctgcggggatcagcccgcagctgaagagcgtcgacaatacgctgctgttaattcagatggtggcggcgcggatgggcatcgccgccctgccgcactgggttgtggaaagctttgagcgccagggtctggtggtgaccaaaaccctgggcgagggactgtggagccggctatacgccgcggtacgcgacggcgaacagcgccagccggtgaccgaggcgtttattcgctcagcgcggaaccacgcttgcgaccatttaccgtttgtgcggagtgcggagcgacccagcgtcgatggacccacagcgaggccaggatcaccagagctcccgtaa

SEQ ID NO: 176485 - DNA, 900 bp, Klebsiella oxytoca
gtggcgctactgataatcaccacgattctgtgggccttctcttttagcctctatggcgaataccttgcaggtcacgtcgacagttatttcgcggtgctggcgcgcgttggtctggcggcgctggtctttttacctttcctgcgcacccgcgggcaaagcctgtcaaccatcggcctgtatatgctggtgggggcgatgcagctcggcattatgtatatgctgagtttccaggcctatctgtacctgacggtatctgaactcctgctgtttaccgtcctgacgccgctctatatcacgctgatttatgatgtaatgagccgccgccgcctgcgctggggctacgcctgcagcgcgctgctggcggtgatcggcgcgggtattattcgctacgaccaggtgacaaatcatttctggaccggtttgatcctggtgcagctctccaatatcagcttcgcgattggcatggtgggctacaagcgcctgatggaaacgcgtccgatgccgcagcataatgccttcgcctggttctatgtcggggcgtttctggtggcggcggttgcctggtcgatactgggcaatgcgcagaaaatgccggaaacttctctacagtggggcattctggtgttccttggcgtggcggcatcggggatcggctacttcatgtggaactacggcgccacccaggtggatgccggtacgctcggcatcatgaacaatatgcacgtacctgccgggctgctggtgaatcttgctatctggcaggagcagccccgttggccaagttttattacgggagctctggtgatcctggcctcgctgtgggtccatcgacgctgggtcgctccgcactccgcacaaacggtaaatggtcgcaagcgtggttccgcgctgagcgaataa

SEQ ID NO: 176486 - DNA, 822 bp, Klebsiella oxytoca
atgtaccaggttgttgcgtctgacttagatggcacgctgctttctcccgatcactgcttaaccccctacgccaaagagacgctgaaactgcttaccgcacgcggtatcaatttcgtgttcgcgaccggccgccactacatcgatgttgggcaaattcgcgataatctcggcattaaatcctatatgatcacctctaacggcgcccgcgtacatgatagcgacgggaagcagatcttcgctcataaccttgatcgcgatatcgccgctgacctgttcgagatgatgcgaaacgatccggcgatcgtaaccaacgtttatcgtgaagatgagtggtatatgaaccgccaccgtccggaagagatgcgcttcttcaaagaggcagtgtttaactacaagctgtacgagccgggcgagctggacccggaagggatcagcaaagtctttttcacctgcgataagcatgagcatctgctgccgctggagcaggcgatcaatgcccgctggggcgatcgggtgaacgtgagcttctctaccgtcacctgcctcgaagtgatggcgggcggcgtgtcgaaaggccatgcgctggaggccgtggcgaaaatgctcggctatagcctgaaagagtgtatcgccttcggcgacggtatgaacgatgcggaaatgctgtcaatggcgggcaagggctgcattatggccgacgcgcaccagcgcctgaaggacctgcatccagagctggaagtgatcggcagcaacgctgatgacgccgtaccccactatctgcgtaaactctatctcgacgaaaaaagcttgacgactgagtaa

SEQ ID NO: 176487 - DNA, 993 bp, Klebsiella oxytoca
atgtttttgcagcaaaaggactgggaaacacgagaaaacgcgtttgcggcttttaccatggggccactaaccgatttctggcgtcagcgggaagaggctgaatttacgggcgtggatgacgttccggtgcgctttgtgcgcttctgcgccaaaagtcacgaccgggtcgtggtgatctgtccgggtcgtattgaaagctacgttaagtacgccgaactggcttacgatcttttccgcagcggctttgacgtgatgattatcgatcatcgcggccaggggcgttccgggcgcatgctttccgatacccaccgcgggcacgtcgtaaatttcagcgattacgttgacgatctcgccgctttctggcaacaacatgtcgtgccggggcactggcggaaacggtttattcttgcccattccatgggtggcgctattgcgacgctatttttgcagcgccaccaccagcattgcgacgcgatggcgctctgcgcgccgatgttcggcattgttatgcgcctgcctgactggatggtgcgccacattctcgattgggctgagggccatcagcgcattcgtgaagagtatgccctcggtaccggccgctggcgggcgctgccctttgcggtcaacgtactgacgcacagccgtcaacgctatcgtcgcaacctgcgtttttacgccgatgagccgcagctgcgggtcggcgggccaacgttccattgggtgcgcgaggggatccttgcgggcgaagaggtgctggccggcgcggaaaaagacgttacgccaacattattgctccaggcggaagaagagcgtgtagtcgataaccgtatgcacgatcgctactgtgaacttcgcgccgcaggcggccatccctgcgaagggaataagccgtttgtcatagaaggggcataccatgagatcctttttgaaaaggacgccatgcgctcggtcgcgctaaacgctatcgtcgatttttttgctcgacatacttaa

SEQ ID NO: 176488 - DNA, 621 bp, Klebsiella oxytoca
atgacgttcgagtggtggtttgcctatctgctaacatctattattctcagcctgtcgccgggctccggggcaataaataccatgaccacctctattaaccacggctatcgcggcgcggcggcctctattgccgggctacagaccgggctcggcattcacatcgtgctggtcggcgtcggcctggggacgctcttctctcgatcgctgttagcttttgaaatcctgaaatgggcgggcgccgcttatcttatctggctcggcattcagcagtggcgagccgcaggttctctcgatctgaatacccttgcgaaagcgcagacccgcggcaaactctttaagcgcgcggtattcgtgaatctgaccaatccgaaaagcatcgtatttctcgccgcgctcttcccgcagtttatcgtgccgcaccagcctcaggtaatgcagtatctggtacttggcgttaccactatcgtggtcgatattatcgtcatgattggctacgccacgctggcccagcgtatcgctgcatggatcaaggggccaaaacagattaaggcgctgaataaggtctttggttcgctgtttatgctggtcggcgccctgctggcctccgcccgccacgcgtga

SEQ ID NO: 176489 - DNA, 162 bp, Klebsiella oxytoca
atgactctggcagaaaagtggcttgaggaaggcataaaagagggcaaacgcgctgcgctacttaacgtcgcaaaggccatgctcgagcggggtattgatactactgcggtgatggaaatgaccggtctcacgtccgacgatttgcagcagctccatcattaa

SEQ ID NO: 176490 - DNA, 624 bp, Klebsiella oxytoca
atgttgacgcttttcttcaccgtcgcgctggtgcatatcattgcgctgatgagtcctggcccggactttttctttgtttcgcaaaccgccgttagccgctctcgtaaggaggcgatgatgggcgtgctgggtatcacctgcggggtaatggtatgggcgggcgtagcgctgctcggcctgaacctgattatcgagaagatggcctggctgcataccattattatggtcggcggcggcctgtatctgtgctggatgggcttccagatgctgcgtggcgcgctgaaaaaaggcgaagcggcggcagcggtagagcctcaggttgagctggcgcgcagcggccggagctttctgaaagggctgctgactaatctggcgaacccaaaagcgattatctatttcggctccgtgttctcgctgttcgtcggcgatagcgtcagttctggcgcgcgctgggggatttttctgctgatcgtactggagacgctggcctggttcacggtggttgccagcctgttcgccctgccgggcatgcgccgtggctatcagcggatggcgaagtggatcgacggcatcgccggtacgctattcgccggcttcggtattcatctgattatttcacgctaa

SEQ ID NO: 176491 - DNA, 1827 bp, Klebsiella oxytoca
gtggcgcaggcggaagtattgaatcaggaatcgctggctaagcaggttttacaagagaccttcggctaccagcagtttcgcccgggccaggaaaccattatcgatacggcactggccgggcgcgattgcctggtggtgatgccgaccggcggcggcaagtcgctgtgttatcaggtgccggcgctggtgctgggcggtctgaccgtcgtggtctcgccgctcatctccttgatgaaggatcaggtcgatcagctgctggctaacggcgtggcggcggcgtgcctgaattcaacccagagccgggagcagcagcaggaggtgatggccggctgccgcagcgggcagattcgcctgctgtatatcgccccggagcgcctgatgctggataacttcctcgagcatcttacgcactggaatctgtcgatggtggcggtggatgaggcgcactgtatttcccagtggggccatgatttccgtccggaatacgctgcgttagggcagctgcgccagcggataccgcaaatcccgtttatggcgctgaccgccaccgccgatgacaccacgcgtcgcgacattgttcgcctgctgggcctgagcgacccgcttatccaggtcagcagcttcgaccgacccaatatccgctacatgctgatggagaagtttaagccgctggatcagctgatgcgctacgtacaggatcagcgcggcaaatcaggcattatctactgcaatagccgatcgaaagtggaggataccgccgcacgcctgcaaagtcgcggcatcagcgcggcggcctatcacgccggcctggaaaatcatatccgcgccgacgtacaggagaaattccagcgcgacgacctgcaaatcgtggtggctacggtagccttcgggatggggatcaacaaaccgaacgtccgttttgtggtgcatttcgatatcccccgcaatattgaatcctattaccaggagaccggccgcgccgggcgcgatgggctgcctgccgaggcgatgctgttttacgatccggcggatatggcgtggctcaggcgctgccttgaggagaaacccgccgggccgctgcaggacattgaacgccataagctcaacgcgatgggggcttttgccgaagcgcaaacctgccgccgcctggtgttgctcaactactttggcgaggggcgccaggagccgtgcggcaactgtgatatctgcctcgacccgccgaaacagtacgacggtttaatggacgcgcggaaggcgctgtcgacgatttaccgcgtcaaccagcgctttggtatgggctacgtggtggaagtgctgcgcggcgccaataaccagcgtattcgcgatatggggcatgataagctgccggtatacggcattgggcgcgagcagagccatgagcattgggttagcgtgatccgccagctgatccatttaggcctggtcacgcagaatattgcccagcactctgcgctacagcttaccgaggccgcgcgtccggttctgcgcggcgacgtgacgctacagcttgccgtgccgcgtattgtggcgctgaagccaaaagcgatgcagaaatcctttggcggcaattacgatcgtaagctttttgccaagctgcgcaaactgcgtaaggcgattgccgacgaagagaatatcccaccctacgtcgtgtttaacgatgcaacactgattgaaatggctgagcaaacgccgctgacggccggcgagatgcttagcgtcaacggcgtcggcacgcgtaagctcgagcgttttggtaaagagtttatggccctgatccgcgcgcacgtggatggcgatgatgagtag

SEQ ID NO: 176492 - DNA, 873 bp, Klebsiella oxytoca
atgcgtatctctttggcctgcctgctggcgcttgttgcgcttccggccggcgttctggcgcaggacgcgccggtgaataaacaggtccaccacactccggccgttcgcgggagtattatcgccaacctgttacaggaccatgataatcccttcctgctctatccctacgagagcaactatctgctctatacatggaccagcgatctcaataaagaagcgattcgcagctacgactgggctgaaaacgcgcgtaaagacgaagtgaagttccagcttagcctggcgtttccattatggcgcgggattttgggcgagaattcgctgctgggcgcttcttatacgcaaaaatcctggtggcagctctccaacagcaaagagtccgcgccgtttcgcgaaaccaactacgagccgcagctgttcctcgggtttgcgaccgattactcatttgctggctggacgctgcgcgacgttgaaatgggttataaccacgactctaacggtcgttccgatcccacttcccgcagctggaatcgcctctatactcgactgatggcgcaaaatggcaactggctggtcgaggtgaagccctggtacgtgattggcagcaccgacgataacccggatatcaccaaatatatgggttattaccggctgaaagtgggctaccagctgggcgacgctattctcagcgctcaggggcaatataactggaataccggctacggcggcgccgagcttggggtaagctatccgatcaccaaacacgtgcgcgtctatactcaggtctatagcggttatggcgagtcgcttatcgattataactttaatcaaacccgcgtcggcgtcgggctgatgctcaacgatctgttttaa

SEQ ID NO: 176493 - DNA, 465 bp, Klebsiella oxytoca
atgtctgaactgaccgccgccgccgccctgaagctggtgggagaaatcttcgtctaccacatgccctttaatcgcgccttagggctggagctggagcgctatgaaaaagagttcgcccagctgagtttcaacaaccaaccaatgatggtcggcaactgggcgcagagtattttacatggcggagtgattgcctcagcgctggacgtcgcggcggggctggtatgcgtcggcagcaccctgactcgctacgacaccatcaatgaagaagagctgcgccagcgcctgtcgcggatgggcaccatcgatctgcgcgtcgactacctgcgtccgggtcgtggggagcgctttaccgccaccagcagcctgctgcgcgccggtaacaaggtggcggtggcccgcgtcgaactgcataacgaagagcaggtgtatatcgccagcgctacggcgacgtatatggtgggttga

SEQ ID NO: 176494 - DNA, 894 bp, Klebsiella oxytoca
atggacgctaaacaaacgcgggtgggggttctcctggccctggccgcctattttatctggggtatcgcgccagcgtacttcaagcttatctactatgttcccgccgatgaaattctgactcaccgcgtgatctggtccttcttctttatggtcgcgctaatcagcatcagtcgtcagtggccgcaggtcaaaaggctactgaaaacgccgaagaaggtgtttctgctggccctgtctgccgtgctggtgggcggtaactggctgctgtttatctgggcggtcaataaccatcatatgctggaagccagcctgggctactttatcaacccgctggtgaatattctgctggggatgatcttcctcggggagcgttttcgtcggatgcagtggctggcggtgctgctggccgcctgcggcgttctggtgcagctctggacttttggctcgttgccgattatcgcgctgggcctggcgttcagcttcgctttttatggtctgctacgtaaaaagatcgccgtggatgcacaaaccggcatgctgtttgaaacgctctggctgctgccggtcgccgcgatttatctgtttggtatagccgatagcccgaccagccatatggggcagaacccgtggtcgctgaacctgctgctgatggcggcgggcgtggtcaccactattccgctgctgtgctttaccggcgcggcgacccgcctgcgcctttctacgctgggcttcttccagtatatcggcccaacgctgatgttcctgctggcggtgaccttctacggcgaggtgccgggagcggataagatggtgacctttgcttttatctgggtggcgctggcgattttcgtaatggatgcggtttacacaatacgtcgtacgcgtagggcataa

SEQ ID NO: 176495 - DNA, 951 bp, Klebsiella oxytoca
atgctgagcgcatttcaactggaaaacaatcgtttaacgcgtctggaagccgacgagatcaagcacctcgccagttcggtgtgggtcgatctggtcgagcctgacgacgatgaacgaagccgtgtgcaaacggaattgggccagaacctggcgacgcgcccggagctggaagacatcgaagcgtcagcgcgtttctttgaggatgaagacggtctgcatatccactcatttttcttttttgaagatgctgaggatcacgccggtaactctaccgtggcgtttactatccgcgaaggccgtctgttcaccctgcgcgagcgggagctgcccgctttccgcctgtatcgcatgcgcgcccgcaaccagtcgatggtggacggcaacgcctacgagctactgctggacctgttcgaaaccaaaatcgagcagctggcggatgaaatcgaaaacatctacagcgatctggaaaagcttagccgggtgattatggaaggtcgtcagggcgatgattacgacgaggcgctctctacgctggcggaacaggaagatatcggctggaaagtccgcctgtgtctgatggatacccagcgcgcgctgaacttcctcgtacgcaaggcccgtctgccggcagggcagctggagcaggcgcgtgaaatcctgcgagatattgaatccctgctgccgcacaatgaatcgctgttccagaaggttaacttcctgatgcaggcggcgatgggttttatcaacatcgagcagaaccgcatcatcaagatcttctcggtcgtctccgtcgtcttcctgccgccgaccctggtggcttccagctatggcatgaactttgagtttatgcctgagctgcactggagctttggctatcccggcgcgattgtctttatgatgctcgctggcctggcgccgtatctgtactttaagcgtaaaaactggctgtaa

SEQ ID NO: 176496 - DNA, 2193 bp, Klebsiella oxytoca
ttgccgggcgcctcatttccggcggtgccaatggacgtttcttacctgctcgacagcctcaatgacaaacagcgtgaagccgttgcggcatcacgtactaatatgctggttctggcaggagcgggcagcggcaagacgcgcgtcctggtacaccgcatcgcctggctgctgagcgttgagaactgttccccttactccatcatggcggtgacctttaccaacaaagcggcggcggaaatgcgtcatcgtattggtcaactgatgggcaccactcagggcggtatgtgggtcggcactttccatggtctggcgcaccgtctactgcgcgctcatcaccttgacgccgggctgccgcaggacttccagatcctcgacagcgaagatcagctgcgcctgcttaagcgcctgattaaggcgatgaatctcgatgagaagcagtggccgccgcggcaggcgatgtggtacatcaacggccagaaagatgaagggctgcgcccgcaccatattcagagctacggtaatccggttgagcagacctggcagaaggtttaccaggcctatcaggaagcctgcgatcgcgcggggctggtagacttcgccgagctgctgctgcgcgcccacgagctgtggcttaacaagccgcatatccttcagcactaccgcgagcgctttaccaatatcctggtggatgaattccaggataccaacaatattcagtacgcgtggatccgactgctggcgggcgataccggtaaggtgatgatcgttggcgatgacgatcagtcgatttatggctggcgcggcgcgcaggtagaaaacatccagcgcttcctcaatgacttccccggcgcggaaactatccgtctggagcagaactatcgctcgaccagcaatatcctcagcgcggcgaacgccctgattgagaacaacagcggacggctggggaaaaagctgtggaccgatggcgccgacggcgagccgatttcgctctactgcgcgtttaacgatcttgatgaggcgcgtttcgtcgtcaatcgtatcaaaacctggcaggaaaacggcggggcgctggagcagtgcgcgatcttgtatcgcagcaacgcccaatcgcgcgtgctggaagaggcgctgctgcaggccagcatgccttatcgtatttatggcggcatgcgcttcttcgaacgtcaggagatcaaagatgcgctctcctatctgcgcctgattgccaaccgtaacgacgatgcggcgtttgagcgcgtggtcaataccccgacgcgcggcattggcgatcgcacgctggacgtggtgcgccagacctcgcgcgaccggcagctgacgctgtggcagtcctgtcgcgagctgttaaaagagaaagttctcgccgggcgcgctgccagcgctctgcagcgttttatggaacttattgacgccatggcgcaggagacagccgacatgccgctgcacgtgcagaccgaccgggtcattaaagattccggcctgcgcatgatgtacgagcaggagaaaggcgagaagggccagacgcgtatcgaaaacttagaggagctggtgacggcgacgcgccagtttagctacaacgaagaagatgaagatttaatgccgctgcaggcgttcctctcgcatgcggcgctggaagcgggagaagggcaggcggacacctggcaggatgcggtacagctgatgaccctgcactcggcgaaagggctggagtttccgcaggtatttatcgttggcgtggaagaagggatgttcccgagccagatggcgcttgatgagggcggccgcctggaggaagaacgccgcctggcctacgtcggcgtgactcgtgccatgcaaaaactcacgctgacctacgcggaaacccgtcgcctgtacggcaaagaggtttatcatcgcccctcgcgctttatcggcgagctgccggagtcgtgcgtggaagaggtgcggctgcgcgccacggtgagccggccggtcagccatcagcgcatggggacgccgatggcggaaaacgacaccggctataagctgggccagcgcgtccgccacgccaaattcggtgaaggcaccattgtgaacctcgaaggcagcggcgaacacagtcgcctgcaggttgcctttcaggggcaggggatcaaatggctggtcgcggcgtacgcccggctggaaacagtgtaa

SEQ ID NO: 176497 - DNA, 720 bp, Klebsiella oxytoca
atgatgcgtttttaccgacctctgggccagatttcagcattgacgtttgacctggacgataccctttatgacaaccgcccggtgattgaccggacgctgcatgagtcgctgagctttgtgcgcagctaccacccttctctgagccaatttgacgccagcgagcttaaccggctgcgccagacgctgctggcgtcagagccggaaatttaccacgatgtgaccgaatggcgccgccgcgcgctggagctggggatgatcaacgccgggctttcagcgacgctggcgaaaacgggggccgatgaagcgatggcgaatttcgctcactggcgcagcctgattgacgttccgcaggagacgcacgatacgctggcgcagctggcggaaaagtggccgctggtggccattaccaacggcaacgcccagccggaactctttggcctgagcgactacttccgcttcgtgctgcgcgcgggccctgacgggcgctctaagccctttgccgatatgtatcatctcgcagcggagcggctggagcttcctctggggcagattctgcacgtcggggacgatctgacgaccgatgtcgcaggcgctattcgctgcggcatgcaggcctgttggatcaaaccgcagggcgcagacctgatgcgcgccgccgatggccgcctgctaccgcacatcgaaatttcacggttggcatctctgacctcgctgatataa

SEQ ID NO: 176498 - DNA, 903 bp, Klebsiella oxytoca
atgaccgactcgcctctgtttgctcccgtagaacgcttcttacgctatctcggcgtcgagcgtcagctgagcccgataacgctgctgaactatcgccgccagctggaaacgcttatcgcgctggcggatagcgccgggctgaaaagatggcagcagtgtgatgccgcccaggtccgtagcctggcggtgcgcagccgtcgtcaggggctggggcctgccagcctggccttacgtctctccgccttacgcagcttctttgactggctggtgagccagggtgaactggccgcgaatccggcgaaggggatttcggcgccgaaaataccccgccatctaccgaaaaatatcgacgtcgacgacgttaatcggctgctggatatcgatctcaacgatccgctggcggtacgcgacagggcgatgctggaagtgatgtacggcgcggggttgcgtctttcggagctggtgaatctcgatattaagcacctcgatctggaatccggcgaggtgtgggtgatgggcaaaggcagcaaagagcgccgcctgccgattggccgcaatgcggtggtgtggattgagcactggctcgatctgcgcggactgttcggtgccgatgaggacgccctgttcttatctaaactggggaagcgaatttccgcgcgcaacgtgcaaaagcgctttgccgaatggggcataaagcaggggctcaacagccacgtgcacccgcataagctgcgccactccttcgcgacccatatgctggagtcgagcggcgatctgcgcggggtgcaggagctgctgggccatgctaacctttccaccactcaaatctatacccatctcgattttcaacaccttgcgtcggtgtacgatgcggcacatccgcgcgccaaacgggggaaatga

SEQ ID NO: 176499 - DNA, 708 bp, Klebsiella oxytoca
atgaaacaagtcggggaagaacaacaggaacttgccagcgagctaaacgatcgcgcagtggtggactatctgttgcaacatcctgaattctttattcgtaatgcggcgctggtggaacacatgtcagtgccgcatccggtgcgtggttcggtctcgctggtggagtggcacatggcgcgggcgcggaaccatatcaacgtgctggaagaaaatatgacgctgctgatggagcaggcgacggctaacgaaagcctgtttcagcgcctgtttcacctgcaaacgcggctggcggcggccgatagccttgacgaaatgctgaaccgctttcatcgctgggcgcgcgagctgggtctggcgggcgccacggtgcgcctgtttcccgaccgctggcggctcggcgcgccttccaaattcacccatctggcgataagccgtcaggcgtttgagcctattcgcattcagcgtcttggacaacagcgccattatcttggcgctttaaacggccccgagctgctggtcgtgctgccggaagctaaagccatcggatcggtggcgatgtcgctgctggggggagacgacgctcccggtgtgatgatattcagcagtcgcgacccccagcactatcagcaagggcagggaacgcagctattgcaggaaatcgcgtcgatgctcccgggattgctggagcgctggattgaacgcgcatga

SEQ ID NO: 176500 - DNA, 825 bp, Klebsiella oxytoca
atgcagttctctaaaatgcatggcctgggtaacgactttatggtcgttgacgcagtaacgcagaatgtttttttctcacctgaactgatccgtcgtctggcggatcggcatcttggcgtgggtttcgatcagctgctggtggtggagccgccttacgatccggagctcgacttccactatcgtatcttcaatgccgacggtagcgaagtggcgcaatgcggcaacggcgcgcgctgtttcgcccgctttgtgcgtctgaaaggcctgaccaataaacgtgatatccgcgtcagtacctcgaatggccgtatggtattaagcgtcacggaagacgatctggtgcgtgtcaatatgggtgagccaaacttcgaaccgtcccaggtgccgttccgcgccaacaaagcggaaaagacctatattatgcgcgccgctgaacagacagtattgtgcggcgtggtgtcgatgggtaacccgcactgcgttatccaggttgatgatgtggaaaccgcgacggtggaaacgctcggcccggtgatggaaaaccacgagcgcttcccggagcgggcgaacatcggctttatgcaggtgatcagccgctctcatattcgcctgcgcgtgtatgaacgcggtgcgggggaaactcaggcctgcggcagcggcgcctgtgcggcggcggcagtcggtatccagcagggattactgggcgaggaggtccgcgtggaattacccggcgggcgtctggatatcgcctggaaaggtccgggccaaccgttgtatatgactggcccggcggcacatgtctatgacggatttattcatttatga

SEQ ID NO: 176501 - DNA, 225 bp, Klebsiella oxytoca
atgaatcacgggcaactatccatgaaaaacgttttcccagcgcttgccgttttattagcggttctcagccttagcggctgtggtctgaaagggccgctttacttcccgccggcggataaaacggcgcctccgccgactaagccggttgatagcggtatccagagctctacgccggatcgtaacgatcgcggcgatagcggtggcccgacccaggtgaattactga

SEQ ID NO: 176502 - DNA, 321 bp, Klebsiella oxytoca
atgaacgacagtgaattccatcgcctggccgataccctgtggatgaccatcgaagaacgccttgacgactgggacggcgacagcgatatcgactgtgaaatcaacggcggcgtactgactatcagttttgaaaacggcagcaagattattatcaaccgtcaggaaccgctacatcaggtgtggctggcaacgaaacaaggcggctaccatttcgacttaaaaggcgacgagtgggtatgcgaccgcagcggcgaaaccttctgggatctgctggaacaggcggcgaccatgcaggccggtgaagcggtgagttttcgctaa

SEQ ID NO: 176503 - DNA, 2628 bp, Klebsiella oxytoca
atggtgacggtttttgttgaaatactgaaactctccgtactattgtacgtcgggtttttgaacatcaggcgatatgtcttgtacctctatattgagacactgaaacagagactggatgccatcaaccaattgcgcgtggatcgcgcccttgctgccatgggacccgctttccagcaggtttacagtctactgccgacattactacattatcatcatccgctgatgccgggttaccttgacggtaacgttccccgtggcatttgcctctacacgcctgatgaaacccaacgtcactatcttgatgagctcgagctcaaccgtggcatgctggccaaggagccgccgaaaggcgagctgccgatcaccggcctttactctatgggcagcacatcttccgtcggccaaagctgttcgtctgacctggatatctgggtttgccaccagtcctggcttgacactgaagagcgtcagctgctgcagcgtaaatgtagcctgctggagagctgggcggcatcgctgggcgtcgaggtcagcttcttcctgatcgacgaaaaccgcttccgtcataacgaaagcggcagcctgggcggcgaagactgcggctccacccagcatatcctgctgctggatgagttttaccgtaccgcggtgcgccttgccggcaaacgtattctgtggaatatggtgccgtgcgatgaagaagagcattacgacgattacgtcatgagcctctacgcgcagggcgtactgacgccgaacgaatggctggatctcggcggcctgagttctctgtcggccgaagagtacttcggcgccagcctctggcaactgtataaaagcatcgactcgccctataaggccgtgctgaaaacgctgctgctggaagcgtactcctgggagtaccccaataaccgcctgctggcgaaagatatcaaacagcgcctgcatgacggtgagatcgtttcgtttggcctcgatccttactgcatgatgctggagcgcgtgacgctctatctgcaggccatcgaagatgaaacgcgcctcgatctggtgcgtcgatgtttctatttaaaagtctgcgagaagctgagccgcgagcgcgcttgcgtcggctggcgtcgcgaagtcgtcagtcacctggtgaaagagtggggctgggatgaaaagcgtctgatgatgctcgacaaccgggccaactggaagatcgacgaagtccgtaaagcgcacaacgaactgcttgatgcgatgatgcagagctatcgcaacctgattcgttttgcgcgccgcaataacctgagcgtttccgccagcccgcaggatattggcgtgctgacgcgtaagctgtacgccgcctttgaagcgctgccggggaaagtcaccctggtaaacccgcaaatttcaccggatctgtctgagccgaatctgacctttatccacgtgccgccgggccgcgccaaccgcaccggttggtatgtctataaccgggcgccggacatggaatcgatcatcagccatcagccgctggaatataaccgttatcttaataagctggtggcctgggcctggtttaacggcctgttgacgtcacgtacgcgcctgtttattaagggcaacggcattgtcgatctggcgaagctgcaggagatggtggccgatgtggcgcatcacttcccgctgcgcctgccttctccgacgccgaaagcgctgtacagtccgtgcgaaatccgccatctggcgattatcgtcaacctggaatatgacccgacggcggccttccgcaatcaggtggtgcattttgacttccgcaagctggatgttttcagcttcggcgaagagcaaaagtgcctgattggcagcatcgacctgctgtaccgcaactcgtggaacgaggtgcgtacgctgcactttaacggcgagcaggcgatgatcgaagcgctgaaaaccattcttggcaagatgcaccaggacgccgcgccgccggatagcgtggaggttttctgctatagccagcatctgcgcggtctgatccgcactcgcgtacagcagctggtgtctgaatgcgttgagctgcgtctttccagcacccgtcaggataccggccgctttaaagcgctacgcgtttccgggcagacctgggggttgttcttcgagcgtcttaacgtttcggttcagaaactggaaaacgccatcgaattctatggcgcgatttcccataacaaattgcacgggctgtcggtgcaggtggaaactaaccacgtcaggctgccgcaggtagtggacggctttgccagcgaagggattattcagttcttcttcgaagatgcggataacgataacggttttaacatctatatcctcgatgagagcaaccgcgccgaggtgtatcaccactgcgaaggtagcaaagaggagctggtgcgcgacgtcagccgcttctactcttcatcccatgaccgctttacctacggttccagctttatcaactttaacctgccgcagttttatcaaatcgtcgacgttgacggtcgcgagcaggtgattccgttccgcagccaggtgattgccgccgccaccgcttcagccggtcaggatgctgcctcatcgccgatgctacagcactactcctga

SEQ ID NO: 176504 - DNA, 957 bp, Klebsiella oxytoca
atgacggtaacaagcatgttagacaaagttttgagaattgccacacggcaaagcccgcttgcgctatggcaggcacattatgtgaaagagcgtctggagtcctgccacccggggctttccgttgaactggtgcctatggtcacccgcggcgacgtgatccttgatacgccccttgcaaaagtgggcggtaagggtctgtttgtgaaagagttagagctggcgatgctggaaggccgcgccgacatcgccgtccattcgatgaaagacgtaccggtggagtttcccacagggcttgggctggtgaccatctgcgagcgtgaagatccgcgcgatgcgtttgtctcaaaccactacgcttccattgatgaattgccgcacggcagcatcgttggcacatcaagtttacgccgccagtgtcagctggccgcagcgcggccggatctcacgatccgctccctgcgcggcaacgtaggcacgcgtctgggcaagcttgatagcggcgagtatgacgccattattcttgccgccgcagggcttaaacgcctgaacctggaggcgcgtattcgtcaaccgctatcgccggagcaatcgctgcccgccgttggccagggcgcggtcggcatcgagtgtcgccttgacgacgaatggaccaaagcgctactggccccgttgaatcatacggaaacggccatacgcgtacgcgctgaacgggcgatgaacacccggctggaaggcggctgtcaggtgccaatcggcagctatgccgaactgatcgacggtgagctatggctgcgcgcgctggttggcgcgccggatggctcacaaatggtgcgcggcgagcggcgcggccgtgcggaagaggcagaaacgctcggcgtctctcttgccgaagagcttctaaataacggcgctcgcgacatacttgccgtcgtctatgcaggagaaggtccacaatga

SEQ ID NO: 176505 - DNA, 741 bp, Klebsiella oxytoca
atgagtatcctggtcacccgtccgctgccgcaaggcgaagagttagtcagccgcctgcgcgcgctggggcgcgtggcctggagctttccgctcattgaatttacccctggacgtcagcttcctgagctgggcggccagctggaaaacctcgcggctggcgatttgctcttcgcactgtcccagcacgccgttgagtttgcccactctcgcctccagcagcaaaggctgcgctggccttcggcgcctgactattttgccattggccgcaccaccgcgctggccctgcataaagtcagcaatcgtcatgttcgctatccgttagatcgggaaatcagcgaagtcttgctacaattacctgaattacaaaacattgcggggaaaagagcgctcatcctgcgcggtaacggcgggcgggaattactcggtgacacgcttcgcgaacgcggtgctgatgtcactttttgtgaatgttatcaacgtagtgcaaggcactatgatggcgcagaagaagcaatgcgctggcagtctcgcggtatttctacgctggtcattaccagcggcgagatgctgcagcagctctggacgctgataccacagtggtatcgcgaacgttggctcctgagctgtcgcattttagttgtcagtgaacgtctggccgagcaggccagagaattgggctggcaggatatccaggttgccgatagcgccgacaacgatgcgctgctacgcgcattacaataa

SEQ ID NO: 176506 - DNA, 1191 bp, Klebsiella oxytoca
atgacggaacaacagaatcaatccgccgtggttgaagagaccagggaggccgtggacacgacgtcacagccagaaaataacgtagaaaagaaaaacggcggcagtaaaaccagcctcgcgctgagcgcaatagctattgctatcgccctcgccgctggcataggtctttatggcctgacgaagacccaggcaacccgccagagcgaagccagcgccgggctatccagccagatcgccgcgctgcaaaaagcccaggaaagccaaaaaagcgaactcgaaggcattattaagcagcaggccgaccagttgacggaagcgcagcgtcagcaggaggctctggcgaagaagctggaagaagttcaggagaaggttgcggttatttccggcagcgacgcaaaaacctggctgctcgcgcaggcggatttcctcgtgaaactggccggacgtaagctgtggagcgatcaggacgtaacgaccgctgccgcgctgctgaaaagcgccgacgccagcctcgccgatatgaacgatccgagcctgatcgccgcgcgccgcgccattaccgacgatattgcctcgctttctgccgtgagtcaggtcgactacgacggcatcattctgaaggtgaaccagctcgccaaccagatcgataatctccgtctggcggacaacaacgatgacgacacgccgatggattccgatagcgatgagctatccagctccattaccgaatggcgtgtaaacctgcaaaaaagctggcagaactttatggacagctttattaccgttcgccgccgcgatgaaaccgccgtgccgctgctggcgccgaaccaggacgtctacctgcgcgaaaatattcgctcccgtctgctggtcgcagcgcaggccgtccctcgccatcaggaagaaacctacaaacaggctctggataacgtctcgacctgggttcgcgcttactacgacacggaagacgccaccaccaaagccttccttgaggatgtggataagctcagccagcaaagcatcaccatgaacgtaccggaaaacctgcaaagccaggcgctgcttgagaaactaatgcagacgcgagtgcgtaatctgatggcgcagccggctgaaccccagaccagcgcgccggcacctgcccctgcacctgcagcccacgcgccaacgcctgcgccacaaggagagtaa

SEQ ID NO: 176507 - DNA, 1197 bp, Klebsiella oxytoca
atgttgaaaattctcttactcttcgcgctgctgcttgccgggattgtggtcgggccgatgatcgcgggtcatcagggctacgtgctaatccagaccgataactacaatattgaaaccagcgtgaccgggcttgcgatcatcctgatcctcaccatggtggtactgtttgccattgagtggctactgcggcggattttccgcaccggcgcacacacccgcggctggttcgttggccgtaagcgtcgtcgcgcccgtaagcaaaccgagcaggcgctgctgaagctggcggaaggtgattaccagcaggttgagaagctgatggcgaaaaatgccgatcacgctgaacagcccgttgtgaactacctgctggcagcggaagccgcccagcagcgtggagatgaagctcgcgctaaccaacatctggagcgcgctgctgaattagccggtgacgatctgatccctgtcgaaataacccgcgtacgtctgcagctggcgcgtaatgaaaaccacgccgcccgccacggtattgacaggctgctggagatcacgccgcgtcatccggaggttctgcgccttgccgagcaggcctacatccgtaccggcgcctggaattcgctgttggatatcattccgtcaatggcgaaagccaacgtcagcgatgaagagcatcgcgctgagctggaacagctggcgtggattggtctgatggataaaacgctggccgacggcggtagcgaaggtttgcgcgactggtggaaaagccagagccgtaaaacccgcagccaggtggcgctacaggtggcgatggcgaatcgtcttatcgaaagcgacgatcatgataccgcgcagcagattattatcgaaggtctgaaaaagcactatgacgaccgtctggttatgccgattccgcggctgaaaaccaataaccctgagcagctggaaaaagtgctgcgtcagcagcttaaaacggtcggcgatcgtccgctgctgtggagtacgctggggcaatcgctgatgcgccacggtgagtggcaggaggccagcatcgcgttccgcgcagccctcaagcagcgcccggatgcgtttgactacgcatggctggcggatactcttgaccgcctgcatcagccggaagaagcggcgacgatgcgtcgcgacggcctgctgttaaccctgcaaaacaatccgcagcagtaa

SEQ ID NO: 176508 - DNA, 1383 bp, Klebsiella oxytoca
atgactgagaaaaaagcggaacttcagcggggactggaggcgcggcacattgagctaatcgcccttggcggcacgattggcgtgggactatttatgggggcggcaagtacgctgaagtgggccggaccttcggttctgctggcgtatattatcgcggggctcttcgtcttctttattatgcgttcgatgggcgaaatgctgttcctcgaaccggttaccggctcgttcgctgtttatgcgcaccgctatatgagcccgttttttggctatctgaccgcctggtcctactggtttatgtggatggcggtcgggatatcggagattacggcgatcggagtctatgtccagttctggttcccggagatggcgcagtggataccggcgcttatcgcggttgggctggtcgcgctggcgaatctggcggcggtacgtctgtacggtgaaattgaattctggtttgccatgattaaagtgaccaccattattgtcatgatcgtggtggggctgggcgtcatcttctttggctttggcaatggcggacactccattggctttagcaatctgaccgagcacggcggtttctttgccggcggctggaagggctttctgacggcgctatgcatcgtggtcgcttcctatcagggcgtcgagcttatcgggatcaccgccggtgaagcgaaaaatccgcaggtcactctgcgtagcgcggtcggcaaagtgctgtggcgaatcctgattttctatgtcggggcgatttttgtgatcgtcactattttcccgtgggatcagataggctccaacggcagtccgttcgtgctgacctttgccaaaatcggtatcaccgcagcggcagggattatcaactttgtggtgctgacggcggcgctttccggttgtaacagcggaatgtatagctgtggacggatgctctacgcgctggcaaagaatcgccagctgcctgcggccatcgccagagtttcgcgtaacggcgtgccgtcggcgggcgtggcgctgtcgatcctgattctgctggtcggttcgtgcctgaactacattattcctaatccacagcgggtatttgtttacgtctacagcgccagcgtgctgccgggaatggtgccatggttcgtaattctgattagccagctacgttttcgtctggtacataaagaagcgatggccagccatcctttccgctcgctgctattcccgtgggcaaactatttaaccatggcgttcctggtttgcgtgctgatagggatgggatttaacgacgatacgcgtatgtcgctctttgtcggaattattttcctcgccgccgtgacgcttatttataaggtatttggccttggtcgacgcggaaatgttgataatgtggcgtaa

SEQ ID NO: 176509 - DNA, 741 bp, Klebsiella oxytoca
atgactgagactacatccgcgccgttgtacctgctgagagggttgcaactcattggttggcgcgatatgcaacatgctctggactatctgtatgccgatggcgagatccgtacgggtacgctggtggcgattaatgcagagaagatgctggcggtagaggataaccccgaagttcgggcgctgatcgaagccgcagagtttaaatatgctgacggcatcagcgtggtgcgctcattacgtaaaaaataccctcaggcgcaggtatcgcgcgtcgccggggctgatttatgggaagcgctgatggcgcgcgctggcgctcagggaacgccggtatttctgatcggcggtaagcccgaagtgctggcgcagacggaacagcagcttcgtcagcgctggaacgtaaacatcgtcggcagccaggacggctatttcgctgctgaccagcgtcaggcgctgtttgaacgtattcgcgatagcggggcgaagatcgtcaccgtggcgatggggtcgccgcgtcaggagatcctgatgcgcgattgccgggaagtttatccgcaggcgctttatatgggcgtaggcggaacctacgatgtctttaccggtcatgttcagcgagcgccgaagttctggcaggacctggggctggagtggttttatcgcctggtttcgcagccgagccgaataaaaaggcaggcgcgtctgctgcgctatttacgctggtattataccgataagctttga

SEQ ID NO: 176510 - DNA, 1347 bp, Klebsiella oxytoca
atgacattaatgcaatttagcggactgctgctggtttggctgctgtcgacgctttttatcgccaccgccacctggtttgaatttcgtcgggtgcgcttcaacttcaacgtctttttctcgctgctgtttctgctgacctttttctttggctttccgctgaccagtattctggtgtttcgcttcgacgtggcggtcgccccgccggaaattctgttgcaaactctgctggtttccgtctgtttttatgcggtttactacgtgacttataaaacgcggctacgctcggcggcgcagagccatcagcatcgtccgctgtttacgatgaaccgcgtggagacccatctggcctgggggattttgctgggactggcgctgctctgcgtcgggatcttctttgcgcataacggctttctgttattcaagctcaactcctatagccagatcttctccagcgaagtttccggcgtggcgctaaagcgtttcttctactttttcattccggcaatgctggtggtctattttctgcgtcaggattataaagcgtggatattcttcctcgtcagcaccgtcgcatttggtctgctgacttatgccatcgttggcgggacccgggctaatatcatcattgcgtttgctatcttcctgtttattggcatcattcgcggctggataagcctgtggatgctggcggcggcgggcgtactgggcatcgtcggcatgttctggctggcgctcaaacgctacggaatgaacgtcagcggcgatgaagcgttttatactttcctctatctgacccgcgataccttctcgccgtgggagaacctggctctgctgctgcaaaattacgacaagattgagtttcagggcctggcgccaatcgtccgcgatttctatgtttttatccccagctggttgtggcacggtcgaccgacaatggtgctcaataccgcgaactatttcacctgggaagtgctgaataaccattctggcctggcgatttcgccaaccctgattggctcgctggtggtaatggggggcgtctggttcgtgccgctgggcgcggtagcggttgggctgattattaaatggtttgactggctgtacgagcttggcaaccgggaaacgaaccgctataaagcggcgatcctgcacagtttctgttttggcgctatcttcaacatgatcgtgctggcgcgtgaagggctggattcctttggctctcgcgtggtttttttcctcgttatctttgggatctgcctactggcggcgaaactgctgtactggttcctcgatagcgtcgggctgattcataagcgggctaaaccgctgacgcaacctcaagtctga

SEQ ID NO: 176511 - DNA, 1080 bp, Klebsiella oxytoca
atgacagcactgatacatgtactgggatcggatatcccgcaccacaaccagaccgttctgcggttctttaatgatgagctggccgtcaatgacgagcaggctcgcctgtttatggtcgtcggtgatgcgacaggaattcgcgaagcgtaccccgcgctctccatcagctgctatccggggaagaagtcgctggcaaaggcggttatcgcgctggcaaaggcgaaccggcagcagcgctttttctttcacggccagtttaataccggcctgtggctggcgctgctcagcggggggatccgcccggcgcagtttaactggcacatctggggcgcggatctgtatgagaattccgccagcctgaagtttcgcttgttttatccgctgcggcgcctggcgcaggggcgggtagggcgcgtctttgcgacccgcggcgatctcagttggttcgccgcccggcattcgggcgtgccgggcgaactgctctatttcccgacccgcatggatccggcgctgaactcacttgctgaaagcgcgccgcgcggcgagacgctgactatcctggtggggaattccggcgaccgcagcaacgagcatatcgccgcgctgcgcgcgattcatcagcagtttggcgatacggtcaacgttgtcgtgccgatgggttatccggccaataatagcgactacatcaatgaagttcgcgcggccggcgcggcgctgttcagcccgccgcatcttcaggtactgggcgataagctggcgtttgatgactatctggccctgctgcgccgctgcgatcttggctacttcctgtttgcccgccagcaggggatcggcacgctgtgtctgctgattcaggcggggatcccctgcgtgctgaaccgggagaatcccttctggcaggatatgtcggagcagcatattccggtactctttaccagcgatacgctggacgcggccgtggtgcgtgaagcgcagcgccagctggccggcgtggataagaatcagattgccttcttccgtcctaattatctgacgggctggcgacgggcgttgcggattgccgcgggggtggatgcatga

SEQ ID NO: 176512 - DNA, 1251 bp, Klebsiella oxytoca
atgtcgctggctaaagcttctctgtggactgcagcgtccacgctggtcaaaatcggcgccggtctgctggtggttaaactgctggcggtgtcgttcggcccggcaggcgtggggcaggcgggcaacttccgccagctggtgaccgtgcttggcgtgctggcgggggccggaatctttaacggcgtcacgaagctggtagcccagtatcatgacgatcgccggcagttgcataacgtcgtcggcaccgcttcagcgatggtgctggggttctccaccctgctggcgctgatattcctgctggcggcggcgccgataagccagggtctgttcggtcatcagcattatcagaatctggtacggctggtggcgctggtacagatgggcattgcctgggcgaacttcctgttagcgctgatgaaggggtttcgcgatgcggcgggcaatgcgctgtcgcttatcgccgggagcctgattggcgtggcggcgtactatgcctgctaccgtttcggcggctatcagggcgcattgctgggactggcgctggtacctgcgctggtggtcgtgccggcggctatcgtactgtggcgacgcggcaatattccgctgagcgcgctgcgtccgcgctgggacaacggcctcgcagggcagctgtcgaaatttaccctgatggcgctgattacttcggtgacgctgccggtagcctacgtgatgatgcgtaacctgctggcggcccactatggctgggacgcggtggggatctggcagggggtaagcagcatctccgacgcctatttacagtttatcaccgcatcatttagcgtttatctgttaccgacattgtcccgcttgacggcgaaagcggatatcacccgtgagattggcaaatcgttaaaatttgttctcccggcggtagctgcagccagcctgaccgtatggctgctgcgcgatttcgctatctggctgctgttttccgaccgctttacggcaatgcgcgatctgtttgcctggcagctggtgggcgatgtgttgaaggtcggggcatatgtttatggctatctggtgatcgccaaagcctcgctgcgtttttatattctgacggaaatcagccagttcacgctgttgaccgcattctcgcactggcttataccggcgcacggcgcaatcggcgcggcgcaggcgtatatggctacttatattgtttatttcgccctctgtagcggcgtgtttttactttggcgtaaacgggcatga

SEQ ID NO: 176513 - DNA, 1131 bp, Klebsiella oxytoca
atgattccatttaacgcgccgccggtggtgggaaccgagcttgattatatgcagtccgcgatgggaagcggcaagctgtgcggcgatggcggttttacccgccgctgccagcagtggatggagcagcgcttcggtactgccaaagccctgctgacgccgtcctgcaccgcttcgctggaaatggcggcgctgctgctggatatccagccgggcgatgaagtgattatgccgagctataccttcgtctccaccgccaacgcctttgtgctgcgtggcgcaaaaatcgtcttcgttgatattcgtcgcgacaccatgaatattgatgaaacgctgattgaagcggcgatcaccgacaaaacccgcgcgattgtgccggtccactacgccggcgtggcctgcgaaatggacaccattatggctatcgccagcaaacataatctgtttgtcgtggaagatgccgctcagggcgtgatgtcgacctataaaggccgggcgctcggtactatcggccatattggctgcttcagcttccatgaaaccaaaaactacaccgcgggcggtgaaggcggcgcgacgctgattaacgatcgtaagctggtagagcgcgcggagatcattcgtgaaaaaggcaccaaccgcagccagtttttccgtggtctggtggataaatacacctggcgcgatatcggctccagctacctgatgtccgatttacaggcggcctacctgtgggcgcagctggaagcggcggagcgaattaaccagcagcgcctggcgctgtggcagaactactacgaggccctgctgccgctggcgcgcgccgggcgtatcgatctgccgatcgtgcccgccgactgcgggcacaatgcgcatatgttctacatcaagctgcgcgatattgacgatcgcagtaagctgattgcctggctgaaagaggcggagattctggccgtgttccactatattccgctgcatagctgcccggccggggagaatttcggcgtgttccacgggacggatcgcttcacgactcaggagagcgaacgcctgctgcgtttgccgttattctacaacctgtcgagcgtaaaccagcgcacggtgattaactcgctgctgagctatttctcctga

SEQ ID NO: 176514 - DNA, 675 bp, Klebsiella oxytoca
gtgcccgcccgcgccagtattgagtccctggagtgggagaaccgcttcttcggcgtcaatagcgctatcctgcgctttggcgatgatgcgccgccgctgacggtggacgcgctggcgaactggtcgcgggtacaggcgaaagttgcggcggatgataccgcacgcctggatgcgctgcaggcattgggcttccggctggtggagggcgaggtcgatctcgcgctttcgccagccgcttatggtgatagtggcgccgagccggcgaccgaggcggatattccccggctgcgtgaactggcagcgctggcctttgcgcagagccgtttccgcgcgccctggtacgcagccgatgccagcggccgtttctatgcccagtggattgaaaatgcggtgcgcggcaccttcgatcatcagtgtctggtgtttcgcgcccctggcggcgatatccgcgcgtttgtctccctgcgccagctcagcgcgcacgaggcaaggattggcctgctggccggacgcggagccggagcggaattaatgcaggcagctcagggctggaccgcgctgcgcgggctgaagacactgcgggtggcgacccagatgggcaacaccgccgcgcttaaacgttacattcttagcggtgcgaatgtcgaaagcaccacgtactggttatacaggtga

SEQ ID NO: 176515 - DNA, 882 bp, Klebsiella oxytoca
atgaaaggtattattctggcaggcggatcgggtacccgcctgcatccgatcacgcgcggcgtctcaaaacagctgctacccatctacgataagccgatgatctactatccgctctcggtgctgatgctggccgggattcgcgaagtgctgatcattaccaccccggacgaccagcgcgatttccagcgcctgcttggcgatggttcggagttcggcgttcagctcagctacgccgcgcagccaagcccggacgggctggcgcaggcctttatcatcggcgaggcgttcctcaacggtgagccctcatgcctggtgctcggcgataatatctttttcggccagggttttagcccgaagctccgtagcgtcgcgtcccgcacttccggggcgacggtgtttggttatcaggtgatggacccggaacgctttggcgtggtggagtttgatgacgatttccgcgcgatttcgctggaggagaagccaaagcagcccaaatccaactgggcggtaaccggcctctatttctacgacggtaaagtcgcggaatacgcaaaacgggttaaaccctcggcgcgcggcgagctggagatcacctccatcaatcaaatgtatctcgacgatggcgcgctaacggttgagctgctgggccgcggttttgcctggctcgataccggcacgcacgatagcctgatcgaagccagcatgtttgtgcaaacggtggaaaagcgtcagggtttcaagattgcctgcctggaagagatcgcctggcgcaacggctggctggacgacgacggcgtgaagcgcgcggcgaaacggctggaaaaaaccggctacggtcaatacttactggatttactccgtgcccgcccgcgccagtattga

SEQ ID NO: 176516 - DNA, 1068 bp, Klebsiella oxytoca
gtgagaacgattctggtcaccggcggcgccggttttatcggttctgcggtggtgcgtgaaatcatcactgcaaccagcgataacgtggtggtggttgataagctgacctacgcggggaatctgatgtcgctggcgcctgtcgccggggatccgcgttttgcttttgaacaggtggatatctgcgatcgcgctgaactggaccgggtatttcgccactatcagcccgatacggtgatgcatctggccgctgaaagccacgttgaccgctctattgacggcccggcggcgtttatcgaaaccaacattgtcggtacctggacgctgctggaagcggccagggcctggtggaatacgctggcgaacgataaaaaatccgcctttcgtttccaccacatctcaacggatgaggtctatggcgatctgcacgacagcggcgcgttttttaccgaaaccacgccctatgcgcccagcagcccctattcggcgtcgaaagccagcagcgatcatctggtgcgcgcctggaagagaacctatggcctgccaacgctggtcaccaactgctcgaataactacggaccgtatcatttcccggaaaaactgatcccgctgactatcctgaacgcgctggcgggtaaaccgctgccggtttatggcaacgggcagcagatccgcgactggttgtacgttgaagatcatgccagggcgctctatcgggtggcaacgagcggtgagccgggcgaaacttacaatatcggcggccataacgagcggaaaaatatcgaggtagtggaaaccatttgcgatctgctggaagagctggcgccgcgcaaaccggaaggccttgcgcgctatcgcgatctcatcacctttgttgccgatcgtcccggccacgacctgcgctacgctattgatgcggcgaaaatagcgcgtgaactgggctggacgccggccgaaacgttcaccagcgggatgcgcaaaaccgttgcgtggtacctggctaatgaagcctggtggcagcaggtgctggacggcagctatcagggtgaacgcctggggctgcaagcctga

SEQ ID NO: 176517 - DNA, 1263 bp, Klebsiella oxytoca
atgaatttttctaccatttcagtgattggccttggatatattggcctgccaaccgctgccgcgttcgcctcccggcaaaagcgggtggtcggcgttgatgtcaatcaacatgccgtggagaccattaaccgtggtgaaattcatatcgtggagccggatctggcgagcgtcgttaaaacggcggtcgagcagggctatctgagcgccaccaccgcgccagtagaagctgacgcctatctgattgcggtgccgacgccgtttaaagacctgcacgaaccggatatggttttcgtcgagtcggcggctaaatctatcgcgccgacgctgaagaaaggttcgctggttatcctcgagtccacttcgccggtaggttcaaccgaacagatggcggactggctggcggaaatgcgccccgatttgagcttcccgcagcaggctggcgaagcggcggacgtgaatatcgcctactgcccggagcgcgttttgccgggtcaggtcatggttgagctgatcaaaaacgatcgcgtgatcgggggtatgtcgccggtttgctcagcccgcgccagcgagctgtataaaattttcctcgaaggcgaatgtgtggtgactaactctcgcaccgccgaaatgtgcaagctgacagaaaacagcttccgcgacgttaatatcgcttttgccaatgaactttcgctgatttgcgccgatcaggggattaacgtctgggaactgattcgcctggcgaatcgccatccgcgcgtgaacattctccagcccggtccgggcgttggcggccactgcatcgcggtcgacccgtggtttatcgtggcgcaaaacccgcagcaggcgcggcttatccgtaccgcgcgtgaagttaacgaccataaaccagagtgggtgatcgatgaagttaaagcgcgggtcgccgactgtcttgccgccagcaacaaacgcgccagcgagataaaaatcgcctgctttggcctggcgtttaagccgaatatcgatgatctgcgcgaaagcccggccatggccatcgccgcacaaatcgcccgctggcacggcggcgaaaccctggttgttgagccgaatatccaccagttgccgaagaagcttgatggcctgtgcgctctggcgttgctcgacgaagcgctggcgagcgccgatgtgctggtgatgctggtcgatcataaagaatttaaagcgattagcggggatagcgtcagccagcagtttatcgtcgataccaaaggggtctggcggtga

SEQ ID NO: 176518 - DNA, 1131 bp, Klebsiella oxytoca
gtgaaagtactaacggtatttggcacgagaccagaagccatcaaaatggcgcctctggttcatgcgctggcaagggatcctcattttgaggcgaaagtttgcgtgaccgcgcagcatcgggagatgctcgatcaggtgttgaaacttttttctattgttccggactacgaccttaacatcatgcagccgggtcaggggttgacggagattacctgccgcatccttgagggcttaaagccggtgctggagtcgtttaagccagatgtggtgctggtgcatggcgataccaccacgacgatggcggcaagccttgccgctttctatcagcgcattccggtggggcacgtggaagccggactgcgcacgggcgatctgagttcgccgtggccggaagaggggaaccgcacgttgaccgggcatctggcaacgtaccattttgcgccgacggaaacctcgcggcagaacctgctgcgggaaaatattgccgataatcggatcacgataaccggcaatacggttattgatgcgctgttttgggtgcgcgatcgggtactgagcgatgaagcgctgcgtaacgagctgactcagcgttatccttttctcgccaacggtaagaagatgattctggtcaccgggcatcgtcgggaaagctttggccgcggttttgagcaaatctgccacgcgctggcagagatcgctgccaataacccggacgtacagattgtctatccggtgcatctgaacccgaacgtcagcgaaccggttaaccgtattctcggccacgttgagaacgtcatgcttattgagccgcaggattatctgccgttcgtctggctgatgaatcgcgcgtggttgattctgaccgattccggcggtatccaggaagaggcgccatcgctcggcaaaccggtgctggtaatgcgcgaaatgaccgagcgtccggaagcggtcagcgcgggaaccgtatgcctggtgggtaccgacagccagcgcatcgtcaatgaagtcacgcgcttgctgcatgatgagtccgcctggcaggccatgagccgggcgcataacccgtacggcgatggacaagcgtgtcatcgtattttgtctgcacttaaaaataatcaggtaacgctatga

SEQ ID NO: 176519 - DNA, 1017 bp, Klebsiella oxytoca
gtgaacgttgagaatgagctggatattcgcgggctgtttcgcgccctgtgggcaggaaaaagctggatagcaggtttcgcggtgctctttgcactgattgttctggtctataccttctttgctcgccaggagtggagcgcgacggcaattaccgaccggccgacggtgaacatgctgggcgggtactattcgcaacagcagtttttacgcaatctcgatatcaaggccaatctcgtctcggtcgatcaaccttcggtaatggatgaagcgtataaagagttcattatgcagcaggcgtcatgggatacccgccgcgatttctggctgcaaacggactactacaagcagcgccagtcgggtaacgcccgcgccgatgccgctttgctggacgatctgattaacgacattcagtttatgcctggcgatgcgctcaaaagcgttaacgacagcgtgaagctgacggcggaaaccgccccggatgccaataatctgctgcgtcagtatgtcgccttcgccagccagcgcgcggcgggtcacctgaatgacgagcttaagggcgcctgggccgcgcgaaccgtgcagatgaaagcgcaggttaagcgccaggaagaggtggcgcgcgaaattttcaatcgccgcatgcatagcgtggagcaggcgctgaaagtcgcccagcaacacaatatttcccgcagcgaaaccgacattccaccagaccagctgccggattccgaactgtttttactgggccggccgatgctgcaggcccgtctggaaaatctgcaggcggtcgggccgcagtacgatcttgattatgaccaaagccgagccatgttaacgacgttaaacgtgggaccgaccctggacccgcgttttcagacttacaggtatttgcgaacgcctgaagaaccggtaaaacgcgatagcccgcgccgcgcgtttctgatggtgatgtgggggattgtgggcgcgctcatcggcgcaggcgttgcgttaacgcgtcgccgtgtccagtga

SEQ ID NO: 176520 - DNA, 1095 bp, Klebsiella oxytoca
gtgaatttactcactgctattactgaattaatcagtattttcttattcaccaccctgtttatatttgtcgcccgcaaggcggcaaaaagagttgggctcgtggataaacctaactatcgtaaacggcatcagggtttgattccgttagtcggtggtatttcagttttcgcaggtatttgttttacgtttgccatcgccgattattacattccccacgcaaagttatacctgggatgtgccggggtgcttgtgctggtcggcgcgttagacgaccgctttgatatcagcgtaaaaattcgcgcggtaattcaggccgccatcgccgtcattatgatgatggtgggaaatcttcatctaagtagcctcggctttatatttggctcatgggagctggtgctcggcccctttggcttcttcctcacgcttttcgccgtttgggccgcgatcaacgccttcaatatggttgatggcatcgatggcctgctgggcggcctctcctccgtctcttttgcggcaaccggtatcattctgtggtttgatggccagtacagcctggcaatgtggtgttttgcgatgattgccgccattttgccctatattttactaaacctcggggcgcttggccgtcgctataaagtctttatgggtgacgccggcagcaccatgattggcttcactatcatctggatcctgctggagaccacgcagggaaagacgcatcccattagccctgtcactgcgctatggattattgcgatcccgttgatggatatggtggcgattatgtaccgccgcctgcgtaaaggaatgagtccgttctccccggaccgtcagcatattcatcacttgatcatgcgcgccgggtttacttcccgccaggcattcgtgctgatcaccctggccgccgcgctgctggcgctggttggggtggcagcggaatacacccgtattgttcctgaatgggtgatgttaatactctttttggtggccttctttctttatggctactgtattaaacgcgcctggaaagtggcgcgcatggttaagcgcattagacgcagaatacggcgacacagcggcaataatccaaattaa

SEQ ID NO: 176521 - DNA, 1260 bp, Klebsiella oxytoca
atgaatcttaccgaattaaaaaatacgccggtttctgagctgattactctcggcgaaaatatggggctggaaaacctggcccgtatgcgtaagcaggatattatttttgccatcctcaagcagcattcgaagagtggcgaagatatctttggcgatggcgtactggagatactgcaggatggatttggtttcctccgttcagcagacagctcctacctcgccggtcccgacgacatctacgtatctcccagccaaatccgccgcttcaacctccgcactggtgacaccatttccggtaagattcgtcctcctaaagagggtgagcgttactttgcgttgttgaaagttaacgaagttaactacgataagccggaaaacgcccgtaacaagattctgtttgagaacttaaccccgctgcacgcaaattcacgtctgcgtatggaacgcggtaatggctcaacggaagacttaaccgctcgcgtgctggatctggcatcgccgatcggccgcggtcagcgtggtctgattgttgcgccgccgaaggcgggtaaaaccatgctgctgcagaatattgcgcagagcattgcgtacaaccatcctgattgcgtgctgatggtactgctgatcgacgaacgtccggaagaagtgaccgagatgcagcgtctggttaaaggcgaagtggttgcttctacctttgacgaaccggcctctcgccacgttcaggttgccgaaatggttatcgagaaggcgaagcgtctggttgaacacaagaaagacgttatcatcctcctcgactcgattacccgtctggcgcgcgcctacaacaccgtagttccggcttccggtaaagtgttgaccggtggtgtggacgccaacgccctgcatcgtccgaagcggttcttcggcgccgcgcgtaacgtggaagagggcggtagcctgaccatcatcgcaacagcgctgatcgataccggttctaaaatggacgaagttatctacgaagagtttaaaggcaccggtaacatggagcttcacctctcacgtaagatcgctgagaaacgcgtcttcccggctatcgactacaaccgttccggtacccgtaaagaagagctgcttaccactcaggaagagctgcagaagatgtggatcctgcgtaaaatcattcacccgatgggtgaaatcgacgcgatggaattcctcatcaataaactggcgatgaccaaaactaacgacgacttcttcgatatgatgaagcgctcgtaa

SEQ ID NO: 176522 - DNA, 330 bp, Klebsiella oxytoca
atgagcgataaaattattcacctgactgacgacagttttgacacggacgtactcaaggctgacgggctaaccctcgtcgatttctgggcagagtggtgtggtccgtgcaaaatgatcgccccgattctggatgagatcgctgaagagtatcagggcaaactgaccattgcgaagctgaacatcgatcagaacccgggtactgcgccgaaatacggcattcgcggcatcccgaccctgctgctgttcaaaaatggtgaagttgcagcgactaaagtcggcgcgctgtctaaaggccagctgaaagagttccttgacgccaacctggcgtaa

SEQ ID NO: 176523 - DNA, 1266 bp, Klebsiella oxytoca
atgagcaaaacacatttaacagaacagaagttttccgacttcgccctgcacccggcagtgattgaagcccttgaaaagaaagggtttcataattgcacacccattcaggccctcgccctcccgctaacgctggaaggtcgcgatgtcgccgggcaggcgcaaaccggtaccggtaaaacgatggcgtttctgacgtcaacgtttcattatcttctcacacacccggctatcgctgaccgtcaggtcaatcagccgcgggcgctaatcatggcgccgacgcgtgaactggcggtacagatccatgccgacgctgaaccactggcgcaggcggccggtctgaagctgggactcgcctacggcggcgacggctacgataagcagctgaaagtgctggaaagcggcgtggatattctgatcggtaccaccggtcgccttatcgattacgctaaacagaaccatattaacctcggcgctattcaggttgtcgtgctcgacgaagccgatcgcatgtacgatctcggctttattaaagatattcgttggctgttccgccgtatgccgcccgcgaatcagcgcctgaacatgcttttctccgccaccctttcttatcgcgtacgtgaactggcgttcgaacaaatgaacaacgccgagtacgttgaagttgagccagagcagaaaaccggccaccgtattaaagaagaactgttctacccttccaatgaagaaaaaatgcgcctgctgcagacgctgctggaagaagagtggcccgatcgcgcgattattttcgccaataccaagcatcgctgtgaagatatctggggtcacctggcagcggacggccatcgcgttggcctgttaaccggcgacgtcgcgcagaaaaaacgtctgcgtattcttgacgaatttacccgcggcgatatcgatattctggtcgcaaccgacgtagctgctcgcggtctgcatattccagccgtgacgcacgtctttaactacgatctgccggacgattgcgaagactacgttcaccgtattggccgtaccggccgcgctggcgccagcggtcactccatcagcctggcctgtgaagagtacgcgctgaaccttccggcgattgaaacctatattggtcattcgattccggtgagcaaatacaattcggacgcgctcatgactgacctgcctaagccgctgcgcctcacgcgcccgcgtccgggcaacggcccgcgccgcaacggtccgccacgtaatcgtcgtcgttcaggttaa

SEQ ID NO: 176524 - DNA, 1509 bp, Klebsiella oxytoca
atgaagtgtatgagttccacctcgctctatgccgctatcgatctgggatctaatagctttcatatgctggttgtacgcgaggtggccggaagcatccagaccctgagtcgcatcaaacgcaaagtacgtctggccgcaggcctgaacagcgacaacacgctctctgcggaagctatggaacgcggctggcaatgtttacgcctgtttgccgagcgtttgcaggatattcctccggcgcaaacccgcgtggtggctaccgcgacgctgcggctggcggttaacgccagcgagtttctggagaaagcgcgggacattctcggctgcccggtgcaggttatcagcggtgaagaggaagcacgcctgatttatcagggtgtggcccatactaccggcggtgcagaccagcgtctggtcgtggatattggcggcgccagtaccgaactggttaccggcaccggtgcgcaaacgacctcgcttttcagcctgtcgatgggctgtgtgacctggctggaacgctactttgccgatcgcagcctgaccaaagagaactttagccaggccgaaaccgctgcgcgtgaagtgctgcgccccgtcgccgatgttctgcgctaccacggttggaaagtgtgcgtcggcgcatccggcaccgtgcaggcgttacaggaaatcatgatggcgcaggggatggatgaacgcatcaccttagccaagctacagcagctcaaacagcgcgcgattcagtgcggacgtctggaagagctcgaaattgaaggcctgacgcttgaacgcgcgctcgtctttcctagcggcctggcgattctgattgccattttcagcgagctcaatattcagtgcatgactctcgcgggcggggcgctgcgcgaaggcctcgtttacggcatgctgcatctgtcggtcgatcaggatattcgcagccgtacgttacgcaatattcagcgccggtttttggtagataccgagcaggcacagcgcgttgctcagttagccgcccatttcgctcatcaggtagaaaagagctgggaaattgagccgttatgctttgatttgctgcaaagcgcctgccagttgcatgaaatcggtttgagcgtggagtacaaacaggcgccgctgcacgccgcctggctggtgcgcaacctggacctgcccggctttacccccgcgcaaaagaagctgctggcaacgttgctgttaaaccaaaccaacgccgtcgatctttcttccattcatcaacagaacgcggtgccgccgagagtcgctgagcatatgtgccgtctgctgcgcctggctattttatttgccaaccgccgacgcgacgatctgctgccgatgatgacgctggccgctgaagatgagcgcctgacgctgacactgccgcagggatggctggaaaaccatcctctgggtcgggaaatggtcgagcaggagtgccagtggcagagctacgttcactggccgctgcaaattatcgaggatagcgcagcaatatag

SEQ ID NO: 176525 - DNA, 921 bp, Klebsiella oxytoca
atgcgagaagaactggacttcaaatcgctgcgttttttttccgccctcttccgtctgggcaatgtctctcccgccgccgaagcgcttaatatcagccagccgaccggcagcttattgttgaaaaaacttcgcgagcatttcgacgatcccctgtttgtgcgaatcggacagcgtatggtgcccacgccgcgcgcagatgatattgctcagaccgtttttactattcttcaactggtcgataaccagctccctggcaaccctgaatttaacccccaaaccagcacacgtaatttcactatcggcatgactgatatcagccagatgacgttgttgccgccgttgcaggcacagctacagcagcttaacgccgaaggcattactatttcggtgctgaatatcgacgatcaaacattgggcgcgcttgagtctgggaagtgcgatttagctataggctatcttaggcagctaccggataacatttaccagcagcgcctgtttgatcaatcctacgtatgcctgacagcagaaaaccatccgcggatccgagccgcgtttaccgccgagaactggcgacaggaaaagcatctggccgttcacgtcaacgggaccgggcatggcgatatcgatagattacttaacgagtacggtatgccgcgacgcatcgccctcactcttcccagctttttaggcgcaggcgagctggttgcgggcagtgaattgattgccgtcgtccccgagcagctggcaaatcatattattactcgctacccctgctgcagctggccgctgccattttcgctgccggaaattgctattcgccaggtctggcatcagcgtctgcaccgcgatcccgggcacatctggttgcggtcgctgatcgtaaacttacccacaaccggcagtagcaaaattccctattaa

SEQ ID NO: 176526 - DNA, 999 bp, Klebsiella oxytoca
atgcgtggaaaaatcgcgttagaagaacacgtttcaacacctaaaaacaacagcctttgggactctacgggtgaagcctcaagaaacggttctgaatatatgatggacgttgagcgccgcttattagatcgtagctatcaactggatgaaatggcccagagaaatatcgaccatgttattctttctctaacttcccctggcgcccaatctattttggataaagccacagccgtatcttttgcgcgcgaaaccaacgactacatcatcgagaattatgttaaacctaatccggataaatttagcgcattcgctactctggcattacaaaaccccgaagctgcggccgaagaactggagcgtgcggtaaaaaaattgggcttgaaaggcgcgctgattaacggttacaccaacgtcagggatagcgagcacggtctgtacctggatgatgaatcaatgctggtattctgggataaagtcaacgaactgaacgttcccgtttatctgcatccgcgtgagcccttagaaggcccggcgcgcggcatctacaccggttatgaaagcctgatcggatccgcctggggctttgcccaggaaaccgcggttcatgcgattcgcctgatgatgagcgggttgttcgatcgctatcccaatctgaatctggtgttgggtcacttaggcgaaggcctggttcatatgctgccacgcacccaacaccgtctctatcgtcagcgtttcggctgcggcctgggcaaagcagaaaaaccgttaatgcactatttgcagaataactttatcgtcaccaccagcggccattttaatacctactctctgcaaaatgcgctagctattatgggtccggatcgcgtgatgttctccgtcgattatccgtatgaagatattcatcaggcctgtgattggttcgatcctctggaaatggatagtgaactgaagaataaaatcgcctggggtaatgccagccgcgtatttaatattaaataa

SEQ ID NO: 176527 - DNA, 723 bp, Klebsiella oxytoca
atgccggtaggaatctttgtttgcagtggctcgctacttgtcggcgcaatttttggcgcatcgctcaatcgatttattcccgaacatttaaaaaagaccttacctttaatcgccgggttaatttctattagcatgggcgtgttttttctcaataagctgatgaatctgccgcccattgctctggctgtcatcgtcggcaccattatcggtagcctgctgcatatcgaaaaagttatcgaaaatgccggtataaagcttcggggccccgttgagaaagtatttcccggcaaaggcagtgccgatattgatccccaggatttcactaatcagtttatcgccgtactgatcctgttttgcgccagcggaaccggtatttttggcgcattaaccgaaggtatgacaggagatgcgaccatactgctcaccaaatccattctcgactttttcaccgcagctatttttgcctccgcgctggggtacatcatcgccgttatctttgtgccccagcttattgtattcgcgatcctcttcttcgccgccagcgttattatggcgttaatcacccctacaatgatcgcggattttactgcctgcggcggcatcatcatgctggcaacgggctttcgactctgcgggattcgcgcttttccgacggcgaacatgctgccatcgctactgctggtgatgcccttctccgccgcctggcaacagttgatcgcctga

SEQ ID NO: 176528 - DNA, 786 bp, Klebsiella oxytoca
atgtcgcaaccgttgcttgagtatataaaagggcgtctgaatgcagaggcccccgcgccgctttatattcaacttaaacaagccattgaagcggcaatgacggagcggctgctgacgcacggcagtattttgccctccgaacgtaaaatgtcgcagacgcttgagctatcgcgcgtgacggtggtgaaggcgctggatgccctgctggaagccgggctggtgattaagcgtcacggaaagggtaccgaggtcaatttgccggtaagctataaccttgccagcgggggattttctgcccagctgcaaaattcggggacggtatctaaccgatggctggtgagggaaaaactggcggcggatgattttttggctcgtgaactggagatcgccgtcggcgatcgggtggcgaaaataaaacgcgtgcgtttagtcgatgcgcttccggtctccatcgaaaccatgtttattcccgagcgttttttaccccgtccggatctgcttgaagggtcgctgtacgcgcactgggcggaaaataatatttttcccgatctccaggactactcactcacggtacatatcccttccggcgaagaactgaatttgctcgacctgccgcaaggcgtgccattgatgaaaattacgctgaaaagtcgtaatgctcagggagaggtgcttgagtacggtactgcattttgcctgagcaattactttaactttgatttccgggtgaaactccagtctgcgtctggcggcaaaccgggcagcgctcacaaaaaagacgcgtaa

SEQ ID NO: 176529 - DNA, 1017 bp, Klebsiella oxytoca
atgtctgatattcgccctactaataccgccgaaagccgcatccttggctgtctttacgggcaagccatcggtgatgcgatgggcatgccttccgaactgtggcctaaacgccgcattatcaaccactttggttggattgaacgcttccttcctggaccgaaagagaatattgcggcctgcgaatttcgcgccgcagagtttaccgatgacacccatcagtgcatcgcactaatggatgccctgaatgaaactaacggcgtgaccgatccactggctattgccaggcatattctgctatgggccagacgctgccaggcttttgaaaaaaatattctcggcccaacctcgaaggcctccctgctggcgcttgaacaggggcaagcgctcgatgagatcgcggccaacggcgtgaccaacggtgcggcaatgcgcgtggcgcccatgggctgtctgctaccgacccggaataaggcatttttcgttgagcaagttcgcctctcctgcctgccgacgcacaaatcagatatcgccatcgccggcgcggtagttatcgcctgggcgatcagtcgcgccattgaaggagccggatggctgttaattaaaacggagctggcatcgctcgccaatgaaacccagcgccagtatgagtccacttttagtccacttctcggtaaccgaattaatctcgcgctgaccacgatcgccagcgaaaccgaccatctgacaggaattgaacgtatttatgaggatatcggcgccggaatggatattatcgagtctgtccccgcggcgattgcgctggtcgagctggcaaaaacgcagcctatgaaatgcgctatgctggcggccaatttaggcggcgacaccgacacgataggcgcgatggcaaccgccatctgcggcgcgcttcatggcatagaggcgtttcctgaggaacatatccaacagattaatcgggccaatagcatagacttcgcgccttacgcacagcggcttgcaggataccgcttcgcttaa

SEQ ID NO: 176530 - DNA, 1416 bp, Klebsiella oxytoca
atggacagcaaagcttcatacgatggaaatatccagacagcagatcccggaatggcggagttggggattgatctggtccccccggtccaccagacccaaaaaccgatccagctatttttcgtctggtgcgccgcaaacatcggcattcttggcgtcgtttacggcgcagtcattgtatcgttcggcctctccttctggcagtcgattcttgccgccgtggcgggcgtcgcctcctttgcgctggtcggcgtcaccagtatcgccggaaaaatcggccgcaccacgacgctgacgctttcacgcgtcatttttggcaagcgcggcaacattgcacctaccagcttctgctgggtaaacctgatgggctgggagtcggtcaatatcattaccggtacgctcaccctcgttgcgctgtttgccgccatgggttttgaagagagcctgaccaccaccgcgctgtcgctttttctgtttggcggcctgaccgtgctggttagcgtgctcggccaaaatgccgtgctgatgatgcaaaagtggatcacccgcatctttggcgccatgacgctgctggtcgtcatttatctgctcttcaccgcggactggcaggccatactcgcgctgccgtcaggtagctggctgacgggctttctaccggcggtctctattattgccgcgggcaccggcatcagctgggcgatcgccggcgccgactatagccgcgatcagcgccctgactccggcgaaaaggggattttcctcgccgttgtcagcggcgcagcccttcccctgctgctgctaatgctgaccggaatactgctcaccgcccaaatccccgatctggcctccagcgaaaaccccatttcagcgatcggtaaactgctgccttcatggatggcaatcccctatctagctgcagctaccgccggggttgtgactatcgccgtgctgagtctctattccgccagccttaacctgctaagcatgggaattaaactgcagcagcgttccgccgtagccattgatgccgtgctggttctggggatcgccctctacgtgctgtttgtctcgaaagattttctcgggccgttcatcgcgtttctgattttctgcggcgtatttcttgccgcctgggccgccatctttatggtcgatttttatcggatgcgccgccgtgtcggctattctgaagctgatttgttcagagaaagcggtgccaaccgtaccgcgctgggctgctggattgtcggcgcgctggcggggttgatggtctctaaaaccgggtttatcgacggacctttcgcggtcggcattttcgcggactccagcctcgggttattcgtctcttttattctgagcctggtgctctatcttgtcttcggaccaaaaaagggggacagccgtgacaatcagcgctga

SEQ ID NO: 176531 - DNA, 963 bp, Klebsiella oxytoca
gtgacaatcagcgctgaccagctatcgccgcggcggccgatcgtggtgatcggcgccgcttttggcgacataattctccatctcgatgcgctgccgcaaagcggtagcgatgtccccgcgcgcgacggcggacggcagattggcggctgcgcgtttaacgtcgcccgtgcgctctcgcgcctcgagttgtttcccgttaacgccataccggtaggcaatggcgactgggggcaggccgttgcgcaaaaaatggcgctggaaaacttgcccgtcctcttgcgtcaccccacccacgataacggctggtgtctggctcttgttgaagccgacaaagagcggacgtttatcaccattgagggctgcgaacagcactggactgatgaactattagcgcaaataccgctgccgaatgacgcgattatttacgtctcgggctacgaactggccagcgaagcgctgcgccagtggctccttgcccaggcagaagataaaacgctgtttgtcgattttggcccacgcctgggcgatctggatattcgctttattcaggcgctgctgcgcaaacgccccgttctcacccttaatcgcgatgaacttagggtgctatgcgcgcgtttatacgatcgggatggcgccacgcttgacgacgccactcggctcgccagcgactggcagctacgagcaatttgtcggtttgataaggatggcgcgtgggtggttgaacctgacgcgcaaccgcagcatattccggcctaccgtgtacaggttcacgacacgattgccgcaggagacagccactgtgccggtactatcgccgggctggcctgcgggatggatctgcagcaggcaacgcggctgggcaatcaagtggcggccattgttgtcagcaaacctggttcagacggcgctccgaatcgcgaagagctacgccagttccagcgtcgagagggcaacggccgctag

SEQ ID NO: 176532 - DNA, 1962 bp, Klebsiella oxytoca
gtgctggcgggtgccggttccggtaagacccgcgttattaccaataaaatcgcccacctgatccgcggctgcggctatcaggcgcgccatattgcggcagtcacctttaccaataaggcggcgcgcgaaatgaaagagcgcgtcgggcaaacgctggggcgcaaagaggcgcgcgggctgatgatttccaccttccacacgctggggctggacattatcaagcgcgaatacgccgcgttagggatgaaatcaaacttctcgctgttcgacgataccgaccaggtcgcgctgttaaaagagctcaccgaggggctgatcgaagacgataaagtggtgcttcagcagctgatctccacgatctccaactggaaaaacgatctgaaaacaccttctcaggccgccgccggcgcgaagggggagcgggagcggatcttcgctcactgctacggcctgtacgatgcgcacatgaaagcctgcaacgtactcgatttcgacgatctgatcctcctgccaacgctgctgctgcagcgtaacgaagaggtgcgggaacgctggcagaataagatccgttatctgctggtggatgaataccaggacaccaataccagccagtacgagctggtaaaactgctggtgggacagcgggcgcgctttaccgtggtcggcgatgacgatcagtcgatctactcctggcgcggcgcgcggccgcagaatctggtactgctaagccaggatttcccggcgctgcaggtgatcaagctggagcaaaactatcgctcatcagggcgcatcctgaaggcggcgaacatcctgatcgccaataatccgcacgttttcgagaagcgcctgttttccgaactgggctatggcgtagagctgaaggtgctctccgccaataacgaagaccatgaggcggagcgcgttgccggtgaactcatcgctcatcactttattaataaaaccgcctataaggattacgcgatcttgtatcgcggcaaccatcagtcgcgggtttttgaaaagatgctgatgcagaaccgcatcccgtacaaaatttccggcggcacgtcgttcttttcccgcccggaaattaaagacctactggcctatctgcgcgtgctgactaaccctgatgatgacagcgccttcatgcgtatcgtcaatacgccaaagcgcgagatcggttcggcgaccctgaaaaagctgggcgaatgggcgatgggacgcaataaaagcatgtttaccgccagcttcgatatgggtttgacccagacgctgagcggacgcggctacgagtctttgacccgcttcacccactggctgcgtgagattcaacagctttccgagcgcgagccgattgcggctgtccgcgatctgatccgcggcgtggattatgaatcctggctttatgagacctcgcccagcccgaaagccgccgagatgcggatgaaaaacgtcaatacgctgttcacgtggatgaccgaaatgctcgaaggcagcgagatcgatgaaccgatgacgcttacccaggtcgttacccgctttaccctccgcgacatgatggagcgcggcgagtcggatgaggagacggatcaggtgcagctaatgacgcttcacgcatcaaaggggctggagtttccctacgtctatctggttggtatggaagaggggctgctgccgcaccagagcagcattgatgaagacaacgtcgatgaagagcgtcgccttgcctacgttggtatcacccgcgcgcagaaagagctgacttttaccctgtgcaaagagcgccgtcagtacggcgaactggtgcggccagagccgagccgttttctgctggaactgccgcaggatgatctgatttgggagcaggagcgcaaagttatttcgccggaagagcgcatgcataaagggcaagcgaacgtcgccaacatccgggcgatgctggcgaaagcgcgtaaatag

SEQ ID NO: 176533 - DNA, 729 bp, Klebsiella oxytoca
atggacttttttagcattaacaatgtgatggtcaatattcctctcggcgaaggcggctatgcgctatcgtggattgaagccatcggtaccgtattcggcctgctgtgcatctggtgcgcaagccgggaaaaaatcatcaattatctgtttggcctgattaacgtcacgctgtttgcggccattttcttccagattcagctctatgccagcctgctgctgcaggtatttttcttcgccgccaacatttacggctggtacgcatggagccggcaaaacgaggcgcaggaagctacgctcaaggttcgctggctttcccgtcagcaaacgctggtgctgggtgccgtttgcgcggtggcgatcgtgctgatgacgctgtttatcgatccggtgtttgcgatgctgacccgcatcatgattgccctgctgcaaacgttcggcatgcaggtggcgatgcccgacctccagcccgacgccttcccgttctgggattccaccatgctggtgttgtcaattgccgccatggtactgatgacgcgtaagtttgtcgaaaactggctgctgtgggtcgttatcgacgtgattagcgtggttatctacgcggtacagggcgtttacgcaatgtcgcttgagtatgttctgctgacggctatcgcggtcatgggctcatacagctggatcaagagcgcgcagcgtaatggctatgcgccgcttgccgccgccggatcctga

SEQ ID NO: 176534 - DNA, 750 bp, Klebsiella oxytoca
atgtcgctgcaaccccatatccagttaaacaaagagatgaccggcgcgcggtacgcgctgctgccgggcgacccccagagggtcgaccgtatcgtcagttttcttgataatgccgagccgctcggtcagaaccgggagtttcgcgccgcacgcggctggtaccagggcgtggaaattttggtgctctccaccggaatcggcggcccctccactgcgatcgccattgaagagctgcgccagatcggcgttacgaccctgattcgtatcggcagctgcggcgccctgcaggataatcttgcgctcggcgacgtaattatcgcccacggcgcggttatggatgacggcaccagccgaacctatgcgccggcaggctatccggcctgcgccgacccgcagctgacctgggagctgatggcgcaggcgcggcaaatgaatatccccgccgcgtgcggactggtgcgcagccatgacagtttttataccgatcgcgaggcggagctggatgcacagtggtcggcgcttggtattctgggtgcagatatggaaagcgccgccctgatgaccatcggcgcgctgcgcgggttacgtacagcctcattgctcaacgtagtagttgcccacaacggttgcctggatagcagcatcaatgattatgtccagcaggaggctctgtgccagcagggcgaagaacggcaaattaccctggcgctgcgcgccatttattccgctagccagcaaggaggtttatga

SEQ ID NO: 176535 - DNA, 705 bp, Klebsiella oxytoca
atggatacaatgaaaaaacctgaattttcagttggctggctttcggggctgagtgatatcgtgagcgatccacagctctatgaattactaaaatattgtcccctcgagatcatgcagcgctggcgcttcgaagagatcccgcgcggcgattttatctgtcgacagggggaggtgtgtcagcgcttttcgctgattatcgccggtgaggtggatgttttctacgaggctgaagatgggcgccgctatcgccaggcccgctaccgaaaaggcgatatggtgggcgagctcgagatctttgagtcgcgtcagtacatctgctcggtggcggcggtggggcatgtgcagcttctcagcctgtcacaggaatatttctgccgctggctggcgttagataaccattttaaccagcggatgctgcgcttctttagccagcaatattaccagctgtcgaaaaaggccagcagcgacaatctttattcgttgcatcagcgggtgtgccaggccctatggctgcgttatcagcaggatggcgccaatgaaatcttgctggataagcagaatctcagccaggaatttgcggcgacgacccgcagtattaaccgtattttgcatgatctgaaagcgctacaaattattgataccgatggtgaacgcattgtgttgttagctcctgaaaaacttaaacaggaggctgatatcggataa

SEQ ID NO: 176536 - DNA, 282 bp, Klebsiella oxytoca
atggcaaaaagcgcagcagccctgcacatcctgattaaagaagagaaactggcgcacgagatcctcgccaaactggaacgtggcgtcagcttcgatcacctggcaaagcgctattcgaaatgtccatcaggacgcaacggcggcgatcttggggagtttaatcaaggcgttatggtcgggccgtttgataaagcggtcttcagctgcccgctgctcaagccatatggaccggtcaaaaccaagttcggctaccacatcattaaggtgctctatcgccgctag

SEQ ID NO: 176537 - DNA, 282 bp, Klebsiella oxytoca
atggcaaaaacggcagcagcactgcatatcctggttaaagaagagaagctggcactggatcttctggagcaaattaaaaacggcgccgatttcggcaaactggcgaagaagcactcgatctgcccgtcaggcaaacgcggcggcgatttaggtgaattccgccagggtcagatggtgccggcgtttgataaagtcgtcttctcctgcccggagctggagccaaccggcccgctgcacactcagtttggttatcacatcatcaaggtgctgtaccgcaaataa

SEQ ID NO: 176538 - DNA, 1476 bp, Klebsiella oxytoca
atggctaactactttaatacactgaacctgcgccagcagctggcgcagctgggcaaatgtcgctttatgggtcgcgacgaattcgccgatggcgcaagctaccttcagggtaaaaaagtggtcatcgtcggctgtggcgctcagggtctgaaccagggcctgaacatgcgtgactccggtctcgatatctcctatgcgctgcgtaaagaagcgatcgccgagaagcgcgcatcgtggcgtaaagcgaccgaaaacggcttcaaagtgggtacctacgaagagctgatcccgcaggctgacctggtggttaacctgacgccggacaagcagcactctgacgttgtgcgttccgttcagccgctgatgaaagacggcgcggcgctgggctactctcacggtttcaacatcgtggaagtgggtgagcagatccgtaaggatatcaccgttgtgatggtagcgccgaagtgtccgggtaccgaagtgcgcgaagagtacaaacgtggttttggcgtaccgactctgatcgcggttcacccggaaaacgatccgaaaggcgaaggcatggccatcgctaaagcctgggctgcggccaccggcggtcaccgtgcgggcgttctggagtcttccttcgtggcggaagtgaaatccgacctgatgggcgagcagaccattctgtgcggtatgctgcaggctggctctctgctgtgcttcgacaagctggtggaagaaggtaccgacccggcatacgctgagaaactgattcagttcggctgggaaaccatcaccgaagcgctgaagcagggcggtatcaccctgatgatggatcgcctgtctaacccggctaagctgcgtgcttatgcgctgtccgaacagctgaaagagattatggcgccgctgttccagaaacatatggatgacatcatctccggtgaattctcctccggtatgatggctgactgggccaacgacgataaaaaactgctgacctggcgtgaagagaccggtaaaaccgcgttcgaaaccgcgccgcagtttgaaggtaaaatcggcgagcaggagtacttcgataaaggcgttctgatgatcgcgatggtgaaagcaggcgttgagctggcgttcgaaaccatggtcgattccggcatcatcgaagagtccgcttactatgaatcgctgcacgagctgccgctgatcgccaacaccatcgcccgtaagcgcctgtacgaaatgaacgtggttatctccgataccgcagaatacggtaactacctgttctcttacgcttgcgtaccgctgctgaaagagttcatgactaccctgcagaccggcgacctgggcaaagcgattgccgaaggcgcggtagataacgctcagctgcgcgacgtgaatgaagctattcgcagccacgctatcgagcaggttggtaagaaactgcgcggctatatgaccgatatgaaacgtattgcggtagcgggctaa

SEQ ID NO: 176539 - DNA, 891 bp, Klebsiella oxytoca
gtggatttacgcgatctaaaaaccttcctgcatctggcggaaagccgccattttggccgcagcgcgcgggcaatgcacgtcagcccttccacactgtcccggcaaattcagcgcctggaagaagacctcgggcagccgctgtttgtccgcgataaccgcacggtgacgcttaccgaagcgggagaagagctacgaacgtttgcccagcagacgctgctgcagtatcagcagctgcgccacactatcgatcagcaagggccgtcgctgtcgggggagctgcatatcttctgctcggtaaccgccgcctacagccacctgcctcccatactcgatcgctttcgcgccgagcacccttcggtggaaattaagctcaccaccggcgatgccgccgatgcgatggagaaagtggtgacgggtgaagccgatctggcaatagccggtaagccagaaacgcttcccggcgcggtggccttcgcaatgctggaaaatctggcggtggtgctaatcgccccggcgctgccttgtccggtccgcaaccaggtctcggtggagaagcctgactgggcaacggtaccctttatcatggccgaccagggccccgtgcgccgccgcattgagctgtggtttcgtcgccataaaatcagtaatccatcaatttacgcgacggtgggcggacatgaagccatggtatccatggtggcgctcggctgcggcgtcgcgctgctgccggaagtggtgctggaaaatagcccggagccggtgcgcaatcgcgtaatgattctggagcgtagcgacgaaaaaaccccttttgagctgggcgtctgcgcgcccaaaaagcgactgcatgaaccgctgattaatgcgttctgggaaatcgttcaaacaaaataa

SEQ ID NO: 176540 - DNA, 390 bp, Klebsiella oxytoca
atgcgttcagggacgttgctattaaccattgccatgctgttatgttgtaccgtccaggcaaaaccgaagggcattaccgtgctggatatcaaacatctggcgcttcagcaatgcctggtggcgaattacaaagcccgaacgcctgaaggcgcgcgatcggccccgtcgcaggatgcgtcatttatgattgagagatacgccctggataatgccggcgtgtggaaggcatttcagacgttcgtcgccaaagagacgaaagattttgatcggctaacgatgtcattacaccctgaccatgctcagactgccaataacgtgctggcgcaatgcatgaacttttatgaatcggacaagctggataagtatgtacgtgggacggtgatgaagtaa

SEQ ID NO: 176541 - DNA, 1548 bp, Klebsiella oxytoca
atgatggccgagtcgcaacccctgtccgccgcccctgagggggcggaatacctcagagccgtactgcgcgcgccggtatacgaagccgcgcagattacgccgctgcaaaaaatggaaaagctctcgtcgcgcctcgataacgttgtgctggtgaagcgtgaagatcgtcagccggtgcacagctttaagctgcgcggggcgtacgcgatgatggccgggctgacggaagagcaaaaatcgcacggcgtgatcaccgcttcggcgggtaatcatgcgcagggcgtggctttctccgcctctcgcctgggcgtgaaggcgctgatcgtcatgccaaccgccaccgcggatatcaaggtcgatgcggtgcgcggcttcggtggtgaagtgctgctgcacggcgcgaacttcgatgaagccaaagccaaagctattgagctggcgcagcagcagggattcacctgggtaccgcctttcgaccatccgatggtgattgccgggcaggggacgctggcgctggagctgctgcagcaggatgcccatatcgaccgcgtattcgtaccggttggcggcggaggtctcgcggcgggcgtggcggtgctgatcaaacagctcatgccgcagattaaggtcattgcggttgaagccgaggattctgcctgtctgaaagccgccctggatgcgggccatccggttgatttaccccgtgtggggctgtttgccgaaggcgtggcggttaaacgtatcggtgatgagactttccgtctctgtcaggagtatctcgacgacatcgtcaccgttgatagcgatgccatctgcgcggcgatgaaagacctgtttgaagacgtgcgtgcggtagcagaaccttccggcgcgctggcgctggcgggaatgaaaaaatatatcgctcagcataatattcgcggcgaacgcctggcgcacgtgctttccggtgcgaacgtcaacttccacggtctgcgctacgtttccgaacgctgcgaactgggagaacaacgtgaagcgctgctggcggtcaccattcctgaagagaagggcagcttcctcaagttctgccagctgctgggtggtcggtcggtgaccgagtttaactaccgcttcgccgatgcaaagaatgcctgcatttttgtcggtgtgcgcctgagtcgcggtctggaagagcggaaagagatcctcaatctgctgcatgaagggggctacagcgtggtggatctctccgacgacgaaatggccaagctacacgtacgctacatggtcggcgggcgaccttcgcagccgttgcaggaacgtttgttcagcttcgagttcccggaatcgcccggcgccctgctgaagttcctgcatacgctgggtacccactggaacatttcactgttccactaccgcagtcacggtaccgattatggccgcgtgctggcggcattcgaactgggcgatcacgagcctgattttgaaacccgcctgcatgagctgggctacgactgccacgatgaaacccataacccggcgttccggttcttcctggcggggtag

SEQ ID NO: 176542 - DNA, 1851 bp, Klebsiella oxytoca
atgcctaagtaccgttccgccacaaccactcacggccgtaatatggcgggtgcccgcgcgctgtggcgcgccactggaatgaccgacgatgatttcggtaagccgattatcgccgtggtgaactctttcacccagttcgtgccggggcacgttcacctgcgcgatctcggcaagctggttgctgagcaaattgaagccgctggcggcgtcgctaaagaattcaacaccattgcggtggatgacgggatcgcgatggggcacgggggtatgctttattcactgccatcccgcgaactgatcgctgactcggtggagtacatggttaacgcccactgtgctgatgcgatggtctgtatctccaactgcgataaaatcactcccgggatgttaatggcgtctctgcgcctgaatattccggtaatttttgtttccggcggccctatggaagccgggaaaaccaaactgtccgatcaaatcattaaactcgacctggtcgatgcgatgattcagggcgctgacccgaaagtctctgacgatcagagtaatcaggttgaacgttccgcttgcccgacctgcggttcctgttccgggatgttcaccgccaactccatgaactgcctgaccgaagcgctgggcctgtcgcagccgggtaacggctcgctgctggcgactcacgccgatcgtaaacagctgttcctcaatgcgggttcgcgtatcgtcgagctgactaagcgttactacgagcaggacgacgcttctgcgctgccgcgtaatatcgccagcaaagcggcgtttgaaaacgccatgacgctggatatcgccatgggcggttccaccaataccgtcctgcatctgctggcggcagcgcaggaggcggaaatcgacttcaccatgagcgatatcgataagctttcacgcaaagtaccgcagctgtgtaaggtggcgccaagtacgcagaaatatcatatggaagacgtgcaccgcgcgggcggcgtattgggtattttaggcgagctggatcgtgccggactgctgaaccgcaacgtgaagaacgtgctcggtttgaccctgccgcagacgctggagcagtacgatatcaccgtcacgcaggatgaagcggttaaaaagatgttccgcgccgggcctgcgggtatccgcacgacgcaggctttctctcaggattgccgctgggacagcctggatgacgatcgcgcagaaggctgtatccgctcgctggaacacgcttatagcaaggacggcggtctggccgttctgtacggcaactttgccgaaaatggctgcatcgtgaaaactgctggcgtagacgatagtatcctgaaattcaccggcccggctaaggtttacgaaagccaggacgcggccgtggatgccatcctcggcggtaaagtggttgcgggtgatgtggtagttattcgctatgaaggtccgaaaggcggaccgggaatgcaggaaatgctctatccgaccaccttcctgaaatccatgggactgggtaaagcctgcgcgctgattaccgatggtcgcttctccggcggcacttcaggcctctccatcggtcacgtttctccggaagccgccagcggcggcaatatcgcgatcattgaagatggcgacatgatcgccattgatatcccaaatcgcggtattcagctgcagctgagcgatgctgagatcgcggcgcgccgtgaagctcaggaagcacgcggtgataaagcctggacgccgaaagatcgcgagcgtcaggtttcctttgcccttcgcgcctacgccagcctggcaaccagcgccgacaaaggcgcggtgcgcgataaatcgaaacttgggggttaa

SEQ ID NO: 176543 - DNA, 930 bp, Klebsiella oxytoca
atgacgacgaaaaaagctgattacatttggttcaatggcgagatggttccgtggggagaggcgaaagttcacgtgatgtcccatgcgctgcactacgggacttccgtatttgaaggcatccgttgctacgactctcacaaggggccggttgtgttccgtcaccgtgaacatatgcagcgtctgcatgactcagccaaaatttaccgtttcccggtttcgcaaagcgttgatgagctgatggaagcctgccgtgaagtcattcgtaaaaacaatctgaccagcgcctatattcgcccgttagtttttgtcggcgacgtgggcatgggcgtcaacccgcctccgggctataacactgacgtgatcatcgcggcgttcccgtggggcgcctacctgggtgccgaagctctggatcaggggatcgatgcgatggtttcttcctggaatcgcgcagcgccgaacaccattccgaccgcggccaaagccggcggtaactatctctcttcgctgctggtcggcagcgaagcgcgtcgtcatggctatcaggaaggtatcgcgctggacgtgaacggctatatctctgaaggcgccggtgaaaacctgtttgaagtgaaggatggcgtgctgtttaccccgccgttcacctcctccgcgctgccgggcatcacccgcgacgcgatcatcaaactggcgaaagaactgggtctggaagtgcgcgaacaggtattgtctcgcgagtcgctgtatctggccgatgaagtatttatgtccggcacggctgcagagattacgccggtgcgcagcgttgatggtattcaggtgggcgaaggtcgctgcggtccggtcaccaaacgcattcagcaagcattctttggcctcttcaccggtgaaaccgaggataaatggggctggttggatcaggttaataactaa

SEQ ID NO: 176544 - DNA, 258 bp, Klebsiella oxytoca
atgatgcaacatcaggtcgccttgcaggctcgctttaatccagaaaccttagaacgcgtgctgcgcgtcgtgcgtcatcgcgggttccagatttgcgcgatgaatatggaaaccgccgccgatgcccggaatattaatatcgaactgaccgttgccagccagcggcccgtcgaattactgtttagtcaattaagcaaactggtggacgtcgcctgcgtcgagatccagcaacctacatcacaacaaattcgcgcctga

SEQ ID NO: 176545 - DNA, 1647 bp, Klebsiella oxytoca
atgaatggggcgcggtgggtggtacatgctttgcgagcacagggtgtcgatactgtttttggctatccgggtggcgcaattatgccggtttacgatgcattgtatgacggcggcgtggaacacttactgtgccggcatgaacaaggcgcagccatggcggctatcggctatgcccgggctactggcaaaaccggcgtatgtattgcgacgtcaggaccgggcgcaaccaacctgatcaccggcctcgccgacgcgctgttggactccgttcccgtcgttgccatcaccggccaggttgccgctccgttcattggtactgatgcattccaggaagtggatgttctcggtttatcgctggcatgcactaagcatagttttctggtgcagtcgctggaagagctgccgcgcgtcattgccgaagcattccatgtgtcaaactcagggcgccccggcccggtactggtcgatatccccaaagacatccagctggctcagggcgatctcgatccgcatttctccatggtagccgatgacgttgacttcccatatgcggatatcgaatacgctttgcagatgttgattcaggcgcagaagccgatgctctacgttggcggcggcgtgggtatggcgcaggcggtaccggcgctgcgtgaatttcttgccgtcacgcagatgccggcaacgtctaccctgaaagggctgggcgtggtggcagctgattatccatactatctgggcatgctggggatgcatggaactaaagcggccaatctggcggtgcaggagtgcgatctgttgattgccgtaggcgctcgctttgacgatcgcgtgaccggcaagctgaatacattcgccccgcacgccaaagttatccatatggatatcgatccggcagaactgaacaagctccgtcaggcgcatattggcctgactggcgacttgaacgtgatgctgccggcgttgcagcagccgctgtccatcgatgcctggcgtcagcgtaatgcacagctgcgcgccgagcacgcatggcgctacgatcatccgggcgaggccatctatgctccattgctgctgaagcagctttccgagcgcaaaccagcagattgcgtcgtgaccaccgatgtgggccagcatcagatgtggtcagcgcagcatatgacctatacgcgtccggagaatttcatcacttccagtggattagggaccatgggctttggcctgccggcagcagtgggcgcacaggtggcccgtcctgatgatacggtaatctgtatctccggtgacggctccttcatgatgaacgtgcaggagctgggcaccgtaaaacgcaagcagttgccgctgaagatagtgttactggataaccagcgtttaggaatggttcgacaatggcagcagctgtttttccaggaacgttatagcgaaaccacccttaccgataatcccgattttcttactctggccagcgccttcggcattcctggtcaacacatcacccgtaaagaccaggttgaagcggcactcgacaccatgctttcgagccaggggccttacctgcttcatgtctcaatcgacgaacttgagaacgtctggccgttggtgccgcccggtgccagtaatgcagaaatgctggagaaattatcatga

SEQ ID NO: 176546 - DNA, 1521 bp, Klebsiella oxytoca
atgtcactcgccattgtttacacccgcgccgctcttgggatcggcgccccccttatcacagttgaagttcatatcagcaacggactccctggcctgacgatggtagggttgcctgaaacaacggtcagagaagcgcgtgaccgggtacgtagtgcgattatcaacagcggctacgcctggccggcgaaaaaaatcaccatcaatctggcgccagccgatttaccaaaagaagggggaagatatgatttacctatcgctctcgcgcttctggtggcctctgagcagctaaatgctcccaggctaaatcaatacgagtttgtcggcgagctggcgcttacaggcgctctacgtggcgttcctggggctatatccagcgcgatggaggcgataagagcgggcagaaagattattgtctctcatgagaattctcctgaggtgggtttaattggcggcagtgactgtcttatcgccgcccatcttcaggaggtctgcgcctttctggagggaaaaaacccgctaaatcatcctattccggaagcggagacctcagatgagtcttcattagacttgcgcgaggttattggtcagcagcaaggaaagcgagcgctggaaattatcgctgcaggcggacataacctgctgatgataggcccacccggcacagggaaaacgatgcttgcgagtcggctgcctgggctactaccgccgctgagtaaccaggaagcgctggaaagcgcggcaatacttagcctggtcaattccagttatgcgatgaaaaactggcgccgcaggccatttcgagctccgcatcatagcgcgtccctggctgcgatggtgggtggcggctctattccaacaccgggagagatctctctcgctcataatggcgtgctgttcctggatgagctgcccgaatttgaacgcagggttctggatgcattaagagaaccgattgaatccggggtaatccatatctcccgcacgcgcgcgaaaatcgattatcccgcccgttttcagcttattgcagcaatgaatcccagccccacgggccactatcagggtcagcataatcgcgcatctccagaacagacgctacgctacctggcccgtttatctggcccatttcttgaccgtttcgatctctcactggaaattcctctgccgccgccgggggtgcttagccggggaacaaacgaagaagagagcagcgcctgcgtacgccaacgcgttttggctgcgcacgaaaggcaactgtcacgacagaaaaaactcaatgcaaatctggggaataatgagatgaaaatctggtgccagcttcatcaagatgacgcaatctggctggagcagacgcttacgcaactggggctctcaatccgggcctggcagcgcctgcttaaagtttcacgcacgattgccgatattgagaaggtcgatcgtattgaacgccgtcatttgcaggaggctcttggctatcgggcaatagacagaatgttgagccatctgcaaaaaatgatgacgtaa

SEQ ID NO: 176547 - DNA, 339 bp, Klebsiella oxytoca
atggcggaaagctttacgacaactaatcgttttttcgacaataaaaattatccgcgcgggttttcccgtcatggagatttcaccatcaaagaggcgcaactgctggaacgtcatggttatgcctttaatgaactcgaactaggtaaacgcgagcctgtcaccgacgatgaaaaacagtttgtttcggtctgccgtggtgaacgtgagcctgcaacggaagcagaacgcgtctggatcaagtacatggcgcgcattaagcgtccgaagcgtttccatactctttccggcggcaagccgcaggtggaaggcacggaagattacacggaaagcgatgattaa

SEQ ID NO: 176548 - DNA, 822 bp, Klebsiella oxytoca
gtggatacggaattgctcaagactttcctcgaggtgagcagaactcgccactttggccgagccgcagaggcgctttatctgacgcagtcagcagttagctttcgtattcgtcagctggagaaccagctgggggtgaatctttttacccgccatcgcaataatatccgcctgacttcagccggagagaaactgctgccttatgccgaaaccctgatgaacacctggcaagctgcgcgcaaggaggtcgcaaatgcctcccggcataacgaattttcaatcggagccagcgcttcactatgggaatgcctgcttaacgagtggttaggaaagctctatacagagccctataacctacaatttgaggcgcgaatcgcgcagaggcaatcgttggtcaaacagctgcacgaacgtcagcttgatctactgatcacgacagaatcgccgaagatggatgaactaagcagccagttgctgggtaattttaccttagcgctttattgcgcctcgccggctaaaaatacaaatgaattgaattatttgcgcctggaatggggtcctgactttcaacaaaatgaagcgggattgatcggaaatgatgatattcctctcctgaccaccagttctgccgaattagcgtatcagcagctcagcgcgcttaacggctgcacgtggttgcctgtgctctgggcgcaggaaaaaaataacctgcatactgtcactgacagcgtgacgctttcaaggcctctttatgcgatttggctacagaacagcgataagcaagcgcaaatccgtgagatcctgaagcacagcatattaggatag

SEQ ID NO: 176549 - DNA, 543 bp, Klebsiella oxytoca
atgaacaaattagcacttatcgttatttcagcattgtccctgagttctgctgcggctctggccgataccgttacggtgaacggcggtacggtgcattttaaaggggaagtggttaatgcggcctgcgcagttgatgccggttctctcgatcaaaccgtgcagttaggccaggtgcgctcagcgaaacttgccaccgcgggtagcaccagctctcctgttggcttcaacatccaactgaatgattgcgatatcaccgtttccgagaaggccgcgatcgcttttgctggcaccgcgattaacagtacaaacccaacggtactggccctgcagggttctgccgcaggcggcgcgactaacgtcggcgtacagatccttgaccgtaccggcaccccgctggcgctggatggcgcgtctttcggcgcacaaaccacgcttagcaatggtaccaacgtcatcccattccaggcacgctactttgcaacaggcgtcgcgactgccggtaccgctaacgcggacgccacctttaaagtgcagtacgagtaa

SEQ ID NO: 176550 - DNA, 519 bp, Klebsiella oxytoca
atgagatcgcgttcagatatgactctatcaactaatattttatctaaggataaatattttactctgggcctgattgaactgcttggagaagaatttattgacaatttctttttgattatagatctcgactccaacgatcttacgggttcggagtggatttacttctcgaataagaacattgtcgcctttgcatccagcgacctggctttttataagtccgaactatttgaaaaaataaccgtacttgataagaaaagtaatacccgaagtatcctgaatttctttttaaagaaagagacctcaggaaattaccatactaaattccggctaagtctgcgtgaaaagcagatgttaagcatgttaagcagaggggaaagcaaccaggagatcgcagaagagtttggcgtgaaacttaagactatttatacgcatcgccgcaacctgatgaataaattaggctgtaaaaacaggattacgtttcaaaaattatttttcaacaataaatgtcttttcaagtga

SEQ ID NO: 176551 - DNA, 822 bp, Klebsiella oxytoca
atgatgtacaaaattcaagggacgatctatttcagaagtgatgacggcctgatgtggctggatgaggatgcatccgtcacgctaacagcaaccaccggtcgcctgcttaagttccttttagaccacagagagcatgtgatttacaggaatgagatacttgaaaaagtctgggacgcacatgggctgcggacgtccagtcatagcctcaataagtatatttcagatctgagagccgttttcagaaacctgggctgcaccgaggagattatcgttaccgttccgcgggtgggttttatgatatctgcagccattgttattgaaagaatggattatcctgctctcgcggtaaatgacgaaagcgaaggagaaggggcggttgtcggtcggggcatcggttcaaatgaggagagcgagacatattctgcggggagggttaaaaaggcccgctatgcactacttgcgctgtgcgcgttagtcatgctttttctgagcattcaaggcgaactgtatcgcccactctttgccgcagacgaggatgaaatctattctctggggagcgtcgattcatgcccggtcagaacttttaacgtaatacctcaagagcagaagccaaagatgatggccctggctcagaagcttattaagaaacaaggaatgctgtgctcaggcaatagtgttttttactttaatgtatcagaatctgtattaaaagcctctgaagcaagagtatttttagcccactgcattaactcaaaagttaagaaaggtgattggtattcatgtgaaaattattacaggccagattatgaaataccaggataa

SEQ ID NO: 176552 - DNA, 486 bp, Klebsiella oxytoca
atgaaataccaggataaaatcaggaccaaaagcatttacatactctttctggtgttggtgatagggttgatttttctctggctggtagggcatctttatcgcaaagacgactttgattgctcagccaacctgagaattgaatcaacttcatttgcctttgatgcaaaatttaaaaccttcttgcttatgcgggaaaataataccggctattttgatgtatccgggaaggtgctagtcgatgacgtgaagtacaacgtcgaaagggcgtaccatttcaactatgaaaagaaagcgaataatatttatcacctaaccaataccacagtttctaagagaaaggccgacaccatgatcgagggtatgatgcagaaagtcttttttagtcccgatccggattcaggacgctatatcaagatacaaaaaatgaaaaacgcctggatcgttcaaagtctgtattccccttcgtttatctgtgtaaccaattga

SEQ ID NO: 176553 - DNA, 918 bp, Klebsiella oxytoca
atgaacttaagacgactgaagtatttcgtaaaaatcgtcgatatcggcagtctgacccaggccgctgaagtcttgcacatcgcacaaccggcgctgagccagcaggttgcgaccctggaaggcgagctggaccagcagttgttgattcgcaccaaacgcggcgtcacgccgaccgaagcgggcaagatcttgtatacccacgcccgtactattctgcgccagtgcgagcaggcgcagctggcggtaaataatgtcggtcaaacgctaagtggccaggtatcgattggcctggccccgggcacggcggcttcggccatcactatgccgctgctgcaaacggtgcgtaacgagctgccggaagtgatggtctatctccaggaaagtagcggaaccctcctcaacgataagcttatcgacggtcagctggatatggccgtactttatgaacgttccccggttgccgggatcatcagccagccgctgctaaaagaagatctctacctggtcggtacccgggattgtccggggcagagcgtggatctgacggcggtcgcggagatgaatctgttcttgccgcgcgattacagcgccgttcgcgcaagggtgaccgaagccttcaccctgcgtcgcttatcggccaaaattatcggtgaaattgaatccattaccaccctgacggcagccattgccagcggcatgggcgtcaccgttctgccggagtccgccgcccgttcgttgtgcagcgcggccaacggctggatggcgcgcatcagcacgccgtcaatgagcctgtcgctgtcgctcaatatgtcggctcgcggcagtctgtcgccgcaggcgcaggcggtgaaggagatcctgatgtcgctggtgagtcgcccgtcgctggaaaatcgtgaattacagttagtcagttga

SEQ ID NO: 176554 - DNA, 975 bp, Klebsiella oxytoca
atgtctgatagcccggaggaaagggtgaacttccagcagctcaaaattattcgtgaagcggcccgtcaggattacaacctgacggaagtcgccaatatgctctatacatcgcagtcgggcgttagccgccatattcgtgaactggaagaagagctggggatcgagatttttatccgccgcggcaaacgtctgctggggatgaccgagccgggcaaagcgttgctgtcgattgccgagcgtatcctcaatgaagccagcaacgttcgtcgcctggcggacctgtttaccaacgatgcctccggcgtcttaaccatcgccactacgcatacccaggcgcgctatagtctgccgccggtgattaaagccttccgtgaactcttttctgatgtccgtcttgaactggtgcagggaacgccgcaggaaattgaaacgctgctgcataacggaggcgcggatattggtatcgccagcgagcgtctgagcaacgatccgacgctggtggcttttccctggttccgctggcaccacagtctgctggttcccaaagatcatcctctgacccaggtgacgccgttgaccctcgaggcgattgcccgttggccgctcatcacctatcgccagggcataaccggccgttcacgcatcgatgaagcctttaaccgtaaagggttgatgccggatatcgtattgagcgcacaggactcagacgtcatcaaaacctacgttgagctggggctgggcgtggggctggtggcggaacagtcgggagatgagcgggagtctgatacctttacgcgtcttgatacccgccatctgttcgatgccaataccgtctggctgggcctgaagcgcggacagctgcagcgaaattacgtctggcgttttattgaactctgtaatgcaggcctgtcgctggaggagattaaacgccaggcgatggagccggaagaggcggcgatcgattatcaaatttag

SEQ ID NO: 176555 - DNA, 924 bp, Klebsiella oxytoca
gtgcggcgcgtgaaactgctttgttcttttattatgcttctcaccagccagagcgctctggcggtgagctacccgctgccgccggaaggaagccgtctggtaggcagcccgttgaccatcacgattccgcagaacaatacccagccgcttgaggcctttgccgctcagtacggccagggcctgagcaatatgctggaggccaacccgggcgtcgatgtgttcctgccgaaatcgggcaccacgctggtggtgccgcagcagcttatcctgcccgccacggttcgcaacggcattgtaatcaacgttgctgaaatgcgcctttactactatccgcctgaaggcacaacggtcgaggttctgccgattggtattggccaggcagggcgcgaaaccccgcgtaactgggtgaccgccgttgagcgtaagcaggaggcgccaacctggacgccaaccgccaatactcgccgggaatatgccagccggggcgaaagtctgccggcatttgtgccggccgggccggataacccgatggggctgtatgccatttatatcggcaggctgtacgccattcatggcaccaacgccaatttcggcattggcctgcgggtgagccagggctgcattcgcttgcgcaatgacgacatcaagtacctgtttgataccgttccggtaggcacgcgggtgcagattatcgatcagccggtgaaatataccgccgagccggacggtagccgctgggttgaagttcatgagccgctgtcgcgaaaccgcgcggagtatgaatcggaccgcaaggtaccgcttcccgtcacgccggcgatgcaggcttttgtgaagggcgagggcgttgatgtgaatcgcgccgggcaagcgcttgaacgccgctccggtatgccggtggagattggccgttcagcgttgtaa

SEQ ID NO: 176556 - DNA, 609 bp, Klebsiella oxytoca
atgaataagcttattggcatgatggactcgccttatgtaaggcgcgtggcgatttctcttgaactttacggcgtcgagtttgaaagccatccgctgtcggtattcagcagctttgacgcgttttcgcagatcaaccctgcggtcaaagcgccgacgttggtgctggataacggaatacgtctgatggattcatcgctgatactggactatttcgaagcacaggctgccagggagcgaaaactcctgccgatcgctgcggatgcgctggcaagagacctgcaggtactgggctttatgctcgccgcgggtgagaaggcggtgcaaaatgtgtatgaacatcatcttcgcccgacggaaaaacagcatcatccgtggatagagcgcattacccgtcaactgctagcggcctgcagggaatggaatacgctactggaagatcgtccgattgctacggaccccgatcaggttgccgtgacaagtacggttatctggacctttattcaggccaggatccccgatattgttgatgcgcaagagtttcgtcacattcagtcgcttgccgaattatttgaaaatcatgctgcgtttaaaaaacatccctatcgctga

SEQ ID NO: 176557 - DNA, 906 bp, Klebsiella oxytoca
atggcggattttcccccgattgcgagtttacgtagttttgaagccgtggctcgtcttggcagcgttacgctggcggcgaaagaactacacgttacgcactcagctatcagtcagcagattaaagtgctggaggagagggtcggcttaaagctgtttattcgtcacggtcgcggcctgcagattaatgaagagggacgactctacgccttgcaggtacgcgaggcccttaaccatatcgctgacgccacccgactggtgcaggtaaagccccgcagacaggagctgacgatagcggtggtaccctcttttggaggccactggcttttgcctcgtcttgagcggtttcgggcgaaataccctcaaatcacgctgcgaatacaggcaaacctggcggtcactcatctgcagcaggaaggggcagatttggccatccgcatgggaaaaggggactgggaaggcacggagagtcattatcttttctccgatgagcttatcgttgtggctgctccatcttataacggcggtgagctaccccgtacgccgtcagagatagcgcagagcaagattatcttttccatggaatcgtggaaaacctggtgtatcaaggcagggcttgaaagagagattgtgcccggcgggctatgcataaacgactcaaatctggtgctggaggccgtccggctcggtaaaggtgttgcgctggaacgccgatctttagtccaggatgctattgcccggggagagctggaacagcttacccctttcgccgcgccttatccgtggccttactggctggtctcatcgcaagttgcagaaaagaaaaacgaagctgtgctttttaaggactggcttagtgaggaggttgttgcctggcgtcagcaaacggcaacggtagaagagagataa

SEQ ID NO: 176558 - DNA, 1233 bp, Klebsiella oxytoca
atgcgaccgaaagaagttcaggcatcggcagtcagtacgatgttcagagatgaaagtagaggtttgctttccagtaaagtcgttattgttctgggtttacttagcgccgttgctgcattatccactgatatgtacttgcctttatttccagctatcgccagcgatctgcatacgacgcctgacaaagttcagcttagcatcaccgcttttatggtgggcttaggtattgggcagctgtttattggaccattatccgatcattacggcagacgtaaattattgctgggcgggatggccctattaaccatcgcttcattagctggcgctatatctacgaacattcagctgctcattgttacacggttctttcagggactgggaggagcggctggtatcgttctttcccgagcaattatttctgatctgtgcccggggaccaaagccgctcgatattttaatctggtgctagcgatacaggggatcgcccctgttattgcaccattacttggaggagtggctgcatggtttatctggccggtagtttttgtttttatggctacaatatcattagtttccactctgctcagtagtcattttattagcgaaaccttaccccgtcatcagcgattacctttcaatctgaatgagtttatcagtcagtttatcgagttgctaagcaataagaaatatattggttatactctaattttttcaatccagtttggggcgctatttgcttatatatcagcatcaccatttatctatcaatcgacgttcgatttatcctcaggaaagttcgctgtaatattctctatcaacgccggagccatgatgtttggtagtatagtcagcgctcgctatgttatgaaatttggtgaagataacctcataaccatgggggtgataagcacgctggtgatatctatattgctttgtatcgttgacaatatttctcatttccagtttgagatcgcggcggtactactgttaatgatgatgtttactatggctttgacatttggcaatgccgcgagtatggccatggcggcatcctctcacttaaagggaacgggttctgctattttaggggcttttcagtttggtatcgctgcgataaccccgtcactgcttggatttggagacccgttgtcactactgccgatgtcgctgattatcgcgggatgttgtttaattgccatcatggcattgttattgacaggtaaaaaaggatag

SEQ ID NO: 176559 - DNA, 2262 bp, Klebsiella oxytoca
atgaaaacccatgacgctataaaaatcattggtgcaaggcaaaataatttgcaagatattgatgtagaggtccctaaaaataaaataacagtttttaccggtgtttccggatcgggaaaaagttctttagtattcggaactatagcggcggaatctcagcgacagttaaatgacacgtttccaccttttattcgccatcgcttaccacattatggtaatcctgaagtcgatgaaattgaaaacctgtcggtggccattattattgaccaaaaacgtattggtggcaacgcacgttcgacggtgggcaccgcatcagatatttataccctactacggctactcttttctcgtgtcggcgaacctttcgtaggttattcgaatgttttttcattcaatcatcctgcggggatgtgtgcgacatgcgacgggttgggcattgccagtactattgatatcaaccatctgattgattcaaatctgtcgttaaatgaaggcgctattcgttatccttcttttgcgccaggctcatggcgctggaaacgttatgtttattcagggctttttgatgccgataaaaaaatcgcggattattcaaaagaggagcgagaattattactttatgcggataatctcactcctgaagcgccgttagccggttggcctaagagtgcaaagtttgaaggcgtcattacgcgctttacgcgaagttatttaaaacaagaaactaaagatactaaaactgaggaatttcagcgagtcgttagtttgcaggtttgcccttcttgtcagggtatgaggcttaacgaggaaatactttcctgccggattagagggaaaaatattggcgaatgcgcaacgctgcctgtcacagagttaaagctgtttgtagaaaagctcgattatcctgaagtcaggccgctgatcgaagcattgctggaaaggctggatgccatgtgtgcagtaggcttgggatatctggatttgaaccgtacgacccctagcttatcgggcggtgagtcccagcggttgaaaatggtccgacatctgggaagtagtctgaccgggatcgtttatataattgatgaacccagtaccggcctgcatccagcagatatagtgaaattgaatgttttaattggaaaactacgcgacaaaggcaataccattctgatggtggagcacgacccggacatgatagcgatagccgagcatgttattgatttagggccaggagcgggtaagcaaggcgggaatattgtctttgagggcgacctgtcggcacttaagcaatcccaaaccttgacgggtcgatatttctcttcacgggcagagataaataagaaaccgagatgtgccaaaggttatatttcggtaagaaacgccacattgcataatctgcataacttatcggtagacgtgcctttaagcgttatggtcgctgtgacgggagtcgctggatcgggcaaaagttcattcgttatgggggccctggcgccacaatgtccggaggcgatcgttatcgatcaaaaaccgatacatacctcaattcgatcgcatattgcttcctggtgcggtgcatttgatacgatccgttcgctgtttgccgaaaaaaaccatgtgtcagcgtcgtggtttagcgctaacgccaaaggggcttgtccggaatgtaatgggctaggggtaatacaaaccgatctggcatttatggatacggttacgttgccatgtgaggcctgccaggggcagcgctataacccacaagcgctgaaatatcgttatcagggaaaaagtattgctgaggtattatccctgtcgattaatgatgccggcgaatttttcctgaatgagccacagctcaggccaatttttcgtagcctggtcgaagtcgggttgggatatttacgcttgggtgaatcgttaaatcatctttcaggcggtgaatgccagcggctgaagttagcgtcacaattaaatcatgatagtgacatgtatattttcgatgagccaaccacgggtcttcatcccagtgatgtggcctcgctgttgaaactatttaaccgactggtagcgcgcggaaacaccgtcattattattgaacataatatggagttgatcgctcaggctgactggattattgatattggaccttatgccgggcaagaagggggggaattattgtttagcggtacacccgaatcgatgctggcctgtcgccattcattaaccgcagaatggttgcgcaaacattgccggatagagtga

SEQ ID NO: 176560 - DNA, 1518 bp, Klebsiella oxytoca
atggaaaataaatcagtatcattacctaccggtaatgactttttagcgggtctaaatgatgggcgagaaatatgggcttatggtgaaaaggtggacaatgttattacacatccagcgtttcgcaattcagcactgtccatagctaaattatacgacgcgctccatgacgaaaagtatcaggctatattaaccacgccttgtgataccggcagcggtggtgtcacccatccgttcttccgcgttcctcattctgttgaggatctgatacgcgatcgcgacgcaatcgcgcagtgggcacggcttagctatggctggttgggaagaagccctgatttcaaagcgtcgtttcttacgactctgggcgccaatcccgaggcctacggcgaatatacggataacgccaggcactggtacaaacgttcgcaagaggagctactttactggaatcatgccatcattaacccccctatcgaccgcaatctcccgcccgaccagattgaagatatctgcattcacgtcgaaaaagagtgtgatgatggcgtaattgttagcggtgccaaggtggttgctaccggctcagctttgacgcattacaatttcatcgcgcattacggtttacctgtcaaaaaaagagaatttgccctggtatgcacattacccatgaatgccccaggactgaagctggtttgccgcccctcttactccttagccgccgaaaaggtcggcagtccttttgactatccactatcctcacgctacgacgagaatgacatgatcttcattctggataaggtgaagattccctgggaaaacatttttatttacggcgataccgctaaagcggccacgtttttacccagttctggcttcctgcaccgctcaaccttccacggagtgacgcgtctggcggtaaaaattgattttatttgtggtttattcattaaaggcgtggaagccaccggcgtagccgatttccgcggcatacagacgcgcgtcggggaaatgctggcctggcgcaacctcttctgggccataagtgatgctatggctaaatcgccgaacccctggcacaacggcgccctcctgcctaacctggattatggtttagcctaccgttggtttatgagtctcggctatccacggatcaaagaaattattgaacaagatcttggcagcgcgcttatttatatcaattcgcatgccaaagatttcgctgcgccggaactggaaccttatctgaaaaaatatatgcggggctccaacggaatggatgccgttgaacgcgtcaagctcatgaagctaatctgggactccgtaggaacagaattcgccagcagacacgaactctatgaacgaaattataccggtagtcatgaaaatgttcgtatcgagctgttactcgccgcacagatgtcggggcaggtacaagaatataaaggtttcgccgaacaatgtatgatggattatgacctggatggctggctggatcgcgattaccactggcctttagacgaataa

SEQ ID NO: 176561 - DNA, 1950 bp, Klebsiella oxytoca
atgttatctaaagattcagcaaatcccgacgagctttcggctcatctggccaatcttgatagaccctttgcctgtatttaccgcccccaatgcgaacctatcaacgcagtattgtttcttgaaggggatattgagctaagccagtccctttcagaattagcgctggatcctcccctggacgcgacgggcaaatgctcatttaacaaattgatattattgccatttaatcagctgaaagaaaaaggatatgcctgcattgacgatggtgaacagacgatcgtaatgcacattgagcggcaagactattatcctatagattcatttatcgcagccattaatgaccatgatatcaagccacgaaacctgcacttcgatcttgatgaccaaacgtatggcgacattgttgataccgtgattgatcaggaaatcagctccggggaaggcagcaactttgtgatttcacgcagcctggagggcgatataaccgactttagtatccgccacgcgctgacgctgtacaaacggctgctgcaatctgaatgcggatcatactggacatggatgatctttaccggcagccgctatttcatgggtagtacgcctgaacagcatatccaggttgatgagcagaacgtggcgatgaatcctatcagcggcacattaaaataccccgataccgggaatatggcgcacgtgctggatgattttctgcaggataaaaaagagcgcgacgaactatttatggtggtagatgaagaactcaaaatgatgagtagcatctgtcagcgtgatattcaggtatccgggccgaagctcaaggctatgtcgcacatcgcgcataccgaatattttatccatggcaaatcagatcgcagtctgaaagaaatcatcaggcaatcgctatttgcgccaacagtgaccggcagcccaatagaaagcgcctgtaaagttatcgctcggcgagaacgccgcggacgcggttattacagcggcatcgttgctatagcgggtgcgcaagaaggtaaacgctatctggactcggccatcatgatccgcacggccgatatttccgctcagggacattttcggcttacggcgggttcaaccatcgtcagaagttccatcgcgcaaagtgaagccggtgaaacacgcgccaaattacaagggctaatgcattcgttcttctctgaaccaagcgccgggacgccaaaccggacaggattgtctgcagaactttgccatcgggctgaccagatactggcacaacggaatgcacgcgcctccgccttttggctggataactcgcaattgggcccgcgcactctactctctcatcatgccatcacactgatcgacatggaggacaacttcaccgccatgattgcctatcagttacgcagcgcgggttgcgccgtcaccctcattccctggtatgactgtccgagcgagctaacgcaactcaccgatcgcgacatcctattcattggtcccgggcctggcgatccaaccaatatacaactcgaaaaaatacgcgtgggccgaaaaattattgcgcaacggctccgggagcagcgtccgctaatcggaacttgtctgggacatcagttaatttgcgccgaattaggcattccgatcgagcggctggtcaataaccgtcagggtagccaacatcagatatccattcagggaaaacctcataccgttggtttctataacagtttctccgcactacatcagcggccatgctggtacagcccggagcatgacaaaacagtccagctggagcgacttccttccggtgaaattgtcgcattatcgtcaggcaacgttgcctccatacaatttcataacgaatcattcctgacgcaagacgcattttctatttatcaatggctgatacagaacgccttaacaacaacggcaactcttagccaacaagatgccgtttaa

SEQ ID NO: 176562 - DNA, 633 bp, Klebsiella oxytoca
atggaaaagatacggccctatccattgccgacagaacgtcaattacccaaatcaattgcagactggcgacccaacagttcaagagcggcgctactcatacatgatatgcagcgttattttctcgatttttacactgctgacgcctcgccgatagcgcaggtcatcgacaacatctaccgcttgcttagcgtcgcccgacgtctgcatattccagtattttatactgcccaacccggcgacatgacgccacaacagcgcggcttgctgcacagtctatggggttcaggcatgaacggcagccaggaacataaacagattgttcctccgttgacgcctctggaaaatgagtgggtattaacgaagtggcgttacagcgccttctttaactctcctcttctgagtactttgcacgaactcaaatgcgatcagctgatcgtctgcggcgtttacgcccatatcggttgtttgtgcacagcgcaagaggcctattccaatgatatcgagacattttttattgccgatgcgctcgccgatttctccgaagaaaagcatcgtctagcgcttgagctagctgcggaaaccagctcagtcgtgctgtcaacccgacaagctatcgacgcattggaacattaa

SEQ ID NO: 176563 - DNA, 786 bp, Klebsiella oxytoca
atgacttttgataaagattatattgccgttattaccggcgcatgcggtggcattggcgaatccgttgcccacgcgctggcgaaagaagggctgtcactagcgcttcttgataataacgccactcagctggcaacccttgtagccacactacaagataaccatccgcagcccattgcaggctttactgtggacgttgccgacgaccgctgcgtagcagaggcctttaccgcagtcggtcatcaactgggcccggtagggtatctggtcaacggcgccggcgtactgtgccacgccagcgtggccgaaacacaacctcaggattgggcgaaaacatttgccgtcaacgcgactggcgtatttaacaccagccgccatgcggccaatctgatgatggctcagcgtaaaggcagcatcgtaactatcgcctcaaatgcagcgcgcgtgccgcgggcgacgatggccgcctactgcgcttcaaaagccgctgcccaggcatttacctatgctctggggctggaggtcgctccgtatgggatccgttgtaatgttgtcgctcccggctcaaccgatacgccgatgctgcgcggcatgtggcatagcgaaagtgacaagcaaaacacgctcaacggtaacccacaacaatttcgcattggtattccactcaacaaagtcgctacggcggaagaaattgctgccgcggtctgcttttacctgtgcgaagaatcagggcaaaccacgctatcaacgttattggtcgacggtggtgccgcactcggcagctgctaa

SEQ ID NO: 176564 - DNA, 1170 bp, Klebsiella oxytoca
atgacatcatttcctggcaataagtccaactggcaacagccgttctggagcgataaggacatgcttgccctggtcaaaagtgaattagacaatcttccagaattattaagttttgcagaaataagtgaactcaataaagcattagccgccgtttatgcaggaaaaacaatgatatttcaggccggcgactgcgctgaaagaatttgcgaatctggcgcgttacatgtacggaaaaaattgatcttccttgagcaaatgtcccgcgaattctcaacactgacggggctgccgatattgacggtaggtagaattgctggtcaatatgctaaaccccgctcgcaacaaaacgaagtcgatggcgacagggtacttcccgtgtggcgcggtgattcagtcaaccggcccgaagcgacaccagaagccaggcgtaacgatccgcaacggatgctgctgagctatcgtgctgctgcggaaacgctggccgaaattaaacgttacgaacgggaatatccccgcgatgttcatcacatttggaccagccatgaagcgctgttgctggactatgaaaccactcaaatccgcactaatccctacggagaatcatacttagccagcacccattggccctggatcggcattcgtactcttgcgcctgacagcccacatatcgccatgctggcgaatatcgccaaccctgttgcctgcaagattgacgccagcgtaacgccatcgttcatcgcgacactttgccgacagctcaatcctcagcgtattcctgggcgtctgacttttatttcgcgttttggccgttcacacattcatcggttgggcgcgttgattcaggccgcacaagcaaccgaaacgccggtgttatggatgtgcgatccaatgcatgggaataccgggaaaacgcgggcgggcaataaacgccgcgagcttagcgacatgatggctgaaatctccggtttcctgaggcaggtgaaatcacataacgcctgcgccgctggactccatctggaagcaacgccgaatccggtcatcgaatgcttctgtgaaaataatcaccctgaagaacatgaacttaagcaaattctctgcgacccacgcctgaacgtagcgcaaacgcagatgttattaactcactggaaagagggacaacatgacttttga

SEQ ID NO: 176565 - DNA, 1521 bp, Klebsiella oxytoca
atgacgcattcagcatatgtctatcagttaaaggctgtccctgatatatttgatgagatttcgcaacgttttccggacagggttgcgttaattttcgatcaaagaaaaataacctatcgagaacttgctgagcaatgttcagcgctggctgcagtgttgcaaaataattgcctgataaaaggcgatatcgttgcaataaaaatagaacgtagcccggagttatatatttttatgctggcgctcatgaaaataggcgctgttatggttcccgtgaactcgaatagtcccgaacgctatattggtgaggttttaagtgcggcgggagccagatacctgattagcgatgatgtaacaagcgtgcccggcggagcatggcacgtcttgtcgagcaggacgctgatacaaaactgcgctcaacaaagaagcgggaattacccggtattaagcgctgatgatccggcgctcatattgatgacctctggttcaacaggaaaaccgaaaagcgtactgattgctcatcgcgggattgccagactgggtctgccggtaccggcgttggggaatagcgagcgggactgctatttgcaaattgcagatatttctttcgctgcctcagctaatgaaatctggatggctttattgaccggagcatgtctcacgattgcgccgcctggcttgccggatttaatggccctggcacggcagatcgaatcggataacgtgacgatgctattcctctctggcgggctgttccggctatttgtcgaggtttcggtcgaaacactgcatatacctgattgtgtggtggtgtcgggagactttgtcaatcctcgcttatttagcgtggcagtgcaggccggtaaagccaaaatatttaatggattaggctgcacggaaaattcagcgatctcgtctctctatcatattcagtcggaggagcaattatccagtgaatctcctgtgccggttggtactccactccctctggttgagatggtggtattcaatgaacggttgcaaccctgtacctgcggtgaatatggggaattatttatcgcaggggctggagtggctctggggtattccgatccgcaactgacggcggaaaggtttatcaccataccgtatcaaggcactgacatgcttttctatcgtaccgatgatcgggcaacttacgaccaggatcgcaatatcgtcctggtcggacgaggcaaccatatttgtaaaatacgtggcttccgcatcaatatcgccggtattgagcacctgttgcgcttacatcacgctgtagaagatgtgctgattgtggtagaggagacgccggatgaaccgcgattacatgcttgttatgtcacgcaggatgacgggctatccgtagcggatttaaagaatcacctcgcaatgcatgctcctgcctggatgatacctgaaaaatttagccgtctggcggtactgccaatgaccgctaacggtaaaaaagatcgtttacggttaaaaaattctttactggagcaggtgtaa

SEQ ID NO: 176566 - DNA, 231 bp, Klebsiella oxytoca
atggacaacgttgagcaacagctactctcgatttggcaggcgattattcattcagaggcgattaacccgcaagaaaatttactagaccagggtggtaactcattacatttcataaagttggcgtcaatggtaagcaagacatttaatttggctgtctcgccggcggacattttcactgccggaactattgctgcgctggctcagaccattcggcaacggcaaaagctctaa

SEQ ID NO: 176567 - DNA, 4371 bp, Klebsiella oxytoca
atgccatcattcaatagcggcgagtcaaaaaagggctgtttgaacaaggagtgtggagaaagtgcggtaacgtatctgccagctacgcccgggcagcaggcaatgtggtggctggataatacgctggagcagccccaatgctataacgtgccggtgctgctgaccgttaatgcgacactggacgctgatattatgcagcgcgctgtggctgagctgaccttgcgccatgaaatattcagaacgcgttttgtttatcttgacggtaaattacaacagcgtatcggcgctgatggctatctctctttttcccatcgacaaccagagcagacggaaacccctgaatccgtcacggcacaactggcggctagccgtttatcattagctgaggggccgctgagtatcattaatatgctcagttcagactcaggtacaacctggttagcatgctgcttccaccacatcattattgatgccccctcagtacgtattgtcttgcatgatttgctgcgaatctattgtgcgcttgacgagatgcgcgttctgccagcgtttaacggcacgggaagctatcaggaatttactcgttggcaggccgcgtcccttgcggcggctgagtgcgaagatatgcgggtttattggcgacaggcactgcatccagctccacccttgtcggacctcccggtcgattttccccgtcgtcttcgggaagataccaaagccgcctataccatgctggcgctgaacgaacaggaagcggactcactgcagcggcacgcgagatcgttgtcaatgactccatttatgtatatgtccatgtgctggcaatttttcctcagccgtatgagcgggcagaacgatattaccgttggcgtgccttttactctgcgggatcgcagcgagtttgccgaaacgccgggatatatgatcaatactctgccggttcgcgtgcaggtcaatgaagatgacacggtcagcacgctggctgcaaaggtacgtcaatcttttattggcgcacatttcaataagctgctccctttcaatgaaattgtcgcactgtcgcgtgaaaacgcggggcaggacagtcctctattcagaacgctgttggttatgcccgatacccggggcgatattttcaacgacttgccttttaaagtcatgctggatgactattttagccagatggcaaaatacgatctgacgctgttctttgaagcgcaaccgcagtggaagctgacgctggagtataagacggcgttgtatcacccgcagaccattgactactggttgaaaatctttcgccatttattaagcgcgatgggcgaggacggcgaggtattactgtcatccctgaggctgttggatgcaccgttaagtcgtgaactggttgttcgatctagtcttaaatcgtgcgcggaggcctggcgatttgacgccctggcggctttcaatcagcatgctataagccactctgcggatactgcgttaattaccgctaatggcacacgatcgtatggttggttagcggaacgttcagggcagattgccgcttacctacagcagcagttaaatatcgcacctggcaaacgtgttgcattattactggaaaggaatgccgaggcgattgccactctttttggcgtgttaaaaaccggcgcggcctacattccgatcgatccgcaatacccgcaagagcgaattggttacatgttgcaggacgccagtgtggattgcatcgccacgacacgatcgctggtagcaaaattcccagtgtctggctccgtacctctgttgttaatcgatgatattcccccggagtaccctggggaatactcttatatcaaaagaatgcccgacgatgagctgtatatcatttatacatcaggttcaaccgggcagcccaagggagtacggttattaaataaaacgctcaataacctgattaagtggcaacgagatgtttctgagtgcgatcaaggagattgtactctgcattttatgtcactttcttttgatgtctcggttcaggagatcttcggcacgttagctggcggtgggtgcttatatattgccagtgaagaagaacggagagatctggatcttctgcaagaggttatccaggagcaggggattaatcgtctctattttccctatgttgctttgcaacagttcgcgcatttgagcgcattggccaacaggcaattcccgagtttaaaagaggtctactccaccggggaacagctcgtactcaccgcggatattaaacattttttcaggcaacccgttcgcctgattaatctctatggtccctcagaaagtcacgtctgttccgcgtatgtgctgccaccggaaagcgataaatggggagatgcagcgtccattggttaccctctacccggatttacgttgttggtggtggatgagcatttgcagctggttcccgccggtgtcgccggtgaactgctcatcgttagcgattttctctctcccggctatcacaataaaagtgaagaaagcgctcgacgttttatctctgctgagggctttgccacacaaagttgccacgcatatcgtaccggtgatctggtgaggctggagcatgacgatcggtttagctatcttggcaggatagacaatcagttaaaaattcgcggttttaggatcgaaccgtctgaagtagaagcggccatcaatgccctggaaggcgtgcaggtttcagcggtagttggcagggcagatacttcaggaagcaagcagctcgtcgcttttattgctggcttaatggatgataaaagcaatcaaaaggataagatcaaacgcggccttcgcctggttctgccggagtatatggttcccacagagttggtctttctggataagctgcctactacccctagcgggaaaatcgatcgtaaggcgttgcttaaggtggatattattgttgaatcatccgcgcagatgccagaacggtctctgacgaaaacgcaggagcaggtcagggcgctatgggaaacgctatttccgggtcgtcacatcgcactgcacgatgattttttcgccattggcggacattccttgttggccacgcagctggtttttctgctccgtaaggcattcaattgcgatattcctctacgtttgttatttaatcacccgacgttgttggctatggcagagtgcatcgacggctatgttgtcagtgaaaaggggctcgtcgataccgttgatcgttcctttgttcaggatggatacgaacgcatacattggcaggggggagagtgttcaacccctgggctgacgatgctcaccggggcgacaggatttttaggcatctacctgctgcgttcactgctattggccgggacccaatccgtgatttgcctggtaagagccaggacagataagcacgcattggctcgtttacgtgaaaatgcgatgcgctacggaatcgccgatgagattgatttttcccgggttgaagtttgcctcggtgatattggtcagcgcgatttagggttaagccctgacgcgtatagtcggttggcagagcgagtgaacacggtattccatgcagccgcacagattaattttttgctctcttattcttctgttaaacagtcaaatgtgcagggtacgctaaatattttagctttctgcggttgtggcggacgaaaaacgctccactatttatccactatcgccgtattttctccacgctatcctgaatcgcctatcgtggaacattgtgtgccggggcatccggaagcactgtcgattggttatacgcaaagtaagtgggtggctgaacgctatgttatacaggccagagaacaaggacttgatgctaacgtatttcgcatcggacgtattggcggagacagccgaactggggcctgccagagcgatgattttttgtggcgccagataaaaagctttatccagatgggattggcgcccgatccgtcttccctgtcaacggacctgctgcctgtcgactttgtcgctgaagcgatagttgctttagcgcgttcagaggctactcgacaggagaacttccatattttccatcctcagagcatccggtttgacccggtgtatcgggcgattcgttctctgggctatccgttagaaacgacttctgacggcgagtggttgcaacaacttgagctgtgtgtcacccaagggcgcgaggttgcgctggggccggtcattcatctctttaaagagaatttgttggatactggcgataacgcctatggtaatccagagacgactaagcgtattacacaactgggcttgcgctttcctgaactgtcggaggagactttcaaacgtatgattgtttatttccagcggcagaaagaaattgtctag

SEQ ID NO: 176568 - DNA, 393 bp, Klebsiella oxytoca
atggttccagcactatttgataaatatatttcggcagtgatggagaagtcatcggacaagctggcatcccttttctctgttaatggacgtttgtcgttgcctttccgtcgcaatagagaggtgattgttggccgtgaaaatattcgcttacactatgctaatggctttggcgttgcgcccttacgctttacctctatagaggatgaacgattccactatacgaataatcccgatgtcgtcattgttgaatataaactacatgggaatactctgccagatgggaaacagttctctttgttatatgttaatgtgattgaaataaatgatggcaagataactgaattaatagattatgaggatgttttgaacagagaatatatctttcaggattag

SEQ ID NO: 176569 - DNA, 498 bp, Klebsiella oxytoca
atggaaatgaataaaaaagtggctagtggttccgagcgcgaaatatcattgaatcgtcaatttgaagatgctttagggaatttgcaatgcgtacttgttgcacgtcgatcgttgattaatcctgatggtattaactggccgcaatacgatacgttgtatattttacgtcagttccagccgatgactccaagcgcaattggtgaaaagctcggatttgcgcgtagtaaaatgtccaagatcctgcggatgttgaaagataagcactttgttgagcaggagtcggcagaaagcgacaagcgagaaatgctgacgaggattacggaaaagggtattgaattcctgaattctgcagagtccagcaggcgcataatggctgagcaggtggcatcctgtatgtcgcagggagagattgctattttcgctgagctttgtacaagggctgccaatatattacacgagaatattaaaggtaaactcgaagataccagtgaaaattaa

SEQ ID NO: 176570 - DNA, 1452 bp, Klebsiella oxytoca
ttgaacgtcacctccgcattacgccagtccgtcgaacgcacgtcctggtttaaaaaacgcaagacctatcgcgtcctctactggcgtgaaatcagtcctcttgcggtcccgattttgctggaaaacgcctgcgtgttgctgatgggcgtgctgagtacttttttggtcagctggctcggtaaagaagcgatggcgggcgttggcctggccgatagcttcaacatggtgatcatgtctttttttgccgccatcgatctcggtacgaccgtggtggtagccttcagtctgggcaagcgtgaccggcggcgggcaagggcggcagcgcgacagtcgctggcgataatgaccctgttctcgattattctcgcggcggttatccatgcttttggcgcggaaattattaattttgtcgccggagatgcgacagaagaagtgaaaggcctggcgctgacctatcttgagctaacggtgttgagctatccggcagcggcaatcgccctgatcggcagcggtgcgctgcgcggagccggaaccactaaaattccgctgttgatcaacggcgggatgaatattctgaatatcattatcagcagcatcctgatttacggcattttttcgtggcccggcatgggggttgtcggcgcgggtctgggattaaccatcgcccgctatattggcgcggtggctactatctgggtattaatgatcggctttaacccggcgctgcgcatttcgctgaagagctactttaagccgttcaacttcgccattatctgggaagtgatgggcattggtattcccgccagcattgaatcggttttgttcaacggcggcaagctgctgactcagatgttcgttgccgggatggggactaacgtgattgccggcaactttatcgccttctccgtggctgcgctgattaacctgcccgggaacgccctgggttccgcatcgacaattattaccggcaggcgtctcggaaaagggcagatcggccaggctgaacgtcaggcgtggcacgtcttctggctatcgacgatcgtattgacgctgatcgcctggggaaccgcgccgtttgccggcctgatcgcttcgttctataccagcgaagaggatgtcaaggtggtggtgaaagagctgctgtggctcaacgccttctttatgccgatttgggcgatggcctggacgctgccgtgcgcctttaaaggcgcacgtgacgtgcgctacaccatgtgggtatccatgctcggcatgtggggctgtcgcgtcgtggcgggctacacgctggggattgtgctgggtatgggggtgattggcgtctggttggggatggtgcttgactgggcggtgcgcggcgttttgttttactgtcgaatggtcagcgggcggtggctgtggaaatatccgcgtaccaaagcgcaggcagaggagaatcaggcgcaggctgaatag

SEQ ID NO: 176571 - DNA, 1455 bp, Klebsiella oxytoca
atgaaccagaaagccgccaggctgaccccagaagaagcgctcacgcagctcgaagcgctctatgaaaaatcggtcaatgcgctgcgtaaagctatcggcgaatatattcaccataatacgcttcccgataatagcgcccgtgcggaaggactgttcgtttacccggagctgtcggtatcgtgggacggctcggagcataaagccttaaaaacccgggcctggggccgttttacccataccggctgctataccaccaccattaccaaccctaaactgtttcgcgcctatttgctggaacagctcaccatgctgtatcaggattacgatgcctgcattaccgtcgggctatcgcagcatgagatcccctatccgtacgtgattgatggctccgagctcacgctcgaccgttcaatgagcgccggcttaacgcgttttttccccaccaccgagctgtcgcaaattggcgatgagactgccgatggcctgttccattccacggaatactatcccctgtcgcacttcgacgcccgccgcgtcgatttctcgctggcgcgcctgcgtcattacaccggcacgccggttgagcatttccagccgtatatgctatttaccaactatacccgctacgtcgatgagttcgtgcgctggggctgtagccaaattctcgatcccgatagcccctatatcgccctctcctgcgcgggcggtatctggataacggcggacacagaggccccggaagaggcaatttccgatctggcgtggaaaaagcatcagatgccggcctggcacctgatcactaaagagggtcaggggatcacgctgattaacattggcgtaggcccggctaacgctaaaaacatctgcgaccatctggcggtgctgcgcccggacgtctggctgatgattggccactgcggcggcctgcgcgaaagccagacgattggcgactacgtgctggctcacgcctatctgcgcgatgaccatgtgctggatgcggtgctaccgccggatatccctattccgagcatcgccgaagttcagcgcgcgctttacgacgccaccaagcaggttagcggaatgcccggcgaagaggttaaacagcggctgcgtaccggaacggtggttaccaccgacgatcgtaactgggaactgcgctactcggcctcggcgctgcgctttaacctcagccgcgcggtggctatcgatatggaaagcgcgaccattgccgcgcagggttatcgcttccgcgttccctacggtaccctgctgtgcgtctccgataagccgctgcacggtgagatcaagctgccgggacaggctaaccgcttctatgaaggggcgatttccgaacatttgcagattggtattcgggcgattgacctgctgcgcgccgaaggcgaccatatgcattcgcgcaagctgagaaccttcaacgaaccgccgttccgttaa

SEQ ID NO: 176572 - DNA, 258 bp, Klebsiella oxytoca
atggaatggtggattaaaaaactacgcgaggccacaacgtctacacatacctgggcggttctgcaaagcggccagttaacgattgtggcggaactgactccctgcgcccggcgtctacaggaaggtgataagctgacgccgttggcggacgcgctttactgcattaataacgataaaaccctcaccgtaaaggtgctcaacgccacccattttagcgccgatcgctgggccgctatcgtcaatgcccccaccggttaa

SEQ ID NO: 176573 - DNA, 1542 bp, Klebsiella oxytoca
atggcaatgatgcgttttacccggctgctgaataagtcgggcttaagaatggtctcgatggcgaaaaaagccatcattggtctactggtggtggtggtggtcttttttattggccgcatttacgaatcgcagcgcggcccggcgctgcaccgctggcacacctggacggcgaatgaaatgaccgccagcgagattgaccacgccacttttgctgactaccagacgcgggaaacgacgattttccgcgatatgaaaagccacattaccgatgcgctgagcgacgatgaaaaaacggcgattaaccgtttttacgcacaaagcctggtctatccggataagtttcatcccgactggaatcgctcctttattttgctgccgcagggcaaaccgcgcggcgcggtggtgctgctgcacggcctgacggactctccctatagcgtgcattatctggcgcagcgctatcagcagcagggatttgtcgccgtcgccccgcggctgcccgggcacggtacggctccgggcgcgctcaccgccgtggaccgcgaggcgtggatagcgacaacccgtcttgcggtgcgcgaagcgacgcgcctggccggggataacgtgccgctgcacgtggttggctactccaacggcggggcgctggcgctaaaatacgctctcgatagcctggaggataaagcgctgcgccggccgcagcagataatcctgctgtcgccgatgattggcgtcaccgcctttgcgcgttttgccggactggccggtttaccctcggtatttccggcttttgcccgcgcggcatggctgaatatcgtcccggaattcaatccctataaatacaattcgttcccggttaaggccgcaaggcagtcatggctgttgtcgcaggcgctgcagcagcaaatcgtgcaggaggcgcaaaatcatcggctttccgaactggcgccggtgttaacgtttcagtcggtgatggactccacggtgagcacccgggcggtggtagagtcgctgtatcgctatctgccggataacggaagcgaactggtgattttcgatattaaccaggcggcgaatctacgcgcgctattccgtccctcgctctattcggcggtgaatacgttattgccgccggcaccgcggccctatgccaccaaggtgattactaacgctgcccccgacacctacgagacggtggcccgcaccacgcttgccggaacgcgaagcgaaaccgtgacgccgctgcatcttgcctggccgcaggatatgtattcgctgtcgcacgtggcggtgccgttcccgctgaccgattcgctctatggccgggaaccggcggagaaaaatcgctacgggatcagcatcggcacgatctctttgcgtggggaaacctcgacgctgagcgtcgggctggatacgctgatgcgcgtgacctccaacccgtttttcccctggatgatggtgagaattgaccatcatattgcctgcagcgagcaggctgatgtcgctgcctgcctccgtccggagtcggtggcatcagaatag

SEQ ID NO: 176574 - DNA, 933 bp, Klebsiella oxytoca
atggatttcatcagcattattatgtcggcgggaaaaacctccgtcgatgtggccctttatacgctgctgccaatcatggttgtcatgctcatcgtaatgaaatatctggaagtacgcggggtgctggatgtcatcgtgcgctggctcgcgccgctgcttaagccgttcggcctaaccggaatgagcgcatttgcgctgattcagatgaattttgtcagctttgccgccccgctggcgaccctcgccattatggataaacgcggcgcctcggaccggcaaatggccgctacgctggccatgctgtttgccatggggcaaggcaacgtattctatccattaacgccctttggcctgcactggctggcctctatcgttatctccattgtcggcggactgtgcgccgccgcggtgacctggcatatcaccggccgcaggctatcaatggttgaaaacgcgcgggccgaagcgctgcccgaggccgaacagaacagccaggggattatcgccgtgattaacagcgccggctccgacgcgattcgcctggcgctcggcgcggtgcccatgctgatcctgtcgctggctatcgtcgggtttatgcaggcggcgggcctgattgagatgctccagcgtctgctcctgccgctgctgctgtggctgaacatcccggttaacttcgtgctcccggcgctggtcaaatgcgtggctggcgggacggcctatttcggcgtgatctctgaactcgtgcagcagggaaaagtgaccatcagccagatcaacgcctcggcaggtctattagtacagacgtttgacctcccgggtatcggtatctttctgggcgtcagctcgcgcttcgtgcgcctgttccgcttcgccgccgccggcgctatcgccgggatcgccatccgcaccgtgatgcacctgacgctattctga

SEQ ID NO: 176575 - DNA, 576 bp, Klebsiella oxytoca
atgcaacgttgtctacgggtagcgtggggaattgtgtttattttcgccttttcggtacaggctgaaacgaagatatatggcgagcagcgcatcagcggctggtggagctggttaaaaaacgatgtctcgcagacctggaatgagccgcaaaactacgatctgtatcttccgtttctcagctggcataaccgctttatgtacgataaagagaaaacggataattataatgaaatgccctggggcgggggttttggcgtttccagatataacgcagagggcaactggagttctctctacgccatgatgttcaaggattcgcataacgagtggcagccgataatcggctacggctgggagaaggggtggtatcttgatagtcgccgcgattttcgcttgggacttggcgttaccgccgggatcaccgcccgcgatgactttgccaactacgtacccctgccgattattttgccgcttttttccgccagctatcgccgtctgagcgtgcagttcacctatattcccggcacctataataacggcaacgtgctgtttgcctggctgcgctacggtttttaa

SEQ ID NO: 176576 - DNA, 966 bp, Klebsiella oxytoca
atgaatagtaccgggttaaatattatcaaaacgctgggatgcatgacggcggtgaccttcttcaccatctacaacacctgggatagctatgattacgactatcactggatcctcgggtttttgacgtttatttcgactatcgccacgccgctgttttttgtggtggccggttatctcgactcgcagtcccgccacgattcgcagtggcaaatgggcaaaatcaaaagcgtggttatcgtctttctgttctggatgacggtgtactatctgtgggagccttatcagcgcggctatcttatccagccgtggtttgtctttgcgtttatcgtgatttacacctttcacccggtcatcgagtggctcagccagcggcgtaaactgttttttgctgcagttttctcgctgctgctgctctcttatgggtacgatcttctgtccgcgctgtaccctgatatccatgcgctgagcctggcgccgcagtatcggctatggacatggctgctgttttatctgaccggtcagctgttcagcgatccgctcgtcgccggctggctcaggcgcgaaaaagtggttaaaggggcgatgatcgccatcccgtttatttatcttttcacctggttttacgagcgccatttctttttcgccctgtttaaggccgacagaaatgccttcattcttaccggttcacaaatttatattctggtagtcgcgctggtgatagcggccaacggcgttcggtttcgtaaaaacagcgagtttaaagaggccgttctcgccaccatcagcaaaacgatgaccggcgtctatattctccactactccatttttcacctgctcaccgcctttatcccgattaactcactgggcaccaaattaatgctgattgttctcacgtttatcacttcggtactgatttcaatgctggcgctgtcaaattcggtggtgaaaaaagtgattaccatttga

SEQ ID NO: 176577 - DNA, 3063 bp, Klebsiella oxytoca
atggatatctcccgccagtttattaacaatccaatccgcgtctggctgactattttactgctgggcatcggcgggatcttcgctctgctgaacatcggccggctggaagatccggcgtttaccatcaaaaccgcggtggtggttacccattatcccggcgcttcagcgcagcaggtggaagaagaagtcaccctgccgctggagaacgcgctgcagcagttgccctatctcgataacgtcagctccatttcctctaacggcctgtcgcaaattaccgtcaacatcgcctcgcactaccactccagcgagctgccgcaaatctgggatgaactgcgccgccgggttggcgacgccgctcgccagttcccgcccggcgtcgcttctccgttcgtgaatgacgattttggcgatgtctttggcttcttcttcgccctctccggcgagagctttaccaaccctgagctggttcgctatgccgagcagctgcgccgtgaactggtgctggtgcccggcgtcggtaaagtcgccatcggcggggcgatcccccagcaaatcaacattgatatctcattggcgaaaatggccgcccgcgggattacgctcaaccagctggcggcgatcctcagtcggttgaacgtcgtctccaacgccggagaaattaaatccggcagcgaatcgatccgcctgcatcccacgggcgagtttgccaacctcgacgagctgggcgatctgttaatcagcccgcatggttcgggaacggcgacgcggctgcgcgatattgccacgctctcgcgcgggctgagcgaaacgccctccagcatttaccacgccaacggtcgccaggcggtcaccatgggggtgtcgtttatccccggagttaacgtgattgatgttggccgtgcgctgcaaaacaaactggcgcaaatgtcggcggaaaaaccggccgggatcaacattgacctgttctacgatcaggcggcggaagtcgcccattcggtcaacggttttatcaccaactttctgatggcgctggcgattgtcgttggcgtactactgatctttatgggcgtacgcagcggtattattatcgccctgtcgctggcgctcaacgtactcggcacgctgctgattatgtatctgtgggggatcgagctgcagcgtatttcgctgggggcattgattatcgccctgagcatgctggtcgataacgctatcgttatcgtcgaaggcgtgctgatcgcccgccagcagggatcgacgcgacttacggcaattaattatgtgattcgccgttcggccctgccgctgctgggggccacggtgattgcgattcttgcctttgcgccgattgggctgtcgcaggactcgaccggggaatattgtaaatcgctgttccaggtactgctgatttcgctcatgctgagctggttctcggcgctgaccattaccccggtgctcattaagtggtggctgtttaagcctcaatcgcagccggtggcgcaggccgataccaacccgtacggcggacgcttttaccgcctgtatcagctgactctgcaggcccttctgctgcgcaaaaccgtcaccctgaccgtcatggcggcgctgctggccgccgctatctgggggtttggttcggtgcgacaaaacttttttccctcttcaaacacgcccattttctttgtcgatctctggcttccctacggtaccgatattgcgaccactgaaaagatgaccagcgatattgagactgccattaacggccagcccggagtcgtcaccaccgtggctaccgtcggccagggcagtatgcggtttatcctgacctacagcgggcaacggcagtacagcaactatgcgcagatcatggtgcgaatggacgaccagcgcagcattgccgccctgacgcagcatgtagatcgctatattgcgcgtaactatccgcaggtgaacgccagcacaaaacgcgtgatgttcggcccttccggcgacagcgccatcgaggtgcggatcaaaggtcccgacccagacagactgcgcctgatcgccagccaggttggcgatatcctctccgcagacccggccaccgatggcgttcgcaacgactggcaaaaccgcagtaaagttatccgtccccagtactccaccgcccttgggcgcgaactgggcgtcgataaacaggatatcgataacgcgctggagatgaacttctccggcagccgcgcgggactgtaccgtgagggtgccgacctgctgccggtgatagtccgcccacccgccgccgagcgccaggatgcgaatcacttaaataacgtgctggtctggagccaaagccgccagcagtatattccgctcagtaacgtggtcagcggctttcaccttgaatgggaggatccgctgatcctgcgccgcgaccgcagccgcgtgctgacggtgcagaccgatcccgacccgctcagcaaccagacctccggggatatcctctcccgcgtgaaaccgcagatcgatgcgctggtgctgccgcacggctacagcatcgagtggggtggtgatgcggaaaactccagcgaggcgcagcagggactgttcacaaccctgccgctgggttacctggtgatgtttatcatcaccgtactgatgttcagttcgctgaaaaatgcgattgccatctggctgaccgtaccgctggcgctgattggcgtaacgccgggctttttaatcaccggcatcccctttggttttatggcgctgatcggtctgctcagcctgagtggaatgctgatccgtaacggcatcgtgctggttgaggagattgaacagcagaagcaggaaaaagagcagcaggaggcgattatttatgcggccacgtcgcgtttacgccctatcctgctgacggcatttaccaccgtgcttggcctggcgcctttactactggacgttttcttccagagcatggcggttgttatcatgtttggtctgggttttgctactattctgacgctgctggttctgccggtaatttacgcctgtttccacaataaggacatgaagcgacaaccatga

SEQ ID NO: 176578 - DNA, 1086 bp, Klebsiella oxytoca
gtgaaccgttatttttctctcatcccgcttgttattttaataacaacggcttgcgatcggaaagcgccagaaattacgccgttaccgcggatggttaaggtcgctgaggtggtggctatcggcgagtcacagcagcgcgtattccccgcccgcattgagtccggagactccactgacctctctttcaaacgcggcggccagattgaatctcttgatgtgcgccagggagctaatgtgactcaggggcagacacttgcccggcttaacgcccgggaagcgcagcagcgggtgaatgagcggcaaaccgccgccaccctcgcccagcggcaattcgatcgattccagaccctggccggtcgtcaggcgatttcaaaagcggaaatggatatccagcgagccaaccgcgactccgctaatgccgcgctaaaaatagcccgggaagagctgtcgcaaacgacgctaaccgcaccgttcagcggcgtagccgccaacgttccggtacgtaaccatcaggtggtcgccgccggacagctgattgtcaccctgacgcgaaccgatctgctcgacgtggtgtttagcgttccggaaaacctctttaccgcgctggatattcgcaacgcgcagtatcgtccggtggttaaaattaacgccatgccggatcgccagtttaccgccgaatacaaagaacataccggcagcagcgacagcagcacgctcacctggcaaatcatactgaccatgccgcgacctgccgacttcccctcggtcggcggcgtaagtggaacggtcacggttaatctggcgaacctgcccgccagcgccggcaaaaatgcggtcgtggtgcctgtcgaagcggtgtttaatccggataatcgcccgcgcaacgaaccccacgtgtgggtggttcagggcagcggcgatcggctccatctggaagaacgcaaagttggcgtgggtcagatcacctcacagggcgtggtgattaccgaagggctcagcgtcggcgaacgcgtggtggcggcgggcgtcagcgaattacatgcgcaacaaccggttcgaatctggacgcgtgaacgaggtttgtaa

SEQ ID NO: 176579 - DNA, 432 bp, Klebsiella oxytoca
atgtataaaaatatcctcgtgccggttgatgtgtttgaaatcggtctggcggacaaggccttgtcccacgcccaattcctagcacaaagctcctccggaaagattcatcttcttcacgtgattcccgctttctctccagtgctgacgcgcggctttatttccgatgcacggaaaatggaagattatctgatgaatacttctaaggaaaagctggctgagctggttaaaaaactcacgctggcggaaaacgatattcagattcacattcgcagcggcaacattcgcgacgaagtgaccaaactggccgatgagctgaaggcggatgtggtgataatcggctcgcgtaacccgaatattcagacgcatctgctggggtcggaggcggcagggatcgttcgctatgcccatgttccggtttttgtggtgcgctaa

SEQ ID NO: 176580 - DNA, 2688 bp, Klebsiella oxytoca
atgaatacagaaaaaccgggcggcccgttctatcagctctccgtcgaagaaaccctgaccagcaccaacagtaccccggacggcatcagcggtgctgaagcggcagcgcgcttgcagcagtacggcgagaatgcgctaccgcaaaaagcgggaaagccggcatggctgcgctttctggcgcattttaacgatgtgctgatctatgtgctgctggcggcggcgctgctgacggcggtcatggggcactgggtggataccctggtgatcctgggcgtggcggtgattaacgccctgatcggccatattcaggagagcaacgcggaaaaatcgcttcagagcattcgcaacatgctttccagcgaagcggtggtcgttcgtcagggcaaccatgaaacgatcccgacaaccgctctggtacccggcgatatcgtcgtgatccgcgccggcgatcgcatccctgctgacctgcgggttatcgaagcgcataacctgcgggtggaagaggcgattctgaccggcgaatcgacggtggtggagaaaagcaccgaggcgcttagcggcgagctgccgcttggcgatcgtaccaatctgctgttttccggcaccacggtgagttcgggcggcggaaaaggcctggtggtggccaccggcggcgataccgagctgggtcatattaaccagatgatgtcggatatcgaaaaacaccgaacgccgctgctggtgcagatggataagctcggtaaagccatttttatcatcatcctggtgatgatggccgcgctgtttgtctttagcctgctgttccgcgatatgccggtttctgagctgatgctgtcgttgattagcctcgcggtggcgtcggtaccggaaggtttaccggcaattatctccattattctctcgctcggcgtgcagaccatggcccgtcagaaggcgattatccgcaagctgcctacggtggaaaccctcggggcaatgacggtgatctgctcggataaaaccggcacgctaaccatgaacgagatgacggtgaaagccgtgataaccgccgataaagtttatcgggtggagggcgacagctacgagccgatagggaatattcacccgatcgatgagcctgcgccggtaaccgttgcgccgggcacgctgctggaacgttatctgcgcactatcgatctgtgtaatgacagtcagcttattaaagatgaaagcgggctgtggaaaattaccggcggcccgaccgaaggggcgttgaaagtgctggcggcgaaagtcccgctcccggcgctcaacactgagctgcgtagcaaaattcccttcgattcacagtataaatatatgtcgacgctgtaccgcatcggcgatgaagagatgattttgattaccggcgcgcccgatgtcctgttccgcctgtgcaagcatcagcaaaccgaccatggcctggagccgctcgaccagccttactgggaaggcaaaatcgaagagtatgcgcgggaagggctgcggatggtggcggcagcgtggaaacccgccgccgacggtcaaacggaactcacccatcaggatttgcagcagggcgtcattctgctcgggattgccgggatgatggatccgccgcggccggaggcgattacggccatcggcgactgcctgcaggcggggatccgcgtgaagatgatcaccggcgaccatccgcaaaccgcgatgagtatcggcaagatgctggggattggcaatgcggaaaacgccattaccggcagagagctggaggtgatggacgacattcagctcagcgaagccgcgcagaaattcgatatctttgcgcgtaccagcccggaggataaattccgcctggtgcaggcgctgcaaagcaaaaaagaggtggtcgggatgaccggcgacggggtgaacgacgccccggcgctgaagcaggccgatgtcggtattgcgatggggattaagggcaccgaagtgaccaaagaggccgcagatatggtgctgaccgatgataacttcgccaccattgccagcgccgtcagggaaggccgccgggtgtacgataacctgaaaaaaaccatcctctttattatgccgaccaacctcgcgcaggggttgttgattattattgcgctactggcgggaaatttaattccgctgacgccggtgctgatcctgtggatgaacatggcgacctccgccacgctgtcgtttggtctcgcttttgaggcaggtgagaagaacatcatgcgccggccgccgcgcgaccctaagctgcatgtgatggacggctttgctatctggcgggtgatttttgtcgggtcgatgattgccgtcagcgcctttgttcttgaagcctggctacagccgcgcggctattcgcctgagtttattcgtacggtgctgttacagacgctggttactgctcagtggttctatatgctcaactgtcgcgtggcggatggcttctcgctgagtaaaggattgctggcgaaccgggggatctggattgtcagcggcgtgctgctggtgctgcagctgctgattatctacgcgccatttatgcagatgctgtttggcaccgaagcgctgccgttccgctactgggttatcacttttattatcggttttgtgatgttcctgattgtggaagtcgagaagccgctgacccggagatggcgtacggcctga

SEQ ID NO: 176581 - DNA, 930 bp, Klebsiella oxytoca
atgtcgcttcgcaactcttgtttcgcttatccgccgaaagggcggatttttatcgccgcgctggttaccaccttgtatgctcttaacgcttacgccaaacccgatatgagcccgctggggccgaatatcgccgatcgcggttccgcgtattatcatttcaacgtcacgaccttcgattcctccgatggtgaacgacattataaggtctggacggcgataccgaatacggcgccgcccgcgcaggggtatccggttgtgtacgtcctggacggcaacgcggtgatggatcggttgtccgacacgctgctcgaaaagctgacgcataaaacgccgcccgtcattgtggccattggctatcaaacgaatttgcccttcgatcaaactgcccgagcctatgactatcggccgaaagtcgaagaggatcccgccgataaccgctgggatcggcggaaaagcggcggtagcggggcgtttcgccgcctcttagaggataccattatggaaaaagttgagcgtgggatcgctatcaaccctcagcgacgggctatctgggggcactcctacggtggattatttgttattgatgcctggctgacgtcatcccgctttcagctctatttctctgccagtccttctctgggaagaggccaagccgcgctgttagacagaatggccggagcaaaaggcgaggcgtttaatcggaacgccttattcctgatggagggcgcggttgcgacgcagcgcggttcttccgccggggcagtggatacgcgcagtaaagttcagcagacggtttcccggctcaggaaaaatggcgttgcggtcaactggtggccttatcccggcctgtcgcacggggcaatgttcagtgcctcgttgcaaagcgcgctgctgacgataagcggttttccccggggctcgggcaattag

SEQ ID NO: 176582 - DNA, 408 bp, Klebsiella oxytoca
atgaacgaacaatttgacggtaacggcatttttcccaaaggggagaaaaatgaggcctatgcgcagtattttcagggcaccagctacctgaatatgctctccacggaaggggtcaatatcggtaacgtggtctttgagcccggctgccgtaaccactggcatattcaccataaaggcgggcagatcctgttggtgacgggcggacgcggctggtatcaggagtggaatcaaccggcgcgagaactaaccgcgggcgatgttgtgaatattcccgcaggcgtcaagcattggcacggcgcggccgccgacagctggtttgcccatattgccgttgccgtccctgccgaaggcgcatctaacgaatggctggagccggtgaccgacgacgcctatcgtcagctgccttaa

SEQ ID NO: 176583 - DNA, 918 bp, Klebsiella oxytoca
atgatgagcaaagaaaaactcaacgatctgcaggcctttgtcaccgtagctcaggagcgaagttttacccgggcggctggaatgctgggggtttcccggtcggcattgagccatacgctgctgggtctggaagagcgtctgggggtgcggttgttaatccgcaccacgcgtagcgtgtcgcccaccgatgccggaaatcgcctgctggccgtactggcgccgcggctgaatgaaatagaaaatgaactggcttcgctgcgcgcttcacgggataaacccgccggcacggtacgcatcaccgccaacgatcatgccattgtcaccgtgctatggccccgcctgcatccattattaaatcgatatccggatatccatattgagttcagcgttggctatgagctgaccgatattgccgccgggcgcttcgatgccggcgtgcggatgggcgatcaggtggacaaagatatgattgcggtgcgcattacgcccgatgtgcagatggcggtggttgccgcgcccggctatctttccggcaaagcggcggtggcaaggcctgaagatctgatggcacacaactgcatcaatttgcgtttgcccacccacggcgcgctttacgcctgggagtttgcaaagggcagccaaaaaaccagcgttcgcgtcgaagggcaaaccgtttttaataatacttttttgatgattcaggccgctttggacggggcagggattgcctatgttcctcacgacctggcggcgaaatatatcgctaaccgacaactggtgccgctgctggccgactggtgcccggttttcccggggtactatctttattatcctggccggaatcatcttccgacggcgtttacgctggtggttgacgccctgcgctggcaggcagtaaattgcgcagcaaaaaggtga

SEQ ID NO: 176584 - DNA, 798 bp, Klebsiella oxytoca
atgtttaaatggccctggaaagtagatgaagagtccggcaacgcggaaatcccctgggaaaaggcgcttgccatccctgtgttagccaacctctccgaccatgagcatcagcagctggtgcaaatggcttcccgctttttgcagcaaaagcgtctggttgcattacaggggcttgagctcactcacctgcagagcgcgcgtattgcgctactgttttgcctgccggttctcgaactggggatcgagtggttagatggttttcacgaggtgctcatctaccctgctccgttcgttgtcgacgacgaatgggaagatgatatcggcctggtgcatagccagcgaatcgtacaatcagggcaaagctggcaacaagggccgatcgttctcaactggttggatattcaggactccttcgacgcttctggcttcaatctgattatccatgaagtggcgcataagctggatacccgcaatggcgatcgcgcaagcggcgtacccttcattccgctacgcgaagtcgctggctgggaacacgatctccatgcagcgatgaacaatattcaggatgagatcgatctggtcggcgaaagcgccgccagtattgacgcttacgcggccagcgaccctgccgaatgttttgcggtgctctctgaatacttcttcagcgcccctgagctgtttgccccacgctttcccgcgctttggcagcgtttctgccatttctatcgccaggatccgctggagagattacgcgagaatagcccgcaggaggatggcgatagcccggcagtacactaa

SEQ ID NO: 176585 - DNA, 1053 bp, Klebsiella oxytoca
atgaacacatctggcgcatctgtcgcacatctcactagcaataatagcagcaaatcaatatccgaattagttgcggccctcgagcaaacgaatttatattcgtacatttctcaaattgcgacagtgtatggttttcctcctgtcaaaggaggtatggatgcgagcttggctgctattgaggcatcaatccagaatccaactgcggcattccccaatgcaaccgttagttcgcttgaaaaaatgattgacagagtaataatttcaggaagtaattattactctattgatgaaacaattgacccaaatttccagccatttgtccacaaaatttttaaatctagtgttcctgagtctcggtatgaaagtttatatcctaaaagactgcatgacggtaactctcttggaaacaatatcaaaggattttatttaacaaaattactggatacaggggatggtttagcttttatatattcttatatttatagtgtgaaaattaaaggaagtcgcggcttaggtctgtcatacacgcctcaacagcattttgttacagcatttgtaccaaataataaaaacagagtagaatatcgtattcctaagcttttaggtaagagagaggctgctaaagcacttcttgcattacgtaatgagttttatgatctttttgttaagaataattacaatgttgtctttcaatcattaaacttttataatgcgattactaacattattgctgacaaacaatttggcagggctgtccaaataatttatgtagggtcgaacaccggttctgatgcaaatgttattggccgtaaagatccaacttatgaggctagagatgttgaaattaaaaacacaaagagaaatgatatctattcgccacgttcagtagccgtcaggttttatagaaataatggggattttaccgagttgggtttagatcctaataaaaaatcatggttagatgatagtttttgtggtgaattttatattgactttcctgaagatacattatcattaaatggtttgattgaaaatgtcatatcaagaaaatga

SEQ ID NO: 176586 - DNA, 393 bp, Klebsiella oxytoca
atgcttttgtctaaacaaaggatgctattgaatgaacttcagggggttttctctgaaagagatgtttatttattcaataatgtactgagttacattaaaaataatgtagataaaagttattatccgattaaagtgcttcgtgaagcatctagatgtgaatctgatgcggatttattaaaactagttcgctatttctgtggagcacattctaaattattcaacataaactattgttactatgattttgataatgaagaagttcctatttcagctgagtgttattacaaagcattaattaaaggcattgctccaatcagcttagattctggacgcgaaatagacgatttcgatgttaataacatttcattctattgtatattaaatgtcaaataa

SEQ ID NO: 176587 - DNA, 798 bp, Klebsiella oxytoca
atgtcaaataatatccttagtaatattacacttgccgatttggctgcactggctaacttaaaaccattcgatgaagatctgtttgtagaaaatctttacgctgatattaataaggcaattaagaatattgaaaaaacagcagataagtattattcggatgatgaagataaaattactaatttattagttttatttctcaagggtgttgggtacaacgcttctgaacaaacaaaatcaaacggctccgtagatatcacagttcaagatcgtggacagagttttacttggctcgctgaagcaaaaagagggaattcgtataatggtgtatttgaaggaatgttacaacttgtaacgagatatattactgatgaaaaatatgctggtttctttatttatcaccaaaagttagattcttcaggttattttaaaaattggttcagctatcttagctctggtgattatgagaaatataatgcaatttctactagactcgaagaatgccgattccattttaaaaagaatccaataactaaagctttcactgggaatgagtgtttttttgattatgatatagtgtcgaaaaaaggtaaaccagttaaagttaggaatttcattttaagtttgcattataaccctgcagataaaagcgggcgagataataagtctttgaaagtaggacaagcaaaactttatgttaatgaagtttgtgataaatggttacatgaacaagaaactcctaaagatcttgaaaagtttatgaactgcttaaatacagctttccctgatttatttgtataa

SEQ ID NO: 176588 - DNA, 987 bp, Klebsiella oxytoca
atgggccgcaaaagagcgcctggtaatgagtggatgccgaagggtgtgtttttccgcccttccggttactactggaagccaggaggtactaccgagaatctagccccagcaaacgcttctaaagcggaagtttggttagcttacgagaaagtcgttgaaggtcgaaaaaaactactcacctttcaacaattgtggaaaaaatttttaaatagtgctgactatgcagaccttgcccccaggacacaaaaagattacctggcacatgaaaaatacttgttagcggttttcggtgatgcagaagcaaaggccattaaaccagaacacgtccggcgctacatggatgcacgtggtaaaagaagccgtgttcaggctaatcacgagcatagttcaatgtctcgtgtataccgctgggggtatcagcgtggttatgtaccaggtaatccgtgtgttggtgtcgataagtttcctaaaccccagcgcgaccgctacataaccgatgaagagtacatcgctatcttcactcatgcgacgcctgcagttaaagccgcgatggaaattgcgtatctttgcgctgcaagggtatctgatgttcttaaaatgaactggaatcagattcttgataaaggaattttcatacagcaaggtaaaactggtattaaacagatcaaagcctggactgagcgtcttaatgcggctgtggatatttgcagggaatggggacaggatggccctgttatcaggacaatgtatggtgagcgttattcatacaagggatttaatgaagcatggagaaaagcgagaaacgcggcttctgaagaacttggtaggccacttgattgtaccttccatgatctaaaggctaaagggatctcggactatgaagggtcatctaaagaaaaacaaatatttagtgggcacaagactgaatcacaagtcattgtttatgatagaaaaacacgcgtaacacccacattaaataaaaattaa

SEQ ID NO: 176589 - DNA, 228 bp, Klebsiella oxytoca
atgagcgatcgcttcctgactgatgaagaactgacagaggccacgggttcgccccaaaagtcactgcagaaagaggtattaacgcagaacgggatcttttttattgaacgccgggacggagcaatcaaaacgacctggtttcatattaaccatcccgtacaacgcatacttccaccagcaggccatatgcctactccaggcatgaactttgacgctgtagagagataa

SEQ ID NO: 176590 - DNA, 375 bp, Klebsiella oxytoca
atgaccaataaccagttaaccagagaacgtctggaaaaaagtaaatcatggcgtggcacctacggtgccggaagcaacgtaatgctgccagctgaagaggctgaggagctggctcgcattgcgctggccgaaatggacagtgagccggtggcgtacatgtaccgcgacaatcttcattcagatgccagatttagtctggaatcgaaaatcggcaactggtctccagaagatattaacgagtatgaagttagcgagactccgctctatcgccacgcgcagcagccggtaacaggagagccagaccaccagctttgcaaaaagtgtaatgacgggcttcgtggaggatgctctgcttgttcgtttagtggcagataa

SEQ ID NO: 176591 - DNA, 348 bp, Klebsiella oxytoca
atggataagccacttaacaagcgcgaacgcgagtttttgaagccagcaattgtccacgactgggaaatcgaaataagcccattccgtaaaacggcgttatgggatggcgattctctccttccagttagagtcggcaccatggctgaaagcctgattaagcgcggctatcttgagcgagtttctatgggattcggcagggacattatccgagcgacggaaaaggctaaaaatttacggtgttaccgttgctcgtatggcaggactatcaaaaacggtcagcaagctggcccgtgtccgcattgtgacggcggcattaagccagaaggagccaccaccaatgaccaataa

SEQ ID NO: 176592 - DNA, 225 bp, Klebsiella oxytoca
atgaaagtaggacagaggcaaaaactgtttcttaaggctatcgctcagcagggaagcagcgactttgtattctcgggcggagttaccgaccagcgagtgcgagaagcgttagagagaaaggggctgcttaaagttgtgcgtcaatctcccggctattacccgatctacgaactgaccgaggatggaaaagtgtactgcaaattacacggatgggaggctgagtag

SEQ ID NO: 176593 - DNA, 579 bp, Klebsiella oxytoca
atgacaactgatatcaccgaactggcgcagcgtatgaaggctgcagctgtaagagccaaaacggcaacagaagaatatgcatctggacacatgtctgtttcagtctgctatgccgaatgcgaagagtttaacaggctcactgatgggccagacaacatcatcgcgctggtagaggcgctggagaaagcgaagcagcacattgcgcgtcaggagcaaattctcctgaatcaggatgagtctctgtctattcgccgcggtgaactggaggcggcgcagcaggagcgggaaaactggcacaccagctttgataacgagcggttccgcgctgataagctcaaagcgcatatcgatgagatgaccgaagaacaaaccgccagcatcaatgaattaagtcggattatccagaaagaggtgaaggcgaaacgcgaagcggagaaacgcatcgccgagctggagtcccgcaccgtgaagctgccgacgccccttggatggaaaccaccctcaggacgtgatgtcgtgcgtctagatgacgtaaagaagattcttacagctgagggcatcaagtgggaggctgagtga

SEQ ID NO: 176594 - DNA, 270 bp, Klebsiella oxytoca
atgagcaagtcattcatcgtaattatccggcgagcctggtgtaacgaaggtgggcacggtatcgaatattcatccgacctcatccactacgagactcgtaatggagccatatcacacggttttcgtactgtagatagcgacgatttcaacatcggagttatcgaggacggcaagttgatttcgtttgactggatggaaaaaccggttggtgaaagcgaggacacgctggcacagattgccgagctaattggtctggaggatgcagcatga

SEQ ID NO: 176595 - DNA, 429 bp, Klebsiella oxytoca
atgaacgcaaaagagattgatggtgtatttcactgtgattgcggattttcctggtcacgcgggaaaaacggtagccataactgcgccgatggtttgcgggaaaaggtacagcagctggctgcggagaatgtggggctgaggccgttaatcgccgagaactggaatatgcgtgacctgcttcgtcagttaatggctggacgcccgggcggggtatatttcaacaaatgggagaagcttatcgctgaggttctgaacgcaacccccgtcaccgatcgcatcgtagccgggattaaggctgatggggtggaggagttcgtatccaacaccgtgcataagatttttgatgaaagcgaagcagtatcagctttggcttacctttccttggctaattcacacgtgaagcagctgcgcgagggggccgacaaatga

SEQ ID NO: 176596 - DNA, 786 bp, Klebsiella oxytoca
atgtctaaaaattcagtagacgtatacggtgccagcggcaagacaaacgcactcaagtttgatcctgaaaatctgcacctggtcaccgataagacccaccctctctacgatgagcgggtccacctgccgatcgacgaagggatggtactgaacatcaaggagctgggtgtactggagccgattatcgtctggaaagaccctgaaacggggctcacctgcgtggttgtaggccgacagcgcgttaaacataccattgaggcaaataaactccttctgaaagaaggcaaagacccactgtttgttcctggagtcgttaagcgcgggtcagcaaatcagatggctaaatacatggtcagcgaaaacgaaattcgccgacctgatacaccgcttggcagggctaaaaaaatgtcagacgcgctcgaccgcgggctcgatgaggacgacattgcggtgttgtttggctgcagttctcagaccgttcgtgcaacgctgtcacttctcgatgctacccaggccgttcgggaagcggtggagtctggcactgttactgttacccaggcacgtcagcttgcatcactaaaacccgaagaacagcgggaaaaggtagccgaaatcgaagcggcgaccgctggcactaccggtcatgaaaaagcgcgtcgtcagcgtcaggttctcggtgaagcaaagccacgtctcaaatcacgcaaagaaataacaaaagctctcgaaggtgccagcggtgattacgccgatgctctccgctgggtactcggggatgctgtatga

SEQ ID NO: 176597 - DNA, 297 bp, Klebsiella oxytoca
atgaaaacagcacagcagttaattaaagatgcctttgaggcggctaaaacaatgcctcctgctactgcagaactgcttaaagatttggcagctatgctcgatgtttcgaacgttactcttcgccaggcgcgtaaagaacgtgacgccatgaaagaagaagttatttcctgggctaaagaatgcgatcgcattgttgaacgccacactaaaacacgcagcaatatgcacgtcttagaagctatgcgggatatgaagaatatctcggcggcacccaccagcgatgtggaggctgtctaa

SEQ ID NO: 176598 - DNA, 660 bp, Klebsiella oxytoca
atgaaaatgaatgaacgcattcgcgcacgtcgtaaagaactcaaacttactcaggccgttctggcaaagatggtcggagttaaccgagttactgttaccggatgggaatccggtgattttgaaccaggaggatcaaacctccaggcgttagctgctgcgttaaaatgtaacccacagtgggtgataagtggattaggtgatccggaatctgaagatgtcacttataagcccactgaagtcttcggtgttaaaaagattcctgttctctcatgggtgcaagcaggcgagtggactgataatggtgcttctgtcactgaagatgatatttctgaatggatatatactaccgcaaacctttgtgatgaggggtttgctctaaaggttcgtggtgattccatgaccaatcctaacggagcgccaagcattccggaaggatcgctcgttgtagtcgaccctgattatggcagtccatatgaggtcaatggtaagattgtggtcgctcagttactgggctcaaccgaagccactttaaagaagtttgttattgatggaccactaaaatatttagttcctctcaatccaaattatcgggcatttgaagtcaacggtaattgcaagattgtaggcgtagtacgtcaggttataaccgaccttcaataa

SEQ ID NO: 176599 - DNA, 204 bp, Klebsiella oxytoca
atgaaaaaagatgatgtgatctcttacttcggtagcgttggcaatgtggctaaggccttaggcatttctcatgcttccgtatcaggttggggggatgtaatcccaaaaggccgagctttcgaaatccaatctcttactgagaaaaaattaaaggtcaatccttctctgtatttaaaggctaaccaatccaccgcaaaagcataa

SEQ ID NO: 176600 - DNA, 462 bp, Klebsiella oxytoca
atggtagagcagaccctgaaagaagtagtgaaagcaatgtgtaaagcatatccaggtggacgtgaggctatggccggtgctttgggaatgacggtgacgcagtttaataacaacctttacgagaaaaatggttgtcgtttcttcgaagtcagcgagctggaagctatggaggacatttccaatacgtcgttactggctgattacttcgctcgccgtcgtggtgctctgctggtggatgttccgcacctggaagaactggaccgcgtggatttgtttagccgcgcaatgcgtacttcagcagcaagagggcaagtggatcagattatcgaacaggcgcttgaagacggggttatcgaaagacatgaagctgaagaaatcatggtgcatcaccgccgccacttggctgcgcgtgaagaagagattgcggcaattatcacgttatttgcacgcaaaaagaagtga

SEQ ID NO: 176601 - DNA, 213 bp, Klebsiella oxytoca
atgcgagagctcaaccgatggttcagagatcactacggcgtcccggtcagggtcatacgctgggatccccagacacagcgcgttatatacctgcgcgaagggtataagcacgagtgtttcagccccctcgagcagttcagacgaaaattcagggaaatagaggggtcttatgagcctgttaatgccatcaaggccgatagtcatcaatcctga

SEQ ID NO: 176602 - DNA, 915 bp, Klebsiella oxytoca
atgagcctgttaatgccatcaaggccgatagtcatcaatcctgaccttgcgtacagcataggcctgaatgaagccattgcgctgcagcaggttaactactggctgcaggagactaactcagggctggagcgtgacggcgttcgctggatctacaacacaacagagcaatggctggagcaattcccgttctggtctgaatccactctgaagcgcaccttcacccggctgaagagcctgggcgtgcttaaagttgagcagctgaacaagtcccagcgcgacatgacgaactactacacgatcaactacgagagcgagcttttagatgaggtcaaagtgaccaaatcgaagaagtcaaaatgcgccgttccatcaggtcaaaatgacacgatggaagaggtcaatgtgaaacgctccaccgggtcaaaacgaaccgctgtcatcaggtcaaattggcacgatgatcttacagagaatacaacagagagtactacagagattacaggtaaagactcttgtccggttgcgctgcaaccagaccagaccgatccggcagatctcgttctggatcatttcaatcgggtaaccaactcgacctatggcaagggggggcgaaccaaaacgacgctgggttatatccgtggacgcctggccgaagattacagccctgaagacctgatgctggtggttgactacctgaacgcgaaatgggctcaggatccgaaaatgagcgattacctgcggcccaaaacgctgtttgctcccgagaactgcgtcgagtatttcgacaaggccaaaaaatgggaggccgccggacgtccagcctggactggcggcaagtgggttaaacaagacacggcgttcaagtccagttattccgacgtggattattcagtgccagcggggttccgctcatga

SEQ ID NO: 176603 - DNA, 810 bp, Klebsiella oxytoca
atgagtaagccatttttgaaatgggctggtggaaagtatacccagctggctgacctgttcgtgcatatcccggcagggaaacgcctgatagagccattcgttggtggtgggtcggtattcctgaacagcgaaaagcacgcagattacctactggcggacgttaatccggacctgattaatctgtatcagatgttagcggtggtgccggatgaagtggaattgaaggctcgctggatgttcgagcacatgcggtcaccagatggctatgagctgatccgttccgagttcaacgctcagacgctggatgctactgaacgcgcagctgctttcctgtatctcaaccggcattgcttcaatggactgatgcgctacaaccaggcgaacaagttcaatgtgggctggggaggctacaaggcgccgtattacccgctgggcgaaatgaaatccttcgccgcaatggcgcataactgcgtattcatgaccgctgactatcgccggacaatcagcctggccgggaaaggggatgtggtttactgcgatccgccttacgaaccgatgccgggaacaaccggattcaccgcctacgccgctggtggttttaactgggagaaccaggtagacctagcgaagcaatgcgtatcagcctttcaccgtggggctcgggtagtcatttctaactcatccgccccgaaggttctcgacctgtaccgggagcatggttttaacctgcaattcatcaacgcgcgccgttcgatctcctgcaaaagcagtacgcgggaagtcgcaaaagacgttgtagcgatcctttaa

SEQ ID NO: 176604 - DNA, 378 bp, Klebsiella oxytoca
atgaaactgactttaccatttccaccgagcgtaaatagttactggcgcgctccgagcaagggaccgctgaaaggcaggcatctggtaagcgagacagggcgcaagttccagcaggcagcgagagcggcgattattgagcaactgcgggccgttccccggccatcctctgatctggccgaggttcacattgtgttgtatccgccggatgagcgccgtcgggatatcgataactacaacaaagcgctgttcgatgccctgaccctaacaggcgtctgggaagacgacagtcaggttaagcgtatgctggtggagtgggggagcatcgtgaagaaagggaaagtagaaatcaccatccgacgttttcgtgcagctgcctga

SEQ ID NO: 176605 - DNA, 981 bp, Klebsiella oxytoca
atgagagcactattaacccctgagattgccccacgcatgggcgttgttctgcttcgcccaggtgctgatctcatgccgatgttcaggagagggcgggtactgattgagcctgcaccggaaaaatacagcgactacgcaactggcgctatccctcccgccacgcagccactggcagaagaccctgttttgaagccagtcttcgaaaacaaagacgtcattctgcgcgcgggtggtatcagctcgctggaggccgagctggagcgtcgttttgaatgccagtacccgcacggttcgtggcacagcgaaaattttacgttgttccggcatgagcctggcagcatccgcctttgctgggcctgcgataacctgctgcgtgatcagtacacagagacgctggcaggcattgcgcgtgagaacctggtatcctggctgataacggtcatccgctcacagctggggttcaacgaagaccatcaactgacgatccccgagttgtgctggtggctggtaataaacaatctggcgcacgtcatccctgaatcgctggcccgtaaagcccttcgattgcaggaaattaagcatcagccggtgatgaaggagagcgatattgtgccggagccagcggcgagcgaagtggtgcagaaaaaggttctcggtcttcgcgtagatcctgaaacgccggaatcattcatgctgcgaccaaagcgccgccgctgggtaaacgagagctggacgcgctgggttaagtctcagcagtgtgtctgctgtaacaaacaagcagatgatccccatcacctgataggccacggacaaggtggaatgggaacgaaagcgcacgatttgtttgtgttgccgctttgcagagcgcatcacgacgagttgcacgctgacaccgtggcatttgaggagaagcacggctcacagcttgagctgctgtttcgatttctggatcgttcgctggcaattggcgtgctggcatag

SEQ ID NO: 176606 - DNA, 579 bp, Klebsiella oxytoca
atgattaacccgtccgaggttggaaaagctggtgaaatggtcaggctgaaaacgctggaggccatctggattcaagggaagctgcgcatgtggggccgctggtcttacatcggcggcggtagtggcggcaatatgttcaatcagctgttggcgtcagggaagataacgaagaccgctataaacgatgctttgcgccgtatgaaaaaatcaggcattaccaagccagagctggaagcgttctttaaggaaatcctcagtggtaaaaataaaagcggcctggccttctgtacagacgatgaaggactgctgattgataaggtggcgggggcagtccttattacgggtggtcacaaagagctgtatcacctgctggtggagcattaccggttacggaagagcaaacgccgcatagcggaagagctctatgaaaagcatcccgactggtgctttatgacctgtagacgcagagttgatacgtggcttagtttggcagaatcgatgctgtacgcaccaatgtgtgacgcattcgacacaaatggcgacagattttacttgcaaagtgagccagaaactgcttga

SEQ ID NO: 176607 - DNA, 333 bp, Klebsiella oxytoca
atgcagcagattacaaatcatcaaatacctcttaatggcacaagcccatcagatttaaataccctgaaaggtattatcgaatccaatgcggatgtgttcgacgagcatctccttactggttttggtggtgatgcgcgatactcagtcattgatggttcttttaaaatcacaatgatagctgaaggcttttttgaatatacagctgagataaatttctacgctgggtgcgcagacatggacgacaccagcactatcaatgggactatggagtttgaaatcgaaggtgacaatatcatcatcgacttggatgaaactgtctgggacgtcagataa

SEQ ID NO: 176608 - DNA, 387 bp, Klebsiella oxytoca
atgtccgaaccaataaccggcacaggcttagctggtggcgctttaacaggggcgagtgtttacgggctgttaaccggtactgactacggtgttgtgttcggggcatttgccggttctgtcttttatatagcgacagcggcagatttgagcgccccacgacggatggcctatttcgttgtgtcctatatcgctggagttctgtgctccgggctggtcggttctaagctatccgacctgaccgggtataacgataagcctctggatgcaattggtgccgtaatcatttcggcattggccgtaaaaatactcaccttcctgaacaatcaggatattggctcgctggtggcgctaataacgcgccggggaggttccggtggtactaaatga

SEQ ID NO: 176609 - DNA, 282 bp, Klebsiella oxytoca
gtggtactaaatgatcctactgcaaccatcaatgcgctgttatgtgctggtgtcgttgttacgttgatgttctatcgccgcagagactcacgtcatcgtaagtgggtgtcgcggctggcatggcttataacagttatatacagctctgtgccgctggcgtatctgtgcggcatctatccctattcaacatggcccaccatcggggccaatatcatgatccttgttgtgctgctgagcgtaagaggcaatgtagcacggcttgttgacgcactgaggcactga

SEQ ID NO: 176610 - DNA, 627 bp, Klebsiella oxytoca
atgaaccaatctcaattccagaaggcggctggtatcagcgccgggttagctgcgcgctggtttccgcatattgatgcagcgatgaaagaatttggcattactgctccactcgaccaggcgatgtttattgcgcagtgcggccacgaaagtacttcattcactcaactggtagagagcttcaactatagcgttgccggactggctggttttgtgaaggcaaagcgtatcacgcaggaccaggcaaactcactcgggcgcaaatcatcggagaaggcgctaccgcttgaacgccagagagcaatcgcaaatctggtctacagcaatcgctacggcaataagtcagcaggtgatggctggaaatatcgcgggcgaggactgaagcaaatcaccttcctggataactacctgagatgtggcactgcgctaaggctcgatttagtcagcaaccctgaactgctggagaaagatattaacgcagcccgcagcgctgcatggttctatacctcaagcggttgcttgaaataccccggcgatttaattcgcgtaactcagattatcaacggtggtcagaacggcattgatgatcgacgcgcccgattcctgaaagctaaatctgttctggtgtga

SEQ ID NO: 176611 - DNA, 276 bp, Klebsiella oxytoca
atgggcattgaaatgattattggtctggcaactgcgttgctggccattgtcgctggcgcatttgggttaggtcatgcgcgaggcactaataaagcggaagccaaagccgatcagcagcgcaccgaagagaaggcggccgccagcgtcgccgcggcagaacgtaaagcagaagccatgaaaggggccagcgatgttgaagagagcgttaagcatatgcctgatgacgatgttgatcgcgagctgcgcgaaaactttacccgccccggtggtggttga

SEQ ID NO: 176612 - DNA, 522 bp, Klebsiella oxytoca
atgtcacatcaacgagcaatcggccgtagagttgaaaaagcatgtcttgcttttcaagaacaagactatgaaacctgtctgctacacttgtttccagctatagatagtacaggtaaagcaaggagaccgaacggtaaagtaggagaacgcataagagcattaatagatgatcaattagatatcataacggccttaggcgtgggctcggtaataagaaatttaaatatcgatgggcaaactatcccccaaatattatataactttgccagaactacattagcgcacgaaggtgaaattgatcctcgtttgaaaatttctgaaaactcacgattaagtgccagcaaggactcatggagtatttcaccaagttttattttaggaatgataatagctgtagttactgcacaagaaaatttaaacgattgtgcatcaataaacattactgttacaattaaaggtcaagaaattgatataaataatttatgggggcaagaagcagtactcaaagcatcattatcataa

SEQ ID NO: 176613 - DNA, 495 bp, Klebsiella oxytoca
atggctggaacggcggggcgttccgggcgtagaccaaagccaacagcgcgcaaggagttggccggaaaccccggcaagcgagccctgaataaagaagaaccagtattctcccccatcaatggcgtagcacctccggactggtttgccgaagaggaactcccgttagcatccatcatgtgggagctgacgaccaaagaattatgcggacagggcttgctctgcgtgaccgatcttgcagtgctggagcgctggtgcgttgcctatgagttctggcgaagggcggtaaaaaatattgctgttgatgggttatccatcactggcgcaatgggcgggaaaattaaaaaccctgaacttacggccaaaaaagaacaggaatcggaaatgagttctaccggttcaatgttggggctggaccccagcagccgacagcgcctggtcggtctggccgggaagaaaaagaacgaaaacccattcctgaagatgatcacgccatga

SEQ ID NO: 176614 - DNA, 1731 bp, Klebsiella oxytoca
atgagccgaaaagcctatcctaacgtcaacgctgcaaatcagtatgcaaggcatgtcgtcgccggaaagattccggcatgccagtatgtcattgatgcctgccagcgacatatcgacgatttgtcgaaatcgcagggaaagaaatttcgataccgttttgataaagactttgctgagcgtgcagcccggtttattcagcttcttccacatacaaagggagagtgggcattcaaacgaatgccgatcacgctggaaccatggcaactatttataatttgttgctcatttgggtgggttcataaaggttccaggctgcgccgattcagagaggtctatacagaaatcccgaggaaaaacgggaagtcagcaataagcgccggtgtggcgcttttttgtttcacctgtgatggtgaatttggtgcggaagtgtattccggtgcaactactgaaaagcaagcctgggaagtttttcgaccggcacggcttatgtgcaagcggacaccgttgttaactgaagcattcgggatagaggttaacgccaagaacctcagtcgccctgaagacggggccagatttgagccgttgattggaaaccctggcgacggtcagtcaccgcattgtgccattgttgatgaatatcatgagcatgaaagtgatgctctatacacgactatgatcactggcatgggggcccgcagacagccgattatgtgggccataaccactgcgggttataacattgaaggcccttgctacgataagcgtcgtgaagttatcgaaatgctgaacggaacggtgccgaatgatgaactttttggcgtcatttacaccgttgatgagggtgatgactggaccgaccctgcagttcttcacaaggcaaatcccaatatgggggtgtcggtttactctgacttcctcttaagccaacagagcagagccaaaaataacccccgcatggcagggatattcaaaacgaaacacttgaatatttgggtcgctgcccgcgctgcgtatttcaacctgttaagctggcgaaaatgtgaggatgagacgctcaccattgagcagtttgaagggcaaccctgcattttgtcttttgaccttgcgcgcaaactggatatgaactctaaggttcgattatttaccagagaaatcgatggtaagcgacattattactgtatatctccacgcttctatgtaccgtatgacactgtatacagcaacgatattgatgatcaccgcaccgctgagcgttaccgtaaatgggttgatgcgggctatatcactattaccgagggcgcggagattgattaccgcgtgatcctggaagatgccaagcgcgacaaccagcaaacgccagtagaacagagcccgatagacccacatggcgcaactaatctttctcatcagcttgctgacgaacagcttaaccccataaccattatccagaactacaccaacatgtctgatccgatgaaagaacttgaggctgctgtagagtccggtcgctttcatcatgacggcaatccgataatgacctggtgtatttcaaacgtagtgggtaagcacctgcctggaaatgatgatgttgttcgaccaatcaaagagcaaaacgaaaataaaatagatggtgctgtagctctgattatggcgattggacgggcaatgttatttgaaaaggaagaaaccctttcaaatcatctcgaaagctatggcgtgcgttcactttaa

SEQ ID NO: 176615 - DNA, 186 bp, Klebsiella oxytoca
atgatcctgatgatactcgcgccacttgttggtgtgctgggggctatgttgctctcgttcggcacctggctaatttatccccctgctggctatatcactggcggcattctctgtctgctctggtcatggcttgtatcccgctatctttccggtaacaggaaatttgaatccgtggagggtggctaa

SEQ ID NO: 176616 - DNA, 1230 bp, Klebsiella oxytoca
atgtttttcccaggaatgtttacgaaaagcaccgcatcggttacgaccccagcggagctggccgaggccgtagggatgacttacgacacctataccggaaagcgcgtcagcagtcagaaagcgatgcgtctcacagcggtgtttggttgcataagggtgctggctgagtcaatgggaatgcttccctgcaacctgtacaaggtcactggtaacagtaagcaaaaagcgacatctgaaaggctgcacaaattactgacgatgaagccaaatgactatatgacccctcaggagttctgggagttggtcatagtctgtctttgcctgcgcgggaatttttacgcttataaggttaaagccctgggggaagtggttgaactcctgcctattgatcccggttgtgtagacccgaagctaaacagccagtggcaaccggtgtatcaggtcactttccctgatggttcgacggatgtgctggggcaggatgatatctggcacgtcaggacgctgacatttgacgggctggtgggcctgaacccaatcgcatacgcaagggaggccatttctctgggtatggcgactgaagaacacggcgcccgattgttctcaaacggtgctgtcacttccggggtccttcgtactgagcaaacgttgactgatgcagcctatgacaggttgaagaaagattttgaggatcgtcacctcgggctcagcaatgcgcatcgtccgatgattctcgaaatgggtctcgactggaagtcgatggcgctcaatgccgaggacagtcagtttcttgagaccagaaaattccagctggaggagatttgccgactgttcagagtgccgatgcacatggtgcagaacaccgaccgcgcgactttcagcaatatcgaaaaccttggcattggctttattaattattcccttgtcccttatatgacccgcatcgagcagcgaattaatgtaggtctggtgaaggaatcgaaacagggcacctactatgccaaattcaatgccggtgcgttgctccgcggggatatgaaatcaaggttcgaatcgtattcaaccggtattaactggggcatttactcaccaaacgactgccgtgaactggaagatatgaacccacgctctggcggtgacatttatctgacgccgatgaatatgacgaccaagccgtctgacagcaataagagcaaaacaaccgaggaacaacatgatgccgatgactaa

SEQ ID NO: 176617 - DNA, 657 bp, Klebsiella oxytoca
atgatgccgatgactaaacagcggctggatattccgctgaagctaaagtctgtcagcgacagcggggagtttgaaggctatggctctgtgtttggcgttaaggacagttacgacgatgtagttgttcccggcgcattcagtaaatcacttcagtcatggcgggagaaaaacgcgctcccagctatgctctggcagcaccagatggatgaacctatcggggtttataccgaaatgaaagaggatgaggttggcttatatgttaaaggccggttgctcattgatgatgatcctctttcaaagcgagcacatgcccacatgaaggccggttctttaaccggcctttctattggttacatgctcaaagactgggaatacgaccgcgagaaaggcgtgtttcttctcaaggagatcgacctttgggaggtcagccctgtaacgtttccgtcgaatgacgaagcgcgggtgagcgatgttaaaagcgcgtttgcccgtggtgaaacaccttctcagaaaagtattgaacgggtcctgcgcgatgttgggctctcccgctcccaggccaaagcattcatggccgggggctatggcaacctctctcagcgtgacgttgatggtgtggatgccgcactggatgcactgaaaaacatcaaattttaa

SEQ ID NO: 176618 - DNA, 1209 bp, Klebsiella oxytoca
atggcagtcgatattaaagacgttgagcaggtcgcgcaggatttgcagcaaaaattcgatgattttaaagcgaaaaatgataagcgcattgacgctatcgaatccgaaaaaggcaagctggccggagaagttgaaacacttaacggcaagctgaccgagctggatcagctgaaaaccgcgctggaagatgagcttaaacagcttaagcgtcccgctggtggcactcaaagcaaggccgcaacagagcacaaaaccgctttcattgactttatgcgcaagggtaaggatgacggactgcgcgatctggagcgtaaagccctgcaggttggcgtggatgaagatggcggatatgccgtacccgaagagctggatcgcaccattctcaatcttctgaaagatgaagtagtgatgcgccaggaggcgacaactatcaccgttggtggtgccaactataaaaagctggttaaccttggcggcaccgcttccggctgggtcggtgaaactgatgcccgccctgagactgctgcatctaaactcggtcagattgaaccgttcatgggtgaaatctacggaaaccctcaggcaacccagacgatgctggatgatgctttctttaacgtagaggactggatcaacagcgaactggcggttgagttctccgaacaggaagaaatcgccttcaccagcggcaatggtacgaagaaaccgaaaggcttcctggcctatgcctcttctctggatgacgataaaacccgtgcctttggcaccctgcagcacattctttccggtgcggcggcgggtgtaacggccgatgcgattatcaaactggtctacaccctgcgcaaggtgcaccgcaacggcgctaagttcatgatgaacaacaacagcctgtttgcggttcgcattctgaaggactccgagggtaactatctctggcgtccgggccttgagctgggccagccttcctctctggcgggttatggcgttgccgagaatgagcaaatgccggatatcgctgctgatgcgaaagccattgcgttcggtaactttaaacgcggttataccatcgttgatcgcattggtacccgtatcctccgcgacccgtacaccaacaaaccattcgttggtttctacaccaccaaacgtactggcggaatgctggccgattctcaggccattaaactgctacagatcggtgctggcgcataa

SEQ ID NO: 176619 - DNA, 204 bp, Klebsiella oxytoca
atgctgctgaaaaaagacctgaaatggtcacctgatggcattcaggtaagaaacattccagccggtaaatatgaggcgggctcacttcctgaacgtgctcttgaggttgctgcccagatggggattctcgacggcactgaacagcctgaaattgaaacaccagttgagcctaaaaccagcaataagcggggtgagggcaaatga

SEQ ID NO: 176620 - DNA, 321 bp, Klebsiella oxytoca
atgaagccctctgtaaaagagcttcgttaccagtgccgtatcgacagcgatgatgacacagaagatgtgatgttaacgctctacctcaacgcctctctgaagcatgcggaaaaaatcactaattgccgtctttatgataacgctgttccagacgacgatcctgatggcgtggtgatagaagatgatatcaaactggccctgatgctgctggtttcgcactggtatgaaaacagggagccggtgagcagcgacagcgttaacactattccgttcggcgttgatgcaattctgaaacagcatcgcaaagtaccaggcacgtag

SEQ ID NO: 176621 - DNA, 339 bp, Klebsiella oxytoca
atgcaggcaggacgattacggcacagggtcaccattcagaacttcacaacctccagaacgccttccggccagcccgttgaaaattgggacgatgggaaaactatctgggccgaggttaaggggataagcggtcgtgagctgttagccgctggcgtagagcatgctgatgcgacaatccgggtctgggtgcgttttcgcagggatatttcagccacatcccgattgaaggttcgcaccggcccgtttaaaggcgcagttcttaacgttaccgggcctccggttccggatatcaaaggtacccggctggaaattctctgcaaacaggggaccgaaaaatga

SEQ ID NO: 176622 - DNA, 450 bp, Klebsiella oxytoca
atgattgatgtgaatctggatttttccggcttagaggatatcgcccgagaccttcaaaccctcagcaaagccgaaaacaacaaagtcctccgggattcgacccgcgccggggctgaagtcctccggcaggaagtgattgatcgggctcctgagcaaagcggaaaactgaagaaaaacgttgttgtcgtcacccagaaaagccgtcgccgtggagaaatctcgtcgggggtgcatattcgtggtgttaatccgcgaacgggaaacagcgacaacaccatgaaggccagcaacaagcggaatgctttctactggcgctttgtcgaacttgggactgctacggctccggcgcatccttttgtacgttctgcttttgatacacgacaggaagaagccgcacaggcagcaatgaaccgaatgaacaaggcgatcgatgaggtgctggcgaaatga

SEQ ID NO: 176623 - DNA, 348 bp, Klebsiella oxytoca
atgacagaggatgatatctacgctttgcttgctccgctggcaaacgggcgggtttatccgtatgtggtgccgcttggcagcgacgatttacccgctgtggctgcaccttacatcattttctcgataccgactgatgttgccggggatgtgttctgtgggcaggccgaatcgacgctgcacattcaggtagacgtgtgggcagaaacaaacgatgaggccagggtgttgcggcttgaggccctttcccggctggaagtgctttctcctaccgaggtgacaaaaatccccggctacgacaccacaactcacctgcatcgggcaacgcttgaaataaccgtcattgcctga

SEQ ID NO: 176624 - DNA, 705 bp, Klebsiella oxytoca
atgtcagcactatttgaacgcgcccaaaaaacgaaagtaatgattacgtcagtgccggtcactgaggatgagctggatgcagcgacctggctcaacctgagttgcaccattaaacaggccagctttactgccggtcagaaaaacgatattgacgtgacaacgctatgctctgaagaaacggagaacatcaacggccttccggcaccgtcagaaatgtctctctccggtaacttctaccgcaacccggcacaggatacgctgcgtaccgcttacgacaatgacggcgtatacggctttaaggttgtgttcccttccggaaacggcttcctgttccgcgctgaagttcgtcagcacacctgggactcacagactaatggcgtcgttgccgcgacattctctctgcgcctgaaaggtaaaccaaccaacattgacgcctctggcattctgtcttttgccacagaccttcccgcatcgcagacggtagcggccggaagcgccctgacaatgagtgtggtggttcagggcggcacagaaccttatacctacgtctggaaaaagggctcgtccaccgtcagcgggcagaccagcgcaacgtttaataaggccagcgcagtatcaggcgatgcgggtgtttattcctgcgtggttactgatgccgatggcactgttatcacctctgctgaccacaccgtcactatcagttaa

SEQ ID NO: 176625 - DNA, 405 bp, Klebsiella oxytoca
atgtcaaaaccgaatcttaaagcgctggcgctggccccgatggcgggcttccgtaaaaaagaagtcaccgttccggagtgggaaaacgccaaagttatcattcgtgaaccatcggctgaggcctggattcgctggcaggggattgccagcccggaacaaccaaaactaccggaagggcaggaagcgccagaggtgccagaactgactccttcagaacgcgcgttccgcacgatgcgggcagatgtcacactcttcattgatattctgctggataccgacctgcagtacgttttcaccgtcgatgataccgaacaggttgaagcaatttatggccctgtccattcccggttgttgaaacaggcgcttgatctcattcgtgatgcggatgataccaaagcaaagtaa

SEQ ID NO: 176626 - DNA, 303 bp, Klebsiella oxytoca
atgcagttcctgatggcgctggcgctccggatgggccgcacgctgggcgaactgcgacaaaccatgacggtcggcgaattcaggatgtgggctgaatacgaccgtatcagcccgatcggtgatatccgtggcgatattctcaatgctcagctggtttcagcgatgtacggagcgcagggcggtaaagttaccattgaagacgcacagattcagtggagcgcagaaggggacgaggcaagcgacagtggcgatcctttttcaggcttagaggccgctttgcttgcggcatccgaggggagatga

SEQ ID NO: 176627 - DNA, 555 bp, Klebsiella oxytoca
atggctaatataaaagtacattacgcaaactttccttatcaagaaataataactagttttggtatcatctcaataaaaacatccgcccttcaaataaaaggagaagttattactggtgataaacttctctctttggaaatatgtacagaaaataatgtcaaaaaaataggtggtgcattgggatggggggttgttggaggaatgcttgctggtcccgctggaattattgcaggggcatttctcggtggaaataaaaaggacgtaactttcgttgctgaaatgaaagatggtcgtaaatttatggggaccacagatatcaaagcatatactgacctgacagcatcaaagctcaaatttgacggtattttaaacgtgtcacatgatgacgatgaaagcgaatatatcccaacttatgatgaggaaatgatgataaaggccaagagaatgtacaatgagcctgattatatggcatggaaagaacgtacaggagaggcggaggaaattcgcgcttggatggcaaagactggatattatccgcctggttatcacgaataa

SEQ ID NO: 176628 - DNA, 2979 bp, Klebsiella oxytoca
atgcgggaatatggttatagctccagccaggtgcttgatattactgaggctatttctactggtttaaaactttctggcgcgaatgctcaggagtctagttcggtcatcactcaatttagccaagctctggcacagggcgtgctgagaggcgaagaattcaatgccgtcaatgagagtggcgacagggttatacgggcgcttgcagcaggtatgggggttgcgcgtaaagaccttaaatctatggcggatcaggggcagctaaccattgataaagtagtgccagccctcattagccagcttggtaagctccggaatgaatatggtgaattaccgcagaccgtttcatcgtcggcaaccaaagttgaaaacgcttttatgcaatgggtcgggggtgctaatgaagcgagcggagccacaaacaccctgaccggcttacttgatggtgtagccagaaatattgatcaagttgccactgctgccggagcgcttgttgccgttggcgcagcccgttatttgggaaatatggctcttggtgccagctctgctacggctgggattattagcgccgcaaaaagtgaagtagctttagctgaagcccaagtaagaggggcgcaggtttcaacagctcgcgcgcgtgctgcagtttatcgtgcccagcaggcactggcagcagcacgaggtacagaagtgcaggccgccgcagaaaaacggctctcactggcgcaggagtcacttaatcgtaatattcaggccagagtatccgctcagactgcactgaactcggttactgctgtaggttcccggctcatggggggagcattgggcctcgttggcggtattcctgggctggttttgcttggtgccggcgcctggtacacgatgtaccaaaatcaggagcaggccaggttatccgcgcaggaatatgcaaaaaccattgatgcagtccgtgaaaagacaaaatcaatgtccctgcctgaagtttctgataatgagaacaaaacccgtcaggcgctggaggagcaaaaccgtcttgttgatgcccaggcatcaaaagtaaaaagcttgaaggaagagatcgcgggctatcagtatgtcctgtccaaccccggaccaacaaccagtggtggtttcatgataaaccacctgacttcggtcgaaacagtcactcgtggtctggaagaagcgacttccgctctggccgttgaacaggagagattagctcagatgcaggctaagtctgagtcgatccagtcggtactggaggggatagagaacaggcgaatagcattaatccggcagcaggctgcagaacagaattcagcttatcaatcgttaataatgatgaatggtcagcatacagaatttaaccgtctccttgggcttggtaataatttactgatggcacgacaagggttggttaatgctccgatgcggattccgcaggctgacttaacatcacaacaaacaaatgctcttgagaaaagtcgccgagatttagcgttatcgaaacttaagggcgaggcaaaagagttagccagacttggttttgccgccgacgatttgggattgactagtgatcctcagcaccagacaggaaggcaggaattaattaataatggaattgctgagtggagaaataatgaatccaataaacccgcccggaaagcgccaataagcgaagaattaaaagccgctgagaagacagaagatgtttacaagcgtcttattaaacaacaggaagaacaaattgctttgggaagccagaataccgaactggctaaagtaaaataccaggtcacgcagggtgagttagcctctcttgaacaagctaaaaaagaaacccttctgcacaatgctgcgcttatcgatcagaaaaacattgctgaacagttaaaaacgttccgtgaggggctagctgacagcaacgctgctgcgcgtgatcggggggatattgattttcttggtgccgggatgggggataaggcccgcgaccgcatgaaggaaatggcagatattcgtactgattttctcaaacagcagcgcgacctgcagcgggatttcagcaaaggtcagatttctgaggacctgtacaaacagcaaacggaagcgcttcaggctgcgcttactgaacggctccagattcaggaggactacaacaagaaaaccgatgaacagcagtcagactggcgggcggggatcagcgattcactgttgaactacgccgatcaggctgctgacctcagttcaatggcagcatcagcgaccagcgagattctcaataacaccacgaactccatttccaacaacctgaccagtgttctgactggtgcgacttctttcaaagaggggatgtcgaatatcttcagctctctgggtgaaacggtgattaagacgctgatccagatggcaacacaggcgttaatcaccaaagcgattatggcgtcgttcggcggtggggctggtggaatgttcggaagtcttcttggtggaggtgggggaggtggtagcaccgggacggccattcagagcgctggtgctaatctttcgtttaatgctctgggtggtgtctacgattcaccttcactttccgcatacagcggcggtgtatacagcactccgcagtactttgcgtttgcgaaaggggcgggtgtgttcggcgaggccggtccggaagccattatgccacttacccgtagtgccgatggttcgctgggggttaaagctgttgggcgggaatcacctgcggtacaggacgctgtgaggcagcagcaggaaagacaacttctttcaactggtgatatcaacgtcaattaccacctcaccggtaaaccggatgatgtaatgatgcagacattggatgtccacggccgccgcctggctaaacagataaaatctgaactgacgagcgacgtaaacaatcctcaaaatgccttcggtagagcactttactccaaccttcagcccaaaaaaccacgataa

SEQ ID NO: 176629 - DNA, 474 bp, Klebsiella oxytoca
atggcagatattttctacccggatgaatacctgcccatgccgcttatggacgggtacgggtttaagcccatatcacctttactgcgaacggagatgacgtccggtcgcgctcaacaacgaaggcgatatacctcaacacccacccaggcatcggttaaatggatttttaaaactgatgctctggcgcaggtgtttgaggcgtttttcagggatgcgcttaaagatggccagtcctggttctatctgaaactccagactcccatcggggtaaagccctataaagccaggttcgtggatatttacgaagggccgacgctggtcgcgccaaaatactggcagtacagcgcaacgctggaattatgggagcgcccgttaccgccttcaggctggggaaattatccggaatggctggcgggccagtcgttactggatattgcgctaaacaaagagtggccgaagcatgacaattcttga

SEQ ID NO: 176630 - DNA, 477 bp, Klebsiella oxytoca
atgacaattcttgagcgattatatgccagcagcggatcggaggttattcacgacacgctggagatatcggtaggcgatgataactactggctaaccagtggctgggatgacgtttccgtgatgctggaaaatggtcagccggcgacgtttgaagccagcgcgatagatatcgccttaccagccaggaacgccgacgggacacaggatttaaagtttgctatcagcaatattgacggaagggtttctgaggcgatcgataaagtcctggatgaaatgaaatcagccacgctgacattccggcggtacatttcatccgatctgtctgctccggcatcatcaccgtatacgctcgatatcaaatccggctcctggaccccgacagcagtgcaggtcacggcgggctatatgaatatcctcaaaacagcttggccccgtaaacgttacaacctcgcagagcatcctggcttgcgttactaa

SEQ ID NO: 176631 - DNA, 381 bp, Klebsiella oxytoca
atgtttaacgctgataaataccgttcagtcagctggctgaaaggcggccgcgtatacccgcaactcgactgttttggcattgtgaatgaaatccggcgcgatctgaaattacccctctggcccgatttcgccggagtgaccaaagacgggggaggcctcgaccgggaggcgagaaggttgatgctttccctgcaacgctgcgagccctgcgaaggggctggcgtggcctgctattccggctcaacggttacccatgtcgggatcgttgtcatgctcgataaccagctgcaggtcgcggaatgtaatccaggctcgggggttacgtttctgccactggcgcgattcatacgacggtttaaccgcgtggagttctggcaatga

SEQ ID NO: 176632 - DNA, 3078 bp, Klebsiella oxytoca
atgacgataaagttttatccgtcccggctgccgggtgaaccccttgagacgcacgagcatggtgtgctgacgctgcatgagtggatgtgcaggaatgtcccgagctattctcaggacagaaagcatcctgttgctgtcgaactggacggccgggctgttccacctgcggaatggccactatgtttgctgcggccagacagcgatgtgcggatttacccgatcccgtatggaaccggcctggaaatcgccgtgtgggtatcggttgccgtatctattgcctctacggcctatgcgctgtttttcgccccgaaaccagagctgggcgggttttcgtcaggcaattcagcatcactggacctgaacccggcaaaagcgaatacagctaaacttggcgatcctgttcgcgaggtcttcggaagaaacagaatttatccggattacctggtgcagccggtcactcgctttgaccccaatgatcccacccggatgacggtcgaaatgtttgtctgcctcgggtatggacgtttctcttacaccggcggtgattttcgggtgggtgaaactcctgctctgccgttaggcgatggcttttcttataccagctatgggccgggcgatgacgtggcgggtgaccgtcgcagtgagatctggttcaactcaacggaagtcgggggaacgtcaagcgggtcaggtctggatatggctcagactgcccctgaagccagtgatatcgttgctgatgccatgaccgtcagcggcacctcagtctcgttttcaggtctcgatgtcgacgatgacaacgatgatgatgaagatgagaacaagctgcctcctggctggattgagggtgcaattgtcactctgaaagcgccggtgaattatcaggtatcgattgaggatggttttaacgttctgacaggtgacgccgtcgaagaagtggcgccatataatggtatgcctgtaacgctgacgtttagcggtaccgattatgatctgcagattgccacgtatacccctcaccaggacgccgttccgggaacgggtggatcgactgcagcattgcgcgccagtgcgtcgccagccacgtatgattttacgacaaccagccagacgtttgctctgacctggcagggcgtcacctataccctgtccctggttgctgactacggcacaatgtccggtttgctggcggcgattaacagcgggctcaccggatcggggttgattgctcaggatgacggcggcgtgattcgtatcgtggaaatctccagcccgtggcgtggcggttccattacgtcatcattcctgcccgcgtcagtttttggagatagccctgtgtttactgccggtacagcatccagtggcggaagcccggcggtcacagccagtgtcaggctggcatacgattccggtaccgcattttcaggcctgccggacggcacgcagcggatttccctggctcaccgtggcaacgaataccagatagcatcgactgacggatcgtctgcgaccgtacagagagtggttaacggtgccgttgacaacacctggtcaggttttctgacccgtaccgtcgtggattttgccgcgtctggtattaacgataatgaaacctggctcggcccctttctggcctccccgcaaaatgaagttgtggacgccttcgaggtaaactttgctttcccaaacggaatttgcggattccagaacaacgggaataagcgggttcgccatgttgagtatgaaattcagtaccgcgtatatggttccggatcggggtggacgagtaagcagggggtgtacgcgcttaaaaacgttaatggcctcggttttacagagcgttttgatctgtcttctcccgggctggtggaggttcgatgccgccgccgcaacgagcaggggagcaacaacgcgagagacagcatgttctggcaggcgctcagaggtcgtttgctttcccgtccgacctcctacgcagggatatcaacaatagggatcacggttgaaaccggcggccagctggcggcgcagtcagacaagcgtgtgagtgttgtcgccacgcgaaactatgatggcggtggtgacaggacaatcagcggtgcgttcctgcatcttgcccgcagtctcggatatcgcgacgaccagatcgacatttccacaattaacatgcttgaggctaactactggacgccacgaggtgagtattttgaccatcaggcaagcagtgacagcacgtccgcaaaggatattttcgacaagattgctgaagcaggcatggggtattttctgctgtctgacggcttactttccgtcgggcgtgaaggggtcaaaagctggaccggaatcatcaccccccaggatactgtcgaggaaatgcagacatcattcagggtgccttcggaggacgattttgatggcgtggatgtgaaatacatcaatcccgttacctgggcggaggagaccgtacagtgccggacgcctgaaaatccgttcccccggaaaacggaggcttacaccatcgatgtcgttatgacagcggatcgtgcttggcgtatcgggatgcgccggttaatgaaatatcttcatcaacgccggacgtatacggctacaactgcaatgctgggatggtgccatgatttcggtgatcacatcattttgtcagatgatattcgaaccgggaaaacccaaagttgcctgattgacgcaatgacatacgactttcaggaaataacgttacatgtcaccgagcccctggactggagctatacaaatccccggtgctggatacagtttcagaacagtcgtccatcgtcacggatgctgacgccgcagcggatagatgatttcactcttaccataccttacaacgacgatctgcacccggaagactggattatggacgaccctgatattgatctaccgcgtttgctgttctgcgacagtgaaaaaggtgcccggcatgggatagtccaggaggtagccccctccggtgacagcaactgtcagattaccgcgccggaatataaagaaattttctacgcctacgacgacgcaacataccccggcgacgtcgcttaa

SEQ ID NO: 176633 - DNA, 750 bp, Klebsiella oxytoca
gtggccgataccgcccatagcaaccagtttttccgctttatcaaccgcgtcttcgaagttcttcgcacgatacatcgccagcgtcggggacagtttttcgtgggcaaacggctcactttcatcaacgtcggtgacttcaccaatcagaatcttggtggacacaggaacggtgaagcctgccagctcagcgattttatacgcaggttgaccaacgatagcggcgttcagcgcgccatttttcagaatgatattctgaaccgctttcagctcctggccctgcagcaggtagccgccgtggctggagaaacgttcgcgaacggcgtcgtatacggaatctacaacgactacggactgctcggaagcacaaataacgccgttatcgaaggttttagacatcagtacggatgcgacggcgcgtttgatatcagccgtttcgtcgataacaacgggagtgttacccgcgcctacgccgattgccggtttaccagagctgtacgctgctttaaccatgcccggaccgccggtggcgaggatcaggttgatatccgggtgatgcatcagcgcattggacagttctacggaaggctggtcaatccaaccaatcagatctttcggcgcgccggcagcgatagccgcctgcagtacgatatcagctgctttattggttgcatctttagcacgcggatgcggggagaagatgatggcgttacgagtcttcaggctaatcagagatttaaagatagcggttga

SEQ ID NO: 176634 - DNA, 297 bp, Klebsiella oxytoca
gtggtttttgatcactttatcttcgacgatgcccatgccggattcggcaacggccatcttagcgagagggattcgagcatctgcagcggccagagcggcggcgcggaagattttgtctacttgttcttgagtgaaactggcatattcacgctgggctttttttacgcgctctacgagtgcgttaagttcagcgacattagtaacagccataatgctctcctgataatgttaaacttttttagtgaatcagtagctcgattcgacagtatagacagtgtgttaactgcttgcatttaa

SEQ ID NO: 176635 - DNA, 696 bp, Klebsiella oxytoca
atgctggtaactgtcaacagccatttttatgatgctgcggagcgccctgtgattcagtcgttgttcgatttttcagcctactttaaattttttattgggttatttgcgctggtaaacccggttggcattatcccggtgttcattagtatgaccagctaccagacggcggccgtacgcaacaaaaccaacctgaccgccaacctgtccgtcgccattatcctgctcacgtcgctgtttttgggcgatgcaattctgcaggtcttcggcatttccattgattctttccgcattgccggcgggattctggtcgtcaccattgccatgtcgatgattagcggcaagctgggcgaggataaacagaacaagcaagaaaaatcagaaacggccattcgcgagagtattggcgtggtgccgctggcgctgcccctgatggccggtcccggggccatcagttcgactattgtctggggaacgcgctatcacagtgtcgcccactttgttggcttttccgtcgctatcgcgctttttgcgctgtgctgctggggcattttccgtatggccccctggctggttcgtttacttggtcaaaccggtatcaacgtaattacccgtattatgggactgttgctgatggctctcgggattgagtttatcgtgaccggtataaaggcgctgtttccagggctggtgaattaa

SEQ ID NO: 176636 - DNA, 1632 bp, Klebsiella oxytoca
atgaccatcatcacgaaaaaaagcctggtagccgcaggcgtactctctgcattaatgacaatcaacgccgcggtggcggcagatgtaccggcaggggtacagctggcggataaacaaacgctggtacgtaacaacggctccgaagttcagtctctcgatccgcacaaaattgaaggcgtgccggagtccaatattagccgcgatttgtttgaagggctgttggtaagcgaccttgatggccatccggtggcgggtgtggcggaaaaatgggacaacaaagattttaaagtctggaccttccatctgcgtaaagatgctaagtggtccgacggttcgccggttaccgcgcaagattttgtttatagctggcagcgtctggcggatccgaaaacagcctcgccttatgcaagttatttacagtacggtcacctggccaacgttgacgacatcatcgccgggaaaaagccagcaaccgatctgggcgtcaaagcgctggacgatcataccttcgaagtgacccttagcgaaccggtaccttatttctacaaacttctcgtgcacccatccgtttctccagttcctaaagccgctattgagaaatttggtgacaaatggacccagccggccaatatcgtcagcaacggcgcgtataaattaaaagactgggtagtgaacgaacgtattgtactggaacgtaatgctaactactgggataacggcaaaaccgttattaatcaggttacctttttgccgatcgcttctgaagtcaccgacgtcaaccgctaccgcagcggcgaaatcgatatgacctataacaatatgccgatcgaactgttccagaaactgaaaaaagagatcccgcaagaagttcacgtcgatccgtatctgtgtacttattactacgaaatcaataaccagaaagcgccgtttaccgatgttcgcgtgcgtaccgcgctgaagatggcgctggaccgcgacattattgtcaataaagtgaaaaaccagggcgacctgccagcctatagctatacgccgccgtataccgatggcatgaagctcatcgaacctgagtggttcaagtggtcacaggaaaaacgtaatgaagaagcgaaaaaactgctgaccgaagccggctattctgctgacaagccgctgactttcaatctgctctataacacttccgatctgcacaaaaaactggctatcgccgtggcttcgatctggaagaaaaatctcggtgtcaacgtgaagctggaaaatcaggaatggaaaaccttcctcgataatcgccatcagggtaccttcgatgtcgcacgcgccggctggtgcgcggactacaacgaacccacttccttcctgaataccatgctgagcgacagctcaaacaacacttcgcattataagagcccggctttcgacaagattattgccgaagcgctgaaaaccagcgatgaagcaaagcgcgcggatctctatgcacaatccgagcagcagctggataaagactccgtcattgtaccggtcttctattatgttaacgcccgtttggttaagccgtgggtaggtgggtataccggtaaagatccgctggataatacttacacaagaaatatgtacattgtgaagcactaa

SEQ ID NO: 176637 - DNA, 921 bp, Klebsiella oxytoca
atgttaaaatttatcttacgtcgctgtctggaagcgattccgacgctatttattcttattactatctctttcttcatgatgcgtcttgcgccgggaagcccttttaccggtgaacgcacgctgccgccggaagtcatggcgaatattgaagcaaaataccatttaaacgaccccatcatgacccagtacttcaactacctgaagcagctggcgcacggtgatttcggtccttcttttaaatataaagattattctgtcaacgatctggtggcctccagcttcccggtgtcagccaaattaggcttcgccgcgttttttctggcggtggtgctcggcgtgacggccggggttattgcagcattgaagcaaaatacaaaatgggattttgccgtgatggggatagcaatgaccggggtcgtgataccgagtttcgtggtggcgccactgctggtcatgatattcgccattacgctgcactggttgccgggcgggggatggaacggcggggcgctgcaatatatgattttgccgatggtcgctctgtcattagcctatatcgccagtatcgcgcgtattacccgcggttcgatgatcgaggttttgcactctaacttcatccgcaccgccagggcaaaaggcttgccgatgcgccgtattattctgcgccatgccttaaagcctgcgctgctgccggtactttcctatatggggcccgccttcgtcggtattatcaccggctcaatggttatcgaaacgatttatggtctgccgggaatcggtcagctgttcgtcaacggcgcgctgaaccgcgactactcgctggtgctcagcctgaccattctggtgggcgcattgaccattctgtttaacgcgattgttgacgtgctgtatgccgttatcgatccgaaaattcgttactga

SEQ ID NO: 176638 - DNA, 909 bp, Klebsiella oxytoca
atgatgttaagtaagaaaaacaacgaggcgctggaaaacttcagtgaaaaactggaagtcgaggggcgtagcctctggcaggatgcccgccgccgctttatgcataaccgcgccgcggttgccagcctgattgtgctggtgattattgcgctgttcgttaccatcgcgccgatggtaacgcagttctcctattacgatactgactggggcatgatgtccagcgcgcccgacatggagtccggccactactttggtaccgactcttccggccgcgatctgctggtgcgcgtggctatcggcgggcgtatctcattgatggtcggcgttgctgctgcgctggtggcggtgattctgggaacgctttacggttcgctttctggctatctgggcggcaaagtggattcggtgatgatgcgcctgctggaaatcctcaactccttcccgtttatgttcttcgtcattctgctggtgaccttctttggccagaatatcctgctgattttcgtggctataggcatggtctcctggctggatatggcgcgtatcgttcgcggtcagaccttgagcctgaagcggaaagaattcattgaggctgcgcaggtcggcggcgtttcaacgcgcaatatcgttatccgccatatcgtgcctaacgtgcttggagtggttgtggtgtatgcctcactgctggtcccaagcatgattctgtttgaatccttcttaagcttcctcggtctggggacccaggagccgttaagcagctggggcgcgctgctcagcgatggcgccaactcgatggaggtgtcgccgtggctgctactgtttcctgccggtttcctggtagttacgctgttttgttttaactttatcggcgatggcctgcgtgatgccctcgacccgaaagaccgctaa

SEQ ID NO: 176639 - DNA, 1014 bp, Klebsiella oxytoca
atgagtacgattgaaacggcgaaaacgccgcagactgcccaacaatccggattgcttctggatgtgaaagatctccgcgtcacctttggtacccccgatggcgatgtgaccgcggtcaacgatctcaatttcaatctgcgggccggggaaaccttaggcatcgtgggcgagtccggttccggtaagtcgcagaccgcttttgcgctgatgggcctgctggcggcaaacggtcgcatcgggggttcagcgacctttaacggtaaggagatccttaacctcccggagcgcgaactgaataagctgcgcgccgagcagatctccatgatttttcaggacccgatgacctcgctcaatccctatatgcgggtaggcgagcagctgatggaagttctgatgctgcacaaagcgctgagtaaagccgaagcgtttgaagagtcggtgaaaatgctcgatgcggtcaaaatgccggaagcgcgcaagcggatgaaaatgtacccacacgagttttccggcgggatgcgccagcgcgtgatgattgcgatggcgctgctgtgccggcccaagctgctgatcgccgatgaaccgaccacggcgctggacgtgaccgtacaggcgcaaatcatgacgcttctcaacgagcttaagcgcgaatttaataccgcaatcatcatgattacccacgacctgggcgttgtcgccggcatctgcgacaaggtgctggtgatgtatgccgggcgtaccatggagtatggcgaggcgcgcgacgtcttttaccaaccctcgcatccgtattccatcggtctgctcaatgcagtaccgaggctggatgcggaaggcgatgccctgctgacgattcccggtaacccgccgaacctgctgcgtctgccgaagggctgtccattccagccgcgttgcccgcatgcgatggagatttgcaatagcgctccgcctctggaggagtttgcacctggccgcctgcgcgcctgctttcaaccggtgggggatttgctatga

SEQ ID NO: 176640 - DNA, 1005 bp, Klebsiella oxytoca
atgaacgccgtaacggaacaaagaaaagtcctgctcgaaatcgccgatttgaaggtgcactttgatattaaagacggtaaacagtggttctggcagccgtcaaaaacgctgaaagcggtagatggcgtgacgctgcgtctgtatgaaggggaaaccctgggcgtggtcggggagtcaggctgcggaaagtcgacgttcgcgcgcgcgatcattggtctggtgaaagccaccgacggtaaagtcgcctggttgggcaaagatttactgggcatgaaggccgaagagtggcgcgacgtgcgtagcgatattcagatgatctttcaggatccgctggcgtcgctcaatccgcgcatgacgatcggggaaattattgccgagccgctgcgcacctatcatccaaaaatgccgcgccaggaagttcgcgaccgcgtgaaggcgatgatgatgaaagtgggcctgctgccgaacctgattaaccgctatccgcatgaattctccggcggccagtgtcagcgtatcggtattgcgcgcgcgctaattcttgaaccgaagctcattatctgcgatgagccggtctccgcgctggacgtgtcgattcaggcacaggtggttaacctgctgcagcagctgcagcgggaaatggggctgtcgctgattttcatcgcccacgatttggcggtcgtaaagcatatttccgaccgcgtgctggtgatgtatcttggccatgccgtggagctgggcacctacgatgaggtgtaccataatccgctgcacccctataccaaagcgttgatgtcggcggtgccggtgccggaccccgataaggaaaagaataaaacgatccagctgctggaaggggagctgccatcgccgattaatccgccgtcgggatgcgtattccgcaccaggtgtcccatcgccgggccggagtgcgcaaaaacgcgaccggtgctggagggcagtttccgccatgcggtttcctgcctgaaggtagacccgttataa

SEQ ID NO: 176641 - DNA, 837 bp, Klebsiella oxytoca
gtggcttttcatattcatgccgctcgtctgcggctgtatcatttactcttcgatcaaaatcgccgttccggtcgtcattttgagggactttgtggcatatttgccctgctcagcgtgctggtgatatttatcgagtccgggctcggtacgcaatatcatctgacattagacgaatggcatattttcgtctggctcgaacttatcgtcacggcggtttttacttttgagtattttctgcgcattatcagctggccgaatccgctaaagtatattttcagcttctggggaattattgacctggccaccattttaccgctttatgttatgtggctatggcccgagatcagtattgagtacgtgtttgcctggcgggcgatgcgcgccatccgggcattgcgcatccttaagctactgcgctttatgccgtcgctgaatattttctggtccgctatcgtcagcgcacgccaccagctgatcctgttctattcttttattgccattgtgatggtgatctttggctccctgatgtatctggttgaggggccgcgatacggttttactacgctaaatgcgtcggtttactgggcgatagtgacgataactacggtagggtatggcgatattacgccgcatacgccgctggggcgcattttggcatccatacttatcttaattggctactcgattattgcgatccctaccggcttaattaccagccatatgaccgccgcctttcagaatcgccgcacgcagcgccagtgtccgcactgtcagcatcacgctcatgaaaaagatgctcgctactgtaatgcttgcggcagtgaactgccggaataa

SEQ ID NO: 176642 - DNA, 330 bp, Klebsiella oxytoca
atggatatggatttaaacaaccgcctgaccgaagacgaaacgcttgaacaggcctacgacattttccttgaactggccgtcgataacctcgacccggcggatgtcattctgttcaacctgcagtttgaagagcgcggcggcgccgagctgtttgacccggcaccggactgggaagagcacgtggatttcgatctcaatcctgacttcttcgctgaagtggtgattggcctggccgatgaagatggcggcgaaattaacgatatttttgcacgcgtgctgctttgccgcgagaaagaccacaagctctgccatatcctgtggcgcgaataa

SEQ ID NO: 176643 - DNA, 1461 bp, Klebsiella oxytoca
atgacaaccttttacacggtggtgaactggctggttatactcggttactggctacttatcgccggtgtaacattacggatattaatgaaaagacgcgcggtaccgtcagcgatggcgtggctgctgatcatttatatccttccgctggtagggattatcgcctatctctcatttggcgaactgcacctgggtaaacgtcgcgccgagcgcgcgcgggccatgtggccatcgacggctaagtggttgaaggatcttaaggcctgcaagcatatctttgccgaagataatagcccggtcgcggaatccttgttcaagctctgcgaacgtcgtcagggaattggtggcgttaaaggcaaccagctacagctgcttaccgaatccgatgacgtcatgcaggcgctgattcgcgatattcagctcgctcgtcataatatcgagatggtgttctatatctggcagcccggtggcatggccgataaagtcgcagagtcattaatggcggcagcgcggcgcggcgtgcactgccggctgatgctggactccgcggggagcgtggctttcttccgcagcccctgggccgccatgatgcgtaatgccggcattgaagtcgtcgaagcgctgaaggtaaacctgatgcgcgtcttcctgcgccgcatggacctgcgtcagcaccgcaaaatggtcatgatcgataactatattgcctataccggcagtatgaatctggtcgatccgcgtttctttaagcaggactccggcgtaggccagtggatcgatctgatggcgcgaatggaaggtccggtcgcgacagccatgggcattgtctactcctgcgactgggagattgaaaccggaaaacgtattttgcccccgccgccggacgcgaacattatgccgtttgaagaggccagcgggcatacgattcacaccattgcctcgggcccgggattcccggaagacctgatccatcaggctctgctgactgccgcctatgcagccaaagagcatttgatcatgacgacaccttattttgtgcccagcgacgatctactgcacgccatctgcactgccgcccagcgcggcgttgacgtcagcattattttgccgcgcaagaacgactcgctgctggtcggctgggccagccgcgctttctttaccgagctgctggctgccggggtgaaaatctatcagtttgaaggcggtctgctgcataccaagagcgtgctggttgatggcgaacttagcctcgtgggtaccgttaacctcgatatgcgtagcctgtggcttaacttcgagatcacgctggtgattgacgatgccggtttcggcagcgatctggccgcggtgcaggatgattatatttcccgctcgcgcctgctggacgccaggctgtggttaaaacgtccgctgtggcaacggatcgccgagcgactgttttacttcttcagtccgttgctgtaa

SEQ ID NO: 176644 - DNA, 174 bp, Klebsiella oxytoca
atgaagcgtagtagaacggaagtagggcgctggcgcatgcttagacaggtgagtcgccgtaaagcacgctggctggaaggccaatcgcgtcgcaatatgcgcatcctctccatcagaaaggagctggttaaacggcaacgtcactctctgctgttcaccttctctgagttttga

SEQ ID NO: 176645 - DNA, 1101 bp, Klebsiella oxytoca
atgagtcaactttttagtccggtgcgaatcggtaagctggaacttgagaatcgcattgtcattgctccaatgtgtcagtattccgccgacaatggcaaggcgacggcatggcatcgtatccatcttggacaactggctttttccggcgcaggtttactgattatcgaagccagcgctgtcgagccagcagggcgaatcaccccggctgatatgggcttatgggatgacgaaacggaagccgcattacacgccgtactgaaagatatacgccagtactcttcaatccccatcggcatccaactgggccatgccggaagaaaagcgtcttccgcagccccctggctggggggacaacagctggcacatgatgctggcggatgggacgcggttgcgccatcagcgctggcctatggcgaaggcgatcgtcctccggttgagcttactcaggaccagatgaaacgcatcaagcaggcattcgcagacagcgccagacgcgctgagcggatgggtatcgagttgattgaaatgcatgctgctcatggttacctgcttcatcagttcctttctccgctcagtaaccagcgcaccgacgagtatggtgggtctctggagaaccgcttgcgtttcccgctcgaagtctttcaggccattcgcgaggctgtcggtcaggacatcgcggtgggagtgcgactttctgcgaccgattgggttgatggcggctgggataatgcacaatcaattctcttcagccagaagcttgaggctctcggctgcgactatattcatgtttccagcggtggattgtcgcctcatcaggcgattcaggttggcccgggctatcagctgccgttcgcccgtgaaatccgggagagggtgaatattccggtgattggggtgggcttagtgacggaaccccagcaggcggaagatgcgttaagccatggcgacgccgatctcatcgccattgcccgcgcggcgctctacaatccgcactggccctggcaggcagctgccgctctgggagcccatgtgagcgttccgccacagtatcttcgctcggaaccacatggtctcaaaggcacgctgcactccaatagctaa

SEQ ID NO: 176646 - DNA, 297 bp, Klebsiella oxytoca
gtgctttacgttatctacgctgaagatatcgccgactctctggaaaaacggacgtcggtacgtcccgcccacctggcgcgtttgcaattattacatgatgaaggtcgtttactgaccgcaggcccaatgcctgccgtagacagtaatgaacccggcgcggcgggctttaccggctcaacggtcattgcggaatttgaatcactggaagcggcgcaatcatgggccaatgacgatccctatattgccgcaggggtttatcagaaagtgtcggtcaaaccgtataagaaagtcttttag

SEQ ID NO: 176647 - DNA, 729 bp, Klebsiella oxytoca
atgacctttgatttacctcgccgctttccgtggcctacgctactgtccgtggttatccacggcggtgttgtcgcggcgttgctctatacttcggtacatcaggttattgaacagccttcgccatcgcaacccattgagatcactatggtagccccggcagatctggaaccgcctcaggcggcgcagccggtcgtagaacccgttgttgaaccggaacccgagcctgagccggaagcgcttccggaaccgccaaaagaggcgccggtggttatccataaaccgaagcctaaaccgaagccaaagcctaaaccaaagccggaaaaaaaagttgagcaaccgaagcgggatgtaaaaccggcggagacgcgcccggcctcgccttttgaaaatgcaaatacggcgccagcgcgtaccgcgccgagcacttcaaccgctaccgctaaaccaaccgtcacggcgccttcgggaccgcgggcgttaagccgcggagagccgacctatccggcacgtgcccaggcgctgcggattgaaggaagcgtacgggttaagtttgacgtgacagcggatgggcgcgtggataacgtgcagatcctttcggcccagccagccaatatgtttgaacgtgaagtgaaaagcgccttacgcaaatggcgctatgagccgggtaaaccggggaccggtattaccatgactattcagttccgcatgaaaggcgttcaaattaactaa

SEQ ID NO: 176648 - DNA, 873 bp, Klebsiella oxytoca
atgtggcaagcgatcggcaaattattaagcgatttgcataccgaagcagctgaaatcgaactgcgcaacgaactacccggtggcgagatccacgcggcctggcatttacgcttcggcggccgggattacttcgtaaagtgcgacgaacgtgagcttttacccatcttcacggccgaggcagaccagcttgagctactgtcacgcagcaaaaccgtgaacgtaccgcaggtttttgccgtaggcagcgaccgggattatagctttctggtgatggaatacctccctcctcgcccgctggatgcgcacagcgctttcctgttaggccagcaaatcgcccatttacaccaatggagcgaccaaccgcagtttggtctggattttgacaacgatctttccacaacgcctcagccgaacgcctggcaacgtcgctggtctacgttcttcgccgaacaacgcataggctggcagctggagctggccgccgagaaaggtctgcattttggcgatatcgatagtcttgtcgataccgtccagcagcggttgagcaatcatcaaccgcagccgtcgctgcttcacggcgatttatggtccggtaactgcgcgctcgggcctgacgggccatacattttcgacccggcctgctactggggcgatcgcgagtgcgatctggcgatgctgccgctgcatccggaacagccgccgcaaatctacgatggctatcaatccgtttcgccgctgccgtccggttttctcgagcggcagccaatttaccagctctatacgctgctgaatcgggctatcctgtttggcggccagcacctggtgacggcgcaaaaagcgcttgatgacgtcttaatggaaaaggccccgtaa

SEQ ID NO: 176649 - DNA, 285 bp, Klebsiella oxytoca
atgagtagcgaaattactgcctgggtggtcacggttcgttttcacgaagagacgttaacggaaattaatgagcttagtaatcacctgactcgcgccggatttaccctggttttaaacgatgatgaaggcaacccccacgagctgggaaccaacgtttttggtctgctttccatgcagaatgccgaagaggtcaaagccttgagcgcgggtttagccgaaactgcgctgggaagaaccgtcgacgttaccgttgccacattcagcgagtggttaaaagctcaataa

SEQ ID NO: 176650 - DNA, 930 bp, Klebsiella oxytoca
atgaccaaaatctatacgctcacgttagccccctcgctcgacagcgccacgcaaaccccgcaaatttacccggaaggcaagctgcgctgtagcgcccccgtatttgaacccggaggcggcggtattaacgtggcgcgagccatcacgtttcttggcggcagcgccaccgctatctttcccgtcggcggcgcaacgggtgaacatctgaccgcgctgctgacggatgagcatgttcccgtcgatacggtagaaacccatgactggacgcgacagaatcttcacgttcacgtgaacgtcagcggcgaacagtatcgtttcgtgatgccgggcgcggcgttaaccaaagaagagcttcatcttctggagcaaaaagttctcgccattgctccaggctcgttgctggtgattagcggaagcctgccgccgggcatcagcgtcgaaaacctgacgcagctggtcaaaaacgctcagcagcatggcctgcgctgtattgttgatagttccggcgacgcgcttgccgccgcgcttgatgtcggcaatatcgagctggttaagccgaaccagaaagagctcagcgcgctggtacagcgggacctgagccaaccggatgatgtgcgtcttgccgcgcaggagcttattcggtcaggcaaagtccagcgcgttgtcgtctctttgggcgcacagggggcgctgggtgttgatataaatggaagtgtccaggtcgtaccgccgccgatgaaaagccagagcaccgtcggcgccggcgatagcatggtcggcgccatgacgttaaggctggcggaaaatgcctcacttgaagatatggttcgctttggggtggcggcgggtagcgcggcaacgataaatcagggcacccgcctttgctcgctggaaaatacgcaaaaaatctacgactacctgcgcggttga

SEQ ID NO: 176651 - DNA, 726 bp, Klebsiella oxytoca
atgctggcgggggggctctttgcgtctgcatacgcaatggccgatgattccgtttttactgtcatggatgacccttcttctgccaaaaaacctttcgaaggaactgttaacgccggctatctggcgcagtccggcaatacgaaaagttcctcaatgaccgcagactccacgttgacctggtatggcaatacgactgcatggtcgctgtggggaaatgccagcaatacatcgtcaaacgatcagcgctcttcggaaaagtacgcgttgggtggacgtagccggtataacctgaccgatcagaactatatctttggccaggccagctggctgaccgatcgttacaatggctatcagcagcgtgatgtgttcaccgcgggttatggtcggcagatcatgaatggtccggtacacagcctgcgtttcgaattcggtcccggcgtgcgttacgacgagtataccgatggagataacgatacccagcctctgggctacgcttccggcacttatgcctggcagatgaccgataacgcccgatttacccagggcgtttcggtattcggcgctgaagatacgacgctgaactcggaaagtgcattgaatgtggcgatcaatgcgcattttgcgctcaaagtggcctataacctgacgtggaactcggaaccgccatcctcggcgccggaacacaccgatcgtcgtacaacgctatcgctcggatataaaatgtaa

SEQ ID NO: 176652 - DNA, 234 bp, Klebsiella oxytoca
atgagaaatagcaaaatcgcactcgcggccgtgatgctgtgcacgctgtcttttggcgcatttgccgccgctcccgcaccgcagccgggtaataacgatcatacgcaagttggcattgctaaagccaccgatgtcgaagcgggttccaacattgcgccgggttcacaatcaaccgggcagtcaatgaacgatgcttttgatgttcataaacttgttgccggggaatggtcctga

SEQ ID NO: 176653 - DNA, 171 bp, Klebsiella oxytoca
atgtccttatttgcagtggtgccccacacgaaagagcacatacaaaacaatataatcataattatcaacatgttccggctcagttcccgcttcactctgcgaaaatatgtgcacgctcgttcaccgacgcgtacccacctgcagccgcctgttgataacaccgacggttag

SEQ ID NO: 176654 - DNA, 1929 bp, Klebsiella oxytoca
atgcctgtaattacgcttcctgatggcagccaacgccattttgatcatgctgtgagcccgatggacgtcgctttggatattggccccggtctggcgaaagccaccattgcgggtcgtgtcaacggcgagctggtcgacgcctgtgacttaattgaaaacgacgcgacgctctctatcatcaccgcgaaagatgaagatggtcttgagattattcgtcactcctgtgcgcaccttttagggcacgcaattaaacagctgtggccaaataccaaaatggcgatcggcccggttgtcgacaatggtttttactatgatgtcgatctggaccataccctgacccaggaagatatcgacgcgctcgaaaagcgtatgcacgagctcgccgagaaaaactacgacgtcattaagaagaaagtcagctggcacgaagcgcgtgaaaccttcgtgaagcgcggcgagagctataaagtctccattcttgatgaaaacattgctcatgatgacaaacccggtttgtatcatcatgaagaatatgtcgatatgtgccgtggaccgcatgtgccgaatatgcgtttctgccatcacttcaaactgatgaagaccgctggcgcctactggcgcggcgatagcaacaataaaatgctgcagcgcatctacgggaccgcatgggcagataaaaaagccttaaatgcctatctgcagcgtctggaagaagccgctaagcgcgatcaccgtaaaatcggcaagcagctcgacctgtatcatatgcaggaagaggcgccgggtatggtattctggcataacgatggctggactatcttccgcgaactggaaacttttgtgcgttctaagctgaaagagtaccagtatcaggaagttaaaggtccgtttatgatggaccgtgtgctgtgggaaaaaaccggccactgggacaactataaagatgcgatgttcaccacgtcttctgagaatcgtgaatactgcatcaagccgatgaactgcccgggtcacgtacagatcttcaaccagggcctgaaatcctaccgcgatctgccgttacgtatggctgaattcggtagctgccatcgtaacgaaccgtcaggcgcgctgcatggcctgatgcgcgtacgtggctttactcaggacgacgcccatatcttctgtactgaagatcaggttcgcgatgaagtgaacgcctgtattcgtatggtctacgatatgtacagcacttttggcttcgagaaaatcgtcgtcaaactgtcgactcgcccggaaaaacgcatcggtagcgatgagacctgggatcgtgctgaagcggatctggccgttgcgctggaagagaacaacatcccgtttgagtatcagctgggtgaaggcgcgttctacggtccgaaaattgaatttaccctgtatgactgcctcgatcgtgcatggcagtgcggtactgtacagctggacttctccctgccgcagcgtttaagcgcctcttatgtgggtgaaaataacgaacgacaggttccggtaatgattcaccgcgcaattcttggttcgctggagcgcttcatcggcatcctgaccgaagagtttgcgggcttcttcccaagctggcttgcgccggtgcaggttgtggtcatgaatattactgattctcaggctgaatacgttaacgaattgacgcgtaaactacaaaatgcgggcattcgcgtaaaagcagacttgagaaatgagaagataggctttaaaatccgcgagcacactttacgtcgtgtcccttacatgttggtctgtggcgacaaagaggtagaagccggcaaagtcgccgtgcgtacccgtcgtggcaaagacttgggcagcctggacgtaaatgaagttatcgagaagctgcaacaagagattcgcagccgcagtctaaaacaactggaggaataa

SEQ ID NO: 176655 - DNA, 444 bp, Klebsiella oxytoca
ttgggtattgtgagtctgagagaagcaatcgaaaaagctgaagaagctggagtagatttagttgaaatcagccctaacgccgaaccgccagtttgtcgtatcatggactacggcaagttcctttatgaaaagagcaagtcttctaaggaacagaagaaaaagcaaaaagttatccaggttaaggaaattaagttccgtcctggcaccgacgatggcgattatcaggtaaaactccgcagcctgattcgctttctggaagatggcgataaggccaagatcacgctgcgttttcgcggccgtgagatggcccaccaacagatcggtatggaagtgcttacccgcgtccgtgacgatctgagtgaactggcagtagtcgaatccttcccaacgaagatcgaaggccgccagatgatcatggtgctcgctcctaagaagaaacagtaa

SEQ ID NO: 176656 - DNA, 198 bp, Klebsiella oxytoca
atgccaaaaattaagaccgtacgcggtgctgctaagcgcttcaaaaaaaccggtaaaggtggttttaagcacaagcacgctaacctgcgtcacattctgaccaaaaaagctaccaagcgtaaacgtcacctgcgtccgaaagccatggtttccaaaggcgatctgggcctggtcatcgcgtgcctgccgtacgcataa

SEQ ID NO: 176657 - DNA, 357 bp, Klebsiella oxytoca
atggctcgcgtaaaacgtggtgtagttgcccgtgcacgtcacaagaaaattttgaaacaagctaaaggctactacggtgcgcgttctcgcgtataccgcgttgccttccaggctgttatcaaagctggtcagtacgcttatcgtgaccgtcgtcagaaaaagcgtcagttccgtcaactgtggattgcgcgtatcaacgcagcagcacgtcagaacggtatttcttacagcaaattcatcaacggcctgaaaaaagcctctgttgaaatcgaccgtaagatcctggctgacatcgcagtattcgacaaattagcgttcaccgcgctggtcgaaaaagcgaaagcagctctggcataa

SEQ ID NO: 176658 - DNA, 984 bp, Klebsiella oxytoca
atgtcacatctcgcagagctggttgccagtgcgaaggcagccattaacgaggcatcagatgttgctgcgctggacaacgtccgcgtggaatacctgggtaaaaaaggtctcctgacccttcagatgacgaccctgcgtgagctgcctgctgaagagcgtccggcagccggtgcggttatcaacgaagcgaaagagcaggtccagcaggcgcttaacgcgcgcaagtcagcgctcgaaagcgcagcgctcaacgcgcgtctggcctcggaaaccattgatgtctctctgccggggcgtcgtatcgagaacggtggcctgcatccggtgacccgtaccatcgaccgtattgaaagtttcttcggtgagctcggttttaccgtcgcgactggcccggagatcgaagatgattatcacaacttcgatgcgctgaatattccaggccaccacccggcacgcgctgaccacgacactttctggtttgatgccacgcgcctgctgcgcacgcaaacatcaggcgtacagatccgcaccatggctaatcagcagccgccaatccgcattattgcccccggccgcgtgtatcgtaacgactacgatcagacgcataccccgatgttccatcagatggaaggtctgatcgttgacactaacatcagcttcaccaacctgaagggaacgctgcacgatttcctgcgtaacttctttgaagaagacctgcagattcgttttcgtccgtcctatttcccgttcactgagccgtctgcagaagttgacgtgatgggtaaaaacggtaaatggctggaagtgctcggctgcggtatggtgcatccaaacgtgctgcgtaacgtgggcatcgatccggaaatctattccggctttgccttcggcatgggtatggagcgcctgaccatgctgcgctatggcgtgaccgacttacgcgcgttcttcgaaaacgatctgcgtttcctcaaacagtttaaataa

SEQ ID NO: 176659 - DNA, 2388 bp, Klebsiella oxytoca
atgaaattcagtgaactgtggttacgcgagtgggttaacccggccatcgatagcgaagcgctgtcggatcagataacgatggccggccttgaggttgacggcgtagagccggtggcgggcagctttaacggcgttgtcgttggcgaagtggttgagtgcgctcagcacccgaatgccgataaactgcgcgtcacaaaaattaacgtcggcggagaacgtctgctggacatcgtctgcggcgcgccaaactgccgtcagggcctgaaggttgctgttgctaccatcggcgccgttctgccgggcgattttaaaattaaagcggcaaagctgcgcggcgaaccgtcggaaggcatgctgtgctccttctccgaactgggaatttccgacgatcacagcggtattatcgaactgcctgccgacgcgccgctgggtaccgatattcgtgaatacctgaagcttgacgataacactatcgaaatcagcgtcacgccaaaccgtgccgactgcctgggaattatcggcgtggcccgcgatgttgccgtgctcaacaaggcgcctttgaatgtcccggaaatggctccggttgccgccaccatcgacgatgttctgccaatccaggttgacgcgccggaagcgtgtcctcgctatctggggcgtgtggtaaaaggcatcaatgtcaaagcgccgacgccgctatggatgaaagagaagctgcgccgctgcggtattcgctccatcgatgccgtggttgacgtgaccaactacgttctgcttgagctcggtcaaccgatgcacgcattcgataaagaccgcattgaaggcggaatcatcgtacgtatggcgcatgaaggtgaaacgctggttctgcttgacggctccgaggcgaagctggatagcgatactctggttatcgctgaccaccagaaagccctcgccatgggcggtattttcggcggcgagcactccggcgtaaacgatgaaacgcaaaacgttctgctggaatgcgcgttctttagtccgctatccattaccggccgcgcccgccgccatggcctgcataccgacgcttcgcaccgctacgagcgcggcgtggactccgcgttgcagtatcaggcaatggagcgtgctacccgcctgctgatggatatttgcggcggtgaagcgggcccgattattgacgttaccaatgaagcgactctgccgaagcctgcgaccatccgtctgcgccgcagcaaactggatcgtctgattggccatcacattgaagatacgcaggttagcgacattctgcgtcgtctgggctgtgaagttaccgaaggacaggatgagtggcatgccgtggcgccgagctggcgtttcgacatggagatcgaagaagacctggtcgaagaggttgcccgcgtctatggctataacaatattcctgatgaaccggtacaagcgggcctgattatgggcacccaccgcgaagcggatctgtcgcttaagcgcgtgaaaacgttgcttaatgacaaaggctaccaggaagtgattacctatagctttgtcgatccgaaagtacagcagtggatccacgccggcgaggaagcgctgattctgccgagcccgatctccagcgaaatgtcggcgatgcgcctctccttgtggaccggtctgttagcaacggtggtctacaaccagaatcgtcagcagaaccgcgtacgcatctttgagagcggtttacgctttgtgcctgatacccaggctccgctgggtattcgtcaggatctgatgctggctggcgttatctgcggcaaccgctatgaagaacactggaacctggcaaaagagaccgtcgatttctatgatgtaaaaggcgatcttgagtctgtactcgacctgaccggtaagctgtccgacatcgaattccgtatcgaagctaataatgcgcttcatccgggccagtcggcagcgatttatctgaaaggtgaacgtattggttttattggggttgttcatcccgagctggaacgtaaactggatctgaacggtcgcactctggtatttgaactggagtggaacaagcttgcagaccgcgtggtgcctcaggcgcgtgaagtttctcgcttcccggcgaaccgtcgcgacatcgccgtcgttgtggcagaaaacgttcccgctgccgatgttttagccgagtgtaagaaagttggcgtaaatcaggtagttggcgtaaacttatttgacgtgtaccgcggcaagggcgtagcggaaggtttcaagagcctcgctatcagccttatcctccaggataccagccgtacactcgaagaagaggagattgccgctaccgtcgccaaatgtgtagaggcattgaaagagcgattccaggcatcattgagggattga

SEQ ID NO: 176660 - DNA, 300 bp, Klebsiella oxytoca
atggcgcttacaaaagctgaaatgtcagaatatctgtttgataagcttgggcttagcaagcgggatgccaaagagctggtagagttgtttttcgaagaggtccgtcgcgctctggaaaacggggagcaggtaaagctctccgggttcggcaacttcgatttgcgtgataaaaaccaacgcccgggccgtaacccgaaaacgggagaggatatccctattacagcccggcgagtggtgactttcagacctggccagaagctaaaaagccgcgtcgaaaatgcgtcacccagagacaaataa

SEQ ID NO: 176661 - DNA, 1059 bp, Klebsiella oxytoca
atgcggccttttttcttttcttcgccgaataccgtaaaatcaatcacatccttttccccgatgcagaaatctatgctgacctttgctcaaattcaacggcgccgcagccggcgctggcttgccgtattaaccttgctgctgctggctacgtcgaccattagcctgtgcgcgggcgaccagtggattggccccggcgaatggtttagcgccaaaggtgagctgtttatctggcagatacgtctgccgcgcaccctggccgttctgctggtgggcgccgcgctggcgctttccggggcgattatgcaggcgctgtttgaaaacccgctggcggagcccggcctgctgggggtctcaaacggcgctggagtcggcctgattgctgccgtattgctgggaaaaggactgcttcctggttgggcgctggggctgtgtgcaatcgcgggcgcgctggtcataacctttattttgctacgtttcgcccggcggcatctgtctaccagccgtctgctgctggcgggtgtggcgctcggtattatttgtagcgcgctgatgacctgggcagtctatttctctacctctttcgatctccgccagctgatgtactggatgatgggcggatttggcggcgtagactggcagcagctgtggttgatgctggcgctgctgccggtactggcctggggatgcctgcaatcgcagccgcttaatttgctcgcgctgggggaggtttcagcgcgtcaactggggcttccgctgtggttatggcgaaaggtactggtggtcgcgaccggttggctggtgggcgtcagcgtggcgctggctggagcgattggctttatcggtctggttatcccgcatattctgcgtttatgtggtttgagcgatcaccgcgtactgcttccggcttgtctgctggcgggcgccagcgcgctgctgggggcggatatcgtcgcgcggctggcgctatctgcggcggagctgcctattggcgtagtgaccgccaccctgggggcgccggtgtttatctggttattgcttaaatcaggccgcccgcattaa

SEQ ID NO: 176662 - DNA, 801 bp, Klebsiella oxytoca
atgaaaaagatgtttagcaccgtgttaattgcggcctccgtcgcgctgttatcggcctgctcgccggatgaagataataaagttaaagtcgcgatcaataccgggccggatgaggctatctggaaagtcgtagaacaggtggctaaagagaaatacaacctcgacgtggaggtcatctcttttaatgattacgtcctgccgaacgaagcgttaaacaataaagacgttgctgctaacgccttccagacgctgccttaccttgaagcgcaatcaaaagaacgcggctataagtttgcgattgtcggtaaaaccttcgtcttcccgatcgccgcttactcgaagaaaatcaaaaatattagcgaactgcctgacggcgcgacgatctccatttctaacgaaaccaccaccctgggccgcagtttgctgttgctacaggcgcagggcttgatcaagctgaaagacgggacaggctacctgccgacgacgctggatattattgataatcctaaacagctgaagattgtggaagtcgacacgccgcagctgacccgtacgcttgacgacccgaacgtcgccctgtcgattattaataccaatttctccgcgcaggctggtctgtccgccgctcgcgatgggttatttatggaggggccggactctccgtacgtcaacgccattgttgcgcgcgaagataataaagacagtaaaaaagttcaggaactgaaagaggccttccagacgcaagccgttgccgacaaggcagcggaagtctataaaggcgatgcgattaagggctggtaa

SEQ ID NO: 176663 - DNA, 552 bp, Klebsiella oxytoca
atgcaacacgatattcttaatactgatgtcaccactatcgatggtgagaaaacaacgcttgctccgtgggcaggcaaagtgctgttgatcgttaacgttgcgtcaaaatgcggcctgacgccgcagtatgagcaactggaagcgctgcaaaaggatttagaaagcgaaggtttcagcgtgctgggctttccctgcaaccagtttttggggcaggagccgggcagcgaagaggagattaaaacgttctgcagtacgacttacggcgtgaccttcccgatgttcagcaaaattgacgtcaacggcgaacatcgcgcgccgttgtatcaaaagctgattgcggcggcgcctcaggccgttgctccagcaggcagcggtttctatgaacgcatggccagtaaaggccgcgcgccgctgtatgtcgacgacattctgtggaactttgaaaaattcctgattggccgcgacggccaggttatcggtcgtttctctccggatatgacgccggatgacccgcagctggtggccgctattaaaggagcattagcgaaataa

SEQ ID NO: 176664 - DNA, 750 bp, Klebsiella oxytoca
atgccgtttttgatgcagctacaggatgtcgaagagcctggacggctggcgccgttttcagccgatatcagaccgggagagattattcatctggtggggccaaacggggcggggaaaagcacattgctggcacgtatggcggggctctctaccggcccggggcaggtaagactgaatgaacgtcttctgaatgactggccggcgcaggagctggcgcgtcatcgcgcctacttaagccagcaccagatgccgcctttcgccatgccggtctggcattacctatcgctgcatctgcagaacgaggcgcaaaacggactcctgacggccattgcgcagaagctgggcttaggcgataagcttggacgtcaggtgaatcacatctccggtggggagtggcagcgcgtgcgcctggcggcggtgatactgcagattcatcgtcaggctaacgcgtccggtcaactgctactgctggatgaaccgatgaacagcctggacgtggcgcagcaggccgcgctcgatcgactgcttagcgatctctgcgcatcaggcattgccatcgtcatgagcagccacgatcttaatcatactctccggcacgcccacagctcctggcttatctgtcaggggcaaactatcgcctgcggcagcaccgcggaggtgttaagcgaggagaatttaaccgctgcctatgccatggagtttcagcgggttgaggtggcgggtcatcttatgctcgttgcgtcacagtag

SEQ ID NO: 176665 - DNA, 465 bp, Klebsiella oxytoca
atgcgtttctggctcgttttgtgcgttgcgttatttctcgcgggttgtagcagtcaccgtgcaccgccgccaaatccgcggctggctgattcgattaccgtcgttgccaacctgaatgagcagttaaggaactggcggggagcgccgtatcgctacggcggaatgtcgccgcgcggcgttgattgctcggggttcgtgctgatgacgtttcgcgataaatttgcgttacagctgccgcgcgaaacccgcgaacaggcggaaatcggcactaaaatcgataaaagcgaactgctgcccggcgatctggtcttctttaaaaccggatccggcgagagcggtctgcacgtcggtatttacgacacggataaccagtttattcatgcttccaccagccagggcgtcacgcgttcatcgctggataatgtctactggcataaaaatttctggcaggcgcgcaggatctaa

SEQ ID NO: 176666 - DNA, 1443 bp, Klebsiella oxytoca
atgaccctgtcttttactacccactggcgtgatgaactgccggatttttacactgcattagcccccacgccgctggagaacgcgcgccttgtctggcataacgcgccgctggcgcaagagctgggcattcccgagtcgttgtttaacctggacaagggcgctggcgtatggggcggcgaagcgctgctgccggggatgtcgccgctggcgcaggtctacagcggccaccagttcggctcgtgggccggacagctcggcgacgggcgcggtattctgcttggcgaacagcagttggccgatggccgccgcgttgactggcacctgaagggcgccgggctgacaccctattcgcgcatgggggacgggcgggcggtgctgcgctcaacgatccgcgaagggctggcctcggaagcgatgcatgcgctgggtattcccaccacccgcgctctggcaatggtcgccagcgatacgccggtgtaccgcgaaaccgtcgagcaaggggcaatgctgatgcgcctggcggaaagccacgtgcgttttggccattttgagcacttttactatcgccgcgagccgcaaaaagtacagctgctggcggattatgtgattcgccaccactggcctcatctgcaaaatgaagcggataaatacattgtgtggttcagggatgttgtcacccgaaccgcggagatgattgccagctggcaaacggtcggcttcgcccacggggtgatgaataccgataatatgtcgatcctcggactgacgatggattacggcccgtacggcttccttgatgattttcagcctggctttatctgcaatcattccgactatcaggggcgctatagctttgatcatcagccggcggtaggactatggaatctgcagcgcctggcgcaagcgctctcgccgtttatcagcgcggaagcgctgaacggcgcgctggatgactaccagcacgcgctgctgacggcatatggccggcgtatgcgcgacaagctgggattattgacccagcaaaaaggggataacgagctgctggacggcctgttttctctgatggagcgcgagggcagcgactatacgcggaccttccggatgctaagccttagcgagcaggagagcgccgccacgccgctgcgcgacgaatttattgatcgtgagaggttcgatagctggtttgccgcttatcgcgcgcgcttgcgcgatgaacagattgacgatgcgcaaaggcaggcgcaaatgcgcagcgtgaatccggctatcgtgctgcgcaactggctggctcaacgagccattgagcaggcagagcagggggatatgcgtgaactggaacgtctgcatagcgcactttctcagccctttgtcgatcgcacggatgagtatagccagcgtcctccggactggggaaagcgccttgaagtgagctgctcgagctaa

SEQ ID NO: 176667 - DNA, 228 bp, Klebsiella oxytoca
atgattatcattgttgccttgatttttatttttagtgctatgacgcgtatggataacactgccacagcagaaaaaacaaaagacaatgccccgtatcccgttccgacggacaaagagataagcagccggacattattaggcagcgaaggacgggtagtgattgaacatggcggtcagcgctatctgctgcgtcagactcattcgggcaagctgatcctgaccaaataa

SEQ ID NO: 176668 - DNA, 1047 bp, Klebsiella oxytoca
atgaataaaacagacgaattgcgtaccgcgcgcattgaaagcctggtaacgcccgcggaactggcgcaacggcaccccgtgtcccccgatgttgccgcccacgtttccgcttcgcgccgccgaatcgaaaaaattctcaacggtgaagatcgccgcctgcttgtagtgatcggtccctgttccattcacgatactgatgcggcgatggagtatgcgcgcagactgcagggtatgcgcgaacgctatcagccgcagctggaaatcgtgatgcgcacctattttgagaagccccgtacggtggttggctggaaggggctgatctccgaccccgacctgaacggcagctaccgggtgaatcacggccttgaactggcgcgtagcctgctgctgcaggtgaacgagctcggcgtccccaccgctaccgagtttctcgatatggtgaccggacagtttattgccgatttgattagctggggcgctatcggcgcgcgtacaaccgagagccaaatccatcgcgaaatggcctctgcgctctcatgcccggtgggctttaaaaacggtaccgatggtaatacccgtatcgccgttgatgccatccgcgcttcccgcgccagccatatgttcctgtcgccggataagcagggccagatgaccatctatcagaccagcgggaatccgtacggccatattattatgcgcggtggtaaaaaaccgaattaccacgctgccgacatcgccgccgccggagaagcgctggcagagttcgacctgccggaacaactggtggtggattttagccacggtaattgccagaaacagcatcgccgtcagctggaagtttgcgccgatatatgtcagcagatccgcgcgggctcgaacgcaatcgccgggatcatggccgaaagcttccttaaggaaggtacgcaaaaggtcgttgccggccagccgctgacctggggacaatcgattaccgatccctgcttgagttgggaagacagcgaacggctgctggatgaattagccgccgcaaccgccacccgcctctag

SEQ ID NO: 176669 - DNA, 834 bp, Klebsiella oxytoca
atggaaagtgctgtagatcgccacgtattttatatttccgacggtaccgctattacggcggaagttctgggtcatgcggtcatgtcgcaattcccggtagccaccagcagcgtaaccctgccgtttgtcgaaaatatcagccgcgcgcgcgccgtgaaggaacaaattgacgccattttccagcagaccggtattcgaccgctggtgttctattccatcgtgctgccggagatccgcgagatcatcgtgcaaagcgaaggcttttgtcaggatattgttcaggcgctggtggcccccctgcagcaggagctacgcctggacccgacgccaatcgctcaccgcacccacggcctgaccccgggtaatttgaacaaatacgacgcgcgtatcgccgctatcgactacacccttgctcatgatgacgggatttcgctgcgcaacctcgatcaggcccaggtgatcctcctcggcgtttcgcgctgcgggaaaacgcctaccagcctgtacctggcgatgcagtacggtatccgcgccgccaactacccgtttatcgccgatgatatggacaatctgattctgccggcatcgcttaagccgctccagcataaactattcggcttaactatcaatccggagcggctggcggccatccgcgaagagcgacgggaaaacagccgctatgcttctatgcgccagtgccggatggaagtcaccgaagttgaagcgctgtatcgcaaaaataaaatcccttgcctgaacagtaccaattactccgttgaagagatcgccaccaaaatcatggatattatggggctaagccgcagaatgtactaa

SEQ ID NO: 176670 - DNA, 2379 bp, Klebsiella oxytoca
atgtccaacaatggctcgtcaccgctggtgctttggtataaccaactcggcatgaatgatgtagacagggttgggggcaaaaatgcctcccttggtgaaatgattacaaatctgtcaggtatgggtgtgtccgtaccgaacgggtttgccaccaccgctgatgcttttaatcagtttttggaccaaagcggcgtgaaccagcgcatctatgaactgctggatgaaaccgacattgacgacgtttccgcattagcgaaagcgggcgcgcagatccgtcagtggatcattgatacgccgttccagagcgaactggaaaatgcgattcgcgacgcgtatacccagctgtccgccgatgacgctgaggcctcctttgccgtgcgctcctccgcaacggcggaagatatgccggatgcctccttcgccggtcagcaagagacattccttaacgtgcagggctttgacgccgtgctcgtcgcggtgaagcacgtgtttgcttcgctgtttaacgatcgcgccatttcctatcgcgtgcatcagggttacgatcaccgcggcgtggctctatccgccggggtgcagcggatggtgcgttccgatctggcatcatccggcgtgatgttctccatcgataccgaatccggattcgatcaggtggtgtttatcacctccgcctgggggcttggcgagatggtggtgcagggggcggtgaaccccgatgagttctacgtccataaaccgacgctggaagcgggacggccggcgattgttcgccgcaccatggggtcgaaaaagatccgcatggtttatgctccaactcaggagcacggcaagcaggtgcgtatcgaagacgtgccgcaggcgcagcgcgacgttttctcgttgaccgacgcggaagtgcaggagctggcccagcaggcggtgcaaatcgagaagcactacaaccgcccgatggatatcgaatgggcgaaagatggccataccggtaagctgtttatcgtccaggcgcgtccggaaaccgtccgttcgcgcggccaggtgatggagcgttataccctccatgcgcaagggcagattatttcggaagggcgcgcgatcggccaccgcatcggcgcgggtccggtgaaagtcattcatgatatcagcgaaatgaaccgtatcgagcccggcgacgttctcgtgaccgacatgaccgacccggactgggaaccgatcatgaaaaaagcggcggcgatcgtcaccaaccgcggcgggcggacctgtcatgcggcgattatcgcgcgtgagctggggatcccggcggtagtgggctgcggcaacgccaccgatcgcatccaggaaaaccagaatgtaaccgtctcctgcgccgagggcgataccggctacgtctatgccgaaattctcgacttcagcgtcaagagttccaccgtcggcgatatgccggatctgccgctgaaaattatgatgaacgtcggtaacccggaccgggctttcgactttgcctgcctgccgaacgaaggcgtgggcctggcgcgtctggagtttattatcaaccggatgatcggcgttcacccgcgcgcgctgctggagtttgacgatcaggaaccgggtctgcagaacgaaatccgcgagctgatgaaaggttacgattcgccgagagagttttacgtcggtcgcctgaccgagggtatttcgacgcttggcgcggcatttttcccgaaacgggtcatcgtgcgcctttccgacttcaaatctaacgaatacgccaacctggtcggcggcgagcgttatgagccggaagaagaaaatccgatgctgggcttccgcggggctggccgctatgtctccgaaagcttccgtgactgcttcgcgctggagtgtgaagcagtgaaacgcgtgcgtaacgatatgggcctgaccaacgtcgaaatcatggtgccgtttgttcgtaccgtcgcgcaggcaaaagcggtggttgaagagctggcgcgccagggcctcaagcgcggcgagaacggcctcaagctgattatgatgtgtgaaatcccatcgaatgcgctgctggctgagcagttcctcgaatacttcgacggtttctccattggctccaacgatatgacgcagctggcgctgggtctggatcgcgactccggcgtggtctccgagctgttcgatgagcgtaacgacgcggtgaaagcgctgctgtcgatggccatccgcgcggcgaagaaacagggtaaatacgtcggtatctgcgggcagggtccgtcagaccatgaagattttgccgcctggctgatggaagagggaatcgatagcctttccctcaatccggataccgtggtgcaaacctggcttggcctggcggagctgaataagtaa

SEQ ID NO: 176671 - DNA, 1122 bp, Klebsiella oxytoca
atgattaaccccaatcagccccgggatataccgcaagttctgctgtcggtgctgtttttgtccctgattattatttcctgtctgtgggtcgttcagccatttattctgtcatttgcgtgggccggtacggtggtcatcgcgacctggccggtacttttgcgcctgcagagcctgcttttcggcaaacgctctctggccgtactggtaatgacgctgctgctttttttactcttcgttattcctattgcgctactggtcaatagtctggtggacaacagcgtgccattaataaaagtggtgaccagcggcaactttaccccgccggatctggcgtggctgaatacggttccgctgatcggcgataagctgtacaccggctggcataatttgctggagatggggggcacggcgattatgactaaaattcgtccttatctcggcaccaccacctcctggtttgttggtcaggcggcgcatatcggcaagctgctggtctactgcggtcttatgctactgtttagcgcgctgctgtactggcgtggtgaacaggtcgcctatggtttccgccacttcgctacccgtctggccgccaaacgcggcgacgcggcggtgatcctcgccggtcaggcaattcgcgccgtggcgctgggagtggtcgtgacggccctggcccaggcggtgctcggcggtattggtctcgcggtcagcggcgtgccctacgcggcgctgctcaccgtggtgatgatttttacctgtcttgtccaactggggcctttactggttctggtgccgtcaattatctggctctactggagcggcgataccacctggggtaccgtactgctggtgtggagctgcgtagtgggcaccatggacaattttatccgcccgctattgattcgtatgggtgccgacctgccgatgattctgatcctttccggcgttatcggcggtctggtggcgttcggcatgattggcctgtttatcgggccggttctgctggcggtctcctggcgactatacgacgcgtgggttaacgaagcgccgccgccgccgaaagatcccgatctggtgcttgaggagcttagcgagctcaatacccgagcctcgcaggataaataa

SEQ ID NO: 176672 - DNA, 3057 bp, Klebsiella oxytoca
atgatcccacagatttctcaagcgccaggtgtcgttcaactggtgctgaattttttgcaggtactggagcaacagggttttaccggcgataccgccaccagctatgccgacaggctaacgatggcaactgataacagtgtatatcagctgttgccggatgcgattttattcccccgttccacggcagacgtggctctgctggcaagactggcagcggaagagcgttttaaaacgctgatctttaccccgcgcggaggcggcaccggcacgaacggccaggcgctgaacgccgggatcatcgtcgatatgtcccgctatatgaaccgcattattgaaatcaatcccgaagaagggtgggtgcgggtggaggcgggggtcattaaggaccaacttaatcagtttcttaaaccgtacggctacttttttgccccggaactgtcgaccagcaaccgcgccacgcttggcgggatgatcaacaccgacgcctccgggcaggggtcgctggtctacggtaaaacctccgatcacgtactcggggtgcgctcggtgctgatcggcggcgatattcttgacactcagccaatcccggcggcgctggcggaaaccctgggcgcagaacagtcggcaatcgggcgtatctatcgcacggtatatcaacgctgcaaagcgcagcggcagctggttatcgataaattcccgaaacttaaccgtttcctcacgggttacgatctgcgccacgtgttcaacgacgacatgagcgaatttgatctgacccgaatcctgaccggttccgaaggcacgctggcgtttattaccgaagcgcggctggatatcacccgtttgccgaaagtgcgccggctggtcaacgttaagtacgattcctttaactctgcgctgcgcaacgcgccgtttatggtggaagcgaaggcgctttcggtcgaaacggtcgactcgaaggtgctcaatctggcgcgggaggatattgtctggcattcggttagcgagctcattaccgacgttgcggataaggagatgctggggctgaatatcgtcgagttcgccggtgatgacgccgaactgattgacggccaggtgacgaccctgtgtcagcgcctggatgaactgatagcgcgcaacgaggcgggcgtaatcggctggcaggtttgtcacgagctggacggcgtcgagcgcatctatgcgatgcggaaaaaagcggttgggctgctggggaatgccaaaggggccgccaaaccgatacctttcgccgaagatacctgcgtgccgccggaacacctggccgattatattgctgaattccgtgagctgctcgacggccacgggctgagctacggtatgtttggtcatgtcgatgccggtgtgctgcacgtgcggccggcgctggatatgtgtgacccgcagcaagagatgctgatgaagcggatctccgatgacgtggtcgcgttaaccgctaagtacggcggtctgctgtggggggaacacggcaagggttttcgcgctgaatacagtccggcattcttcggcgaagagctgttcggcgaactgcgcaaaattaaagccgcgtttgacccggataaccgtctgaacccgggtaaaatctgtcctccggaaggcgttgatgcgccgatgatgaaggtggatgcggtcaagcgcgggacattcgatcggcagatccccatcgccgtgcgcagctcgtggcgcggcgcgatggagtgtaacggcaatggcctgtgcttcaactttgatgccaaaagcccgatgtgcccgtcgatgaaggtcagcaaccaccgtattcactcgccgaaagggcgggcaacgctggtgcgtgaatggctgcgcctgctggcggaccgcggcatcgaccccaatcagctggaaaaagatctgccggaaaaacgcgccagcctgcgtactctggtggagcgtacccgcaatagctggcatgcacgtaaaggcgagtacgatttctcccatgaggttaaagaggcgatgtccggctgtctggcctgtaaagcctgctcgacccagtgtccgattaaaatcgacgttccggagttccgttcgcgtttcctgcaactttaccatagccgctatttgcgcccggttcgcgaccatctggtggcgacggttgaatcctacgcgccgctgatggcgcatgcgccaaagaccttcaacttctttatcaatcagccgtggatgcgcaagctatcggaaaagcatattggtatggttgatcttccgctgctttccgtcccatcgttgaagcagcagatggtcggccaccgttcggcgaataccaccctggaacagctggaagcgctgagccctgagcagagggcgaagagggtgctggtggttcaggatcccttcaccagctattacgatgcgcaggtggttgccgactttgttcgcctgatcgagaaagtaggataccagccggtgctgctgccattctctcccaacggcaaggcgcagcatattaagggcttcctgacgcgattcgcgcgcaccgcgcagaaaactgccgacttccttaaccgcatggcccagctcggcatgccgatggtgggtgtcgatccggcgctggtgctctgctatcgcgatgaatacaaccaggtgctgggtgacaagcgcggcgattttcgcgtgatgctggtgcatgaatggttgccgcaggcattgacggaaaccgcagcgcaggatcaaggcggcgagtcgtggtatctgtttggtcactgtactgaggtgacggcgcttcccgcttctacccggcagtgggcggatatcttcgcacgctttggcgcgaagctggaaaacgttaacgtgggctgctgcggcatggccgggacctacggtcatgaagtgaagaatcacgccaattcgctggccatctacgcgctctcctggcagcaggcgatgcagcgcctgccgcgcaaccgctgtctggtcaccggctactcctgccgtagccaggtgaagcgtattgaaggcagcggcgtacgccatccgctgcaggcgctactggagattatgggatga

SEQ ID NO: 176673 - DNA, 411 bp, Klebsiella oxytoca
atgatttggaaacgtcacagcacgctggagcaactgaacgcgatgggcgacgggaacatggtcggcctgctggatatacgcttcgaggccatgaccgacgagaccatcgccgcgaccatgccggtagacagccgtacccatcagccgtttggcctgctgcacggcggcgcatcggtggtattagcggaaacgttaggttcggtggcgggctacctgtgcagcgaaggcgaacagaaggtggtcggtctggaggtcaatgccaaccatattcgttcggtgcgcagcgggagggttcgcggcgtgtgccgggcgctgcacgtcggctcccgtcaccaggtgtggcagatcgacattactgatgagcaggggcgtctttgctgttcgtcgcggttgaccacagccgtaatttaa

SEQ ID NO: 176674 - DNA, 249 bp, Klebsiella oxytoca
atgggtatcatttcatggatcatttttgggcttattgccggtattttagccaagtggattatgccggggaaagacggcggcgggtttatcgttaccgtaattctcggtgtcatcggtgcagttgtcgggggttggattagtactttcttcggctttggccgggtcgacggttttaatttcggcagctttgtcgtcgcggtgattggtgcgctggtcgtactcttcatctaccgtaagatcagaagctaa

SEQ ID NO: 176675 - DNA, 327 bp, Klebsiella oxytoca
atgaaaaaaactatcattgcgctcttcgccgtcgtttcgattaccgtcaccagcgcgttcgccgccgatgcagagaaagccgaaacgcccttaccggcggctgaggcgcataatgctggccatccccccttcgagctgactcagggttatggcccaatgcctttccctgtgccgccgaaaaaaccggttattttctccgccaccgtagccaccgataatccggtcgaaacgatcaataaactcacgccgctgattccagccagcaaagctaaacattatgaagtgcgcgttgaagtcgtgccggtccccgatatgcccgcgctgtaa

SEQ ID NO: 176676 - DNA, 420 bp, Klebsiella oxytoca
ttgcatgaatggattcgcgttagtgagggggcaaacagcgtctcaatttggcatattggtcgggtggcgcgtcaggcggcgcgggagccagaggggcaatgggaggcaaatgccatcgtcccgccggatacgcacgtgaagaaaatattaatactgtttattggccgccgcgcctcgttatgcgcagcgcggcatcaaccgatgccacggtggacgccgacgcgacgaacaggcggcaggacttcgctggaagcagggctccgcttagtccacgcgtttgcctttggtcgcctctccgccgccgagtgcggcttgattaattttatcttcgtgggtattaatcaattgcgtgagcgctatttgctcctgaaatttagtcagcagaagctcagcgtcggatttaagaatatcttccgatga

SEQ ID NO: 176677 - DNA, 342 bp, Klebsiella oxytoca
atgaataatgtcattctcagcatcatcgcgaaaatttcagcgatggatgcagaaaacaagcagcttgctgcgcaggttgaggcccagtcgctgctgataagcgcattgatgcttgccattggcgaggaaggaggggtcgcggagctggttgggaatgtgaccaaagcaattaactcggtgcttgaatcatcggaagatattcttaaatccgacgctgagcttctgctgactaaatttcaggagcaaatagcgctcacgcaattgattaatacccacgaagataaaattaatcaagccgcactcggcggcggagaggcgaccaaaggcaaacgcgtggactaa

SEQ ID NO: 176678 - DNA, 378 bp, Klebsiella oxytoca
atggattcacatgcaggaacttttaatcccgaagatttcagctggcgcggcctggcgatgaccccagccgccgccgcccatattcgcgaactggtcagcaaacaacccgacaagcaggggctacgcctgggcgttaaaaccagcggctgcgccggctttggctacgttctcgaactcatcgctgaaccggcgcaggacgatctgctttttgagcgcgatggcgcgaaactgtgggcgccgctgcaggccatgccgtttatcgatggcaccgagctcgactacgtccgcgaaggtttaaaccagatttttaaatttcataaccccaaagcgcagcacgaatgcggctgcggcgaaagttttggcgttcaggcggagtaa

SEQ ID NO: 176679 - DNA, 1488 bp, Klebsiella oxytoca
atgtctcgtaatactgaagcaactgacgatgtcaaaacctggagcggcgggccactcaactataaagagggcttttttacccagctacagaccgatgagctggcgaaaggcataaatgaagaggtggttcgggcgatttctgcacgccgcaatgaaccagaatggatgctggagtttcgtctgaacgccttcaaggcctggcaggcaatggaagagccgcactggctgaaagcgcactacgacaagctgaattatcaggattacagctattactcagcgccctcctgcggcaactgcgatgacgcctgcgcttccgagccgggagctctacagcaaacggggtccagtgcgtttctgaccagcgaagttgaagaggcgtttaaccttctcggcgtaccggttcgcgaagggcgggaggtggctgtcgacgccatttttgactcggtttccgtggcgaccacctaccgcgaaaagctggcggagcaggggattattttctgctccttcggcgaagcgattcacgatcaccctgaactggtcaggaaatacctcggcaccgtagtaccgggtaacgacaacttctttgccgcccttaacgcggcggtagcctccgacggcacctttatctatgtgcccaaaggcgtgcgctgcccgatggagctgtcgacctatttccgcatcaacgccgagaagaccggccagttcgaacgcaccatactggtcgccgacgaaggcagctacgtgagctatatcgaaggctgttcggcgccggtacgcgatagctaccagctgcacgcggcggtggtggaggtgatcattcataaagatgccgaggtgaagtactccacggtgcaaaactggttccccggcgacaataataccggcgggatccttaatttcgtgaccaagcgcgccctgtgcgaaggcgagaacagcaaaatgtcgtggacccagtcggaaaccggctcggcgatcacctggaagtatccgagctgtattctgcgcggcgataactccattggcgagttcttctcggtagcgctgaccagcggccaccagcaggcggacaccggcaccaagatgatccatatcggcaaaaacacccgttcgacgattatctcgaaggggatttcagccggccacagccagaacagctatcgcggcctggtcaaaatcatgcccaccgcgaccaacgcgcgcaacttcacccagtgcgactccatgctgattggcccggacagcggggcgcataccttcccgtatgtagaatgccgtaataacagcgcgcagcttgagcacgaagcgaccacctcccgtatcggcgaagatcagctgttctactgtctgcagcgcggaatcagcgaagatgatgccatctcgatgatcgttaacggtttctgtaaggatgtcttctcagagctgccgctggagtttgccgtagaagcgcaaaaattactggcgattagccttgaacacagcgtcggctga

SEQ ID NO: 176680 - DNA, 747 bp, Klebsiella oxytoca
atgttaagtataaaaaatttgcaggtcgccgttgaagacaaagagatcctgcgcggactgaatctggacgttcgccccggcgaagtgcatgccattatgggcccgaacggttccggtaaaagtacgctctccgccacgcttgccggacgtgaagactatgaggtgaccggcggcagcgtggagtttaaaggcaaagatctgctggaactctcccctgaagatcgcgctggcgagggcatcttcatggcctttcagtatccggttgaaattcccggcgtcagcaatcagtttttcctgcaaaccgcgctgaacgccgtgcgcagctaccgcggccaggagcagcttgaccgttttgacttccaggacctgatggaggacaaaattaagctgctgaagatgccggaggatctgctgacccgctcggttaacgtcggcttctccggcggcgagaaaaagcgcaacgatatcctgcagatggcggtgctggaaccggagctgtgcatcctggacgagtcggactccgggctggatatcgacgccctgaagattgtttccgacggcgtcaactcgctgcgcgacggcaagcgctcgtttattatcgtcacccactatcagcgcattctcgactatatcaagccggattacgtccacgtgctgtaccaggggcggattgttaaatccggcgattttactctggtcaaacaactggaggagcagggctatggctggcttaccgaacagcagtaa

SEQ ID NO: 176681 - DNA, 1275 bp, Klebsiella oxytoca
atggctggcttaccgaacagcagtaacgcgctgcagcagtggcaccatctgtttgaagcgcaaagcgagcagcgcagcccgcaggcgcatcagcatttgcaacagcttctgcggctggggctgccgacgcgtaaacatgaaaactggaaatataccccgctggatgcgttactgaaccatacttttgtcgctgcggaaccgcagacgctgacggcggcccaacgcgacgccctggggctggcgttggacgcatggcgtctggtttttgtcgacggccagtttaacgaacgcctgagcgacgacctgaccgccagcggctttgaggtgcgggtagataacgaccgtcagccgctgcctgatgccgttcagcccgaagtttttctgcatttgaccgaaagcctggcgaccagcgtcacccatatccgggtcgggcgccaccagcgaccggaaaagccgctgctgatcgtgcacatgacgcgcgggctgccgggcgatgaaatgaacaccgcccactatcgccaccatctggagctggagagcggcgcgcaggcgactattatcgaacactatctgagcctcaacgacgccgcccattttaccggcgcaaggctgacgatgtccgtggcggataacgcccacctgcagcatatcaagctggcgtttgaaaatgcgcaaagctaccactttgcccataacgatctggccctcggacgcgacgcctccgccttcagcagcagttttctgctcggcgcctcggtactacgccaccacaccagcacgcagttgaacggtgaaaacagcaacctgcggattaactcgctggcgatgccggttaacaacgaagtgtgcgacagtcgcacctggctcgatcataaggtcggatactgtaacagccgtcagctgcacaaaaccatcgtcaacgataaagggcgcgcggtgtttaatggactgatcaacgtcgcccagcatgcgattaaaaccgatggccagatgaccaacaataatttgctgcttggccgcctgtccgaagtggataccaagccgcagctggaaatctacgctgatgacgtgaagtgcagccacggcgcgaccatcgggcgcattgatgatgaacagctgttttatctgcgttcgcgcggcattacgcagcaggcggcgcagcagatgattctttacgcctttgccgcggagctcacggaagcgatcgatgatgaggcgctcaggcagcagatactggcgcgtattggccagcgtttgccgggaggtaaagcatga

SEQ ID NO: 176682 - DNA, 1221 bp, Klebsiella oxytoca
atgacattttctgtggaacgcgtgcgcgcggattttcccgtgcttaatcgcgaggtgaacggtcagccgctggcctaccttgatagcgccgccagcgcgcagaagccggaagcggtgatcaacgccgaggcggagttttaccgccacggctatgcggcggtacaccgcggcattcatacccttagcgcggaagccacggcgcggatggagcaggtgcgtcagcagggggcgacgttcctgaatgcccgatcggcagaagagctggtgtttgttcgcggtaccacggaaggcattaatctggtagcgaacagctggggcaatgctaacgtcggcgcaggggacaatatcatcgtcagcgcgatggagcatcacgccaatatcgtgccgtggcagatgctgtgcgccagggtgggcgccgaactgcgggttatcccgctgaatcaggacggtacgctgcagctcgatgccatccccggcctgtttgatgagcgcacccggctgctggcaatcacccaggtgtctaacgtgctgggaaccgaaaacccggtcgccgccctggtggctttagcccatcagcacggcgccaaagtgctggtggacggcgcgcaggcggtgatgcaccatccggtggacgtgcaggctctggactgtgatttctacgcattttccgcgcataagctttacggccccaccggtatcggcatgctctacgttaagcaggatatcctgcaggatatgacgccttgggaagggggcgggtcgatgatcgccacggtcagcctgacgcaaggcacgacctggacaaaagcgccgtggcgcttcgaggcgggaacgccgaacaccggtggtatcatcgggctgggggcggcgctggattacgtcagcgcgctgggtctgacgcagatcgcggaatatgaacaaaccctgatgcgctacgcgctgcaggcgctggagagcgtggcggatttaaccctttatggtccgcaaaatcggctcggggtgattgcctttaatctcggcaagcatcatgcctacgatgtcggcagcttcctggataactacggcattgcggtacgtaccgggcaccattgcgccatgccgctcatggagttctacggcgtccctgccatgtgccgggcgtcgctggcgatgtacaataccacggaagaggtggaccggctggtagcgggcctgcagcggatccacaaattgttaagctaa

SEQ ID NO: 176683 - DNA, 417 bp, Klebsiella oxytoca
atggcggcgttacctgataaagacaaactgctgcgcaactttagccgttgcgcgaactgggaagagaaatatctctatatcatcgaactggggcagcgccttgcgccgctgagcccggaagagcatagcgcgcagaacatcattcagggctgccagagccaggtatggatcgtgatgacgcaggagcagagcggcgcaattgcgcttcgcggcgatagcgatgccgctattgtgaaagggcttatcgcggtggtgtttattctttacgatcggatgacggcgaaggatatcctcgcttttgatgtacgcccgtggtttgaaaaaatggccctcacgcagcacttgacgccttcacggtcgcaaggactggaagcgatgatccgcgcaatccgcgcgaaggcggcaaatcttagctag

SEQ ID NO: 176684 - DNA, 984 bp, Klebsiella oxytoca
atgaaacgcgcttctctcatcaccatagccgttctgagcgccctcagcgcgtcacatgcagcctgggccgtcgattaccctcttccccctgccaacagtcgtttgattggtgagaaccagtcctggacggtacaggaggatgatcgcaacctgcaggcgattgcccgtcgtttcgataccgcagcgatgctgatcctcgaagcgaacgatacgattgccccggtgcagcctaaaccgggtacccaggtgctgattccctcccggatgctgctgccggacgtgccgcgggaagggatcgtcgtcaacctggccgagctgcgcctgtactacttcccgccgggaatgaaccaggtgcaggtttatcccctcgggattggtcagcaggggctggagaccccggagatgaccacgcgaatagggcagaaaattccgaacccgacctggacaccgacggcaggcattcgcgctcgctcgctggagaaaggaattaagctgccgccggtcgtgcccgcaggaccgaataacccgctggggcgttatgcgctgcgcctggcatacggcaacggggaatatcttattcatggcaccagtgcgccagatagcgtcggactacgcgtcagctccggctgtatgcgcatgaatgcggcggatattcaggcgttattcaatcaggtgaaaagcgggacgccggtgcggattatcaatcagccggtcaagttcgccgtggagccggacggtaagcgctatgttgaagttcatcgaccgttgacgccggatgagaccagcaacccgcagacgatggcctatacgcttcctgcggagttccatcaattctccggcgataaagcggtggatgaggccatgcttaaacgcgcgctgacccggcgagcaggatatccggtggtggtatccgcgggcagcagctcgacgtcgggcctgtccgtacagagtgcgccggtagacgaagcaaaaagggtgcagtag

SEQ ID NO: 176685 - DNA, 237 bp, Klebsiella oxytoca
atgaatcgtactaaactggtactgggcgcggtaatcctgggttctactctgctggctggttgctccagcaatgctaaaatcgatcagctgtcttctgacgttcagactctgaacgctaaagttgaccagctgagcaacgacgtgaacgcaatgcgttccgacgttcaggctgctaaagatgacgcagctcgcgctaaccagcgtctggacaacgcagctactaaataccgtaagtaa

SEQ ID NO: 176686 - DNA, 1413 bp, Klebsiella oxytoca
atgaaaaagaccaaaattgtttgcaccatcggtccgaaaaccgaatccgaagagatgttgaccaaaatgctggacgccggtatgaacgttatgcgtctgaacttctctcacggtgactatgcggaacacggccagcgcatccagaacctgcgcaatgtgatgagcaaaacgggcaagaaagcggcaatccttctggataccaaaggtccggaaatccgtactattaagctggaaggcggtaacgacgtctccctgaaagcgggccagactttcaccttcaccaccgacaaatcggtggtaggtaataacgaaatcgttgcggtgacctatgaaggcttcaccagcgacctgagcgtcggcaacaccgtactggtcgacgatggtctgatcggtatggaagtcaccgcgatcgaaggtaacaaagttgtttgtaaagtgctgaacaacggcgacctcggcgagaacaaaggcgttaacctgccgggcgtatctatcgctctgccggcgctggctgagaaagacaaacaggacctgatcttcggttgcgagcagggcgtggactttgttgcggcctcctttatccgtaagcgttccgacgtcgtggaaatccgcgagcacctgaaagctcacggcggcgagaagatccagatcatctctaaaattgaaaaccaggaaggcctgaacaacttcgatgaaatcctcgaagcttctgacggcatcatggttgcgcgtggcgacctgggcgttgaaatcccggttgaagaagttatcttcgcgcagaaaatgatgatcgaaaaatgtatccgcgcgcgtaaagtcgttattaccgcgacccaaatgctggattccatgatcaaaaacccgcgtccgacccgtgcggaagcgggcgacgtggctaacgccatcctcgacggcaccgatgctgtcatgctctcaggcgaatccgcaaaaggtaaatatccgctggaagcggtcaccatcatggcgaccatctgcgaacgtaccgaccgcgtgatgaccagccgtcttgagtacaacaacgataaccgtaagctgcgcatcaccgaagcggtctgccgcggtgcggttgaaacggcagaaaaactggaagcgccgctgatcgtcgtcgcgacccagggcggtaaatccgcgcgcgccgtacgtaaatacttcccggatgcaaccatcctggcgctgaccaccaacgaaaccactgcgcgtcagctggtgctgagcaaaggcgtggtagcgcagctggttgaagagatcgcctctaccgacgctttctatcacctcggtaaagagctggcgctgcagagcggcctggcgcgcaaaggcgacgtggttgttatggtttccggcgcattagtcccgagcggaaccaccaataccgcttccgtgcacgtgctgtaa

SEQ ID NO: 176687 - DNA, 213 bp, Klebsiella oxytoca
atgggaaacacagccaaagatgaggcgctgtatcaggaaatgtgccgcgtagtcggtaaagtcgtgcttgagatgcgcgacctgggtcaggagccaaagcatatcgttatcgccggcgtgctgcgtaccgccctggcaaacccgaaggtcaagcgctcagcgctgacgcaggaagcgatggagaaggtggtccatgcgctttccggcagctag

SEQ ID NO: 176688 - DNA, 639 bp, Klebsiella oxytoca
atgtctgccgttgctcatgatgaagcacaatcgcttaaggagcggatcttcgccgccgctattaccgttttcgccgagcacggtttatcgggcgcgcgaatggagcaaatcgccaccgaagcgcagaccactaaacgcatggtggtctactacttcaagaccaaagagcagctttatcaggccgtgctccagcacgtctacgcgaggatccgcgaaaccgagcagcagcttgggctggaaaacgtgccgccggttgaggcgctggtgcagctggtaaagtggagcgtgcgctatcacgccacgcacgccgactatatgcgggttatctgtatggaaaacatgcagcgcggcaagtggctgaaaagctccggacagctgaaaccgctaaaccgtaccgctctgtcgattctggaagatattctgcagcgcggccagcagcaaggcgtgtttcaggcgggtctggaggcgcgcgatgtgcatcgattgatcagcagctttagcttctatcaggtgtcgaacttttatacctttagcagcctctatctggacgacccgatgccggccattgatgatgaagcgatggtcgcccaccactgcgatattgccgtcaaagcggtgatacgctttgtgatttcataa

SEQ ID NO: 176689 - DNA, 1857 bp, Klebsiella oxytoca
atgttgcgctccatcgccaccgtctcgatttccggtaccttacccgagaagctccatgccatcgcagcggcgggctatcagggcgtcgaaatttttgaaaacgatctgctctattataccggtacgccggccgatatccgccacctggcggctgatttagggctaaaaatcacgctttttcaaccgtttcgtgattttgaaggcgccagccgcgcccagttcaccgctaatatggaacgcgccagacgcaaatttgcgctcatgcatgagctgggctgcgataccatgctgctgtgcagtaacgttcagccggactgttccgccgacgtcgaactgcaggtggccgatttacgcgctctggctgagctggcggagcaggaaggcatcactatcggctacgaggcgctggcctggggcacccacgttaaccgctggcatcaggcatgggcgcgggtcaaacgcgtcgatagcccggcgctgggtattgtgctcgacagtttccacgtgctggcgcgcggtgacacgctggcgcagctggcggacgtgccgctggagaaaatcacctttgtacagatggccgacgcgccactgatgaaaatggatatcctcgaatggagccgccacttccgctgcttccccggtcagggacaactgccgctggtggattttgcctgcgagattatccgctgcggctatcgtggcccctggtcgctggagatttttaacgacagcttccgggcttctcccaacggtgcgacggcgaaagatggctatcgctcgctgctgtggctggaagagcaggtccgccaccggctgccggaaagccgcgcgccgctgtttgcaccggctgaactaccggtctatgccgggctcgagtttatcgagtttgccgccacgccatcgcaggcgggagtactcggagacaggctggcgcagctcggctttgccgaagaggggacgcatcgctcaaaacgcgtctccctctggcgcaacggtggggcgcgggtggtggttaacgcccaaccgcatagctgggccgaccattttcatcagcgtcacggagtttctctctgcgctatggcgctacgcgtcagccagagtgcggcaatcgtcgagcgcgcccgcgccttgggctatgccacctggcagggcgatgccggtcccaacgaaagcccaatcccggcggtttgcgccccggacggtagcctgatttatctgattgaagtgggcgacgacatctacacgcgcgatttccatctgcgcacggacgtcacgccgcgcgacgattattgtggtatcgatcacctggcacttggcatggagtcggatagccgcgataactggatcatttttttccgcaccgtattcggctttatccttgagcatgaacaaacgctacccgatccgtacgggctggtgcgcagcctggcggtacgcagtccgcagggcgacatccgctttgcgctgaatatttcgcaaagccgcgccacgcaaattgcccgttcagtggcctgttatcagggggcaggtttacagcacgcggcttttgcctgccgcgatttatcctccactcttgcaagcgtgcccgaggttgccgtcaatgcgctgccgattccagcgaactactatgaagatttgctggcccgttatgggaaagatgttcctgttaacttgttgaagaatcatcaaattctttacgatcgcgatggcagcggcggcgaatttttccacctctacacccgaccgattgcggtgggacgctttttctttgaactgaccgagcgccgcaacggttacgcactttatggtgctgtaaatgcagctgtacgcttgtcagcaatgcagtacaccgagtaa

SEQ ID NO: 176690 - DNA, 1320 bp, Klebsiella oxytoca
atgaactcttatagccacaatcacccgacggcggcggccgcgcccggcgtgaggccctcccggcggcgtatcggtattcttgcgctgctggccgtcggcaccatgatcaactatctcgaccgtacggtgctgggtatcgccgcgccgcagctgaccgctgagctgggtattgatgccgcaatgatgggcatcgtgttctccgcctttgcctggacctacgcgctggcgcagatccccggcggcatcttccttgaccgcttcggcaacaaagtgacctattttctggcgctgaccctatggtcgctattcaccatgttccacggcctggcggttggcctgaaaagtctgctgttgtgccgctttggcctcggcgtcagcgaagcgccctgtttcccggtgaacagtcgggtggtgagcgcctggttcccgcagcaggagcgggcgaaggcgacggcggtctataccgtcggcgaatatctcgggctggcctgcttttcgccgctgctgttctggataatgggcagcttcggctggcgcgcgctgtttattagcgtcggcgcggtcggcgtgatgttcgcgctggtgtggtggcgctgctatcgcgagccgcatgaagataaacacctcaatcagcaggagcgcgagcacatcgtcaacggcggcggaatgtccaccggcgcagagcagcataccgcctttagctggccgctgattcgccagttgctggcgaaaagacagattctcggcgccagcatcgggcagtttgccggtaatacggtgctggtcttcttcctgacctggtttccaacttatctggctaccgaacgccatatgccgtggattaaggtcggcttctttgccatcatgccgttcctggcggcggcgggcggcgtgatgttcggcggctgggtctcggataagctgctgaaggccaccggttcggcgaatctcgggcgtaaactgccgatcattgccggtctgctgatggcgagcacgattatctccgccaactggctgaccagcgatctggcggtgattctggtgatgtcattcgccttttttggtcaggggatggtgggcctgggctggacgttaatttccgatatcgcgccgaaaggccttggcggtctgaccggcggcctgtttaacttctgcgctaacctcgccgggatcctgacgccgctgatcatcggtttcatcgtcgcggcctccggcaacttcttctacgcgcttgtttatatcggtggcgctgcgctgctgggcgtagcggcatatgtgtttattttgggtgacgtaaagcgtatcgaactttcgcagtaa

SEQ ID NO: 176691 - DNA, 837 bp, Klebsiella oxytoca
atggtgattagtggaaatacgcggctgatagcgcatcttggctatccgaccgcgaagtttaaagcgccgatgatttataacccgtggtttgccgatcgacaggtcgacgccaaagtagtgccgatgggcgtgaagcctgaggactacgccgcctttgtcccgatgctatttaaaatgaccaatattattggcgcgctggtcaccatgccgcacaaaatcgccacctgcgggctggtgcagcatcttagcccgacggcggcaattgcgggcgcctgtaacgcgattcgccccgaagccgacggcacgctcagcggtgatatgtttgacggagaaggctttgttctcggtatccggcgcaaagggtttgcgacgcaaggggcgcgggcgctggtggtgggcagcggcggcgtcggctcggccattgccgcatcgttggcggcagcgggcgtcagcgccctgacgctgtacgacgtccgcccgcagacggcggaagcgctggccggacgtctgctcgagcactatcctcggctggatatcactctgatgcagcgcgacccgcaggggcacgatctggtggtcaacgctacgccgctggggatgaaagagggcgatccgctgccgctggacccgcagcgcctggcgccgggcacttttgttggcgaagtggttatggcccaggaatttactccgctactgcaggccgcgcgggcggcgggctgccccattcagcgcggcaccgacatgctgtttgaaatgatcccggcctatctgcgcttctttaacctgccggtggcaacgccggaacagctgcgcgaactggcggaaattggctactga

SEQ ID NO: 176692 - DNA, 741 bp, Klebsiella oxytoca
atgactccctccctaaagctgctggcagcgggaagcctgaaaagcgctttcattccgctgctggcgcgctttcagcaacagaccggcattccggtcgacgtccatttcggtccggctggtctgctgcgcgagcgcattgaggccggagagccgtgctccgtgttcgcctcggccaatagccatcatccgcaggcgctgcgtcaggcggggctggccggagagtgctattggttcgcccggaatcagctgatgctgaccgtccggcgcgacgcgagaaccgaggcgcgggagtggctgacgctgctcagcgacccgggcttgcgtctggcaacctcaacgccgggctgcgacccttcaggcgactacacctggcagcttttctcccacattgaagagcgctgtcccggcgtcggtgccgccatcatgacgcgcgcgcgtccgctggtaggcggccgagactcgctgccggtgcctgcgggagaaatcgccggggcgtggctcattcggcaaaatttaaccgatctgttcatcggctatgcgcattacgccgcgcagatggcggcgtgcagcgatctgcgcacgctggttattccgccggcgtggaatgttcgctgcgattatcaactgacgcagattgaacagagcgccggggcgcagcgtctgtgccgctttatcctcggcggagagggccagcgttttctgaaaaacgccggctttttagccatcaacggcgaatcgtaa

SEQ ID NO: 176693 - DNA, 750 bp, Klebsiella oxytoca
atgaccctttccctgaatttaagcagcctgctctacggttatagccgaccgctattcgcaccgctgaacctgcagtgccgctccggtgatatctgggcggtacttggcgccaacggccgcggcaaaagctccctgctcgataccctgaccggcgtcctggcgccgctcggcggccagtttaccggcaccggcggtatcgccatcgtgccgcagcattttcgtccagcctttagctggctggtacgtgacgtggtgctgatggggcgggcgcgccacgttaacctgttcgctcagccatcggcggacgacgagcgccaggtccaggaggcgctggcgcagctggggatcgcgacgctcgccgacaaggtgttccgtgcgctgtccggcggccagcagcaactggtactcatcgccagggcgctggtgggcgctagccagaatatcctgctggatgaaccctgctcggcgctggatctggccaatcagcagctggtgctgcagctgattagcgacctggcatatcgccagaagcggacggtgctgtttaccacgcacgatcccacccacgccctgcaggtagcgaaccagactttgctactgctccccgacggtgaatggctggcgggagaatccaccgccgtactgacggaagagaatcttcagcgcgcgtatggtttggcggtacgcaaaatctgtcacccgtgctcggcgctgccgctgctggccccgcagtttacgattcgccgttga

SEQ ID NO: 176694 - DNA, 1005 bp, Klebsiella oxytoca
atgcttagtcatcgtcatccggctctgctgcactgtaccctcgcgctggtaacgctcatgattgcactcgcctctatctgcctcgggcagtatccgttaagcctggcggaggtttttcgccagctggcgcatctctcccccctcgacggcgtcgccggtcaggtggtgtggtcggtcagactgccgaggatcgtgatggcgctgctggccggcggcgcgctggggctgtgcggggccaccttacaaggggtgttccagaacccgctggtcgacccgcatatcatcggcgtcacctccggctccgctttcggcgggacgctggcgattctgctgggactcaatgccgcgctgatgatgacctcgacctttctcttcggccttgccgcgctgatgctggtctatctaatcgccgcgctgcaggggcgcgaaagtaccctggtactgatcctctcaggaattatcctcagcggcttttttgccgccctggtgagcctgatgcagtatctggccgataccgaagaaacgctgccgaatatcgtcttctggctgctcggcagctttgccaccgccagttggcataaagtcctgctgatggcgctaccggtagcctgcgccgcgatggtgctgttcaggctccgctggcggattaacctgctggcgctggaggaaaaagatgcccgcgggctgggcgtttcggtgaccgcgctgcgtcgcggggtgctggtatgctgcgcggtgctggtcgccgctcaggtggcggtcagcggcagcatcgcatgggtcgggctggtgatcccgcatctggcgcggctgctgaccggcgccgatcaccggcgtcttctccctatcgccttctggctcggcggcggttttatgatcgtcgtcgatgaccttgcccgcacgctaacccaggccgaaattcccattggtattatcaccgcgctgcttggcgcgccgctgttcacctggctgctggtgcagtcgcgacgcacgggcgcgcgctga

SEQ ID NO: 176695 - DNA, 1059 bp, Klebsiella oxytoca
atgttcagatacccgcacgttttatttctcctgacgctgtcaggcgccagcctgttcgccggtcaggcctttgccgatcgcaccctcaccgaccagctgggccgtgaagtcaccctccccgaccgcgtcacccgcgccgtggtgctccagcatcaaactttaaacctgctggtgcaacttaatgctgctgacgacgtcgtcggcgtcttgagcagctggaaaaaacagcttggcccgcagtttgcgcgctttatgccgaacattgaaaaactgccgatgccaggcgatctcacccaggtcaatatcgagagcctgctggcgctgcatccgcaggtagtcttcgttgccaactatgcgccgcaggcgatgatccagcagatccagagcgccgggatcccggtggtggcgatctctctgcgccaggatgccgcaggggagaaaaacaaaatgaacccgacaatggccaatgaagagcaggcctacaatgagggactgaaacaggggatccgcctgattggcgaagtggtcggtcgccaggatcaggccgaacagctgattgattacaccttcagcgcgcgcagtctggccaatgcgccggttgccgacatcccggaaaatgagcgggtgcgggtgtatatggccaatccggatctcaacacctacggttcgggcaaatataccggcctgatgatgaagcacgccggagcgctgaacgtagccgccgccagcgtgaagggggcgcgccaggtctcgctggagcaggtactacagtgggatccgcaggtaattttcgttcaggaccgctacccggaggtggtcaaacagatacaaaacgacccgcagtggcagagcattgacgcggtcaaaaaccatcgcgtgtggctgatgccggagtacgccaaggcctggggctatccgatgccggaggcgctggcgattggcgagctgtggatggcgaaaaagctctatccatcacgctataacaccattgatgtcgatgcgaaggcgcaggagtactatcagcgtttctaccgcgtgaagtggtcgccggatgcttag

SEQ ID NO: 176696 - DNA, 807 bp, Klebsiella oxytoca
atgaacgagaattcgtcggcggaatacaaagcggtacgcggattgagccgcggattattgttattaaatttgttaaataaattcgacggaggcgcgacggtcagcaccctggccgagtttagcggtctgcatcgtacgaccgtcaggcggctgctggaaacgctgcaggatgagggttacgtgcgccgcagccgctccgatgacagctttcgcctgacgattaaagtgcgtcagttaagtgagggatttcgtgacgaacattggatttctgccctcgccacgccgctgcttggcgagctgctgcgcgaggttttatggccgaccgatatcaccaccctggacgtcgatgcgatggtggtgcgcgaaaccacccaccgcttcagccgcctctccttccaccgggcaatggtcggccgccgcctgccgctgctgctgaccgcctccgggttaacctggctggctttcgcgccggaacacgaacgacgcccgatcatcgatatgctggctgcccgcccggaagcggagtatcagctggcgcgcgagccggaaaaactggccgccattctcgaacgcacccggcaaaacggctacggtgaaaactttcgcggctggcagcaggaggagaaaatcgcctccattgccgttcccgttcgccgtcggcagcgggttatcggctgcctgaacctggtctatatggccaaagctatgactatcgaccaggcagcgcaaaagcatctcgcctcgctgcaaaaggtcgcaaggcagatagaggaacggatgtccgatgaagaggttttctaccagtag

SEQ ID NO: 176697 - DNA, 1665 bp, Klebsiella oxytoca
atgacaacatccaatcctgatatccagcccgccgtacagcacagcgcgcaggtcgcgattgccggcgccggcccggttggcctgacgatcgccaactacctcgggcagatgggcgtcagcgtggtgctgatcgagaagctcgagtcgctgatcgattatccccgcgccatcggtatcgacgatgaggcgctgcgggcgatgcaggccgtggggctggtagataacgtgctgccgcataccacgccgtggcacgcgatgcgctttctcacccccaaagggcgctgctttgccgatattcagccgatgaccgacgagtttggctggtcgcgccgtaacgcgtttattcaaccgcaggtcgatgccgtgctgtacgacggactcagccgctttccccacgtgcgctgcctgttttcccgcgaagttgaagcctttagccagaatagtgacggtgtcacgttaaatgttaaaggcagcggcggcgagcgggaaaccgttcgcgccgactggctggtggcctgcgacggcggagccagctttattcgccgcacgctgaatattccttttgaagggaaaaccgcgccgaatcaatggattgtcatcgatattgccaacgatccgctggcgacgccgcatgtctatctgtgctgcgacccggtgcgcccgtacgtctccgccgcgctaccgcacggcgtcaggcgtttcgaatttatggtcatgcccggcgaaaccgaagcccagctcagcgagccgcacaagatgcgccagctattgagcaaagtgctgccggacccggataacgtcgaactgattcgccagcgcgtctatacccataacgcacgcatcgccgaacgctttcgcgtcgatcgcgtgctgctggcgggcgacgcggcgcacatcatgccggtctggcagggacagggttacaacagcggtatgcgcgatgcttttaacctggcctggaaactggcgctggtggtgaacggcaaagccggagaggcgctgctggacagctaccagcaggagcggcgcgatcacgccaaagcgatgatcgacctgtcggtcaccgccggcaacgtcctggcgccgccgaaacgctggcacggcgcggtgcgcgacggaatttcgtggctgctgaattatctgccgccggtcaaacgctacttccttgaaatgcgtttcaagccgatgccgcagtatcgcgacggcgcgctgctggcggaaggcgaaggcaaaacgtctccggttggcaaaatgtttatccagccgaaggtcacgctggaaacggggcaggtgacgctgctcgatgaggtgataggcgccaggttcgccattatcgcctggggctgcaatccccggtgggggctcaccgacgagcagattgcgcgctggcgcgcggtcggggtgcagttcatccaggtcgtgccggaagtacagattcattgcgatcaggacaacgtgcccggcgttatccgcgtgggcgatacgcaaaaccgcctgaaaaactggttcgcgcagcacgataccgccatcgccgtggtgcgtccggatcgcttcgtcgcgaccgtggctatcccgcaaaccctcggcaaaaagctcaacgcgctggcgagcaagatgcagctggcctccgcgcaagcgccaaccgtgattgaacaggtggcctga

SEQ ID NO: 176698 - DNA, 945 bp, Klebsiella oxytoca
atgaacgcttatcttcattgcctctcgcatacgccgctggtgggttatgttgacccggaacaggcggtgctggacgaagttaacggcaccattgccgacgcgcgggcgcgtattgctgccttcgatccggagctggtggtgctgtttgcccccgatcactacaacggctttttctacgatgtgatgccgccgttctgtttaggcatcggcgcaacttctatcggcgatttcagcagcgccagcggcgttctgccggtgccgacggcgctggcggaggcctgcgcccacgctgtgatgaaggagggcatcgatctggcggtctcctactgcatgcaggtggatcacggcttcgcgcaaccgctggagttcctgctcggcgggctggatacgttgccggttctgccggtgtttatcaacggcgtcgcgtcgccgctgccgggctttcagcgtacccgcatgctgggcgaagccatcggccgctttctgaccaccctcaataaacgggtattaatcctcggctccggcggcctgtcgcatcagccgccggtaccggagctggcgaaggccgatgcccatatgcgcgaccggctgctgggcagcggcaggcagctgccgccggacgaacgggaactgcgccagcagcgcgtgattagcgcggcgaagcagtttatcgaggatcagcactcgctctatccgctcaatccggtctgggatacccgcttcatgagcctgctggagcaggggcggctggcggagctggacgccgtcagtaacgaagagctgtcggcaatggccgggaaatcaacgcacgaaattaaaacctgggtggccgcctttgccgcgctatccgcatttggccgctggcgctgcgaaggtcgctattaccgaccaatccccgagtggattgccgggtttggctcgctgagcgccacagcgcagaactga

SEQ ID NO: 176699 - DNA, 867 bp, Klebsiella oxytoca
atgagctaccaaccgcaaaccgaagccgccaccagccgctttctcaacgtggaagagggcggagaaacattacgcatccattttaatgactgcggccagggtgacgaaaccgtggtgatgctgcacggctccggccccggagctaccggctgggccaactttagccgcaatatcgacccgctggtggaggcgggctatcgggtcattctgttggactgccccggctgggggaaaagcgatgctatcgtcaatcgcggctcccgctccgacctgaacgcccgggtgctgaaaagcgtcattgatcagctggatatcagcaacgtgcatttgctgggcaactcgatgggcggacacagcgcggtggcctttaccctcagctggccggagcgcgtcggcaaactggtgctgatgggcggcggaaccggcggcatgagcctgtttacgccgatgccgacggaaggcatcaagctgctgaacggcctgtatcgcgaaccgaccatcgaaaacctgaaaaagatgatgaacatctttgttttcgatacccgcgatctgactgacgccctgttcgacgcgcgtctcaacaatatgctatcgcgccgggagcatctggataatttcgtcaaaagtctcgaagccaacccgaagcagttcccggactttagcccgcgtctcggcgaaatccgcgcgcagacactgatcgtctgggggcgtaacgatcgcttcgtgccgatggacgccgggctgcgcctgctggcgggcattaacggttctgaactgcatatctatcgcgactgcggccactgggcgcagtgggagcacgcggagagttttaaccaactggtgctcgattttctggcacgtgcctga

SEQ ID NO: 176700 - DNA, 807 bp, Klebsiella oxytoca
atgacaactttatctcttgaacacctggcgcaacggttgcgtgaggcggaaagtcgcggccaggcgattgaaccgctgcgatctctcctcggcgtcgacaatgccgaagcggcctatgctatccagcggatgaacgtgcagcaccacgtggcgaacggccgccgggtggtgggacgcaaggtgggattgacccatcctaaagtgcagcagcagctgggcgttgaccagccggacttcggcaccctgtttgccgacatgtgctacggcgataacgccgatgtgccgttctcccgggtgctgcagccgaaggtggaagccgaaatcgccctggtgctgaaacaggatctgccgcatgccgataccacttttgatgaactgtacgccgccatcgactgggtgctgccggcgctggaagtggtcggcagccgtatccgcgactggtcgattggctttgtcgatacggtcgccgataacgcctcctgcggcgtttacgttttgggcagtccggcgcggcgcccggatgggctggatctgaaacattgcgtgatgcgcatgacccgtaacgaggaagaggtctccagcgggcgcggcagcgaatgccttggccatccgctgaacgcggcggtgtggctggcgcgcaaaatggccagcctcggcgagccgctgcgggcgggcgatatcgtgctcaccggagcgttaggcccgatggtggcgattaccgccggcgatcgttttatcgcccatatcgacggtttaggttcagtggcggcgatctttgtcgccgaagaggaacagcgtgatgagtaa

SEQ ID NO: 176701 - DNA, 951 bp, Klebsiella oxytoca
atgagtaaacgtaaagtcgccattatcggctccggcaatatcggcaccgatttaatgatcaaaattctgcgccacgggcagcacctggagatggcggtgatggtcggcatcgaccctgagtccgacggcctggcccgcgcccggcgtatgggcgtcgccaccacccacgagggcgttggcgggctgatgcagatggcggaattcgccgatatcgatgtggtttttgacgccaccagcgccggggcgcacgtgaaaaacgacgccgcgttgcgggaagccaaaccggggatccgcgtgatcgacctgaccccagcggccatcggcccgtactgcgtgccggtggtcaatctcgaggccaatcttgccgagggtaacgtcaatatggtgacctgcggcggccaggccactatcccgatggtggcggcggtatccagagtggcaaaagtgcactatgcggagatcgtcgcctcgattgccagcaaatctgccggaccggggacgcgcgctaacattgatgaatttaccgaaaccacctcgcaggccattgagaaagtgggcggcgcggcgaaaggcaaagcgattatcgtgctgaatccggcggagccgccgctgatgatgcgcgataccgtttatgtcctgagcgaagcggcatcgcagcaggcggttgccgcgtcgatcgccgagatggcggcggcggtgcaggcctatgtgccgggatatcgcctgaagcagcaggtgcagtttgaggtcatcccggaagataaaccggtgaatctgcctggcgtcggccgcttctccggcctgaaaacggcggtttacctcgaggtcgaaggggcggcgcactatctgcccgcttacgcgggtaacctcgatattatgacgtcggcggcgctggcgacggcggaaaaaatggcccaggcgctgaatgacgcagcgggagaggcagcatga

SEQ ID NO: 176702 - DNA, 1017 bp, Klebsiella oxytoca
atgaacggcaaaaaactctatatctccgacgtgactctgcgcgacgggatgcacgcgattcgccatcaatactcactcgacaatgttcgccagattgcccgggcgctggatagcgcgggagtggattcaatcgaagtagcccacggcgacggcctgcagggttccagctttaactacggcttcggcgcgcacagcgacctgcagtggattgaagcggcggcggagtcggtcagccaggcgaaggtcgcgactttactgcttcccggcatcggtaccctgcatgatctgaaaaatgcgtatcaggcaggcgcgcgggtggtgcgcgtggccacccactgcaccgaggcggatgtttccgcgcagcatatcgccttcgcccgcgagctgggcatggacaccgtcggcttcctgatgatgagccatatgaccactccggagcagttggcgcagcaggcgctgaaaatggaatcctacggcgcgacctgtatctacgttgtcgattccggcggggcgatgaatatgcgcgatattcgcgatcgtttccgcgccctcaaatcggtgctgaagccggaaaccgccaccgggatgcacgcgcaccataacctgagcctcggcgtcgccaactccatcgccgcggtggaagagggctgcgaccgcatcgacgccagcctggcggggatgggcgccggtgcgggcaacgcgccgctggaggtgtttatcgccgccgccgataagctcggctggaatcatggcaccgatctgtatgccctgatgaacgccgccgatgagctggtgcgcccgctgcaggatcgcccggtgcgggttgaccgcgaaacgctggcgctgggctatgccggggtttactccagctttctgcgccacagcgaagtggccgccgagcgctacggcctgagcgcggtggatatcctcgtcgaactgggcaaacggcggatggtgggcggtcaggaggatatgatcgtcgacgtcgcgctggacctgctcaatcgtcatcaataa

SEQ ID NO: 176703 - DNA, 1197 bp, Klebsiella oxytoca
atgacccaaacaacgactgcaagcaattcgcgcctgatgttaaccgtcgggctctgttttatggtggccctgatggaagggctggatctccaggcggcgggcatcgccgccgtcggcatggcgcaggcgttcgcgctggataaaatgcagatgggctggattttcagcgccgggatcctcggcctgctgcccggcgcgctggtgggcggcatgctggcggatcgctatggccgcaagcgaattctgctcggctcggtgctgctcttcggcctgttctcaatcgccaccgcgctggcatggaattatccgacgctgctgctggcgcgcctgttaaccggcgtcgggcttggcgcggcgctgccgaatctgattgctttaacctccgaggctgcgggtcctcgttttcgcggcagggcggtcagcctgatgtactgcggcgtgcccatcggcgcggcgctggcggcggcgctgggctttttcggccttgccgcggcctggcaaacggtgttctgggtcggcggtatcgttccgctgctgctggtgccattattgatgcgctggctgccggaatcgcaggcgtttcggcgcagcgcacagggcgtgccgctacgcacgctccttgcgccgggcaacgccgccgctactctgctcctgtggttgtgctatttctttacgctgctggtggtctatatgttgatcaactggctgccgatgctgttagttggccagggattcagccccagcgaggcggcgggggtgatgtttgtcctgcagttcggtgccgcctgcgggacgctgctgctgggggcgctgatggataagctcagtccgctatggatgtcgctgctaatttatatcggcatgctggcgtcgctgctggccctgggaaccgcgtcctcgctgaccgcaatgctcttctccggctttgtcgccggcctgtttgccaccggcggccagagcgtgttgtatgcgctggctccgctgttctatcgcaccgaaatccgcgccacgggcgtgggaacggcggtggcgattggccgtctcggcgcgatgagcggtccgctgctggctggcaaaatgctggcgctgggcaccggcaccgtcggggtgatggcggcgtccgcccccggcattctgctggcgggcgtggcggtgttctggctgatgagccgacaaaagcgcgccgcgctggcctga

SEQ ID NO: 176704 - DNA, 1140 bp, Klebsiella oxytoca
atgtcacagcccctcgatctcaatcagttagcgcagcaaatcaaacaatggggcacagagctggggttccagcaggtcggtattaccgataccgatctcagcgccagcgaacccaaactgcaggcgtggctggataaacaataccatggcgaaatggagtggatggcgcgtcatggcatgatgcgcgcgcgacctcatgaactccagcccggtacgctccgcgtgattagcgtcaggatgaactatcttcccgctaatgccgctttcgcccgcaccctgaaagatcccgcattgggttacgttagccgttatgcccttggacgggactatcacaagctgttacgtaatcgcctgaaaaaattaggtgagatgattcaggggcagtgtgcttcgctcaattttagaccttttgtcgattccgcgccgattcttgaacgccctttagccgaaaaagcggggctgggatggacaggtaagcactcactcatccttagccgcgatgccggctcgttctttttcctcggcgaattgcttatcgatctccctcttcccgtcgaccagcccgttgaagaagagtgcggacgctgcgttgcctgcatgaccatctgcccaaccggcgccatcgtcgagccctataccgttgatgcccggcgctgtatctcctatctgactatcgaactggaaggcgctattccggaagaatttcgtccgctgatcggtaaccgcatatacggctgtgatgactgccagctgatttgcccgtggaaccgcttcgcgcaattaaccgatgaagatgatttcagcccgcgtcaggcgctgcatgccccggcgctggtagaactgttcgcctggagcgagcccaggtttttaaaagtgacggaaggatcggccattcgccgtattggtcatctgcgctggctgcgtaatatcgccgttgcgttgggcaatgcgccctggaatgaagcgaacctgcaggcgctggaaagccgccggggtgagcacccacttctcgacgaacatatcgaatgggcgattgcgcagcaaattgcaaaaagaaatgccaatgtgattgaggtgcaactaccgaaaaagctacggctggtcagggtggttgaaaaagggttaccgcgcgacgcctga

SEQ ID NO: 176705 - DNA, 1524 bp, Klebsiella oxytoca
atggaccatacgatgacgaaaaacgctgacagtataccacatatcatctggtcggcggatgcgctacggcgggcggaaaaagaggcggcggatgccctcgggctgacgttatacgagctgatgcgtcgtgcgggcgaagcggcttttgaacgggcttacgagtactatcctgaaaaccggtgctggctgattctctgcggtcacggcaataacggcggcgacggctacgtggtggctcgcctggcgcagtcgcgaggtattcaggtcacgctggtgtcgctggatagcgagaagccgctgccgaaagaggccagtaccgcgcgtgaagagtggctcaacgccggcggtacgattcatgccgccgacatcgcctggccagaagatatcacgctaattattgacggcctgctcgggaccggattacagagcgctccacgggaaaacgttgcggagctcatcgcgcgcgttaatgcccatccggcgccggttgtggcgctggatatcccctcaggtctgaatgcgcagacggggaccacgccgggtgcggttatccaggccgctcataccatcacctttatcgcgcttaagcccggattgctgaccggcaaggctcgcgatgtcgttggccgcttgcatcaccacgccctggggcttgagggttggctggcaggccagacgacggcgctcagtcgcttcgatgcctcgaagcttgccgactggctaccgcccagacgcccaacgtcgcacaaaggcgaccacgggaagctggtcattatcggcggcgaaccgggtacggcgggagccatccgcatgagcggcgaggcggctctgcgcgcgggcgccgggctggtgcgagtcctgactcaccgggacaacattgcgcccattctgaccgccaggcctgaactgatggtccatgagctgacctcccgctcgctcgaagagagtctgcaatgggcggatgtcgtcgcgattgggccgggtctggggcagggcgagtggggtaaaaatgcgctgcgccaggtggagaattttcgcaaaccgatggtctgggatgcggatgcgctgaacctgctggcaatcaatcccgataaacgtcacaatcgcgtgctgacgccgcatcccggcgaagccgctcgtctgctgaacgtgagtgcggcagaaattgaaagcgatcgcttacattctgcacaacgtctggtaaaacgttatggcggcgtcgttgtgctgaaaggcgcaggtacgatcgtggcgagtgacgctggcgagacgggtattatcgatgccggcaacgccggaatggccagcggcggaatgggcgatgtcctgaccggcataattgctgcgttgttaggccagcagctgacgccgtatgatgccgcctgtgccggatgcgttgctcatggcgaagccgccgatcgtctggcggccagatacggcacccgcggcatgctggcgaccgatcttttttccacgctcaggcgtgttgttaacccggatgtgattgacgtagaccatgattaa

SEQ ID NO: 176706 - DNA, 462 bp, Klebsiella oxytoca
atgattaatcgagtgattcctttacccgacgagcaggcaactctcagccttggcaaccgcgtagcgcaggcatgcactggcgcgacggtcatctatttgtacggcgatttaggggcgggtaagacgacctttagccgcggtttccttcaggctctcggtcaccgcggcaacgttaaaagcccgacctatacccttgtcgagccttatagtctcgataagttgatggtctatcacttcgatctctatcgcctggcggaccctgaagagctcgagtttatggggatccgcgattattttaccgacgacgccatctgcctggtggaatggccgcagcagggtacaggcgtactgccggaaccggatgttgaaattcaccttgaatatcaggctcaagggcgtgaggcgcgcgtaactgcggtctcctcattgggtgagtctttattggcgcgtttggctaattag

SEQ ID NO: 176707 - DNA, 1323 bp, Klebsiella oxytoca
atgtatcgcttaaccagttggctgaccgccgcactgatgctgttcagcattcaggccactgcggcaagtttatccgatatccaggtctcaaatggcgatcggcaggcccgtattaccataagttttatcggcgaccctgaatattcgtttagcccgcagggcaaacgcaccgtcgcgctggatatcaaacagagcggtgtactccagggcttgccgctgcagtttagcggcaataatctggtaaaaagcattcgttccggagcgccgcaggatacccagtcgctgcgtctgttggtggatttaaccgccgacggcaaaacgcgcgcggtgaaacagcagaacggttctaactataccgtggtgtttacgattaatgccgatgaaccgcctccgccaccgcgtgtcgtggtgaaacaggcagaacggcccgtggcgcagcccgtgcgtccgagcgagccggcgcgcaacccgtttaaagccgataacgaccgcctgactgcggtgaccagtacgaccagcgtaacgcgtcctgcggcacgtaccgtttctagcgacgataaagtgattatcgccattgatgccggtcacggtggccaggatcccggagcgattggtccgaacggcactaaagagaagaatgtgaccatcgcgattgcgcgtaagctccgcgcgttgctgaatgccgatcctcagttcaaacccgtgctgacgcgcgacggcgattatttcatttcagtaatggggcgttctgacgtcgcgcgtaagcaaaacgccaatttccttgtctcgattcacgccgacgctgcaccgaatcgcgatgctaccggagcatcggtttgggtgctttccaaccgtcgcgcgaacagcgaaatggccggctggctcgagcaacatgagaaacaatccgaactgttgggcggtgcaggcgatgtgctggccaacagccagtcggacccttacctgagccaggcggtgctggatttacagttcggccattcccagcgcgtcgggtatgatgtggcgactaacgtgctgagccagctgcagcggatcggcgatttacataagcgtcgtcctgaacatgccagcctcggcgtactgcgctcgccggatatcccgtcaatcctggtggaaacggggtttatcagtaataacggcgaagagcggctgctggggagcgatgcttatcaacagcaggtcgcagaggccatttataacggtctgcgtaactactttatgcaacatcctctacaatccgcgccgcgcggggcagccgcgcagactgccagcgcaggttcgtcagatgggacgctgttaaattaa

SEQ ID NO: 176708 - DNA, 1896 bp, Klebsiella oxytoca
atgccgattcaggttctaccgccgcagctcgccaaccagattgccgcaggtgaagtggtggaacgaccggcgtcggtggttaaagagctggtggaaaatagcctcgatgccggggcgacgcgcatcgatattgatattgagcgcggcggcgcgaagttaatccgcatccgcgataacggctgcggcattaaaaaagacgagctggcgctggcgctggctcgccacgcgaccagtaaaattgcttcgcttgatgatcttgaagcgataattagcctcggttttcgcggcgaagccctggccagtatcagctcagtcgctcgcctgacgttgacctcgcgtaccgaggatcagcaggaggcctggcaggcctatgccgaaggacgcgatcaggcagtaaccgtgaagccggcggcccacccggtgggtacgacgctggaagtactggatctgttttataacacccccgcccggcgcaagtttatgcgcactgagaaaaccgagtttggccatatcgacgagatcgtacggcgcatcgcgctggcgcgctttgacgtgaccattaacctcagccacaacggaaaggccgtgcgccagtaccgggcggtatcgcaggatggccagcgcgaacggcgtctgggcgcaatctgcggtttgccgtttctcgaacatgctctggctatcgagtggcagcacggcgacctgaccctcagcggctgggtggccgatcctctgcataccaatccgacgctggcggagattcagtattgctatgtcaacggacggatgatgcgcgatcgcctgattaatcacgcgatccgtcaggcctgcgaagacaaattgggcgccgatcagcagcccgcttttgtgctttacctgaagatagatccgcatcaggtggatgtgaacgtgcacccggccaagcatgaggtgcgttttcatcagtcgcgcctggtgcacgattttatctatcaaggcgtgctaagcgttctgcagcagcagctgaacgctcctctggcagaagagggcgcagaacccgcgtcgcgtcaggtgcctgaaaaccgcattgcggcaggcggcaatcattttgcccagcccgccgtcgcgcgtgaaaccgccgctccccgttatcgtgacgagcccgtcgcgccgcgctttaataccagcactggcggctcgcgagaatccgctgccacggggtcatctggcggagccggctggccgcatgcgcagccaggttatcaaaaacagcaggggacgctctatcgccaactgctggatactccggccgcggagcgaaaaccaaaatcttctgcgccggtagcggaaggcctggcaggccatagccaaagttttggccgcgtgctgacgatcgtcgataacgactgtgcgctgctggagcgcgacggtaagcttgcgctgctggccctgccggttgccgagcgctggctacgccaggcgcagctaactccgggcgcggaggcggtctgtgcccagccgctgcttatcccgctgcggataaaagtgtccggggcggaaaaggacgcgcttgagcaggcgcagtcggcgctggcagaagtcggtattgaactgcagtccgatgcgcactacgtgacgatccgcgcagtgcctttacccttaagacaacaaaatttacaaatcttgattcctgaactgataggctacctggcgcagcaaaaaacatgcgacgccgacaatattgctcagtggatagcgcgtaatctggcgagcgaacatgcgcagtggaatatggcgcaggcgattgccgtcctggcggatatcgagcgtttatgtccgcagctggttaaagcgccgccgggtggcctgttacaacctgttgatttacattcggcgatgaatgccctgaaagatgagtga

SEQ ID NO: 176709 - DNA, 906 bp, Klebsiella oxytoca
atgggcccgacggcctctggtaaaaccgcattggctatcgccctgcgtaaagttttgccagtagagttgattagcgttgattcagccctaatctatcgagggatggatatcggtacggccaagcccgatgccgctgagctgagcgctgcgccgcatcgcctgctggatattctggacccggccgaggcttattccgcggcggatttccgtcgcgatgcgctggcagagatggctgatatcgttgcggccgggcgtattccgctactggttggcggaacaatgttgtatttcaaagcgttgctggaaggattgtcgcctttgccttcggcagatccgcaggtcagagcgcggattgagcaacaggccgcagagcagggatggaacgcgttacaccagcagctacaggaaatagatcccgttgccgcagcgcgtattcatccaaatgatccgcaaagactttcccgagcactggaagtttttttcatttcgggtaaaactttaacggagctgacgcaaacgtcaggtgatgctctgccgtataaggtgcaccagttcgccatcgccccggcgagccgtgaactgctccatcagcgcatagaacagcgttttcatcagatgttggcttcaggttttgaagcagaagtgcgggcgctttttgcccggggagatttgcatacggatatgccttccattcgttgtgtcggatatcgccagatgtggtcttaccttaatggcgagatcccgtatgatgaaatggtttatcgaggtgtttgcgccacgagacagttagctaaacgtcaggttacctggctgcgcggttgggaaggtattcactggttagacagtgaacaacctgaacaagcgttcaacaaagtattacaggttgttggtgctagcctggactga

SEQ ID NO: 176710 - DNA, 309 bp, Klebsiella oxytoca
atggctaaggggcaatctttacaagatccgttcctgaacgctttgcgtcgggaacgtgttccggtttctatttatttggtgaatggtattaagctgcaagggcaaattgagtctttcgatcagttcgtgatcctgttgaaaaacacggtcagccagatggtctataagcacgcaatttctaccgttgtcccgtctcgcccggtgtcacaccacagcaacaatgctggcggcggtactaacaactatcaccacggtggtggtgcgcagggttcttctgcaccgcagcaagacagcgaagacgccgaataa

SEQ ID NO: 176711 - DNA, 1281 bp, Klebsiella oxytoca
ttgtttgaccgttatgatgccggtgagcaggcggtactggtacacatctatttttcgcaagacaaagatatggaagatctccaggagtttgaaactctggcctcttccgccggtgtcgaagcaatgcaggtgattaccggtagccgtaaagcaccgcacccgaagtattttgttggtgaaggtaaagctgtcgaaattgcggaagccgtaaaagcgaccggtgcatcggtcgtgctcttcgatcatgccctgagtccggcgcaggaacgaaatctcgaacgcttatgcgaatgtcgggttatcgatcgcaccggcctgattttagatatttttgcccaacgagcgcgtacccacgaagggaaactgcaggttgagctggcgcagctgcgccacatggcgactcgcctcgttcgcggctggacccaccttgaaagacagaaaggcgggattggtttgcgcggcccgggtgaaacccagctcgaaactgaccgccgattgctgcgtaaccgtattatgcagatcctgtcgcgactggaaaaagttgaaaaacagcgcgagcaaggacggcggtcacgggccaaagccgatatacccaccgtgtcgttggtcggttataccaacgccggtaaatccacgctgttcaatcagataactgaagctgaggtctatgcagcgaaccagctgttcgccactctggatccgacgctgcgccgcatcgatgtccctgatgttggcgaaaccgtgctggcggataccgtaggtttcattcgtcatctgccgcacgatctggtggccgcgtttaaagcgactctccaggagacgcgccaggcgacgctgctgctgcatgtcattgatgcggcggatgttcgcgtgcaggaaaatattgacgcagtaaatacggtactcgcggaaatcgaggccgatgagatcccggcgctgctggtcatgaataaaatcgacatgctggatgattttgagccgcgtatcgatcgggatgaagaaaacaaaccgattcgggtctggctttccgcccagaccggggttggcgtaccgctgctttttcaggctttgacggaacggctctctggtgaagtggctcagcatacgctgcgcctgccgccgcaggaaggccggttgagaagccgattctatcagcttcaggcgatagagaaagagtggatggaggatgacggtagcgttggtctgcaggtgcgcatgccgatcgttgactggcgtcgcctctgtaaacaagagccagcgctggttgaatacgtgatttga

SEQ ID NO: 176712 - DNA, 1257 bp, Klebsiella oxytoca
atggcgtggaatcagcccggtaataacggacaggaccgcgacccgtggggaagcagcaataaccaaggcggcaactctgggggaaatggcaacaaaggtggtcgcgagcagggacctcccgatctggatgatatcttccgtaagctaagtaaaaaacttggcggcctgggcggcgggaaaggtggactgggcggcggtagcggctcacagggaccacgcgggcctatgggcggacgtatcgtcggcatcgttgccgccgctgcggttattatctgggcagccagcggtttctataccattaaagaagctgaacgtggcgtcgtcactcgctttggtaaatttagccatctggttgagcctggccttaactggaaacccaccttcattgataacgttcaggcggttaacgttgagtcggtgcgcgaactggcggcctctggcgtcatgctgacgtcagacgaaaacgtcgtgcgcgttgagatgaacgtacagtaccgcgtgaccgacccggaacgctatctgtttagcgtgaccagcgctgacgacagcctgcgtcaggcaaccgacagcgcgctgcgtggcgttattggtaaatacacgatggaccgtatcctgaccgaagggcgtaccgtcattcgtagcgatacccagcgtgagctggaagagacgattcgtccgtataacatgggtatcaccctgctggacgtcaacttccagacggcgcgtccgccggaggaagtgaaagccgcatttgatgatgcgattgccgcacgtgaaaacgaacagcagtacattcgtgaagcggaagcttacaccaacgaagttcagccacgggctaacggtcaggcgcagcgtatccttgaagaggctcgtgcgtacaagacccagacagttcttgaagcgcagggtgaagtggctcgctttgcaaaaattctgcctgagtataaagcggctccggaaatcacccgcgagcgtctgtatatcgaaaccatggaaaaagtgctgagccatactcgcaaagtgctggttaacgataaggggagcaacctgatggttctgcctctggatcagatgctgaaaggcgctggcgcgccagcggcaaagagtgatagcagtggcgcaagcgatctgctgcgtctgccgcctgcatccagctcaagcagcgccagtaacgcttctacctctacgggaggcaccattatggaccaacgccgcgccaacgcgcagcgtaacgactaccagcgtcagggggaataa

SEQ ID NO: 176713 - DNA, 1005 bp, Klebsiella oxytoca
atgcgtaaatctgttatcgcgataattgtcatcgtgctggtggtgctctatatgtccatctttgttgtcaaagagggcgagcgcggtatcacgctgcgttttggtaaagttctgcgcgacgatgaaaacaaaccgctggtgtatgcgcctggccttcacttcaagattccatttattgaatctgtgaagatgctcgatgcgcgtattcagacgatggacaatcaggccgaccgctttgttaccaaagagaaaaaggacctgatcgttgactcctatatcaagtggcgcatcagcgactttagccgttactacctggctaccggcggtggtgacgtctcccaggccgaagtactgttgaagcgtaaattctccgaccgtctgcgttctgaaattggtcgtctggatgtgaaagacatcgtgaccgactcccgcggtcgtttgaccctggaagtacgcgatgccctgaactcaggctctgcgggcacagaagatgaagtcagtacgccggctgccgatgatgcaattgccaaagcggcggagcgagttgaagcagaaacgaacggtaaggttcaggtgatcaacccgaacagtatggcggcgctgggtattgaagtcgtcgacgttcgtattaagcagatcaacctgcctgctgaagtgtctgaagcgatctacaaccgtatgcgcgctgagcgtgaagcggtagctcgtcgccatcgctcacagggccaggaagaagctgaaaaactgcgcgcgactgcggactatgaagtcaccaaaacgctggcggaagccgagcgccaggggcgtatcctgcgcggtgaaggcgatgcggaatccgcaaaactgtttgctgatgcattcagtcaggatccaggattctacgcctttatccgtagcctgcgtgcgtacgagaacagcttcaagagcaatcaggacgtgatggttctcagtccggacagtgatttcttccgctatatgaaatctccagcggcagcgactcgctga

SEQ ID NO: 176714 - DNA, 198 bp, Klebsiella oxytoca
atgaactcaacaatctggttggcactggcgctggttttagtacttgaagggcttggaccgctgctttatccccgcgcatggcgccgtatggtcgccacgatgagccagctaccggataatttattacgccgctttggcgggggacttgtggttgccggcatcgtcatctactacatgttgaggaaaacgattggctga

SEQ ID NO: 176715 - DNA, 1299 bp, Klebsiella oxytoca
atgggtaacaacgtcgtcgtactgggcacccaatggggtgacgaaggtaaagggaagatcgtcgatctcctgactgaacgggctaaatatgttgtgcgctatcagggcggtcacaacgccggccatactctcgtaatcaacggtgaaaaaaccgtcctccatctcattccatcaggaattcttcgtgagaatgtcaccagcatcatcggtaacggtgtggtgctgtctccggctgcgctgatgaaagagatgaaaggtctggaagaccgtggtatccctgttcgcgagcgtctgctgctttctgaagcttgtccgcttatcctcgaatatcatgttgcgctggatgttgcgcgtgagaaagcgcgcggcgcgaaagctatcggtacgaccggtcgcggtatcggcccggcttacgaagataaagtggctcgccgcggtctgcgcgttggcgatctgtttgataaagctaccttcgctgacaaactgaaagaggtgatggaatatcacaacttccagctggtgaatttctataaagctgaagcggttgattaccagaaagttctggatgacgtgatggcgattgccgacatcctgacctccatggtggttgatgtttccgatctgcttgaccaggcgcgtaagcgtggcgatttcgtcatgtttgaaggcgcgcagggtacgctgcttgatatcgaccacggtacctatccatacgtaacgtcttccaacaccaccgcaggtggcgtggcgaccggctccggtttgggcccgcgttatgttgattacgttctgggtattatcaaagcctactctactcgcgtaggcgcaggcccgttcccgactgagctgtttgatgaaaccggcgagttcctgtgtaaacagggtaacgagtttggcgccaccaccggccgtcgtcgtcgtaccggttggctggatgccgttgcggtacgtcgtgcggtgcagattaactccctgtctggtttctgcctgactaagcttgacgtcctggacggcctgaaagaagttaaaatctgcgttgcctaccgtatgccggatggccgtgaagtgaccaccactccgctggctgccgacaactgggaaggtattgagccggtttatgaaacaatgccgggctggtctgaaaccaccttcggtgtgaaagagcgcagcggtctgccgcaggcagcgctgaactacatcgcccgcattgaagagctgaccggcgtaccggttgatattatctctaccggtcctgaccgtaccgagacgatgattctgcgcgatcctttcgacgcataa

SEQ ID NO: 176716 - DNA, 426 bp, Klebsiella oxytoca
gtgcagttaacgagtttcactgattacggactacgcgcgctgatttatatggcgtcgctgccggatggaagaatgaccagtatctccgaagtgacggaggtttacggcgtttcccgtaatcatatggttaagataatcaatcagctgagccgcgtgggttatgtgacggcggttcggggaaagaacggcggaattcgtctggggaaaccggcaaatatgattcgcgtgggtgatgtggttcgcgatctggagccgctctctttagtcaactgcagcagtgaattttgccatattacgcccgcctgtcgtctgaaacaggcgcttgctgaagccgcgcaaagttttctcaaggaactggataactacacgctggccgatttggttgaaaagaatcaaccgctttataaattattactggtggagtga

SEQ ID NO: 176717 - DNA, 2448 bp, Klebsiella oxytoca
atgtcacaagatcctttcctggaccgcgaatctgaaaaatacgctaatccaatcccgagccgggaatttatcctcgatcatttagcaaaacgtgaaaaaccggccagccgagatgagctggcaattgagctgaatattgaaggcgaagaacaacaagaagcattgcgccgcagactgcgcgcaatggaacgcgatggtcaactggtctttacgcgtcgtcagtgctatgcgctgccggaacgtctcgatctgctaaaggggaccgttattggccaccgcgacggttatggcttcctgcgcgttgaaggccgtaaagatgacctttatttgtcgtccgagcagatgaaaacctgcattcacggcgatcaggtactggcgcagccgttaggcgccgaccgtaaaggccgccgggaagcgcgtatcgtccgcgtgctggtgcccaaaaccagccagattgtgggccgctactttaccgaagcgggcgtaggcttcgttgtgcctgatgatagccgcttgagcttcgatatcctgattcctcccgaagagatcatgggcgcgaggatgggctttgtagtggtggttgagctgacccagcgtccaacccggcgcaccaaagcggtcggcaaaattgttgaggtcctcggcgacaacatgggtaccggcatggcggtcgatatggctctgcgcacccatgaaatcccctacgtctggccgccagcagtagaaaaacaggttgctggcctgaaagagcaggtaccggaagaagcgaaagccggtcgcgtggatttgcgtaatctgccgctggttactattgatggcgaagatgcccgtgactttgatgatgccgtgtactgcgagaagaaacgcggcggcggctggcgtctgtgggtggcgattgccgatgtgagctactacgtgcgtcctggtacgccgctggatggcgaggcgcgcagccgcggcacctcggtctacttcccgtcgcaggtcgttcccatgctgcctgaagttctctctaacggcctgtgctcactgaatcctcaggtcgacagactctgtatggtttgtgaaatgacgatttcggctaagggccgtctcaccggctttaaattctacgaagcggtgatgagctctcatgcccgtctgacctataccaaagtctggcatatgctgcagggcgatcgggatctgcgtgaacagtacgcgccgctggtcaagcacattgaagagctacacaacctctacaaagtgctggacggcgcgcgtgaagagcgtggcggtatctcatttgagagtgaagaagctaaattcatctttaatgctgaacgtcgtattgaacgtattgagcagactcagcgtaacgacgcgcacaagctgattgaagagtgcatgatcctggcgaacatttccgcggcgcgcttcgttgagaaggccgaggagccggcgctgttccgtatccatgacaaaccaagcaccgaagcgattaccgcattccgttcggttcttgcagagctggggcttgagctgcctggcggcaacaagccggagccgcgcgactatgcgcaattactgcagtctatcgccgaccgtcctgacgctgagatgctgcaaactatgctgctgcgctcgatgaaacaggcagtatacgatccggaaaaccgcggccactttggtctggcgctgcaatcttacgctcactttacttcgccgattcgccgctatcctgacctgtcgctgcatcgcgcgatcaagtatttactggcgaaagagcaagggcataaaggtaatagcactgagaccggcggctggcactacagcatggatgagatgctgcagctgggggcgcactgttcgatgaccgagcgccgtgctgatgaagcgacgcgcgatgtttcggactggttgaagtgtgatttcatgttggatcaggtcggtaacgtctttaagggcgtgattgccagcgtgaccggctttggtttcttcgtacgtcttgatgaactatttatcgatggtctggtgcacgtctcttcccttgataacgattactaccgtttcgaccaggtaggacagcgtctgatcggtgaatccggcggtcaaacctatcgtctgggcgatcgcgttgaagtacgcgttgaagcggtgaatatggatgagcgtaaaattgatttctcgcttatctccagcgagcgcgccccgcgcaacgtcggtaagaccgagcgtgaaaaggcgaagaaaggggcggcaggtaaagcttccggacgtcgccgccaggctggtaagcaggtaaacttcgagccggatagcgcattccgtaaaccgaaaggtcaatcccagccgaaggccgctcagccaaaaggcgagaagaaagcgaagaagccgtcggcgaaaacccaaaagatagctgctgcgaccaaagccaggcgcgcggcgaaaaagaaaatagctgagtaa

SEQ ID NO: 176718 - DNA, 732 bp, Klebsiella oxytoca
atgagtgaaatgatttacggcatccacgcggtgcaggcactgctggagcgcgcacctgagcgttttcaggaagtctttattctgaaaggccgtgaggataagcgccttatgccgctgatccatgctctggaagcacagggcgtagtgattcaggtcgccagccgccagtttctcgatgagaaaagcgaaggcgccgttcatcagggaattattgcccgcgtgaagcccggacgtcagtatcaggagaacgatctgccggatctgatcgcttctctcgatcagccattctttttgatcctcgacggcgtgaccgatccgcacaacctcggcgcctgtttgcgtagcgctgatgctgcaggagtacatgcggtgattgtgcccaaagatcgctccgcgcagctgaatgccacggcgaaaaaagtcgcctgcggcgcggcggagaacgttccgctcattcgcgtcaccaacctggcacgcaccatgcgtctgctgcaggaagagaacgtctggatcgtcggtaccgcgggtgaagccgaccatacgctgttccagagcaagatgaccggttcgctggcgctggtgatgggcgcggaaggtgaaggcatgcgacgcctgacccgcgagcactgcgacgaattgatcagcattccgatggccggcagcgtctcgtcgctgaacgtatcggtcgccaccgggatttgcctgtttgaagcggtgcgtcagcgcagctaa

SEQ ID NO: 176719 - DNA, 363 bp, Klebsiella oxytoca
atgattcatttaattattgaagatcgggaaaacgcactgacctatattccgcttatccgtcggcatctaccccatctggcgattaacgccatcaagcagaacctgaacgcttcgggctacgttacctcatttgatgaaagcaaaatttgcgacgatatccttgaagagcagaatcctgttggaaattttctcaatctcatcaagatattaaaaaatcggggcgcgcagcttaaattcatcgagcaaacgggagatgaaccaggagaggcgttatccttaagccagctattgaactatgtggaaagaggtctggaaatcgcccgtcagacggaacgagaagatgaacaggcaagacgaagataa

SEQ ID NO: 176720 - DNA, 1638 bp, Klebsiella oxytoca
atgcactggcaaactcataccgtatttaatcaacccgcgccgctgtgtaacagcaacttattcctgtccgataccgccctgcgtgaagccgttgtccgcgaaggcgcgggctgggatggcgatctgctggcgagtattggccaacagctggggacggcagaatcgctggagctggggcgtctggctaacggtaatccgccggaactattgcgctatgatgcgacgggatcgcggcttgacgatgttcgtttccatcccgcctggcatctgctgatgcaaggattatgcgctaaccgggtgcataaccttgcctggcaggatgacgctcgcgaaggtgccttcgttgcccgcgctgcccgctttatgctgcatgcgcaggtcgaggcgggaaccctgtgccccgtcacgatgacctttgccgctattccattgctgcagcgctccttacccggggcttttagcgactggctatcgccgctcctaagcgatcgctacgatccgcatctggcgccgggtaaccagaagcgagggctgcttatcggaatggggatgacggaaaagcaggggggatccgatgtcctgagcaacacgacgcgtgcggaaaaaaccgccgaaggcttttatcatcttatcggtcataaatggtttttctcggtaccgcagagcgatgctcatctggtgctggcgcaggcgccggcgggactctcctgcttttttgtcccgcgtctgctgccggacggtcagcgtaacggcgtacgcctggaaaggctgaaagataaattaggtaaccgcgcgaacgccagtggcgaggttgagttttacaatgcttgcggctggccgatcggggaagagggcgatggcatccgtcagattcttaagatggggggcctgacccgatttgactgcgcgctgggcagccatgcgctgatgcgccgggcttattcagtcgccctgtatcatgctctgcagcgccaggcatttggcaaaaatctggtcgatcaaccgatgatgcgtcaggttctggggcaaatggcgctgcggctggaagggcaaaccgcctttctgttccgcctggcgcgcgcctgggacagacgcggtgatgcgcaggaagcgctatgggcaaggcttttcacgcccgcggcaaaatttgcggtctgcaaatccgggatcgccttcgtcgctgaagcgatggaggtgctggggggatcgggctattgcgaagagagtgaactaccgcgtttgtaccgcgaaatgccggtaaacagtatctgggaaggttccgctaatattatgtgcctggacgtgatgcgtgtactgatgaagcagcctgcggcgcttgaactactggcggcggagtgcgcggaagtgaaagggcaaaaccgtcatttcgatcgcgcatggcggcagttgcagcaatggttgcggcgacctgtggaagcgcaggggcgggaaattacccggctggtctataggctgggcgctggcgcgcaggtattacgcgttgcttcaccgccgttggcggaagcctggtgccgtatgatgctcgacacgcgcggcggcatgcgtctggacgagcagacgctggacgacttgctgctacgggcaatggggcgtggacgtcaggcgcctcaggcatag

SEQ ID NO: 176721 - DNA, 288 bp, Klebsiella oxytoca
atggagctgacgatgaaacgaaatttttccctacccagcctgatgttgaccaccgtcacggccaatacttccgcgcagtcagcggagtttgccagcgctgactgcgtgactggcctgaacgaaattggcctgatttgcgttaacaatatttccggcagccagcaggacgttgagcatgctatcgccttgcaggccgatgagcagggcgcgtcctggtatcgcatcgtccagatgtacgaagagcagcagccggataactggcgggtacaggccattctctatgcctga

SEQ ID NO: 176722 - DNA, 309 bp, Klebsiella oxytoca
atggctatgcgtaggtttataccctggctattggctatcgctttaagcggctgtagtgcgctacaagggacgccagaagcgccgccgccagcaaccgaccatccgcaagagatccaacgtaatcagacgatgggcttgcagaagatgggcacggtgagcgtcttaaggtacggctcgccgatggatgtcgaggctgcgctaagagtcaaagctgaagcagctaaggcggattactacgtcatcattatgattgatgacaccatggttcccggccaatggtattcgcaggcgattttgtaccgtaaatag

SEQ ID NO: 176723 - DNA, 717 bp, Klebsiella oxytoca
atgattgcactagaaatgcgtaaccttgcgggtggggaagttctccatgcgtgcccgcacggcgctgcggattcaccgctgccttgcatcgtcttttatcatggatttacctcttctaagctggtctacagctactttgccgttgctctggcagaggccgggtttcgggtcattatgcccgatgcggcggaacacggtgcgcgctatcagggtgatgaacaagggcggatgcagcgcttctggccgatcctgatgcaaaattttgctgaatttccggcattacaggaggcgattcgtgcgcagggatggcttgctgacgacaggctggcggttgccggagcatcgatggggggaatgacggcgctggggataatgacccatcatccagagctgaaaagcgttgcctgcctgatggggtctggctatttcagtacgctctcgcagaggcttttcccttcgccttcatttgatgcagcacagctggcggattgggacgtcagccagcagctggcgacgcttgccagtcggccgctgctgctctggcacggcgatgaagatgatgtggtgcctccggaagagactttccgtctgcagcaggcgctgcggcaacatgagatgaccgataagttaacctgcctctggcagaagggcgtccgtcaccgcattacgccagaggcgttagcggcgacggtggcattttttcaacgccatctttaa

SEQ ID NO: 176724 - DNA, 756 bp, Klebsiella oxytoca
atgacggaagcgcaaagacatcaaattttactggatttgctggcacaaacgggatttgtcaccgtggagcaggtgatttcccgactgggaatttctccggcgacggcacggcgcgatatcaataaactcgacgacagcggcaaactaaaaaaagtccgcaacggcgcggaagccatcagcgagcagcgcccgcgctggtcaccaatgaatattcaccaggcgcaaaaccacgacgagaaagtgcggattgcacgtgcggcttcgcaactggtcaaccccggcgaaagtattgttatcaactgcggctctaccgccttcctgcttgggcaagagctatgcggaaaaccggtacagatcatcactaactatttgccgctggccaattacctgatcgatcaggaacacgacagcgtcatcattatgggcggacagtataaccgcagccactccatcaccctgagcccgcagggcagcgaaaacagcctgtacgccgggcactggatgtttaccagcggcaaaggtctcaccgccgaagggctatataaaaccgatatgctgacagcgatggcggagcaaaaaatgcttaacgtcgtcggtaaactcgcggtactggtcgacagcagtaaagttggcgaacgcgccggaatgctgtttagccaggccgggcaaatcgacctggtgattaccggaaaacaggcggatgaagcgatcctcaagcagcttgaggatcagggcgttcaggtgattcgcgtttaa

SEQ ID NO: 176725 - DNA, 1065 bp, Klebsiella oxytoca
atgagtaaagtgcaaaccatcacccgcgaatcatggattctgaatacttttccggaatggggcagctggctgaacgaagagattgagcaagagcaggtggcgccgggcacctttgccatgtggtggttgggttgtacgggcatctggctaaaatccgaaggcggagccaatatctgcgtcgacttctggtgcggcaccggcaagcaaagccacggcaacccgctgatgaaaacgggccaccagatgcagcgcatggcgggtgtgaagaagctccagccaaacctgcggaccactccgtttgtcctcgatccgttcgccattcgccagatcgacgccgtgctgtctacccacgatcataacgatcatattgatgtgaacgtagccgccgcggtcatgcagaactgcgccgaagacgtaccgtttatcggcccgcaaacctgcgtcgatctgtggatgggctggggcgttccgaaagaacgctgcatagtgatgaaaccgggtgatgtggttaaaatcaaagatattgaaatccacgcgctcgacgcctttgaccgtaccgccctgatcaccttacccgcagaacaaaaagccgcgggcgtgctgccggatgggatggatcagcgcgcggtgaactacttgtttaaaacgccgggcggcaacctgtaccacagcggcgattctcactactctaactactacgcgaagcacgggaacgagcaccaaatcgacgtggctctgggctcctatggcgagaacccgcgcggcattaccgacaaaatgaccagcgccgatatcctgcgcatggccgagtcgctgaataccaaagtggtgatccctttccatcacgatatctggtcaaatttccaggccgatccgcaggaaatccgcgttctgtgggaaatgaaaaaagaccgcctgaagtatggctttaagccatttatctggcaggtcggcgggaagttcacctggccgctggataaagacaactttgaataccactatcctcgcggattcgacgattgcttcaccatggaaccggacctcccctttaagtccttcctctaa

SEQ ID NO: 176726 - DNA, 1401 bp, Klebsiella oxytoca
atggagattctctaccacatctttaccgtgttctttaaccaggtaatgactaacgccccgctactgctggggattgtgacctgcctgggctatatcctgctgcgtaaaagcgccagcgttattgttaaagggacgattaaaaccattatcggttttatgctgttgcaggctggctccggcattctgaccagcacctttaagccggtagtggcgaaaatgtctgaggtttatggcattaacggggctatctccgatacctacgcatcaatgatggccacgatcgaacgcatgggagacgcctacagctgggtgggctatgccgtgctgttagctctggcgttgaatatttgttacgtcctgctgcggcgtattaccggtattcgcaccatcatgctgaccgggcacatcatgttccagcaggctgggttgattgccgtctctttttacatcttcggctacccgatgtggacgaccattatctgtacggcggtgctggtatcgctctattggggcattacctcgaacatgatgtacaagccgacccaggaagtgactgacggctgcggcttctccatcggtcaccagcagcagttcgcttcatggattgcttacaaggtcgccccgtatctgggcaaaaaagaggagagcgttgaggatcttaagctgccgggctggctgaacatctttcacgacaacatcgtctccacggccattgtgatgactattttcttcggcgcgatcctgctctccttcggcatcgataccgtacaggcgatggcgggcaatacccactggacggtctatatcctgcaaacgggcttctcgttcgccgtcgctattttcattatcacccagggcgtgcgcatgttcgtcgccgaactttccgaggcgttcaacggtatctcccagcgcctgattcccggcgccgtgctagccattgactgtgcggcgatctatagctttgcgccaaacgccgtcgtctggggctttatgtggggcaccatcggccagctgatcgccgtcggtattctggtgggcgtcggctcttccattctgattattccgggctttatcccgatgttcttctcgaacgccaccatcggcgtctttgctaaccactttggcggctggcgcgcggcgctcaagatttgcctggtgatgggaatgattgaaatctttggctgcgtctgggcggtgaagctgaccggcatgagcgcctggatgggcatggcggactggtcaattctggcgccgccgatgatgcagggcttcgcctccatcggtatcgcgtttatggccgtcatcatcattattgcactggcttatatgttcttcgcagggcgcacgctgcgtgctgaagaggacgcggaaaaacaactggcagatgcttctgctcaataa

SEQ ID NO: 176727 - DNA, 306 bp, Klebsiella oxytoca
atgaccgtacgtattctggctgtatgtggcaacgggcaaggaagttccatgatcatgaagatgaaggtggaccagtttttgacccagtcaaatatcgatcacacggtgaacagctgcgcggtgggggaatataaaagcgaactaaacggcgcggacattatcatcgcctccacccatatcgccggtgagattagcgtctccggcaataaatacgtggttggcgtacgcaacatgctctcgccagcggattttggcccaaaactgctggaagtgatcaaagcgcactttccgcaggatgtgaagtaa

SEQ ID NO: 176728 - DNA, 468 bp, Klebsiella oxytoca
atgaaattacgtgattcgctggtggagaataactccatccttttacaggctgatgccagcacctggcaggaagccgtcaagctgagcgttgatttgctggtgaaagccgatgtggtagagccgcgctactaccaggccattctggatggcgtagctcagcacggcccttattttgtgatagctcccggcctggcgatgccgcacggtcgcccggaagagggggtcaagaaaactggctttgcgctggtcacgctgaaaacgccgctggttttcaatcatgaggataacgacccggtcgacatcctgatcaccatggcggccgtggatgccaatacccatcaggaagtgggcattatgcagatcgtcaatctgtttgaagacgaagccaattttgaccgtttacgcgcctgccgcaccgcgcagcaagtgctggatttaattgataacgccacggcggcggccgtttaa

SEQ ID NO: 176729 - DNA, 651 bp, Klebsiella oxytoca
atgtcattacctatgttgcaggttgcgctcgataatcaatccatgtcttccgcgtatgaaacgacgcgcctgatagccgatgaagtggacattattgaagtcggtaccatcctttgcgtggctgaaggcgttcgcgccgttcgcgacctgaaggcgctctatcccaacaaaatcgtgctggcggacgctaaaatcgccgatgctggtaaaatcctctcccgcatgtgctttgaagccaacgccgactgggtaaccgtgatctgctgtgcggacatcaacaccaccaaaggtgcgctggacgtggcgaaagagtacaacggagacgttcagattgaactgaccggctactggacctgggagcaggcgcaggagtggcgcgaagcgggtatccagcaggtagtctatcaccgtagccgcgacgcccaggcggccggggtggcatggggcgaggcggatattaacgctatcaaacgcctgtccgatatgggctttaaagtcaccgtcaccggcggcctggcgctggaggatttgccgctgttccagggaattccgatccacgtctttatcgccgggcgcagcattcgcgacgccgcttcgccggtggaagccgcccggcagttcaaacgttctatcgcccaactgtggggctaa

SEQ ID NO: 176730 - DNA, 855 bp, Klebsiella oxytoca
atgctgtcgaaacatattccgctcggcatctatgaaaaagcgctccccgccggggagtgctggctggaacgcctgcagctggctaaggcgctcggttttgatttcgtcgaaatgtcggtcgatgaaactgacgcccgcctggcccgactcgactggagccgggagcagcgcttcgcgctggttaacgcgattgccgaaaccggggtgcgcgtgccctctatgtgcctgagcgcccatcggcgcttcccgctcggtagcgaagacgacgcggtacgggcgcaggggctggagattatgcgcaaagccattcggttggcgcaggatgtaggcattcgcgttattcagctggcgggttacgacgtttactaccaggaggctaataacgagacgcgccgtcgtttccgtaacgggctaaaagagagcgttgaaatggccagccgcgcgcaggtaacgctggcgatggaaatcatggactatccgctgatgaactcgatcagcaaggcgctgggctatgctcattacctgaataatccctggttccagctctatccggacatcggcaacctttccgcctgggataacgacgtgcagatggagctgcaggccgggatggggcatatcgtggcggtgcatataaaagatacgaaacccggcgtatttaaaaacgtgccgttcggcgaaggcgtcgtcgattttgaacgttgtttcgaaacgctcaagcagacgggctactgcggcccgtatctaattgaaatgtggagcgaaacgaccgacgatccggccgccgaggtcgcgaaagcacgcgattgggtgaaggcgaggatggccagcgccggtctggtggaggcagcataa

SEQ ID NO: 176731 - DNA, 687 bp, Klebsiella oxytoca
atgcaaacgctaaaacggcaggtatttgaagccaatatggatttaccgcgctacggcctggtcacttttacctggggtaacgtcagcgctatcgaccgcgaacgcgggctggtggcgattaagcccagcggagtcgcctacgaggccatgaaagcggacgatatggtggtcgtggatctggaggggagagtggtagacgggcggtatcgtccctcttccgataccgccacgcatctggcgctgtatcgccgctacccgagtctggggggcgtggtacatactcattcgacgcacgcaacggcctgggcgcaggcgggtctggccattcccgcgctgggaacgacccatgcggactacttctttggcgatatcccctgcacccgggcgttgagcccccgggaagtggaagaggcttatgagctgaataccggccacgtgattatcgaaacgctgggcgatgttgagccgctgcatacgccgggcgtcgtggtctatcagcacgggccttttgcctggggcaaagatgcgcacgatgcggtgcacaacgcggtggtgatggaagaagtggcgcggatggcgtggatagcccgcgcgatcaacccgcagctgaagcccatcgatagctggctgatggacaaacacttcatgcgcaagcacgggccaaacgcctactacgggcaaaagtga

SEQ ID NO: 176732 - DNA, 1194 bp, Klebsiella oxytoca
atggttccgcgttttgccacgctcagccgtatcccaaaaggggtttgggtgctgggcggcgttagcttgctgatggatgtttcctcagaaatgatccacagtctgctccctttatttatggccaccacgttgggagccagcgtgattattatcggcattatcgaaggcgtggcggaagccaccgcgctgatgctgaaggtgttttccggcgtcatcagcgattatgtcggcaaacgtaaagggctggcgctgctcggctatggcctgggagcgctgagtaagcctctttttgctatcgcccctacctccggcatggtgtttagcgcacgaatgatcgaccgcatcggcaaaggaatacgcggcgcgccgcgggatgcgctggttgccgacgtcactcccccggaaattcgcggggccgcctacgggctgcgccaggcgctggacaccatcggcgcgtttctgggcccgctgcttgccgtcgcgctgatgtttctctgggataacgatttccagtcgattttctgggtcgcggcgattcccgccgtcctctcaatcgctctgttgggctttgggttaaaagaacccaacacatcggtcgtccagaaacgtaccaatcccctgcgccgcgagaatctcaagaagctttccgccgcttactggtgggtggtggctattggctcgattttcaccctcgcccgcttcagcgaagcctttctggtgctacgcgcccagcaaatggcgatcccgctattcgccataccgctagtaatggtcgccatgaacctggtctacagcctgactgcctatcctttcgggaaattatcggacaggatgagccacagcaaaatgctgcagtggggcctgctggtgctgattgccgccgatatcgtgctggcgctgagtagccactggagcacgcttttagccggcgtcgcgctgtggggtattcatatgggcatgacgcagggtctactggcggcaatggtggcgcataccgccccgcctgaactgcgcggcactgcattcggaatgttcaacctgatgagcggaatcgcgctactgctggccagcgccggtgcaggcgtgctgtgggaaatgttgggcgccgcctcgacgttttatgctggcgcgataatttgcgtcgtgacgctgataggtatgcgctgtatgccgtcggcttatcaacaacgttaa

SEQ ID NO: 176733 - DNA, 276 bp, Klebsiella oxytoca
atgaaatacatcctcataaccatgatggcagcgcttttgttatgcgccaacgcgctggctgctattaaaatcgatgcccgccaggcccgcaatatggatgatgtgcagagcctcggcgttatctatatcaaccataacatcgccaccgagcaggaagctgaccaggcgcttagccagcagagcgatgttcagggagcgaaatacttccagccaatccttattcatgaaccgggaagcgatgggcaaattcacgccagcgccgtcatttaccgctaa

SEQ ID NO: 176734 - DNA, 396 bp, Klebsiella oxytoca
atgcgtcattacgaaatcgtttttatggtccatcctgaccagagcgaacaggttccgggcatgatcgaacgttacactggtgcaatcactgcagcagaaggtacgatccaccgtctggaagactggggccgccgtcagctggcttatccgatcaacaaactgcacaaagctcactacgttctgctgaacgttgaagcgccgcaggaagcgatcgatgagctggaaactaacttccgcttcaacgacgccgttatccgcagcatggtaatgcgtactaagcacgctgttaccgaagcatctccgatggttaaagcgaaagacgagcgccgtgagcgtcgcgaagatttcgctaacgaaaccgcagatgattctgaagctggggattctgaagagtaa

SEQ ID NO: 176735 - DNA, 315 bp, Klebsiella oxytoca
atgaccaatcgtctggagctgtccggcattgtttgcaggactccacttcgtaaggtcagcccgtcaggaattccacactgccagttcgtgcttgagcatcgttcagtgcaggaggaagccggttttcaccggcaggcgtggtgccagatgcccgtgataatcagcggacaccagaaccaggccattactcacagtataacggtcggtagcgcagtaatcgttcgagggttcatctcttgccacaaggcaaagaacggcttgagcaaaatggttctgcatgccgagcagattgaattgatagattctggagactag

SEQ ID NO: 176736 - DNA, 228 bp, Klebsiella oxytoca
atggcacgttatttccgtcgtcgcaagttctgccgtttcaccgcggaaggcgttcaagagatcgactataaagatatcgctacgctgaaaaactacatcaccgaaagcggtaagattgtcccgagccgtatcaccggtacccgtgcaaaatatcagcgtcagctggctcgcgctatcaaacgcgctcgctacctgtccctgctgccgtacactgatcgtcatcagtaa

SEQ ID NO: 176737 - DNA, 450 bp, Klebsiella oxytoca
atgcaagttattctgcttgataaagtagcaaacctgggtagcctgggtgatcaggttaacgttaaagcgggctatgctcgtaacttcctggtaccacagggtaaagctgttcctgctaccaagaaaaacgttgaattcttcgaagcacgccgtgctgaactggaagccaaactggcagaagttctgagcgctgctaacgcacgtgctgaagcaatcaacgcactgggcaccgttaccatcgcgtctaaatctggcgacgaaggtaaactgttcggttccatcggtactcgcgacatcgctgacgctgtaactgcagctggcgttgccgttgctaagagcgaagttcgtctgccgaacggcgttctgcgcaccaccggtgagcacgaagtggacttccaggttcacagcgaagtcttcgctaaactggttgttaacgttgtagctgagtaa

SEQ ID NO: 176738 - DNA, 951 bp, Klebsiella oxytoca
atggacgcaccctcaatattttcccgcaagaatgtggcttatgcctgcgcaaccctctgctgcctgctgtggggaagctcctatccggcgattaaaagcggctatgaactgtttcagattgccactgatgatgtgccgtcaaaaatcgtttttgctggctatcgcttcctgtttgccggaaccctgctgctgctcttcgcgctggtgcaacgtaagccgattgcccgcttaaatccgcgtcagtgcgggcagctggcgatactgggcgttacgcaaacgtctatccagtacgttttcttctacgtgggcctggcgtttaccaccggcgtgaagggctcgattatgaacgctaccggaaccttcttcagcgtcctgttggcgcacttcatctatcagaatgacaagctgagctataacaaggccatcggctgcattctcggttttgccggcgtcatgctggtgaactttaatcattcattgagcgattttagctttgtctggcaaggagatggttttgtggtgctggcggcttttattctgtcggcggcgacgctatatggtaaacgcatttcacaaacggttgacccaacggtgatgaccggctggcagctggcgtttggcggtctggtgctggttggcggcggttacctgaccggcggaaccctcgaggttcacagctccgcagcggtgctggttctggcttatttgacgctgctctcctccatcgcttttgctttgtggagcgtgctgctgaagcataaccgcgtgagcatgattgcgccgttcaactttgtcatcccggtagccggaaccgtgctgtcggccatcttccttggcgagaatatttttgaaccgaaatatgcggttgcgctggtgctggtgtgcgccgggatctggtgggtaaataagccgggggcaacatccggaaaatcttcacagcaggccgggtaa

SEQ ID NO: 176739 - DNA, 663 bp, Klebsiella oxytoca
atgcccgggcgctttgaactgaaatctaccctggagaagatctggcatgccccggatcattttcgcctcatggatccgctaccgccgatgcaccgccgcggtattattgccggagcgctgctggtggttatcggcgttctgctcccttcagaggataacggcagttcagttcaggccagccgcgaggcgaatctcgacctgcaatctcagtcgcagccgcagtcttcaggtaatcaggccgtcccactgccgcccatcaccaacacgccgccggtcaacgatgccgatcaggtggcgccggtcgcgccggagcccattcaggatgagcagccggatcaaccgcagcagcagaccgcttcccagccttatcaggagccgcagtcgactcccggcattgagcagcagtggcggacctaccgtattgaatccggcaaaaccctcgcgcagctgttccgcgaccacaacctgccgccgaccgacgtttacgccatggcccaggttgaaggtgccggtaagccgctaagctcgctgcaaaccgggcagacggtacagatccgccagaatgccagcggcgtggtcaccgggctgactatcgataccggcggcgggcagcaggtgctgtttacccgccagtcgaacggtagctttattcgcgtccgttaa

SEQ ID NO: 176740 - DNA, 267 bp, Klebsiella oxytoca
atgtttcgtgaggttaaccttatctctctattgtttctgtttccgtcagatttgtcatcatcctgccgacaaagttttacccgtcgtgctgtggctgatatgctgcccacctctttatacccgtcatacttcaggttgcagatgcgttggctgcagctcgaattatttagggtatatgttccggcttttctgcttatgctgcgtgaagccgtggaatatgaaattctcacccaaaaaaggaacaaagatggcaacccctacttttga

SEQ ID NO: 176741 - DNA, 621 bp, Klebsiella oxytoca
atggcaacccctacttttgacacgattgaagcacaggcaagttacggtatcggcttgcaggttggacaacagctgagcgaatctggcctgcaggggctgctgccggaagcgctggtcgcgggtattgctgacgcgctggaaggtaaacagccgcaggtgccggtggaagccgttcaccgcgcgctgcgtgaaattcacgaacgcgctgacgccgtgcgtcgcgaacgtttccaggaaatggccgcggatggcgagaaatacctggaagaaaaccgcgagcgcgaaggcgtgaacagcaccgaatctggcctgcagttccgcgtactgacccagggtgaaggcccgatcccggcgcgtactgaccgcgttcgcgttcactacaccggcaaactgatcgatggcaccgtcttcgatagctctgttgcgcgcggcgaaccggctgagttcccggtgaccggcgtgatcggcggctggattgaagcgctgaccctgatgccggtaggctctaaatgggaactgacgattccgcacaacctggcctacggcgagcgcggcgcgggcgcatccattcctccgttcagtaccctgatttttgaagttgaactgctggacattatttaa

SEQ ID NO: 176742 - DNA, 1404 bp, Klebsiella oxytoca
atggtagatcaggtaaaagtcgttgccgacgaacaggcgccgactgaacagtcgctgcggcgaaatctcactaaccggcatattcagcttatcgctatcggtggtgcgataggcaccgggctgtttatggggtcaggcaaaactatcagccttgccgggccgtcaattatttttgtttatatgatcatcggtttcatgctgtttttcgtcatgcgcgccatgggtgaattactgctgtcgaatctcgaatacaagtcattcagcgattttgccgccgacctgctgggcccctgggcaggttatttcaccggctggacctactggttctgctgggtggtgaccgggatggcggacgtggtggcgatcaccgcctacgcgcagttctggttcccgggactctccgactgggtcgcctcgctggcggtcatcctgctgctgctgggtcttaacctcgccaccgtgaagatgttcggtgagatggagttctggtttgcgatgatcaaaattgtcgctatcgtggcgctgatcgtggtcggcctggtgatggtgctgatgcacttccagtcaccgaccggcgtggaagcctctttcgcccatctgtggaatgacggcggctggttcccgaaaggcatcagcggattctttgccggcttccagatcgccgttttcgccttcgtgggcatcgaactggtgggaaccacggcggcggaaacgaaagatcctgagaaatccctgccgcgggcgattaactcgattcccattcgtatcattatgttctacgtctttgcgctgatcgtcattatgtcggtgactccgtggagctcagtcgtgccgtcaaagagcccgttcgtcgagctgtttgtgctggtcgggctgccggcggcggcgagcctgatcaacttcgtggtgctgacctcggcggcctcttccgctaacagcggcgtattctctaccagccgtatgctgtttggtctggcacaggacgggcaggcgccgaaaatgttcgccaagctgtcgaaacgcgcggtaccggcgaaaggcctgaccttctcctgcatgtgtctgctgggcggcgtggtcatgctgatggtcaatccaagcgtcattgcggcgtttaccatgattaccacggtgtcggcaatcctgtttatgttcgtctggacgattatcctgtgctcgtatctggcctatcgcaggaaacgtccgcagctgcatgagcagtccaaatataagatgccgctgggcaaactgatgtgctgggtgtgcatggcattcttcgtctttgtgctggtgctgctgacgctggaagccgatacccgcgaagcgctgatggtgaccccgctgtggtttgtgctgctcggcgcgggctggctgtttgccggcaagaagcgcctggcgaaataa

SEQ ID NO: 176743 - DNA, 663 bp, Klebsiella oxytoca
atggctttccgtgaccaacctttaggcgagctggcgctgacgattccgcgcgcctccgcgctgttccgtaagtacgatatggactactgctgcggcggcaaacagacgctggatcgcgcggcatctcgcaaagagctggacgtcgcggtgattgaagccgagctggcgaaactggcggaagagccggtagagcgcgactggcgggttgcgccctatgcggaaattatcgatcacattatcgttcgctatcacgacaggcatcgcgagcagctgccggagctgattttacaggccactaaagtcgagcgcgttcacgccgacaagcccaacgttccgaaaggcttaaccaagtatctgaccatgctgcaccaggagctttccagccatatgatgaaagaggagcagattctgttcccgatgatcaaacagggcatgggaacgcaggccggcggccctatcagcgtgatggaaagcgagcatgatgaagcaggcgagctgctggaggtgattaagcacatcacgcagaacgtgacgccgccagcggaagcctgcaccacctggaaagcgatgtacaacggcatcaacgaactgattgatgacctgatggagcacatcagtctcgaaaataacgtgctgttcccgcgtgccctcgcaggtaaatag

SEQ ID NO: 176744 - DNA, 972 bp, Klebsiella oxytoca
atgattagtggtgtgctgtacgccctgctggcagggctgatgtggggattgatattcgtgggccctttactggtgccggaatacccggctgttttacagtcgatggggcgctatctggcgctggggctgatcgccctgccgctggcctggctgggccgcgcacggctgcgccagctcgccaggaaagactggtggacggcgctgggactgaccctgatgggcaacttaatctattacgtctgcctggccagcgcgattcagcgtaccggcgcgccggtgtcgaccatgattatcggcactctgccggtcgtgctgccggttttcgccaacctgctctatagccagcgcgatggaaagctgccgtggcggcgactgttcccggcgctggtctgtattgccttcggcctggcatgcgtcaatatcgctgaactacatcagggcttaaccgatttcagcccgtggcgctacggctccggtatcttgctggcgttgatctcggtggtgtgctgggcctggtacgcgctgcgcaacgcccgttggctgcgggaaaacccggataaaccgccgatgatgtgggctaccgcgcaggcgctggtgaccctgccggtatcgctggtcggataccttatcgcctgcgggtggctgcatggacagcacccggacttcccgctccccttcggcccgcgcccggcggtgttcgtcaccctgatgctggcgatcgctatcttctgttcatgggttggggcgtggtgctggaacgttgccagccagcgtctgccaacggtgatcctcgggccgctgatcgtcttcgaaacccttgccggactgctgtatacctttattctgcgccagagcctgcccccgcttctgaccctaagcggtattctactgctggtgatcggcgtggtgtctgccgtgcgtgctcgtccggaaaaacccgtgctgcagaaactggtcagcgagaaaaaatag

SEQ ID NO: 176745 - DNA, 825 bp, Klebsiella oxytoca
atgcaaggcgtaccggaacagtttaatgatgaaagagacagcgcgcgctttcgccatctggcgcagctgcccggcgttgagctgtatcatgcccacatctcccgctacgcctttgaaccgcacacccatgaagcctttggtatcggcgcgatagagctcggcgccgagcgttttcgctatcgcggcagccagcatgtggcttcggttaactctatcgtcaccatgaatcccgatgaactgcataccggcgaggcggagactgccgacggctggcgctatcggatgatttatctcgacccggatacgctggaaaaggtgactggcgtgcgccactggtggttcagcgaagtggtgcgtcaggacccgcttcgctcccggcaaatcggcaatctcatctacggcctgtggcatactgacgatccgctcgcgcagcagggtctgctgctggatttaatcgataccttccggccattcgctcaccatgccgctgcgctgcccgaagctcgccaccgcttcgagcgggtgcgcgactatctgcatgataactatatgcgtacggtgaccctcgatgagctggcgcaggtggcggcgctgagcccgtaccatttccagcgccagttcaaagcgcacttccacgttacgccgcaccagatgttaatggccattcgcctgtggcgcgccaaagcgtttctcacccacggtatgcccgctgccgacgtcgctctcgccgccggactgaccgaccagtcgcacctgacccgcgcgtttacccgccgttacggcattaccccggtacgttatcaaaagcaggttctcccgcgctaa

SEQ ID NO: 176746 - DNA, 849 bp, Klebsiella oxytoca
atgatcgcaattaccggcgcaaccggccagcttggccaacacgtcctggaaaacctgttaaaaaccgtccccgcgggccaggttgtggctatcgtgcgcaacccggcaaaagccgaatcgctgagccaaaggggcataggggttcgtcaggccgactacagcgatgaagcggccctgaccgccgccctacagggcgtggacaaactgttgctgatctcttccagcgaggtcggtcagcgcgccgtccagcaccgcaacgtgattaatgcagcgaaagctgccggcgtaaaatttatcgcctataccagcctgctgcacgccgatacctccccgttggggctggcggatgaacatatcgccaccgagcagatgctcgccgactccggcattgcatatgccctgctgcgcaacggctggtacaccgaaaactatctcgccagcgcgccgccggcgattgagcacggcgtgtttatcggcgctgccggtaacggcaaaatcgcctctgctacccgcgcggattacgccgccgctgccgctcgcgttatcgccgaagagggccacgccggaaaagtgtatgaactggcgggcgatgaggcatggactttgagcgaactcgccgctgagctgagcaaacaaagcggtaaaaacgtggtgtatcaaaacctcagcgaagccgacttcgccgccgcgctgaagggcgtcggcctgcccgcaggcctggctgatatgctggcgaattctgataccggcgcctccaaaggcgggctgttcgacgatagccgcaccctgagcgcgctgattggccgcccgaccaccaccctcgctgatagcatcaaaggcatcctgtaa

SEQ ID NO: 176747 - DNA, 384 bp, Klebsiella oxytoca
atgaatatggcgaatctgacgctgagcgagcagttacgtaacggcaacctgtttgccgaacagtgcccctcgcgggaagtgctcaaacacgtgaccagccgctggggcgtactgattttggtgtccctgcgcgatggcacccatcggtttagcgatctgcggcgtaagatcggcggcgtcagcgaaaagatgctggcccagtcgctccaggcgctggaacaggacggctttcttaaccgcgtgtcgtatccggtggtgccgccgcacgttgaatatagtctgactccgctcggtgagcaggtgagcgagaaggtggcggcgctggcggactggattgagctgaacctgcccgcggttctggcgaaccacgaacaggtagcctaa

SEQ ID NO: 176748 - DNA, 1944 bp, Klebsiella oxytoca
atgattaagtttagcgcaacgctactggccacgctgatcgccgccagcgtaaatgcggcaacggtcgatttgcggatcatggaaaccaccgatctgcacagtaatatgatggactttgactattacaaagatgccgccacggaaaaatttggcctggtgcgtaccgcaaccttgattgagaaagcgcgtcaggaagtcagcaatagcgtactggtcgataacggcgatgttattcagggcagcccgctgggtgactatatggccgcaaagggtctgaaagagggcgatgttcacccggtctacaaggcgatgaataccctggattatgtcgtgggcaacctcggcaaccacgagtttaactacgggctcgacttcctgcataaagcgctggcaggggcgaagttcccctacgtgaacgccaatattatcgacatcaaaaccggcaaaccgatgtttacgccttatctgattcaggatacccaggtgaaggatagcgacggcaaaacgcagacgctgcgcattggctatatcggcttcgtaccaccgcagataatgacctgggataaggccaatcttagcggcaaggtgaccgttaacgacattactgcaaccgcacgcaagtttgtcccggaaatgcgcgaaaaaggcgcggacgtggtggtggtcattgcccactccggcctctccgccgacccgtatcaggccatggcggagaactccgtttactatttaagccaggtgcctggggtcgatgccattatgttcggccacgctcacgccgtcttcccgagcaaagattttgccggtatcaaaggcgcggatatcgcgaaaggtacgctgaacggcgtaccggcagtgatgccgggcatgtggggcgatcaccttggggtggtcgatctggtcctgaacaacgacagcggcaaatggcaggtcagcgcagcgaaagccgaagcgcggccgatctacgactcggtggcgaagaaatcgctggcggcagaagacagcaacatggtggcggtattaaaagccgaccatgacgccacccgcgagtttgtcggcaaaccgattggtaaatcctcggataatatgtacagctacctggcgctggtgcaggacgacccaaccgtacaggtggtcaatatggcccagaaggcctacgttgagcactatattcagggcgacccggatctggcgaagctgccggtactctccgccgccgcgccgtttaaagtcggcggacgtaaaaatgacccggccagctttgttgaagtggaaaaagggcagctcaccttccgcaacgccgccgacctctacctgtatcccaacaccctggtggtgatgaaagtcagcggtaaagaggttaaagagtggctggagtgctccgccggacagttcaatcaaattgatcccgccagcagcaagccgcagtcgctgattaactgggacggcttccgcacctacaacttcgacgtgattgacggcgtgaactaccagatcgatatcacccagccggcgcgctacgacggcgaatgcaacagcgtgaatccgcaggccgagcgaattaagcatctgacctttaacggcaagccaatcgatccgaacgccactttcctcgtcgcgaccaacaactatcgcgcttacggcggtaaattccagggcaccggcgaggatcatatcgcgttcgcttcaccggatgaaaaccgctcggtgctggcggcctggattggcgcggagtcgaagaaaaacggcgagatccatccggcggcggataacaactggcgcctggcgccgatccacagcacagtaccgctggatattcgctttgaaacctcaccgggcgacaaggccgcggcatttatcaaagagaaagcgcaatacccgatgcgccaggtggctaccgacgatatcggctttgctatttatcagctggatttgagtaaataa

SEQ ID NO: 176749 - DNA, 744 bp, Klebsiella oxytoca
atgttagaacaagtatgtcagcttgcacggaatgcgggcgatgccatcatggaagtttacgatggaaaacagccgatggacgttaccagcaagaaggacgattctccggtcacggccgcggatattgcggcgcacaaggtgattatcagcggcctgctggccctgacgcccgatattccggttctgtcggaagaggatccgccggcctgggaggtgcgccagcactggcagcgctactggctggtggacccgctggacggcaccaaagagtttatcaagcgcaacggcgagtttaccgtcaatatcgccttgattgaaaacggtaaaccgaccctgggcgtggtctacgcgccggtgatgaaggtgatgtacagcgcggaaaagggcaaagcatggaaagaggagtgcggcgttcgcaagcagattcaggtccgcgatgcgcgcccgccgctggtggtgattagccgttcacacggcaatgacccggagctgcaggagtatcttgagcagcttggcgaacaccagaccacctcaattggttcgtcgctgaagttctgtctggtcgctgaagggcaggcccagctttacccacgcttcgggccgacaagtacctgggacaccgcggccggtcatgcggtcgccagcgccgccggggcgcacgttcacgactggcaggggcgtactcttgattacacgccgcgtgaatcgttcctcaaccccggcttccgggtctctatttattaa

SEQ ID NO: 176750 - DNA, 558 bp, Klebsiella oxytoca
atgaccctacgtagattactggccgtttcatgtctcctgttcccactgttggcctcggcgcataactttgtcgacggtcagcgcgttgcgccggtcggcgtagcggatcggggagaactggtgctggataacgataaatttagctataaaagctggaatagcgcgcagctggcgggaaaagtgcgcgttgtgatgcacattgccggtcgctcgtcggcaaaagaaaaaaacgcgaccttaattgaagccattaaaagcgcgaagctgccgcacaatcgctaccaaacgacgactatcgtcaataccgatgacgctatcccaggctcgggaatgtttgtccgcagcagtatcgagaacaataagcagctctacccctggtcacagttcatcgtcgacagcaacggcgcggtgcgcaaagcgtggcagctcgaagaagagagttcagccatcgtggtgctggacaaagagggtcgcgtgcagtgggctaaagacggcgcgctcagccagcaggaggtgcagcaggtagtgggcctgctgcacaagttgcttaataaatag

SEQ ID NO: 176751 - DNA, 207 bp, Klebsiella oxytoca
atgaaaattttccaacgctacaacccgctacaagtagcgaagtacgtgaagatcctgttccgtggacgtttgtatatcaaggacgttggcgcttttgagtttgataagggcaaaatccttatcccgaaggttaaggacaagctgcatttgtcagtgatgtccgaagtcaaccgccaggtcagccgtctacaaacagagatggcataa

SEQ ID NO: 176752 - DNA, 1344 bp, Klebsiella oxytoca
atgttaaacagtattttagtaatactttgtctgatagccgtcagtgcgttcttttcgatatcggaaatctcgctggccgcatcacgtaaaatcaaactcaagctgctggccgatgacggcaacgtcaacgctcaacgcgtgctgaagatgcaggaaaaccccggtatgttctttaccgtggtgcaaatcggcctcaacgcggtagcgattctcggcggtatcgtcggcgatgctgcattttcgccggcgtttcacggcctctttagtcgctatatgtcccccgagctctccgagcagctgagctttattatctcctttaccctggtcaccagcctgttcattctgtttgctgacctgaccccgaaacgcatcggtatgattgcgcctgaagccgtcgctttacgcatcatcaacccgatgcgcttctgcctgtttctcttccgcccgctggtgtggttgttcaacggcatggccaacaacatcttccgcctgttcaaaattccgatggtgcgtaaagacgacattacctccgatgatatttacgccgtagtggaagccggcgcgctggccggggtgctgcgtaagcaggagcatgagctgattgagaacgtgtttgagctggagtcgcgcaccgtgccttcgtccatgacttcgcgtgaaaacgtcatctggttcgatctccatgaagatgaacagagcctgaagaataaggttgcagagcatccgcactctaagttcctggtgtgtaacgaagatatcgaccacatcatcggctacgttgactccaaagacctgctgaaccgcgtgctggcgaaccaaagcctggtgctgaccggcggcgtgcagattcgcaatacgctgattgtcccggataccctgacgctgtctgaagcgctggaaagctttaaaaccgccggtgaagacttcgccgtgatcatgaacgagtatgcgctggtcgtcgggattatcacccttaacgacgtgatgaccaccctgatgggcgatctggtcggccaggggctggaagagcagatcgtcgcacgcgatgagaactcctggctgattgacggcggcacgccgatcgacgacgtgatgcgggtgctggatatcgatgatttcccacagtccggaaattacgagaccattggcggctttatgatgtttatgctgcgtaaaattcccaagcggaccgacgcggtgaagttctccggctataaattcgaggtggtggatatcgacaactaccgcatcgatcagctgctggtgacccgcatcgacaataagccgacggtgctggtgcccaagctgccggacgcggcgaacagtgataaagagtcagcgtaa

SEQ ID NO: 176753 - DNA, 639 bp, Klebsiella oxytoca
gtgagtctatttgataaaacgcatcttgtcgcccaagcggacgcgctgccgggacgcaatacgccgatgccggtggctacgctccacgccgtcaatggccattcgatgaccaacgtccccgccggaatggaagtcgctctgttcgccatgggctgtttctggggcgtcgaacgcctgttctggcaactgcccggcgtttatagcaccgccgcaggttacaccggcggctacacgccaaaccccacctaccgtgaagtttgcagcggcgagacgggccatgctgaagccgtgcgcgtggtctacgatccgcaggttatcagctatgagcagctgcttcaggtcttctgggaaaatcacgacccggcgcagggcatgcagcagggtaacgaccgcggcacgcagtatcgttccgctatttatccgctgacgccggaacagagcgaagccgcgaaagccagcctcgcgcgtttccaggcggcaatgaaggaagccaacgacccgcgagctatcaccaccgagatcgccacggcaaagccgttctattatgcggaagacgatcatcagcagtatctgcataaaaacccctacggatactgcggtatcggcgggattggggtttgtttaccgccgcagccctga

SEQ ID NO: 176754 - DNA, 1734 bp, Klebsiella oxytoca
gtgctacaaatccgccagttatgtatcaccagccttttgctggtcagcggggtcgccagcgcagcgaacgtgcgtttgcaggttgaggggttatccggggaactggaaaaaaacgtccgcgcccaactctctacgatccagagcgatgaagttacgccggaccggcgctttcgcgcgcgcgtggatgatgctatccgcgaaggtctgaaagcgctcggctactatgagcccaccatcgattttgatttacgtccgccgccggcgaaggggcgccaggtactgatcgccaaagtcacgcctggcgaaccggtgcgcattggtggtacggaagtcattttacgcggcggagcccgaaccgatcgcgactatctggatttgttaaacacgcgaccggccatcggtaccatcctcaatcacggtgattatgacagctttaaaagctctctgacccgggtcgcgctgcgtaagggctacttcgatagcgagtttaataaaagccagcttggggtttctcttgaccgtcatcaggccttctgggatatcgactacaacagcggcgagcgctaccgctttggcccggtgacctttgagggctcgcaaattcgcgacgaatatctgcaaaatctggtgccgtttaagcagggcgactattacacctcgcaggatctcgccgaactcaaccgccgcctggcggcgaccggctggttcagttccgtcgtcgtggcgccgcagtttgagaagtcccgccagacgaaagtgttgcctttgcagggcgtggtttctccgcgcaaagagaatactgttgagaccggggtcggctactcaaccgacgtcgggccgcgcgtcaaagggacctggagaaagccgtggatgaactcctacggccacagcctgacctccagcctcagcctgtccgctcctgaacagcagcttgatttcagctacaaggtaccgctgctaaaaagcccgcttgaacagtactacctgatgcagggcggctttaagcgtaccgatctcaatgatacccaggcggattctaccaccctggccgtgtcgcgctattgggagatgtcgagcggctggcagcgcgcgctgaacctgcgctggagtctcgaccactttacccaggccaacgtcaccaataccacgatgctgatctatcccggcgtgtcggtgaaccggacccgttctcgcggcggcctgatgccgacctggggcgattcacagcgctattcggtggactactccaacaccatgtggggctcggatattaactttatcgtgatgcaggcgcaggacgtctggatccgcaccctttatgaccgccaccgcttcgtggtacgcggcaacctcggctggattgaggccgataacttcagcaaagtcccgccggatctgcgtttcttcgccggtggcgaccgcagcattcgcggttataaatacaaatctatctcgccaaaagatgatgacggcaagctgatgggggcttcgaagctggccaccggctcgctggagtatcagtacaacgtgagcggcaaatggtggggcgcggtgttcgtcgatagcggcgaagcggtgagcgatatccgcgaaagcaactttaaaaccggcgctggcctcggcgtacgctggcagtccccggtcggtccaatcaagctggatatcgccagaccgatcggtgacaaagaagaacacggtttacagttttatatcggcctggggcctgaattatga

SEQ ID NO: 176755 - DNA, 3777 bp, Klebsiella oxytoca
atgagtttatggaagaagataagcctcggcgtactgatttttctggtgctgctgctggggacggtaggattcctggtggggacgacgactggcctgcatctggttatcaaagccgccgatcgctgggtccctgggctggaaattggcaaagccaccggcggctggcgcgatctgacgctggagaacgtgcgctttgagcagccgggcgtggcggtcaccgccgggcagttccaccttggcgttaagctacgctgcctgtgggacagtagcctgtgcgtcaacgatatttctctgcgcgatatctatgtggcgatcgataccagcaaaatgccgccagcggcgccggttgaagaagaagatagcgggccgctgaatctctccacgccttaccccatcaccctgagccgggtggcgctgcataacgtcaacgtgaaaattgacgatacggccgtttcgctgcgcgatttttccacggggcttaactggcaagagaaaaacctgaccctgacgccaacctcgctgcaggggctgcttatcgcgctgccgaaggtggcgaaagtggcccaggagcaggtcgttgagccgaaaattgacaatccgcagccggaagaaaagccgctcggcgagacgatgaaagacctgttctcgaagccggtgctgccggaaatgaccgatgtccatctgccgttgaatctcaatattcaggagtttcgcggcgagcagctgcgtctgaccggcgataccgatatgaccatctactcgctgctgctcaaagtcagcagcattgatgggcagatgaagctggacgcgctggacgtggattctgaccagggcaaagtgacggcttccggtaatgcacaactgcaggataactggccggtcgatatcaccctcaacggtacgctgaatgtagacccgctcaagggcgagaaagtgcagctcaaagtgggcggcgaagtgcgtaaaaagctcacgctcggcgtggatctgaacggccctgtcgccatgacgctgcgcgccgaaacgcagctggcggaggccggcctgccgctggatatggaggtgaaaagcaagcagctttactggccatttaccggcgagaaagcgtatcaggctgacgacctactgctgaaatttaacggcaagatgaccgactacacgctggccttcagcaccgcggtgaaagggcagtcgctgccgccagcgaaaattagcctgaacgcgaagggcaacgagcagcaggtgaatctcgacaagctcaccgtcgccgccctcgaaggaaaaaccgagttgaaagcgctgctcgactggcagcaggcgatcagctggcgcggcgaactgacgcttaacggtatcaacaccgctaaagaggtaccggactggccgtcgaagctcaacggactgattaagacccagggcagcctgtacggcggcagctggcagatgtcggtaccggagctgaaaatcaccggtaacgtgaagcaaaacaaagtcgacgtgagcggttcgctgcagggcaacagctatatgcagtggaaaatccccggcctgcatctggctctgggccccaacagcgccgacgtgaaaggcgagctgggagttaaagatcttaacctcgacgccaccattgacgcgccgcatctcgataacgccctgccgggcctgggcgggacggcgaagggattagtaaaagttcgcggcaccgtcgatgcgccgcagctgctggcggatatcaccgcccgggcgctgcgctggcaggagctatcggtggctcaggtgaacgtgaagggcgatgtgaaatccaccgaccagattggcggtcatcttgacgtacgcgtggaccgcattagccagccgggcgtgaatatcagcctggtgcagctcaacgcgaagggcaacgagaaacagcacgacctgcagctgcgggtgcagggcgatccggtttccggacagctgtcgctggcaggcagttttgaccgcaaagaggagcgctggaaaggtacgctgagcaatacccgcttccagacgccggtagggccggtggcgctgacgcgcaacatcgcgctggattaccgtaacctcgagcagaaaatcagcattggaccgcactgctggactaacccgaatgccgaactgtgcgtaccgcagaccattgacgccggcgcgagcgggcgcgcggtagtgaatctcaaccgtttcgacctggcgatgctgaagccgtttatgccggaagagacgcaggccagcggcgtgtttagcggcaatgccgacgtgagctgggacaccaccaaagaggggctaccgcagggcaaggtcaccctgagcggacgtaacgtgaaggtgacccagacggtcaacgacgcgccgctgccggtggcgttcgataccctgaatcttacggccgatctgcacaacaatcgcgcccagctgggctggctgattcgcctgaccaacaatggtcaactggatgggcaggtgcaggtcaccgatccgcagggccgacgtaatctgggcgggaacgtgaatatcagcaacttctcgctggcgatgatcaaccctatcttctcgcgcggtgaaaaggcggaagggcggctcaatgcgcgtctgacgctgggcggcaacgtacagagcccgcagctgtacgggcagatgcagctgaatggcgtggatattgacggcaactttatgccgttcgatatgcagccgagccagctggcgatgaatttcaccggtacccgctcgaccctacaagggacggtgaataccagccagggccatattgcgctcagcggtaacgccgactggacgcagattgacaactggcgcgcgcagattgccgcgaagggcagccgtgtgcggataaccgtgccgccgatggtgcgcctggatgtttcgccagatgtcgtctttaccgccacgccaagcctgtttaacctggatggtagcgttgacgtgccctgggcaagaatcgtcgtcaatgaagtgccggaaagcgccgttggggtctcttctgacgaagtcatgctggataaaaatctgcagccgattaagcagcagagcgccggtattccgattaacagcaacctgacgattcatgtaggcaacaacgttcgtctcgacgcctttggtctgaaagcgcgtctgaccggcgatttgaaagtggctcaggataaacaggggctgggcctcaacgggcagattaatatcccggaaggccgcttccatgcctacggccaggatctgatcgtgcgtaaaggcgaactgctgttctccggaccgccggatcagccgctgctgaacatcgaagccattcgtaatccggatgccacggaagacgacgtgatcgccggcgttcgcgtgaccggttcggccgatcagccgaaagcggaaattttctccgatccggccatgtcgcagcaggaagcgctctcttacctgctgcgcgggcagggtttgggcagcggacagagcgatagtgcggcaatgacctccatgcttattggtatgggggttgcacaaagtggtcaggttgtgggtaaaatcggcgagacgtttggcgtaagtaatctggcgctggataccgaaggggtgggcgactcctcccaggtggtggtcagcggctacgtgctgccgggtctgcaggtaaaatatggggtagggatctttgactccctggcgacgttgacgttacgttatcgcctgatgcctaagctatatatggaagccgtgtctggcgtagaccaggctctcgatttgctctatcagtttgagttttag

SEQ ID NO: 176756 - DNA, 345 bp, Klebsiella oxytoca
atgcgaatatttgtttacggcagtttacgacgcaaacaaggcaacagccactggatgaccaacgctcagtggctgggcgatcatagtgtcaatgattatcaactgtacagcctgggccactatccaggcgcggtgcccggcgatggcacggtacatggtgaggtctatcgtattgacgcatcgacgctggctgaattggatgcgctgcgtactaaaggcggcgagtatgctcgtcacctgatccagacgccctacggtagcgcctggatgtatgtctatcagcgccccgttgagggcttcacgctgatagaaagcggcaactggttggacaaagaccagtattaa

SEQ ID NO: 176757 - DNA, 528 bp, Klebsiella oxytoca
atgagcttactcaacgtacctgcgggcaaagatctgccggaagacatctacgtcgtgatcgagatcccggcgaacgcagatcctatcaaatacgaagtcgacaaagagagcggtgcactgttcgttgaccgtttcatgtccacggcgatgttctatccgtgcaactacggctacatcaaccacaccctgtccctggacggcgacccggttgacgttctggtcccgacgccgtacccgctgcagccgggttccgttatccgctgccgtccggttggcgtactgaaaatgaccgacgaatccggtgaagatgcgaaactggttgcggtaccgcacaccaagctgagcaaagaatacgatcacatcaaagatgtgaacgacctgccggaactgctgaaagcgcagatcacccacttcttcgagcactataaagacctcgaagcaggcaaatgggttaaagttgacggctgggacaacgctgaagcggcgaaagccgaaatcgtggcttccttcgagcgcgctaagaagtaa

SEQ ID NO: 176758 - DNA, 957 bp, Klebsiella oxytoca
atgtggaagcgcttacttcttgtcaccgcagtttccgcagctatgtcgtctatggccatggctgcccctctgaccgtgggtttttcacaggtcggctctgaatccggctggcgtgcggcagaaaccaacgtcgcgaaggaggaagccgcgaagcgcggtatcactctgaagattgccgatgcgcagcaaaaacaggaaaaccagattaaagccgtccgctctttcatcgctcagggcgtcgatgccatcttcatcgctccggtggtggcgaccggctgggaaccggtactgaaagaagcgaaagaggccaaaatcccggtattcctgctcgaccgctccattgatgttaaagataaagacctctacatgaccaccgtgaccgccaacaacgtgctggaaggccagctgatcggcgagtggctggtgaaaaccgtcgatggcaaaccgtgtaacgttgttgagctgcaggggaccgtaggcgccagcgtggcgattgaccgtaagaaaggcttcgccgaagccatttctaaagcctctaatatcaaaattatccgttcccagtccggcgactttacccgcagtaagggcaaagaagtgatggaaagctttatcaaagcggagaacaacggcaagaacatctgcatggtttacgcccataacgacgacatggtgattggcgctattcaggcgattaaagaagccgggctgaagccgggcaaagatatcctcaccggctctatcgacggcgtgccggatatctataaagcgatgatggccggtgaagctaacgccagcgtcgagctgacgccgaatatggcaggcccggcgttcgatgcgctggagaaatacaaaaaagacggcaccctgcctgaaaaagtcaccatcactcaatcgacgctctacctgccggatacggcgaaagaagagttagagaagaagaaaaatatgggctactga

SEQ ID NO: 176759 - DNA, 1503 bp, Klebsiella oxytoca
atgaacggcgaatcgcatcaggaaatccttcgtacggaagggctcagcaagtttttccccggcgtgaaagcgctggataacgttaatttcagcctgcgccggggcgaaatcatggctctgctaggcgaaaacggcgcgggtaaatctactctgattaaagcgctgaccggcgtctatcacgccgaccgcgggacaatctggctggaaggccaggcgatttcgccgaaaaacaccgcccatgctcaacagctggggattggtaccgtctatcaggaagtgaacctgctgcctaacatgtcggtggcggacaatctgtttatcggccgtgagccccggcgttttggcctgctgcggcgtaaagagatggaaaagcgcgccaccgagctgatggcatcctacggtttttcccttgatgtacgcgagccgctgaaccgcttttcggtggcgatgcagcagattgtcgccatctgccgggcgatcgacctgtcagcaaaggtgttaattcttgatgaaccgaccgccagcctggatacccaggaggtggagatgctcttcaccttgatgcgccagctgcgcgatagcggggtcagcctgattttcgtcacccatttcctcgaccaggtttacgccgtcagcgatcgtatcaccgtgctgcgcaacggcggttttgtcggctgccgggaaacccgcgagctgccgcaaattgagctggtgaagatgatgctgggccgcgagctggagcataacgccctgcagcgcgcgggccgcaccctgctcagcgataagccggtggccgccttcgaagattttggcaaaaaaggcaccattgcaccgtttagtctgcaggtccgtcccggtgaaatcgtcggcctggcgggtctgttaggctcggggcgcacggaaacggcggaggtaatcttcggcattaaacccgccgacagcggcaaagcgtggatcaaaggcaagccgcaaaccctgcgctcgccgcatcaggcatcctgcctcgggatcggcttctgcccggaggaccgcaaaaccgacggcattatcgccgccgcctcggtgcgggaaaatattgttctcgcgctacaggcgcagcgcggctggctgcggccgattgggcggcgcgaacaaaatgagattgccgaacgttttattcgtcagctgggtattcgtacccccagcgccgaacagccgatcgaatttctctccggcggtaatcagcaaaaggtactgctctcccgctggctgctgacgaaaccgcagttcctgatcctcgatgaacccacccgcggtattgacgtgggtgcccacgccgagatcatccgcctgatcgaaaccctgtgcgccgatggtctggcgctgctggttatttcttcagagctggaagagctggtgggttacgccgatcgggtgattatcatgcgcgatcgccagcaggtggcggagctggctctgagcgagctctccgtgccggcgatcatgaacgctattgcggcataa

SEQ ID NO: 176760 - DNA, 1023 bp, Klebsiella oxytoca
atgcctcaatctgttccgaaaaccggccagccgaaacggcgcgttaactggcccaaagggatgccgcagatccttgcgctgctgctggtgctggtggttgacagcctggtcgccccgcatttctaccagatcgtgctccaggaggggcgactgttcggcagcccgattgatattttgaaccgcgccgcgccagtggcgctgctggcgatcggcatgacgctggttatcgccaccggcgggattgacctctcagtcggggcggtgatggcgattgccggcgcaacggcggcgtcgatgaccgtggcgggacacagcctgccggttgtgctgctggcttcgctgggagccggcgcgctggcgggcctgtggaacggtatccttgtggcggtgctgaagatccagccgtttgtcgccacgctgatcctgatggtcgccggacgcggcgtggcgcagctgatcacctccgggcagatcgtcacttttgactccccgccgctggcctggctgggcagcggatcgctgctgctgttcccgacgccggtgataatcgccatcgttacgctggtgctgttctggctgtttacccgcaaaaccgcgctggggatgtttatcgaagcggtggggattaacattcgtgcggcgaaaaacgccggggtaaatacccgcatcgtcgtgatgctggcctacgtgctgagcggagtatgcgcggccatcgccggcattatcgtcgcggcggatattcgcggcgcggatgccaataacgccgggctatggctggagctggatgccattctggcggtcgttatcggcggcggctcgctgatgggcgggcgctttaatctgctgctctcggttgtcggggcgctgattatccagggcatgaataccgggatcctgctgtccggtttcccgccggagcttaatcaggtagtcaaagcggtggtggtgctgtgcgtactgatcgtccagtcgccgcgctttatcagcatactgaaggggatgcgcggccatgataaaacgtaa

SEQ ID NO: 176761 - DNA, 1002 bp, Klebsiella oxytoca
atgataaaacgtaatttaccgttaatgattaccctcgcggtcttcgtactgggatacctttactgcctgacgcagtttcccggctttgcctcgacgcgggtgatctgcaatatcctgaccgacaatgcttttctcgggatcatcgccgtcggcatgacgttcgtgatcctctccggcgggatcgatctgtcggtggggtcggtgatcgccttcaccggggtattcctcgccaaagcgatcggtttctgggggatctcgccgctggtggcatttccgctagtgctggtgatgggctgcgcttttggcgcctttatggggctgctcatcgatgcgttgaagatcccggcgtttatcatcacgcttgccgggatgttttttctgcgcggcgtcagctatctggtttcggaggagtcgattcccatcaatcatccggtgtatgacgcgctttccggactggcatggaccatccccggcggcggtcgtctgagcgccatggggctgttgatgctgctggtggtgatcggtggcatttttatggcccaccgtacccgctttggcaatcaggtttacgccattggcggcaacgcgacgtcggccaatctgatggggatctccacgcggagtacgacgattcgcatctatatgctctctaccggtctggcgacgctggcggggatcgtcttctctatttatacccaggcgggttatgcgctggcaggggttggcgtcgagctggacgccattgcttcggtggtgatcggcggcacgctgttaagcggtggcgtgggcacggttctcggcaccctgtttggcgtggccattcaggggctgattcaaacctatatcaactttgacggtacgcttagttcatggtggaccaagatcgccatcggtattctgctgtttatctttatcgcgctgcagcgcggactgacggtgctgtgggagaatcgacagagttcgccagtgacaagggtaaatgtgcgtgcgactgctgagtag

SEQ ID NO: 176762 - DNA, 513 bp, Klebsiella oxytoca
atggatatggttgaaggtgaaggattatcaggcaagtgcgccagctgtgggcaaaaggtattgcctccggcgcgttattgtaaaacctgtaaggataaaaaatataccggtatcggcggctggctttatctgccggctttaaccctgacgctcagctcgcttttacagatcgtcgggatatgtaatacggtgacggtttttctggatgttgaagaggagtttagagcgtttgcgctgtttgaagcggctggggcactatttctttggttattggtagtttatacgacgatgttgtttttcaggaagaaacgtcagttgccaaattattataccgtctgggttctgttcaccacgattctctacgccatcgactgctggattgctgcgcatttttatggtttagggctggaggttgaagatataaaaattttggcctcatgcgcgctgcagataatcatctggataccttatttccacctgtcgaaacgcgtcaaactcaccttcgtgaactaa

SEQ ID NO: 176763 - DNA, 999 bp, Klebsiella oxytoca
atgaaaacgttaggtgaatttattgtcgaaaagcagcacgagttctctcacgcaacgggcgagctgactgctttgttgtcggcgataaagttaggcgccaagatcatccaccgcgatatcaacaaggccggtctggtcgatatcctgggtgccagcggtgctgaaaacgttcagggcgaggtgcagcaaaaactcgacctgtttgccaatgaaaagctgaaagccgcactgcgagcacgcgatattgttgccgggatcgcctctgaagaagaagatgaaatcgtcgtctttgaaggctgtgaacacgccaaatacgtggtgctgatggaccctctggatggctcctctaacatcgacgttaacgtctccgtcgggacgattttctctatctatcgccgcgtcacgccggtgggtactcccgtcaccgaagaagacttcctgcagccgggtaaccgccaggtcgccgccggctatgtggtttacggttcctcgacgatgctggtttataccaccggctgcggcgtccacgcctttacctacgacccgtcccttggcgtgttctgcctgtgccaggaacgcatgcgcttcccggaaaaggggaatacctactcgattaacgaaggtaactacatcaagttcccgatgggcgtgaagaagtacatcaagtactgccaggaagaagataaagagacccagcgcccgtatacctcgcgctatatcggctcgctggtagcggatttccaccgcaacctgctcaaaggcggtatctacctctacccgagcaccgccagccacccggacggtaaactgcgtctgctgtacgagtgcaacccgatggcgttcctcgctgaacaggcgggcggcaaggccagcgacggtaaagagcgcattctggatattatcccggaaagcctgcaccagcgccgctctttcttcgtcggcaataaccatatggtcgaagacgtcgagaactttattaaagagttcccggacgcgtaa

SEQ ID NO: 176764 - DNA, 1374 bp, Klebsiella oxytoca
atgcgcattcatattttaggaatctgtggcacgtttatgggggggctggcgatgctggcgcgttccctcggtcatgaggtaacggggtcggatgcaaacgtctatccgccaatgagtaccctgctggaaacccagggaattgagttaattcaaggatatgatgccagccagctggatcctcagccggatctggtgatcatcggtaacgcgatgacgcgcggcaacccgtgcgtggaagcggtgctggaaaataacatcccatatatgtccgggccgcagtggctgcacgactttgtcctgcgcgatcgctgggtgctggcggttgccgggacgcatggtaaaaccaccactgccggaatggcgacctggatccttgaagcctgcggctacaagccgggctttgtcatcggcggcgtaccgggcaactttgaggtgtccgcgcgccttggcgacagcccgttcttcgtgattgaagccgatgaatacgactgcgctttcttcgataagcgctctaagttcgttcactactgcccgcgtacgttgattctcaataaccttgagttcgaccatgcggacatttttgacgacctgaaggccatccagaaacagttccatcatctggtgcgcattgtgccgggcaagggcaaaatcattctgcctgagaacgacatcaacctgaaacagacgatggcgatgggctgctggagcgagcaggaactggtcggcgaacagggccactggcaagcgaaaaagctgaccaccgatgcttcctcatgggaagtgtggctggacggcgagaaagtgggcgaggtgaagtgggcgctggtcggcgaacataatatgcataacggcctgatggccattgctgccgcccgtcatgtcggcgtgctgcctgccgatgcggccaatgcgctgggtagctttatcaacgcccgccgccgtctggaactacgcggcgaagccaacggcgtcaccgtatacgacgattttgcccaccacccgacggcgattctggcgactctgcaggcgctacgcggcaaagttggcggtaccgcgcgaattcttgccgtgcttgaaccccgttccaacaccatgaaaatgggcatttgcaaagatgacctggcgccgtctctcggtcgtgccgacgaggtctttctgctgcagccgcagcatattccgtggcaggtagctgaagtagctgacgcctgcgtacagcccgcgcactggagcgccgatgtcgatacgctggtggatatgattgtgaagaccgcgcatcctggcgaccacattctggtcatgagcaacggtggttttggcggcattcatcagaagctgctcgataagctggcgaaaaaagccgaggcggccgaatag

SEQ ID NO: 176765 - DNA, 600 bp, Klebsiella oxytoca
atgttgatttcacaaagagtgacctctaccgattccgcttattttcccgcgctggacgccctgtacggcagggccttcccgtggcacgaacagcgtgaagccgaggctaaacagcaggcgcttgataatccccattatgtactggaagcctggttcgatgatggtctgtttatcggcctgagcggctgctggcggtttgctgactatagttacattgaacatctggccatcgacgatacgttacgatcgcgtggctacggcaagcggctgttagctgaaatacttcagcgtgcgccgctgaccattctcgaaatcgatccgctgaccagcgagattgcccataagcgtctgcgcttttatgaaaccatggggttttgcgcgaatccctgggcgcatcgccatccgacctatcatcagggtattgccgatcatgaattgatcgtgttgagctacccgcagccgattgatgaggcgcggtatcagcgctttgcgcgggatttgcgtttggtggtcatggctcaggctggtgcgatcgaggtattgtcgcccggacaaggtgcgccaggcgccgcctccgggaaaatccccggttgcggctga

SEQ ID NO: 176766 - DNA, 1209 bp, Klebsiella oxytoca
atgaaaaagacattagctttgacggccatttccgcgcttatttctacgccggtaatggcaaaaacgtgggtgctgacaagcgctgaaagcggcatagataaaggaaactggcaaataaccagcgatcagctgaagataaaagagcataacttcagcattgagcaaaaagtccttcacggcggtaaacaagaaggcagtaaaatccttgtgatccatagtaaagacggcctgaccatcgcgcttagcccgacccgcggcatgaacctgctaaaaatcgaaggctttggatcgcgaatgggctgggattcgccggtcaaagaagtggttaatcccgcctttattaacctcgaaagccgtaacggactgggatggctggagggtttcaatgaaatgatggtacgctgcggctacgaatggacaggccacccggtgaccgccgatgggcagatttacaccctgcacggcaaagtcggcaacacgccggcttcccaggtagaagttgaagtggcggataccgcgccatatgaaattcgcgttcgtggactggtgaaggagagcaccttcaagaaagcagatttgcagaccatgaccgaactgcgctacgtgccaggcagcaatagctttagcctgcacgatgtcctgaccaaccatgccgactatccgcatgactatcaaattatctatcacagcaactttggcaagccgatcctcgaagaaggcgcccgcttcctggccccgatcgccagcatcagtccattcaacgactacgccaaagcgggcttaaaaagctggcaaacctacgccggaccaacgaaagatttcgatgaaatggtgtttaatatgcagcctctggcggatgaaaatcatcaaacgctggccgcagtggtcaacaaagccggcgataaaggagcatctattcagtttgatacccgccagctaccggtgctgaccctgtggaaaaataccgataccgagaaacagggttacgtcaccggtattgagccaggcaccagctacgcctatccggtcactatcgagcgggagcaaaaacgcgttaagcagcttcagcccggggaaagcgcccagtttgatctgacctatacgctgctgcacagcagcgagcaggttgccgaggtggagaagaaaatcgcggctattcagggcgatagcaaagtggcggaaaacgaaacgcctatcgcgaaagagtaa

SEQ ID NO: 176767 - DNA, 1143 bp, Klebsiella oxytoca
atgacccaggccttctcaattcctcgcagtattatttatggcgaaaatgctttagagcatctttccaccctgagcggaaaaaaagctgcattagtcaccggcggcagttcaatgaagcgttttggctttctggataaagccgtcagcgaactcaataaagcgggtatggagtgcattattatcgataatgttgaacccaatccgtccattaaaaccgtctggcgcggagccaaagcgatgctggcctttgaacctgactggatagtggccattggcggcggttccgcgctggatgccgctaaagttatgtggtgtttctatgaacatccgcagctgaagtttgaggatattattcccgtcggtgccatgccgccgctgcgcagcaaagcacggtttgtggcgatcccctccaccagcggcagcgcgtccgaaatcaccgccttctcggtgatcaccgatacggcaaatcatatcaaatacccgattgttgccgccgatctggtgccggatatcgccattctcgaccccactattccggcaaaaatgccgcctcacgtgacggttcacaccggcatggacgttttgacccatgcgattgaagcctacgtctccactgcagccaactcgtttaccgacccttatgcggtagaggccattcggctggtatttaagcatctggaaaccgcctggcgctcacccgatgatttaaatgcccgcatgcatatgcataatgcttccgcgctggcgggaatcgccttcaccaatgcgtcactgggattagtgcattcgatggcgcataaaattggcggcgaatttggcattactcacggtctggcgaatgcgattatgttgccgtatatcattcaatataatgcgaagttcaccaaaaaatatcgtcagctggaagccgcattaggtatggataatttaattgccgcgatcaatgcgctgaatcaacggctgggcgtcccgaaaacgctgagccagtgtgacgaagtggaaatcaatgaagtgacctttgttaatgtgctcgaccgaatgagtcgccatgccgtcgacgatccctgtacgttaaccaatcctaactatccgtcagttcaggacgttaaagggttgtacaccctggcattctacggcgcttga

SEQ ID NO: 176768 - DNA, 1512 bp, Klebsiella oxytoca
atgactactgtaccaagactgaaatatttcgttgatggtcaatggcgcgtttcgcagaccgaacgctatatggacgtctataacccaagtaccggggaagtcatggctcaggccccctgctgcaccgagcaagaagtgctggatgccgttgccgcggcgcgcaaagcctttccggcgtggtcagatactccggcgattaaacgctcgcaaattatgtttcgcgttcgtgaattattaatccagcatcaggatcgcttaaccgagctggtggcgaaagaaaacggtaaagcctggggagatgctcagggcgatgtattaaaagcgaaagagggcaccgagcttgcctgctctatcccgactctgctggcgggtgaaaatctgatggacgcgtcagccgggatcgacaccaacctttaccgtgagccgattggcgtgttcgccggcattgtgccgtttaacttcccggcgatgattccgatgggatggatggcgccgctatgcgtcgcatccggtaacactatggtgattaaagcggccagtatgacgccgatgacctgtatggaaatcaccaaactctatcaggaagcgggcgtaccggatggcgtgattaacatcgtgacctgttcacgtaacgaagccgatattctgctgacccatccggacgttaacggcgtctcattcgtcggctcgacgtccgtcggcctgcacgtatactccaaagccgccgcccacggcaaacgcgtccaggcgctgtgcgaagcaaaaaaccatgccctggtgctggccgatgcgccaattaaccgtaccgccgccggtattatcaacgccgcgttcggctgcgcgggcgaacgctgtatggcgctgccggtcgtcgtggtgcaggaagagattgccgacaagctgattgccgccgtcgtcgaaaaagccaaacagctgaaaatcggccccggctatctgcgcgataccgacatgggtccggtgatttctaaagaccataaacaatccgtcatcaactggattaataaaggcatcgaagagggtgcgaagctggtgctcgatggtcgcgatattaaggtgccgggccaggaaaaaggcttctatgtcgggccgactatactcgatggcgtgaccgaggagatgagcgtcgggacgcaggaaattttcgggccggtcctgtgctttaagcgggtaaaaaccttcgaagaaggtctgaaattaatgaacaataacccgtttgccaacggctcggttattttcacccaaagcggctactacgcccgcgagttccagaaacgcacccacggcggtatggtcggtattaacgtcggcatcccggtgccggtcggcgtattccccttctcaggtcataaacagtcgttcttcggcgacctgcactgcctgggcaaagatggcgttcgtttctatacagagtccaaatgcgtgacttcgcgctggtttgatgaagaagaagcaaaacgcgaaaaagtcgactcctgggacggtacgatttaa

SEQ ID NO: 176769 - DNA, 492 bp, Klebsiella oxytoca
atggcgcacaaactgggttctcagttccacattcctcatggtctggcgaacgcgctgatgatttgcaacgtcattcgctataacgccaacgacaacccgaccaaacagacggcattcagccagtatgaccgcccgcaggcccgtcgtcgctatgcggaaatcgccgaccacctgggtctgactgcaccgggtgaccgcaccgcagcgaaaatcgaaaaactccttggctggctggaagcactcaaagctgaactgggcataccaaaatccatccgcgaggcgggggtgcaggaggccgatttcctcgcccacgtcgataagctggcggaagatgcgttcgatgaccagtgcaccggcgccaacccgcgctatccgctgatttctgaattgaaacagctgctgacagacagcttctacggcaatcaatacgctgaaaaatcaccgaccgcagccggaaaatcgcaaaaagcggaggccgttgtccggaaataa

SEQ ID NO: 176770 - DNA, 720 bp, Klebsiella oxytoca
gtgcgctttttctctcttctgccgctgctactgttatctttgcccgccttcgccagcgggaaatgctcgctgaccgatccatcgctcacgctgcaaagctatcgcgtcgatccgcagcgcgagcgcattgtgatgtactggcaaaaagaggacggcaaagcctgggggtcgctgcgctcgctgctggcggatatcgaccgcaacgggcaggtgcagatggcgatgaacggcggaatttatgataaagcctacgcgccgctggggctgtatatcgagaaaggccggcagttgatcccgcttaaccgcgcctccggcggcggcaacttttttattcgtcccggcggggtgttttatctgcgagggcaaaacgcgggaattgtcagcattgataaattcaagccgtcgccagccattcaatacgccgtgcagtcggggccaatgctaattgaaaacggcaagatcaactggcggctgaagccgtccgccagctcgcgcaagttgcgtaacggtgtgggcatcaacggcgatggcaaagtggtatttatgctcagcgagcgcgaaaccaatttctacgatttcgcctgctacgcgcaatccaggctcaacgtgcgccagatgctctatctcgacggcaccatttcgaagatgtaccggaaaggcggcagcgtgccgtggcagtaccatccgttcgtcaccatgatcgcggtggagagcagatag

SEQ ID NO: 176771 - DNA, 1116 bp, Klebsiella oxytoca
atgccgttacctgattttcaccgctccgagccgtttacccttggcatcgagctggagctccaggtcgtcaacccgccgggcttcgatctgagccaggactcttccgcgcttattgatgaggtccagggcacgctgaaagcgggcgaggccaaacatgacatcaccgaaagcatgctggaaatcgccaccggcgtctgtcgcgatatccatcaggccacggcgcaactgagcgcgatccaacaggcggtgctgcgtgccgccgcccgccatcatgtacaaatctgcggcggcggaacgcatccgtttcaaagctggcagcgccagcagatcagcgataacccgcgctacctgaaaaccgttgagcactttggttacctggcgaagcaggcgactattttcggccagcacgtgcacgtgggctgtcaaaacggcgatgatgcgatttatcttctgcacggcctgtcgcgcttcgtgccgcattttatcgcgctgaatgcggcctctccctggctcgacgggaccgatagcggctttgcctgctcgcggcttaatctttttgccgcttatcccgataacggcccgatgccgtgggtcaataactggcaggcgtttatcggcctgtttcatcgtcttagctataccagcatgattgacagcatgaaggatctgcactgggatattcgccccagcccgcgctttggcaccgttgaggtacgagtgatggataccccgctgacgattacccaggcggtaaatatcgccgggtttatccagatcattgcctgctggctgctgacagaacggccgtttaaacatcagcccgaagattacctgttgtaccccttcaaccgctatcaggcctgtcgctatggcctggacgggatcaacaccgatgtgaacggcggcgaacagcgaacctttcgcgaagaaattctacggctgacggataaactggcgcccagcgcccataagctgaatgccggcagcgcgctggaggcgattgtgcgccaggcgaagcaggctcgcagcgagccgcagcagatgcgcgagttcgtcgccaacggcggttccttaatcggactggtgcaaaagcactgcgagatctggacggcgtag

SEQ ID NO: 176772 - DNA, 1665 bp, Klebsiella oxytoca
atgctgaagaaaaaaatattttcgcctggatgccatctcgccgttgctgttagcggggcattggcgttgtttgccagcgtgtcggcccatgcctcaactctgcggatcgccatgactgccgccgatattcctttgaccctcgggcagcccgatcagggttttgaagggaaccgtttcaccggcattccgctttacgacgcccttgttgaatgggatctgtcgcaaggcgaaaagcccagcggtctggtgccgggactggcaaccgagtggcacgttgacccgcaaaatcaaagccgctggattttcaccctgcgcccgggggttaaatttcacgatggctcggaggtcaatgccgacgccatcgtctggaacgtggagaaggtactgaataaagccgcgccgcagtatgcgccaggccagattggcaacactctctcacgcatgccgaccctgactggcgcggagaaaattgatgaccataccgtggcgctgaccaccgccgaacctgacgcgctgctgccctacaacatcaccaatctgtttatcgtttcgcccaccgcgtggcaaaagctgtatgacgcggtgccggcaagcgctggcgataccgcggcgcgcagcaaacaggcatggaccgagttcgccgcccatgcggtgggcagcggcccgttcaaaatggaaaaactggttccccgccagcagctgatcctcgataagaaccccgactactggaacaaagaacgaattccacgggtggataaagtggtgctgatcccgctgccggaagctaacgcccgcaccgcggcgctgctctcgaagcaggtggactggattgaagctccggctccggacgcggtagatcagataaaagcgcagggttttaaaatctatgccaacacccagccgcacctgtggccgtggcagttctcctttgaagagggatcgccgtggaaagatattcgcgtgcgtaaagccgccaacctgtgcctgaaccgcgccgagcttaaaagctatctcggcggctatatgaccgaagcgaccggcgtctacgaggccgacagcccgtggcacggcaagcccactttccagatcaaatatgaccctgaaaccgcccgcaagctgatgaccgaagctggctatagcgccggtaaaccgctgcacgtcacggttgccacctcggcctccggctccgggcagatgcagccgctgccgatgaacgagtacatccagcagagcctgaaaagctgcttctttaacgtcgacattaaagttaatgaatggaacaccctgtttaccaactggcgtctcggggcgaaagatccatcggcgcaagggatcgacgcgatcaacgttagcgccgcggttaacgatccctatttcggcatgatccgcttctccaccgcgaaggccttcccgccggtagcgaccaactggggctatttctcgacgccggaaaccgaaaagctggcggcggcggtaaagcacgcgtttaccccggctgaaatggataaagccgcgggcgaactgcacgccgcgctggtcgatcaggtgccgttcctgttcgtcgctcacgatgtcgggccaagggcgatttcgcctgccgtcaccggagtggtgcagccgcaaagctggtttatcgaccttagcctggtgagcaaaaaagagtaa

SEQ ID NO: 176773 - DNA, 954 bp, Klebsiella oxytoca
atgatcaataccctgctatatcgcatcctgctggccgtccccaccatgctcggggtcgcggtgatctgttttatgctggtgcagatagcaccgggcgacccgctggtgtcggtgatgccgccggacgcctcggaatcgctgcgtcagaccttaatgcaggcctacggctttgataaaccgctgccgctgcagtttgtgcactggctatggcgggcgctgcacggcgatttgggcatgtcggtcgccaccggccgtccggtcatcgacgaggtcatgacggcggtgacctactctctgcgtctggcgctgctggcgacggcgatcggatttgtgctgggtagcctgtttggttttgtcgccggctattttcgtaacagcattattgaccgcctggcctcggtgctgtcggtattcggcgtcagcgtgccgcactactggctggggatgctgctggttatcgtttttagcgttaaattcgcgctgctaccggcaaccggcggcgggccaatcggcgaggtgggctggcagtgggactgggaacacctgcagtttatgctgctgccggccttcacgctgtcggtgatcccgaccggcatcatcgcccgcaccgttcgttcgcaggtggcggacattctcagccaggagtttatcgtcggcctgcgcgcccgggggctcaacgaatcgcggatctttctgcacgtggtgaagaatgccgctccgaccgcgctggcggtgatggggctgcaggtcggctatctgatgggcggctcgattctggtggagacggttttctcctggcccggcaccggcctgctgctgaataccgccattttccagcgcgatctgccgctattgcagggcaccatctgggtactggcgctgttctttgtcctgctcaatctgctggtggatatgctgcaaaccagtctcgacccgcgaattaagaggagctga

SEQ ID NO: 176774 - DNA, 894 bp, Klebsiella oxytoca
atggtggataccgtgacgaccaaaggcattgccgtccctgccaggacggttgccaggcaaggctactggcgcggcgtgtttggccgcctgctgcgcgacccgggcggggtattcgtcggcgcgatcattctcgttctgctggcgctggcgctgttcggcccctggctgatcgttaaagatccgtatcaaacgtcgatgtttttacgcctcaagccgatcggcaccgacggctttccgctgggctccgatgagctcgggcgcgatatgctatcaaggctgattctcggcacaaggctatcgctgtttatggggattgtcccggtggtgttggccttttttatcggcggggccatcggcattatcgccggctatgcgggcggcaaaaccaacaccctgatcatgcgcaccgtggacgtattttatgctttcccctcggtgctgctggcgatcgcgctttccggcgcgctgggcgcgggtatcggtaacgcgctgctatcgctgaccctggtgttcgtgccgcaggtggcgcgtattgccgaaagcgtcaccgcgcaggtgcggcatatggactacatcgacgccgcccgagccaccggggccagcgcgttcaccattattcgcgtccaggtgctgggcaacgtgctggggccgattttcgtcttctccaccggcctgatttcggtgtgcatgatcctcgcctccgggctctcatttctcggcctcggggttcgtccaccggagccggagtgggggttgatgctgaacaccctgcgcacggcgatttatacccagccgtgggtggcggcgctgcccggtctgatgatttttatcacctccatttcgttcaatatcctcgcggaccgcctgcgtgcggcaatggcgattaaggagtaa

SEQ ID NO: 176775 - DNA, 1044 bp, Klebsiella oxytoca
atgcaaccctttacgaatatcgacctcggcgggccggcgcagccgctgctcaaggttaacaatctgctgaagcattttcccgccggcggcggcaaagcgcgcgaagtggtacaggcggtggatgacgtcagtttttcggtgatcaaaggcgaaaccctcggcgtcgtgggggagtcgggctgcggtaaatcgaccaccgcccggctgctgatgcagctgcttaagcaggacagcggggagctgatctttgatggcctggaagtaggctcatcgcgcctgccgatgaaagcgtatcgccgccaggtacagatggttttccaggatagctacgcctcgctcaacccgcgcatgaccatggaagagagcattgccttcggtcagcgggtacacggcgtcagcgccaaagaggccagcgagtacgcccgctacctgctggcgcacgttggccttgagccgggacgttttgcgcaccgctatccgcacgcgctctccggcggtcagcgccagcgcgtgaatatcgcccgcgcgctggcgatgaagcccaggctggtgatcctcgacgaggcggtctcagcgctggataaatcggtagaagctcaggttctgcagctgttgcaggagctgaagcggacgctggcgctgacctatgtgtttatcagccacgatctgcatgtggtgcgctggctgtcggaccgcatcctggtaatgtatctcggcgaggtggtggagattggcccggcggagcagctgtttaccgcctcagcccacccctatacccgggcgctgttaagttcgatgccgtcgatggacccgcataatcgcaccttaacctcgccgctgagcggcgatccgcccagcccgatttctccgccctccggctgccgctttcatacccgctgcccgcatgccagagcggtgtgcgcggaggtgaaaccgacgctcgaaagcgtcggcgaggggcacctgagcgcctgcctgatggcgcagcccgcgtcgccctggcagcaaaaaatcgccattcaggaggtgagctatgtcgcatga

SEQ ID NO: 176776 - DNA, 1011 bp, Klebsiella oxytoca
atgtcgcatgaagcttacgtccatatccacgacctgcgggttgagtttcgccgcgacggtcagacggtcaacgcggtcaacggcgtctcctttgatgtacaaaaaggcgaggtgatggcgctgatcggcgaatctggctccggtaaaagcgtcaccctgcgcgccctgatgcgcctgcatccgccaaaaagcagcgtgctttccggcacgctgagggtcggggaagaggaggtgttgaagatgagcgccgggcagctgcggcgctaccgcggcgcgcgctgcgcgatgattttccaggagccgctgctggccttcgacccggtctataccgtgggccagcagattgtcgaagggctgcgtcgccatgaaggcctgtcgcgacaggcggcgcgggaaagggcgctcgaggcgctgcgccaggtacgcattccgagccccgagcggcggctggatgcttacccgcacgagatgtccggcggaatgcgccagcgggcgatgattgccctcgcgctctcctgcaacccgcagctgctgctggcggatgagccaaccaccgcgctcgatgccacggtgcaaatacagatcctgatcctgctgcgcgagcagcaaaagcagcgcgatctgtcgatcatttttgtgacccacgatatcggcgcggcggtggagatcgccgaccgggtagcggtaatgtacgccggacgcatcgtggaagaggcgtcgattgaggagattctgtatcgtccgcgccatccctatacccaggtgctgctgggcagccggccgaaagaggggctgaaaaagggcgacgcgctgcactgtatccccggctcgccgccggatctctcgcgtctgccgcccggctgcgcgttcgccgatcgctgtccgcacgcgcgccccgcctgtgcgcagagccagccggctaccgaaccggccgggccgcgtcacgtggtgagctgccatcgctggcgtgagctgagtgcgtccgttgaaaaccaggcgctttacgcctga

SEQ ID NO: 176777 - DNA, 1185 bp, Klebsiella oxytoca
atgcaggatgatattcgcgcttttatgccctatccgccgcatccggtggcgcatgcgctaagcgggccgctgagcgggttaacttttgcggtcaaagatctgtttgacgtagcgggctaccccaccggcggcggcaatccgcatctgctggcgctgtccggggtgaaaacccgcaccgcgccggtggtgcaaaaattattagataacggcgcgcgctttatcggtaaaacccataccagcgagctggcgtattcgatgagcgggcacaacgtgcattacggcactccgcgcaacggcgccgcgccgaatcatatccccggcggctcgtcgtccggctcggcgtcggcggtatcgaacgaggcgtgcgactttgccctcggcagcgataccggcggctcggtacgcacgccggcaagctactgcggactgtttggcctgcgcccgacccatggccgactctccctcgacggctgccagccgctatgcgccaccatggatacctgcggcttctttgcccgctcgccggaggtcttttccaccgtcgccgcctgtctgttcgacgatgagcgagcggatatcaccggcgtgcggctggccagccatgaagggctgttttcccgcctgccgctgcgcagccagcaggcgctgctgccggtccgccaggagctggcgcgcttattcggcccggtaacgccgctcggcgcgccgctgccggacgtggatgatatctatctcgccttccgccagattcagggctacgaagcctggcaggcgcagggggaaaccattgagcgctacggcctgcagctggggccggacgtccgcgagcgttttttctggggcaaagcggtcacccgcgcgcagtttgacgccgcctgccagcagcgcgagcgttttaccgcctggtgggacgcgcagttgggcgatgcggtcctggtgatgccgaccgttcccgacggcgcgccgctgctgacggcgcaggccgaagagatagaggcggtccgccgcctgtctcacgatctgctgttaatttccgtcatgacccaacgtccgcaggtgacgctgccggttgcccggacgggcggcctgccgctgggaatttcatttttgggcccgcgcggcagcgatcgtctgctggtcgagctggccgccgcgtttatgcaaggagaccgaaatgagcagtga

SEQ ID NO: 176778 - DNA, 1269 bp, Klebsiella oxytoca
atgagcagtgatgtcctttttaccccgataaccgaaaccaccgcctgccgggtcaatggcgcgcgcctgtgggattcgctgatgacgctggcggaaattggcgctacgccgaagggcggctgctgccgtctgacgctgaccgatcttgaccgccagggacgggatttggtgattagctgggcgcaggcggccgggatgagcgtcaccgtcgataaaatcggcaacgtatttatgcgccgggaagggcgtaatccggcgctgccgccgattgtctccggcagccatattgacacccagccgaccggcggcaaatttgacggtaactacggcgtgctggcggcgctggaggtggtacgtaccctgaacgatcgggagattgaaaccgaagcgccgattgaggtggtgttctggaccaatgaagaggggtcgcgctttgtaccggtgatgatgggatccggcgtgtttgccggggtattcccgctggagaccatctacgccgcgcaggatgcggacggtaaaaccgtcggcgcggagctggcgcgtatcggctatatcggcagccagacgccgggcgaccatccggttggcgcctactttgaagcgcatattgaacaggggccgattcttgaagatgaagagaaaattatcggcattgtgcagggcgtgctggggatccgctggtatgactgcgtggtgaccggccaggagtcccacgccgggccgacgccgatgcgcctgcgtcaggatgcgttacagatagcgacccgcattatgcaggaagtggtggcgattgccgggcgcagcgaggaagggcgcggtacggttggaagagtgcaggtctatccgaacagccgtaacgtagtgccgggagaggtcactttttcgattgatatgcgcaatatcagcgatgcgctggtggatgagatggaccgccagctgcgggcgtttatcgccggggtcgagcgggagtgcggcctgaaggtggcgttaaaagaggtgagccactatccggcggcgccgttccacccggagtgccaggcggcgatcgccgacgccgcgcagcggctggggtatcccgcgcgggagattgtctccggcgccggacacgacgcggtgtatatgagctatctggcgccgaccgggatgatttttatcccctgtaaggacgggatcagccacaacgaaattgaatatgcgtcgccggagcacgtggaagccggcgcgaacgtgctgctgcaggtgatgctgcagtacgcgcgggtagtgtaa

SEQ ID NO: 176779 - DNA, 891 bp, Klebsiella oxytoca
gtggtagattcagcggttcataaaacggttcccgggccgtggtccggatggcttaatggtttactgggcgtcattatttttagcggttcgctgcccgcaacgcgcctggcggtgctggatatgaacccgttcctgctaacctttctgcgcgcctccatcgccgggctcctcgctatcgcgctggtagtcggcttgcgccagaaacggccgcgcgcatcgcagcttgtccccctggccatcgtctcgtcaggggtggtgatcggctttccgctgctcacggcgctggctttgcgccacgtcacttcagcgcattcgatcgttttcatcgggctattgccgttgatgacggccatttttggcgtagtgcgcggcggagaacgtccgcgccgcgctttctggatcttttccgttattggcagcctgctggtggtgggtttcgccctgacgcaacaagctgcggcgtcgctgaacggcgatctgctgatgctggcggcggtggtcgcctgcggcctcggctatgcggagggtgctaagctgacccgggagcttggcggctggcaggtgattagctgggcgctgattatggcgctgccttttatgctgatcgcctcgttactcacccggccagcgtcatggagcgccatctcggtttccgcctggattgcgctcggctatgtgtcgctctttagcatgcttatcggttttattttctggtacaaagggctggccgctggcggtatcgccgccgtcggccagcttcagctattacagccgttcttcgggcttggcctgtcagccgcgctgctgcacgaaaccgtcagcccactgatgctgaccgtaaccctgggcgtgattctgtgcgttatcggttcgcgcaaatttggccgctag

SEQ ID NO: 176780 - DNA, 1335 bp, Klebsiella oxytoca
atgaaagcccgatacaaagcggttgtcgacagatacgcgcaggcgattcagagcggacagctgccggccggaacccgcctgccgacgcatcgtacgcttgccgccgacgaagggatctcgctggccacggccacgcgcgtttatcatgaactggaagcgatggggctggtcagcggcgaaaccggtcgcggcaccttcgtgcgggacatcgcgctaccgccgggacacggtgtcgatcagcaggcggtggcagccgatgttgtggatctcaacttcaactatccttcgctgccgacgcagggagatgcgctgcgcgaggcgctcaggcagctggcgggggcaggggatatcgaggctcatctgcgctaccagccgcatggcggacggctcccggagcgagaaattatcgctcgctatctgaccagcagccgctttgcccctgacgcggaaaatgtgctgatcgtcaacggcgcccagcacgggctggcggtgaccgtgatggggcttctgcgcccgggggacgtggtggcggtcgatgcgctcacctactcgggttttaaggttctggcggcgctgtatcatctggaactggcggcgatcccttgcggcgcggacggaccggatctgcatgcgctccaccggctatgccagcagcggcgcgtccgggcggtgtataccatgccgacgctgcacaatccgctgggctgggtgctcagccctcgccaacggcagacgctggcggaactcgcccgccagcacgacctgctgatcgttgaagatgccgcctatgccagcctggtgcgcaatccgccgccgccgctggtgagctatgcgccggaaagaacggtatatgtcaccggcttctcgaaaaacgtcgctaccggtctgcgcatagggacggtcatctgcccacctcgctatcggactgagattgagcgcgccatacgagcgacgacgtggaatacgccgtcattgatgagctcgctgatctgcgcctggattgaagatggcacggttgcacgctttgaaaatgagaagcgccaggatgcgcggcagcggcagcggcttgcccgtgaggcgctcgatgggctgcccttcgtgagccatgaggatttgtactttctctggctacctctgggcgaagagagtcgggccgatcggctggcgaaaacgctgatggcgcgccatatttccgtgtcgaccgccgaacccttctgcgttgccgcaactgttccgcaggcgctgcgcatcgccctcggttctgttccgcttgataccctgcgcgcggcgctggtcgaggttcgccaggccgtggcatttgaacaataccgctag

SEQ ID NO: 176781 - DNA, 1467 bp, Klebsiella oxytoca
atgatccgacaccggttacacgttgatttcgacccgcgccgcggtttgcaggagcaggtgcgcgaaacgctgattaacgccattctgggcggcattttttccgccgacacgccgctcccctcctgccgccagctggccagccagctgcgggtatcgcgcaacaccacggcgctggtgtttgaggggctggttaacgagggatatctggtgagccgcccgcgcagcggttattacctgcatgcggattatcagcacgcagctccctccacggtaacggaagctgcaccgcaggacgcgggttctgcaccacgctggggcacgcggctgcaaattacccccagtcagcaggagtcgattctcaaaccggccggctggatgaactaccgctatccgtttatctacggtcagcccgatacccgccagttcccgctgacgacctggcgctcggcggcgaactggctgcacggcggcgtaagggacccggagtgggtggtggatcatatcgatcgggacgtgccgatgctgattgagcagatccgcacccgggtgctgcccaaacgcggaattgtcgcctcggcggacgagattctgataaccctcggttcgcaaaacgcgctgtacctgctgacccgcctgctgatgtcccccggcacgcgcgttggcgtggagaatccctgttttcgcgaggctattaacacttttctgcttgccgataccgatatcgtgccgcatccggtggatgaacaggggatcgtccttaatgacgccccctgcgattactactatgtaactcccgggcatcaggtgccaaccggggtggcgatgagcaaagcgcgccgcagccagctgctggagcatgccgcccgccatgatgcggtgattattgaggacgattacgactctgaaagtaactttatgctcaacccgctgccggcgctgaaggccagcgatcgctgcggacgagtgatctacgtgagcagcctgtcaaaggcgctctcgcctggcctgcggctgggctttatggtcgctgacccggatctgattgacgaagcccgggcgctgcggcggctggtgtatcgtcatccgccaaccaacattcagtatcagatggcccattttctcgcccagggtcattatgaaacccacctgcggcgctaccattacgactctgcccagcgctgggagcgcctcaataacgcgctgcggcagcacctgccagagtgccaaatcatccccggcagcgaacacgccaatgccttctggctggccaccccggagcaaatcaacacccagcagctgacctggcgcgccgcccacgccggggtgctgatcgagcccggcgcccggcattttctcagcgacgcgccgccggataactttttccgaatgggctttcacgccattaaccctgacgccatcgaacaaggcgtggaggtgctgcgcggccagctggcgcagatgggctag

SEQ ID NO: 176782 - DNA, 852 bp, Klebsiella oxytoca
atgaacaaatcattaggttcaatttgtctgggcgccatcatggcgatggccttttcttatcacgcagccgccgcagatcttccggaaatagaaaaatccggcaccctgaaagtcgcgaccgaagatgattacgcgccttttaactttatgaataacggccaggcggatggcttcaacaaagatatgctcgatgaattacgtaaatacgcgaaattcaacgtcgaccagagcattctgccgtggaccggattattggcggcggtctccaccgggcaatacgacatggcgttaaccggcgcggtgattaccgatgaccgtctcaaggtctttgatttcacgccgccgtgggcgtcagcgcagcactattttgtcaaacgcgcgggcgataattccctgaataccattgccgaactgagtgggaaaaaagtgggcgttcaggcgggcagcgcgctgctggcaaggctgccagaactgaaagcgatgctggagaaaaccggcggtaagctggggccggtggtggagtatccctcctatcctgaagcctacgccgacctcgccaacaaacgcctggactacgtgattaacgtggttatctcggtcaacgacctggcgaaggctaagccgaaggtgtttgccaaaggtctggcggtatccggcccgggctatatggcgtggccgatcccgaaaaactcgccgcagctgctggcctatatgaccaaatttatgaaccacatgaaggagaccggcaagcttgcggaactccagaaaaagtggtttggcgaaacctatgacgacctgccgaccgaagcgattaccagcccggaacagttccataaattagccgggctgtaa

SEQ ID NO: 176783 - DNA, 642 bp, Klebsiella oxytoca
atggatgcaatttcctggcagttactgattgaaggcgcatggacgaccctctggatttcggccatcgccattgcctttggggtggtgattggtctgctgatcgcgctggtgcgcatgctgcgtatcccggttatcgatcagctgctggtggtctatatcagccttgcccgcgcgacgccgctggttacgctggtgctgttcctgtttctttctctgccgaccgtcgggattaatctcgataaaaacgtcgcggcgattgtggcgctgacgctcaacacctcggccttcaacgccgaaatctggcgcaatgcctttcgcactttcccccgcgaacagcgggaagcggcggagtcggtagggatgcgccgctgggcttacttccgctacatcatgctgccacaaatgtggattgaaagcctgcccgcgctggttaatgagatgtcgttcctgattaagggcagtcccgccattgcggtgattggcgtggtggatttgacgcgcgtgaccaaccgaatttcttcggtcacctatgagccgctttcgccgattctggcggcgggtctgctgtacgtggtgattattggcctgctgctgaaactgcaggggatggccgagcgtaaagcgaagcgtctggcacgataa

SEQ ID NO: 176784 - DNA, 666 bp, Klebsiella oxytoca
atgaatcagtgggccgttatctggtcggtgcgcgacagctttattgccggtttactcgccacccttgagctttttattactgcggcaatagccggcttaattatcggcgtggccctgtgctatttaaccgagtatcaaaagaaaactcttaaccggcttattattggctttgtcagcttaatgcgggcgattccctttttgatcctcgcctatttgctctattacggactgccgcaagtgggtattagtctggagccctggaccgccggattaatcgccctgattatctaccacggcgcctatttctttgagattttgcgcagccagcgtcgggtcttttccggaggctatatcgaggcggcggtagcgcaggggttctcgcgctacaaaatattccgccgcattattctgcccaatattttgtcatcggcactaccgctgatgggcaatcagctgattatctgcctgaaagataccgctttcctcagcattatcaccgtccaggagataaccgccgcggctaacagcgtgcaggccacctattttatcccgtttaacgcctttattgtcgccattggactctactgggcgatcagcatcctgctggagctgtttattaagcgtctgagcgcctggggagcgagaagaggaatgagtcatgcctga

SEQ ID NO: 176785 - DNA, 762 bp, Klebsiella oxytoca
atgcctgatacgactgctgtaagcgtcaaaaacgtctcaaaacagtttgataatgttgaagttcttcgtgatatcaatctgacggtagagaaagggaccgtggtgagcatactcggctcgtcggggtcaggtaaatcaacgctgctgcgctgcatgaactggctggaacagccggatcgcggcgagatccgcatcagcggccagcggctggggattgatgaacaaaatggccgggcgatgtcccatcgtcagctgtcgaaaatccgcgagcgggtagggatggtgtttcagagctttaacctgtggccgcaccttacggtgcagcagaacgtcagcgaagcgctgctgcacgtcaaggggatgaagcgtgatgaagcgaaggctatcgccatgcagcagctggagaaagtggggatggcgcataaagccgacgtttacccgatcacgctctccggcggacagaagcagagggtggctattgcccgttcgctggcgatgtcgccggaggtgattctgtttgatgagccgacatcggcgctggaccccgagctggtcaacgaggtgctgggggtgatgaaggcactggccgccgagggctacacgatggtggtggtgacccacgagatggactttgcgcgccaggtatcggatgaggtggtgtttcttgagaagggattgttgattgagaaagcgccgccggagaagtttttcagcaacccggactccgagcgcgtcaggcagtttctgcagagcagccggtaa

SEQ ID NO: 176786 - DNA, 765 bp, Klebsiella oxytoca
atggcaacgagcaaagtggtgtttattaccggggcgacctcgggttttggggaagcagcggcgcaggtcttcgccgatgcgggctggtcgctggtgctgagcggacgccgttttgagcggctgaaggcgctacaggataagctcgcctcgcaggtgccggtgcacattatcgaactcgacgtccgcgatagcgatgcggtcgccggggccgtggcggcgctgcccgctgaattcgccgatatcacgacgctgattaacaacgccgggctggcgctgtcgccgcagcccgcgcagaaagtggatctggacgactggaaaacgatgatcgacaccaatgtcaccgggctggtcaacgtgacccatgccctgctaccgacgctgattcgtcacggcgcgggggcgagcatcatcaatattggctctatcgccgggcagtggccctatcccggcagccacgtctacggcgccagtaaggctttcgtgaagcagttcagctataacctgcgctgcgatctgctcgggaccggggtgcgcgtgaccgatctcgcgccgggtattgccgaaacggaatttaccctggtgcgcaccaaaggcgaccaggcggcgtcggacaatctgtatcgaggcaccacgccgctgagcgcgcgggatattgccgaacagatgttttatatcgccaccctgccggaccatatgaacattaaccgggtcgaggtaatgccggtacgtcaagcttggcagccgttcgcgatcgatcgggattga

SEQ ID NO: 176787 - DNA, 1338 bp, Klebsiella oxytoca
atgaagctggcactacagaacgaggtagcgataagcaatgatgaagttcggcagctggatcgcgcttatgtgtttcattcatggtcgatgcagggcaatttacatccgctggtgatcgccggggctaaaggctgcgagctgtgggattacgaaggcaatacttacctggatttcagcagccagctggtcaacgtcaacattggctatcagcatccgcgcgtgctggcggcgatgaaagcccaactggaagagctggtgaccatcgcgcccgccactgccaacctcgcccgcggcgaagcggcgaagcgcatcgtcgatctggcgccggaaggctttagcaaagtgttcttcaccaacgccggcgccgacgccaacgagaacgccatccgcatggcgcggctctacaccgggcgcgataaagtgctctctgcctatcgctcctatcacggcaacaccggcagcgccattgccgccaccggcgactggcgccgggtgccgaacgagtattcccgcgggcacgtacactttttcaatccctacctctatcgcagcgaatttaacgccgcgacggaagaggaggagtgccagcgcgcgctggcccatctgcggcggatgattgaatgcgaaggcccgaacgcgatagccgcgattctgctggagtcgattccgggcaccgccgggattcttgtcccgcccgagggctatatgcagggggtgcgggcgctggccgatgagttcggtattgtgctgatccttgatgaagtgatggccggttttggtcgtaccgggagttggtttgccttcgagcaggatggcgtggtgccggatctggtgactttcgccaaaggggtcaatgcgggctacgtcccggccggcggcgtgctgattagcgagccaatcgcccgctactttgatgaccatttctttgccggggggctgacctattccggccatccgctggcgatggcggcgattgtcgccaccattgacgcgatgaaggaagagaaggtggtggagaacgcggcgaccatcggcaacgaggtgctgcgtccggggctggaggcgctggcggagaagcacgcgattatcggcaacgtgcgcggccgcggtctgttccaggcgctggagctggtcagcagccgcgaacataaaacgccgctgggcgctgccgatatggcggccattaaaggcgcgttaaccgaagccggcctgctggcgtttgtggtggagaaccgcattcatgtggtgccgccgtgcaccatcagcgccgggcaggtggcaaaaggcctggcgatttttgatgcggtattcgcccgcttcgcgaacctggctcagtaa

SEQ ID NO: 176788 - DNA, 705 bp, Klebsiella oxytoca
atggcaatcgttaatctcaacaatctacaggtgaattttgctgaaaaaaccgcggtgtccgccgccagctttgccgttgatgcaggggaaacgttcagcctgatcggcgcatccggctgcggaaaatcaacgattctccgggtattagccgggctgcagcgggactggcgcggccgcgttgaactgttcgataaggccattacgccgggcgcgcgttttcagggcgaactgcggcgcaacgtacagatggtgtttcaggacccgtacgcctcgctgcatcccaatcatacgctatggcgtacgctggcggagccgctgaaaattcacgctatcggcgagatcgagcagcgggtgtccaccgccctggaagaggtggggctgcctgtcgacgccgcgcgccgctatccgcaccagctttccggcggccagcgccagcgggtggcgattgctcgcgcgctgctgctgcggccaaagattctgctgctggatgagccaacgtcggcgctggatatgtcggtgcaggcggaaatactgaatctgctcaatcggctaaagcaggagcacggaatgacctatctgctggtcagccacgatgccgatgtgattgcccatatgtcggaccgggcagcgtttatggcggaaggcgtgattcagcgcttctttgaccgcgaagcgctggcgaacggcgaacatcggttagactga

SEQ ID NO: 176789 - DNA, 837 bp, Klebsiella oxytoca
atgactgatactcgtctgatcgttcagggactgaccatcgactatcccaccgccagagtggtggaccatttaagcttcacgctcggcaacgagcggctggcgctggtcggcgaatccggttccggtaaatccatgaccgcacgcgccctgatggggctggtccgccggcccggcgtcgtcagcgccgatgcgctcaacgtgctggggcgcgacgcattaacccttcgcgagcgcggctggcgcgcgctacgcggcaacaatattgcgatggtgctgcaggatccgcgctacgcgctcaatccggtaaaaagcattcaggcgcagctggaagaggcattaactctgcatcagcgccttagccgccgcgcgcggctggaggcggtcaaagccgccgttgccgccgtcggtctggatttaccggtactcaaccgctatcctggcgaactctccggcgggatgggccagcgggtgatgattgcccttgcgctgctcaataatccgcaggtgctgatcgccgatgagcccacttcagccctcgatgcccgactgcgcaatcagatccttgaactgctggtagagcagtgcgaacagcggcggatggcgatgctgttgattagccacgacctgccgctggtggccgagcactgccagcgggtgctggtcctgtatcaagggaaaaaggtcgatgagatggcggcgcgagatctgccgacggcgacgcatccctacacccgtacgctctggacctgtcgcccggccgcgcaaacttacggtcagatgctgccgaccctcgaccgaaccctgaacttgacggaggcggcgcatggcaatcgttaa

SEQ ID NO: 176790 - DNA, 834 bp, Klebsiella oxytoca
atgcctggctacctttttttacgccgcctgcgccgttctcccgccgccttttgcggtctgatcatcattacgttactcctgctgactgcgctctttgccccctggctggctccgctcgacccgaactggcaggacgccgccgcgcggctgcagggtccgggcgcgcggcactggctcggcaccgacagctacggtcgcgatcttctctcaaggctgattttcggcacccgtccggcgctggggctggttgcgctggtgacagcgattacgctccccgccggtctgctggtggggatcctgtccggctattacggcggctggctggagcgcgtgctgatgcgttttaccgacgtggtaatgtcgatgccgcggctaattctggccttcgcgtttgtcgcgatgctcggcccgggcctggtgaacggcgccctggcgctggcgctaacgacctggcccgcttacgcccgtcaggcgcgcagcgaaattcagcgcctgcgccacagcgactatctggcggcggcggagatgatgggcattcgcggctggcgtctgctgattggccatattctgccgctctgtctgccctcggcgatcgtccggctggcgctggatctagccgggattattctcgccgctgccggtctcggcttccttggtctcggcgcccgcccgccaatggcggaatggggcgcgatgatcgctgacggcatgcaggtcatttttgaccagtggtggatcgccgccgcccctggcgccgtcatcctgatcgccagcctggcgtttaacctgctgggcgatggcctgcgcgacgttctggagccgcaacatgactga

SEQ ID NO: 176791 - DNA, 1050 bp, Klebsiella oxytoca
atgtctgctgttttacctccccgagcagagcggcgcgcaaaacgccccctgctcgcgctgtttcagggactgctgacgctggccctgacgctgctcggcctgctgctggtgacctttgcgctctctgcgctgtcgccggttgatcgggtgctgcaaatcgtcggcgaccacgccagtcagtccacctatgaccaggtacgccaccagctcggcctcgaccagccgttgccgctgcagttctggcactatctgctgaatctcgcccacggcgatcttggaatcgccagctcaaccggccagccggtgctgcacgacctgctcgccgctttcccggcaacccttgagctggccacgttggcgttgattatcggcgcgctgtcgggcgttatcgcaggcgttctctgcgcccgctacgtcggctcgccgtgggatctggcgatgcgcacctttacgctgctcggcaactcggtgccgatcttctggctcggcctgctgatgctggcgctgttttacgccaaactgcagtggacgccggggccggggcggctggacgatatttatcagtacaccgtcgaaccgcgcaccggctttgcgctcattgatacctggctctcgggtgataaagaggcggttaaaaacgccgccgggcacctgctgctgccggtgctgctgctggcctattactctctggcgagcatcacccgcctgacccgttccgcctgcctgagcgaaatgaacaaagagtacatcctgctggcgcgcgccaaaggggccggtgagatgacgattctgctgcgtcacgtcctgcccaatatccgcggcaccctgctgacggtgaccgccctcgcctggacctccatgctggaaggggcggtgttgaccgaaaccgtcttctcctggccgggaattggccgctatctgaccaccgcgctctttgccggcgataccacggcgattatgggcggtacgctgctgatcggcgcgagctttgtgctgattaataacctcaccgacctgctggtgcggctgaccgatccgaggatacgctga

SEQ ID NO: 176792 - DNA, 1569 bp, Klebsiella oxytoca
atgactaaaaaactgctgccgctgctggcgctcgccgcgttatccgccgccgttcacgccgccacgccgccgggaaccctggtggtcgcccagggcctcgacgatatcgtcagcctcgacccggcggaagccaacgagctctccagcatccagacggtaccgagcctctatcagcgtctggtgcagccggaccgcgataaccctgaaaaaatcaccccgatcctggccgaaagctggcaggccgatccggcggcgaaaaccctgaccatcaagctaaagcccgacgccaaattcgcctccggtaacccgctacgcccggaagatgtcatttactcatacacccgcgcggtcaccctgaacaaatcgccggcatttattcttaacgtcctcggctggcagccggataacatcgccagccagttgaagaaggtagacgaccataccctcacgctacgctggactgccgacgtcagcccggcggtggcgctgaatattctctccacgccgatcgcctctatcgtcgatgagaaacaggtcgccccgaacgccaaagatagcgacttcggcaacggctggctgaaaatgcactcggcgggcagcggcgcgtataaaatgcgggtctatcagccgcatcaggccatcgtgctggaggccaacagcagcgcacccggcggcgcgccgaagctgaaaagcatcatcattaaaaacgttccggacccggcctcacgtcgtcttctcatccagcagggtgatgctgacgtggcgcgcgatctcggcgccgaccagattgcggctctgcagggtaaagcgggcgtcaaggttctcagcatcccctccgctgagcagaactatctggtctttaataccggcaacagcgctaacccgctgctgaaaaacccggccttctgggaagcggcgcgctggctggtggattacaacggcatcacgaaagatttgctgaaagggcaatatttcgtccatcagagcttcctgccggtcggcctgccgggcgcgctggagaataacccgtttacattcaacccgcaaaaagccaaagacatcctcgctaaagcgggcattaaagaggcgcatttcaccctcgacgtcgaaaacaagccgccgtttatcaccattgctcagtcgatgcaggcgagcttcgcccagggcggcgtgaaggtggatttgctgccggccgcgggtagccaggtctatgctcgcgtgcgcgccaaacagcatcaggcggcgattcggctgtggatccctgactatttcgacgcccactctaacgccagcgcctttgcctacaacgacggtaaatccagtaccgtcgccgggctaaacggctggcagatcccggagctgaataaagcgaccctggcggcagtcgccgagccggacgcagcgaagcgccaggatctgtataaaaacattcaggaggaactgcagcgcaattcgccttacgtgtttatcgatcagggtaaaacccagattgtggttcgcgataacgtgaagggttatcagcagggtctcaatgccgatatggtgtggtatgaccgggtaaccaaataa

SEQ ID NO: 176793 - DNA, 696 bp, Klebsiella oxytoca
gtgccggaaattaatgaatttggtcagcaggtcaacgatcgcgtgcccgggtggcggggggcggggcttctgcgccgcacggcgttaaatggccgctattgccgactggagccgctggataccgaccggcacgcggcggatctgtttgctgcctatgctctcggcgacgacagtgactggacgtggctggcgagcacgcgcccgcagagcgttgagtcaacggcgaactggatcaccggcaaggttatggatgacggactggtgccctacgcggtcgtcgatctgcgctgcgagcgagccgtcgggctggtcagctatatggcgattgagcgggcgatgggcacggtggagattggccacgtcacctggtcgcgggcgatgaaaaatacgccgctcggcaccgaggcggtctggctgctgctgcaaaatggttttgcccatggctatcgtcgactggagtggaagtgcgattcaatgaatattgcttcccgccgcgccgccgaccgactgggattcacctgggaaggacgacttcgccagaggatggtgcgtaaaggacgaacccgcgatagcgatatgctgtcgattatcgacagcgaatggcccgcgcgcgatgcggcgctgcgggcctggctggcgccggagaattttgatgctaatggacggcagataaagcggctggaagattttcgctag

SEQ ID NO: 176794 - DNA, 1665 bp, Klebsiella oxytoca
ttgcagtttgactacattattattggtgccggttccgccggcaacgtactggctacacgactgacggaagatcctgacaccaccgtcctgctgctggaagcgggcggcccggattaccgtttcgacttccgcacccagatgcccgccgcgctggcgtttcctctacaggggcgtcgctataactgggcctacgagaccgagcctgaaccgcatatgaaccatcgccgcatggagtgcggacgcggtaagggactcggcggatcctcgttaatcaacggcatgtgctatatccgcggcaacgctatggatcttgataactgggcctcggcgccggggcttgagcactggagctacctggactgcctgccctattaccgcaaagcagaatcccgcgatatcggcgccaacgattaccacggcggcgacggcccggtcagcgtcaccacgccaaagcagggcaataatccgctgttccacgcgatgattgaagctggcgtacaagctggctatccgcgcaccgacgatcttaacggctaccagcaggagggatttggcccgatggatcgtaccgtgacgccgcagggacgccgcgccagcaccgcgcgcggctatctcgaccaggcgcgcgcgcgtcccaatctgactattcgcacccatgcgctgaccgatcatattatttttgccggcaagcgcgccgtcggcgtcgagtggctggagggcgacagcaccgcgccgtcgaaagcgaccgccaataaagaagtgctgctctgcgcgggggctatcgcttcgccgcaaattctgcagcgatccggcgtcggcagcccggaactgttgcgccagttcgatattccgctggtacacgccctgccgggcgtcggggaaaacttgcaggatcatctggagatgtatctgcagtacgaatgcaaagagccggtgtcgctttacccggcgctacagtggtggaaccagccgaaaatcggcgccgaatggctgttcggcggaaccggcatcggcgccagcaaccagtttgaagcgggcggatttattcgcagccgtgaagcctttacgtggccgaatattcagtatcacttcctgccggtcgcgattaactacaacggctcaaacgcggtgaaagagcacggcttccagtgccacgttggctctatgcgctccccgagtcgcggccacgtgcggctgaaatcgcgcgatccgcacgaacatccggcgattctgtttaactatatgtccagcgaacaggactggcaggagtttcgcgatgcgattcggattacccgcgaaatcatgcatcagccggcgctggataactatcgcggccgggagatcagcccgggtgcggagtgccagagcgataccgagctggatgagttcgtgcgcaatcatgcggaaaccgccttccatccgtgcggcacctgtaaaatgggctatgacgagatggcggtggtcgatggcgaaggtcgggttcacggactggaaggcctgcgcgtggtcgacgcctcgatcatgccgcagattattaccggcaaccttaacgcgaccacaattatgattggcgaaaaaatggctgatgccattcgcggccgtcagccgctgccgaagagcacggcggcgtattacgtggcgaacggggcgccggttcgccggtaa

SEQ ID NO: 176795 - DNA, 1473 bp, Klebsiella oxytoca
atgtcccgaatggccgaacagcagctttacatcgacggtggttatgtttccgccaccagcggtaaaaccttcgagacgattaaccccgccaacggggaagtgctggcgaccgtccaggccgccggccgcgaagacgtcgaccgggcggtaaagagcgcccaaaaagggcaaaaaatctgggcggcgatgagcgccatggaacgttcgcgcattttgcgtaaagcggtcgacattctgcgcgagcgcaacgacgaactggcgcgtctggaaactctcgataccggcaaaccgctgagcgaaaccgccgccgtcgatattgtcaccggcgctgatgtcctggagtactacgcgggcctgatcccggcgctggaagggagccagatcccgctacgcgaaagttcattcgtctatacccgccgggaaccgctgggcgtcgtcgccgggatcggtgcctggaactacccgatccagatcgccttatggaaatcagccccggcgctggcggccgggaacgcgatgatctttaagccgagtgaagtcaccccgctcaccgccctgaagctggcggaaatttaccgcgaagcgggactcccggcgggcgtatttaacgtgctgccgggcaccggcgccgaaaccggccagtatctcaccgagcacccggacatcgccaaaatctcctttaccggcggcgtcgccagcggcaaaaaagtgatggccaattccgccgcctcctcactgaaggaagtgactatggagctgggcggcaaatcaccgctgatcgtctgcgaagacgccaacctcgacctcgccgccgacatcgcgatgatggctaacttctacagttcaggccaggtctgcaccaacggcacccgggtattcgttccggcgcgcctgaaagcggcatttgaagagaaagtcctcgcccgcgtggcgcgtatccaccccggcgatctgtttgctgaaagcaccaacttcggaccgctggtgagcttcccgcaccgcgagaacgtgctgcgctacatcgagacgggtaaacaagaaggcgcgcgcctgctctgcggcggcgaagtgctgaaaggagaaggcttcgaccacggcgcgtgggtcgccccgacggtatttaccgactgcgatgaccagatgaccatcgtccgcgaagagatcttcggcccggtgatgtcgattctgagctacgacgatgaggaagaagcggttcgccgcgccaatgccaccgaatacggcctcgccgctggcgtcgtcacgccggatttaaaccgcgcccatcgtctgattcatcggctggaggccgggatctgctggatcaacacctggggcgaatcccctgcggagatgccggtcggcggctacaagcactccgggattggccgcgaaaacggcgtacagacgctgcacagctacacccagataaaatccatccaggttgagatgggtcagtttcaatccatattttaa

SEQ ID NO: 176796 - DNA, 594 bp, Klebsiella oxytoca
atgcccaaactggggatgcaaccgatacggcagcggcagctgattgacgcgaccctggccgccatcaatgaagtgggaatgcacgatgccaccgtcgcgcagatcgcccgacgtgctggcgtatcgaccggcatcatcagccactatttcaaagataagaacggcctgctggaggcgacgatgcgcgatatcaccggccagctgcgccaggcggtgttgagccgcctgcacgccctgcccggggccggcccgcgggaacgcctgcgcgccatcgtggccggcaacttcgacgagagtcagataagcagcgcggcaatgaaggcctggctagccttttgggccagcagcatgcatcagccgatgctctatcgcctgcagcaggtcagcagccgacgactgctgtcgaatatcgtctatgagtttcagcgcgccctgccgcgcgaagaggcgcaggaggccggatacggtctcgccgcgctgatcgacgggctgtggctacgcgcggcgctgagcggtaaaccgctcgataaagcccgcgccgaaacgctcgccgagcacttcatcagcaaatatctgccaccgacttctcaataa

SEQ ID NO: 176797 - DNA, 2034 bp, Klebsiella oxytoca
atgacagacctttcgccgagcagagaaaaggacaaaatcaatccggtggttttttatacctccgccggactgattttgttgttttccctgatgactctcttcttcagcgatttttccgcggcctggattggccgtaccctgaactgggtttcaaagaccttcggctggtactatttgctggcggcaacgctgtatatcgtgtttgtggtgtgcatcgcctgctcgcgtttcggttcggtgaagctcgggccggagcactcgaagccggagtttagcgtcatgagctgggcggcaatgctgttcgccgccggtatcggtatcgacctgatgtttttctccgtcgccgaaccggtgacccagtatatgcagccgccggaaggggcggggcagaccatggaggcggcgcgccaggcgatggtatggacgttgtttcactacgggctgaccggctggtcgatgtatgccctgatggggatggcgctgggatactttagctatcgttataatttacccctgaccatccgctccgcgctctatccgatcttcggcaaaaagattaatggcccaatcggccacagcgtggatatcgccgccgttatcggcaccatttttggtatcgccaccaccctcgggattggcgtggtgcagctaaactacggcctcagcgtgctgtttgatattccggactcgctgggcgcgaaagcggcgctgatcgtgctgtcggtcattatcgccaccatctccgtgacctccggggtggataaaggcattcgtatcctttccgagcttaacgtggtgctggccctcgggctgatcctgtttatcctgtttatgggcgacaccgagtttctgctcaacgcgctggtgctcaatgttggcgactatgtgaatcgttttatgggcatgaccctcaacagcttcgccttcgatcgtccggtcgagtggatgaacaactggaccctgttcttctgggcgtggtgggtggcgtggtcgccatttgtcggcctgttcctggcgcgtatttcacgcgggcgcaccattcgtcagtttgtggtgggaacgctgattatcccgttcacctttacgctgctgtggctgtcggtgttcggcaatagcgcgctgtatgaaatcatccacggcaatgcggccttcgccgccgaggcggtcgcccacccggagcgcggcttctataacctgctggcgcagtatccggcgtttacctttagcgcttcggtggcgacgattaccggcctgctgttttacgtgacctccgcggattccggggcgctggtgctgggtaacttcacctcgaagctgaaggatatcaacagcgatgcgccaaactggctgcggatcttctggtcggtggttatcggcctgctgaccctggggatgctgatgactaacggcatttccgccctgcagaacgcgacggtgattatggggctgccgtttagcttcgtgatcttcttcgtgatggcggggttatataagtcgctgaaggttgaggattatcgccgcgagagcgccaaccgcgacaccgccccgcgaccgctgggcgtgcaggatcgcctgagctggaagaagcgcctgtcacggctgatgaactatcccggcacgcgctatacccgccagatgatggagacggtgtgcttcccggcgatggaagaggtggcgcaggagctgaagctgcgcggcgcctatgtcgagctaaaaagcctgccgccggaagagggggacaacctgggccatcttgacctgctggtgcatatgggcgaggagcagaactttgtttatcagatctggccgcagcagtactccattcccggctttacctaccgggcgcgtagcgggaagtcgacctactatcgtctggagaccttcctgctggaagggagtcagggcaacgacctgatggactacagcaaagagcaggtcattaccgatattcttgaccagtacgagcgtcatttgaactttatccacctgcatcgcgaagcgccgggcaacagcgtgaccttccccggaatgtag

SEQ ID NO: 176798 - DNA, 153 bp, Klebsiella oxytoca
atgctgacaaaatacgccctggtggcaatcatcgtgctgtgtctgacagcgctgggattgacgttaatggtgcacgactcgctgtgcgagctgagcatcaaagaacgtagtatggagttcaaggccgttctcgcttacgaaacgaagaagtag

SEQ ID NO: 176799 - DNA, 582 bp, Klebsiella oxytoca
atgtatcgccactatcaggccctgatttttgatatggatggcacgctttttgacaccgaacctttgcaccgcaaagcgtggctgagcgtattcgctgccgacaatatcaccatttctgaagaggagctgattccgttcaatggttcagcgccctggcaggtggccagccagcttgtggccttaaaaggattacgagccgatccgttctccctggccgagcgtaaaaaacaggcgatcgagaacttgctgcagacggtcgatattcagcttttaccggccatgaagattttacagcagtggcagggcaaaattcccctggcgctgggaaccggaagcgaacgtagcaccgtggatatactgcttgcacgctttcaattaactcagcatttcgccgctatcgtctccgctgaccgggttaaaaatcataaacccgccgccgacacttttttattatgtgccagcgagcttcaggttcagcctgaacgctgcctggtttttgaagactcacgatttggtattgaagccgcaaaaaatgcaggtatggacgtggtcgacgtcaatactctgacgcctgccagataa

SEQ ID NO: 176800 - DNA, 786 bp, Klebsiella oxytoca
atgatcgcaaaagattttgcccaacagctatttaatctgcaggaccgcgtagcctttgtcaccggcgcgggcagcggcatcggccagatgattgcttacggactcgccagcgcgggggcccgggttgtttgcttcgatctacgtgaagacggcggccttgctgaaaccgtcaaaaatattgaggcgatcggcggcggagcctgtttttacaccggcgatgttcgtcagcttagcgacctacgcgccggcgtcgcgctggcgaaaagccgctttggccgccttgatgtcgccgtaaacgccgccgggattgctaatgccaatccggcgctggaaatggaaaccgagcagtggcagcgggttatcgatattaaccttaccggcgtgtggaactcctgtaaggcggaagctgaactgatgcaggaatccggcggcggctcgattattaatatcgcttccatgtccggcattattgttaaccgcggcctcgatcaggcgcactacaactgctcgaaagcgggcgtgatccacctgtcgaaaagcctcgcgatggagtggatcggcaaagggatccgcgttaactccatcagcccaggctacaccgccacgccgatgaacacccgccctgagatggttcatcagacccgcgagttcgaaagccagacgccgatccagcgcatggcgaaggttgaagagatggccggtccggcgctgttccttgccagcgacgcggcatcattctgtaccggggttgatctggttgtcgatggcggctttgtctgctggtaa

SEQ ID NO: 176801 - DNA, 798 bp, Klebsiella oxytoca
atgcaaagaaatttccagaacaaaacggttgtgatcaccggcgcctgccgcggaattggtgcaggtatcgccgagcgctttgcgcgcgatggtgcgaatctggtgatggtctctaacgccgagcgcgtccatgaaacggcggaaaccttacgccagcgctatcaggccgatatcctgtcgttacaggttgatgtgaccgacgaagcgcaggtgcagtcgctgtacgagcaggctgcagcgcgttttggcaccatcgatgtctctatccagaacgcaggcgtgatcaccatcgactattacgatcgcatgccgaaagccgactttgaaaaagtgctcgccgttaacaccaccggcgtctggctgtgctgccgcgaagccgccaaatacatggttaagcagaaccacggcagcctgatcaatacctcttccggccagggtcgacagggttttatctacaccccgcactatgccgccagcaaaatgggcgtcatcggcatcacccaaagcctggcgcacgagctggcgccgtggaatatcaccgttaacgccttctgtccaggcattattgaaagcgaaatgtgggattacaacgaccgcgtctggggcgagatcctcagcaccgagcagaagcgctacggtaagggcgagctaatggcggagtgggtcgaaggcattccaatgaagcgcgccggcaaaccggaagacgttgccgggctggtggcgtttctcgcctccgacgacgcgcgctacctcaccgggcagaccatcaatatcgatggcggcttgattatgtcgtaa

SEQ ID NO: 176802 - DNA, 1056 bp, Klebsiella oxytoca
atgaaccagaaatatatgatttatatgtacctgctgaaggccagaacgtttatcgctctgctgctggttatcgcattcttcagcgtgatggtaccgaatttcctgaccacatctaacctgctgattatgacccagcacgtggccatcaccggcctgctggccatcggcatgacgctggttatcctgaccggcggtatcgacctttccgtcggcgccgtcgccgggatctgcggtatggttgccggggcgctcttaaccaacggtctgcccttatggaacggcagcgttatctttttcaacgtgccggaggtaatcctctgcgtggcgctcttcggcgtgctggttggctttgttaacggcgcggtaatcacccgcttcggcgtggcgccctttatctgcaccctgggcatgatgtatgtcgccagaggctcggcgctgctgttcaacgacggcagcacctatccgaacctcaacggcatggaagcgctgggcaataccggcttctccactctcggctccgggacgctgatgggcatctatctgcctatctggctgatgatcggcttcctgctgctgggctactggctgaccaccaaaaccccgctgggccgctatatctatgcaatcggcggtaatgaatccgccgctcgcctggccggcgtgcctatcgtcaaagcaaaaatcttcgtttacgccttctccggcctgtgctccgcattcgttggcctcatcgtcgcgtcacagctgcaaaccgcgcacccgatgaccggcaatatgttcgaaatggacgccatcggcgctaccgtgctcggcggaaccgcgctggcaggcggtcgcggccgggttaccgggtcaatcatcggcgcattcgtcatcgtcttcctcgccgacggcatggtgatgatgggggtcagcgatttctggcaaatggtcattaaaggcgtcgttatcgtcaccgccgtcgtcgtcgaccagttccagcagaaactgcagaacaaagtcatcctgatgcgccgccatgaggagaagctggctgcggcaggagccaccagttaa

SEQ ID NO: 176803 - DNA, 1545 bp, Klebsiella oxytoca
atgcagcggcaagaactcgtcaattcccaaccagtcgaatctgaagttattatcgaaacccgtgaattatcgcgcgtttatcccggcgtcgttgccttagataacgtcaattaccgggtctatcgaaataaagtaaacgttctgatcggtgaaaatggtgcgggtaaatccaccatgatgaaaatgcttgctggcgttgaaacaccctcctccggtcaaattattcttgatggcgttccggttaccctgagctcgactcaccaggccgaaaagcagggaatcagcatcattttccaggaattaaatttatttccgaatatgaacgtcatggataatattttcatggctaacgagttctttcaaaaaggaaagatcaacgaaaaatatcaatacgagttagccaaaaaattactcgagaggctggagctcaacgtcgacccttatacccagctcggcgagctcggtattggccatcagcagctggtcgaaattgcgcgcgcgctttcaaaagacacccgggtattaattatggatgagcccacctctgcgctcagccagtcggaagtcaaaatcctgtttaacgttattgaacagcttaaacgtcgcggcgtcaccattatctatatttcccaccgcctcgaagaactgatggaaattggcgaccacatcaccattttccgcgacggacgctttatcagtgaacgcgaggtcagcgacgccagtatcccgtggattatcgaacagatggtcggcgataagaaaaaacatttcgactaccggcccgcgccgaaaggcgaagcggtccttgccgttgaaggtttaacggcgctgcacccgagcggcggctataagctcaacgacgtgaccttcaccttaagtaagggagaggtgatcggcatatatggcctgctcggcgccggacgcacggagctgtttaaaggcctggtcggattaatgccttgccaaagcggtaacgtccatctcaacggcgaaaatatcgaaaagtccccgttccaggcgcggctgaaaaaagggctggcgctggttcccgaagaccgccagggagaaggcgtggtgcagatgatgtcgattcaatcgaatatgaccctctctgatttcagccttcagggctttcgtcgggcgtggaaatggctgaatccgcagaaagaaatcacctgcgtcaaagagatgatccgcgaactggcgatcaaggtcagcgaccccgatctgcccatcacctcgctcagcggcggcaatcaacaaaaagtggtgctcggcaaggcgttgatgaccaggcccgaagtggtgtttctcgatgagcccactcgcggtatcgacgtcggcgcgaaaactgacgtgtatcacctgatcggcaaaatggcccaacagggtctggcggtgatgttctcttcatcggagctggatgaagttatggcgctggcagatcgcattctggtgatggccgatggccggattaccgccgatttaccgcgccatgcggttacccgcgaaaaattgatcgcggcttcaacacctcaagattaa

SEQ ID NO: 176804 - DNA, 621 bp, Klebsiella oxytoca
atgtataaaaaaatctcgctgatgctggtcgttgttgccctcggaggctgccgaattgtttctcagcaggagctggccgacctgaaatccccgcctaatccgcatatggcggatatcgatcggacatggcaagagcaggtcgttcctcaggttgtggccagggctcgccccgttgccgagttaatgactgccctgcgcacggcgaaagacattgatagcgcctgcaaagcgttaggttatcgcgctcaggatgagaacccgtgcgtgttctacgtcaaagtggaaggcaatatcagcaaaattgattccgcttcccgcagcggaaaaatgacgatccaggataccagcggcggcaacgtggtggtgcagattggcccgacgctgcgcggcacgcttttacgcgacggctaccagggcgccagctatcaggacttcaacgatcaggtgctgtttggtgaatatagccgggcgattaacgaacatgcggtcaaaatgatccagacggcacaggttaaaaccggtgaagcggtgcaggtatatggcgtgttctcggcctgggatattccgcagaccgttcctgatattacgccggcaaaaattgttcgtttgggaggacaataa

SEQ ID NO: 176805 - DNA, 936 bp, Klebsiella oxytoca
atgaaattacgtttaacgcttttaactgctgctaccctgaccgccttttcttttgccgctcaggccgcagaaaaaggcaccattatgatcatggttaactcgctggataacccgtattacgcctctgaagccaagggcgccagcgagaaagccaaagagctgggatatcaaactaccattctgtcccatggcgaagatgtcaaaaaacagaacgagctgatcgataccgccatcggtaaaaaagttcagggcattattctggataacgccgactccaccgccagcgtcgccgccattgaaaaagcgaagaaagcgggtattccggtggttttaatcaaccgtgaaattcctgtcgatgatattgcgctggagcaaattacccataataacttccaggccggttctgaagtcgccaacgtatttgtcgagaaaatggcggagaaaggcaaatacgccgagctgacctgtaacctggcggataataattgcgtaacgcgttcaaaatctttccaccaggttatcgaccagtacccggatatggtcagcgtcgctaagcaggacgcaaagggcacgttaatcgacggcaaacgcattatggacagcatcctgcaggcgcaccccgacgtgaaaggcgtgatttgcggcaacggtcctgtcgcgcttggcgccattgccgcgctgaaagccgctaatcgcaacgacgtggtggtggtcggtatcgatggcagcaacgatgagcgcgacgcggtaaaagccggcaccctgcaggccaccgtgatgcttcaggcgcaggccatcgccgctcagggagtgaccgacctcgataactacctgcaaaaaggcgaaaaaccggccaggcagcgcgtgatgttccgcggcattctgatcacccaggacaatgcagacaaagttcaggacttcaatatcaaatcctga

SEQ ID NO: 176806 - DNA, 1521 bp, Klebsiella oxytoca
atgcaggcaacacctaaagagttcatcattgcactggacgaaggcaccacgaatgccaaagccgtcgtgctcgatagccgcggccaggtcgtggtgaaattctcccagccgctggcgattcaaacaccgcgtgagggctgggttgagcagtcgggagtagtgctggtagaggcgtcactggacgttattgcgcaagcggttgaacacgttggcgcggaaaacatcgctgccttagccatcagcaatcagcgcgagacggcgatcggctggtatcgccagagcggtaagccgatcaacgcggctatcacctggcaatgtacccgcagcgctgcgttttgcgatgaactacgccgcgacggtactgagcaacaaattaaggccgctaccggcctgccgattgcccccctgttctctgcctcaaaaatgcgctggctgctggaatccattcctgagggtcgcatgctggcagagcggggagaaatctgcctcggcactatcgacagctggctgctgtggaacttaacccagggcgaagcgtttcattgcgattattccaatgccgcgcgcacgcagctactgaacctgcaaaccggccagtgggacgacgaaatgctggcgctgttccagatcccacgcgccgcgctgccggagattaaaccgtccagcggattatttggctatacccgcgggctgaataatattcctgacggtattcctgtgatggcgatggtcggggattcccacgccgcgttgtttggccacgcactgggcgaactcggctgtgttaaagccacctacggtacggggtcatcggtgatggcgccggtaaaatccgcacagtgcgatatcgacgcgctggccaccaccatcgcctggcacgacggcgacagcatcacctacgggctcgaaggtaatattccccataccggcgacgccgtggcgtggatggccgacagcaccgggttaagcgagctttcggatgccgaactggctcacgagcttaacacccttcccggctccgtggactccactcttggcgtctattttgtaccagccttaaccggcctcggcgcaccgtggtgggacgacagcgcccgcggcgtgatttgcggtctgagccgcggcgtcaagcgcgcccatctgattcgcgccgcgctggaatccattacctatcaaatcgccgatgtcgtcgtcgccatgcgccagcaggatgacttccatttagcggcgctgatggtcgacggcggcccgaccaaaaacgactggttaatgcagtatcaggctgacctgctcggctgcccggtgatgcgcagcgacgttgccgaactgtcggcgattggcgcagccctccttgcgcgcaaggccctgaatccgggaacggtcaccgacctgaaagcctttttaaccgaacatagcgaatttattcccgatatggcccgccaccagcgcctgcagaagagatggcaggagtggcgccatgcggtgaacagaacattatggaaaccggcaacgtccgcctga

SEQ ID NO: 176807 - DNA, 951 bp, Klebsiella oxytoca
atggctaagcaggatgaacaacggctattagttaagattgccacgctctactatctcgaaggacgcaagcagtccgacattgctcaacttctctcgctttctcagtcatttatctcccgagcgatcacccgctgccagaaagagggcgtggtgaaaattagcgttgttcagccatcaaatatttttcttaaccttgaaaaaggtcttgaggatcgttacggaattaagcaagccatcgtggtggataccgaagaggatgccagcgatcacaccatcaagcgcgctatcggttccgccgctgcccactacctcgaaacgcgattacggccaaaggatctgattggcgtctcttcgtggagttccaccatccgcgcgatggtggatgaggtacacgcgcaaaacctgaaagccagcggcgtcatccagctgctcggcggcgtagggccgaacggcaacgtgcaggccactattctcacccagaccctggcgcagcatctgaactgtgaagcctggctgctcccttcccagagcattgaaggatccaccgaggagaagaatcgtcttgttgccagtaaagatgtcgccgacgttattgcccgctttgatgaagtcgatatcgcaattgtcgggatcggtattcttgaaccttcgcagctgctgaaaacatccggcaactactatcacgaagatatgctgcaggtgctggcggaacgcggtgccgtgggtgacatttgcctgcactattacgataaaaacggcagagcagtgttacgcgatgatgaagatcctgttatcggtatggcgctggagaaggtgaagaagtgccctaacgtggtggccctggccggcggcagcgagaaggtcgcggctatcaaaggtgcgctttcgggcggttatatcgatgttctgatcaccgattacccaacggccagactgcttattgccggttaa

SEQ ID NO: 176808 - DNA, 831 bp, Klebsiella oxytoca
atgaatccctatagctatgatgtccaggcacttgagcgtaaagcccgcgccgtacgtcgccatatcgtcagattgaatgccaatagccctgctggcgggcacaccggcgccgacctgtcgcaggttgaactgctcactgcgctctattttcgcattatgaacgtcgcgccggaccgcgtggatgatgaccagcgcgatatctacatccagtcgaaaggccatgcggtgggctgctactactgcgtgctggccgaagcgggcttcttcccggttgactggctggaaacctatcagcatgcgaattctcatcttcctggtcacccggttcgtcagaaaacgccggggattgaactcaacaccggcgcgctgggccacggtttgcctgttgcggtggggctggcgctggctgcgaaaaaaagcaacagcacccgccgcatctttttaattaccggcgatggcgaactggcggaaggcagcaactgggaagcggcgctggctgcggcgcactacggccttgataacctcgtcattattaatgacaaaaacaatctccagctggcggggccgacgcgggaaattatgaataccgatccgctggccgataaatggaaggccttcggaatgacggttaccgaatgccagggtaacgacatggcgtcggtggtggcgaccctggaagggctgaagcaggaaggtaaacccaacgttattatcgccaacaccacgaaaggtgccggtatttcctttatccaggggcgcccggagtggcaccaccgggtaccgaaaggcgaagaaattacactggcactggaggaactgaaagatgagtaa

SEQ ID NO: 176809 - DNA, 936 bp, Klebsiella oxytoca
atgagtaatgcagaacacctggcgagcgtgatggttcaggcctttattgatgcagtcgacagcggtgtcgatctggtgccggtggtggctgactccacgtcaacggccaaaatcgcgccgtttattaaacagttccccgggcgtctggtgaacgtgggcatcgccgagcagagcatggtcgggacggcggcgggcctggccctgggggggaaagtggcggtcacctgtaacgccgcgccgttcctgatttcccgcgccaatgagcagattaaagtcgacgtttgctataacaacaccaacgttaagctatttggccttaacgccggcgccagctacggcccgctggccagcacccatcatgcgattgatgacctggcggtgatgcgcggcttcggcaatatccagattttcgccccgtcttcgccgcgtgaatgccggcagattatcgattacgccatcggctatcaggggccggtctatattcgtcttgacggcaaggcgctgccggaactgcatgatgaaagctatcgcttcgtgccgggagcggtcgttacgctgcgggaaggcgaggatatcgctctggtcgctaccggatcgacggtgcatgagatcgtcgatgccgcgcagatgctggctgacgcggggattcaggctaaagtggtgagcgtgccgtccattcgcccttgcgataccaccgcgctgctggcggcgctgaaaccgtgcaaggcggtgataacggtggaagagcataacgtcaacggcgggttgggtagcctggtggcggaagtgctggctgaggccggggcggcaattccgctcaaacgcctggggatcccggatggtgagtatgcggcggcggcagatcgcggctggctgcgtaaacaccacggtttcgatgccgcttccgtcgccgggctggcgcagaaaatgcgctga

SEQ ID NO: 176810 - DNA, 624 bp, Klebsiella oxytoca
atgcaaacccaacgttctatcattcagcttgccgatcgctcgctgcagcgtgtcgatttcgacccattgacctttcggcctgaagatctcctctggctgccgcaccatgcccggctaaccggctgcgcccgcaagcggcagagcgaacatcttgccgggcgtatcgctgcggtttatgcgctgcgggaagtcggtgaaacagaggtccctgccattggcgaccaacgccagcccctatggccgcacccgtggtacggcagcataagccactgtgaacgcagcgcgctggcagtcgtctctgtccggccgatcggcgttgatattgagcgcatcttgactcctgatctggcggctgagctggaaagctgcatcatcaacagcgcggaaaaaagtctgctggacgccagcggcctgggccccgagctggcgctcacgctggcattttcggcgaaagagagcgcgtttaaggccagccatcccgacgtacaggcgggcgtcggttttagcgattttacgctggcgtatataaaggagggaaatctgcttcttcggctctccgccggggagtatcggctgcaatggattaaggccggtgactacgtcattacgctctgcgcggcgtaa

SEQ ID NO: 176811 - DNA, 2250 bp, Klebsiella oxytoca
atgaataacaggatcaaatccctggccttgctggtcaatctgggaatctacggggctgcttttccgctaagcgcggcggaaacggtctccgatagcaaaaccgcaaccgctgatgaaaccatggttgtcaccgccgccgagcagaacctgcaggcgcctggcgtatcaaccatcaccgcagatgaaattcgtaaacgtccgcctgcgcgagacgtatctgaaattatccgtaccatgccgggcgtaaacctgaccggcaactccaccagcggccagcgcggcaacaatcgccagattgatattcgcggcatgggcccggaaaacaccctgatcctgattgacggcaagcccgtgaccagccgcaactccgtacgtctgggctggcgcggcgagcgcgatacccgcggcgatacctcatgggtaccgccggagctgatcgaacgtattgaagtcattcgcggcccggcggccgcgcgctacggcaacggcgcggcgggcggcgtggtcaatatcatcaccaagaagagcgacggcgaatggcacggttcatggaatacctacatgaacgccccggagcataaagacgaaggttcgactaaacgcaccaactttagcctcagcggcccactggggggcgatttcagcttccgcctgctgggtaacctcgacaaaacccaggccgatgcctgggatatcaacgacggacatcaatccgagcgtaccggcacctatgccaataccatgcctgccgggcgtgaaggggtgaaaaataagaatattaacggcgtcgtgcgctgggatttcgcgccgatgcagtcgctggagtttgaatccggctacagccgtcagggcaacctctacgcgggcgatacgcagaacaccaatactaacgatctggtgaaagagaactacgggaaagagacgaaccgcctctatcgccagacttattccgtcacctggaacggcggctgggataacggcgtgaccaccagcaactgggcccagtacgaacgtacccgtaactcgcgtaaaggcgaaggtctggcgggcggcacggaaggtatcttcaacagcaaccagttcagcgatatcgacctcgccgacgtgatgctgcacagcgaagtcaacatccctctggatctggtgtttaaccagaacctgacgctgggctccgagtggaatcagcagcggatgaaggatttggcgtcaaatacccagacctttatgggcggcaatatcgacggctatgacagcaccggccgtagcccatactcgaaggccgagatcttctccctgtttgccgaagacaacgtggagctgaccgacaccaccatgctgacgccggcgctgcgtttcgatcatcacacgatcgtcggcaacaactggagcccgtcgcttaacttgtctcagggtctgtgggatgacttcacgttaaaaatgggcatcgcccgcgcctataaagcgccgagcctgtaccaaaccaacccgaactatattctctatagtaaaggccagggctgctatgccagcggcaacggtaccggttgctacatgatgggtaacgatgacctgaaagccgaaaccagcatcaacaaagagattggccttgagtttaaacgcgacggctggctggcgggtgtgacatggttccgtaacgactaccgcgataaaatcgaagcgggctacgcgccgatttcacagacgacgaacggtaaagtgaaaaccgatatctatcagtgggaaaacgtgcctaaagcggtggttgaaggtctcgaaggcaccctgaacgtgccggtcagcgaaacggtgaactggaccaataacatcacttatatgctgcaaagtaaaaacaagaaaaccggcgatcgtctgtcgattattccggaatataccctgaactccactctgagctggcagattcaggaggatatttcggtgcagtcgaccttcacctggtacggcaagcagcagccgaagaaatataactacaaaggtgagccggcggtgggttctgaaacggatgaagtcagcccttacagcatcgttggcctgagcgccacctgggatgtgacgaaaaacgtcagcctgaccggcggcgtggataacgttttcgacaagcgccactggcgcgcgggtaatgcgcaaaccaccggtagcctgacggatgtttcttatatggctggcgctggcgccaatacctataacgaatcaggccgcacctggtatctgggcgtcaatacccacttctga

SEQ ID NO: 176812 - DNA, 1200 bp, Klebsiella oxytoca
atgcataagacaggatgcgaccactggtggcgccatatctccggtccgcaaattgaggtcgtggacgacgcatatcgggtgaccttttggtggcgcgatccggcgggcaacgaagcctcttcgccaacccggcgggtatggatttatattaccggtgtgactgaccatcataaaaacgccgtaccgcaaacgctgcagcgcattcccggtaccgatgcctggtgctggcaaaccactctctctgccgcctggcgcggcagctactgctttattccttccgcgcgggacgacgacttttcccctcagctttttaacggcgacagcccggaccgcgcgctgctgcgcgaaggctggcgcaagctgctgccgcgggcgattgccgacccgcttaatccgcaaagctggaagggcgggcgcggccacgcggtctctgcgctggagctgccggacgcccccgaacagcccggctgggcgctgcgtgatgaaccttatcagccgccggtctgcattgaatggcagagccagcgactcggcaaccgtcggcggatatggatttacgccaccggcgatgcgcagccgcaagcgcgcccgctggcgattttgcttgatggtcagttctgggcagaaagcatgccggtatgggcgccgctagcaggattaacccgcgagaagcggttaccgcaggcggtttatctgctgattgacgttatcgataaccagcatcgcgccgaagagcttccctgcaatgaaacgttctggctggcggttcaggaagagctgctgccgatggttcaccggatagcacctttcagcgatagcgccgaccgaaccgtggtggcaggccagagctttggcggcctggccgcgatgttcgccgcgctctactggccccggcgatttggctgcgtgctcagccagtctggctcctactggtggccgcatcgcggcggcgcgcagacgggcctgctgattgagcggctcagccgcggcgaaatacagccgcaagggctacgcatctggctggaggccggcgttcgcgagccgatcatttttcgcgcgaaccaggcgctgctgacgcatctggaacagcagacgattttctggcgtcaggttgacggcggacatgatgcgctttgctggcgcggcgggctgacggccgggctcatccagctgtggcagccattaggccgtgaagagtag

SEQ ID NO: 176813 - DNA, 204 bp, Klebsiella oxytoca
atgcaattcagtaaccccttcgacaatccgcaagggcagttttacattctgcgcaatgaccagcagcagttcagcctgtggccgcaccactgcgccctgccggaaggctggacggtagagtgcccgccgcagtcgttagaggcgtgcaacgcctggctggcggagaactggtcaacgcttacccccgcgcactatgcatcctga

SEQ ID NO: 176814 - DNA, 3882 bp, Klebsiella oxytoca
atgaccacacgtttaccgctggttgcggctcagccggggatctggatggcggagcgcctctcgacgctgcccggcgcctggagcgtggcccactatgttgagctgcgcggcgatatcgacccgaccttgctcgggcgggcgattgtcaccgggctctctcaggctgacaccctcagcatgcgtttttgtgaagataacggcgaagcctggcagtgggtcgatgaaaatcgtcattttgccgagccggactatcgggatctgcgcacgtcgcacgacccgcacgctgccgcgctggcgctgatgcaggccgacctcgggcaaaacctgcgcgtggacggcggtaatccgctggtctgccatcagctgctgcgggtgggggataagtgctggtactggtatcagcgttaccatcatttgctggtcgatggcttcagtttcccggccattacccgccagatcgccgcgatttatcgcgcatggcagcgcggcgaagagacgccagcttcgccgttcacgccgtttgccgaggtggtggaagagtaccagcgctactacggcagcgacgcctggcagcgtgataaacagttctggcaggcgcagcgtcaggcgctgccggctccggcctccctttccgacgcgccgctggcgggaagggcgaccagcaccgatatctggcgcatgaagctggaggtcgacgccggcgtatttagccggctggcggcaggcgcgccgcagtgccagcgcgcggatctggcgctggcgctgaccgccctgtggctgggacggctgtgcagccgaatggattacgccgcgggctttattttcatgcgccgcatgggctctgcggcattaaccgctaccggcccggtgctcaacgttctgccgctggcggtcaatattgacgcccgggaaacgctggcggagctggccatgcgtcttgccggacagctcaagaaaatgcgccgccaccagcgctatgatgccgaacagattgtccgcgacagcggcagggcggcgggcgatgaaccgctgtttggcccggtactcaatattaaagtcttcgactatcagctggatatcgacggcgtacaggcgattacccacaccctggccaccggcccggtcaatgacctggagctggcgctcttcccggatgaaaccggcggtctatcgctggaggtgctggcgaacaagcagcgatatgatgaacagacgctgcgcgggcatatcgcccgtctatcttctttgctgactcagtttgccgataatcccactctgccctgcggcgaggcgaatatgctgtcggcggcggaaaaccaacgcctggcgcaggtgaacgcgaccgctgtcgacctgccgctcaccaccctgagcgcgctggtggcggcgcaggcggcaaaaaccccggatgccccggcgctggcggatggctgctggcagtttagctaccgtgagatgcgccagcaggtggtagcgctggccgagcgtctgcgcgcacggggcgtcaaaccgggcgatagcgtggcggtcgcgctgccgcgttcggtgttcctgacgctggcgctgcacggcattgttgaggccggagccgcgtggctgccgctggataccggctatcccgacgaccgcttgcggatgatgctggaagacgcccgtccgtcgctgctgatcacctctgaggatcagctggcgcgctttagcgatattcccggcctggaaagcctctgctaccagcagccgctggcggcgggcgagtccgcgccgctggcgctctcgcagccggagcataccgcgtatatcatctttacctccggctccaccgggcggccgaaaggggtgatggtcgggcagaccgccatcgtcaaccgcctgctgtggatgcaggaccactatccgctctgtgctgaggatgtggtggcgcagaaaacgccgtgcagctttgatgtctcggtatgggagttctggtggccgtttatcgccggcgcgcagctggtgatggccgagccggaagcccaccgcgacccgctggcgatgcagcagttttttgcccgctacggcgtgacaacgacccactttgtgccgtcgatgctcgcggcgttcgttgcctcgctggaggcggaaaacgtcgattgttgtcaaaccctgcgccgggtattctgtagcggagaggcgctgccgacggcgctatgccgtgaatgggagcagctcaccggcgcgccgctgcataacctgtacggcccgacggaagccgcggtggacgtcagctggtatccggcctgcgggcccgaactggcggcagtcaccggcgccagcgtaccgattggctggccggtgtggaataccggcttgcgcatccttgatgccgccatgcgcccggtaccgccgggcgtggcgggggatctctacctgaccggcattcagctggcgcagggctatctggggcgtcccgatttgaccgccagccgctttattgccgacccctacgcgccgggcgagcggatgtaccgcaccggcgatgttgcccgctggctggataacggcgcggtcgagtatctcggacgcagcgacgaccagctaaaaatacgcggccagcgaattgagctgggcgaaattgaccgcgcgctatctgcgctgccggacgttgcgcaggcggtggctcacgcctgcgtcttcaaccaggcggcggcgaccggcggcgatgcccgtcagctggtgggctatctggtttctgcttccggtctgccgctggacaccgccgcgctcaaagcgcagcttggcgaacagctaccgccgcatatggtgccagtggtgctgattcagctgccggcgctgccgctaagcgccaatggcaagctggatcgtaaagcgctgccgttacccacgttgagcagtgagcgcagcggacgtccgccggagccgggcgtggaaactgccgttgccgcagcgttcagccagctgctcggctgtgaggtgaacgacatcgacgccgatttcttcgcccttggcggccattcgctgctggcgatgcgcctggcggcgctgctgagccgcgaactggaacgccaggtgacgcctggccagataatggtcgcttcttccgtcggcaagctgagcgcgctgctggcatcggatctgagcgatgagcaggcgcaacggctgggcttcgacgcgatcctgccgctgcgcgagagcgacggtccgacgctgttttgcttccatccggcttccggttttgcctggcagttcagcgtgctggcgcgttatttaagcccgcgctggtcgatcgtcggcattcagtcgccgcgaccgcaggggccgatggcgacggcggcggatctggatgcggtatgcgaacatcatctgcaaaccctgctttcgcagcagccgcgcggcccgtactatctgtttggctattcgctcggcggtaccctggcgcagggaattgccgcccgtttacgccagcgcggcgaagcggtggccttcctcgggctgctggatacctggccgcccgagacgcagaactgggcggagaaagaggcgaacggtctggatgctgaggtgctggcggaaattgcccgcgaacgtgaggcgtttctggccgcccagcaggggcaggcttccggcgagctgttcagcgtgattgaaggcaactatgccgatgcggtgcgcctgctgactaccgcgcacagcgcgaagtttgacggtaaggcgacgctgttcgtggcggagaaaacccggcaacccgggatggacccgcaggtggtgtgggggccgtggatcggcgagctggaggtgtttagccaggattgcgcccacgtggatattatctctccgcaggcttttgaagcgatcggtccggtggtcagggagatactcggttag

SEQ ID NO: 176815 - DNA, 795 bp, Klebsiella oxytoca
atgaccgctgttacctcccgtttgcgcggcgatcggctgaccctggcgtacggcaaaaagaccatcgccgaatcgctgaacgtcaccattcccgatggccactttaccgcgattatcggccccaacggctgcggtaagtcgaccctgctgcgcaccctgagccgcctgatgacgcctaccagcggtcatgtctggctcgacggcgaacagatccagcattacgccagtaaagaggtggcaaagcgcatcggcctgctggcgcagaacgccaccacgccgggggatataacggttcaggagctggtcgcccgcggccgctatccgcaccagccgctgtttacccgctggcgcaaagaggatgaagaggcggtcaccagggcgatgaaggccaccggcattaccgacctcgcgcaacaaagcgtcgatacgctctccggcggccagcgccagcgggcgtggatcgccatggtgctggcccaggaaacggcgattatgctgctggatgagcccaccacctggctggatatcagccatcaaatcgatctgctggagctgctgagcgagctgaatcaggaaaagggctatacgctggcggcggtgctgcacgacctgaatcaggcctgccgctacgccacccacttgattgccctgcgcgacggtaaaatcgtcgccgagggcgcgccgaaggagattgtcaacgcggcgctgatcgagaagatttacggcctgcgctgtacgattattgaagatccggtggcgcatacgccgctggtagtgccgctgggtcgcaagtag

SEQ ID NO: 176816 - DNA, 990 bp, Klebsiella oxytoca
atggccccgtcccgccgcctgatgtttagctgcctgctgctgctgatcgccagcgccctggtctccctgtgggggctcggcaccggcctggtaccgttaagcgttgaacaggttatctccgcgctgctcggcgatgcgccgcgcaatatcaccctggtggtgaccgagtggcgcctgccccgcgtgctgatggcgctgctgatcggcgccgccctcggcgtcagcggcgcgattttccagtcgctcacccgcaaccccttgggtagcccggacgtgatgggttttaacaccggggcgtggagcggcgtgctggtcgccatggtcatgttcggccagaacctggcggccatcgccgcggcggccatggctggcgggatcctcaccgcgctggtggtctggatactggcgtggcgcaacgggattgaaacctttcgcctgattattatcggcatcggcgtccgcgccatgctggtagcattcaatacctggctactgctgcgcgcttcgctggaaaccgccctctccgccgggctgtggtatgccggctcgcttaacggactgacctggggaaaaacctggccctccgcgccgctgattctcttgatgctggtttgcggggcgctgctggcgcggcgcatgcggctgctggagatgggtgacgataccgcctgtgcgctgggcgtgcgggttgagcgttcgcgcctgctgatgatgctggtcggggtggtactgaccgccgccgccaccgcgctcgccgggccgatttcatttatcgccctggtggccccgcatatcgcgcgccgcctcagcggtaccgcgcgctgggggctgactcaggcggcgctgtgcggcgccctgctgctggccatctccgactacgccgcgcagcgtctgtttatgccctatcagttaccggtgggcgtggtgaccgtcagcattggcggcatctacctcatcgcgttgttaattcaggagtcccgcaaaaaatga

SEQ ID NO: 176817 - DNA, 1008 bp, Klebsiella oxytoca
atgtcgtcttcaacgaccgcggcgcgcgcctttgccgtgccgggtcttttaatcgtgttaatcattgcggttgcgctcagcctgctgatcggcgccaaacccctaccgtttagcgtcgtcatcgatgctttcgccggcacctgccagagcgccgattgcaccatcgtccttgatgcccgactgccgcgaacccttgccgggctgctggccggcgccgcgctgggcctggccggagcgctgatgcaaacgctgacccgtaacccgctggcggatccggggatcctcggcgtcaactccggcgccagcttcgctatcgtgctgggtgcggcgctgtttggtatctcctcaccgcaagagcagctgctgatggccttttgcggcgcgttcggcgcctcgctgctggtcgcctttaccggcagccagggcggcggccagctgagcccggttcgcctgaccctcgcgggggtcgccctggcggcggtgctggaaggcctttccagcggtatcgccctgctcaaccccgacgtctacgatcaactgcgcttctggcaggcgggttcgctggacgtgcgcaccctgcaaacgcttaaaattgtcctgatcccggtactcattgccggcctggtgacgctattgctgagcagggccttaaacagcctgagcctcggtaacgatacggccaccgcgctcggcagccgggtggcacgtacccagctcatcggcctgctggcgattaccgtcctgtgcggcagcgccacggcggtggtcgggcccatcgcctttattggcctgatgatgccgcatatggcccgctggctggtgggcgcggatcatcgctggtcgctaccggtcaccctgctggccacccctgccctgctgctgtttgccgacgtgctgggccgtctgctggtccccggtgagctgcgggtttcggtagtcagcgcctttatcggcgcgccggtgctgatctggctggtccgccgccagccgcgcggaggtggaatgtga

SEQ ID NO: 176818 - DNA, 1242 bp, Klebsiella oxytoca
atgaaccgacaatcctggctgctgaatctcagcttgctgaaaacccacccggcctttcgcgccgtctttatcgcccgctttatctcaattctgtcgcttggcctgctgggcgtggcgatcccggtacagatccagatgatgacccattcgacctggcaagtggggctgtcggtcaccttaaccggcggttcgatgtttgtcggtctgatgatcggcggcgtgcttgccgaccgctatgagcgtaagcgtctgatcctgctggcgcgcggcacctgcggcatcggcttcgtcggcctgtgcctcaacgccatgctgccggaaccgtcgctcatcgctatctatctgctgggcatctgggacggcctgtttgcctcaatcggcgtgaccgcgctgctggcggcgaccccagcgctggttggccgggaaaatctgatgcaggccggggcgatcactatgttgacggtgcggctgggatcggtcatttcaccgatgatcggcggtctgctgctggcaaccggcggcgtggcctggaactacgggctggcggcggcaggtacttttataacgacgctgaccctgctgcgtttgccgcggctggcaccgccgccgcagccgcgcgagcacccgctaaaatcgctgaacgcgggattgaagtttctgtttaatagcccgcttatcggcggcattgcgctgcttggcggactgctgacgatggccagcgcggtgcgcgtgctctatccggcgctggccggaagctggcagatgtcggcgtcgcagattggcctgctgtacgcggcgatccctttgggagcggcgttcggcgcgttgaccagcggacagctggcgcagacggcgaagcccggcgtgctgatgctggcgaccaccgtcggctcgtttgtggcgattgcgctgttcagcctgatgccggtgtgggagctgggcgcgctgtgcctggcgctgtttggctggctgagcgcaataagctcgctgctgcaatatacgctgatccagacgcaaaccccggagaatatgctcgggcgcatcaacgggctgtggaccgcgcagaacgtgaccggcgatgcgataggcgcggcgctgttgggcggtctgggcgcgattctgacgccggccgcttcggcgagcgccagcggctgggcgctggtgattgtgggcgtggtgctggtcgggctgctacgcgagctgcgccgctttcagcgcccggagacggtcagcgaaagctag

SEQ ID NO: 176819 - DNA, 696 bp, Klebsiella oxytoca
atggcctctgaagttatcgatatggagccgttctatttcgaaggcatcaacgtcgaaccgacggatgaagcggatgaaacggatgaaaatgaggaagacgacgttcagcctgaaccggcggtcaaccacgcgccgaaagcagccatcgaactgatggtggttggcggctcccgcgtgcgtctttccggcgaaaaatcctcggatgaagatagcgacgacctgtccttcagttggggcgtgcctgcggcgatcgccgtggcggataaaaccgccgccgtcatcgagttcgacgtcccgaaagtgagcgaagataccgagttcacctttactctgttcgtgcgcgatacctggggtgagccgtcaacgcagcagcgctttgtgctctccgtcgtcgccgcgacccagagcgatgacagcgaagacgagtcggaagacaagaacgatgatgagccggcggacgaccaggataacagcgatgatcaacctcaaccggcggatgatgatgtagtgccgtcagacgaaaccacgccttatccgctgtggaatgccagcaccgtgtatggcagcaactggggtacctttgaaaccgtcagctggaaaggccacaactaccaggtgaaatggtggtctcagggtgaccagccggacctgaactgcggtcagttcgcggtatggagcgatcttggcgcgtactaa

SEQ ID NO: 176820 - DNA, 786 bp, Klebsiella oxytoca
atgttttcagcgatctatcgctatcgtggttttatcattgacagcgttaaacgagacttccagtctcgttatcaaacgagttttttgggggccgcatggctgattttacagcctgttgccatgatttccgtctatacgctgatcttttcggagctgatgagggcacgtttggccggtatggatggcccctttgcttacagcatctatctctgttcgggagtattgacgtggggattgtttaccgaaacgcttaacaatctcgtcaacgtttttttgtcgaatgccaatattctcaaaaaactcagctttccgcgcatctgtttgccaattattatcactgcttctgcatttattaactttttgatcatatttggcctgtttgtactgtttctgcttattaccggtaattttccgggctggatctttttcgaaattattccggtgttgatgatacagatgctgtttactttgggcctgggcattatcctcggggtattgaatgtttttgtccgtgacgttgggcaatttgttaacattctgctccagttttggttctggttcactcccattgtttatgtctctaaaactttaccagagtgggtttcgggactgctggcgtataacccaatggcaacaattataacgtcttaccagaatgtgatgttgtaccatcaaagccctaactggatggctttgctaccggtaaccatactatcccttattctgttcttatttgcctggcgcctgtttaagaaacactcagctgatattgtggacgagatttga

SEQ ID NO: 176821 - DNA, 1293 bp, Klebsiella oxytoca
atgaccattaaagttcagaacgtcggcaaggcgtataaatattactcatcgaaatggaaccgggttattgagaagctattaccgggcaataagtcgcgacacagcaaaaagtgggtactcaaggatattaactttaacgttgaacctggcgagtctatcggcatcgtcggggttaatggcgccgggaagagtaccttactaaaattgttaaccggtacgactcagcctactgaggggtcaattgaaattcatggccgggtggctgctcttttggagttagggatgggttttcatcctgatttcaccggtattcagaacgtttatatgtccggcttaatgatgggtttaaatcgcgaagatatcgagcgtttaatgccggaaatcgaggcctttgctgatataggcgactatataaaccagccggtacgcatctattcgagcggtatgcagatgcgtctggcttttgcggtcgccactgcttcccgtccggatattttgatcgttgatgaagccttgtccgttggtgattctcgtttccaggctaaatgttatgcacggattgctgatttcaaaaagcaggggacaaccttactgctcgtatctcatagcgccggtgatatagttaagcattgcgatcgtgctatcttcttgaaagatggtaatatttgcctcgatggcaccgcgcgtgaagtgaccaaccgctatcttgatgagttattcggtaaagcggacaaaaatgctgcgcaagtggctaaaaaaccaaaaaatagtgacagcggcgtccatatgtcacttgatgaggttgctgacgttttccatacccgtccgggctatcgacctgaagaatatcgttggggacaggggggcgcaaagatcattgattatcatatccaaagctccgggatagattatccaccgtcactgactggaaaccagcagactgacttcatgatgaaagttgtctttgaatatgattttgactgcgtagtgcctggtttgttaatcaagactttggatggtttatttctctatggtaccaattccttcctggcctcggaaggtcgggaaaatatttcggtatcacgtggggacgttcgggtatttaaattcagttttccggttgatttaaatagtggtgactatcttctgtcgtttggcatttcagagggaagcccgcaaaccgatatgacaccgctcgatcgtcgctatgactccatcattttgcatgtaactaagagcatggatttctggggtgtgattgacctgaagtcgacgttcaatagttaccaatga

SEQ ID NO: 176822 - DNA, 2058 bp, Klebsiella oxytoca
atgactactaatacacataaattggttagcgaattacctgagatttatcagactatttttgggcatcccgagtgggatggtgatgctgcacgcgactgtaatgaacggctcgcgctaattagtgaagaatatgacaccttgtccagagagttaggcaggccactgcgggttctcgatctgggctgtgcacagggattcttcagtttaagtctggcaaacaagggcgccagcgtattaggtatcgactttctacagcagaacattgatgtttgccaggcgcttgctgaagaaaatccacattgtgatgttagatttcaagtcgggcgcatcgaagacattatcagcaagctggaagaaaaccagttcgatcttgccattgggctaagtgtttttcaccacatagttcatctgcatgggattgctgaagtcagaacgctgctagagcgattggcaaacctgacgcaggcgatgattctcgaactcgctgttaaagaggaaccgctgtattggggggaatcccagccagaagatccgcgtgagcttattgaacagtgtgctttctatcgattgattggaagatttgacactcatttgtctaatatttcacgtccgatgtatattatcagtaaccacagggttattcttccggaatttaatcagccttttacttcatggcgcgacagtccttataccggggcaggttttgcgcataagcagagccgtcgctattatttctcttctgatttcatatgtaagttctatcgttatagtacggtaagtggtttactaactgataaggaaagcgagcgtaatcgtacagaactcgcccatgaagaagcttttctcaaatctccgccatctggcttaaaagtgcccgcgttgtttacttccggggggaatgaagttgcgggatggctggtaatggaaaaaatacccggagagctgttaaacgacgttctggccagcggacggcatattgatcgggaaaaagttatttccgatcttctcgatcagcttgtaattttggaagaacatggtctgtatcatgatgatttcagaacctggaatgttttaattgacgataatgacagcgctcgtttaatagattttggttcggttggaagtgtgcaacaagactgcagctggccagttaatattttccagtcgttcattatttttgtaaatgaactgtttggtgaaaataaatcctggggggggttctggcgttccgcgccattaagccctttccagttgcctgaaccgtattcaaattggttgacagcattctggaaacatcctgttggtgagtggaattttgctttactccaacgactctttaataccaaagatgctctaccggctgcgagctccgctatggatgcttctgatctatggatccgggctcaggagcccgtattgttggaaggtcaaacgcaaatacgtaatacggatgcgcgggttgtccgtctcgagtcgcaaatcaatgaactcacatccctgataaatatgatgggtgagagtattcagacgcttgaaaagcgtgagtatccgccacaagacgttatcaccgatgcacagcagtgtgtcgaggttgagccgagtcaaactgtagattctgaagaggttatgcaactccatactcagctcaatgatgcgcgacaagaagcagagaatctccgccatgaaatcgctaaaatccataatagccgctcatggaaaatgacgaagtggtatcgttatgctggcatgcagtactatttacttcgccagtatggcttcaggcagcgttgtaagcatttactgaaacgagtacttggcaaaatatttatttttctgcgtgcacatccacggctaaagcagagagctatcaatctactgcataaagttggaatttatgactttgcttatcgtttgcatcgtcgtatgaatcctggttcacataacccttatcataacgacccacaaaatcagtcgcagactgaaaaacagatattacatccagagttattgcctccggaagttaattcaatttttagcgagcttaaaaacaagagataa

SEQ ID NO: 176823 - DNA, 2523 bp, Klebsiella oxytoca
ttgcatattttgattgatgtacaaggatatcagtcggaaagtaaattccgtggagttggtcgcagcacttatgaaatgagtcgtgcgatcataaaaaatgctggccagcatcgagtcagcatcttaatgaacggcatgtatccgattgacagtattaatgaaattaaaaatagctggggtgatattctaccgcaggaagaaatgtttattttttcagctgcgggcccgacagctcttcgcgaccgtgaaaatcaaccgcggagtgttgccgctaaactagctcgcgatcttgctattgctaacatcaaccccgatattgttttcgtcattaatttctacgaaggttttgacgacagttacaccgtctcaattcctcaaactacagtgccgtggaagacagtttgtgtttgccacgatctcattccgttacttaataaagaacgctatctgggcgaaccgaacttccgtcagtattatcttgataaacttgctgaatatgaaaggtcggacgctatttttgctatttccagatcatccatgcaggaagttattgattatacatcaattcctgcagataagatcattaatatttcatctggagtcagcgattcatttaatattacagattatactcaagacgatatcaatgctttacgtaacaaatatcatctgcctcaagagtttattctctccttggcaatgatagagccgcgtaaaaatattgaggcgctgattcatgcgtatagtttattaccggatgccctgcaacagagttatcccttagttttagcttataaaattagcactgatgaaaaggaaaggctgtaccgcgttgcagagaactatggtttatcccgcaatcagctagtttttaccggtttcttaaacgacggtgaccttattgcactttacaatttgtgcaaaattttcgttttcccctctatacatgaagggtttggcctgcctccactagaagctatgcgctgcggcgcggctacgctgggttcaaatgtgaccagcttaccggaggtcatcggtatggaagaggctttatttaatccgcaggatgttcacgatatttgccgtgttatgcaaagggctttgaccgataatgcgttctactcagcgttgaaagctcatgctccgaagcaggcggcaaaattcacatgggatcacaccgcgcaactcgcattaaagggatttgaaaggcttgttgatacggcttctgcttcagagcctctggatatcactagtttcaccgcaaacaccattaatcaaattaaaaatattgcggaattaggtgaagccgaacgcttacaaacagcctgggctattactcgtaacagctttgccacgcatcagcgcaagctgctggttgatatttctgtccttgtcgaacatgatgcgaaaacggggattcaacgagtttcccgtagtatacttagtgagttactgaaatcaggcgttgctggttacaccgtcagtgcggtttattatcgaccgggtgaatgctatcgttatgccaacgaatatctgaatacccattttaacggccagttcgggcctgatgaaccggtactgtttaccaaagatgatattctggttgctaccgatctgactgcacatctgtttcctgaacttactgcccagctggattttattcgtttatccggcgccagggtttgttttgttgtgcatgatatcttgcctctgagaaggccggagtggagcgatgagggaatgcagcgcgttttccctatttggttatcctgcattgcgcagcacgctgaccgtctgatttgtgtttctgcaagcgtagcagaggatgtgaaatcgtggattgctgaaaatgccaactgggttaaacctaatccattgctgcaggtgagtaatttccatcttggcgccgacctggatgccagcgttccttctgtgggcatgccggataacgcgaatgacttgctgactaagatggctgctgaaccctcctttattatggtgggaacgatggaacctcgcaaaggccatgcgcagacgctagcggcatttgaggaattgtggcggcagggcaagaactacaatctgtttatcattggtaaacaggggtggcatgttgatgatttatgtgaacgtttacgtcaccacccacagctaaataagagattattttggctacaaaatattagcgatgagttccttgcgaagttgtatgctcaatctagtgcgttaatcttcgcatctctcggcgaaggatttgggctaccattaattgaagctgcgcagaaaaaattaccggtaatcatccgtgatattccggtgtttaaagagattgctcaagaacatgcattctatttctctggtgaacagccgggagatatttcaacagcgattgacgagtggttggaattatatcggaaaaatgctcatcctcgctctgaaaaaatcaactggttgacatggaagcaaagtgcagaattcctggtggagaatcttccggttattaaatctgacgcgaataaataa

SEQ ID NO: 176824 - DNA, 1146 bp, Klebsiella oxytoca
atgaaaattatatttgcaactgagccaatcaaatatccattaacgggtatcggtcgttattccctcgaactggtaaaacgattggcggtggccagcgaaattgaagagctaaaattatttcacggctcttcatttattgacagcattccccagattgaaaataaagcggatacccgagccagcaatcacggtaagctggcggcttttttacgccgtcagccgttattgattgaagcctatcgcgtgttgcatccgcgtcgccaggcgtgggcgctgcgcgattataaagattatatctatcatgggcctaacttttatctgccgcatcgtctggaacgtgccgtaaccacatttcatgatatctccatattcacctgtccggaatttcatccaaaggaccgggtgcgttatatggaaaagtcactgcgcgaaagtctggacacggcaaagcttattttgacggtatctgacttttcccgcagcgaaattatccggctgtttaactatcctgccgatcggatcgtaacgacccatcttgcctgcagcggcgactatattccgcgcagcccggatgaatgtctaccggttctgcagaaatatcagctggagtggcagcgctacgcgctttacatcggcacgatggagccgcggaaaaatattcgaggcctgttgcaggcgtaccagcttctgccgatggagacgcgcatgcgttacccgctgatcctcagcggttaccgtgggtgggaagatgatgcgctgtggcagctcgttgaacgcgggactcgtgaaggatggatccgttatctgggttatgtcccggatggcgatcttccgtatttatatgcggcagccagaacctttatttatccttcgttttatgaaggattcggattacctattcttgaagcaatgtcttgcggtattccagtagtatgctccaatgtcacatcattacctgaagtggcaggggatgcggggttgttatccgatcctaacgatgtagacgcgataagcgctcatatattgcaaagtctgcaggatgaatactggcgggagatagcagtagcgcgcggttttattcaggcacaacagttttcgtgggaaacctgtacggcccagacgatcgatgcctataaattactctaa

SEQ ID NO: 176825 - DNA, 1116 bp, Klebsiella oxytoca
ttgagagttttacacgtctataagacctattatccgaatacctacggtggtattgaacaggtcatttatcagttgtgccagggctgcgctcgtcgggggatcgcggccgacgtcttcaccttttccccggataaaaataccgggccagtggcttacgaacagcatcaggttatctataataagcaattaattgaaatcgcctcgacgccattctcactcggcgcgttaaagcgatttaataaaattaaagataactacgatattattaactatcatttcccgtttccctttatggatatgctacatctgatggcgcatcctaaagcgaaaaccgttgtcacctatcattccgatattgtgaaacaaaagcggctaatgaaattatatcaaccgctgcaggagcaatttctctccagcgttgactgcattgtggcctcatcgccaaactacgtagcctccagccagacgctgcaaaaatacctcgataaaacggtggtcattcccttcggcctcgagcaaaaggatgtgcagcataatccgcagcgcctggcttactggcgagagaaagtcggcgagcgctttttcctttttgtcggcgcatttcgttactataagggattgcatattctgctggatgccgcagagcgcagtcgactgccgatcgttattgtcggcggcggcccgcttgaagcggaagttcgccgtgaggctgaacagcgcggcctgaataacgtgatattcaccggcatgctgaatgatgaggataaatatattctctttcatctgtgccgcggggtggtctttccctcgcacctgcgctcagaggcgtttggcattaccttactggaaggggcgcggttcgcccggccgctgatctcgtgtgaaattggcaccggaacctcgtttatcaaccaggataaggtcaatggttgcgtgatcccgccggataacagcgcagcgttggtcgaagcgatgaacgaactgtggcacagtgatgaaacggcagcgcgctatggcgcaaattcacgtcgccgctttgaggagatgtttaccgccgaacatatgattgatgcctacgtgaatctctacagcacactgctggagcagaaaccctga

SEQ ID NO: 176826 - DNA, 597 bp, Klebsiella oxytoca
atgttaagtgaacagctggattggcaaaaaaccgacggtctgatgccggtcatcgtgcagcacgccgtttccggggaagtgctgatgctgggctatatgaatcaggatgcgctggcgaaaaccgaagagaccggtaaagtgaccttttattcacggaccaaacagcgtctgtggaccaagggggaaacgtcgggcaatttcctcaacgtggtgagcatcaccccggattgcgataacgacaccctgctggcgctggtaaatccgattggcccaacctgccataaaggcacatcgagctgcttcggcgaaaccggccaccagtggctgtttctctaccagctggagcaactgttggccgaacgcaagcacgctgacccggagagctcttacaccgcgaagctgtacgctagcggcaccaagcgcattgcccagaaggtgggagaagaaggcgttgagaccgcgctggccgccacggtgcatgaccagttcgagctgaagaatgaagcgtcggatttgatgtatcacctgctggtgctgctgcaggatcaggggctgaatttaacggacgtgattaacaatcttaagagccgtcactga

SEQ ID NO: 176827 - DNA, 777 bp, Klebsiella oxytoca
atgctggcaaaacggataatcccctgtcttgacgttcgcgacggccaggtagtgaaaggcgtgcagttccgtaatcacgaaatcatcggcgatattgtcccgctggcaaaacgctatgccgacgaaggcgcggatgagctggtgttctacgatatcaccgcctcgagcgacggtcgcgtggtggataaaagctgggtatcgcgcgttgcggaagtgatcgacattcccttctgcgtcgccggcggcattaagtcgctggaagaggcggcgcaaatcctctcctttggcgcggataaaatctccatcaactcccctgccctggcggacccgacgctgattactcgcctggccgatcggttcggggtgcagtgtattgtcgtgggtatcgatacctggtttgacgccgaaagcgggaagtatcacgtcaatcaatataccggcgatgagagccgtacgcgggtgacgcagtgggaaacgctggactgggtgcaggaagtacaaaagcgcggggccggcgagatcgtcctcaatatgatgaatcaggacggcgtgcgtaatggctacgatctgcagcagttaagcaaggtacgcgccgtgtgccacgtgccgctgattgcatccggcggtgccgggactatggagcacttcctggaagccttccgcgacgccaacgtcgacggcgcgctggccgcctcggtgttccacaagcaaattatcaatattggtgaactaaaaacgtacctggcagcacagggcgtggagattagggtatgttaa

SEQ ID NO: 176828 - DNA, 738 bp, Klebsiella oxytoca
atgatcattcctgctttagatttaattgacggtacggtcgtccgtctccatcagggcgattatggccagcagcgcgactacggtaacgatccgctgccgcgcctgcaatcctatgccgcgcaaggggccgaagtactgcatctcgtcgatctgaccggagcgaaagatccggcgaagcgccagatccccctgctgaaaacgctggttgccggcgtgaacgtgccggtgcaggtcggcggcggcgtgcgcacggaagaagacgtggccgccctgcttgacgcgggcgtggcgcgcgtggtggtgggctcgacggcggtgaagtcgccggaggtggtgaaaggctggtttaagcgttttggcccgcagcatctggtgctggcgctggacgtacggatcgatgcgcaaggcagcaagcaggtggccgttagcggctggcaggagaattccggcgtaaccctggaggagctggtggagagctatcagtccgtcggcctgcagcacgtgctatgtaccgatatttcccgcgacgggacgctggccgggtctaacgtctcgctgtatgaagaagtctgcgcccgctatccgcaggtggcgtttcagtcctccggcggcattggcgatctgcatgatatcgccgcgctgcgcggaacaggggtgcgcggggtgattgtcggccgggcgctgctggaaggtaaatttaacgtaacggaggccattcaatgctggcaaaacggataa

SEQ ID NO: 176829 - DNA, 591 bp, Klebsiella oxytoca
atgaacgtggtgatcctcgataccggctgcgccaatctcaattcggtgaaatctgcggtgagccgccacggctacgagccgcaggtcagccgtgacccggacgtggtgctgcgcgccgataagctgtttctgccgggtgtagggacggctcaggcggcaatggaccagctgcgcgaacgggatttaatcgatctgattaaagcctgcacccaaccggtgctgggcatttgtctcggtatgcagctgctgggaaaacgcagcgaagagaataacggcgtcgacctgctgggtattatcgaccaggacgtgccaaaaatgaccgaccacggcctgccgctgccgcatatgggctggaaccgggtatatgctaaagcgggcgatcgtctgtttcgcggcattgaagacggggcgtatttttacttcgtccacagctacgcgatgccggtcaacgttaacaccatcgctcagtgcagctacggcgaggccttcaccgcggcggtgcagaaagataacttttttggcgtccagttccaccctgaacgctccggcagcgccggggcgcagctgctgaaaaacttcctggagatgtga

SEQ ID NO: 176830 - DNA, 1068 bp, Klebsiella oxytoca
atgacccagaagtttctctttattgaccgtgacggtacgctgatttccgagccaccggttgattttcaggtagaccgcttcgataagctggcgtttgagccgcaggtgatcccggccctgctcaagctgcagcaggaagggtataagctggtgatgatcaccaatcaggacggactgggaaccgccagcctgccgcaggacgagttcgacggcccgcacaacctgatgatgcagatcttctcctcacagggcgtcaactttgacgaggtgctgatttgcccgcatctcccggcggataattgcgactgccgcaagccgaaaaccaggctggtgctgccgtggctggagcaaggggtgatggacaccgccaatagctacgtgattggcgaccgggccaccgacattcagctggcggataacatgggcattaccggactgcgctacgatcgcgaaacgcttgactggccgaccatttgcgaacagcttacccgtcgcgaccgctacgcccacgttgagcgcatcactaaagagacccaggtggatgtcaaagtgtggctcgatcgcgaaggcggcagcaaaatctccaccggcgtcggcttcttcgatcatatgcttgaccaaattgccacccacggcggcttccgtctggaggtcaaggtcggcggcgacctctatattgacgatcaccacaccgtggaagacaccggccttgcgctgggcgaagcgctgaagctggcgctcggcgacaagcgcggcatcgcccgtttcggctttgtgctgccgatggacgaatgcctggcccgctgcgcgctggatatttctggccgcccgcaccttgaatacaaagctgattttacctatcagcgcgttggcgatctgagcaccgagatggtcgagcacttcttccgctcgctctcctataccatggcggtcactctgcacctgaaaaccaagggcaaaaacgaccaccaccgcgttgagagcctgtttaaggccttcggtcgcacgctacgccaggccatccgcgtccagggcgacacgctgccatcttcgaaaggggtactctga

SEQ ID NO: 176831 - DNA, 1062 bp, Klebsiella oxytoca
atgagcatcgaagatttagcccgcgccaacgtccgcgcgctgacgccgtatcagtctgctcgccgtctgggcggtaagggcgacgtctggctgaacgccaatgaattccccaccgcggttgcgttccagctgaccgaacagacgctgaaccgctatccggaaccgcagccgaaagccgtcattgaacgctatgcgcagtatgctggcgttaagccggagcaggtgctggtcagccgcggcgccgacgaaggcattgaactactgatccgcgccttctgcgagccgggccaggacgcggtgctctactgcccgccgacctacggcatgtacagcgtcagcgccgaaaccatcggcgtgacctgtcgtacggtgccgacgctcgccgactggcagctggatctgccgggcatcgcagccaatcttgacggcgtgaaagtgattttcgtctgcagcccgaataacccgaccggacagattatcaacccgaaagatttccgcaccctgctggagatggcgcgcggtaaagccatcgtggtcgcggatgaagcctatattgagttctgcccgcaggcgacgctggcaacctggctgaacgagtatccgcatctggtggttctgcgcacgctgtccaaggcgtttgccctggctggactgcgctgcggctttaccctcgccaacgtcgaggtcattaacgtactgctgaaagttatcgcgccctatccgctctcgacgccggtcgccgatattgccgctcaggcgctgagtgcggaagggattgccgccatgcgcgagcgcgtggcgcagatcctcaacgaacgcgattatctggtcagccagctgcgcagcattgcctgcgtggaagaggtgttcgcttccgagaccaactacgtactggcgcggatcaccgcgtccagcgcggtgtttaaatctttgtgggatcagggcattatcttacgtgaccagaataaacaaccttcattaagcggctgtttgcgtatcactatcggtacccgtgcagagagccagcgcgtcattgacgctttgactgcggagaatgtatga

SEQ ID NO: 176832 - DNA, 1305 bp, Klebsiella oxytoca
atgagcttcaacacaattatcgactggaacggctgtggcgcagaacaacagcaacaacttttaatgcgtccggccatttccgcctccgagagcatcagcaaaacggtggcggagatcctgaataatgttaaagacaacggcgatgcggccctgcgtgaatacggcgcaaagttcgacaaaaccgaggtcacagcgctgaaagttagcgaagaagagattgccgccgccggtgcgcgcctgagcgacgagctcaagcaggcgatggccgtagcggttagaaatatcgaaacctttcacaacgcgcagcggctgcaggccgtagatgtggaaaccctgccgggcgtgcgctgccagcaggtgacccgccctatcgcctccgtcggcttatatattcccggcggctcggcgccgctgttctcaacggttctgatgctcgccacgccggcgcgcatcgcgggctgccagcaggtcgtgctgtgctcgccgccgccgattgccgatgaaattctctatgccgcccagctatgcggcgtgcgcaatatctttaacgtcggcggcgcgcaggcaattgccgccctcgccttcggcacggagtcggtgacgaaagtcgataaaatctttggcccgggcaacgccttcgtcaccgaggccaagcgtcaggtgagccagcgtcttgacggcgcggctatcgatatgcccgccgggccatcggaagtgctggtgatcgccgacagcggcgcaacccctgatttcgtcgcctctgacctgctttcccaggcggagcacggcccggattcgcaggtgatcctgctgacgccggatagcgcgatggccacccgcgtcgccgaagccgttgagcgccagctgtccgcactgccgcgtgcggaaaccgcccgtgaggcgctctccgccagccggatcatcgtggcccgcgatatcgcccagtgcgtggaaatatccaaccagtacggccctgaacacctgattattcagacccgcaacgcccgcgaactggtcgatggcatcaccagcgccggctcggtgttcctcggcgactggtcgccggaatccgccggggattatgcctccggaaccaaccacgtgctgccgacctacggctacaccgcgacctgctccagcctcggcctggcggactttcagaaacgcatgaccgtgcaggagctgtcccgcgacgggttcgccgctctcgcttccaccattgagatactggccgccgccgagcgcctggacgcccacaaaaacgccgttacgctgcgcgttgcagcccttaaggagcaagcatga

SEQ ID NO: 176833 - DNA, 900 bp, Klebsiella oxytoca
atgttagacaatagtcgtttacgcatagctattcagaaatcagggcgtttaagcgaagattcacgcgaattactcagccgctgcggcatcaaagtgaatctgcacacccagcgcctgatcgcgatggcggaaaatatgccgatcgatattctgcgcgtgcgtgatgacgatattcctggccttatcatggacggcgtggtcgatttggggattatcggtgaaaacgtgctggaagaagagctgctgagccgccgcgcccagggcgaagatccgcgctactttaccctgcgccgcctcgacttcggcggctgccgcctgtcgctggcgaccccggcggatgaaccctgggacggccctgcggcactggacggcaaacgcatcgcgacctcttacccgcacctgctgaagcgctaccttgaccagaaaggcatctcctttaaatcctgcctgctgaacggctcggttgaagtggccccgcgcgctggcctggccgacgcgatttgcgacctggtctctaccggcgcgactctcgaagcgaacggcctgcgcgaagtggaagtcatgttccgctccaaagcctgcctgatccagcgcgacggtgagatggtggatagcaaacagcagcttatcgaccgcctgctgacccgtattcagggcgtgattcaggctcgcgaatcgaaatacatcatgatgcacgcgcccaccgagcgcctggaagaggttgtcgccctgctgcccggcgccgagcgtccgaccatcctgccgctggcgggggacaagcagcgcgtcgccatgcacatggtcagcagcgaaaccctgttctgggaaaccatggaaaaactgaaagcgctgggcgccagctccattctggttctgccgattgagaagatgatggagtaa

SEQ ID NO: 176834 - DNA, 825 bp, Klebsiella oxytoca
atgaagaaggtcgcaattgtaggattaggatggctgggtatgccgcttgcgctgtcgttgatgtcgcggggatggcaggtcaccggcagtaagaccacccaggatggcgtggaggcggcgcggatgtgcggtatcgacagctacccgctgcgtctggagccgcagctggtctgcgacgctgaggacctggatgcattaatgaacgtcgacgcgctggtgattaccctgccggcgcgccggaccgggccgggagacgacttctatcgtcaggcggtacaggaaatcgttgataccgcgctcgcgcatcacgtgccgcgcatcctgtttaccagctcaacttccgtctacggcaacgccagcggcacgctgaaagagagctcgccccgtaatccgcaaaccgccagcggacaagtgctgaaagagctggaggactggctgcacaatcttcctggcacctcggtggacattctgcgcctttccgggctggtggggccgtctcgtcacccggggcgcttctttgccggaaaatccgcgccagacggccagcacggcgtgaacctggtgcatctccaggatgcgatcgccgcgatcgagctgttattgcagtccccgaaaggcggacgcatctataatatatgtgcgcctaagcatcccgcgcgcggcgtcttttatccgctgatggcccgggagcttgggcttcccgttcccgtcttctctgataacccggaaaacggtagcggcaagatcgtggatggcagccgtatttgcaacgaactggggtttgaataccaataccccgacccgctggtgatgccgatggagtga

SEQ ID NO: 176835 - DNA, 891 bp, Klebsiella oxytoca
atgaaaccactgctggatgtgctcgtcattcttgatgccctcgacaaagagggcagttttgccgccgcctcggcaaagctctataaaacaccctccgcgctgagctataccattcataagctggaaagcgatctcaatattcaactactcgatcgcagcggccaccgggcgcgctttacccgtaccggtcagatgctgctggaaaaagggcgcgacgtgctgcataccgcccgcgagctggaaaagcaggccgtcaggctgcatcagggctgggaagacaggctggtgctgaacgttgatagcggtttcccgtttcacctgttggcgccgctgataacggcgttttatcgccagcatcacgccacccgtctggaatttcgccgcgataccctcgcagcaggctggcagaccctggcggaagggcgggcggatctgctgctcggggttcagagcgacccgccggcgctaagcggctacggttgtctgcttctcggtgaactgacgcaggtatttgtcgtttcgccccagcatccgctggcgcaaattaccgaaccgctgagctggcgcacgttgcgccgttatcgcgcgattgccaactgcggctcgttgccgcaggcagaaaatcaggacagcctgacggtattcgatctttccggccagctgacgctgctttgcgccgggctgggatggggctatttgccgctatttcaggtgcagcctttattagcgcgcggcgagctgcgaataattcaaaccaggatggttgcgccggtaaatcgcgcgtggattggctggcatgaagagggcggtggtctggcgggcgagtggtggcgagcagagatattagcaaatagtgctatccatcaggtctataatactaaaatcgtatga

SEQ ID NO: 176836 - DNA, 1359 bp, Klebsiella oxytoca
atgtcgcataacgctactccaaaaacctctcgcgtggaattacgtaaaacgcttacgttgattccggttgtaatgatgggccttgcctatatgcagccaatgacgctgttcgatacgtttggtatcgtctctggattgactgatggtcacgttgcgacggcttacgccttcgcgctgatcgccattctcttcacggcgctgagctacggtaaactggttcgccgttttccgtcggcgggttccgcttatacctacgcacagaaatccattagcccggccgttggctttatggttggctggtcatcgctgctggactatctgttcatgccgatgatcaacattctgctggcaaaaatttactttgaagcgctggtgccttccattccgtcgtggatctttgttgttgcgctggtggcctttatgaccatctccaacctgcgcagcattaagaccgtggcgaacttcaacaccctgatcgttatcctgcagatgggtatcgtagcggtgattgttggcctgattatctacggcgttatgcacggcgaaggcgcgggcacgctgaccagcacccgtccgttctggtctgaaggcgcgcacgtggtgccgatgattaccggtgcgaccattctctgcttctcgttcctcggcttcgacggtatctcttcgctgtctgaagaaaccaaagacgcagagcgcgtgatcccgaaggctatcttcctgacggcgctgattggcggcctgatctttatcggggcttcctacttcctgcagctgtacttcccggatatctcgcgctttaaggatccggacgcatcgcagcctgaaatcatgctgtacgttgcgggcaaaaccttccagtggggcgtgctgattttctccagcgtcaccgtactggcgtccggcatggctgcgcacgcgggcgtttcccgtctgatgtacgtgatgggccgcgacggcgtgttcccgacgcgtttctttggttacgtgcatccgaaatggcggactccggcgtggaacgtactgctggttggcgcgattgcgctgctggcgattaaattcgacctcgtgacggcaacggcgctgattaacttcggtgcgctggtggcgttcaccttcgttaacctgtcggtgatctcgcagttctggatccgtgaaaaacgcaacaagacgctgaaagaccacttcaactatctggttctgccggtgtgcggcgcgctgaccgtcggcgcgctgtggatcaacctggaagagagctccatggttctcggcctgatctggggcggtattggtctggtctacctggcctgcgtgaccaaaagcttccgcaacccggtaccgcagtacgaagacgttgcctga

SEQ ID NO: 176837 - DNA, 312 bp, Klebsiella oxytoca
atgatcgccaatcaccccgaacgtgaacaaattcgcctcgaaaatgtgcttttcgccctcggtaacccgctgcggcttgagattatccggatccttgccgacggcagcgagcagagctgtaacgccctgcgtcatgaagatgtggcgaagtcgaccatgactcaccactggcgcgtcttgcgcgacagcggggtgatctggcagaggcctcaggggcgggagaatttgatttcgctgcgccgggaagatttagacgcgcgctttcccggcctgctggatacgctgcttaaggtgatgcagcaggagaagtaa

SEQ ID NO: 176838 - DNA, 2103 bp, Klebsiella oxytoca
atgccccgacccatccccctcgaacgttatcgcaacatcggtatctccgcgcatatcgatgccggcaaaaccaccaccaccgagcgcatcctgttttacaccgggatgagccacaagctgggggaagtacacgatggcgcggcaactaccgactggatggcgcaggagcaggagcgtgggatcaccattacgtccgcggcggtgagctgcttctggcccggtatggaccgcagctttgagccacaccggattaatatcatcgatacccccgggcacgtggatttcaccattgaagtcgagcgctctatgcgcgtactggacggtgcggtcatggtttacgactccgtgggcggcgtgcagccgcagtcggaaaccgtctggcgccaggcgaacaaataccacgtcccgcggctggccttcgtcaacaagatggaccgccccggcgcggattttttccgcgtggtgcagatgatgaccgatcgcctgaaggcgaacccggtaccgattgtgatcccggtgggcgccgaagagcacttcaccggcgtggtggacctcatcaaaatgcgcgctattttgtgggatgacgctacccagggaatgaccttcagctatgcgccggtgcccgacgaactgctggaaaccgcccggttgtggcgggaaaaaatggtttcggcggcggcggaagccagcgacgaactgatggataactatcttgaaaccggcgagttgagcgaggcggaaatcgtcgccggactgcgtcagcgcacggtgaagggggaaatccaggcagtgctgtgcggcagcgcgtttaaaaacaaaggcgtgcagcggatgcttgatgcggtggttgagctgatgccgtcgccgctggatattccggcgattcagggcgtggatgagaaagggcggcccgctgaacgtcacccgagcgacgacgaaccgttctcggcgttggcatttaaactgatgaccgacccctacgtcggccaattgacctttatccgcgtctattccgggacgctgaaaaaaggcgatgcggtgtggaatccggtgaaaggcaagaaagagcgcatcggccgcatcgtgctgatgcaggccaacgatcgccatgaagtggacgaactgcacgccggagatattgccgcctgcgtcggcctgaaggatgtcaccaccggcgacacgctgtgcgacccggatgcggtgattacccttgaacggatggagttcccggagccggtgatttcgctggcgattgaaccgaaaaccaaagccgatcaggagaaaatgggcatcgccctgcagcgattggcggcggaagatccgtcgtttcgtctgcatactgacgaggagtccggccagacgatcatttccgggatgggtgaactgcatctggagattatcgttgaccgcatgaagcgcgagtttggcgtcgaggcgaatatcgggcgtccgcaagtgacctatcgcgagacgatccgcaaaacggtcaaagaggtggaaggcaagtttgttcgccagtccggcggtaaagggcagtacggtcacgtggtgctgagccttgaaccgctggcgccgggaagcggtttcgtgtttgaggacgcgaccaaaggcggcgtggtgccgcgcgagtacatcccttcagtcgaaaaagggctgcgcgaagcgatgggcaccggcgtgctggcgggatatccggtggtggatattaaggcgaccctgacgtttggttcgtatcacgacgtcgactcctcggagatggctttccggatggcggcaatattcggcttcaaggaaggggcgcgcagggccgacccggttattcttgaaccggtgatgcacgtggaagtggagacctcggaagagtacgccggcaatattatgggcgatctctcttcccggcgcgggatggtgcagggaatggaggagcggttcggcagccagattattcgcgccgacgtgccgctggccgagatgtttggctattccactacgctgcgttcaatgtcccagggccgggcgacctacagcatggagttccaccactacgcggaagccccgcgcaacgtggctgaggcgattatcgccagccgcgccaaaggctaa

SEQ ID NO: 176839 - DNA, 1425 bp, Klebsiella oxytoca
atgcaagatagcgccaaccagcccggatttttgtttcacgattacgagaccttcggcaccagcccttcgctcgaccggccgtcgcagtttgccgccatccgtaccgatgaagacctgaatgtcgtcggcgaacctgaagtgttctactgcaggctcgccgacgactatctgccgcagccgcaggcggtaatggtcaccgggataacgccgcaggaggccaatgccaaaggcgacaacgaagccgcgtttgcccgccgcgttcacgatctgttcacggtgccgaaaacctgcatcgtcggctacaacaacgtgcgcttcgatgatgaagtcacgcgcaatatcttctatcgcaatttttacgatccttacgcctggagctggcagcatgacaactcccgctgggatctactggacgtgatgcgcgcctgctatgcgctgcgccccgaggggatcaactggccggaaaatgatgagggcttaccgagcttccggctggagcatctgaccgtcgctaacggcatcgaacacagcaacgcccacgacgcgatggccgacgtttacgccactatcgcgatggcaaagctggtgaagactcagcagccgcgcctgttcgactatctttacgcccaccgcaacaagcgcaagctggcgacgctgattgacgtgccgcagatcaagccgctggtgcatgtttccggtatgttcggcgcggcgcgcggcaacaccagcctggtcgccccgctggcgtggcacccggataaccgtaacgcggtgattatggtcgacctggccggtgatatcgcccctctgctggatctggatgccgatgccctgcgcgaacggctgtatacgccgaaaagcgagttgggcgatctggctgcggtgccgatcaagctggtccacctcaataagtgcccggtgctggcgcagcaaaataccctgcgcccgcaggatgctgaccggctgggcatcaatatccagcgctgtctggagaacgcccagcggctgcgggctaatccacaggtgcgcgagaaagcggtggcgatttttgccgaagcggagccgtttgtgccgtccgataacgtcgatacgcagctgtataacggctttttcagcgatgccgaccgcgcggcgatgaaaatcgtactcgagacggagccgcgcaatctgccggcgctggacattacctttgctgataagcgtattgagcgtctactgttcaactatcgcgcgcgcaattacccgggcacgctggatgaagccgagcagcagcgctggttggagcaccgtcgccaggtgtttacgccagagtttttgcaggcctacgccgatgagctacagatgctgtatcagcaatatgcggatgataaagagaagctggcgcagctgaaggcgctgtggcagtacgcgcaggatattgtttga

SEQ ID NO: 176840 - DNA, 1167 bp, Klebsiella oxytoca
ttgaaaggccgtttgtttattgctgtatctttgctcgctgcgagcgtttcttgcgcatttgccgccaatgattttcccgtcaacgtgacgccgccttccattcaggccggttcctgggtgctgatggattacaccaccggccaggtccttaccgccggtaacgagcatcagcagcgcaatcccgccagcctgaccaaactgatgaccggctatgtggtcgatcgcgccatcgacagccaccgcatcacctttgacgacatcgtcaccgtcggtaaagacgcctgggcgcagggcaatccggtctttaagggatcttccctgatgtttcttaagcctggcgatcgggttagcgtacgcgacttgagccgcgggctcatcgttgactccggcaacgatgcctgcgtggcgctggcggattatgttgccggcggccagccgcagtttgtcgcgctgatgaacagctatgtggacaaactgcatttacaggatacccattttgaaaccgttcacggcctcgacgcgccggggcagcatagctcagcctacgatctggcggtactctcgcgggcgattattcacggcgagccggacgtttatcatatgtacagccagaagagtctgacgtggaacggcattacccagcagaaccgcaatggtctgctgtgggataaaactatgaacgttgatggtctgaaaaccggccatacctccggcgctggcttcaatctgattgcctccgcggtggacggccagcgccggctgattgcggtagtcatgggggccgacagcccgaaagggcgtgaacagcaggcggcgaagctgctgcactggggccagcaaaacttcgataccgtccaggtcctgcaggacggcaagcaggtcggcgttgagcgtatctggtatggcgataaagagcagattaggctggggaccgatcaggacttctggttagcgctgccgaaatcggaagtctcgcgcattaaggcgaaatatgtgctggataaaaaagtgctggaagcgccgattgccgcccaccagcgggtcggtgaaatctctctttatgatggcgataaagtcgtcgcccactggccgctggtgacgctggaaagcgtcggcaagggcggcctgctgtcgcgctttagcgattatctgcatcaaaaactgtaa

SEQ ID NO: 176841 - DNA, 1437 bp, Klebsiella oxytoca
atgaaatactttgcgcgtagtgcgctttctctgggactcttcgccgtttttagcacctctggttttgcctctggcctcgttctggccgataacgaattccgcaatgatttagcctggttatccgaccgcggaaccctctctttaagtttgtccacctggcctttgagcgaagaagagattaaccgtgcgctggtcaatgcccatccgacaacatccgccgagcgggtggttctgagtcgggtaaatcagcgtttaagggcgctcaaagccgacgtgcgcgttaccggttacagttccactgataagccgggaactccgcaggggtttgcccagtcttatcctgctgaccagtcgctttctctcgccctgaacaacagcggtgaatggtgggatctgcatctacagggcaatgttgaaggcgacaaacgcatcgacaacggctccagcgtaaacgccaacggcgcatacggcgcggtaaaactgtggaaccagtggctggcgttcgggcaaatcccgcagtggtggggaccgggttatgaagggagtttgattcgctccgatgccgcgcgtcccatgaccggttttctgctgcagcgtgcagaacagcgggcgccggaaacctcatggctacgctggattggcccgtggcagtatcaactttccgccagccagatgaaccagtacgccgccgtaccgcataccaaaatcttcggcggtcgcctgacgttttcgcccatctcctcgctggaactgggcgcttcgcgcgttatgcagtggggcggcgaagggcgaccttcatcattcagcagcttctgggacggcctgaccggcaatgataacaccggtgaatcggccgacgatcccggcaatcagctggccggttttgatttcaagctgaagctggcgccaaccttgggctggccggtgagcatttacggccagatgatcggcgaggatgaagccggatacttgccctcggcgcacctctaccttggcggcgtagaagggcaccatcagtggaacagcaatgcggttaactggtatctggaagcccacgatacccgctcgaatatgggacgcaccaactatatctataaccactttatctataaagatggctactatcagcagggctacccgctgggcgatgcgatgggcggcgatggacgcctgtatgccggtaaggtggagctggtcaccgaagcaaatcagcgctggagcgcgcgcctggtctacgcggaagtcaatccgaagaaccaacgaatcaataaagccttcccgcacgccgacacgctgaagggcgtacagctgggctggagcggcgatgtcatgccgacggttcgcctgaatacctccatgtggtacaccgatgcaaaccacagcgccagcgacgatgttggggccagcatcggcattgaactgccgttcagtttataa

SEQ ID NO: 176842 - DNA, 474 bp, Klebsiella oxytoca
atggactataacgttaaatccgtaggcaagaagaaaattgccggttttcatctggtcggcccctgggaacagacggttaaacaggggtttgaacagctgatgatgtgggtcgacaacagccaggttccggcgcaggagtgggtggccgtttactacgacaatccagacgaagtcacggcggaaaagctgcgctgcgacaccgccgtcacggtggcggaagactatcagatccctgaaggaagtgaaggcgtgatgatgaccgaaatcgccggcggcgagtatgccgttgcccgcgccagagtcgagaatttcgattttgcgactccgtggtatcagtttttcgaaagtctgatgcaaagcacagagcatcagatggcgatgaagccctgttttgaagtctaccttaacgatggtaaccaggacggctactgggacattgatatgtatatcgcggttgaacccgtagtgaagtga

SEQ ID NO: 176843 - DNA, 1059 bp, Klebsiella oxytoca
gtgcgcgcggataaatcacttaagccatttgaaattcggctgtatcgccattaccgcatcgtccatggcgtgcgaatagcattggcctttgtgctcacctttgtgctggtgcgcctgcttaacgtgccggaaggtacctggcctctcatcaccctggtggtggtgatggggcctatctccttctggggaaacgtcgtcccgcgcgcgtttgagcgtatcggcggcacgatcctcggctcggcgctcgggctggtggcgctcaagctggaacttatctctctgcccattatgctgctgtggtgcgcggtggcgatgttcctctgcggctggctggcgttgggtaaaaagccctaccaggcgctgttgatcggcatcacgctggcggtggtggtcggcgcgccgccgggcgatatgacgaccgcgctatggcgaagcggcgacgttatctttggttccctgctggctatgctgtttaccggtatctggccgcagcgggctttcctgcactggcgcatccagatggccagctacgtcaccgccttcaaccgtctgtatcaggcgggcttctcgccgaacctcgtcgagcgtccgcgtctggaaaagcatatgcagaaggtgcttaacgatgtggtcaaaatgcgcggattaattacgcctgccagcaaagagacgcatatccagaaggccatctttgaagcgatccagaccgttagccggaatctggtgtgcatgctggaactgcaaatcaacgcctactgggcatcgcgacccggccattttgttatgctgaatgcccatacgctgcgcgaaacgcagcaaatgacccagcagacgttgctgactatcgcccatgcattgtatgagggcaatccgcagccgattcttgctaacaatgaaaagctcaacgaaattgtggccgagctgcgccagctcatcaaagagcagcaggacgacaatttctctgaaacgccaatccatggttatgtctggctaaccatcgaactggcccggcagcttgagctgctgtcgcatttaatctgccgggcgttgcgtaaataa

SEQ ID NO: 176844 - DNA, 336 bp, Klebsiella oxytoca
atggaaacaactaagccttctttccaggacgtactggagtttgttcgcctgtatcgtcgcaagaataaactgcagcgtgaaattcaggacgttgagaaaaagatccgtgataaccagaagcgcgtactgctgctggacaacctgagcgactacatcaagccgggcatgagcgttgaagctatccagggcatcattgccagcatgaagagcgattacgaagatcgcgttgacgactacatcattaaaaacgccgagatctccaaagaacgtcgcgatatctctaaaaagctgaaagcaatgggcgaagcgaaagtagaagataaatctgccgagtaa

SEQ ID NO: 176845 - DNA, 741 bp, Klebsiella oxytoca
atgattaagtcattttttgccgcattatcgtttatcagccgcttgccggtcccggcgcgtttgtctcaggggctagaaattgaacaatatcaacgcagtatcgttactttcccctttgttggcctgctgctgggagcgatcgcgggggttgtcgtgatactgctccagccctggtgcggcggcccgcttgccgcgctgctcggcgtgctggcgctggcgctgttgaccggcggcttccatctggatgggctggcggatacctgtgatggcattttctctgcccgccgccgcgagcggatgctggagattatgcgcgacagtcggttgggcactcacggcgggctggcgctgatttttgtgctgattgcaaaagtgctggtggtcagcgaggtcacgctgcgcggtacgtctgcggttgccgccctggcggccgcctgcgccgtggcccgcggtatggcggtgctgctgatgtaccgtcagcgctacgcgcgcgaagaggggctgggcaatctgtttatcggtaaaatctcgctgcaacagacgctgatcgccatggggatcgctctggcgctggcgacgctgctgctcggcgttaacggtctgcgcgcagcgcttatcacgctggtgctggtctgggcgctaggccaggcgctgaagcgtactctgggcgggcaaaccggcgacactttaggcgcggcgattgagctcggtgaagtcatatttttgctggccctgctgtaa

SEQ ID NO: 176846 - DNA, 1110 bp, Klebsiella oxytoca
ttgaataacaagataaaattagagaaagaaatcgcatgggccagccagaatatgccgcgtacgctgcgccaggtcgccgccctgcccgacctcagccaggttcgtctggcctgctgtatgcacctggatatgaaaatgatcccactggtgcagggaattctggaaaaaggggcgaaggttttcctgaccacctgtaacccaaccacggtgcaggatgatgtggtcgcctggctggtggagcgcggcgctgaggcttgcgcatggcgtgatatgagcgatgccgactggcagcaatcgtgggaaaaagcgattgcctggcagccgacgcatctgtgcgaaatgggcgcggatataacaaccctactgcatcagcgtggggagttcggcaatgttgtcgccgggcttgaagcgacaggctctggcgttagccgcctcggcgatattcggcccggctatccgatttttaactgggatgatttgccggttaaggaaggtctgcataaccgtcatatggtcggcctgaccgcgtggcataccttcttccagacgacccacctgaccctgcatgagaaaaaagtactggtcatcggctatggtctggtcggccagggggttgcggcggcggcgaaggccttcggcggccaggtcatggtggcggaaatcgacccggcacggagattacaggctgcctacgacggctggcacgttgttgaattacaggaggcgatagcttcggcggacgtggtggccacggctaccggcggcaaaaaagtcgttaacagccaggcgcttgataaatgcaaagatggagtgtttatcctcaacgtgggtcacgtggcggaagagattgattgcgagtacctgcgccagttcagccaggaagaggtcatgccctatatcaacgcttaccggatgggccagaaaacgatctatctgatggcgaacggttcaatgctcaacctgaccgcgggttttggcgatagcctgaacgcctttgacgtcaccctggcggtgatggccagcggcatccagcatattgtgaccgacggcatgacggcgccggcagacgtttatctgctgccgcaaagcgtatggcaaaaagcgctgtaa

SEQ ID NO: 176847 - DNA, 738 bp, Klebsiella oxytoca
atgttaagcgttttacccggatcgctcttttcacggatccgcattttacttggccgccttaagccgcacgcgttaccggtcgccagaaaacatatcgttctggcgtcaataggcgccgggacggggctggcggtcaccagtatgtttagccactggctattaggcgaggtcaatatctggtttatcgccccgatgggcgcgtcggcggtgctgctgtttggcgtgccgagcagtccactggcccagccgtggtcgatagtcggcggtaatgtcctttcagcgctgattggcgtgaccgtgggaatcgccatcccgaacctggccctggcctgtggcgtggcggcagggttggcgatcgccggcatgtatttcctgcgctgcctgcatccgccgggcggcgcggtggcgttaacggcgatcctcggcggggcggggatacagagcgaaggctatcactttgttctgaccccggtgttactcaactcattgatgctggcgatgctggccattgtttttaataacctggtcggacggcgctacccgcatccgctggcggcggaggaagtgaaggcgaaagcggaggcggtgccgctgggcatatccgtgacgcgcgaagatattcatgcggccctgctggacggtcagtttctcgacattgatgaagacgacgtgcaggagctgctggaaaatattgaacaaaaagccagacagcgtatcgccagcgcccagcgatcctga

SEQ ID NO: 176848 - DNA, 1425 bp, Klebsiella oxytoca
atgaccgatcatgtgataactgaaagtcgtaaaacagataatgataagaaaatcagattaataaccctcgtctcaaccatcggtgggctgtgctttggctatgacaccggggttatttccggcgcgctgatattcatgaagaacgatcttggcctcactcctctgcaggaagggctggtgacatcgtttttattattcggcgcggcaatcggctccgttggcggcggctggctgtccgaccgccaggggcggcggaaaaatattctgtgggtagcggtgatttttatctttggcgccctcggtaccgccgtcgcgtgggatatgtcgtcgatgataatcgcccgctttatcctcggcctggcggttggttgtgcgtcagtgacggtgccgatttatatttcagagctagcgcggcccgcgcagcgtgaacggctggtgacggtcaacgaactgatgatcgtcaccgggcaatttctcgcttactccgtcaacgcttccatcgtcaatttctatcccgacatgtcgcacaactggcggctgatgctggctattccggcgctgcccggcgcgctgctgtggattggaatgctggtaatgccggagtctccgcgcttcttcgtgcgtaaggggcaaatagacaaagcggttgcggtgctgaaaacgattcgtcggcctgaagaggtggagcaggagatccgcgatatccagcaggtgagtcagattggcatcaaccatggccgatttgttgacgagctgaagaaaaaatgggtgctgcagctgattttgatcgggctgatgattgtgctggcaacgcgcgtaaccggcgtgaataccattatgtactacgcgccgacggtgctgaaagccaccggacttggcgatgcggcggcggtgaccggcgccgtggctaatggcgtcgtgtctattctggccacgctactagggatgctgttaattggcaggcattcccgacggaaaatgttctttaccggacagatcggcgtcacccttagcctggtgttgattggtctctcgttcaaactcttcttccatatggaaaccgttgatggcgtcagcggcttgcatgccaactttaccggcgccagctacatcatccttgccctgatgctgatgtttctgacctttatgcagggttggatcgcaccggtgttctggctgatgctcgcggaaatttacccgctgcggatgcgcggtctgggtatgggttttgcggtattcggtttatggatatttgacttcatcattcagtctgttttcccgattttactcaacagctacggcggcggaatgaccttcggtttcttcgcggtaaccaacgtcataatgctgattctgctggtgaagttcctgccggaaacccgtggcttaacccttgaacaaattgaacaaaaattcagattctga

SEQ ID NO: 176849 - DNA, 1011 bp, Klebsiella oxytoca
atgacagttaatatcggtttaattggtttaggtatgattgggcgcgatcatctccagcgttttcagacggtgattcagaacgccagggtcagcgccgtctgcgatatcaatcgtaatgttaccgacactattgcccgcgaatatggcgctcaaccctattacgatgcggtcgaaatgattcaatcggacgacgtggatgcgatctttatttgctctattggtccggtccataaagaacaaattctggcggccatcaaggcaggtaaaccggtgttttgcgaaaagccgctgaccccaaccgcggatgaagccaaagcgattattgatgctgaagtggcctacggcaaacgtatgctgcagctgggttttatgcgccgtttcgacccagggtacaaccagcttaaagcgactctggatagcggtgaactgggggaaatattgctcatccattgcgcacatcgcaacgcctccgtgccagaaagctacaccctggagatggcgattaacgattcggcgacccacgagatcgatattatccgctatctgcttaacgaaaatatcgtttcggtacgcgtcgataaaccacagaagaaaacgcgcagagcctgcgcgcatctgcaggatccgttgattgtgatttttgaaaccgaatccggcgtacgtattgatgatgagctgtttgttaactgcgattatggttacgacattcgctgtgaagtgattggcgaaaatgccattagcgcattgaccgaacaggctctcaccaccgtccgttcggcacagggttatagccgtgctatccccaaaacctgtatggaacgtttcgccaccgcctacgatcgcgaggtgcagaatttcgttgaccgggtaaacctgggggcggagatgagcgggccatcatcgtgggacggatttgtcgtggcgatggtatgcgatgctggtctggcatcgctgaaggatggcgaaaagcacgcggtctctctgccggagtgtccggcgctctaccgctga

SEQ ID NO: 176850 - DNA, 450 bp, Klebsiella oxytoca
atgttaacgctgaaaccagaagatatttttattggctgtcgggcgaattcaaagaaaaaggcgctgcgtattgctgcggattccctgcaggccagcggctacgtcagcgagggtttttttgaatcgatggtggatcgcgaaaaggcgctctctacctggctcggggcgggagtggcgatgcctcactgtagcaaagaggggatcgacctggtgcggcaaaccggtttccagctgtttcagttcccggatggcgtgggctggggggaggggaaagtggctttccttgtggtcgccgtggcggcaaaaaataatgaacacattgatgttatagcggatctggcagacctgcttgatgacgaagtgaaaaccacgctgctggccagcgccgacagcaaagacgcgtttatgcagatcctcgaaggacactcatttaagaaggatagaatatga

SEQ ID NO: 176851 - DNA, 942 bp, Klebsiella oxytoca
atgaaactggcactctgtaccgatgttctcgccggcctggcgttcccggaaatgctcgatcgcgtcaagcagtacggcattacgggcgtggagatgaccgcaggcggttggtcgccttgtccacatgttaaaactgaagaactgctggcttcttcggcagcgctggcggcgtttcgcggagaactggaaaagcgcggaatggagatcgttgcgctgaactgttcgggtaacccgctggcccccggcgcgctgggcgagaagcataccgccagcagctatcgtaccgtcgagctggcggcaaagctgggggtgaaaaagattgtcatgatgagcggcctgccgggcggcgggccggacgataaaatccctaactggatcacctcgacggtttcctggccggactatatgccaggcgtgatcgattaccagtggaacgaggttgctattccctggtggcaggcttttacccgccatgcggctgaacacggcatcgaacagattgctctcgaggaattccccagccagctggtttacaacccgagcacgctgctgcgcctgcgtgaggcggttggcgacataatcggcatgaatctcgatccgtcgcatctgatcgccatgggggcagacccgattgccgcagcccgtaagcttgaaggggtgatttatcacgtccacggtaaagacgcgcgtattgaacgcgggctggcggatgtcgacggcttactggaataccagccggtcacgcagaccaaaacccgcacctggaactacgtggcggttggctgtggacaggatttgaagtggtggaaagagttcttctcggtgctgcgcatgaccggatataacggttatgtgtcgctggagatggaggacctgacgatgagcgttgaagcagggctacggacgtcgattgatgccctcaacgccacattaagtcagtga

SEQ ID NO: 176852 - DNA, 1005 bp, Klebsiella oxytoca
atgagcgccccaaaacgacaaaaagcgaccgccagcgacgttgcattactcgctggcgtctccaaatggacggtttcccgggcatttacccccggggcctccatccagcccaaaacccgggaagaggtgatgaaagccgctaatattctgggatatcgaccaaatttactggcgcgtagcctgacgcaaaagcaaacgcatattattggcgtggcggtcgacgagttacgcaatcccaacatggtgctgctgcttaacgaagtgactcgccagctgcagaatcgcggctacatggcgctggtgattaacgtcaccgacgaagaaaacacccgcacggcgatggcgctggcttaccagctccaggttgacggtatcttatttatggcaacggtgctgacaccggaacttatcgcgattgccactgaaattcatcgcgttccgctggtgcagattggccgtaataccgatcattcggaaatccaggtggtcaatatcgatggtcggcttgccggaaagcagcttgctgaactgctactggcgcaggggcatcgcacttttggctatatgaagggtccggataccgcttcccaccatttaatgaggatggaaggatacgaagcggcgctggagcaggcaggctgccggcttgatactctgctggttgccggccagtatttacgtacccggggatatgcggcgatgagtgactatctggacgcgacgcccgcaggcgaaagagtagatgccctgttttgtgaaaacgatattctggcgataggcgcgcttcaggcgctgcgcgagcgcgatttaacgatgggtattgtcggtttcgataatatcgatgaggcggcggcgccggaatggcagctaacgacctacgatcagcgacgggagcggctggtggaagaggcgttgaatcggctcattgatgctgctgaagggccgacggcgacgtggcgcaccggggaacccatcgtgcgccagtcgcatcgtcggcagagctaa

SEQ ID NO: 176853 - DNA, 390 bp, Klebsiella oxytoca
atgccattactgacgtttgatatcattgaaggacgcagcgaaaacgagatcaaaaccctgctggatgcggcacatcgcgccgttgtgcaggcgttcaaggtgccagagcgtgaccgctaccagattgttcacgaaaacaaagctcaccatatgattattgaggataccgggctggggctgacgcgaagccgggacatagtggtggtgagggtttataccagcccgcgcagcgaagcgcagaagcagcttttttatgccactctgcaggctgagcttgaagagcactgcggtctgagcggcgaggatctcatgatctcggtaatcagcaaccacaaaggggactggagttttgctcacggcgtagcgcagtatattaccggcgacctttag

SEQ ID NO: 176854 - DNA, 921 bp, Klebsiella oxytoca
atgatgagcgaaatccgcccggacatttactggacccacctgtactggctgacggtactggaggagcaaaaaagctatactcgcgccgcggaaaagctggcggtcagcaagtccgccattagccagaaaataagcgaactggagcgggtcaccggcaagacgctggtgcaccgcaccacccgcagcgtgaccctaagcgaagatggccagcggctggtggcggaactaaacgaaccgtttgggcagatccgcgagatttttaccggcacctgcgacgatgagggcggcccgctgcgcggaacgctgcgccttaccgcgccggtggcgttctctcgacagcagctggttccggccatcacgccttttctgcatcagcacccgcagcttcatctgcagctggaggtgaccgatcggctggtgtcgctcgccagcgaagggtttgatattgccattcgccactgtcgtcgcgagctgctgccggagacccacgtagcctggccgctgtgccgtacggcaaccctggtggtcgcctcggcggactatattcgccgctttggtcgccccgattcgcctgacgcgttgcgtcagcatcaatgcctgacctacccgcgcgggccgcaaagcccgcactggaccttcgagcgcaacgatgagcgggtgagcgttaaggtgcagggacccttcgccaccaataacagcgaatccctgcgcgatgcggtgctggcggggctgggaattgccttactgccggattttagcgccagggaggcgattggccgcgggctggtacaggagctcttgccggaatggcggccggtggatgtgtttgcggaaagtctctacgttattcgcccctatgcgccgcgcgtatcgcgggcagtagagacctttagccgctatctgaagacgaccttcagctaa

SEQ ID NO: 176855 - DNA, 732 bp, Klebsiella oxytoca
atgattcaggagccctgctggccgcagcgctttcatcaccagcagctgccgcttcactactgcgccgatccgacgcttgccgagcagccgctgtttgaccgggcacgcgacggggaagcggtggcccagctctggcaggccccgcagggatttgtggtgccgggaagctatcgcaaatttgccgaactcccggcggtaagcgagcagtttgccagccggggatggccggtctggcagcgccgctccggcggcggcctggtcccgcaggggccgggaattgtcaatctcagcctggcctggccggtttatcactcgctgggcgaagccgcagagccgatttatcttttcctctgcggcctgttgcagcgtacgctttcaacctttggcgtagccagccactttcaggcggtcagcggttcattttgcgatggacgctataatctggcctgcggcgaaggcgggcaggtgcgaaaaatagccggcacggcccagtactggcgccccatgccggcaggacggggccatgtggtcctcgcgcacgcggtgatcctgctggacgtcgagctgcaggctgcccatcgggcggccaatgatttcgaagcccggctcggcagcggacgggtataccgagccgagaaaaccgtgacgcttgccgaacttgtgacacaaccagccgatttgctcccccgctttcgcgaggcgctggtgcaggagttacagaatattagctga

SEQ ID NO: 176856 - DNA, 1335 bp, Klebsiella oxytoca
atggaatcaacgttaatttctcagggctccggcaaggaggcatgttctctcaaccgcgcccgcagagcggcctggggcagcttcgccggggccgtggtcgactggtacgactttcttctctatggcatcaccgccgcgctggtatttaaccgggagtttttcccgcaaatcagcccggcaatgggtaccctcgccgcgtttgccaccttcggcgtcggtttcctctttcgcccgctgggcggcattatcttcggtcatttcggcgatcgcctcgggcgcaaacgcatgctgatgatgacggtgtggatgatggggatcgctaccgcctgcatcggtctcctgccctcgttcaaccagataggctggtgggcgccagttctgctggttctgctgcgcgccgtacagggttttgcggtgggcggagagtggggcggcgcggcgctgctggcggttgagagcgcgccgaaaaataagaaagcgttctacagcagtggcgtgcaggtgggttatggcgtcggattgctgctctcaacggggctggtgtcgctgataagcgcctgtaccaccgatgcgcagttccttagctggggctggcgtctgccgttcttgtttagcgtcgtgctggtgctggcggcgctctggatccgcaacggcatggcggaatctgccgaatttgaacagcagcagcgcgaacagcagcaacagccgcagaaaaagcgtctgccggtagtagaagcgctgttccgccatccgggcgcgttcttaatgattatcggtctgcgcctgtgcgaactgctgacaatgtatatcgtcaccgccttcgcgcttaactactccacgcagaatctcggcctgccgcgcgagttgtttcttaacattggcctgcttgtcggggctatcagctgtctgacgatcccctgcttcgcctggctggcggaccgctttggccgacgccgcgtctatatcaccggggcgctgatcggcaccctcagcggcttcccgttctttatggcgctcgaaagccagtcatacttctggatcctgtttttcgcgctcatgctggcgaatattgcgcacgatatggtggtttgcgtccagcagccgatgtttaccgaaatgttcggtgccagctatcgctacagcggggccggagtgggatatcaggtcgccagcgtcgtcggcggcggttttacgccgtttattgccgccgctctggtcaccctatccggaggctcctggcatagcgttgcgatctatttgaccgtaggttgcctgctatctgcccttacggcgatgctgatcaaaccttgtcgccacggcgatgaaccgctttaa

SEQ ID NO: 176857 - DNA, 498 bp, Klebsiella oxytoca
atgcgtttaatttttgcagctttattttgtgtcatggttttgccttccgcttttgcagaaaaactgccggcgcccgtgggtaaacccgttttaactatttccggcctgattactaatacgaatgagggcgataccgccgtttttgatgtggcggcactggaaaaactgggcatggaaacgatcgtaacaaccaccccgtggtattcgggaaaggttcgctttgacggcgtttccctcagtaaactcatggatttagtcggtgccaaaggcaagtcggcgcgggtgctggcgctgaatgattacaccaccattgttcccatcgatgactttcataaatttcccgtaattttggctttaaaaatgaacggcgaatatatgcgcattcgtgataaagggcctttatttattgtttatccctacgacagtagcccggaattgcagaatcagatttattattcccgttcggcatggcaggtttcgaagattataattgagtaa

SEQ ID NO: 176858 - DNA, 1923 bp, Klebsiella oxytoca
ttgaatcgaatactcactgccattattttgtcgctcttcattgtgaccggttacattacttatctggtccatgagcggcaaagtgagctgcaaaaattaacccgttatactgattcgtggtccgtttcccagatagtctccgagtacatgcgtcttgaggcgcgactgagtgcgatgggactggaggtaaagggaagcgaccacgatgaggtgcgcctgcgtctggaaatcatgatgagccagattgcgctgctgcagcagggtgatttgggaaagtttatcggcaaagatcctcatcgtaaggcgatagttgacagcctgattactcttctggaccggctggataagcagctggataccatgacgacagcacagctgaagctgatgttacaagagatgagcaccctggacgggccgttgacctcgctcgcgtccacctctctcgcccaggattttaatctggttaatctcacccacgataaaatacagaacctctattacatctattcggccatttctattctgctgattattctctgtatcacgctcgggatgttgatgctgaagcagaataacaccctgcgtcgcgctcacgtgcggatgaaattactggctaccgatctgcaggcttccaaagaaaagctacaggtgcaaaaccgtcggctgcagtacgatgcttatcatgattcgctgaccgggatgcccaaccggctctctttctggcaacgcctgcaggaggtggttaatcaggtgcggccctatcacggctcggcggtggttatgttgttcgatctggataatttcaaggacgtcaacgacatgcagggtcatgacgccggagataagctattgcaggatttggccagccgtctctcattttttcgtaaaacgtcagaaacgctgtaccgactggggggagacgaatttgctctggtgacccacgatcttagcgaagagatggcgctggagcgggcaacggtgatccgggaaaagattagccagccgtatcagatttacgactcgcagattcagatcggcgcctgtatcgggattgtcatctctgacggagaaagccgcaccgactatttatacaaatgcgccgacctggcgctgtatgaagcgaaaaaagagggctccggttacgtccagatattccgccccggtatgcttcagcgccagcaggagaataaatctttcgaagatgacctgatgcaggcgctcgagagaggggagttcagagtttactatcagccgattgccgatgccatgaatggtgaaatctacggctatgaagcgctggttcgatggtttcatccgctacgcggcagcgttccgccgacggaatttatcccggtggcggagaaaatcggcctgattaatgcgttgggcgagtgggtattgaaaaccgcctgtgaagcggccgccagctggtcgtcgccgctcaaagtgtcggttaacgtgtcgccggttcagttaatgaacagttcactgaccgataccgtggtaaccatcttaagaacaaccgggctggatccgtatcggctggatttggaaattaccgagtctgacgtatttaatgaaaatacccgctcgttagagatcctgagccagctgcgtgagcttggcgtgcagatctctattgacgactttggtaccggctattcgtcgctctcgcgtttaagctatttcccgtttgataagataaaaatcgatcgatcatttgttattaatatcccccatcagcaagacgatctggatatcgtgcgcctgatcatcagcatgggtaaaagcctgcatatgcgaattgtggcagaaggcgtcgaaacggaagaacagctgacgtcgttacgaaaattaggttgtgatctggttcagggctatttgatcggtaaaccggggccgcttacttcagcagggaaataa

SEQ ID NO: 176859 - DNA, 333 bp, Klebsiella oxytoca
atgcagcgaatcatcatcccgacccactatgtgcatacccgtagcaccccgctgtggacaaaagagacggcgccagcgtcgatctggaagcggcatctggacgcgggcacccggcagggcgtctacccacgactgtcggtgatgcgcggcgcgatacgctatctgggctacgctgatgagaccagcccggatccggtcgaaaccctgaccattgctgaaggggagtttggcgttttcccacccgaaaaatggcactgcattgaggcgttaacggaagacaccgtatttaacgtcgacttttacgttgatcctaaaattcttatcgagggataa

SEQ ID NO: 176860 - DNA, 339 bp, Klebsiella oxytoca
atgaacagtgaaaataaaggttatgcgttagcggtaatcaacggcaataataaagataaaaaagaaaaagtgtatcttaagcccatggctctgtacgtgcctgatatcgcagcgcaggccatcgctgagcttatttccgatctctcagtcgataacgccggggataagggatttatcgtaacggtaaccaacaataataatggcgtgtcggtcgacagtgaatttgcaactttggctgaattgcaggatccgcagacggctgccgatgcggtaaaagatctgattaatatcgtgcgcggctacgagtccgacgaagagactaacgtctgcggctggtaa

SEQ ID NO: 176861 - DNA, 699 bp, Klebsiella oxytoca
gtgatatacaaatccattgccgaacggctgaaaaatcgcatcaacagcgatgagtttgaagtcggagatgcgttaccgagcgagaaagcgttagccagcgagctacaggtatcagtgatgaccatccgcaaagcgctaacgctgctggaaagggaaaaattgatcgtcaaacgccacggcagcggttcatacgttgcgcgaaagagcaattatcacggcggggagcttgatgggttcaactatcagatgcatatcgttggcgagactaactatcgcaacaaggtcatcgagttcactatgctcgatgcgcctctggccatcgcacaacagttaaaaattgagcccggagaaaaagtctattatgtcaggcgcattcggatgattgatgacgtgcccattctgatagaaaacagctatataccggtagcgattttcccatggcttagcatcggaaatctggaaaggtcaaaatttaactactttaagaaggagtgcaacatcaccattctggaaagccaccgtagctattccccggttctggccacccgcgaacaagcggaactcctgcaggttgcgcaaaacagcctgctgctacgcgtgcaatcgatcagctatgcgcagaataatctcatcgtcgatttatccgatatttaccaaaataccaataaatacaatgtaaaacatatcactcgccgttga

SEQ ID NO: 176862 - DNA, 1536 bp, Klebsiella oxytoca
atgatcggggtaaaaaaattacaagatttttccagggcgatgattgggccggttttatatctgccggttgtgggtctgttgattgcgttgctcagtatgaccaccaataaattatgggtggcagaagacagctcgcttttcctgctggggaaatatgcttccagtatgctctgggcaatcatgaacaatcttggcttcttcttttgcctcggtctggcgagcgggttggcaaaaactcgcaaagcggaagccgcgtttgtcgccgcaatgacctggtttatgtacctggcggccaacaatagctggcttactctgaccaggcggcttgttgaggggagcagcaacgcgcagctttacggcagcgggcaaacctttattttcggtttccaggtcatcgatatgggcgtgtttcttggcatcattctgggctgcgcggtggctttcattcataaccgctttgtcgatatcgagtttcgcggcgcattctcaatttatggcaacagtaagctggttctgatcgtaatgatcccgctggtcggcgtgtttgccatcgccacggtctatttctggccaattgttgaacacggtatatcggcgctgaccggcgtcatgaaaactttcggcgccgccggcgtttttctgtatggttttctcaatcgttttcttatcccgaccggtttacatcatctcatttggtcacccttcgtttttacctctattggcggacagctgttaattgatggacagacgatagtcggggcaaagcccatttttctcgctgaaattgccggtaacaccgggggagcgttaagcgactcggcgcgattcctgacctatggaatggtcaaaatttttggcacggccggaatggccctggccttttataagacggcgaaacctgaaaataaacaaaagttgaaagtcacgcttatcccgctgattgtgacctccttcctcgtcgggataaccgaaccttttgagtttttatttatcttcaccgcaccggtgttatggctggtttattcgttagtggatggctttttccagatgctggcgtggctactcgatgttcgggtctgcgcaaccaacggcattatcgattttattgtttataacataccggcgggagcccatctgacgcgctggcctgtttttgtcgccctggggttagcggaaacagcgacgatgtattttatcggtaaattcctgattctgcgtttcaggatgcgcacgccaggccaggaacaacaggatgaggcgctaagccgagcggcgagcgcaagcgtcccagccaagacttccggtgaacaggtcattctggggcttggcgggaaagacaatgtgtgttctgtcggcaattgttttacccgacttcgggttgacgtgcgggacccggcattaattcaggaacatattctgaaaaccagcggcggtaccagcgtcattatcaaaggtaatcacgttcaggttatttatggtttaggggtgaataaaatccgtaatgctgtggatcgctatttagatgtacatgaataa

SEQ ID NO: 176863 - DNA, 1329 bp, Klebsiella oxytoca
atgcaaaataaatttgttgttacgatagctggcggcggcagtacttatactccagggattattatgatgctgctggaaaatatggacagatttccgctgagcgaaattcgtctctatgataatcatcacgatcgccagcgcgtgatcggtgaagcctgcgcgattctggtggctgaacgttatccgcaagtggcttttagctacaccaccgatccgcaggaagcttttaccggcgttgattttgtgatggcccatattcgcgtcggcctctatgagatgcgcgaaaaggacgagaaaataccgcttaagcatggcgtgattggccaggaaacctgtggccctggcggtatcgcttatggtatgcgttccattgccggggtacttgaactggttgactatatggaaacgtactcccccggcgcgtggatgctcaactattccaatccggcggcgatcgttgccgaggccactcgtcgattacggccagcggctaaaattattaatatctgcgatatgccggtggcaattgaaggattattcgccgatatccttggtctgaaatcacgtaaagagatgaacgtgcgttatttcggcctcaaccatttcggctggtggaccagcattaccgataaggccggtaatgatttaatgccgacgttaaaaaagcatgtgtctgagctggggtattgcagtccgaaagaggattttcagcacaaagcgccaagctggattgagaccttcaaaaaggtgaaggacgtctttgcgctggataccgacacgttgcccaatacctacctaaaatactatttttatgccgactacgaggtagcccactcggacccgaactttacgcgcgcgaatgaggtgatggccggaagagagaaagaggtattcgatatggcgaaagacattgtcgcccggcggagcgccaaagcggcgcatttccatgccggggcgcatgccacctttattgtcgatctcgcctgcgccatcgcctttaatacccaggaaaggatgctgttgattgtagagaacaacggcgctatcgcgaattttgacgagaccgcgatggttgaagtgccttgcctggtcggcgttaacggtcccgaaccgctggcgatggggaaaataccgctgtttcaaaaggggctgatggagcagcaggtcgcggtggaaaaactggttgtcgacgcctgggttgaaggaagctaccaaaagctctggcaggcgttgaccttgtccaaaacggttccgagcgcgtcggttgcgaaagctattctcgatgaactgatcgaggccaatcgtggttactggccggagttgagctaa

SEQ ID NO: 176864 - DNA, 1389 bp, Klebsiella oxytoca
gtgcggttgatggaagacgggggcgcccggcccgtggtgttaacctcagcgtcaccgacgctgccccctgacgtacgccgtctggtggtgtttctccctgaatcccctgttcggctactctcaaccctgaagcgtgccgctatgctgctggaacagtccgcaacgccgctaccgatgctgtttctcagccgcagcccggccagttggctatggtccaccctgctacaccaggtcgcagagcggcgtcagctttccgcggtgcgggcggccgcctccgacctcccggtcccctgtctggcggcgctactgcgcgacgtcatacccgagggatatccttcccttgaacagctggcagatgaagaagcgcgggcattgggtaagcgccctgccgggctaacccgaccggagctgaacgccatcctcggtttgctctgcggataccgcgccagcgatcaggccaaacgccgcggcatcagccacaagacgctctacaatcaaagaaccgcaggattgaaaaaaatggtggaacaccacccgcagatggccgcccgctttcccggcagtcagataagagaacagaaaagcgagcccatcgccgccctttgcgctttcgagcgtgaatttgtccatgcaatccatagccgacaaattttcccggttttccagcccataaccgatgaacatcgtcagctaagggggatggagatccttgtccgctggcgccggaacggcagcgttttgtttcccgctgattttttaccgcagctacgctcggaatatgcgtggctggtgctcaccgcgtttgtgctgcaggaagccgtgcagaatatcaatctgtacagtggtgaattttatttcgcagtgaatattcccgaggctgtcgccagcaatgaaaacctgattcgcatgatggaaaccgcgcgccagcagctgcgtcagccgcaaatatcgccgcggctggtgctggagcttgccgaaaatgccgacctcagccgccacggaaaaatagccggaaatatggcccggctacagcagcgcggcttccgaattatgcttgatgactgcttctcgcaaagcagcgtgctgttcccggtgcgggcgttgacgttcaacgcctacaagctggatatgggcatcatcaatgatatgcagcgcgatgcgcacgccctggcgctgattaaaagcctcatctactactgccggctgatcggcagccgctgtattgccgaaggcgtagatagcctggagaaattcaacaaactgaaagcgctgggagtcgaccattttcagggaaacgccatctcggcgccggttggcagagaaaacgtggcggagatcatacagcaactctccggcgaagcggagtatccgtccggcatcgcagtgtag

SEQ ID NO: 176865 - DNA, 906 bp, Klebsiella oxytoca
atgaaaaagataatccccctgctgatgacgctgctgctggcaggctggtcgtttaacgcctggtctttcgcctgtaaaaccgcggcgggcgtgaccattcccatcggcggcggctcggcgaacgtgtacgtaaaccttgcgccggcggtcagcgtcgggcagaacctggtcgtggatctttcgacacagattttttgtcataacgattttccggaaaccatgaccgattacgtgacgctccagcgcggatcggcctatggcggcgtgctgtcgagcttttccggtaccgtcaggtataacggcaccagctacccgttccccaccaccagcgaaacggcgcggatgacctacaactcgatagtcgatagaccctggcctaccgttctctatctgacgcccgtcagcagcgcaggtggggtcgccatttccgccggttcgctaatcgctgtcctgatcctgcgccagaccaataacaaggataacgacgacttccagttcgtgtggaacatatacgccaacaacgatgtcgtggtgccaaccggcggctgcgacgtttctgctcgcgatgtgacggtgacgctgccggaatatcccgcttcggccgccattccgctaacggtttactgcgcgcaaaaccagaatctgggctactacctctccggtactacggagaacgcggccaattcgatatttaccaataccgcatcggcctctccggctctgggggttggcgttcagttgacgcgcaacggcagcgtcgttcccgcgaataccacggtgtcgttaggcaacgtgggaacctcggcggtcagccttggcttaaccgccaactatgcgcgcaccagcggacaggtgaccgcgggtaatgtgcagtcaattatcggggtgacttttgtttacgaataa

SEQ ID NO: 176866 - DNA, 501 bp, Klebsiella oxytoca
atgaaatggactcatgcaccctggctgctggcggtaatgatggccttcgccagcgccccccgcgccgccgacgtgactattaccgttaacggcaaagtggtggctaaaccctgcacggtctccaccgctaacgccaccgtcgatctcggcgatctttatacctttagcctggtctccgccggctcttcctcaccctggcacagcgtggcgcttaacctcagcaactgtccggtcggcacctcgcgggtcaccgccagctttagcggcacggcggacgccaccggctactacaaaaaccagggtaccgccggcaacatccagcttgagctgcaggacaatggcggcaccacgctgaacaccggcgcgagaaaagaggtccaggtggatgacgccacccagtccgccagcttcccgctacaggtcagagcgctaacggtcaacggcggcgctacccagggaacgattcaggcggtgattaacgtcacctatacctacgcctga

SEQ ID NO: 176867 - DNA, 531 bp, Klebsiella oxytoca
atgatgagaaaaaccctgtatctgttgagcgccctcgtctcgctggcggccagcaacgccggcgcggcggacagtaccattactatcagcggctacgttcgcgataacgcctgcgccgtggcgggtgaatcaaaagattttaccgtcgatctgatggataacgccgcaaagcaattccatgcggttggggcaaccacgccgctggtcccctttcgtattgtgctgtcgccctgcggtagctcggttaccgcggtgaaggtcggctttgttggcgttgccgacagcatcaatagcgatctattaaagctcgacggcggggcttcggcggcggcggggatgggcgtgcagatccttgacgcgcagcagacgatgctgccgctcaacgcagcctcatcggccattgcctggaccacgctgacgcccagccagcccaacaccctgaacttttatgcccggctaatggccacccagctaccggtcaccgccgggcacgttaatgcaaccgcgaccttcacgcttgaatttcagtaa

SEQ ID NO: 176868 - DNA, 444 bp, Klebsiella oxytoca
atgaaaacttatctcatcaatgataattgcgtttacaacgaaggaaagtatgagctgagaaccacctcaaactcacaggtcattaaaatgacggcaatgagggcgaagtgcctgagcttcatcatcgaaaatgcaaatatggatattattgaacggcaaaaaataacttcagaattatggggaagccgtagtcactttgtgaatgacgcaaatttaacgcaaatactctacttaatcagaagagatctgaagtcccttgggataaatgacctgtttatcaccattccaagacagggcattcaggttaataaagagattcctattaaagccatggagagcgaaaagaaaggaacaaaacgacaggtgttcagaaagacgctggcagcattaaccaccgtgttttctgtcaccctcggcacggtgatgtacctgcacattcattaa

SEQ ID NO: 176869 - DNA, 534 bp, Klebsiella oxytoca
atgaacccgattattgatggtattttagtaatggaaggcggctataccaacaatcctaaagataaaggtggagccaccaactgggggatcactgaggcaacggcccgagctcatggttatacaggagagatgatcaacctgacgcgagctgaagcattttctatcctcgaagaggattactggatcaaacccggatttgagcagatctcaactatatcctggcccatttctttcgaactctgcgatgccgcagtcaatattggcccccactatccttgcatctggctacagcgctggctcaacgcgctaaaccgggaagaaaaaagttaccaggatatcaaaaccgatggcaaaattggccctcggaccctctccgctctcaatcactttctggccttaaggggcaaacagggtgaagaagtgctgataaaagcgctcaactgcagccagggagcctactatctggatatcacagaaaaaaacaaaggtaatgaagagtttatttatggctggatgaaggccagaatcacctaa

SEQ ID NO: 176870 - DNA, 348 bp, Klebsiella oxytoca
atgtctattccaaatcatttggcgacaacggaagtcgttttgctggaagtcgaaatttttatcaccattattgctatcggagcctggggcgggtttgttagctaccttatccggcgtgataagcaagaaggtgatgatcattcccataagggcatcatgcactgtttaacccaggttgtggtttcctgttttaccagttttttgctcagcgccgtggcgattgaaaaagagcttagttttaatatggtgttgctcgccgcggggcttggcggggtatttgcagggccgattttgaaaattcttggcgagaagattaaaaaggctctggaaaatgcaaaaattcattaa

SEQ ID NO: 176871 - DNA, 948 bp, Klebsiella oxytoca
atgggatcgaaaggtgccaacaaggattttgattacaatttaatcaagacccttgacgctgttatttcagctggaaatgctgccaaagcagcaaaaaaacttggtatcactccggcggcggtctcgttggcgcttcgccgtttacagagctattatcaggaagagttgtttatccgtggtaaagatggcctgttacccaccgctaaagcgatcgagatccatcaaaatttccgtcaggttatggaactgataaatagtacctttattcccgagcataaagggagtcgtgatgcccggctgactattttaggcggtgatatcgttgaggcttactatctctcacagctttatgccggagatatctttgaacgggtattactcaaccattattcatcaagaaatctctctcgtgagatgatgacggagctactgcttacagcagaatgtgatgttctgattggtaccgagccgttgaacgtccccgggattgataatcaactgatcgatagcttcaaaagctttgtctgcatttttgccagtaatcatatcttaagcaccttacctcatctttcattacatcatttctattcctcccgtcatgcgatgtatcagccgggcatgcactccccgatgattattaatgataagggtctttttaaagatgatctttattataaaggctcacgtattattggctatcgtagcgactcccttaatggcttaatgagtatgattgaacgtacttcattaatagccttaatgccattgaagttggcgctattctataagaatcagcgtaaatatgatattaagtttgtgcaaccgccaccggaacttacttttaaatctatacagatttatgcatcatggaacagaaacagtaaaaatatatcagtgataaatgaaattgtttccatgttacacactctgtcatcatttcgtcgctga

SEQ ID NO: 176872 - DNA, 1134 bp, Klebsiella oxytoca
atggcaaagcaagactattacgagattttaggcgtttccaaaacagcggaagagcgtgaaatcaaaaaggcgtacaagcgcctggccatgaagtatcacccggaccgcaaccagggcgataaagaggcagaatcaaagtttaaagaaatcaaagaagcgtatgaaatcctgactgatgcccagaagcgtgcagcttacgatcagtacggccatgctgcgtttgagcagggcggtatgggcggcggcggcggttttggcggcggcgcggatttcagcgatatctttggcgatgttttcggcgatattttcggcggcggacgtggtcgtcagcgcgcatcgcgcggttcagacctgcgctataacatggatcttacgctcgaagaagccgttcgcggtgtaacgaaagagatccgtatcccgactctggaagagtgcgacgtttgtcacggcagcggcgccaaagcgggcagccagccgcagacctgtccgacctgccacggggcaggccaggttcagatgcgccagggcttcttcgccgttcagcagacctgtccgcactgtcagggacgcggtacgctgatcaaagatccgtgcaataaatgtcacggtcatggccgcgtcgagaaaacgaaaacgctgtcggttaaaatcccggcgggcgttgataccggcgaccgtattcgtctggcaggtgaaggtgaagccggcgagcatggcgcaccggcaggcgatctgtatgttcaggttcaggttaagcagcacgccattttcgagcgtgaaggaaataatctgtactgtgaagtaccgatcaacttcactatggctgctctcggcggtgaaatcgaagtcccgacgctggacggtcgtgtaaatcttaaaataccgggcgagacgcagacaggtaagctgttccggatgcgcggtaaaggcgtgaagtccgttcgcggcggcgcgcagggcgatctgctgtgccgcgtggttgtcgaaacgccggttggtctgaacgataaacaaaagcagctgctgaaagatctgcaggaaagctttggtggcccaacgggtgaaaagaatagcccgcgctccaaaagtttcttcgatggcgtgaagaaatttttcgatgatttgacccgctaa

SEQ ID NO: 176873 - DNA, 1917 bp, Klebsiella oxytoca
atgggtaaaattattggtatcgacctgggtactaccaactcttgtgtagcgattatggatggcactactgcacgcgtgctggagaacgccgaaggcgatcgcaccacgccttctatcattgcctatacccaggatggtgaaactctggttggtcagccggctaaacgtcaggcagtgacaaacccgcaaaacaccctgtttgcgattaaacgcctgattggccgccgcttccaggacgaagaagtccagcgtgacgtttctatcatgccgtacaaaatcgtggccgcagataacggcgacgcatggcttgatgtgaaaggcaccaaaaccgcaccgccgcagatctctgctgaagtgctgaagaaaatgaagaaaacggctgaagattacctgggcgaaccggtaactgaagcggtaatcaccgtaccagcttacttcaacgatgctcagcgtcaggcaaccaaagacgccggccgtatcgcaggtctggaagtcaaacgtatcatcaacgaaccgacagccgctgcgctggcttacggtctggataaagaagtcggcaaccgtactattgcggtatacgaccttggtggtggtactttcgatatctccattatcgaaatcgacgaagttgacggtgaaaaaaccttcgaagttctggcgaccaacggtgacacccacctgggcggcgaagacttcgacacccgtctgatcaactacctcgttgacgagtttaagaaagatcagggcatcgacctgcgtaacgacccgctggcgatgcagcgcctgaaagaagccgctgagaaagcgaagattgaactctcttctgctcagcagaccgacgtgaatctgccgtacatcaccgcagatgccaccggtccgaaacacatgaacattaaagtgacccgtgcgaaactggaaagcctggtagaagatctggttaaccgttccatcgagccgctgaaagttgctctgcaggatgctggcctgtccgtgtctgacatcaacgacgttattctcgttggcggccagactcgtatgccaatggtgcagaagaaagttgctgagttctttggtaaagagccgcgtaaagacgttaacccggacgaagccgtggccattggcgcagctgtccagggcggtgttctgaccggtgaagtaaaagacgtactgctgctggacgttaccccgctttctctgggtatcgaaaccatgggcggcgtgatgactgcgctgatcaacaagaacaccactatcccgactaagcacagccaggtgttctctactgcggaagacaaccagtctgcggtaaccatccatgtgctgcagggtgagcgtaaacgcgcatctgataacaaatctctgggtcagttcaacctggatgggattaacccggcgccgcgcggcatgccgcagatcgaagtcaccttcgatattgacgccgacggtatcctgcacgtttccgcgaaagacaaaaacagcggtaaagagcagaagatcaccatcaaagcctcttctggcctgaacgaagaagagatccagaaaatggttcgtgaagcagaagctaacgcggaatctgaccgtaagtttgaagaactggttcagacccgtaaccagggtgaccatctgctgcacagcacccgtaagcaggttgaagaagcgggcgataaactgccggctgacgataaaaccgctatcgagtctgcattgaccgcgctggaaacttccctgaaaggtgaagataaagccgatattgaagcgaaaatgcaggcgctggcccaggcttcccagaagctgatggaaatcgctcagcagcagcacgcccagcagcaggctggcggcgctgacgcttccgagagcaacgcgaaggacgacgatgttgttgacgctgagttcgaagaagtgaaagacaaaaaataa

SEQ ID NO: 176874 - DNA, 405 bp, Klebsiella oxytoca
atgaaatcactgattcatatatcagcaggattatttttgagcgcaacgttagtcgcgtcggcgtccgctaacgatcataaaattttaggggttgtcgccatgccgcgaaatgagactaacgatctcaccctgaagctaccgatatgcagggtaattaagcgtatccagctaactgccgatcgcggcgatgtccagctgtccggcgcaacggtgtacttcaaagtcagcaacagcgccagccaaagcctcagcgtcccgtcaactataaaagaaggggaaacgaccggctggattaatattaatagcgacaacgacaacaaacgctgcgttaaaaaaatcgctttttctggtcacaccattaactcttccgatatggcctcgctaaaaattatcggcgacgattaa

SEQ ID NO: 176875 - DNA, 750 bp, Klebsiella oxytoca
atgaagattaattatctggatgatgaagacctctcttttctgcatcgctgcagcgaagagcatctggaaacattcactcgaattctgactcacaatgagaatggaaaaccccggctttcaagtacgctattgcgtaatgaaacctttcaggcgatggaaggacaccctgagcgctatcgccgcaactggcagctcattgccggggaactccagcactttggcggtgatagcatcgccaacacgctgcgtcgtcatggcaagttctatcgcgaaattttgctggacgtctgcaagcgactaaaaatcaaaaccgataaacaagcctctaccccggaaatagaacaacatctcctggaacactttctggagcatagctggaaaaagatggatgagcggcaaaaagccgacttctttagtgccgttgagtgtcgtgtcaaagagcagaaagagctgcttccccatctgcttcagacaaataagttagcgcagggagtctcgcatcttcttgaaacccgactgacgaagatcctccgcacccacgccgcggtgagcgtcatcggccacgggctggtacgcggagcagggcttggcggaccgctcggcgccgcgtttaatggggtaaaagccgtgagcggcagcgcatatcgggtgaccattccagccgtgttgcatattgcctgtttaaggcaaatgaccagacttcatcagggaaaaaatgaaattggcgaaaaataccccgccagatcatag

SEQ ID NO: 176876 - DNA, 567 bp, Klebsiella oxytoca
atgggcaacactaagttggctaatccggcaccgctgggccttatgggcttcggcatgaccactattctgcttaacctggcaaatagcggcctgttcgcgtttgatgtagctatcctggcgatgggcattttttatggcggcattgcgcagatttttgccggcctgctggaatttaaaaaaggcaacacttttggcttaaccgcatttacgtcttacggcgctttttggctgacgctggttgccattcttctgatgccgaaaatgggccttgctgaagcgcctgatgcacacttcctcggtatgtaccttggactgtggggcgttttcaccctgttcatgttctttggcactctgaaagccgcacgtatgctgcagtttgttttcctcagcctgaccgtgttgttcgctctgctggcgattggccacctggctgataacgaaggcattgtgaagattgctggctgggtgggtctggtctgcggcggcagcgccatctatctggcgatgggtgaagtgctgaacgagcagtttggccgcaccgttctgccaatcggcgaaaagcattaa

SEQ ID NO: 176877 - DNA, 1311 bp, Klebsiella oxytoca
atgtcacactatacccgacccctgaaccgacaggattataaaaccctgacgcttgccgcgcttggcggcgcgctggagttttatgatttcatcatctttgttttctttgccgccgttgtcggcgagctgtttttcccggcggatattcctgagtggctgcgacaggtacaaaccttcggcatttttgcggcaggttatttagcgcgtcctcttggcggcatcattatggcccactttggcgatctggttgggcgtaagaaaatgtttactttgagcattctactgatggcgctgcctacgctggcgattggtctactgcctacctacgcatcgatgggcatcgtggcgccgattttgctgttgctgatgcgcattcttcagggcgcagcgattggcggtgaagttcccggcgcctgggtcttcgttgccgagcatgtaccggaaaaaagaataggtatcgcctgcggtacgctgactgccggtctgacggtgggtattttacttggttcggttgtcgcgacgctgattaatacgcacctcacctctcagggtatccacgatggcggctggcgtatcccgttcctgttaggcggcgcatttggcctcgtcgccatgtatttgcgccgttggcttcaggagacgccgattttcctcgaaatgcagcagcgtaaggcattagcgcaggagctgccggttaaagccgtcgcgctgaagcatcagaaggcggttgtggtctcaatgctgctgacgtggctgttatccgcaggcgtggtggtggtgatcctcatgtctccggtctggctacaaaaacactacggctttgctcccgccatcaccctgcaggcgaacagcatcgctaccatcatgctctgtatcggctgcctgctggcaggcctggccgccgatcgttttggcgccagccgcacgtttattgtcggcagcttattcctcgctgcggcaagctgggctttctatcatctttccggtgatagcccgcagcgcctgttcctgctctacggtacggtggggttatgcgttggcgtggtcggggcggttccatatgtgatggtgcgcgcgttcccggcggaggtccgatttaccggtatttcgttctcttataacgtctcttacgccatctttggcggcctgacgccgattgcggtgaccatgctgatgggcgtttcgccgatggcgcccgcgtggtacgtgctggcactgtcgtttatgggattggggttggggatctggctgcgtcagggactggagcagcaggtcgcagcgccgaaagctgaactgcagcgtctgccttaa

SEQ ID NO: 176878 - DNA, 588 bp, Klebsiella oxytoca
atgaacaccttacgaatcggcttagtttccatctccgatcgcgcctccagcggcgtctatcaggataaaggcatcccggcgctcgaagagtggctggcccgtgcgctatccacgcctttcgaattgcaaacccgcttgatcccggatgaacaggttattatcgagcaaacgctgtgcgaactggttgatgaaatgggctgtcatctggtcctgactaccggtggcacgggcccggctcgccgtgacgtgaccccggatgcgacgctggcgattgccgatcgggtgatgccaggctttggcgagcaaatgcgccaggtgagcctgcactttgtgccgacggccattctttctcgccaggttggcgttattcgcaagcaggcgctgatccttaacctgcccgggcagccgaaagcgattgaagaaaccctggaaggcgtaaaagatgccgagggtaacgtgctggtgcacggagtttttgcaagtgtaccgtattgtgtacagttgcttgaggggccatatgtcgaaacaaacggcaatgttgtagcatcttttcgccctaaaagcgcgagacgtgaaacattatcctga

SEQ ID NO: 176879 - DNA, 954 bp, Klebsiella oxytoca
atgacggataaattgacttctctgcgtcagtacaccactgtcgtagctgataccggagatatcgcggcaatgaagctgtatcagcctcaggacgccacgactaacccttctttgattctcggcgcggctcagatccctgagtaccgtaagctgattgatgacgctgttgcctgggctcgcggccagagtagcgatcgcgcgcagcagattatcgatgcttccgataagctggcggtgaacattggtctcgaaatccttaagctgatccctggccgtatttccaccgaagttgatgctcgtctgtcctatgacaccgatgcatctatcgccaaagctaagcgcctaatcaagctgtataacgatgccggcatcagtaacgatcgcattctgatcaaactggcttctacctggcagggcattcgcgccgctgagcagctggaaaaagaaggcatcaactgtaacctgactctgctgttctccttcgctcaggcgcgtgcttgtgcggaagcgggcgtattcctgatttctccgtttgtgggccgtatcctcgactggtacaaagcgaacaccgataagaaagaatacgcgccggcagaagatccgggcgtggtgtccgtgagcgaaatctacgaatactacaaacagcacggctacgaaactgtggttatgggcgcaagcttccgtaaccttggtgagatcctggaactggccggctgcgatcgcctgaccatcgctccggccctgctgaaagagctggctgaaagcgaaggcgcggttgagcgtaaactgtctttcagcggcgaagtgaaagcccgtccggctcgcatcaccgaatccgaattcctgtggcagcacaatcaggatccgatggcggtagacaaactggcggaaggtatccgtaagtttgcgatcgaccaggaaaaactggaaaaaatgatcggcgatctgctgtaa

SEQ ID NO: 176880 - DNA, 1431 bp, Klebsiella oxytoca
atgcctgattttctgtcgtttatcaatgaaatactttggggctcggtaatgatctacctgttactgggcgctggcgtctggtttacctggcgaacaaaatatattcagttccgttatatccgccagttcagcaaaagtctgaaaaaaagccttcagccgcagcccggcggcttaacgtcttttcaggcgctgtgcatgagcctggcggcgcgcgtgggcagcggcaatatggctggggttgcgctggccattgccgctggcggcccgggcgccgttttttggatgtggatctcggcgctgctcggcatggccagcagcttcgccgaatgctctctggcgcagctttataaagagcgcgactctcgcggccactttcgcggcggtccggcctggtatatggcccgggggctcggcatgcgctggatgggcgtgctgttctctattcttctcctgctggcctacggtgttatttttaacaccgtccaggccaactccgttgcccatgccatggagtatgcgtttcgtttacctgatgtcatcaccggcggcgtacttgcggccctgaccctgctggtcatcattcgcggtattcgcggcgtagcgcggttgatgcagtggctcgtgccggctatggctttgctgtgggtgatggccagcctggtcattggcttgtggcatatcagcgccctgccgacgatttttgaaattattttccgctgcgctttcggttggcaggaggccgctgcgggcgcggtgggctataccatcagccaggcgctcaccagcggctttcagcgcgggatgttctccaatgaagcgggtatgggttcgacgccaaattctgccgccgccgctgcctcctggccacctcatcccgcagcgcaggggatcgtacaaatgatcggcgtctttattgataccatcgtcatctgtaccgccagcgccgtgatcattatgctggcgccaagagacggcaatgaaggggtggcaaacggtattcaggctatccagcattcgatgaacaatcttgtcggcgactggggtgccagctttgtcgcttgtatcgtgctgctgttcgccttcagttcgatcgtcgcaaactatatctatgccgaaaataaccttatctttctgcgcatggatagcctccgcaacatctggctgctgcgtctgctgacgctgtgcatggtcatcaccggagcggtagtcagcctgccggtagtctggcagatggcggatattatcatggcgctgatggcgataactaacctgacggctatcctgctgctgtcgccgacggtgcgcatcattgccagcgattacctgcggcagcgcaagctgggccagcggccggaatttgacgtcacccgctaccctgaaatccatcaacagctggtaccgggaacctgggataacctgccgcgcgaatag

SEQ ID NO: 176881 - DNA, 774 bp, Klebsiella oxytoca
atgctcattctgatttcacctgccaaaacgcttgattatcaaagtccgctggcaacgacgcgttatactcagccagagctgctggaacactctcaggagcttatcggcattgcccgccagctgtcggcaccacagattgctaaactgatgggcatcagcgacaagctggccgatctgaacgcgacccgcttccacgactggcagccagacttcaccccggacaatgcccgtcaggcgatcctggcgtttaagggcgatgtctataccggcctgcaggcagagacctttagcgaagctgatttcgattttgcccagcagcatctgcggatgctttccggcctgtatggcgttctgcgcccgctggatctgatgcagccgtatcgcctggaaatgggtattaagcttgagaatgcgaggggtaaagacctgtatcactattggggatacgtcatcaccgataagctgaatcaggcactgaaagcccagggcgacgatatcgtggtcaaccttgcctctgatgaatacttcaggtcggtgaaagccaaacggcttgagggccagctgattaagccggtattccttgatgagaaaaacggcaagtttaaagtgatcagcttctacgctaaaaaagcgcgcggcttgatgagtcgttatatcattgagaatcgcttaacgaagcctgagcagttgacccgctttgatagtgaaggctatttctttgacgccgaggcttcggataacggagaactggtctttaaacgccacgagcagtaa

SEQ ID NO: 176882 - DNA, 1281 bp, Klebsiella oxytoca
atgaaactctataacttaaaagatcataacgaacaggtcagctttgcgcaggccgttacgcaggggcttggcaagcatcaggggctgttcttcccgcacgatctgccggaattcagcctgactgaaatcgacgaaatgctgcagcaggacttcgtgtcgcgtagcgcaaaaattttgtcggcatttatcggcgacgagatcccgcaggaggttctgcaagaacgtatcggcgccgcctttaccttcccggcaccggtaagtaaagtgcaggacgacgtcggctgcctcgaactgtttcacggtccgactctggcgtttaaagacttcggcggccgctttatggcgcaaatgctgacccatatcgcaggcgacaaaccggtcactattctgacggccacctcgggtgataccggcgcggcggttgcgcatgcgttctatggtctgccaaacgtcaaagtcgtcattctctatccgcgcggcaaaatcagcccgctgcaggaaaagctgttctgcaccctgggcggcaacattgaaaccgtagcaatcgacggtgactttgatgcctgccaggcgctggttaagcaggcatttgatgatgaagagctgaaagctgcgctgggtcttaactcggctaactcaatcaatatcagccgcctgctggcgcagatttgttactattttgaagccgttgctcagctgcctcaggaagcccgtaatcagctggttatctcggtacccagcggtaactttggcgatctgaccgccggtctgctggctaaatctctggggctgccgatcaagcgttttatcgcggcgactaacgccaatgataccgtgccgcgcttcctgcaggacggtaactggtcgccaaaagcgactcaggccacgctgtctaacgcgatggacgtcagccagccgaacaactggccgcgtgtggaagagctgttccgccgtaaaatctggcgtctgaacgagctgggctacgcggcggtggatgatgaaaccaccaagaagaccatgcgtgagctgaaagccatcggctatacctctgaaccgcatgcggcgattgcctatcgcgcgctacgcgaccagctgcagcctggcgaatatggtctgttcctcggcacggcgcatccggcgaaatttaaagagagcgtggaagagattctgcaggagacgctgccgctgccgaaagagctggccgatcgtgccgatttgccgctgctgtcgcatgatctgccggctgattttgccgcgctgcgtaagctgatgatgggttaa

SEQ ID NO: 176883 - DNA, 930 bp, Klebsiella oxytoca
atggtcaaagtatatgccccggcttccagtgccaacatgagcgtcgggtttgacgtgctgggcgcggcggtaacgccggtcgacggcacgctgctgggggacaacgtctcggttgaagcggcggcgagctttagcctgcaaaacgtgggtcgcttcgccagtaaactgccgacggctgcgcaggagaatatcgtctatcaatgctgggagcgtttttgccaggagattggcaaacaggtaccggtggcgatgacgctggaaaaaaacatgccgattggttccggcctgggctccagcgcctgttccgtggttgccgcgctggtggcgatgaatgaattctgcggtaagccgctcaatgagagccgaatgctggcgctgatgggcgagatggaagggcggatttccggcagcattcactatgataacgtcgccccttgctatctgggcgggattcagctgatgcttgaggaaaacggcatcatcagccagcagataccggcatttgatgaatggctgtgggtgctggcctatccggggattaaagtctcaactgcggaagcgcgggccattctcccggcgcagtatcgccgtcaggactgtattgcccacggtcgccatctggcgggctttattcacgcctgctatagccgtcagcctcagctggcggcgaagttgatgaaagatgtcattgccgaaccgtatcgtaccaaactactgccgggcttcagcgaagcgcgtcaggcagcaatggaaattggcgcgcaggcgtgcggcatttccggttccggtccaacgttgtttgcattatgcgataaaccggaaaccgcgcagcgcgtcgccgactggctggctacgcactatctgcaaaataaggaaggcttcgttcatatttgccggctggacacggcgggcgctcgagtagtgggataa

SEQ ID NO: 176884 - DNA, 2463 bp, Klebsiella oxytoca
atgcgtgtgttgaagttcggcggtacatcagtggcaaatgcagaacgttttctgcgtgttgccgatattctggaaagtaatgccaggcaggggcaggtagcgaccgtactgtctgccccggcgaagatcactaaccacctggttgcgatgatcgaaaaaacgatcggcgggcaggatgcgttgaccaatatcgctgatgccgaacgcattttcgccgaacttctgcaagggctcgccgatgctcagccgggctttccacacgctcagctgaaagtttttgtcgagcaggaatttgcgcaaatcaaacacgttctgcacggtattagcctgcttgggcagtgtccggatagcgttaacgcgtcccttatttgccggggtgaaaagctctcaatcgccattatggccggcttgctggaagcgcgcggtcataacgtcacggtgattaacccggttgaaaaactgcttgccgttggccattacctcgaatccaccgtagatatcgcagagtcgactcgtcgcattgccgccagccagatcccggctgaccatatggtgctgatggcgggctttaccgcgggtaacgaaaagggtgagctggtggtgctggggcgtaacggctctgactactccgcagcggtactggcagcctgcctgcgcgccgactgctgtgaaatctggaccgacgttgacggcgtttatacctgcgacccgcgtcaggtcccggatgcgcgtctgttgaagtcgatgtcctatcaggaagcgatggagctttcctacttcggcgctaaagttttgcacccgcgtactatcgcccccatcgcccagttccagatcccctgtttaatcaaaaataccggtaatccgcaggcgccgggtacgcttatcggcggcagcagcgatgaagacgatctgccggtgaaaggtatctctaatctcaacaacatggcgatgttcaacgtctccggtccggggatgaaggggatggttggcatggcggcgcgcgtgttcgccactatgtcccgcgcgggaatctccgtcgtacttatcacccaatcctcatccgaatacagcatcagcttctgcgtgccgcagagcgactgcgctcgggcgaagcgggtaatggaagatgaattctatctggagctgaaagaggggctgcttgagccgctgtcgatcatggaacgcctggcaattatttcggttgtcggcgatggcatgcggacgctacgcgggatttccgccaaattcttcgctgcgctggcgcgcgccaatatcaacattgtggcgattgcacagggctcttccgagcgctccatctctgttgtcgtcagcaacgatgatgcgactaccggcgttcgcgtgacgcaccagatgctgttcaataccgatcaggtgatagaagtgtttgtgattggcatcggcggcgtcggcggcgcgttgatcgaacagattaagcgccagcagggctggttgaagagtaaacatattgacctgcgcgtttgcggggtagccaactctcgcgctttactgaccaacgtacacggtctgaacctggaacactggcgcgatgagctggcggaagccaaagaggcgttcaacctgggacgactcattcgtctggtgaaagagtaccatctgctgaacccagtgattgtcgactgtacctccagccaggcggtggccgatcagtatgccgatttcctgcgcgaaggcttccacgtggtgacgccgaacaaaaaggccaatacctcatcgctggattactatcatcagctgcgtcatgccgcgagcagctcacgacgcaagtttctctacgacaccaacgtcggcgcggggctgccggtaatcgaaaacctgcaaaatttgctgaatgccggtgatgaactgctgcacttctccggtattctgtccggctcgctgtcatttatcttcggcaagctggatgagggcgtaagcttctctgccgcgacgaagctggcgcgtgagatgggctataccgaaccggatccgcgcgacgatctttctggcgttgatgtcgcgcgtaagctgctgattctggctcgtgaaaccgggcgagagctggagctgtctgacattatcgtagagccggcgctgccggcggattttgatgccagcggcgatgttgacagctttatggcgcgtctgccgtcactggatgatgagtttgcttcacgggtcgctaaagcgcgcgatgaaggtaaagtcttgcgttatgttggcaatatcgaagaggatggcacctgccgcgtgaaaattgccgcggtagacggcaacgatccgctgtttaaagtgaaaaacggcgagaatgcgctggcgttttacagccactattatcagccactgccgctggtgctgcgcggttatggcgcggggaatgatgtcaccgcggctggcgtttttgccgacctgctgcgtaccctgtcatggaagttaggagtttaa

SEQ ID NO: 176885 - DNA, 687 bp, Klebsiella oxytoca
atgcgtttatcaatagtattagtgtccccggcgcgggcagaaaacgtgggtgcggcagccagggcaatgaaaactatggggtttagcgatatgaggatcgtcgatagcgaggctcatttgcagcctgccgcgcgctgggtcgcgcacggctccggcgatattctcgataatattcagacttatgccactctggagcaggcgctccacgatgtcgattttaccgtcgccacgacggcccgcagccgggctcgttttcactactacgcgacgccgcagcagcttttaccgctactggaagagaaagcgcagtggatgaatcatgccgcgctggtatttggccgtgaagattccggtctgaccaatgaagagctggcgcttgccgatgtgctgaccggcgtgccgatggcggcagactatccttcgctgaatctggggcagtcggtgatggtatattgctatcagctgacctctttgctgcaaaaaaccacgaccgtagccccaggcgtcgatgacaatcagctgcaggcgttacgtctgcgcacgctcgatctgctcaatcgcctcggcgtcggcgacgatataaaattgaccgactggcttcagcagcgaataggtcttctgcagcagcgagacaccgccatgctgcatcgtttactgcatgatattgaaaaaaacctgccagagtaa

SEQ ID NO: 176886 - DNA, 717 bp, Klebsiella oxytoca
atgcagaccccgcacattcttatcgttgaagacgagttggtaacacgcaacacgttaaaaagtattttcgaagcagaaggttatgatgtattcgaagcgaccgatggcgcggaaatgcatcagatcctgtctgaaaatgatatcaacctggtgatcatggatatcaacctgccaggcaaaaatggtctcctgttagcacgcgagctgcgtgagcaggcggacgtcgcgctgatgttcctcaccggtcgcgataacgaagtggataaaatccttggcctcgaaatcggcgccgatgactatatcactaaaccgttcaacccgcgtgaactgacgatccgcgctcgcaacctcctctcccgtaccatgaacctgggtaccgtgagcgaagaacgccgcagcgtagaaagctataagttcaacggctgggagctggatatcaatagccgttcgctggtaagcccaaatggtgagcagtataagctgccgcgcagtgaattccgcgccatgctgcacttctgcgaaaatccgggcaaaatccagtcgcgtgcagaactgctgaagaaaatgaccggccgtgagctgaagccgcacgaccgtaccgtggacgtgaccatccgtcgcattcgtaagcattttgagtccactccggacaccccggaaattatcgccaccattcatggcgaggggtaccgcttctgtggcgacctgcaggaataa

SEQ ID NO: 176887 - DNA, 1371 bp, Klebsiella oxytoca
atgttgaaatcaccactattctggaaaatgagcaccctgctgggatgtattttactgttgtcgatcccgctgatgattgtcagacagctgatcgacgaacgcgcggattatcgtagcgacgtcattgaggctctggagagcagcaccagcggggcgcagaagctggccgggccgctcatcgccattcccgtaaccgagacgttgactcgggttgagggcaaaaaaacggtcgaatatcaaaaccattgggtgcattactggctgccggagacgctggcggttaacggtaatcaggacgttgaatcccggcgggtcggtatctatgaagggcaaatctggcacaataatctcagcatcaaggcgcattttgacccggcacgaatcacggcgctcaggaaaagtacgattacgctggggaggccatttctggtcgttagcgttagcgatgcgcgcgggattggcgagattaaggctcctgaggtcaacggcgagacgctgtccgttgagccagggcccggcactggcgagagcggagagggcattcatatgccaatgccgctgttgttacctgaacaaaaagcgctggatattgaattcacacttaatctgaatggtagcggcagcttctcggtggtaccgcttgggcgcaacagcacgctacagctaaccagcaactggccgcatccgggattccttggcgattttttacccggcaagcgtgaggttagcccaacaggctatagcgcacagtggcaaagtacctggtttgccaacaatatggccaggttttttgtcgatgaccgggaaattgagtggcgtcagctacctgcattcaacgtgaatgtcaccacgcctgccgatcaatatcagctgaccgacagggcgacaaaatatgccattctattgatagcactgacatttatggcgttctttgtgtttgaaagtttaaccctttatcgtatgcaccccatgcagtatatgctggtggggctgtcgctggttatgttctatctggtgctgctggcgctgtccgaacatatcggctttacgtcatcatggattgccgccagtttgatcggcgcgctcatcaatggcgtgtatcttcaggcggtgctgaaagggtggcggaatagctttctgttcgtctgtgcgctactgctgctggatggcattatgtggctgctgctgcgttcggaagatagcgcattattgctgggtaccggtgtgctgctgctggcgttaagtgcgcttatgttcctgactcgccatgttgactggtacgcgttatctctgccgaaagccaaagataatcagccaggcgttggcgatgatgttggcgatgatgacgataggctcaggatctggaaataa

SEQ ID NO: 176888 - DNA, 1425 bp, Klebsiella oxytoca
atgcgcatcggaatgcggctgctgctgggctattttttgattgtcgctatcgcggcctggtttgtgctttccatctttgtccaggagattaagcccggggtgcggcgggcaacggaaggtacgctgattgatacggccaccttgcttgccgagttggcccgcgaggatttactctccgccgatccccagcatgggcggctggcccaggctttccagtcgcttcatcgacaaccgattaacgccaatatcgccggcattaataaagtgcgtaacgaatatcatatctatctgaccgacgcgcagggcaaagtggtatttgattcggcgggcaaagcgctgggacaggactattcgcgctggaacgatgtctggctcactttacgcggtcaatatggggcgcgcagtacccgcagcgacccgaacgacgacaacagctcggtgatgtatattgccgcgccggtgagcgacaatggccggatcattggcgtgctgagcgttgggaaacccaatctggccatggccccggtaatcaaacgcagcgagcgccgtattctgtgggccggaggcgcgctgctgggtatcgcgctactgatcggcgccgggatggtgtggtggattaatttctccatcggcaagctggttcgctacgcggactccgtgaccgccgaccgcccggttccgttgccggatgtcggcggcagcgaactgcgtaggctggcgcaggcgctggagagtatgcgccttaagctggaaggaaaaaacgccattgaaaactacgtgtatgccttgacccatgagctgaagagcccgctggcggcgattcgcggcgcagcagaaatcctccaggaagcgcctccgcctgagatcgccgcgcgttttacccgtaatatcctggcgcagaatgcgcgtatgcagtcgctagtagaaaatttactccagcaggcccggctggagaatcggctggagatcgccaggcgtcccgtctctgtagcggcgctttttcgccgccttgccgaggagcgagagatcgcgctggcggcgaaaaacctcaggctacgctggcaggagacaaccctgacggttgagggcgatcgcgaacttttggcgcaggcgttgggcaatctccttgataacgctatcgatttcactcctgtggaaggagagatcctgcttggcgcggaagaaaacgatggcggcgtactcttgaccgtaagcgatacgggaagcggtgttccagactatgcgctggggcgtatttttgagcgtttctactcactgccgcgcgacgatggacataaaagcagcggcctggggctggcatttgtgcgtgaggttgcgcgcctgcatcagggggatattcagctgattaatcgccctgaaggcggggcgtgcgctttgctgagacttcacgctcacttcacatag

SEQ ID NO: 176889 - DNA, 687 bp, Klebsiella oxytoca
atgcaacaaccgcggatctggttggtggaagatgagctcagcattgccgatacgcttgtctacatgctgcaacaggaaggatttatcgttacggcgtttgagcgcgggctacccgctctggatgccgcccatcatcaaatacccgacctggcgatcctcgacgtcgggctgccggatatcagcggttttgagctatgccgtcgtctgctggcccgctatccggcgttgccggtgctgttcctgacggcccgcagcgaagaggtggataagctgcttggcctggaaatcggcgccgatgattatatcgccaagcccttttcccctcgtgaagtgtgcgccagggtgcgcaccgtcctgcggcggctgcaaaaatttgccgcgccttcaccgctgctacgggtaggggaatttactttgcatgacgctgcggctcaggttacgtggtgcggacagcccctgaatctgacccgctatgagtttttattattaaaaacgctgcttcactctcccggccgcattttttctcgccagctgctgatggagcaagtttggggcgacgcgaacgagagcttcgatcgcaccgtggatacccatatcaaaacgctgcgcgcgaagctgcgagaagttaaccccaatatctcccctattagtacgcatcgcggcatgggatacagccttggaggttag

SEQ ID NO: 176890 - DNA, 474 bp, Klebsiella oxytoca
atgaaatacaagaagttagttgcaggaatgtttttactggccggctgtcaggtggcccaggcggagcaaatcggctccgtggatacggtatttaagtttcttggtccggatcataaaatcgtcgtggaggcctttgacgatccggatgtccagaacgtgacgtgctacatcagtcgcgcgaaaaccggcggaattaaaggcgggttaggcctggcggaagatacctctgatgccgcaatttcctgtcagcaggtggggcccattgagctgacggataaaattaaaaacgggaaaaagcagggcgatgtggtattccagaaacgcacctcgctggtttttaaaaagctgcaggtcgtgcgtttttatgatgcgaaacgcaatgcgctggtctatctgacctattcagataaaatcgttgatggctcgccgaagaatgcgcttagcgccgtgccgattatgccatggaataaataa

SEQ ID NO: 176891 - DNA, 870 bp, Klebsiella oxytoca
atggatcaagcagggattattcgcgatctccttagctggctggaaggtcacctggatcagccactctcactggacaatgtggcagcgaaggcaggttattccaagtggcatctgcaaagaatgttcaaggacgtcaccggccacgccatcggtgcctatattcgcgcccgtcgcttatctaagtcagcggttgccctgcgcctgaccgcacgtccgattctcgatatcgcgctgcagtatcgttttgattcgcagcagacgtttacgcgtgctttcaaaaagcagttttcgctgacgccagccctctatcgacgctctccagactggagttcttacggtatgcgccctccgctgcgtctgggcgagttcaccatgccgcagtatgaattcgtcacgctgaacaccactcagctggttggcgtcactcagagctatacctgtaagctggaagagatctccgatttccgtaatcagatgcgcgttcagttctggcgtgaattcctcgccaatacgccgtcaattcctccgacgctgtacggcctgcacgaaccgcgccccagcatggataaagacgatgagcaggaggtgttctacaccaccgcgctgacgccggagctggctaacggtcacctgcacaacgcccatccggtgacgctggaaggcggcgagtacgtgatgtttacctacgaaggattgggtaccgggttacaggaatttattctgacggtttacggcacctgcatgccgatgctcaacctcacccgccgtaaaggtctggatatcgaacgtttctttccggaagatgaaagccggaatcaggaaccgcccattcagctacgctgcgaatacctgatcccgattcgtcgttaa

SEQ ID NO: 176892 - DNA, 648 bp, Klebsiella oxytoca
atgttacaggtataccttgttcgccacggtgaaacgcagtggaacgccgagcgacgtattcagggccagtccgacagtccgcttaccgcccacggtgagcgtcaggcctggcaggtaggcgagcgcgccagaacgctggggattacgcatataattgccagcgacttaggtcggacgcggcgtaccgcagaaatcatcgctgaagcctgcggatgcagcgtcataaccgattcacgcttgcgtgagctggatatgggcgtgctggaaaagcgccatattgactcgctaagcgaagaagaagagggctggcgtcgccagctggtcaacggcacgcccgatgggcgtatcccgcagggggaatcgatgcaggagctgagcgagcgtatgcatgcggcgctggcatcttgcctggaactgcccgcaggcagccggccgctgttggtgagccacggcatggcgctgggatgtctggtgagtacgattcttggtttgccggcatacgcggagcgacgtctgcgtctgcgcaactgctccatttcccgcgttgactatcagcagagcccctggctggcgtcaggatgggtagtggaaaccgcgggggatgtttcgcatcttgatgcccccgcgatggatgaactacagcgttaa

SEQ ID NO: 176893 - DNA, 522 bp, Klebsiella oxytoca
atgcaccatgttgtctcagctaccactaatcccgccaaaattcaggcaattctgcaggctttcaacgagatcttcggcgaaggatcctgccacattgagtccgtctccgtcgagagcggcgtgccggaacagccttttggtagcgacgaaacgcgcgctggcgcacgaaatcgcgtggctaacgcgcgtcttgcgcagccaaatgcggacttctgggtcgccattgaagccggaatcgacgagggcagcacttttagctgggtgaccatcgataacggtagcctgcgcggcgaagcgcgctcggcaaccctaccgctgccgcaggtcattcttgaaaaagttcaggcaggggaagcgctgggtccagtgatgtctcagcataccggcatcgatgaaattggccgtaaagagggcgcaatcggcgtatttacggccggaaaactgacccgcagcagcgtttatcatcaggccgtcgtgctggcgctaagtccgtttcataacgctatttatcgccagcgttaa

SEQ ID NO: 176894 - DNA, 333 bp, Klebsiella oxytoca
atgacccaacaatccccctattcagcagcggtagccgaacagcgtcatcaggagtggctgcgttttgtcgcgctcttacagcaggcgtacgccgacgatcttcatctgccgcttttacagcttatgctgacccccgacgagcgcgaggcgctgggtacgcgggtacgtattattgaagagctgctgcgcggtgagatgagccagcgcgagctaaaaaatgaactcggcgccggcatcgcgaccatcacccgcggttcgaacagcctcaaatcagcgccgccggagctgcgtttatggctggagcagtcgttgtttaacgctggcgataaatag

SEQ ID NO: 176895 - DNA, 1938 bp, Klebsiella oxytoca
gtggaaaaagccaaaactgtgacgtggcgtcttctggccgccggcgtaagtctgctgacgttaagccaactggcgcatgcggattcactggatgaacagcgcagccgctatgctcaaactaaacaggcatgggacaaccgacagatggatgtcgtcaatcagctgatgcccaccctgacgacctatccgctttatccttatctccagtatcgtcagataaccgacgatctgatgaaccaaccggcgctggtggtcaccaattttatcgccgctaaccctacgctgcctcccgcacgatcgctgaaatcccgctttgttaacgaactggcgcgtcgcgacgactggcgaggcctgctggcgtttagcccggagaaaccgaccggcaccgaagcgcagtgtaattactactatgcgaaatggaacgtcggccagactcaggaagcctgggatggggcgaaagcgctgtggctgagcggcaaaagccagccaaacgcctgcgatcggctatttggcgcctggcgggcctcaggtcagcaggatccgttggcctatcttgaacggatccgtctggcgatgaaggcgggaaataccagcctggtaagggttctggcccagcagatgccgtccgattatcaaacgattgcgacggcggttatcgcgctggctaacgatccgaatagcgttatgacctttgcccgtacaaccggcgcgacggattttacccgccagatggcggcggtcgcctttgccagcgttgcgcggcaggacgtggaaaatgcgcgcctgatgatcccttcattagcgcaggcgcagcagcttaatgaagatcaaatccaggagctgcgtgacatcgtcgcctggcgactgatgggcagcgacgtgaccgaagagcaggccatctggcgcgacgacgctatcatgcgctcccaatccacttcgttggtggagcgccgggtacgtatggcgcttggtcttggcgatcgtcgcggcctgaatacctggctggcgcgtttgccgatggaagcgaaagagaaggatgaatggcgctactggcaggccgatctgctgctggagcgcgggcgcgatgatgaagcgaaagatattctgcgctcgctgatgcagcagcgtggtttctacccgatggtcgcagcccagcgcctgggcgaggagtacactttccgtattgataaagctcccgctaatctcgatccggcgctgacctccgggccggaaatggcgcgagtccgcgagctcatgtactggaatatggacaataccgcccgcagcgagtgggccaatctggtcaccagcaagaccaaagatcagcaggcacagctggcgcgttacgcgtttaatcagaactggtgggatctcagcgttcaggccacgatcgccgggaaactgtgggatcaactggaagagcgtttcccgctggcctataacgatcttttcaaacgctacatcagcgggaaagatattccgcaaagctacgcgatggccattgcgcgtcaggagagcgcctggaacccgaaagccggttcaccggtaggtgcccgcggtctgatgcagattatgccgggtacggcgacgcatacggtgagcatgttcagtatccctggctatagcggtccatcgcagctgctggatccggaaatgaacatcaacattggtaccagctatctgcagtatgtttatcagcagtttggcaataaccgtatcttcgcctcagcggcctataacgccgggccagggcgggtgcgcacgtggcggggcaacagcggcggccgtattgacgcggtggcgttcgtcgagagcattccgttctctgaaacgcgcggctacgtcaaaaacgttttgtcctatgatgcctactatcgctattttatgggccagaaagatgctctgctgagcgatgcggagtggaagctgcgctactag

SEQ ID NO: 176896 - DNA, 1668 bp, Klebsiella oxytoca
gtggctcaattcgtttataccatgcatcgtgtcggcaaagtggttccgccgaaacgtcatattctgaaaaatatctccctgagcttcttccctggcgcaaaaatcggtgttctcggtctgaacggcgccggtaagtctaccctgctacgcatcatggccggcattgataccgatatcgaaggcgaagctcgtccgcagccgggcctgaaaatcggctatctgccgcaggagccgcagctcaatccagagcagaccgtacgtgagtcggttgaagaggcggtggccgaagtggtcaatgcgctgaaaggtctggacgaggtgtacgcgaagtacgctgagccggatgccgacttcgacaagctcgccgctcagcagggcaagtttgaagagattatccaggcgcacgacggccataacctgaacgtgcagctggagcgcgccgcagatgccctgcgtctgccggactgggacgcgaaaatcgccaatctctccgggggtgaacgccgccgcgtcgcgctgtgccgtctgctgctcgaaaagccagacatgctgctgctcgacgaaccgactaaccacctggatgcggaatccgtagcgtggctggaacgtttccttcacgacttcgaaggtaccgtggtggcgattacccacgaccgttacttcctcgacaacgtggccggctggatccttgagcttgaccgcggcgaaggtattccgtgggaaggcaactactcctcctggctggagcagaaagaccagcgtctggcgcaggaagcttctcaggaagcggcgcgtcgtaagtcaatcgagaaagagctggagtgggtccgtcagggcgcgaagggccgtcagtctaagggtaaggcccgtctggcgcgctttgaagagcttaacaacgtcgagtatcagaaacgtaacgaaaccaacgaactgtttattccgccaggcccgcgtctgggggataaagtcgtggaagtcagcaatctgcgtaagtcctacggcgaccgcgtgctgattgacgatctgagcttctcagtaccgaagggcgctatcgtcggcatcatcggtcctaacggcgcgggtaaatcgaccctgttccgcatgatgtccggtcaggaacatcctgacgccggttctatcaccctgggtgaaaccgtcaagctggcctccgtcgatcagttccgcgacgctatggacaacagcaaaaccgtgtgggaagaagtttccggcggcctggatatcatgaagatcggcaacaccgagatgccgagccgcgcctacgtgggccgctttaacttcaaaggcgttgaccagggcaagcgcgttggcgaactgtccggcggtgagcgcggtcgtctgcacctggcgaagctgctgcaggttggcggtaacgtcctgctgctcgatgaaccgaccaacgacctggatatcgaaaccctgcgcgcgctggaaaacgccctgctggagttcccgggctgcgcgatggttatctcgcacgaccgctggttcctcgaccgcatcgcgacccacattctggactaccaggatgaaggtaaggtggagttcttcgaaggtaactttaccgaatacgaagagtataagaaacgcaccctcggcgccgatgcgctggagccgaagcgtatcaagtacaaacgtattgcgaaataa

SEQ ID NO: 176897 - DNA, 1233 bp, Klebsiella oxytoca
atgtcgtcatttgactatttaaaaagcgccataaagcagaagggctgtacgctacagcaggtggcggacgccagcggaatgacaaaaggctacctgagccagctgctgaacgccaaaattaaaagccccagcgcgcaaaagctcgaagcgctgcaccggtttctcgggctggagtttccgcgtcggcaaaaaagcgttggcgtggtatttggtaagttttacccgctgcataccgggcacatctacttgattcagcgcgcctgtagccaggtcgatgagctgcatatcattatgggctacgacgatccccgcgatcgcgagctgtttgaaaagagcgcgatgtcgcagcagccaaccgtgcctgaccgcctgcgctggctgctgcaaacgttcaaatatcaaaaaaatatccgcatccacgccttcaatgaagagggaatggagccttatccgcacggctgggacgtctggagccgcgggatccgcgcctttatgagcgagaagggcattgagcctaactggatctacacctcggaagagggcgacgcgccgcagtatctggatcatctggggattgaaaccgttcttatcgatcctaaacgcacctttatgaacatcagcggcgggcagattcgtgagaatccgttccgttactgggaatatattcctaccgaagtgaagccctttttcgtacgcacggtggcgatcctcggcggtgagtcgagcgggaagtcgacgctggtgaataagctttccaatatctttaataccaccagcgcctgggagtatggccgcgactacgtcttttcgcacctcggcggcgatgagatggcgctgcaatattccgactatgacaaaatcgctcttggtcatgcgcagtatattgattttgcagtaaaatatgccaataaagtggcatttatcgatactgactttgtcagtactcaggcgttttgtttgaagtatgaagggcgggaacatccctttgttcaggcgctgatcgatgagtatcgcttcgacctggtcattctgctggaaaacaacacgccgtgggtagccgatggcttgcgaagccttggcagctccgtagaccgcaaagagttccagtcgctgctggtgtcgctgctcagggagaacgagatagattttgtgcatgtgaaagaggctgattacgacgcccgcttcctgcgctgcgttgagctggtgaaagagatgatgggcgagcagggatag

SEQ ID NO: 176898 - DNA, 1383 bp, Klebsiella oxytoca
gtggcgaaagctccaaaacgcgcatttgtctgtaatgaatgcggtgcggattatccgcgctggcaggggcagtgcagcgcctgtcatgcctggaataccataaccgagatgcgcattgccgcttcgccgcaggtggcaagaaacgaacgcctgtcaggttacgccggtaatgccggcgtatcgaaggtgcaaaagctctctgatatcagcctcgaagcgctgccgcgcttttcgaccggatttaaagaatttgaccgcgtgctcggcggcggcgtggtgccgggaagcgcgattctgatcggcggtaaccccggcgcgggcaagtcgacgctgctgctgcaaaccctgtgtaagctctccgaaggcatgaaaacgctctacgtcaccggggaagagtcgcttcagcaggtggcgatgcgcgctcaccgcttaggtctgcccaccgccaacctgaatatgctgtcagaaaccagcattgagcagatttgccagattgccgacgaagaaaagccgcagctgatggttatcgactccatccaggtgatgcatatggccgacgtgcagtcgtcgccgggcagcgtggctcaggtgcgcgaaacggcggcctatttaacgcgctttgccaagacgcgcggcgtggcgatcgtcatggtcggccacgtgaccaaagacggctcgctggccgggccgaaagtgctggagcactgtattgactgctccgtgctgctcgacggcgacgccgattctcgttttcgcaccttgcgcagccataaaaaccgcttcggcgcagtcaacgagctgggcgtattcgctatgactgagcaggggctacgtgaagtgagcaacccctcggctatcttcctgagccgcggtgacgaagtgacttcgggcagttcggtaatggtggtctgggaaggtacccgaccgctgctggtggagatccaggcgctggtcgatcactcgatgatgtccaacccgcgccgcgtggcggtggggctggagcagaaccgtctggcgatcctgctggcggtactgcatcgtcacggaggtctgcagatggctgaccaggacgtgttcgtcaacgtggttggcggtgtgaaggtcaccgaaaccagcgccgacctggcgctgctgctggcgatggtttccagcctgcgcgaccgtcctctgccgcaggacctggtggttttcggcgaagtgggtctggcgggcgaaattcgcccggtgccgagcggccaggagcgtatttccgaagcggctaagcatggttttcgtcgggcgattgttccggccgcgaatgtgccgaaaaaagtgccggaagggatgcaaatctttggcgtgaaaaagcttgcggacgcgctaagcgtctttgacgacttataa

SEQ ID NO: 176899 - DNA, 972 bp, Klebsiella oxytoca
atgccaaacagtttgacctggtgcgacctgcctgaagatgtttcccagtggcctggattgccgctttccctgagcggtgatgaggttatgccgttggattatcatgccggacgtagcggctggctgctgtatggtcgcggtctcaacaagcgtcgtctgaccgaatggcaacgggagctgggggcggccctggtaattgttgcctcctgggcggttgacgactatcaggtgattcgtctggctggttcgttaacgctacgagcgacccgtctggcccatgaggccgggtttgacgtcgcgccgctggggaaaatcccgcatttacgcacgccgggcctgctggttatggatatggactcgacggcgattcagatcgagtgcattgatgaaatcgccaaactggctggtaccggcgagctggtctctgaagtgaccgagcgcgcgatgcgcggcgaacttgatttcaccgccagcctgcgtcagcgggtagcgacgctgaaagatgccgatgccaacattcttctgcaggtgcgtgaaacgctgccgctgatgccggggctgacccagctggtgctgaagctggaaacgctcggctggaaggtggcgatcgcctccggcggcttcaccttctttgccgagtatttgcgcgacaagctgcatctcgacgcggtgttcgccaacgaactggagatcatggacggtaagctgaccggcaacgtcatcggcgatatcgtcgatgcgaaatataaagccagtacgctgcgtaaactggcggaaaagtatgaaatcccgccggcgcaaaccgtcgctattggcgatggcgcaaacgatctgccgatgattaaagcggcaggactcggcatcgcctatcatgctaagcccaaagtgaatgaactggcggaagtgacaatccgccacgctgacctgatgggggtattctgtattctctccggcagcatgaatcaaaagtaa

SEQ ID NO: 176900 - DNA, 642 bp, Klebsiella oxytoca
atggtacgcgcaaaacttaaattccggctgcatcgcgcggtgatagttctgatctgtctcgcactcctcgtcgcccttatgcagggcgcttcgtggtttagccagaacagtcagaagcagcgcaatccgcagctggaagaactggcccgcacgctcgcccagcaggtcacgctgaacctggcgccgctgatgcacagcgaaacgcccgacgaaaagcgaattagccagctgctggaccagcttacccataaaagccggatcctcgacgccggcgtgtatgacgaacagggtgacctggtggcgcgttccggcgaaagcgtcgaggtacgcgatcggctggcgctggacgggaaaaaagcgggcggctacttcaaccagcaaatcgttgagcctgttcagggtaaaaatgggccgctcggctacctgcgcctgacgctggatacccacacgttagccaccgaagcgcagcaggtcgataataccaccaatatcctgcgtctgatgctgctgctatctctggccatcggcgtcgtcctgacgcgcaccctgctgcagggaaaacgtacccgctggcagcaatcgcctttcctgctcaccgccaataagccggtgcaggatgaagataaagatgaatcagaataa

SEQ ID NO: 176901 - DNA, 1017 bp, Klebsiella oxytoca
atgcccacgctgcgcctgctgctctctgactcttacgacccttggttcaatctggcggttgaggagtccatttttcgccagatgcccgcaactcaacgggtgctgtttctgtggcgcaacgccgatacggtggtcattggccgcgcacaaaacccgtggaaagagtgcaacacccgacgtatggaagaagacaacgtgcgcctggcgcgtcgcagcagcggcggcggcgcggtattccacgatctgggcaatacctgctttacctttatggccggaaagccagagtacgataaaaccgtttccacgaatatcgtcctgacggcgctgaattcgctgggcgtcacggcggaagcctcaggccgtaacgatctggtcgtaaaaaccgctgaaggcgaccgaaaagtctccggctccgcctatcgcgaaacgatggatcgcggctttcatcacggaacgctgctgctgaacgccgatttaagccgtctggccaactacctcaatcccgataagaaaaagctgcaggctaaaggcattacctccgtacgcgggcgcgtagccaatctggtcgagctgctaccgggcattacccatcagcaggtctgcgaggctatacaggaggcgtttttcgcccattacggcgaacgcgtcactgcagaagtgatctccccggagaaaatgccggacctgccgaattttgccgcgacctttgctcgccagagcagctgggagtggaactttggccaggcaccggctttcagccatctgctggacgaacgttttacctggggcggcgtagagctccatttcgacgtcgaaaaaggccatatcacgcgcactcaggtctttaccgacagccttaacccggcaccgctggaagcgcttgccgcccgactgcagggctgcctgtaccgcgcggatatgctgcagcaggagtgcgaggctttattcgttgatttcccggagcaggagaaagagctgcgtgagctgtcggcgtggattgccggcgcggtacgctaa

SEQ ID NO: 176902 - DNA, 723 bp, Klebsiella oxytoca
atggctactccacacattaacgcagaaatgggcgatttcgctgacgttgtgctgatgcctggcgacccgctgcgcgcgaagcacattgccgaaactttccttgaagatatccgtgaagtaaacaacgtccgcggtatgctgggcttcaccggtacctataaaggccgcaaaatttccgttatgggtcacggtatgggtatcccctcctgctccatttatgcgaaagagctgatcaccgacttcggcgtcaaaaaaatcattcgcgtaggctcctgcggcgcggtgcgtatggacgttaaactgcgcgacgtggttatcggcatgggcgcctgcaccgactctaaagttaaccgtatgcgtttcaaagaccacgactttgcggcgattgccgactttggcatggtgcgtaacgcggttgacgcggcaaaagcgctgggcgttgacgctcgcgtgggcaacatcttctctgctgatctgttttatgcgccggacggcggtgagatgttcgacgtaatggaaaaatacggcattctgggcgtggaaatggaagcggccgggatctacggcgtcgcggcggaattcggtgcgaaagcgctgaccatctgcaccgtatctgaccacatccgtacccacgagcagaccacggctgctgaacgccagacgaccttcaacgatatgatcaaaatcgcgctggaatccgttctgctgggcgataaagagtaa

SEQ ID NO: 176903 - DNA, 1224 bp, Klebsiella oxytoca
atgaaacgtgcatttattatggtgctggactcattcggcatcggtgcgactgaagacgctgaacgctttggcgacgtcggttcagacaccatgggccatattgcagaagcttgtgccaaaggcgaggctgacaacggccgtaaaggtccgctcaatttgcctaatctgacccgcctggggctggttaaggcccatgaaggttctaccggtaaagttgcagccggtatggacggcaatgcggaagttatcggcgcttacgcatgggcgcatgagctctcttccggcaaagacaccccgtcaggccactgggaaatcgccggcgtgccggttctgtttgactggggctacttccctgagcatgaaaacagcttcccgcaggagctgcttgataaactggttaagcgcgcaaatctgccgggctacctcggcaactgccactcttccggtaccgttatcctcgatcaactgggcgaagagcatatgaaaaccggcaagccgattttctatacctctgctgactcggtgttccagattgcctgccatgaagagacctttggtctcgataagctgtacgaactgtgcgaaatcgcgcgtgaagagctgaccgaaggcggctacaacatcggccgcgttattgcgcgtccgtttatcggcgacaaagccggtcacttccagcgcaccggtaaccgccacgatctggccgttgagccgccggcaccgacggtgctacagaagctggttgacgagaaaaaagggcaggtggtttcggtcggtaaaatcgccgacatctatgccaactgcggcattaccaaaaaagtgaaggcgaccggcctggatgcgctgtttgacgccaccattaaagagatgaaagaagcgggggacgaaaccatcgtcttcaccaacttcgtggacttcgactcttcctggggccatcgccgcgatgttgctggctatgctgcgggcctggagctgttcgatcgccgtctgccggagctgatggaactggtaggggaagatgacattctgatcctgaccgctgaccacggctgcgacccgacctggaccggtactgaccatacccgcgaacatattccggtactgatttatggcccgaaagtgaagccgggttcgctgggtcaccgcgaaaccttcgccgatatcggccagactctggcaacgtacttcggtacgtctccgatggaatacggcaaaaacatgctgtga

SEQ ID NO: 176904 - DNA, 1323 bp, Klebsiella oxytoca
ttgtttctcgcacaagaaattattcgtaaaaaacgtgatggtcatgcgctgagcgatgaagaaattcgttttttcattaacggtatccgcgataacaccatctctgaagggcagatcgccgcgctggcgatgaccatttttttccacgatatgtctatgccggaacgcgtttcgctgaccatggcgatgcgggattcaggaaccgtcctcgactggaagagccttaatcttaacggcccgattgtcgataaacactctaccggcggcgtaggcgatgtgacttccctgatgctggggccgatggtcgctgcctgcggcggctatgtaccgatgatctccgggcgcggactcggtcataccggcggtacgctggacaagctggaagcgatccccggtttcgatatcttcccggacgatagccgcttccgtgaaatcattaaagatgtcggcgtcgcgattatcgggcagaccagctctctggcaccggcggacaaacgtttttacgccacgcgtgatatcaccgcgacggtggactctatcccgctgatcaccgcctcgattctcgccaagaagctggcggaagggctggacgcgctggtgatggatgtcaaagtcggcagcggcgcctttatgcctacttatgagctttccgccgcgctggccgaagcgatcgtcggcgttgctaacggcgccggcgtgcggacgacagccctgttgaccgatatgaaccaggtgctggcttccagcgctggtaatgcggtggaagtgcgggaagccgtgcagttcctcaccggcgagtaccgcaatccgcggttgcttgaggtgacgatggcgctctgcgttgagatgctgatttccggcaagctggcggagaacgatgccgatgcgcgggctaagcttcaggcggtgctggataacggtaaagccgcagaagtctttggccggatggtggcggcgcaaaaaggccctggcgatttcgtggaaaactacgataaatacctgccgggcgcgatgctaagcaaagcggtctacgccgaaggcgaaggatttgttgccgaaatggacactcgcgctctgggcatggcggtggtctctatgggcggcggtcgccgtcaggctgcagatctaattgattacagcgtcggcttcaccgacatggttcccctcggcgcgcgcattgatacgcagcagccgctggcggttatccatgcgaaagatgagaacagctggcaggaagcggccaaagcagtgaaagcggccataaaacttgacgataaagcgcctgaaattacgccgacagtctatcgtcgtatcaccgaatag

SEQ ID NO: 176905 - DNA, 780 bp, Klebsiella oxytoca
atgactgatttaactgcaagcagcctgcgcgcgttgaaactgatggaccttaccaccctgaatgatgacgacactaatgagaaagtgatcgcgttgtgtcatcaggccaaaacaccggtagggaataccgccgcagtgtgtatctacccgcgctttatcccgatcgcgcgcaaaacgctgaacgaacagggaaccccggatatccgcattgcgacggtgaccaacttcccgcacggtaacgatgatatcgatattgcgctggcggaaacccgcgcggcgattgcctacggcgcggatgaagtcgacgtcgtgttcccttatcgcgcgctgattgcgggcaacgaacaggtgggttttgacctggtcaaagcctgtaaagaagcctgcgcggcagcaaacgtgctgctgaaagtcattatcgaaaccggcgagctgaaagaagaagcgctgattcgtaaagcgtctgaaatttccatcaaagccggcgctgattttatcaaaacgtcgaccggtaaagttccggtgaatgcgaccccggaaagcgcgcgcattatgctggaagtcatccgcgatatgggtgttcagcagagcgttggcttcaaaccggcaggcggcgtgcgcagcgcggaagacgcgcaaaagttcctcgccattgctgatgagctgttcggggccgactgggccgattctcgccactatcgcttcggcgcttccagcctgctggcaagcctgctgaaagcgttgggtcacggcgatggtaagagcgccagcagctactaa

SEQ ID NO: 176906 - DNA, 1278 bp, Klebsiella oxytoca
atgcaaattatcatgggacttatcggcatggtggtgctgttagccatcgcagtgctcctctccagtaatcgaaaagccatcaacctgcgcaccgtcctcggcgcctggattatccaggtggggatcggcgcgttaattctctacgtgccggccgggcgcacggcgctgctggccatgtctaacggcgttgccaacgtgattgcttacggcaatgaagggatcggctttattttcggcggtctggtttccgacaagatgtttgaggtcttcggcggcggcgggtttgtttttgccctgcgcgtcctgccggtcattgtcttcttctcatcgctgatcgccgtgctttattacctgggcattatgcagtttgtgatccgcatactcggcggggcgctgcgcgcggtactgaaaacctcgcgcacggaatcgctctctgccacggcgaatatttttgttggccagaccgaagcgccgctggtcgtgcgtccttacatcgccaccatgacgcgctctgagctatttgcggtgatgtgcgggggcctggcttcggtcgcaggctccgttctggccggttatgcccagatgggcgtaccgttagaatatctgattgccgcttcatttatggcggcaccgggcggcctgctgtttgcgaaaattatcgtgccggaaaccgagcagccgcaagatagcccggcgctggaaaaaaatgacgccgatccggaagcgccggcaaacgtactggatgctgccgcatccggggcagcttcggggatgcagctggcgcttaacgttggcgcgatgctgctggcgtttatcgcgctgattgcgctggttaacgggatcctctccggcgtgggcggctggtttaactacccggatctgtcgctgcaaatgattctcggctgggtcttctcgccgctggcgtgggtgattggcgttccatggagtgaagccaccgtggccggctcatttatcggccagaagctgatcatcaatgagtttgtagcctatatgaatttcggcgaatatctgaaagccgacgccgaggtggctgccgcaggtttgcaggtcatttcaacccacactaaggccattatctcctttgccctttgcggttttgccaacctgtcatccattgccattctgattggcggtttaggcggtatggcgcccaatcgccgccaggaaatcgcacagctgggcatgcgggcggtggcggcgggtacgctctcaaatctgatgagcgccaccatcgcaggcgtcttcctcgcgctataa

SEQ ID NO: 176907 - DNA, 780 bp, Klebsiella oxytoca
gtgaccttgcgatttattgatacccactgtcacttcgatttccctcctttcaccggcgacgaaactgccagtattgcccgagcggctcaggctggcgtgaggcaaatcatcgtaccggcgacggaagcggataactttgcccgcgtattagggctggcggcgcagtatgctccgctttacgcggccctggggcttcatccgatagtaattgagcggcatgaagaagagagtctggcgcggcttgaagcctgcctggcgaaacgcgatgctaagctgatcgcggttggggaaattggcctcgatctctatcgcgaagatccgcagttcgagcgccagatttctctcctggaggcgcagttgcgtctggcgaaacgctacgacttgccggtcatcctccactccagacgcactcatgacaagctggcgatgctgctaaaaaagcacgctttaccgcgtaccggcgtggtgcacggttttgccggtagtcttcagcaagccgaacgttttgtccagctgggctataaaatcggcgttggcggtaccattacctacccgcgcgccagcaagacccgcgatgtgatggcgcagctgccactttctgcgctgttactggagaccgatgcgccggatatgccgttaaacggtttccaggggcagccgaacaggcctgagcaagcggctcgcgtcttcaccgccttatgtgagctacgctctgagcctgctgaagagatagctaataccatgttttgtaatacaaaagaggtttttgctattttataa

SEQ ID NO: 176908 - DNA, 1074 bp, Klebsiella oxytoca
gtggggcagcgaattcccgtgacgttgggcaacattacgccgttatctgttaaacccttccagccgggcaggcttgcgctggtgtgcgaaggtgggggacagaggggcatttttaccgccggggtgctggacgaatttatgcgcgcgggatttaacccgttcgatatgctgtttggcacctctgccggggcgcaaaatctctcggcctatctgtgcaaccagcccggctatgcccgcaaggtgatcacccgctacaccaccgcccgcgagtttttcgacccgatgcgttttgtccgcggaggcaacctcatcgatctcgactggctggtcgacagcaccgccaaaaaaatgccgctggcgatggcttatgctgaagaccgttttgctcagggtaaagagttctggatgtgcgcctgccgcggcgatgattatacgcccaactacttttcccctacccagcaaacctggctcgatctgattcgcgcctccagcgcgattcccggtttttaccgcagcggcgttatgctggatggggtgagctatctggacggcggcgtcagcgatgcgatcccggtgcaggaggccgcccgtcggggcgcgcaaacaattgtagtgatccgcaccgtgccttcgcagatgtactacaccccgcagtggtttaaacggatggagcgctggcttggcgaaagtagcctgcagccgtttgtgaatctggtacagcaccacgaaaccacctatcgctccacgcaagagttcattgagaagccgccgggtaagctgagaattctggaaatatatccacagaagccattgaaaagtatggcgttaggcagccgtcttcctgctttactggaagactacaaaaccgggcgccagtgcgggcgctatttcctcgctacggtcggtaaactgctggccgacaggcctcctttgctgcgtcatgcgccacgcattgcggtaccgaaaacggtggttatcccgccggcgcccgtggccaacgagatccctcaggttccggtcatcgcggctgagcaggccaatgatgccagctttgataatgaggacctcgcgtga

SEQ ID NO: 176909 - DNA, 162 bp, Klebsiella oxytoca
atgtttagatggggcattatttttctggtgatcgctttaattgccgccgctctgggttttggtggcctggcaggtaccgctgcctgggctgctaaaattgtctttgttgtcggtattattctgttcctggtcagcctgttcaccggccgtcgacgtccctag

SEQ ID NO: 176910 - DNA, 612 bp, Klebsiella oxytoca
atgacaagacttaagagcggcaagacactcctggccctcttcctgggctcagcaataatcagcgcttcggcgtatgcagaaaactcgaccgtagacagcgcaaaatctgcagccagcaatgccggtcaagccgttgataattcgatgaacaaagtcggaaactttatggacgacagcaccatcaccgccagggtgaaagcggcgctgatcgatcataaggatattcgcagcaccgatatctcggtgaaaacggaaaataaagtcgtcacgttaagcggtacagttgatagttcagagcagcataaacaagcgcttagcgtagctaaagccgttgaaggcgtgagctcggtaaacgacaagcttagcgtgcagaacgaaaaatcagcgtcgctgaagggctacgcgggcgataccgcggtgaccagcgagatcaaagctaaattactggctgacgatatcgtcccgtcgcgtaacgtgaaagttgagaccaccgatggcgtcgtacatttatccggcacggtcgagtccagcaagcagtcggaacgtgcggaaggcattgctaaagccgtttccggcgtcaaaagcgtgaagaacgatcttagcgttaaataa

SEQ ID NO: 176911 - DNA, 1590 bp, Klebsiella oxytoca
atgacgttgtctccttatttgcaggaggtggccaagcgccgcacttttgccattatttctcacccggatgccggtaaaacgaccattactgaaaaggtgctgttattcggacaggctattcagaccgccggtacggtaaaaggccgcggctccagtcagcatgcgaagtctgactggatggaaatggaaaagcagcgcggtatctccattaccacttccgtaatgcagttcccgtatcacgactgtctggtcaatctgctggatactccggggcacgaagacttctccgaagatacctatcgtacgctgacggcggtggactgctgtctgatggttatcgatgccgcgaaaggcgtcgaggatcgtacccgtaagctgatggaagtcacccgtctgcgcgatacgccgatcctgacgtttatgaacaaacttgaccgtgacatccgcgacccgatggagctgctggatgaagtggaaaacgagctgaaaatcggctgcgcgccgatcacctggcccattggctgcggcaagctgttcaagggcgtttaccacctctataaagatgaaacctatctctaccagaccggtaaaggtcacactatccaggaagtgcgcatcgttaaagggttaaataacccggatctggacgcggcggtgggcgaagacctggcgcagcagctgcgcgacgagctggagctggtgcagggcgcgtctaacgaatttgataaagatctgttcctggcgggcgaaattacgccggtattcttcggaaccgcgctgggtaacttcggcgttgaccatatgctggacggtttagtggagtgggcgcctgcgccgatgccgcgtaaaaccgatacccgcaccgtggaagcctcggaagagaagttcaccggctttgtctttaaaattcaggccaacatggacccgaaacaccgcgaccgcgtggcctttatgcgcgtggtttccggtaagtacgagaagggcatgaagatgcgccaggtgcgtatcggcaaggatgtggtgatctccgacgcgctgaccttcatggccggcgaccgttcgcatgtggaagaagcgtatccgggcgatatcctgggtctgcataaccacggcaccatccagattggcgataccttcacccagggtgaaatgatgaagttcaccggtatcccgaacttcgccccggaactgttccgccgcattcgcctgaaagatccgctcaagcagaaacagctgctgaagggtctggttcagctttctgaagaaggcgcggtgcaggtgttccgtccgatcgccaataacgatctgatcgtcggcgcggtgggggtactgcagtttgacgtcgtcgtcgctcgcctgaagagcgaatacaacgttgaggcgatctacgagtcggtcaacgtcgccaccgcccgctgggtggaatgcagcgacgcgaagaaattcgaagagtttaagcgtaagaacgaaattcagctggcgctcgatggcggcgataatctgacctacatcgccccgaccatggttaacctgaacctgacgcaggagcgttatcctgacgtccagttccgcaaaactcgcgagcattaa

SEQ ID NO: 176912 - DNA, 678 bp, Klebsiella oxytoca
atgaagtgggactggattttctttgatgccgatgaaacgttatttacgtttgactcgtttagcggcctacagcggatgtttctcgactatagcgtgaccttttccgcagaggattttcaggactaccaggccgtgaataagccgctgtgggtggattatcagaacggcgctatcacttctcttcagctgcagcatcagcgctttgacggttgggcggagcgcctgaacgtccctcctggtgagctgaacgccgcgtttatgaacgcgatggcggagatctgctcgccgctgccgggcgcggtgtcgctgctggattcgttgcagggtaaggtgaaaatgggcatcatcaccaacggttttacctcgctacagcagacgcgtcttgaacgtaccgggttacgcgatcattttgatttactgattatttccgaagaggttggggtcgctaaaccggatgcgcgcatctttgattatgccctggcgcaggcgggcaaccccgatcgtgcacgggtgctgatggtgggtgatacggcggaatctgatattcgcggcggcgtgaatgccggcctggccacctgctggtttaaccctcatcaacgcgagttgcccgccgacctccgcgcggactggacggtcacctctttaagcgaactggagcaactcctgtgtaaacactga

SEQ ID NO: 176913 - DNA, 447 bp, Klebsiella oxytoca
atgaacacgatttctaccctcaacgcggctgatttgcctcgggcctggcaaattgaaacgcgcgcccacgctttcccctggagcgagcagacgtttgccagcaatcagggcgatcgctatttgaatcttcagctgtccgtagacggggagatggcggcctttgctattacgcaaatcgtgctcgacgaggcgacgctgtttaatatcgccgtcgatcccgcttttcagcgtcgcggtctgggcagagcgctgctggagcaggtgattgatgaaatagaaaaacgcggcgtcgtcacgctgtggctggaggtgcgcgcgtctaacgtcgccgccatcgcgctctatgaaagcttaggctttaacgaggcgacgattcgccgcaactattaccccacggtcgacggacgtgaggacgccattattatggcactgccaatcagtatgtaa

SEQ ID NO: 176914 - DNA, 414 bp, Klebsiella oxytoca
atgacatcccgacgagactggcaattacagcagctgggtattacccagtggtcgctgcgtcgtcctggggcgttacagggtgaaatcgctatctcgcttcctggacacattcgtctggtgatggtggcggaagaaccgccatcgctgaccgaaccgcttatccgcgatattctgcgcacgctgtccctgacgccggagcaggtaatgcagttgacgcctgagcgcgtggcgatgttgcctcaggacgcacgctgtaatagctggcggctgggtacggacacgccgctgatgctggcgggcgcgcagctatccacgcccgctttcgatgaacttcagaccagtacgcctgctcgcatggcgctctggcaacagatctgctcacatgaacacgatttctaccctcaacgcggctga

SEQ ID NO: 176915 - DNA, 1029 bp, Klebsiella oxytoca
atgtccgcttttaccccggcaagtgaagtcttgctgcgccacagtgatgatttcgagtccgcccgcgttctgtttgccggtgacctgcaggatgacctgcccgctcgtctggatacggctgccagccgcgcccatacccagcagtttcaccactggcaggtactgagccgccagatggctgaaaacgcccgttttagcctggtcgcggaagccagcgatgttgccgattgcgatacgctgatctactactggccaaaaaacaaacccgaagctcagtttcagctgatgaatctgctttccctgctgccggtcggtattgatattttcgtggttggcgaaaaccgcagcggcgtgcgcagcgccgagcagatgctggcggaatatgcgccgctgactaaagtcgacagcgcgcgccgctgtggtctctatcacggtcgtctggaaaaacagccggccttcgatcccgagcagttctggggcgagtatccgctggaaaatctgacgattaaaacgctgccgggcgtcttcagccgcgatggcctggatattggtagccagctgctgctttcaaccctgacgccgcacaccaaaggtaaagtattggacgtcggctgcggcgccggcgtactggcaaccgtgctggccagccactcgcctaaagtccgcttatccttatgcgacgtcagcgccccggcagttgaagccagccgcgccacgctcgccgctaacggtatcgaaggggaagtattcgccagcaatgtattttccgaagtgaacggccgcttcgatatgattatctccaatcctcctttccacgatggtctgcagaccagcctggaagccgctcagaccctgattcgcggcgccgttcggcatttgaacagcggcggagagctacgcatcgtcgccaacgccttcttgccctatccgaatgtgctggatgagatcttcggcttccatgaagtgattgcccagacgggccgctttaaggtttaccggacggtgatgacgcgtcaggccaggaaatag

SEQ ID NO: 176916 - DNA, 222 bp, Klebsiella oxytoca
atgaacaaatttattatagtggcattgctggctacgctacttgccggctgtgcacatgactctccgtgcgtaccggtttatgactctgaaggtagactcgtccataccaatacttgtgtgaaaggaacaactcaggataactgggaaaccgctggcgcgattgccggcggcgcagccgcggtagctggcctgacgctcggtattgtagctttaacccgttaa

SEQ ID NO: 176917 - DNA, 3111 bp, Klebsiella oxytoca
atgtctaagttttttatccatcgcccggttttcgcctgggtgctggcaatcatcatgatgattgccggcggcctcgcgattatgcagctcccgatagcacaatacccgaccatcgcaccgcctgcggtcgctatctccgccacctaccctggcgcggatgcccaaaccgtacaggatacggtgactcaggttatcgaacagaacatgaacggtattgataacctgatgtatatgtcctcaaccagcgattccgccggcggcgtgaccattacgctgacctttacctcgggtacggatccggatattgcgcaagttcaggtacagaataaactccagctggcaacgccgctactgcctcaggaagtacagcagcaggggattagcgtcgagaaatcaagcagtagcttcttaatggtcgctggtttcatctccgataaccccagcaccactcaggatgatatctctgactatgtggcctcgaacgtcaaagatactatcagccgccttaacggcgtgggtgatgtacagctcttcggcgcacagtatgcaatgcgcatctggctggatggaaacctgctgaataagtacaatttgacgcctgttgacgtcattaaccagcttaaaatccaaaacgatcagattgctgcagggcagcttggcggcactccggcccttaaaggccagcagctaaatgcatccatcattgcccagacgcgattgaaggaccccgcagaatttggcaaagtaactctgcgagtgaacgccgacgggtcagtcgtgcatctgaaagatgtggcacgcattgagctgggcggagaaaactataacgtcgtcgcaagaatcaatggcaagccagcttcaggcctgggaattaaacttgcgaccggcgctaatgcccttgataccgccgcggcgataaaagcgaagcttgccgaactgcagccgtacttcccacaggggatgaaggtcgtctatccttacgacaccacgccgtttgtgaaaatctctatccacgaggtggtgaagacgctatttgaagccatcatcctcgtcttccttgtgatgtatctgttcttacagaatatccgggctactctgatccccactatcgcggttccggtcgttctgcttggcacctttgccgtgctggcaacattcggttactccatcaatacgctaacgatgtttggcatggtgctggcaataggcctgctggtcgacgatgctatcgtggtagtggaaaacgtcgaacgcgtgatggtagaagagaagctctccccaaaagaggcgacggaaaaatcgatgtcgcaaatccagggggcattggtgggtattgccatggtgctatcggcggtgtttgtccccatggccttctttggcggctctacgggggcgatttatcggcagttttctatcaccatcgtctccgcgatggcgctgtccgtactggtggcgctaatcctgacccccgcgctttgtgccaccttactgaaacccgcatcagccgatcatcatgagaaaaaaggattttttggctggtttaatgcgaaattcgatcgtagcgtgaatcactacaccaacagcgtgagtgggatcctgcgatgtaccgggcgctatctgatcatctatttgctaatcgttgtgggtatggcgatattgtttatgcgcctgcccccctctttcttgccggatgaggatcagggggtatttatgaccatgatccagcttccttcaggcgcaacgcaggaacgcacgcagaaggttcttgatacggttaccgattactatctgcataaagagaaggcgaacgttgaaagcgtctttaccgttaacggctttagctttagcggccagggccaaaactccggtatggcgtttgtcagcctgaagccatgggaagagcgcagcggcgcagagaatggcgttgaggcaatcatcaaacgggctaccgttgcctttagtcagattaaagatgctatggtctttcctttcaatctaccagcaattatcgagctgggtacggctaccggttttgattttgagcttatcgatcagggtaacctgggccatagcgcattaacccaggcccgtaatcaacttctgggtatggtgagagaataccctgaccagctggtacgcgttcgccccaacgggctcgaagacacgccgcaattcaagcttgatgtcgatcaggagaaagctcaggctctgggtatttcgctatccgatatcaatgagaccatttccgcggcgctagggggctactacgttaacgactttattgaccatggacgcgtgaaaaaagtctatgttcaggccgatgctaaattccgtatgctgccgagcgatatcaataatatgtacgttcgcagcgcgaacggcgagatggtcccgttctccgcattcgtgacctcgcgctgggtttatggttcaccgcgcctggagcgctacaatggtttaccctctatggaagttttgggggaagcggcgccggggaaaagtaccggtgatgcgatgattttaatggaacagctagccagcaagcttcctgccggtattggttacgactggacgggaatgtcctatcaagaacgtttatcgggtaatcaggcgccagccctgtatgccatttcgctgattgtcgtctttctgtgtcttgcggcgctttatgaaagctggtcgattcccttctctgtcatgctcgtcgtaccattaggcgttgttggagcattactcgcggcgtcgttacgcgggcttaataatgacgtttatttccaggtaggtttattaaccactattggcctctctgcgaaaaacgcgattcttatcgttgagtttgccaaagacctgatggataaagaaggcaagggcattatcgaagccacactggaagcatcccgtatgcgtctacgtcctatcctgatgacttcccttgcttttattttgggtgttctgcctctggttattagccatggcgcaggcagcggagctcaaaatgcagtaggtaccggagttatgggcggaatgttgacggcaacattgctggctatattctttgtcccggtcttctttgtggtagtaaggcggcgctttaccaggcacatagactaa

SEQ ID NO: 176918 - DNA, 1140 bp, Klebsiella oxytoca
atgacacgtcacgtcagggttacacttttatccagcctcatcatcccggccctcctgctcagcggctgtgatgattcaggcgatcggcaaccgcatgcgcagatacctcaggtctccgtttatgtggtgaacagcgcgccgctgtccgtgaccacggagctacctggccggacatcagcttaccgcgtagcggaagttcgcccgcaggttagcggcattatcctgcatcgtaactttgtcgaaggtagcgatgtcgccgctggacagtctctctatcaaatcgatccggcgacctatcaggcagcttataacagcgcaaagggggatgaagcgaaagcagaggccgcagcggctatcgcccatttaacggtcaaacgttatgcgcctcttctcggcacaaaatatatcagccagcaggaatacgatcaggcagtagcgactgcccgccaggcggatgccgatgttatcgcaacaaaagccgccgttgaaagcgcgcgcattgatttggcgtacaccaaagtgacttcacctatcggcggtcgcatcggcaaatccagcgtaaccgaaggcgcactggtgacaaatggtcaggctgatgcaatggcgacgatacagcagctcgatcctatttatgttgatgttaccgagtccagtaatgatttcatgcgcctgaagcaggagagtctgcagcagggcagtggcactaaaagcgtgcagctgattatggaaaacggtcaaccttatgcgctgcggggcaccctgcagttctccgatgttacggtagatgagagcaccggctctattacgctgcgcgcgatcttccccaacccacagcatgctctgctgccaggaatgtttgttcgcgctcgcatcgacgaaggtatttcaccagacgctattctcgttcctcagcagggggtaacccgtacgccgcgcggtgatgccagcgtgatgctcgtcaatgacaaaaaccaggttgaaacgcggccagtcaccgcctcgcaggcgattggcgataagtggttaatcacgagcggtctgaaagccggtgaaaaggtcattgtcagcggtctgcagaaagtgcgtcccggcgtcacggtgaaggccgaagaggataccgcgacgactgtcgcgcaataa

SEQ ID NO: 176919 - DNA, 642 bp, Klebsiella oxytoca
atgcctagaagaacgaaagaagatgcgttaaagacgcggcagcttttgattgagtcagccattcaacagtttgccctacgcggcgtgaccggtacaacgttagccgatatcgctgatgctgctggcgtgacgcggggagcagtctactggcacttttccagcaaagcggaactctttaatgaaatgtggcaacagcagcttccgttacgtgatctgcttaaacatgaatttacctcttcacacgctcaggacccgctcagcaggctacgagaaaaatttattatcggtctgcaatatatcgccattaatccccgtcaacgtgcgctaatgcaaattctgtatcagaagtgtgagttttccagcgagatgatatccgaggctgagattcgcaaaaaaattggttttagctatcccattattcgcagtgttttacagctgtgcattcgtaacggattattaccagaggaaaccaacgttgaaatttcattaattgtattacatagcgcatttgtcggtattattaaaaactggctcgtagagcccggaaaattcgacctgtatcatcaggctcccgctttggttgataatattatgtcggtcctttgcggaacccgcgggctacaggcgatagtcaatcattaa

SEQ ID NO: 176920 - DNA, 297 bp, Klebsiella oxytoca
atgttcgaacaacgcgtaaattctgacgtactgaccgtttctaccgttaactctcaggatcaggtaactcaaaagcccctgcgtgactcggttaaacaggcactgaagaactattttgctcaactgaacggtcaggatgttaatgacctgtatgagctggtactggctgaagtagaacagcccctgttggacatggtgatgcaatacacccgcggtaaccagacccgtgctgccctgatgatgggcatcaaccgtggtactctgcgtaaaaagctgaaaaaatacggcatgaactga

SEQ ID NO: 176921 - DNA, 918 bp, Klebsiella oxytoca
atggctggcattactgacagaccattccggacgctgtgttacgagatgggagcagggttgaccgtatccgagatgatgtcctccaacccgcaggtctgggagagcgacaagtcccgcttacggatggtgcacgttgatgagcccggtattcgtaccgtgcaaatcgccggcagcgtgccggaagagatggctgcagccgcccgtattaacgtggaaagcggcgcccaagttattgatatcaatatggggtgtccggctaaaaaagtgaatcgtaagcttgcaggttcagccctcttgcagtaccccgaccaggtgaagtcgatcctgacggcggtcgtcaaagcagtggacgttcccgtaactctcaagattcgcaccggttgggaaccggaacaccgtaactgtgtagaaattgcccaactggctgaagaatgtggcattcaggctctgactattcacggacgcacccgcgcctgcttgtttaacggagacgctgagtacgacagtattcgggcagttaagcagaaagtttccattccggttatcgcgaatggcgacattactgacccgcttaaagccagagccgtgctcgactatacgggggctgatgcccttatgataggccgtgcggctcagggaagaccctggatctttcgggaaatccagcactatctggacactggagagctgctgcccccgctgcccctggcagaggttaagcgcttgctttgtgcacacgttcgggaactgcatggcttttacggccacgcaaaagggtaccgaatcgcacgcaaacacgtatcctggtatctgcaggaacacgctccagatgaccagtttcggcgcacattcaacgccatagaagattccagcgaacagctggaggcgttggaggcatacttcgaaaattttgcgtaa

SEQ ID NO: 176922 - DNA, 741 bp, Klebsiella oxytoca
atgaaaacatctttaggcaaggcggcattgttggtgttaagcatgatgcccattacggtttttgcttcccattggggctatgaaggcgaaggttcgccggagcactggggagcgctcagtgaagagtacaaaacctgccagagcggcatgaaccaatctcccatcaacatcgataccacgttcaaagcgcacctgtcaccgttggaaacccactatattgatggcccaattacgctcatcaacaatggtcacaccattcaggccgggttaaaaactaccacagcggacaccattacaattgacggtacgccatttacccttcagcagttccatttccatgccccgagcgaaaataccgttcacggtaagcactatgcgatggagatgcacctggtccataccaacgctcaaggagccatcactgtcgtagcggtgatgtttgaccagggggcggaaaatagtgagctgaacaaactgtgggccactatgccggaaaaagcggagcagaatgcgaagatcagcacgcaaatggacctcaacgccctgcttcctgcggacaagacatactggcgattcagcggctctctgactactccgccctgctctgaaggggtaacctggattgtccttaagcatccgctaacgttgtctgccgcgcagctggcaaaatttagccacaccatgcatcacgataataatcgtccggtgcagccgctgaatggtcgcgtcgtcattgagtaa

SEQ ID NO: 176923 - DNA, 882 bp, Klebsiella oxytoca
atgccatggatccaactgaaactgaacactaccggcgcgaacgcggaagaactgagcgatgcgctgatggaagcgggttccgtttccattactttccaggatacgcacgacacgccggtattcgaacctctgccgggcgagacccgtctgtggggcgatactgatgttatcggcctgtttgacgctgaaacagacatgcaagaagtggtcgcgattctggagcagcatccgctgctgggcgccggtttcgtgcataaaatcgaacaactggaagataaagactgggagcgcgaatggatggataacttccaccctatgtgcttcggtaaacgcctgtggatctgcccgagctggctcgatgtgccggatgaaaacgccgttaacgtgatgctcgatccgggcctggcgtttggtaccggtacgcatcccacaacggcaatgtgcctcgaatggctggatggactcgatctcgcaggcaaaacgatcatcgattttggctgcggctcaggcattctggccattgcggccttaaagctgggcgcagcgaaagcgattggtattgatatcgatccgcaggcgattcaggccagccgcgataacgccgagcgcaacggggtctctgaacgcctggaactgtatctgcctaaagatcagccagaggcgatgaaagccgatgtcgtggtcgcaaacattctggctggcccattacgcgagctagccccgcttatcagcgtgctgccggttacaggcggtctgctggggctttccggcatccttgccagccaggcggaaagcgtttgtgaggcatacgccgacctctttaatctcgatcccgtcgtggagaaagaggagtggtgccggattaccggtattaaaaagtaa

SEQ ID NO: 176924 - DNA, 1452 bp, Klebsiella oxytoca
atgcagcttgaagtcatactgccgcttgtcgcctacctgctggtggtgtttgctctctccatctatgcgatgcgtaagcgcgtaacgggttccttcctgaacgaatatttcctcggtagccgctcgatgggcggcattgtattagccatgacgcttacggctacctatatcagcgcaagctcgtttataggcggccccggcgcggcctataaatatggtctcggctgggtactgctggcgatgatccagcttcctgctatctggctctcgctgggaattttgggtaagaaattcgccattctggcgcgacgttataatgccgtaacgctgaacgatatgctctttgcccgctatcaaagccgcctgctggtctggctcgcgagcctgagcctactggttgcttttgttggggcaatgacggtgcagttcatcggcggggcgcgcctgctggaaaccgcggcgggcatcccctacgaaaccggcctgctgatttttggcgtcagtatcgcactttataccgcgttcggcggttttcgtgccagcgtcctcaatgacaccctccaggggatggtaatgctgataggaacgattgttctgctggttggcgtcgtgcatgcggctggcgggctacataatgcggtagaaacgctacaaactatcgatcctaagctggtctctccgcagggtgctgatgatattctttctcccacctttatgacctctttttgggtgctggtctgcttcggggtgattggccttccgcacaccgccgttcgctgcatctcctataaagacagcaaagcggttcaccggggaattatcattggcacagtagtcgtcgcgatcctgatgtttggtatgcaccttgccggagcgctcggccgcgcggtgatcccggatctgacggtgccggatctggtcatccctaccctcatggtgaaagtattgccgccatttgccgccgggatcttcctcgctgcgccaatggccgccattatgtcgacgatcaacgctcaactgctgcaaagttccgctacgatcattaaagatctgtatctgaatctgcgccccgagcagataacaaatgaaacccggttgaagcggatgtcggcaacgatcaccctgctgttgggcgctttactgctgctggcagcctggcgtccgcctgagatgattatctggctcaacctgctggcgttcggcggcctggaggccgtgttcttatggccgctggtgctgggcctgtactgggaacgagcgaacgcgaaaggcgcattgagcgcgatgatcgtcggcggcgtactctatgccatactcgccacttttaatcttcagtacctgggcttccatccgatagtgccctcgttactgttaagtttattggctttcctggtcggaaaccgcttcggaacctccgccccgcaagccgccgtattgactactgataaataa

SEQ ID NO: 176925 - DNA, 243 bp, Klebsiella oxytoca
atggacaaacgttttgttcaggcccataaagaggcgcgctgggcgctgtggctaacccttctttatcttgcggcctggctggctgccgcctatttgccgggcgtcggtattggcataaccggcctgccgcactggtttgaaatggcctgcctgctggtaccgctggtgtttatcctgctgtgctgggcaatggtaaaactgatttatcgcgatattcctctggaggatgacgatgcagcttga

SEQ ID NO: 176926 - DNA, 1350 bp, Klebsiella oxytoca
atgctggataaaattgttatcgccaaccgcggcgagattgcattgcgtatcctgcgtgcctgtaaagaactgggcatcaagaccgttgctgtgcactcaacggcggatcgcgatttaaaacacgtattgttagcggatgagacggtctgtattggcccggctccgtccgtaaaaagttacctcaatatcccggctatcattagcgcagctgaaatcaccggcgcggtggctattcacccgggttatggttttctgtccgaaaacgctaacttcgctgagcaggttgagcgttccggctttatctttatcggtccgaaagcagacactatccgcctgatgggcgacaaagtctctgccattaccgcaatgaagaaagcgggcgttccaaccgtaccgggctctgacggcccgctgggtgaagatatggacgttaaccgcgcccatgccaaacgcattggctacccggtgattatcaaagcctccggcggcggcggcggtcgcggtatgcgcgtcgtgcgcagcgatgctgagctggctcaatccatctccatgaccaaagcggaagcaaaagccgcttttaacaacgacatggtgtatatggagaaatacctggagaatcctcgccacatcgagatccaggtactggctgacggtcagggcaacgctatctatctggctgagcgcgactgctccatgcagcgtcgtcaccagaaggtcgtcgaagaggcaccggcgccgggcattactccggaactgcgtcgctatatcggcgagcgttgctccaaagcgtgcgtcgatatcggctatcgcggggcgggtacttttgagttcctgttcgaaaacggcgagttctatttcatcgaaatgaatacccgtattcaggtagaacacccggtaaccgagatgatcaccggcgtcgatctgattaaagaacagctgcgcatcgctgctggtcagccgctgtccatcaagcaggaagaagttatggttaaaggccatgcggtggaatgccgtatcaacgctgaagacccgaacaccttcctgccgagcccgggtaaaattacccgcttccacgcgccgggcggttttggcgtacgctgggagtctcatatctacgcaggctacaccgtacctccgtactatgactcaatgatcggcaagctgatctgctatggtgaaaaccgtgatgtcgcgattgcccgcatgaaaaatgcgctgcaggagctgattatcgatggcatcaaaaccaacgtagatctgcagatccgcatcatgaacgacgaacatttccagaatggtggcaccaatatccactatctggagaaaaaactcggattgcaggagaagtaa

SEQ ID NO: 176927 - DNA, 474 bp, Klebsiella oxytoca
atggatattcgtaagattaaaaaactgatcgagctggttgaagaatcaggtatctccgaactggaaatttctgaaggcgaagagtcggtacgcattagccgtgccgcgccaaacgcaggtttcccggtgatgcaacaggcttatgccgcaccgatgatgcagcaacagccggctctgtctaacgcagtcgcaactgcggccactccagcaatggaagcccctgcggcagcggaaatcagtggtcacatcgtacgttccccaatggttggtactttctaccgcaccccgagcccggacgcgaaagccttcatcgaaatcggtcagaaagttaacgcgggcgataccctgtgcatcgttgaagccatgaaaatgatgaaccagatcgaagccgataaatccggcgtggtgaaagccattctggtcgaaagtggtcaaccggtagaatttgacgagccactggtcgtcatcgaataa

SEQ ID NO: 176928 - DNA, 600 bp, Klebsiella oxytoca
gtgcgcctgaatgtaaagcagataacctggctgaaagtgcttctccatctggctggctttttgcccgttgtctggctgttctgggccgggcagcagggctatttcagcgccgacccggcaaaggatattcagcactttaccggtaggatggctcttaaattcctgctggctaccttgcttgtttcgccgctagcgcgctacgctaaacagccgttattgatacgcacccggcgcttacttggcttatggtgctttgcctgggcaacgctgcatttaaccagctatacgctgctcgaactcgggattaacaatctggcgcttttgggttcagaagttatcagcaggccttacctgacgctgggtttactcagctggctgattctgctggcgctggcggcgacctccacccaggcgatgcagcggaaattaggccgccgttggcaaacattgcataacttcgtctatgttgtcgcgatccttgcgccgattcactacctgtggtcggtgaagattttatccccgcagccgatcatttatgcgctgctggcactgctgcttttagcatggcgatacaagaagtttcgccagtggtggcgctga

SEQ ID NO: 176929 - DNA, 1002 bp, Klebsiella oxytoca
atgaaacccaaaaaactgacagaagccgacgttacggcagaatccgtttttatgctgcaacgtcgccaggtcctgaaaatgctgggcatcagcgcgaccgccctttcccttaccccctccgcgcaagccgatctgctggattggtttaaaggcaacgatcgcccgccggcgccggcgggcaaagcgctaacgttcgaaaaaccggcgcaatggcaaaataacctgccgctcacgccggaggataaagttgctggttacaacaacttttatgagttcggtctggataaagccgatccggcggcgaatgccggcagcctgcgcaccgatccctggacgctgacgatcggtggcgaagtggcaaaaccgctcacgctcgatcatgacgacctgaccagccgattcccgctggaagaacgaatttatcgaatgcgctgcgtagaagcctggtcgatggtggttccgtgggtcggtttcccgctccataagctgctgtcgctggtcgaacccaccagcaatgctcgctacgttgcatttaaaacgctttatgctcctgagcagatgccgggtcaaaaggaccgttttatcggcggcggtctggcgtatccctacgttgaaggactgcggctcgatgaagcaatgcatcctctgacgctgctcagcgtgggcgtgtatggcaaggcgctgcccccgcagaacggtgcgccggttcggctcaccgtgccctggaagtacggcttcaaagggattaagtccatcgccagtattgagctcacccgtgagcgtccgcccaccacctggaatctggccgggcccgaagagtatggcttctacgccaacgttaatccgcatgtcgatcatccccgctggtcgcaggcgactgagcgttttatcggcgccggcggcgtactcgacgttaaacgccagccaacgctgctgttcaacggctatgccgaagaagtggcgtcgctctatcggggcctgaatttgcgggagaactactag

SEQ ID NO: 176930 - DNA, 975 bp, Klebsiella oxytoca
atgcaggctttaatcttagaacagcaggatggcaaaactctctcttcggtgcaaaccattgacgccagccagctgccgcagggcgatgtgacagtggatatcgagtggtccagcctcaactataaagatgcgctggcgatcaccggtaaaggaaaaatcatccgcaactttccgatgattcctggcatcgattttgccggttcggtccacagcagcgaagatcctcgctttcatgcgggccagcaggtgctgctcaccggatggggcgttggcgaaaaccactggggcggtctggcggaacgcgctcgcgttaaaggcgactggctggtagcaatgcctcaaggactgaatgggcgtaaagccatgaccattggtaccgcgggcttcaccgccatgctgtgcgtgatggcgctggaagatgccggaattcgtcctgaagatggcgaaattgtagttaccggggccagcggcggcgtcggcagcaccgcagtcgctttgctgcatcagctggggtacaaggtagcggcggtttccgggcgcgaaagcacccatgaatatttgaaagccctcggcgcgcagcgcatccttggccgagatgagttcgccgaaacccgcccgctggaaaagcagctgtgggccggcgctgttgacacggttggcgataaagtactggcaaaagtactggcgcaaatgaactacggcggctgcgttgcagcctgcggcctcgctggcggatttgcgctgccgaccaccgtgatgccgtttattctgcgcaatgtacgcctgcagggcgttgactcggtgatgaccccgcccgcccgccgggctgaagcctggcaaaggctggttcgcgatctgccggaatcgttctatgcgcacagcgcaaccgaaatcaccctcgccgaagcccctgagtttgctgaaaagattatgaccaataagattcagggccgcacgctggttaaaatcgcctaa

SEQ ID NO: 176931 - DNA, 1983 bp, Klebsiella oxytoca
atgtttatcgggcactcattcactcgcggagttaacacagggatgcgattaacgacgaaattctcagcctttgtcacgttactcaccagcctgactatctttgtcacgctgattggcgcttcgctgagtttttataacggtattcagctaaaaatgaccaaccgcgttcaggcggtggcaacgatgctggataaccgcctggtctctatatcttttgaccagttagaaccgcagatggatgagctgatgacgccggtcgaagtcgtgcacgttgattttcagcttaatggcaaatcagtctatagccattcccgcaacgataactatcgtccgttaggcagcagcaatcagttccgtagtatcaccgtgccgtcgctcaagcacccgggcatggttatccatctggtttatctggatccgatggccaattatttccgttcgctgcacgttaccgcgccgctttccatcgccattggtttcatggtgctgattatctttttttccgtccgctggatccgtcgtcagctggcgggccaggagctactggagcttcgctctgtgcgtattcttaacggcgaacgcggcccgcaggtgcgcgggtcggtacacgaatggccagtcaacaccagcagtgcgttagatacgctgctatcagaactgcagtttgccagcgatcagcgaagccgcatggataccctgattcgttcttacgttgcgcaggattcaaaaaccggactcagtaaccgattgttctttgataatcagctgtcgacgctgcttgaagatcaggagaaggtggggtcgtacggtattgttatgatgatccgcctgccggatttcgacctgctgcgcgataactgggggcgtacagcgactgaagagcattactttacgctgatcaacatgctttccacctttattatgcgttatcccggcgcgctgctggcccgctatcaccgaagcgattttgccgttctgctccctcatcgcacgttaaaagaggcggatagcatcgccggattgctattgaaggctatggatgccctgccgccaacgcgaattctcgatcgtgacgacatgatgcatatcgggatctgcgccttccgtagcggacaaacggcagcccaggtgatggagcatgcggaagcggcaacgcgcaatgcggtattgcagggtagcaacagctgggccgtctacgatgactctctcccggaaaagggacgcggcaacgtccgctggcgcacgcttatcgagcaaatgctcagccgcggcggaccgcgtctctaccaaaaacctgccgtaacgcgtgacggtcgcgtacaccaccgcgagctaatgtgtcgtctttacgatggcaaggaagaagttatcgcggcggaatatatgccgatggtactgcagttcggtctggcggaagagtatgaccgcctgcaaatcacccggttgctgccgtttttaggcttctggccggaagaaaatctcgcgctacaggtgacggttgagtcattaattcgcccccgcttccagcgctggctgcgcgatactttgatgcaatgcgaaaaatcgcaacgtcggcgtattatttttgaacttgcagaggcggatgtttgtcaatatatcggccgcctgcagccggttatgcggttggttaatgctttaggtgttcgagttgccgtagttcaggctggtctgacgctggttggaaccagctggattaagcagctcgacgttgaggttatcaagctgcattcggggttatcgcgcaatatagaaaaacgcagtgagaatcagctgctggtgcagagtctggtggaagcctgtaaggggatgccggttcaggttttcgcaaccggcgtgctcagccgtagcgagtggcaggtgctgtctcaatgcggtgtcaccggcggtcagggggaattttttgccgcctcacagccacttgacacaaatgtgaaaaaatattcgcaaagatactctgtttga

SEQ ID NO: 176932 - DNA, 1044 bp, Klebsiella oxytoca
atgttaaaaaaatttcgtggcatgttttccaatgacctgtccattgacctgggtaccgcgaataccctgatttatgtaaaaggacaaggcatcgtattgaatgagccttccgtggtggccattcgtcaggatcgtgccggatcgccgaaaagcgtcgcagcggtgggtcatgaagcgaagcagatgcttgggcgtacaccgggcaacattgcagctattcgcccaatgaaagacggcgttattgccgacttcttcgttaccgaaaaaatgcttcagcactttattaaacaggtgcacagcaacagctttatgcgtccgagcccgcgcgtgctggtgtgcgtgccggttggcgcgactcaggttgaacgtcgcgcgattcgtgaatccgcacagggcgctggcgcccgtgaagttttcctgattgaagagccgatggcggctgcgatcggcgcaggcctgccggtctccgaggcaaccggttcgatggttgtggatatcggtggcgggacgactgaagtggcggtcatctccctgaacggcgtggtctactcctcttccgtacgtatcggcggcgaccgttttgacgaagcggtgattaattatgtgcgtcgtaactatggctccctgatcggcgaagcgaccgcagaacgtatcaaacacgagatcggttccgcttatccgggtgatgaagttcgcgaaatcgaagttcgcgggcgcaaccttgctgaaggcgtaccacgcggctttacgctgaattccaatgaaatcctcgaagcgctgcaggagccgctgaccggcatcgttagcgcggtgatggtcgcgctggagcagtgcccgccggaactggcttccgatatctccgaacgcggtatggttctgaccggcggcggcgcgctgctgcgcaaccttgaccgcctgttaatggaagagacaggaattcctgtcgtagttgcagaagatccactgacctgcgtcgctcgtggcggcggcaaggcactggaaatgatcgatatgcacggcggcgacttgttcagcgaagagtag

SEQ ID NO: 176933 - DNA, 987 bp, Klebsiella oxytoca
atgaagccaatttttagccgtggcccgtcgctacagattcgccttattctggcggttttggtggcgcttggcgtgataatcgccgacagccgcctgggtacgttcagccagattcgaacgtacatggatactgccgtcagccctttctactttgtctctaatggtccccgggaactgctggatagcgtttcgcaaacgctggccacccgcgaccagctcgaactggaaaaccgcgcgctgcgccaggaactgctgttaaaaaacagcgatctattgatgctgggtcagtataaacaggagaacgcgcgtctgcgcgagctgctgggctctccgctgcgtcaggacgagcaaaaaatggtgacccaggtcatctcaacggttaacgacccatacagcgatcaggttgttatcgataaaggcagcgttaacggcgtatatgaaggtcagccggtcatcagcgataaaggcgtcgtcggccaggtggtcgcggtggcgaagctgaccagccgcgtgctgctgatttgcgatgccactcatgcgttaccgattcaggtgctgcgtaacgatattcgcgtgattgcggcaggcaacggttgtactgacgatctgcagctggaacatctgccggccaatactgatattcgcgtcggcgacgtccttgtgacttcggggctcggcggccgcttcccggaagggtatccggtgggcgtggtctcttccgttaagctggatacgcagcgcgcgtacacggtgattcaggcccgtccgaccgccggtctgcagcgcttgcgctatctgctgctgctgtggggcgccgatcgcaacggagctaatcccatgacgccggaagaggttcatcgcgtagcgaacgagcgcctgatgcagatgatgccgcaggttctgcctgcgccggatgcgatggggccgcagatgccggcgccagcaaccggtatgccacagcagcctctgcctgcaggggggcaatag

SEQ ID NO: 176934 - DNA, 489 bp, Klebsiella oxytoca
gtggcaagctaccgtagccagggacgctgggttatctggctctcgttccttattgcactcttgttgcagattatgccctggccggcggacattagcgtttaccggccaaactgggtatttctcatcctgttgtactggattcttgcgttgccccatcgggttaacgtcggcacaggctttgtgatgggcgcaatcctcgatctcattagcggttcgacgcttggcgttcgcgcactatcattaagtattgtggcttatctggttgcgctgaaatatcagctgttccgcaatctggcgctctggcaacaggcgctggtggtagtcatgttatccctcgccgtggatatcattgttttctgggcagagtttttagtgatcaacgtctctttccgcccggaagtgttctggagtagtgtagtaaacggtgtgctctggccatggattttcctgctaatgcgtaaagtgcgtcagcagtttgcggtgcaataa

SEQ ID NO: 176935 - DNA, 582 bp, Klebsiella oxytoca
atgacgactctgtatctggcttcaggctctccccgtcggcaggaactgctgactcagctcggtctctcttttgaacgcgtgattcccggtattgaggaacagcgccgtccccaggagagcgcgcagcagtatgttgtacgtctggcgcgtgagaaggctcaggctggagtggcgttagcgccgcttgatctccccgtactgggagcggataccattgtcatccttaatggtgaagtgctggagaagccgcgcgatgccggccacgccgccgaaatgctgcgtatgctttccgggaaaacccatcaggtgatgaccgccgtggccctggccgataagcagcagacgttggattgcctggtggtcacggaggtcactttccgtgtgctctcagtacaggatatcgccgattatgttgccagcggcgaacctttagataaagcaggtgcatacggtattcaggggttgggtggctgttttgtcaggaagataaatggcagctatcacgccgtagtgggcttaccgctggtggaaacgtatgagttgctgagtaactttaactcactgcgtgaagaaaagggataa

SEQ ID NO: 176936 - DNA, 1470 bp, Klebsiella oxytoca
atgactgctgaattattagttaacgtaacgccatcggaaacgcgcgtcgcttatattgatggcggtattcttcaggaaattcatattgagcgtgaagcgcgacgcggaatagtaggcaatatctacaaaggtcgtgtcagtcgggtgctgccgggaatgcaggcggcttttgtagatattggcctcgataaagccgcgtttctgcacgcttccgatattatgccgcacaccgaatgcgtggcaggtgaagagcaaaaacagttcaccgttcgcgatatttccgaactggtgcgccaggggcaggatttaatggtgcaggtggtgaaagacccgctgggtaccaaaggcgcccgtctcaccaccgatatcaccattccttctcgctatctggtctttatgccaggcgcttcgcacgtcggcgtctctcagcgtattgaaagcgaagcggaacgtgagcgcctgaaaaaagtggtgtctgaatactgtgacgaacagggcggtttcattattcgtaccgcggctgaaggggtacatgagcaggagatggccgcagatgccgcctacctcaagcgcgtctggacaaaagtcatggagcgcaaaaagcgccagcagacgcgttatcaactgtacggtgaactggccctggcgcagcgcgtgctacgtgatttcgccgatgcgcatcttgaccgtattcgcgtagactcccgtctgacctacgaatcgctgcttgagtttaccgccgaatatattccggagatgaccagcaagctggagcactacagcggccgccagccgattttcgatctctttgacgtagaaaacgaaatccagcgcgcgctggagcgtaaagttgaactgaaatcaggcggttatctgatcatcgaccagacggaagcgatgactaccgtcgatatcaataccggagcattcgtcggtcaccgtaatcttgacgatactatttttaataccaatattgaggcgacccaggccattgcccgtcagctgcgtctgcgcaatcttggcggtattatcatcattgatttcattgatatgaataatgaggatcaccgtcggcgggtgctgcattcgctggaacaggcgctgagcaaggatcgggtaaaaaccagcataaacggcttctctcagcttgggctggtggagatgacccgcaagcgcacccgcgaaagcgtggagcacgtgctgtgcaatgagtgcccgacctgccacggccgcggcacggtgaaaacggtagaaacggtgtgctacgaaatcatgcgtgaaatcgtgcgcgtacaccacgcctacgattctgaccgattcctggtctatgcttctcctgcggtagcggaaacgctgaaaggggaagagtcgcatgcgctggcggaagtcgagatctttgtcggtaagcaggtcaaagtacaaattgaaccgctctataatcaagagcagtttgatgtagtaatgatgtaa

SEQ ID NO: 176937 - DNA, 3798 bp, Klebsiella oxytoca
gtgaggcgactgcccgggattttactgctcaccgcggcaacagtgattgttgtcgtcgcactgctggtgagcggtctgcgtctcgtactgccgcagttgaacagttggcgtccgcaggtgctggaaaaagtatcggcgatggctggcgtaccggtcgatgcctcacaaattaccgccagctggcagacgtttggcccgacgcttgatgtccgtgatatcaaggcaggcctgagcgacggcggtgagctttccgtcaaacgcgtcactctggcgctcgacgtatggcaaagtctgctgcatatgcgctggcagtttcgcgacctgaccttctggcagctacaggttcataccaacacgccgatccaaaccaataacagcggcgaaggtctgaaaactgaccgcatcagcgatcttttcctccgccagttcgatcactttacccttcgcgatagtcatctgagcttcctgacgatttccggtcagcgggcagaacttacgattccgcagcttacctggctgaacggtaaaaatcgccatcgcgcggaaggacagcttagcctcagcagcctgaccggccagcatggcgtgatgcaggtgcgaatggatctgcgcgacgaagacggtttgctcaataaggggcgtgtctggcttcaggccgatgatatcgacgttaagccctggcttggacgctggatgcaggacaacatcgccctacagagcgcgaagtttagcctggaaggctggatgactatcgataaaggcgatgtcgccagtggcgatgtgtggctgaaaaaaggcggcgccagctggcagggcgataaagataagcatcatctgtcggtcgataatctgaccgcgcacatctatcgcgataaccacagctggggctttcgcatcccggacacgcgtatctccatggatgataaaccctggccgcgcggcgcgctggcgatggcgtggatacctgcccaggatgtcggcggaacaaatgctcagcgcagcgatgagctgcgcatacgcgccagcaaccttaatcttagtggcctgaccgggctgcagccgatggcggataaactggcgccgtcgctgggtgaaatctggcgtacaacgcagccggatggcaagatcaatcttctggcgctcgatattccgctccagatggcggagaaaacgcgtttcaaagcggactggagcgacatgtcctggaagcagtggaagctgttgcccggcgcggagcatttttccggcagcattgccgggagcgtggagaacggtatcctgcatgccagcataaagcaggcaaaaatgccttatgagacggtatttcgcgcgccgctggagatcgctaaaggcgatgcgacgctcagttggataaagaacgacaaaggttttatgctcgacggtcgcgatattgacgtgcaggctaccggcgttcgcgcccgcggcggcttccgctatctgcaaccgcagggtgatgaaccctggctcggtattctggccggtattagtaccaatgatggcggtcaggcatggcgctacttccctgaaaatctgatgggtaaagagctggtggattatcttagcggggcgattaaaggcggccaggccaccgacgccacgctggcttacggcggtaatccccatctgttcccttacaagcacaatgaaggtcagtttcaggtctcggtgccgctaaaaaacgccaccttcgcctttcagcctgactggccagcgctcaccggcctgaatatcgatcttaactttatcaatgacgggctgtggatgaaggccgataaggcgatgctcggcaaagtgacggccagtaatctggacgcggtgataccggactactcgcgagaaaaactgctgattgatgccgatgttaacggcccgggtaaagaggttggtccttactttaacgagacgccgttgaaagaggcgctgggcgcggcgctggacgagcttcagttggatggggatgtgagcgctcgcttacatttgaacatcccgctggacggcgagatgaccaccgccaaaggcgacgtccagctgaagaataatagtctgtttatcaagcctatcgataccacgctgcaaaacctgagcggtaaattcagctttgtaaacggcgatctgaaaagcgaaccgatgagcgcgacctggtttaatcagccgctgaacgttgatttctcgaccaccgagggcgagaaagcgttcctggttaacgtcgggatgaacgccaactgggagccagcgcgtaccggtctgttgccgaaagcgctggagaacagcctgagcggcagcgtgccctgggacggtaaagtggcgattgagcttccgtaccgcggcagcgcaaattataaagtcgatattaacggtgagctgaaaaacgtaagtagtcacttacctgctccggttgataagcaggccggtgagcctttaccggtaaaaattaaggttgatggcggattaagcagctttaatttgaccggctccatggggacgaagaatcacattaatagccgctggctgctgggcaataagctcacactagatcgcgcgattttaacttctgacagtaaagccgtatctccgctgcctgcgcagtcaggcgtcgagctgaatatgccgccgatggatggcgcgcagtggctggcgctgttccagcgcggtgcggcaactgacgtcagcagtagtattgtcttcccgcagcaggtcacgctgcgtacgccgacgttaacgatggcgggtcagagctggaataacgtcagcctggtctcccggcccgatgcaggtggaacgaagattgaagctcaggggcgtgaagtcaacgctaccctgactatgcgcaaaaatgccccgtggctggcggccattcgctacctctattacaacccaacttcggcgaaaagcagcgggacggaaaatagcagcgctccgctgaccgagacaaaagtagatttccacggctggcccgatctccagcttcgctgcgcagagtgctggctgtgggggcaaaaatatggtcgtatcgacggcgattttacgatcagcggcgataccctgaccctggcgaacgggctggtggataccggttttggccgtctgacgagcgatggcgtatgggttagcgccccgagcggcgtacggacctcattaaaaggtaagctgcacgggaataaaaccgatgattttgtaaacttcttcggcgtgtccacaccggtaaaaggatcgtcgttcgatattgattacgatctacactggcgcgcgccgccgtggcagccggacgttgcttcgcttaacggcattcttaaaagccgtctcgggaagggagagtttaccgatatcagcaccggacacgccggccagcttctgcgcctgctgagcgttgatgcgctgctgcgcaagctgcgcttcgactttagcgatacgttcagcgaagggttctacttcgattcgattcgcagcacggcatggattaaagacggcgttctgcataccgatgataccctggtcgatggtctggaagctgatatcgcaatgaaaggctcggtggatcttgttcgccgccagctggatatgcaggccgtggttgcgccggaaatctccgcgaccgtaggcgttgcggcggcctttgccgttaacccgataatcggtgctgcggtctttgccgccagtaaggtgctgggaccgctatggaataaggtctctattttgcgctatcgcatcaccggtcctatcgatcagccgcaaattaacgaagtgctgcgccaggcgcggagcgacaaaaagcaatga

SEQ ID NO: 176938 - DNA, 1446 bp, Klebsiella oxytoca
atgagtctgaacctggtaagtgaacaattactgtcggcaaacggcctgaatcatcaggatctgtttaccattcttggccagctggccgagcgtcgtctggattacggcgatctctattttcagtcgagctatcacgagtcctgggttctggaagacagcatcattaaagatggttcgtacaatatcgaccagggcgtcggcgttcgcgcggtgagcggggaaaaaaccggctttgcgtacgctgatcagattagccggctggcgctggaacagagcgcgcaggcggcacgcaccatcgtgcgcgatcgcggtgatggtaaagttcatactctcggagcggtggagtacagctccctctataccagcattgacccgctgcagagcatgagccgcgaagagaagctggatattctgcgccgggtcgataaaaccgcccgcgcggccgataaacgcgtgcaggaagtgtccgccagtctgaccggtgtctatgagttaattcttgttgccgccaccgacggcacgctagcggctgacgttcgtccgctggttcgtctttccgtcagcgtgctggtggaagaaaacggcaaacgcgagcgcggcgccagcggcggcggcggccgctttggctacgactatttcctggcctcgctggagggagaagtgcgcgctgatgtttgggcgagagaagccgtgcgtatggcgctggtcaacctgaccgccgtcgcagcgcctgccgggatgttgccggttgttctgggtgctggctggcctggcgtgctgctgcatgaagccgttggtcacggcctggaaggcgattttaaccgtcgcggaacctcggtgttcagcggtcatatgggggaactggtggcctctgagctatgtaccgttgtggatgacggcaccatggccaaccgtcgcggctccgtcgccattgacgatgaaggtacgcctgggcagtataacgtgctgatcgaaaacgggattctgaaaggttatatgcaggacaagctcaacgccaggctgatgggcgtggcgccaaccggtaacggtcgccgcgaatcctacgcgcatctgcctatgccgcgtatgaccaacacctacatgctggcgggtaaatccacgccgcaggaaattatcgaatcggtcgattacggtatctatgcgccgaacttcggcggcggtcaggtagatatcacttccgggaaattcgttttctctacctcggaagcctacctgattgagaaagggaaagtgaccaaagcggtgaagggggcaacgcttatcggctccggcattgaagcgatgcagcagatttcgatggtggggaacgatctgaagctggatagcggcgtcggcgtttgcggtaaagagggccagagcgtgccggttggcgtcggtcagcccacgctgaaagtggataaactcaccgtcggcggcaccgcctga

SEQ ID NO: 176939 - DNA, 747 bp, Klebsiella oxytoca
atgaaagccgcgcgtcaacagcagatagttgagttactcaatcagcatcacactttaaccaccgaagcgttgtcccattttctgcaggtcagcattgagaccattcgccgcgatttgaacgagctgcagaggcaggggagcattctgcgtagccacgggcgggcgcgagttcttcaacgcgataatcatcacggcgagaagccttttcatcgtcgcgtgaaaagccactatgcccataaatccgatattgcgcgtacggcgctggcgtggattgatgcaggcatgacgatcgcgctggatgccagctcaacctgttggtttgtggcgcgtcagctgccggatattaacctgacggtatttaccaatagccacccggtctgcgttgaacttggccgccgcgagcggatccagttaattagcgccggtggtcagcttctgcgtcaatatggctattacgttaaccccgcgctgttatcgcaggtcaaatcgctggagatcgatctgtttattttttcctgcgaagggatcgataactatggcgtactctgggattccagcgttaacaatgccgcgtacaaatccttgctcctgaaacgggcggcgcagtcgctattgcttatcgacaaaagtaaatttcatcgtgccggcgaggtgcgcatcggaaatctcagcgaagtgacgcaaatcatttccgatgccggacctgataatgagttaatgccctctttggctgattcggacggctag

SEQ ID NO: 176940 - DNA, 930 bp, Klebsiella oxytoca
atggaacgattaaaacgcatgtccgtttttgccagagtggtcgaattagggtcatttaccgccgcggctcgccagctccagatgagcgtttcttccatcagccagacggtagccaaactggaagatgagctgcaggttaagctgctcaaccgcagtacgcgtagccttggcttaacagaagcgggaaaaatctactatcaaggctgtcggcgaatgctgttcgaagtccaggatgtccatgaacagttgtacgcgtttaacaatacgcccatcggtaccctgcgcatcggctgttcttcaactatggcacagaatgtccttgcgcgcataacggcggacatgcttaaagagcaccccggactatcgataaatctggtcacgggcatccccgctccggacctgattgcggacggtctggatgtggttattcgcgtgggggcgctgcaggattccagcctcttttcccgccgcctgggttcgatgccgatggtgctgtgcgcggcgaaaagctatctccagcatgccggatgtccggaaaaaccagcagatctcgccagccactcctggctggaatacagcgtccggccggataacgaatttgaaatcatcgccccggaagggatctcaaccaaactgatccctcagggccgatttgtcactaacgatccaatgacgctggtccgctggctgacggcaggcgtcggcgtggcttatgttccgctgatgtgggcgatcgacgagatcaaccgcggcgaactggagatcctgctgccgagctaccagtccgatccgcgcccggtttacgcgctgtataccgagaaagataagctgcctctgaaagtacaggtatgcattaattatctgacggagtatttcgtcggggtggcaaaaatttatcagggcatgcacggtcgggggattgcccgctag

SEQ ID NO: 176941 - DNA, 204 bp, Klebsiella oxytoca
atgagtctgtttcctgtcattgtgattttcggcttgtcgtttccgccgatcttctttgagttgctgttgtcgctcgccgtcttctggctggcgcaccgcctgctggttccaacgggcatctatgattttgtctggcacccggcactgttcaataccgcgctatattgctgcttgttttatctgatatcacgtttgttcgtttga

SEQ ID NO: 176942 - DNA, 933 bp, Klebsiella oxytoca
gtgaaaacactaacaagaaatatcctccgtaccgcaatcactgtgatactggttatccttgcatttatggcgatttttcgcgcatgggtgtactacaccgcatcgccctggacgcgcgatgcgcgctttagtgcggatattgtggccattgcccccgatgtttccggcctgatttcgcaggtgaatatcaaggataaccaactggttaagaaagaccaggttttgttcgtcattgaccaaccgcgttaccagaaagcgttagcagaggccgaagccgatgtctcctattaccagactctggcgcaggagaagcgcgtggaagccggtcgtcgtaaccgtcttggcgtccaggccatgtcccgggaagagatagaccaggcgaataacgtcctgcaaaccgttgaacatcaattagccaaagcgacggcgagtcgcgatctggcgaagcttgaccttgaacggacggtgattcgcgctccggccgatggctgggtgaccaacctgaacgtgtaccgcggcgagtttatcacccgaggttccaccgcggttgcgctggtgaagcaaaataccttctatgtcatggcctatcttgaagagaccaagcttgaaggcgtgcgccccgggtttcgtgctgaaattacccctctgggaagcgtacataccctcagggggaccgtcgacagcatcgctgctggcgtcaccaatgccagcagcagcagcgattcaaaagggctggcctctattgattctaatcttgagtgggtgcgcctggcgcagcgggtaccggtacgtattcgccttgatcagcagcagggcaatctctggccagcgggcaccacggcgacggtggtgatcacgggtaaagaggatcgcgataccagtcaggcaaacttcttccagaaactggcgatgcgcctgcgtgagttcggttaa

SEQ ID NO: 176943 - DNA, 1968 bp, Klebsiella oxytoca
atggggatcttcaccatcgaactccggcatctccgcttcgccgttaagttagcctgcgcggtggtgctggcgttattcgtcggttttcattttcagctggaaactccgcgctgggcggtgcttactgcagcgatcgttgctgccggtccggcatttgccgcaggcggggagccttactccggcgccattcgctatcgcgggatgctgcgtatcgtcggcacctttatcggctgtatcgccgcactggcgattatcatcctgatgatccgcgccccgctgttgatggtactggtctgctgcctgtgggcgggcttctgtacctggatctcctcgctggtgcgggttgagaactcctatgcgtggggtctggcgggttataccgcgctcatcattattatcactattcacgaagagccgatgctggcgccgcagttcgccgtcgaacgatgcagtgagattgtcatcggtatcgtcagcgccattgtggccgatctgctgttttctccgcgatcgataaaaaaagagatcgatcttgagctggataacctgctgatcgatcaatatcgcctgatgcagctttgcgtggcctatggcgataaagatgaggtcgataaggcctggagcgccctggtccgccgtaccaacgggctggaggggatgcgcgccaacctgatcatggagtcttcgcgctgggctaaagtgaatcaacgcctgaaggcgatcaacaccctctctttgaccctgattactcaggcctgtgaaacctttctgattcagaacacccggcctgagatagtgacggatgattatcgggagctctttgctgaaccggttgagaccgtgcaggacgtgcaccgtcagctaaaacgtatgcgccgctttttgacctggaagggggagcataatacgccggtgacgatctacagctgggtaggtgctgcgacgcgctatctgcttttgaagcggggcgtggtcggcaataccaaaatcagccgtattgaagaggaagtactgcagggcgaagtggtggtgaaggcggaatccgccgagcgccatcatgcgatggtgaacttttggcgaacttctatctcttgtatcctcggtacgttgttctggctatggaccggctggacttcgggaagcggggcgatggtgatgattgcggttgttacggccttagcgatgcgtttgccaaatccgcggatggtggctattgatttcctttacggcacgctggcggctttacctctgggcgcgctgtttttcctggtgattatgcctgcgacgcagcaaagtatgctgctgctgtgcattagccttgcggtgatggcattttttatcggcatcgaggtacagaagcggcgcctggggtcgttgggcgcgctggccagcacgattaatatcctggtgctcgacaacccgatgaagtttgaattcaaccagtttcttgatagcgccttaggtcagatcgtaggatgcttcctcgcgctgatggtgatcctgctggtgcgtgataactcccaggctcgcaccggacgcgtgctgcttaaccagtttgtctcggcagcggtatcatcgttgaccaccaatacggcgcgacgtaaagagaaccatttgcccgctctgtatcgtcagctttttttattgctgaataagtttcctggcgatatcgcgcgctttcgtctggcattaaccctgattattgcccatcagcgcctgcgcgatgcaccggtaccgataaacgacgatctgtccgcctttcaccggcagctgcgtcgcacggcggatcgcgtcatttccgctaagagcgatgataagcgtcgctactattttgcccgtttgcttgatgaactggatatctatcagcaaaaattacagcactgggaagcctcttcccaggtgaccgagccggtacgaaggctggtggatatgctgcataagtatcagcacgtactcaccaacagctag

SEQ ID NO: 176944 - DNA, 279 bp, Klebsiella oxytoca
atgacgactacctatacctttgattttgacgaaatagctgagcagcaggatttttatcgcgagttttcacgtacttttcacttagagcgtgagaaagtgaacaaccttgattcactatgggatgcggtgaccgccgggttgctgccgctaccgctggagattgagtttattcatttaagcgataatcagcgacgccgattcggcgcattaattctgctttttgatgaggcggaagaggagctggaaggagagcttcgttttaatgtgcggcattcataa

SEQ ID NO: 176945 - DNA, 267 bp, Klebsiella oxytoca
atgaaaagcgcaattatcatcgcatccctgggtctggcttccgttctctctttcggtgcaaacgccgccgttaaccaagtgaacgcagaacaggcgcaaaatctacagtccatgggcaccgtttccgtttctcaggtaggcagcgcaccgatggatatgcgtcaggagctggcggctaaagctgaaaaagaaggcgccagcagctaccgcatcattgaagcccgtaccggcgataactggcacgctacggctgaactgtacaaataa

SEQ ID NO: 176946 - DNA, 264 bp, Klebsiella oxytoca
atgaaaatcaaaaccactgtagctgcattgagcatcctttccgttctctcctttggcgcctttgccgctgactctatcaacagcgaacaggctcagggccgtcaggcaatcggcaccgtttccgtcggcgcggtaagttcttccccgatggatatgcatgaaatgctgaacaaaaaagcgcaggaagaaggtgcttcttcttatcgcattattgaagcacgtaccggtgaccactggcacgcaacggctgaactgtataaataa

SEQ ID NO: 176947 - DNA, 471 bp, Klebsiella oxytoca
atgcgaagttcggcaaaacaagaagaactggttaaagcgtttaaagcgctgcttaaagaagaaaaattcagctctcaaggtgaaatcgtccaggcactacaggaagaaggcttcgataatatcaaccaatcgaaagtctcacgtatgctcaccaaatttggcgctgtacgcacgcgcaacgccaaaatggaaatggtttactgcctgcccgccgagcttggcgtcccgacgacctccagcccgctgaaaaatctggtgctggatatcgattataacgattcagtcgtggtcattcacaccagccctggcgcggcacagcttatcgcccggcttctcgactcgcttggcaaggctgaaggcatcctcgggagtattgctggtgatgacaccatctttaccacccccgccagaggttttaccgttaaagagctgcatgacgccattcttgttctgtttgagcaagaactctga

SEQ ID NO: 176948 - DNA, 939 bp, Klebsiella oxytoca
atgaaagttgcagtcctcggcgccgctggtggaattggccaggcgcttgccctactacttaagacccaactgccttcaggttcagaactctcgttgtacgacatcgctccggtaactccgggcgtggcggttgatcttagccatatccctaccgatgtaaaaatcaaaggtttttccggcgaagacgccacccctgcactcgaaggcgcggatgtggtgctgatatccgcgggcgtagcgcgtaagcccggtatggatcgctccgatttatttaacgttaacgccggtattgtgaaaaatctggttcagcaaattgctaaaacctgcccgcaggcctgcgtcgggattatcaccaacccggtgaataccaccgtggcgattgccgcagaagtgctgaaaaaagccggcgtttacgacaagaacaagctgtttggcgtaaccacgctggatattatccgctcgaatacctttgtggcggaactgaaaggcaaatcttcatccgatgttgaggttccggtaatcggcggccactcaggcgtaactattcttcctttattatcacaaattccaggcgtgagcttcagcgagcaggaagtggcggatctgactaaacgtattcaaaacgccggtactgaagtcgttgaagccaaagctggcggcggctcagcaaccctgtcgatgggtcaggctgcagcccgatttggtctctctttagttcgcgccatgcagggagagaaaggggtggtggaatgcgcctacgtggaaggtgatggtcaatatgcccggttcttctctcagccgctactgctggggaaaaatggcgtagagcagcgtcagcctattggcaaactcagtgcgtttgagcaacaggcgcttgaagggatgctggatacgttgcagaaagatatcgcccttggcgaagattttgtgaataaataa

SEQ ID NO: 176949 - DNA, 645 bp, Klebsiella oxytoca
gtgaaaaaaattgaaagaaagcagaccagggaccacattactcagatgatccgttatgagatcctttccggtgggatgaaacccggagaggagcttgcgcaggaaagtattgcggaacagctggggctctctcgtatgccggttcgggaagcgctacaggcccttgagcaggaagggtttctggtgcgcttgccaaaccgccatatgcaggtcgcaaaactggagcctgaccatgtcagccacatttttcgggcaattgcggtgatggccacggagctttttttattggtgcccgcggcggcaggcgaatcgctcgctgcgcgcgcgcgcgcgctggcgcatccgggtgagcggtcgcgggagttggcgttccaccagacgctaatttcatatattgataaccgctatctgcaaaagatttatcagcagtttttggatggctatatcagctatgtcattctgtatctgaaagaggataatcaggagtcggcgcagatactcagctctctgatggacgctatccgtcggggcgatggtgatgagatcgcgcaggaaacgcagcgttatttcctctctctggcagaaataatgcgtcaacacatgaaggattgggaaagtgcagaagcctcgattagggaaaattaa

SEQ ID NO: 176950 - DNA, 666 bp, Klebsiella oxytoca
gtgcagaagcctcgattagggaaaattaagcttctttcagcgaaagagcaggtcgcggcagtattacgtaaagctatactgtcgcgcgatttagttgaagggcaagaaattacccttgaagggatcgccagcatggtcggcgtctccagtatgcccgtgcgtgaagcatttcagatcctggccgcggatgggctgattaaagtccggcccaataaaggggcggttgtgctggggattaacgaacaaacgattcgcgagcattatgagattcgcgcgctgctggagagtgaagcggtcgctaaagcctctcgtcccgggacggatatttcgcgaattgccgaagtgcactactcagcagaaaaagcgctggccgaaaataactcggctgaatattccgacatgaatcaggcctttcatatggagatatggaatgcggccggaaatgctaaaatgaagctcttgctcagcaatatgtggaacgggctgtcgatgggacataaggtcactgaggaagagtacgcttccatttcgatacgcgagcacaagggcattttacaggccctggagcagcatgatgaagagctggcgcgcctgcgaatgcgcgaacatattatccgttcgatggagaatatgctgacgcgctacgttgacgatcccggcgcttga

SEQ ID NO: 176951 - DNA, 1269 bp, Klebsiella oxytoca
atggaaccgattaccattactctatgtttgctggtgtttgctatcgccatgttcgtgtgggagaaaattccccttgcggtcacttcgatggtggtttgcgtagcgctggttctcaccggcgtacttgacctcaaacaggcttttgccggctttatcgacaccaacgttattcttttcgtcgctatgttcatcgtcggcggcgcgctatttgaaaccgggatggcgaataaagttggcggcgtgattacgcacttcgccaaaactgaaaagcagctgattttcacgattatggtggtggtcggcgtgatgtccggctttctttcaaataccggtactgccgcagtattgatccccgtcgtcatcggcgtggcggcgaaatccggctttacccgttctcgtctgctgatgccgctggtttttgccgcagcgcttggcggcaacctgtcgctgatcggcgcgccgggcaatctgattgcacaatcggcgttgcagaatatcggcagcggtttcggattttttgaatatgccaaagtgggtctaccgatgctggtttgcggcatcatttatttcctgacgattggctataagtttctgcccaataacccgaatagcagcgaagtcggcagcatcggtgaacagcgcgattacagccacgttccgcgctggaagcagatcctgtcgctggtcgttttgattgccacgatcctgggcatgattttcgaaaaacagaccggtattagcctggcggtagcgggctgtattggcgcgctggtgctggtagtcaccggggtgctgagtgaaaagcaggcctataaagccattgattcacaaactatttttatcttcggcggcaccctggcgttagcaaaagcgctggaaatgaccggtgccggaaagctggttgccgatcaggttatcggcatgctggggaacaactcttcgccattcatgctgctggtggtggttttcgcactatccgtcgttatgaccaactttatgtccaatactgcgaccgttgcgcttttggtaccggtgagcctgtcgattgctgccggtatgggggccgatccgcgcgccgtgctgatggccacggtgattggcagttcctgcgcctatgccaccccaatcggtatgcctgccaacatgatggtgctgtcggcgggtggatataagtttgtcgactatgccaaatccggcatccctctgattatcgtttccaccattgtcagcctgattctgctgccaatccttttcccgtttcatccgtaa

SEQ ID NO: 176952 - DNA, 900 bp, Klebsiella oxytoca
atgagcaaaagtgaacagatatcccatatgaccaatattatggccaagtttgtgggatacaccggcaaagtcttgcccgatgacgtcactgcaaaactggaagatttgcataaaaaagagaccagtaaactggccgacgtcatctttacgaccatgattgagaaccagcgcctggcgaaagagctcgatcgtccttcctgccaggataccggggtgattcagtttctggtggagtgcggggcgaacttcccgctgatcggcgaactggaagcgctgctgcgtgaagcggtgatcaaagcgaccgtcgattctccgctgcgccataacagcgtcgaaacttttgatgaatacaataccggcaaaaacgtgggtaaagggacgccgacggtattctgggagattgtcccggattccgaccagtgcagcatttatacctatatggcgggcgggggctgctccctgccggggaaagcgatggtgctgatgccgggcgcgggttatgaaggcgtcactcgctttgtcctcgatgtgatgaccagctatggcctgaacgcgtgtccgccgctgctggtgggcgtgggcgtggcgacttccgttgaaacggcggcgctgctgtcgaaaaaagcgctgatgcgtccgattggttcgcataatgagaatgagcgtgcggcttcgctggaaaaaatgcttgaagacggcatcaataaaattggcctcgggccgcagggcatgtccggtaatacttccgttatgggcgtgaatattgaaaacaccgcgcgccatccatccaccatcggagtggcggtgaacgtcggctgctggtcgcaccgtaaagggcatatcgtttttgataaagacttgaactacaccattacgtctcacagcggagtgaatttctga

SEQ ID NO: 176953 - DNA, 618 bp, Klebsiella oxytoca
atgactaaaaaaattcttaccacgccaattaaagatgaagatttagccgatattaaagctggcgatattatttacctcaatggccatattgttacctgtcgcgatgtggcgcaccgtcgcttaattgaaggtggccgcgaattacccgtagacgttaacggtggcgctattttgcacgctggtccaatcgtccgcccaattaaaggcgaagacgataagtttgaaatggtctccgttggtccaaccaccagtatgcgcatggaaaaattcgaaaaagaattcattgccaaaacgggtgtgaaattaatcgttggtaaaggcggaatggggaaaggcaccgaagagggctgtgcggagcataaagcgctgcactgcgtattcccggcaggctgtgcggtagtggcggcagtatgcgtggaagagattgaagatgcgcagtggcgcgatctgggaatgccggaaacgctgtgggtatgccgggtgaaagagtttggcccgttaattgtttctattgatacgcatggtaataacctgtttgaacagaacaaagttattttcaatcaacgtaaagagattgtcgctgatgaaatatgccagaacgtaagttttatcaaataa

SEQ ID NO: 176954 - DNA, 1644 bp, Klebsiella oxytoca
atgtcaattcgcccaatgtttagccgaaaaatcacgcactggtttgcccgacgttcgttccagaaccgcatcttcctattgatcctgtttacctcgacaatagtgatgctggcgatgtcatggtatctcaccagcatcacggaagagcgtctgcattatcaggtcggccagcgcgcgctgatccaggcgatgcagatctccgccatgcctgagctggtagaggcggtcgaaaagcacgatctggcgcgaattaaagcgcttatcgaccccatgcgatcgttttccgatgccacctacatcaccgtcggtgatgcaaaaggccagcgtctgtatcacgtgaatccggatgagatcggcaaatatatggaaggcggagacagcgacgaagcgctgtataacgctaaaagctacgtgtcggtgcgtaaaggatcgctcggctcttcattgcgcggtaagtcgccgatccaggacagcaccgggaaagtgatcggcatcgtctcggtgggctacaccatcgaacagttagagaactggctgagtctgcaaatcggatcgctgatgatcccgatggcgatcatgctgctcctgctgctctactgcgcccgacgcttctcgctgcatatcaaaaaacagatgctgaatatggagccgcagcagctatcacagctgcttatccagcaaagcgtcttgtttgaatcggtcttcgagggactgatagccattgactctcactaccgaattaccgccatcaaccaaaccgcaaggagattattaaacctcagccagccggaaactatcctgattggcaaaagcatcagcagcgtgatctctcaggagacgttcttttatgacgcgccgcagacaaataaaaaagacgaaattgtcacctttaatcagatcaaagtgatcgccagccgcatggccgtcacgctcaatagcgagccccagggatgggtcattagctttcgtagtaaagacgatatcaacaccctgagcctgcagctcagccaggtccagcagtatacggataaccttcgcgccgtgcagcacgagcaccgcaatttgatctccaccattgccgggctactgtttttgaaacgctacgataacgcgctggatctcattcagcagcagtctgaaagccaccagaaagttctcgattttatcgcccgtaattttaaagtgaaccatcttgccgggctgctgatcggcaaatattaccgcgccaaagagctcggattagagctggtcttcgatcccgcctgtcacgtggaaaccctcccctcctcgctttcgcataatgagtggatctcgatcgtcggtaatctgctggacaatgcctacaatgccgccttacgtcagccggcaggatcgaagcagatcgagtgcctgatcaacagcgagggcggcgaagcgatcgtcgagatcgccgaccagggctgcggaattgatgaatcgctgcgcgatcgtatttttgagcgcggcgtcaccagcagcgacagcggcgatcacggtatcgggctatggctggtacgcagctacgtcgagcaggcgggcggcaatatcgtcgtcgacgacaacatcccttttggcactatttttactctttatatccccctgacccgagatgaacaccatggatag

SEQ ID NO: 176955 - DNA, 699 bp, Klebsiella oxytoca
atggatagcatcacaactctcatcgttgaagacgaacctatgctggcggaaattctggtggataccatcaagcaatttccccagttcgaagtcattggcattgcggataagctggaaagcgcaaaaaaaatgcttcgtctctatcagccccagctgattctgttggataactttttgcccgatggcaaaggcctcgatttgatccgtcacgccgtcaatatcaattataaagggcgtatcattttcatcaccgccgacaaccgtatggataccatcagcgaagccctgcggatgggcgttttcgattatttgattaagccggttcactatcagcgattgcagcatacgctcgagcgttttgcccgctatcgcagctccctgcgctcgagcgagcaggcgagccagacccacgttgacgcccttttcaatatccaggccaaagagcacgcggaagccgccggcaccgccctgcgcggaatcgatgaaagcacctttaaccgcgtattacagctcttcaccgacccggggatcgtccataccgcagactcccttgcgcgtatcctcggcagcagcaaaaccactgcccgccgctacctggagcaaggggtcaaaaacgattttcttgaggccgaaataagctacggtaaagtcggcagaccggagcggatttatcacggcaaaaatagtgagcacgtttaa

SEQ ID NO: 176956 - DNA, 630 bp, Klebsiella oxytoca
atgactgaacgactttattacaccagcgatgccactgaatgccctgcgcgagtcgtcaactgcctgggcgaagccgatggccgctatgccattgagctggaccgcacgctgtttcatccgcagggcggaggacagccagcggatcgcggctggattggcgagcttgcggtcgagagcgttgccgcgcgcggcgagagcatcgtgcatattgttgcgcagccgctaccctccggcgaggtggcgatccgggtggacgcggacgcgagacggctgcacgctcggctacattccgccgggcacctgattggccaggccggagagcgctttggctggcggccgattaaggcgcatcactggccgggagaagggcgcatcacctttgccgccgggacgaacgcgtcactgcccgaagccagcgccctgctggcgcagatcgaaggatggcaggcggaggatttaccgcgtcggatctcttttgccgaaggtctgcgcaaggtcgggttcggcgatatgccgagctatccctgcggcggcacgcacgtggccagcctgtcagaactgggagaggtcgtcattacccaggtgaagatgaaaaaaggccagatgattgttagctacgctatagcgtaa

SEQ ID NO: 176957 - DNA, 954 bp, Klebsiella oxytoca
atgaatctgaacttactgcccgatctcgccctgttcgtgcagattgtcgatcagggcagcttttccgccgtcgcgcgccagacaggcgcgacgccttccgccattagccgcagcgtctcgcggctggagcaggaaatgggctgcaagctgctgcatcgcaccacgcgcaaactgcgccttagcgatgccgggaaaacggtgtatgaacatgcgctggagatgctggactcggcgcgtctggccatggattccgccggcagcgcccaggcggtgccgcagggtaagctcacgctaagcgtgccgaaagccgtgggacggtttgtcattcatccgctgatgctggagttttttagccgctacccgaagatcgacgtctgtctgcgccttgaggatcgggttctcgattttatcgatgacggtatcgatctggcgctgcgcatcacccatacgccctcgccggggctgcacggtaagcctttgctgtccgtcagccatatcgtctgtgcgacgcccggctacctggcgcaatatggcagaccgcgaacgccgcaggatctgcgcgaacatagctgtatcagccttggggaaacgcccgccgattcgcgctggaagtttcgccgcgacggcaaaacggagactatccagacccacggtcgttacgcggcaaaccacaccgccgtacgccttgatgccgtgaagcaaaatctgggtatcggcagcctgccgttgtttaccgcccgtgaggcgctggcgaacggcgagattgtgcaggttttaccggaatgggagtttatcagccgctattccggccagctctggctactgtggtcgggcaataagcacatgcccgccagaatgcgggcaatgattgattatcttagcgagaagatgaagccgactgcaggcagcacagccatagcgcaacgttcgaaaatcacggataagccgctatga

SEQ ID NO: 176958 - DNA, 2289 bp, Klebsiella oxytoca
atgataaaactgtatggccatggagtatgtatatcacaccagcatggtattatccctgttggtcatccttccttcccggtggacaagcaggaggcgcgtaaaggcacgatttcgtggtcgatcctctccgcccataatacttcaggcgatcaccgcaagttaaaaataaaatttgattgtatggcctcacacgatattacatttgtggggataatccaaaccgctaaagcgtctggaatgcagcgttttccactgccttacgtattaactaattgtcataattcgctatgtgcggtcggcggtaccattaatagtgatgatcatatattcggtttatcttcggccagaaagtacggcgggatttatgttccgccgcatatttccgttattcatcaatatatgcgcgagatgatggccggcggtggcaagatggtgctgggctcggacagccatacccgctatggcgctttagggacgatggccgtcggcgaggggggcggcgagttagttaagcaactgctgggagggacctgggatattgattatcccgaggttgttgcggtgtatttgacaggtaaacccagccctggcgtggggcctcaggatattgccctggcgataattggcgcggtgttccggcgcggttatgtgaaaaacaagataatggagtttgtgggaccgggggtggcgacaatgtctaccgatttccgcaacagtgttgatgtcatgacgacggagaccacctgcttatcgtctatctggcaaaccgatgaagagactcgaagctacttgcgcgttcatggcagggagcaagactattgttcgctctcagcatccgatatggcttattacgatggttgtatagaagtcaatttaagcgctatcaaaccgatgatcgccttaccttttcatcccgccaacgtctatgaaattgatacgctgaaggagaacttgccggatattttgcatgaagtcgaaatggaatccgaaaaaatttcgcttgggcgcgcaaaactctccctgctggataaagtcgaaaagggtaagctccggatccagcagggaattattgccggttgtgctggcggaaattacgtcaacgtagttgaagcggcaaatgccttaaagcatcactcctgcggcgacaacgttttctctctctcgatatatccctcatcccagccggtgctgatggatctgaccaaaaaagggataacgaccgatttattaagcgctggcgcgattatgcgtaccgcattttgtgggccctgctttggcgcaggcgacacgcctatgcataatggattgagcattcgccatacaacgcgcaatttcccaaaccgggaaggttcaaaacccggaaatgggcaaatgtcggctgtcgcgttgatggatgcccgctcaattgcggcgacggctgccaacggtggtattctgacctcggcgtcagagctcgattgctgggagaacataccgcaatatgaatttgacgcttcaccctataaaaaccgtgtctatcaaggctttattaaaggcgcatcccagcaatcgctgatttatggacccaatataaaagactggccggaaatgagtgagttaacggaaaatattctcttaaacgttacctctaaaatcatggatccggtgacgactactgacgagcttatcccatcgggagaaacctcatcatttcgctctaacccctcaggactggcggagtttaccctctcacggcgcgatccgggctatgttggccgcagtaaggagattgccgctctggaacaattgcgcgtcgcgggggacaatccttgcaggctgcatcctgaacttgaggacatctttacccaaatccgccagctgccgggacaggagagcgtcaccctgcagcagacggaaataggtagtatggtttatgcgataaaaccgggcgatggttcagcacgagaacaagcggccagctgccagcgcgtgctgggggggctggcaaatattgcgcaggaatacgccacgaaacgttatcgttcgaatgtgattaactggggaatgctgccgctgcaaatgaaagccttacccgaatttgaagtgggggattttatctttattccgggcataaaatccgccttagacagcgagctgggtcatattaccgcgtttgtcattagccgcgagcgccccataaaagagatcgcgctttacatggagggcctgacctcatcagagcgggagattattaaggcaggaagcctgattaattataataaatcacgcttaacttcccaccatcagtaa

SEQ ID NO: 176959 - DNA, 1260 bp, Klebsiella oxytoca
atgtctccagttacgattacgttgtcgctattggttttttcgatcgtcatgttcgtttgggaaaaaataccattagctgtaactgccatgattgtttgtattactctggttgtcaccggggtcttcgatgtcaaaactgcttttgcaggttttattaatcagaatgttattttatttgtggctatgtttgtggtaggcggggctttattcgaaaccggcgtaaccgataaaattggcggtatcgtgacacgctatgcgcgtacagaaaaacagctgatagtcattattatgttagtgtgtgggaccctttctggatttttatcgaataccggaacggctgcagtgttaatacctgttgtgatcggcgcagcgataaaatcaggttatgcccagtcacgtctgcttatgcccctggcctttgcctctgcgttggggggaaatttgtcgcttatcggttccccaggaaatctgattgcacagtcggcgctggagcaggttggccaacgttttggtttttttgaatatgctaagctgggtattccgatgctggcttgcggtattctctattttgtcacgataggctaccgactattaccgcaaaaaagtacgctacaccagcaacgcactgaaagtatgcgcaagatagcgtgcccgaaatacaagcaggtgattgcgctgtcggtactaatcgcaaccgtatccggcatgattttcgaagaacagattggattgccgattgctattgttggctcaattggcgctttaacgctgattgtcacccgggtgattactgaaaaacaggcataccaggccattgattcacagaccattttcctgttcggcggaacgctggcattagcaaaagcgctggaaaccaccggcgctggtgcgatcatggcgcgtgcaatgattgaacaactgggtaatcacgcttcccccttcttacttttaagcgcggtattgctcatctcctgtgtgttaacaaacttcatgtccaatacggcaaccgccgctttattaatgccgattggtctatctattgcgcattcgatgggggccgatccccgggcggtattaatggctatagttattggctgctcgtgtgcgtatgcaacccctgtgggtacgcccgccaatatgatgattttttctgcgggtggctataagtttattgattacgttaaaaccggattgccgcttattgttatatcggtaatcgtcagctttattttattgcctgtgttttttccattttattag

SEQ ID NO: 176960 - DNA, 1434 bp, Klebsiella oxytoca
atgcaaaagaataagttatggaagctgctggttataatagcaataccgttactcatgagtttattcccggcgccgcaaggattatcaacacttgcctgggttttatcaggcatttatctggcagccattgtggggttagtcattaaacccttttcagagcctgtggtactgctgattgccgtcgccgcatcaatggtggtcaccggcaatctgggtgatggttcggtaaaagccgccagcgtattaagcggatattcatccggcaccacctggttagttttctccgcatttactctgagtgcagcttttgttattaccgggctaggtaaaagaattgcttattttcttatcggaaaaattggtagtacaacgttgggccttggctatgtaaccgccttccttgacctgatcctggcccccgcaacgccatcgaatacagcacgtgctggggggattgttttaccgatcattaatagcgtcgcagtcgcccttggctcggagccggagcacagcgcaaagcgagttggtcactatcttatgttgaacatctatatggtgacgaaaacaaccagctatatgttctttaccgcaatggccggcaatattcttgcgctgaagatgattgaagatatctgccacatcaaattaagctggggtggctgggcgctggccgcaggattacctggtatcattatgctgctgctgacgccgctgattacctacaagctttatccgccggaattaaagcgggttgataataaaaagatcgccaaaacgggcatcgaagctttgggacccatgaccctgcgtgaaaagatgctctcttgcctctttgttctggcactgggcggttgggtgttcagcagcgccctgggggttaatgagtcaaccgttgctatctgcgtcatggccttgatgttagtgctgaaaatcgtaacctgggatgatgtgataaaaaataaaggcggctggaatacgctcatttggtacggtgggattattggcttaagctcgttattatcaaaagttggctttttcgtgtggctggctgatttattaaaaaataatatttcatttgatggtcacggtaatatagcctttattgttattgtcgccttgagcatactggttcgttatttcttcgcctcgggaagcgcttatatcgtcgctatggttccggtctttgccatgctggcgaatgtatctggtgcaccgataaccctcaccgcactcgcgctattattcagcaattcttatggcggaatggtcactcactatggtggcgcggcgggaccagttatttttggtgtgggttataacgatatcaaatcctggtggattataggtggaatactggcggtactgacattcctcttgcacatcaccctcggggtatggtggtgggaaatactcatatcatccgggatgatttaa

SEQ ID NO: 176961 - DNA, 1056 bp, Klebsiella oxytoca
atgaagagcattcactgtgtattaatgcgtggtggaacatccaaaggcgcctttttattagcggatgatttaccaaaggatattaaccaacgtaatgacttcctgttatccatcatgggatcgggccatgagctggaaattgacggaattggcggtggaagcccacaaaccagcaaagtggccattattagtcgatctgttagtgaaaaagcggacattgattatctgtttgttcaggttatcgtcaacgaacggcgggtcgataccacgccgaactgcggaaatatgctgtgtgctgtagggggattcgcaatagaacaggggttaattaaagcggattctccggtcacgagagtgcgcataaggaatgtgaacaccaatacttttattgaggctgacattcaaacgcctgagggaaaggttatctacgacggcgatacgcagatagacggcgttcccggccgtgccgcaccggttgcattaacctttttgaattctgcgggtgcaaaatccggccagcttttccctaccgggaatcggctggacgtatttgataatgcgcaagtcacctgtattgacatggcaatgccgatggtcgtgattccagctcagagcctgggaaaaaccggttatgaatctgcctgcgaattagaccgggacacagcgcttttagaatcgctggagtctattcggcgacaagcgggaaaggcgatgggatttggcgatgtgacaaatatggttatcccgaaaccggttctgatttctcctgcgcttagcggcggaaatttaaatgttcgatattttatgccccacagttgccataaatcgttggcgattaccggcgctatcggcctggcgagtgcatgtattattccgggaacgattgctaatgaactgacgaaattgtctggtgatggcatcgttaaaatcgagcaccccagcgggagtattgcggtcgacttaagtaatacgaccgaagcccctgaagcgatccgcgcctctgttattcgcacggcacggaagattctttccggctcggtttatattgccgactaa

SEQ ID NO: 176962 - DNA, 936 bp, Klebsiella oxytoca
atgaaaaatgaactatccgggatgaaagcctttgtcacagttgcagagctaggctcttttagtaaagccgccgaacaattaaatcttacgcaaccggcattaactaagaagataaaaaaaatagagagtaatctggatattgcgctgttcgaacgaacgacgcgaaagattgcgctgacgcaagccggaaaaatgcttctcccaagagctaaatctttgatctccggccttgatgcggcaatatttgaccttaacgatttaacgtctcaattgcatgatacggttacgctatcctgcattcctactgccgtattttattttttaccgcgcgctatcgtgcaatttaatcaaagttaccccaacatcaaagtacgaatttatgaacaaggtattgaaacctgtatggactcggtacgaaaaggcgatgttgattttggtataaacatgaacttcatcacacatccggatatcgatttcattcccctggtgaacgagccttttgttctggcctgccggcaagatcatcctctggcaaccaggaaactggtcgaatggcgggagcttgttagccagacgttaatcggcgtcaggaaatcaagcggcaatagacagttgatcgagaaatgcctggcggataaaccctggcagctgagctggttttatgaagtcagacatttgtcgacctcgctcggccttgtcgaagcaggcctcggagtctccgcactcccttgtctggcaatgccccacggagagagcgccgtggtgagcgtcccgcttgtggagccggtcatcagacgcacgctgggtatgattcgcgtaaaaaacaggcctctttccgcagcggcagagcgcttagcttccctgctactgatgatgtggacggatgaagcgggcacgctctggcgcaacgtcgtggattcaacgcagaaaacctga

SEQ ID NO: 176963 - DNA, 915 bp, Klebsiella oxytoca
atgcgcttacctatcattctggataccgatcccggcattgatgacgccgcagcgattgccgcggcgctgttcgctcccgaactggacctacagctgatgaccacggtagcggggaacgtatccgtggagaaaaccacccgcaacgccctgcagcttttgcatttctggaacgccgatgttccgttggctcagggcgcttccatgccgctggtccgcccgctgcgcgacgccgcctccgtacacggcgagtccgggatggaaggctacgatttcgtggaacataaccgtcagccgctggcaaaaccggcatttcaggcgatccgcgatgcgctgatgcacgctccggagccgatgaccctggtggcgattggcccgctaaccaatatcgcgcttctgctgacccagtatcccgaatgccgctttaatatccgtcgactggttatcatgggcggttccgccgggcgcggtaactttacgccgaatgcggagttcaatatcgccatcgacccggaagcggcggcgaaagttttccagagcgggctggagattgtgatgtgcgggctggatgtcaccaacgaggcgatgctggctccggactaccttgctacgctaccgacgctgaatcagaccgggaagatgctgcatgcgctatttagccactaccggagcgggagcatgagcagcggcctgcgtatgcatgacctgtgcgcgattgcctggctggttcgtccgcagctcttcaccctcaagccctgttttgtgacggtagaaacccagggaacctggacctcgggaacgacggtggtcgatatcgaaggcaaactgggccaaccggcaaacgtgcaggtggcgctgggtctggatgtagaaggttttcagcgctgggcagcggaggtgattgctttagcgccctaa

SEQ ID NO: 176964 - DNA, 951 bp, Klebsiella oxytoca
atgcagattctgttggctaacccgcgcggcttctgcgcaggcgttgaccgcgctatcagcattgttgaaaacgcgctgacgctatatggcgcgccgatctacgtgcgtcatgaagtcgtgcacaaccgctatgttgtcgacagcctgcgtcaacgcggcgctatttttatcgagcagattagcgaagtgccggacggcgcgatcctgattttctccgcccacggcgtctctcaggccgtacgcaacgaggcgaaaagccgcgatctgacggtttttgacgctacctgcccgctggtgaccaaagtccatatggaagttgctcgcgccagccgtcggggggaagagtcgatcctgattggtcacgccggtcacccggaagttgaaggcaccatgggccagtacagcaacccgcagggggggatgtacctggtggaatcgccgaatgacgtctggaagctggatgtgaaaaacgacgctaagctgtcgtttatgactcagacgacgctctccgttgatgatacctccgacgtgattgacgccctgcgcgagcgcttcccgaaaatcgtcgggccgcgcaaagatgatatctgctatgcgacgacaaaccggcaagaggccgtccgcgcgctggccgggcaggctgacgtagtgctggtggtggggtcgaagaactcctcgaactctaaccgtctggccgaactggcccagcggatggggaaagccgcctatctgatcgatgatgcgaccgatatccaggaagcctgggtgaaagacgcaacctgcgtcggcgtaaccgcaggcgcatcggcgccggatattctggtacagaacgtgatttcgcgtttgcaggagctgggcggcggcgaagcggtgccgctggaaggccgtgaagagaacattgttttcgaagtgccgaaagagctgcgcgtagacgtccgtgaagtagagtaa

SEQ ID NO: 176965 - DNA, 450 bp, Klebsiella oxytoca
atgtctaaatcagtacagagcaacagtgcggtgctggtgcacttcaccttaaagctcgacgatggctccaccgcagagtcaacccgcaacaacggtaaaccggcgctctttcgtctgggcgatacttccctgtctgaaggtctggaacagcatctgctggggctaaaagagggggataaaaccaccttttcgctggagccggacgccgcgtttggcgtaccgagcccggacctgatccaatatttctcgcgtcgggaatttattgatgcgggcgagccggaagtcggcgcgattatgctctttaccgcaatggatggcagcgaaatgcccggcgtgatccgtgaagtaaacggcgattcgattaccgttgatttcaaccatccgctggccgggcgtaccgttcattttgatgttgaagtgctggagatcgatccggcgctggaggggtaa

SEQ ID NO: 176966 - DNA, 501 bp, Klebsiella oxytoca
atgagtaaaccgattagttcaacggggctacgctggctctgggtcgtcgtagccgtgctgattatcgatttaggcagcaaattcctgatcctccagaacttcgctctgggggatacggtatcgctgttcccatcgcttaatctgcattatgcgcgtaattatggcgcggcctttagcttcctcgccgacagtggcggctggcagcgctggttcttcgccggtatcgctatcggtatctgcgtgatccttgcggtgctaatgtatcgctctaaggcgacgcaaaagctgaataacattgcctatgcgctgattattggcggcgcgttgggcaatttattcgacaggctttggcatggttttgtcgtcgatatgatcgatttctacgtcggggactggcatttcgccaccttcaaccttgccgataccgctatttgtatcggcgcggcgctgattgtgctggaaggcttcttgccgaacgcggctgcgaagaaacaggcgtaa

SEQ ID NO: 176967 - DNA, 2817 bp, Klebsiella oxytoca
atgagtgactataaatcgaccctgaatttgccggaaacagggttcccgatgcgcggcgacctcgccaagcgtgaaccgggaatgctggcgcgttggaccgatgatgacctgtacggcatcattcgtgcagccaaaaaaggcaaaaaaaccttcattctgcatgatggccctccttatgcgaatggcagcattcatattggtcactcggttaacaagattctgaaagacattatcgttaagtccaaagggctggcgggctatgactctccgtacgtaccgggctgggactgtcacggtctgccaatcgagctgaaggtagagcaggaatacggcaagccgggcgagaaattcaccgccgccgagttccgcgccaagtgccgcgaatatgccgccactcaggttgacgggcagcgcaaagactttatccgtctgggcgtgctcggcgactggtcgcacccgtacctgaccatggacttcaaaacggaagccaacatcatccgcgcgctgggtaaaatcatcggcaacggccatctgcacaaaggcgctaagccggtgcactggtgcgtagactgccgttccgcgctggcggaagcggaagttgagtattacgacaaaacttctccgtccatcgacgtggcgttccacgcgaccgataaagcggcggtgctggcgaaattcggcgtggccgacgttaacggtccggtttctctggttatctggaccaccaccccgtggaccctgccagcgaaccgcgccatctccctgtccccggagtttgactatgcgctggtgcaggttgacggccaggcgctgatcctggcgaaagatctggtcgacagcgtcatgaaacgcgccggcattgctgattacactatccttgcggtggtaaacggcgccgagctggagctgatgcgctttaagcatccgttcctcgatttcgacgtcccggcgatcctgggcgatcacgtcactctggacgcgggtaccggtgcggtacataccgcgccaggccacggcccggatgactatgtcatcggtcaaaaatatggcctggaagtcgctaacccggtgggtccggacggcgcctatctgccgggaacttactcgacgctggatggcgtaaacgtgtttaaagccaacgatattgtcgttgcgctgctgtctgaaaaaggcgcgctgctgcacgtagagaaaatgcagcacagctacccgtgctgctggcgtcacaaaacgccgatcatcttccgcgccacgccgcagtggttcgtgagcatggatcagaaaggcctgcgcgcgcagtcgcttgccgaaatcaaaggcgtgcagtggatccctgactggggccaggcgcgtattgaatcgatggtcgccaaccgtcctgactggtgtatttcccgtcagcgtacctggggcgtaccgatgtcgctgttcgtgcataaagagacgcaggagctgcatccgcgtactatcgaactgatggaagaagtggcgaaacgcgttgagatcgacggcattcaggcgtggtgggatctcgattcccgcgacatcctcggcgccgaggccgatagctatgagaaggtgccggatacgctggacgtgtggtttgactccggatcgacccactcctccgttgttgacgtgcgtccggaatttgccggtcacgccgccgatatgtatctcgaaggttctgaccagcaccgcggctggttcatgtcatccctgatgatctctaccgcgatgaagggcaaagcgccttaccgccaggtgctgacccacggctttaccgttgatggccagggccgcaagatgtccaagtctatcggcaacaccgtctctccgcaggatgtgatgaacaaactgggcgcagatattctgcgtctgtgggtggcttccaccgactacaccggcgaaatggcggtctccgacgagatccttaaacgcgccgccgacagctatcgtcgtatccgtaacaccgcgcgcttcctgctggcgaacctcaatggcttcgatccggctaaagatatggtgagaccggaagagatggtcgtgctggaccgctgggcagtaggctgcgcgcaagcggcgcaggacgatatcgtcaaagcctatgaatcttacgatttccacgaagtcgtgcagcgtctgatgcgcttctgctccattgaaatgggttcgttctggcttgatatcattaaagaccgtcagtacaccaccaaggcggacagcgtcgcgcgccgtagctgccagaccgcgctgtaccacattgccgaagcgctggtacgctggatggcgccgatcatgtcctttaccgctgacgaaatctggggttacctgccgggcgaccgcgagaaatacgtctttaccggcgaatggtacaccggtctgtttggcctggccgacgacgaagcgatgaacgatggtttctgggacgagctgctgaaagtgcgcggcgaagtcaacaaggttatcgaacaggcgcgtgctgacaagcaggtgggtggctctctggaagcggcggtaacgctgtatgccgatgccgatctcgcggcgaagctcaacgcgctgggcgacgaattgcgatttgtcctgttgacctcaggggcgaaagttgccgattatgcgcaggctccggccgacgcatggcagagtgagctgctgaaaggcctgaaagtcgtgctgagcaaagccgaaggtgataagtgcccgcgctgctggcattacacgacggacatcggcaaggtggcggaacacgcggatatctgcggacgctgtgtcagcaacatcgccggtgacggcgaaaaacgtaaatttgcctga

SEQ ID NO: 176968 - DNA, 939 bp, Klebsiella oxytoca
atgaagctgatacgcggcatacataatctcagtcaggccccgcacgggtgcgtgctgaccattggaaattttgacggcgtgcatcgcgggcaccaggcattattgcagcgtttgcgcgcagaaggtcgccagcgtggcttaccggtggtggtgatgatttttgagccacagccgcttgagctttttgccgccgataaagcgccggcacgtctaacgcgcctgcgtgagaagctgaactatctggctgaaagcggcgtcgattacgtcctgtgcgtgcgtttcgatcggcgctttgcggcattgaccgcccaggactttatcagcgaactgctggtccgccagctgggcgttcagttcctcgccgttggcgatgatttccgctttggcgcaggtcgccagggggatttcttgttattacaaaaagccggcgtggagtacggctttgacgtcaccagcacccaaaccttctgtgaaggcggcgtgcgcatcagcagcaccgcggtgcgccaggcgctggcagacgacgatctgcccctggcggagacgctgctggggcatccgtttaccatctccggccgcgttgtgcacggcgatgaactcgggcgcacaataggtttcccgacggcgaatttaccgctgcgtcgtcaggtttccccggttaaaggggtctatgcggtagaagtgacagggcttggcgacaaaccttttatgggcgtcgccaacattggtactcgtccaacggtgtccggcgtgcgtcagcagctggaagtccatctcctggatgttgtaatggacctctacggtcgccatatagatgtaatactgcgtaaaaaaatacgtaacgagcagcgatttgcgtcgcttgatgagctaaaagcgcaaatcgcacgtgatgagttaacggcccgcgacttctttgggctaaccgggcaggcataa

SEQ ID NO: 176969 - DNA, 210 bp, Klebsiella oxytoca
atgacgcgcagctttgtttttgtggatcagacctttagcagcctgacggtccacgattggttgcatttcgttaaatgctttcagtgcagtagctttgtcgccagcttcgatagctgcgtatactttcttgatgaaagtacgcatcatagagcgacggctagcgttgtgcttgcgggccttttcagactgaacggcgcgcttcttagctga

SEQ ID NO: 176970 - DNA, 936 bp, Klebsiella oxytoca
atgtcgcatatcaactacaaccatctgtactacttctggcatgtctataaagaaggctccgttgttggcgcggcggaagcgctgttcctgacgccgcagaccattaccgggcaaattaaggcgctggaagagcgcctgcaggggaagttgttcaagcgaaaaggaagagggctggagcccagcgaattaggcgagttggttttccgctatgcggatcgcatgtttacgctgagccaggaaatgctcgatatcgttaactatcgtaaagagtcgaatctgctgtttgacgtcggcgtcgcggacgcgctgtcgaaaaggttggtgagcggggtactggatgctgccgttgtcgataacgaacagatccatttacgctgtttcgaatcgacccacgaaatgctgctggagcagcttagccagcataagctcgatatgattatttccgactgccctattgattcaacccagcaggaagggctgttttcagtgaaaattggcgaatgcagcgtcagcttctggtgcatgaatcctccgccgaaaaaaccgttcccggcctgtctggaagagcgtcgcttactgatccctggccgtcgttcgatgttagggcgcaagctgctcaactggtttaactcgcagggattgcaggtggaaatcctcggcgagtttgacgatgcggcgttgatgaaagccttcggcgcggcgcataatgcgatattcgttgccccgacgctgtatgcgcatgatttctatagcgatgagtcgatagttgagatcggacggatggacaacgtcatggaagagtatcacgcgatcttcgctgaacgaatgatccagcatccggcggtgcagcgtatttgtcatcgcgactattcggcgctctttacgccgccgcaggcccaggacagcgctgtttctggcggttcggcaaagcaatag

SEQ ID NO: 176971 - DNA, 1176 bp, Klebsiella oxytoca
gtgaaacatctacagcgtttttttcatagcgaggcatccggggggataatcctcatcttcgccgccgctatggcgatgctattagccaatacgggcctgaccagcggcctgtatcactcttttctggagacgcccgttcagctgcgcgtaggcgcgttagagatcaacaagaacatgctgttgtggataaacgacgcgctgatggcggtatttttcctgcttataggtctggaagtaaagcgcgagatgaaacagggcgcgttggccagccgtcgccaggccgtatttccggtcgtcgcggcgttgggcggcatggtggttccggcgttagtctatctggcatttaacggccaggatgcgattgccagggaagggtgggcgattccggctgcgaccgatattgccttcgcgctgggcgtactggcgctgctgggcaatcgtgttcccgctgcgctgaagatctttctgatggcgctggccatcatcgacgatctgggcgccattattatcattgcgctgttctacacgcacgatctttccgtggtgtcgttggttgtcgctgccggcgccattatggtgctggcggcgctgaatctgagcggcgtacggcgtaccgggatctatattctggtcggcgccatactctggactgcggtgctgaagtcgggggttcacgcaacgctggctggcgtcattgtcggctttatgatcccgctaaaagagcagaacggtaaatcgccggcgaagcagcttgagcacgtgctgcatccgtgggtggccttcctgatcctgccgctgttcgccttcgctaacgcgggcgtttctttgcagggcgtcacggtagaagggctgacctcgctgctgccgttaggtattattgccgggctgtttatcggtaagccattgggaattagcgtattctgctggctggcgctgaaactgaaatgggcctcgttgccggaagggacaacctgcaagcaaattatggcggtcggcattctatgtgggattggcttcacaatgtcgatttttattgccaccctggccttcggcagcgtcgaccccggattgatcaactgggccaagcttggcatcctgattggatcgatattatcggcagtcacgggatacatcatactgcgtaagcgcgtaacggattcgggctacgcggcttaa

SEQ ID NO: 176972 - DNA, 1263 bp, Klebsiella oxytoca
atgtttaacgacgttaatgttaatagttgcaaaacgcccggttgtaaaaatcttggcgtgcttaatagccctgattaccttcgtcagggagaaaatatcctgtgccgggaatgcggctttctctttccgcccatttcggcgatttcccttaacgcttttcgccgcacggtaaaccagggatggaaggggctggttaagcagtgtccgggatgcggcagcgtttctctaaaacgctacggctactcggcgcagggcgagcggcgtatggcatgtcgcgactgcagcaagaccttcgtgataccggacagcctgaccctcacgcctcgccagcaggagcttgccgctctcatccagcaaggcagctcgcttaacgatattcgcactctactggctatcgataacactacattaggccgcgaattagctaacctctcttatcgcgcggacctggcggagcgcgcttttgactttccggcgtttgatattgttctcaccacccgggcgtttagccttggttttaacggtggagagaatcggctgtatgtgctggtcaccgctgaggaaaaaagcggtaaagtggtggctatctcgacgaactatactccacgcccggttgagccggcgtatcagtatcaatcgcaatatgaagaacgactgcccccaggcacgctggcgtatctcgtgcaacgcaaagaaatgctcactatgcggcgtcgtggcgcgctgtttgatattgattacgggccgggaacgttgcaccggcatgtgcgaggtatgctggttaaacccgtattgccggcctatcgacattttgaactggtgcgaatgttaaccgatgagcgttcgctaaatgtgcagcattatctcgatcatgagtgtttcatccttggcggatgtatgatggcaaacctggcgcaggtccggcaggggcgctgccatatctcattcgtcagagaacgcggtgtaaacccccctcagggcgacatgccaccgcgactgttctacagcggcgggatccgcaacaatgtctggcgaacattctccacgcgggactacgccatggccgtttgtaacctgaccggaagtaagaaaaccggcctgttacggcatgcgaccctgcgaagcgccagcgaatttatagactatatttatcgccatcctttccttccctggctcaccaggatgtcgcctgccaacgtgacgtctgcgctaaatcatttgaaatatgaatataacaaccgtctttcctgcctgcctttttaa

SEQ ID NO: 176973 - DNA, 1494 bp, Klebsiella oxytoca
atgaaaaaaacatgtgttgccggcctgattggcctggcattatgcgcaggtagcgccatgcattctgtttatgccgctgatgctaaacatcccaatctggtcatcattctggcagatgatttaggctatggtgacctgggcgcctatgggcatcaaatcgtcaaaacgcccaatattgataagctggctcaggaaggggtgaagttcaccgattattatgctccggcgccgctctgctcaccttcgcgggcgggcctgttgaccggccgcatgccgtttcgtacgggcattagatcgtggatcccggaggggaaaaatgttgccttaggccgtaacgagctgacgattgcgaatctgctgaagcagcagggttacgatacggcgattatgggcaaactccatctcaacgccggcggcgatcgtaccgaccagccgcaggcgaaggacatgggctttgactacaggctggtcaataccgccgggttcgtgagcgactcaacgctggataacgccaaagagcgtcctcgctacggcatggtctatcccaccggttttacccgcaacgagaaacctatcggtcgcgcgaagacgttcagcggcgagctggtgagttcggaagtcgtcaactggctggataagaagaaagataacaaccccttcttcctctacgtcgcctttaccgaagtgcatagcccgctggcctcgccgaagaaatatctcgatatgtacgcgccttatatcagcgcttatgcgaagcagcacccggatctgttctacggtgattgggcggataagccctggcgcggcgccggtgagtactatgccaacatcagctatatggatgctcaggtagggaaagtgctcgacaagattaaagcaatgggtgaagaagataacacgatcgtgatttttaccagcgataacggcccggttacccgcgaagcgcgaaaagtttatgagctgaaccttgctggtgaaacggatgggctgcggggtcgtaaagataacctgtgggaaggcggaattcgcgtcccggcgattatcaaatatggtcaccatattccgcaggggatggtctcagaaacgccgatgtcgggtctggactggatgccgacgctggcgcaaatgatgaacttccctctgccgaaggaccgtacctatgacggccagtcaatcgtaccggtactggagaagcaagcgttcaagcgggaaaaaccgctgattttcggtatcgatatgccgttccaggacgatccgaccgatgaatgggcgattcgcgacggcgactggaaaatgattattgatcgcgaaggtaaggctaaatacctctataatctgaagcaggatcgcgcagaaacgctaaatcaaatcggtaagcagcccgaaattgagcagcggatgttcgctgagtttctgaaatataaaaatgacatcgataatgattcactgatgaaagcccgtggcgataaaccgacgccggtgacctggggctga

SEQ ID NO: 176974 - DNA, 144 bp, Klebsiella oxytoca
atgccgttgctatgtgagatttcaatcactaatatcattttcttttcgattgatacttctttcccgattggccggtttggctatggatacatcaattttactcccatgaatatctgcaattataggctggtgagagagcaataa

SEQ ID NO: 176975 - DNA, 300 bp, Klebsiella oxytoca
atggaaaaaatgcccctcatacatagtgtgatgcccgcgctggtcttgccgctatggtttatcggctgcgcgtgcctcgcctccggcggtcagcttcagttttccggtagcgtgataaccgccgcctgctggaacgaaacgggaacctccgatattttatgccagcgtcaggatcgtcttgagcgtcatatcaccgtggaaaacctcattgtgcccatatcctccccctatgccacgattgaaaagtcctacctggatgaggacaaacagctaacgctgctgcgcgtggtctatgactga

SEQ ID NO: 176976 - DNA, 846 bp, Klebsiella oxytoca
atgcacgattcatctttaaagctgagctgcctggcggcactggcgctgattagcggcgcgatttctttaccggcgcaggcggagaacggcgagccggcgtcgcagattggtccggcggcggaggcctatatcgccagccatccggataaagtcggcgaagccgtagccacgtatctggcgaatcacccggaatttctcatcgccgccagtgaaacgctacatcagcggcagcagatcgcccaacagcaggcttacgtacagctggccctgcagtatcaggccgggctgttgagcagcgccagcccatccgttggcccggcagatgcgaaagctgcagtggtcatgttctttgattatcagtgttcatggtgcagcaaaatggcgccggttatcgaggcgctgatcaaagccaacccggatacgcgctttgttttcaaagagttccctattttttcttcgcgctggccggtatcggggctggcagcaaggatcggcgaacaggtgtggttaagcgacggcggcgccaaatatcttgactggcataacgcgctctatgccaccggtaaagtggaaggcgcgctcacggaacaggatgtctatggcctggcgcagcattatctgtcgaaagagaagatcgcggaggtcaagcaggcgcaggatagcggggcggttcatgacgctctgctggcaaatcaggcgctggcccagcatatgaacttttccggtacccccgcgtttgtcgtgatgccacaggcgaaaacgccggaggctaaccgcgtctcggtgatgcccggcagctcctcgcaggacgctctgcagacggcgattcagaaagcgaaaggctag

SEQ ID NO: 176977 - DNA, 732 bp, Klebsiella oxytoca
atgcttcagccacgtttatcctcgcctatgaataaactccttttttatatcgtcatgagctggctgctgccgatccctgtagctcaggcgggcgtggtgatcggtgggacgcggtttatctatcatgcgcagatgccgaccctaagcgtgccggtgagcaacacctcttctgagagctggcttattgatagccacattcagtcggcgcgacgatggcccggcgcggctattgccgcagggaacagacccccctttatcattacgccgccgttgttccgtcttgcggcagagcaggagaatacgctgcgcgtgacctggaccggcgacgcgctcccctccgaccgggaaagcctgttcacattgagtattgccgccataccctccggtaagcctggcgaccatcatgttcagatggcctttcgttccgcgctgaagcttatctatcgtcctgctggcctggcaggcaatccccagcaggcgtaccgggggctgcgctggacgttgaccccggaggggctgtcggtacagaacccgggcccttattacgtcacgctcttctcgctcaaggccaacggccggcccattgataccgcaggtgtcgtcgcccctttttcgacgcgcaaaaccgactggtgccagcgggtgacccgctgcgaggtgcgctggcaaagcattaatgattatggccgcgtgctgccgccgatagcggcgaacgtactgctggcgcgctga

SEQ ID NO: 176978 - DNA, 525 bp, Klebsiella oxytoca
atgaataaatatgcttatttagcctgcatggcttgctgcctactgacgccagcaacggcagacgcgcatgacgggcgtgtctatgtcaccggcacgattaccgacaatacctgcacgttgtcgccggattcagaaaacattaacgtggagatgggcagcgtatcgaaccgtcagttttaccaggctggcgatggttccgcctggcagcctttcgccattgatttgcagaactgcggcagcaccgtcagcggcgttacggtgagcttcagcgggacggcaaatcagcgaaatacggatctcctggcgcttatcgacgcggcggacgatgccacagggattggcattggcctctatgaccaggataaacatcttattccgccagggcagacgagcgaagtcatcgcgctttctccggggcagacttccgcgcatctgcagttctatgctcgctatatcgcggacggcagcgcggttacggccggaaaggcgaatgcttcagccacgtttatcctcgcctatgaataa

SEQ ID NO: 176979 - DNA, 537 bp, Klebsiella oxytoca
atgagcttaaaacgcggtctctttttagcgctcctctgcgggagcccattttgccaggccagtaataccggcaataacctggaatttaccggcacgatcgttgcgcaaacctgcgatgtggagatttccagcgtcagccagagtatcgatttggggcagttttcggttgaggattttccggcgatcggaacgtggacgaaagcgaagccgtttaacatcaatctgaaaaactgctcccgggggattaccggaaccaaaatctggtttaccggcacggcagacagtgatgatccgtcgctgctggcgctgaccgataccggcatgggtaacgaaaatatgctggccagcggcgttggcgtggaaattaacaatgatgatggggatgaaatcagtatcaataacagcaactcggcggtttattccctaaaggccgggcgcaataccctctccttctacattcgctacaaatcgacacggccagtggtcacctccggtaatgcgacggcggtgatgtatttcgacctgcaatacgaatag

SEQ ID NO: 176980 - DNA, 1008 bp, Klebsiella oxytoca
atgaagacgggtttattttttattccgctggcgggactgctgttagccaatgcggctcaggctgccgtctgtcaaaacgtcaacggcgcgcctactacggtcgattacgatctgagtaccaccctcacggcggcccaaaacgcggcggggaatacggttcagttgaccaaaaaccaggaagtgaacgttcaggccgtgtgtcccgcagggtcggcattctcgaaccggacgtatcgttcctatgtttcaccctacgccgtggttgaaaccagcggcccatggaagtatttaaagctcgaccctgactatctggagggggcgatgagaattgacgactccgcggcaggaaccctttatctccctaccaactacgcctatatgggcaccgatgacagcgtaaacgccggcaaaccgttctacatccgcgactcgaacctggtgtttcagctcaagattgccaggcctttcgtgggaaccgtcactatcactccgaagaccatgttcaacgtctacgtgacgacagggacgagcgatcccctgagcaacgtggtttacaacattgcttacagcggaacggtaaccgtgccacaaagctgcgaaatcaacgcagggcagaccattcttgtggatttcggctcgctttatagcggtggcttcaaccgcgccggggcaaagccggtgagcgtcagaaataaaaaattcagggtgccggtgaaatgcagcggcgtgaattcgcaggttaatttaagcctgcggctgattgcgacagcggatactcaccttaaccaggctatcgcctcggataacccgggcgtcggcgtggtggttgagaccaacgatggcgcggtattgacgccaaacgatgccagcagcgtggtgcctttcgtcactgacgatgccggtaaagccaacatcgcgctgcaggcttatccggttagcacgaccggtgaaattcccgcggagggcgtatttaccgcgctggctaacctgcgggtggacttcgactaa

SEQ ID NO: 176981 - DNA, 2670 bp, Klebsiella oxytoca
atgattttggtgcgaccacgcctgtacaaacctgccagagccaatcttagcgtgcagaaaatggctgctataaagcgtcaatcgccgtctgtcagtaaaccggtgctgatgaccctgactttagtcagcgtgttaacgctgccgaagggctgggcggataactattttaatcccgcgtttttatcggacgatccgtccaggatcgccgatctttcacgttttgaaggcaatggccaggcgcctggcgtttatcgggtcgacgtctatctgaatggcgcctttcttgccacccgcgatatgaccttctacgaagcgaaaccctctgccaggacgccagccgcagacgactccgggctaagcgcttgtctgacgcctgatatgctcaaagagatgaaggtgaacgttgaggcctttccggggttgttaaagccctcttctcaagggtgcgtggatattgccgccgccattcctgcggccttcgcgcgctttgatttcacccagcagcgcctgaatatcagtattccccaggcggcgatgaagaacagcgccaggggctctattgcacctgagtactgggatgaagggatcaacgcgctattgcttaattacacgtttaccggtgcgaatagccgcgatcgcagcgagggcggcgttgatgcccgtaccctgtttcttggccttaacagcggcctgaaccttggcgcctggcgcttgcgtaactattccacctggaacgataacagcggcggcgagagcaataaaagcgactggcagcatatcagcacgtatgtagagcgcgatttgcgcgctctgaaaagcgaactgaccgcaggagatagctatacgccttccgcgatcttcgacagtttgccctttcgcggcattcagctggcttccgatgacaacatgctgcctgacagtatgaaaggcttcgcaccgaccatccacggtatcgctaaaagcaatgcccaggtgaccattcggcagaatggctacaccatcgaccagcgctacgtctctcccggcgcatttaccattgacgacctttactccacggccagcagcggtgatttaagcgttgagataaaagagtccgatggcagcatcactcgctatagcgtgccgtattccgctgtgccaattctgcaacgtgaagggcggttgaaatacgcggccacggcggcgagctatcgcggcgacagcagccagaaagaggacgttaagtttggccaggcgacgctgatatggggcctgccgcacggctttaccgtctacggcgggacgcagtttgccgatcattatcgcgcgctggcgttaggtacgggagccaatctgggcgactggggggcgatttccgtcgacctgacccaggcgcgcagcaccctggctgatgatagcgagcatcaggggcaatccacgcgttttctttacgctaaatcgctgaatagtctgggaactaactttcagctgctcggctatcgctactcaacatcgggtttttataccctcgacgagacggcgttgaagcgcatgtctggctataacggtccaaccgacgaaaatgaagaccagcgtagctggagcgattactacaacctctattacaccaaacgcggcaagattcagctgaatatctcgcagcagcttgggcgttttggttcgctttatgtaaccggtagtcagcagagctactggcataccggtgagaagaacacgctgctgcaagtgggctatagcgataccctggcgggcgtgtcatggagcctctcttataaccaaagccgtgccccgggagaggacaagagcgaccagcttattgccctgaatctctcgctgccgctcagccagtggctacatcacagcgatgatgttacccacaagcatcacaatatctacgccacgttcagcaccagtaccgatcggcacggcggcgtcagccaaaatgccggaataagcggtaccgcgctggcgcaaaacaatctcagctatagcgtacagcagggttatcaaaatcatggcgttggtaaaagcggcgccgccagcctcgaatatgatggcgccgaaggcaatgtcaacgtgggctataacaccagcaataacggcgattatcagcagataaattacggtctgagcggcggcatagtggcgcatgcgcacggcttaacgctgagccagccgctgggcgagaccaacgtgctgatcgccgctccgggagcaggcaatgtcaatattgatgacgagccgggcattcataccgatcgccggggctatgcggtggtgccttacgccacgacctatcgccaaaatcgcatggcgctggatgtgaactcgatggcggatgacgtggatatcgacgatgccgtcgtgaacgtcgtgcctacgcagggcgcgctggtactggccagctttaaagcgcgcgtcggcgaacgtgcgctcctgacgctgctgcacaacgggcagccggtaccgttcggcgcgaccgcctcgaccgatgcgtcagcggaggaggcgatcgtcggcgatgacggcgaagtttacctggccggtttgagcccccagggaacgctcaaagtgcagtggggccggggagcttcccggcagtgtctggtgcattatcaacttcccgcaacccggcaggccctggtgcgacaacgcgtggaatgccgctaa

SEQ ID NO: 176982 - DNA, 684 bp, Klebsiella oxytoca
atgcttaaaagaacaattcaatttctatcgctgttactggctatcgctggaataataaaccaggcgcacgcgggcggtatcgctctgggatcaacccgcgttatctatccgcagggaagcaagcaggtctctctgcaggttattaactcctcggagaacaacgttttcctgattcagtcctgggttgccaatgctgatggtagccggagctctgattttattattaccccgccgctgttcgtgattcagccgaaaaaagagaacaccctgcgaattatgtacatcggtccgtctttgcccaccgaccgggaaagcgtgttctatctcaatagcaaagcgatcccctcggtcgataaaaccaggctggcgaataattcattgcaaattgcgacccaaagcgtcattaaactttttattcgtcctgcggatttgcccgttccttccgcaaatgcgcccgcgatgctgcgctgccatagccaaaacggtcgattaatcgttaccaatccgtcgccctactatgtctctctggttgaaatacatgctggaagccgaaaactgccgaatgccatggtcgcgccaaaaagcgagctgacgttgcagagcagcgaaagccgggtaaccttccagaccgtcaatgattttggtgcgaccacgcctgtacaaacctgccagagccaatcttag

SEQ ID NO: 176983 - DNA, 543 bp, Klebsiella oxytoca
atgaaaaagcatctattagccatgatggtgactgctatttctgcaggcggcatgatgacttccgcttttgcggatacggcgaccgtttctggtggcactgttaattttgttggccaggttgttaatgccgcctgttctgtttctgctgactccgttgatcaaacggtcaccttaagccaggttcgtgccagcaaattaacggccgccggcatggttgcgaatcaaaaagaagatttctcgatcaaactggaagattgcgataccacggtaagccaggaagccgcagttatttttaacggtcagcaggacggtacgctggccggctcccttgccaacaccgcaggtgctggtgcggctaccaacgtcgctctgcagctgtatggtccggacggccagccgctcaatattggcgatacttctggcaccgtaacgttaattgatggtgaaaacgtggttccgctgagcgtcgattatatcgccaccggcgctgtagttgccggtaacgtctctgctaccgccacctttagtatggtgtactcctga

SEQ ID NO: 176984 - DNA, 717 bp, Klebsiella oxytoca
atgattatggtttttaatgaaaaaatgaaagttgacattgctgaaaacgataatgagaataccttgcactcatatttattttcccagcaggctaaaccacatgcagcgcttgatgcgctcttctctgcattatggtcttttggtaagccttttaatttaaatcctggtgatgagtttttacttaattctggcggtgagaataaaatagtccttctgcagtccgggattttttcattttgccgctgcggcagtggacttcatgtgagttctacatttgcgccctctattgtcggactcgtcgatagctatggggtaacctacgatgttccgacccgaccggagcactttctggtggccgaaaccgagtgcagcggacgtgcggtttctttgcccgactttattaagaccgtcgatgagtgcgatctgtggcacgatgtcgcacgaatacttgcctatcgtttgatggtgatgagcgtacgggatcgggagctggttggcgtggattcttatctgaaggtgcgcgcattattaatcgaactttgggcttatgccagcgaataccgacaaagcattaacgtccttaactttattcaaagacgaacgggcatatcccgtagccgtacgatgaaacttctctctgaacttaagaaagggggttatattagtatcgatggcggtcgtttattagacatgaagaaattaccgacggcctattaa

SEQ ID NO: 176985 - DNA, 3060 bp, Klebsiella oxytoca
atgacggtctcgattaaaaacagccagatcgatgtgaacagctggtatcaaaaaatcaccttaaccatcaccaatgaaaataacagcgccgtggatatcaatcatgcggccattggttttaccgggtccggacatcaggatccgtggggcaattttggcggtacgcttaaaggggatatgcccctcaccttaagcggtaaaacgcagggagccctcgacgtcaatgaaatcattattaataacagccaaccgctgctgctgcagcccggtgaaagcggcacgttattcttcagctttgccgccactcaggtaccggtcaaaatctcaacttttagcttaaccctggcctcatctgcgcaagatgatagcgctgatgaatctgcggacgaggggcagccggaacctgaagcccccgtcgatgatcaaactgatgatgtcgcgcctgtacctgaagagattatccctgacgatgagggtacggatgagatggctcctgagcctgaagagcagggcgatgatgcggttgtggaaggagagggaatgactgttgtcgcaagcccgctgagcacgaccagctggtatcaacgggtgactctgacgctgaccaacctctatgcccaggctatcgaccttaaccaacttaagctgcagtttaccgccagcgcgcatcccgatccttacagcgcgttcagcggatctttgctcggcaacaagcccgtaacgttgggcagcgacggcggttggccaatcgaaaagaacacgattacgataaataatgatgggcaattctggctaaagggcggcgcaagcgctgagctgcagttctatctttccgctacccaaactccggtcactatgagcggcttaacggcaatcctcgcgcacgacccaggccgtcagggcaagatcaatattcagttcccttcgttaaaacaaaacaccaccctgaagccgacgatcgacctgtactatccggatgcgacttcacgacgctttgcaggcgagtggggagagacgctgaccatcagcgatcttagcgcgggtgagtacacgatcgctgtgctggaactgagtaatgatgatatgcagatcgtacccgttgaatcgacgttcaggctgaagctggctggcggatctgactgccagacctgtcaggtcgcgtatcaggcgccggtacagtttgcttcagtacgtcttatcgtcgatgcccctgagtttgccggcgcggaaatggtggttgagctgtggtcggaatctggggtatgcgaaagaaccctgacgatgcccgtcaaccaaatacagctggtggatcggcttatcgccggtcactgctacgagattggcttacagtcgacggtaatcaataaccagatgattagccatcccgcccgaccgacgatttttacccctgagcagggccaggtgaaagaggtgagcatcggcttccagcagaccggggttgatagtcatgattttgtcgaagttcaggtgacgatactaggtttacctgagggcgtatcgcctcagcgctatcggttctgctgcgggcaatatcaatataccgtgatgctggagagcgatgcccgtctgcaaacgctggcgatgcatctggctcccggacagtatagcgttgagactcccgatgtttacgtcgccggtacaccgtggcgctgtgaacaggatgcgccgctgcggctgctgaaaagcgtcaatcatattacgctcgagtttgtgcagggcgttccactgcaggttaaaggctggccggactatcttgcccacggcggggtgacggtgaatgccgcggataccgtatcgctatatcgcgacgtcccttttagcgccctgtttaaatatgatggttttgacggcggcggcgacccgctaccggcggcggaagtggataaaaacggtgacggcttccttgattatgactcgctgccgattcacaaaaccgttccgctggtgcgtgagattgaaaaagaagcgggacgctccgtgatgccggtcatggtggtttataccgctaacgccagcggcggcagcgcgctctcggatcttcaggacggacagcggttacgtaaccactttggtaacttcatcacccagtgtcttgcggcgcagtcctggaagggcgaccagcacgccgttcccgccacctttgtgctgaatccggatttccttggcgcgatacagcaggagccgtacggctataccgcagtacgtaaagcgaatagcgtacaggttaatgtccagctggcggcggcgattaacgctttgcctgctcttccgggattcagcgcgccgctgttgccgacgttttctaacgatctttatggttatgtccaggcgattaactatattgtgcgccagtttgcgccggacgtggccttcggctggcagaccaacgtctgggcgacgggaacggcagactgggtactcagagcaaatgccgatcctgtggcccaggggacagcgatagccagctttatcaatgagctgggagtgtatagcggtgagtatgcgccagattttatcgcctttgataaatttgaacgcgattgctttagcccggatgcattagcgcactatggctggaacgcgacctgctggtttaattatttagggatggtaaaacaagcggctaaagacctgcataaaccagctatgctatggcaaatcccggggggccatatgccaaccgtagacgaaggcaacagtaaaattgccgccgcgcactacgcgtcgggcggaagcttctttatgggcgatgcgcgtattggcagcgatctcaataccatcgcttcggatctgttaaatacgacggtgaatagcgcgacttatggcgtagcgacagtcggcgactttttacgccaggataatggctacgactgggggcagatgcaggcgttaaatctccctgattataacgttttctcggtactttggggcggaggctcaacggtaagcattacgacaattcactctaacggtgaagatggcggttggctggcagaaaaaatggtggaatattactcagcgccaaaatattttagttaa

SEQ ID NO: 176986 - DNA, 669 bp, Klebsiella oxytoca
atggcctctgaagttatcgatatggaaccgttctatttcgaaggcatcaacgtcgacccggcagatgaacaggatgacgatagcgttcagcctgaaccggcgatcaaccacgcgccgaaggctgccattgaactgcgcgttgtgggcggttctaccgtacagctctctggtgaaggttcctctgatgaagataaagacgagattacctggagctggggcgttccttctgaaatcagcgtggcagacaagaccagtgccgtcatcgagttcgtcgttccggaagtgaccgttaacaccaacttccagttcaccctgttcgttcgtgatgcctggggcgagccttcttcccagcagcgttatgtgctggttgccgttccgtcggcgtctcaggtgcagcctgagccggaagaggacgataccgtggttccggtagagcctgtcgaaccggaagaagactccactcctgcggaagacgacacttccacggatgacgcgacgacgccttacccgctgtgggatgccagcaccgtttatggcggcaactggggtacctttgaaaccgtcagctggaaaggccataactaccaggtgaaatggtggtctcagggcgaccagccggatctgaactgcgctgcgggccaggcatggactgaccttggtgcttactga

SEQ ID NO: 176987 - DNA, 1380 bp, Klebsiella oxytoca
atgcaacaacaaaacaagccacacctgctgcgcgggctgaatgcccgtcacattcgttttatcgcgctcggttccgccatcggcaccgggctgttctacggctcggcatcggcgatcaaggccgcaggcccggcggtactgctggcctatctgattggcggcgcggcggtgtttatcgtgatgcgggcgctgggggaaatggcggtacgcaacccggtttccggctccttcagcagctacgcgcgacagtatcttggcccgctggcggggtttattaccggctggacctacacctttgagatggtgatcgtcgccctcgcggacgtgaccgctttcggcatctacatggggctgtggtatcccgatgttccgcgctggatctgggtgctgagcattatcttttttatcggcgccatgaacctgtgcagcgtgcgcgttttcggcgagatggagttctggctgtcgctaatcaaagtggtggcgattattgccatgattgtggcgggcggcagcattattttcttcggattcggtaacgccttcccggcaaccgggctggataacctatggagtcacggcggctttgcccctaacggctgggaggggatcgtggcttcgctcggaatcgtcatgtttgcctttggcggcgttgagatcatcggcgtcaccgctgcggaagcgaagaatccgcacaaggtgatcccgcaggcgatcaatacgattccgctgcgtatcgtgctgttttatgtctgcaccctggcgattctgatggcgattttcccgtggaacagcttcggcgagcgaggtagtcctttcgtactgatattcgatggcctgggcattccggcagcggccaccattctgaatatcatcgtcatcagcgccagcatttcggcgattaacagcgatatttttggcgcggggcgcatgatgtacggtatggcgaaagaggggctggcgccgaagagcttccagcgcatcgccagcaacggggtgccgtggatgacggtggtggtcatgggcgtggcgctgctggcagcggtggtgctgaattatctgatgccggagcaggtgtttgtgctgattgcctcgctggcggccttcgcgacggtatgggtctggttaatgatcctgctggcccactttgcgatgcgtcgcggtctgtccgctgaggagcgtagcgctatcgcgtttccggtgccgttctggccggttgcgccgctgctgacgctactgtttatgggactggttattgcggtgctggggatggtggaagagacgcggattgcgctgatcgccggtttggtgtggctcggcctgctgacggcggtgtggttcgcgcgggtcagaaaaaacgccgtgctggcggtgacggagtag

SEQ ID NO: 176988 - DNA, 1536 bp, Klebsiella oxytoca
atgaacgctttaacactgattccgggccaactcagcctgtcgcagctgcgcgacgtctacagccagccgctgaacattacgctagacgaaagcgcgttcgcggcgattgatgacagcgttgcctgcgtcaacgcgattctggcggaaggccgcaccgcctacggtatcaacaccggttttggcctgctggcgcaaacccgtatctccaccgaagacctggaaaatctccagcgctcactggtattgtcgcatgcggcggggatcggcgaaccgctggatgacgatctcgcgcgtctgattatggtgctgaaaattaatagcctgtcgcgcggcttttccggcattcgcctgagcgtgattcaggcgctgatcggcctggtcaacgccggggtaacgccgtggatcccggcgaagggatcggtcggcgcgtccggcgatctcgcgccgctggcgcatatgtccttaaccctgcttggcgaggggaaagcgcgggtgcgcggcggggtgtggctaccggcgacggaagcgctgcgtcaggcggggcttgagccgattactctggcggcaaaagaggggctggcgctgctcaacggcacgcaggcatcgacggcgtttgccctgcgcgggctgttcgaagccgaagacctgtttgcttccgcagtggtctgcggggcgttaaccaccgaggcggcgcttggatcgcgtcgtccatttgatccgcgtattcatgaagcgcgcggccagcggggacagattgacgccgcggcgctctatcgccacctattgaccgatgacagcgcaatttcccaatcacaccataattgcaccaaggtgcaggacccgtattctctgcgctgtcagccgcaggtgatgggagcctgcctgacccagcttcgccaggcggcggaagtgctgctggttgaagccaacgcggtctccgataacccgctggtatttgccagcgagaacgacgtgatctccggcggcaacttccacgccgaaccggtggcgatggcggcggataatatcgcgctggcgattgccgaaattggctcgctgtccgagcgccgaatcgccctgatgatggacagccatatgtcgcagctgccgcctttcctggtgaaaaacggcggcgtcaactccggctttatgatcgcccaggtgacggcggcggcgctggccagcgaaaacaaagcgctgtcgcatccgcacagcgtggacagcctgccgacctccgctaaccaggaagaccacgtctcaatggcgccagccgccggtcgccggctgtgggcgatggcggaaaatacccgcggcgtgctggccgtagagtggctggctgccgtgcagggtctggatatgcgtgaaggcctgaccagcagtccgctgctggaagaggcgcgccacctgctgcgcgagcgggtgacccactacaccgaagaccgcttcttcgctccggatatcgaaaacgccattgcgcttctggccgcacgtcatcttacgcggctgctgcctgccgtgctctcagaccaacgctaa

SEQ ID NO: 176989 - DNA, 1689 bp, Klebsiella oxytoca
atgtcgcaaagcaaataccgccagcaggacgtacgtgcaccgcgtggcacgacgttaaatgcgaagagctggctgaccgaagccccgctgcgtatgctcatgaataacctcgacccggatgtcgccgaaaacccgcatgagctggtggtgtacggtggtattggacgcgcggcgcgcaactgggaatgctacgacgccatcgtgaaggcgttgaaaaacctcgagagcgacgaaacattgctggtgcagtccggcaagccggtgggcgtcttcaaaacccatgaaaactcgccgcgggtgctgatcgctaactccaacctggtgccgcactgggcaacctgggaacactttaacgagctggatgccaaagggctggcgatgtacggccagatgaccgccggcagctggatctatatcggcagccagggcatcgtgcagggcacctatgagacctttgttgaggccggtcgccagcactatcagggtagcctgaagggccgctgggtactgaccgctggtctgggcggcatgggaggcgcgcagccgctggccgcaaccttagcgggtgcctgctcgctgaatatcgaatgccagcagagccgcatcgatttccgcctgcgtacccgctacgttgatgaacaggcgacatcgctggatgacgcgctggcgcgcattaaaaaatacaccgccgaaggtcgggcgatctctatcgcgctatgcggcaatgcggcggaaatcgtgccggaaatggtgaagcgcggcgtgcgtccggatatggtgaccgatcagaccagcgcccacgatccgctgcacggttatctgccgaaaggctggacctgggaagagtatcaggctaaagccgagtctgacccgcagggcactatcctggcggcaaaacgctcaatggccgaccacgtgcaggcgatgctggcattccacgaaatgggcgtgccgacgtttgactacggcaataacattcgccagatggctcaggagatgggcgttgacgacgcgtttgctttcccgggcttcgttcccgcctatatccgcccgctgttctgccgcggcatcggtccgttccgctgggttgccctgtccggcgacccgcaggacatctataaaaccgacgcgaaagtgaaagagatcgttaaagacgataagcacctgcaccactggctggatatggcccgcgagcgtatcagctttcagggactaccggcgcgtatctgctgggtaggactggagtggcggcagaagctggggctggcgtttaacgaaatggtgcgcagcggcgaagtctccgcgccgatcgtcatcggccgcgaccatcttgactccggctcggtcgccagcccgaaccgcgaaacggaagcgatgcgcgatggttccgacgccgtttccgactggccgctgctcaacgctttactgaataccgccagcggcgcgacctgggtgtcgctgcatcacggcggtggggtagggatgggcttttcgcagcactccggcatggttatcgtctgcgacggtaccgatgaagcggcggcgcgtatcgcccgcgttctgcacaacgacccggcgaccggcgtcatgcgtcatgccgatgcgggttacgacatcgctattgagtgcgcgacagaacaaggtttgaatcttccgatggtagcagcaacgcaggggcacgctaaatga

SEQ ID NO: 176990 - DNA, 726 bp, Klebsiella oxytoca
atgttctcatcgcaacctcgttccgcgcctgcgccattctatgaaaaggtgaaacaggctattagtgaaaagatccacagcggcgtctggcggccgcacgatcgcatcccctcggaggcggagctggtggcgcagtttggctttagccgcatgaccattaaccgggcgctgcgcgagctgaccgatgaaggcctgctggtgcgattacagggagtgggaacgtttgttgcggagccaaaagggcagtcggcgctgtttgaagtgcgcagcatcgctgaagaaatcgcttctcgccatcatcagcaccgctgcgaggtgctgctgctggaggaaactcaggctgacctgattcaggccgcagcgctgaacgtagctgccggaacgcgcattttccattcgctgatggtgcattttgaaaatgagatcccggtacagattgaggaccgctgcgttaacgccgccgtggtgccggactatctgcatcaggactacaccgtcaccactccccacgactatctgtcgctgatcgcccccttaaccgagggagagcacattgttgaggcagtgcaggctacggcggaggagtgcgcgctgctgcatattcatgcccacgacccgtgtctgctgatccgccgccgtacctggtccaccacccatattgtctcccacgcgcgcctgcttttccccggcagccgctaccgtctccagggccattttggctcctga

SEQ ID NO: 176991 - DNA, 957 bp, Klebsiella oxytoca
atgaagctatggcaaccgacgcccgccgagatttggcagggacgcgacgatagcgcggaggcggccaacgcgctgcgtctgtttcagactatcgcccgcgtcgaacgttttgaaccgcaggcgcagcccggtgacattgctctgctgggattcgcctgcgacgaaggggttcggcgtaataaaggacgaaccggcgctgctaaaggcccggaaatcctgcgccgggcgctggcgaatatggccagccacgacggccacgaccgctgcgtggatatggggagcgtcagcgtagagggcgacgcgctggaagcggcgcagcaggcgctgcgcgaagcggttacggcctgccaacgcgcgggcaagcgtacgctggtgctgggcggcggtcacgagacggctttcggccacggcgccggcgtgctggacgcgtttcccacagatgaggttggcattattaaccttgatgcgcatctggacttacgtattgccgaccgggccagctcgggtacgccgtttcgtcagctggcgctggcctgtgaagcgcagcggcgcgcttttcactacacctgtatcggcgtgagttacgccgctaatacccgggcgctgctggacgaagctgcccgccgcgaggtgacgatcattgacgatttagcggtgctcttcgcctttgaagcgcgggttatcccgcaaatcgagcatcttattgcccgctacgatcgcctgtatctgactatcgatctcgacgtgctgcccgcgtgtgaaatgcccgcagtgtccgcgccggccgcgctcggcgttccgctggcgacgctgctgcgcatcgtcgagccgctgtgccgcagcggtaagctccaggcggttgatctggtcgagtttaacccgcagtacgatattgatagccagggagcccgcgcggcagcgcgtctggcgtggcaaatcgcccattggtggcaatag

SEQ ID NO: 176992 - DNA, 1218 bp, Klebsiella oxytoca
atgacacagactctttccgaacgcgtaatctggcgaaacgtccgccttgctaccctcgaccctcgatacgcccggccgtatggcctgctggaggaccacgtgctgctggtgcgcgatggccgtattgaggccattgtgcccgaaggcgatgcgccagccggccgaagtatcgacctcggcggcaggctgcttacgccggggctgatcgattgccatacgcatctggtttttggcggcagccgggcgcaggagtgggagcagcgcctcaacggcgtttcctaccagaccattagcgcaaacggcggcggcattaacgcgaccgtgcgcgccacccgggaaagcagcgaagcggagctgctggcgctggcccgccagcggctggctcgtctgctgcgcgaaggcgtcaccaccctggagattaaatccggctacgggctggaccttgaaaacgagcgcaaaatgctgcgcgtgatacaacagcttgctgcgacgcatgccgtggatatttcgccaacgctgctttccgcccacgccacgccgccggagtatcaaggcgacccggacggctatatcgatctggtgtgccagactcttctcccggcgctgtgggaagaggggttattcgaaagcgtcgatgccttctgcgaaaacgtcggctttacccccgcgcagactgaacgggtttacagtacggcccaggcattaggtatcccggtaaaaggtcacgttgagcagctctcttcgctgggcggcgccgaattagtgagccgctataaaggcctgtctgccgaccatatcgaatacctgaccccagagggcgcggcggcgatgagccgcagcggcaccgtggcggtgcttctgcccggcgcgttctatttccttaacgaaacccgcaggccgccggttgaactgctgcgcgaacatcaggttccgatggcggtggcgacggactacaaccccggcactagccccttcgccagcctgcatctggcgatgaatatggcttgcgtgaaatttggcctgacgccggaggaggcgtgggcaggcgtaacccgtcatgcggcgcaggcgctgggccgtcaggcgagccatggtcagctggcggcgggcttcgttgccgattttgctatctgggatgcggcgcatccggttgagatggtttatgagccggggcgcagcccgctctggcagcgcgtggtgcgaggagagattgtatga

SEQ ID NO: 176993 - DNA, 1284 bp, Klebsiella oxytoca
atgaacacatattccgtttcccgcctggcgctggcgctggcctttggcgtgacgttgtccgcctgtagttcgacgcctgccgatcaacagccctcaacgcagactgcgccgggcacggcctctcgtcctgttttaaccgccgatgaagcaaaaaactttttaccggcgagctatttccagtctttggatcctaacgctgcggcgtggagcccatccgccatcagcctgccggcgcagccggattttgtcgtgggtcctgcgggcgcccagggcgtaacgcataccaccattcaggccgcggtggatgcggcgattatccgccactccaaccgtcgtcagtttatcgccattatgccgggcgaatatgcgggcaccgtatacgttccggcggcgcctggcgcgctgaccctgtacggcaccggcgagaagccgattgacgtcaaaatcagcacagcgcttgattcagaaatggatccggtctcctggcgtcaccaggtcaatccgggcggtaaatatatgccgggtaaaccggcctggtatatgtacgacagctgccagagccgacgtgccgccaccgttggcgttatgtgttccgcggtattctggtcgcagaacaacggcctgcagctgcagaatctgaccatcgccaacaaccttggcgacagcgttgacgcggggacgcatcaggcggtggcgctgcgtaacgatggcgatcgggtacagattaacaatgttaatatccttggccgccagaatacctttttcgtgaccaacagcggcgtgcaaaatcgcctgcaggataaccgccagacccgtacgctggtcagcaacagctatatagaaggcgatgtagacatcgtttccggtcgcggagcggtcgtgtttgagaataccgacttccgcgtagtcaactcgcgcacccagaaagaggcttacgttttcgcccctgccaccctgaaaagcgtgacctacggcttcctggcgatcaacagccgctttacggcgtccggcgataacgtcgcgcagctgggccgctcgttagacgttgacggcaataccaatggccaggtcgttattcgcgacagcgtcattaacgaaggttttaacattgccaaaccgtgggctgatgcggtcggttccaatcgtccgttcagcggcaataccggaacggcggatgccaaaggcaacccgcagcgtaacctgaacgacgctaacttcaatcgcatgtgggaatacaataaccgcggcgtggggagcttcgtcgtcgctgaaccgaaacagtaa

SEQ ID NO: 176994 - DNA, 213 bp, Klebsiella oxytoca
atgcagataaagaacaccattccagcagaatttatatttaactctgcgttgttgaaaaacatcgaacatatggtgcgaatggagaacgaggccgtgagcaatgaacgtttaatcgttgaagttcagcgccgtctgaatgtcgagaaaaatgaaatactcgctgacttatacacccagacgctgcatatgttacgcgcgaaaaatcatcactaa

SEQ ID NO: 176995 - DNA, 555 bp, Klebsiella oxytoca
atgaataacgacaagcaaggtctcttttttaatcattacgatctttggattaacaataaccttcttcgtcaaggattacagcttgtactagattcattatcaccaggctgttttcatggaaaatacgtctttttcaccagcgataactattatgcggtgctcaatcatcattacgaccgcaaaagagttcgttttgtcctgctcaccgacggcaacgatctgaacttccttagcgaaattccgatgtacagaattcctgcgcgctcaacgcccgctgagataaaatcttttattcttcgcccgacgttgtttggtaaaaaacctgacagtgaagctgaaagtattgtttttaccaaccgcgaaaaagaagtgattcgcctgatgaacgatggcgaagcgatggttaatattgggaagtcactgaatttacatattaaaacaatttaccaaattcgcctgaccttaattaaaaaactaggctgttctggtcgcactgatttttttaatattagccgcagcgaaacatttaaagcctggactcagcaaaatttctga

SEQ ID NO: 176996 - DNA, 732 bp, Klebsiella oxytoca
atggcatattacagcatcggtgaagttgccgaacgttgcggaatcaaccctgttactttgcgtgcatggcagcgtagatacggtctgctaaagccgcagagaagcgagggtggacaccgccagtttgacgaggaggacgttcagcggattgaggaaatcaaacgctggatcgatcgcggcgtctccgttggcaaagttaaggcgcttctggaaggccatcagcctgaaacgcaagacgcagccgtcctgctccaggaagagatgatgacgcttctgcgaggtgtccagccctcaaaattacgcacccgcatcatgtccctcagccatgaatatcccgtagataaacttattgaccggctgtttgtccccgtgcgcagcaagcttaatctcgaccagaatacttccctggctatcatcagtatgctggatggcattttgatagattgcgtggcgtccatccttgcggaatcgcgtaagaaggtgggtaaagagacgctgttagtaggatggggtaatgaagatcgcactcgcctgtggctggaagcatggcgattgtcccagcgcgcctggcacgttaatgtgctggcggaaccgctcgactctcctcgcccggaactgttccctggtcaacacatttttgtctggaccggccgcgcgctgacccctttgcaggcagaattacttagccactggcaaagtcagggctttaccatcgagtttcacggagagtaa

SEQ ID NO: 176997 - DNA, 1224 bp, Klebsiella oxytoca
atgctcactaccatcatttatcgcagccatatctgcgacaacgtgtcaattaaatcgctcgaaagcatggttgctgcagcaaatgtaaaaaatggtcaggaagacgtgtcgggtattttgctttttaacggcacccatttttttcaactattagaaggacctgaagagaaggttgaggaaatttatcgccatatttgcgaagacccgcggcaccataacctcgttgagctcctcagagaccatgggccgacccgtcgctttggcaaaatcggtatggaactctttgatttacgagagtttgaccgcgatgaagttctgcaggccgtactggataaaggaacctcgaaatatcagctcatctatgacgacagagctctccactttttccgtaccttcgtcgaagccacggaaaaggagaactattacgaaattcctgcggccgaaagctgggactttgtgatagaagacgaggcctggtatcctgaaaccccgctcgagcaggccgagtgcagctttgcttttcagccggtgatcgatccgtttgccaaagaggtcgtctcctatgaagcgctgctgcgcaccaactccggtgaatcgccagcggtctattttgacggactttcgcgagaggaaatctactggacggatctgcacagtaagcgcatcgccttcgccatggcgggacgtttgcatcttcgtggacgcaccttgtcgattaatctgttacccatgacgctggtcaatgttcccaacgctgtcgaatttctgttggctgaaattgaagccagtggtttgattcccgagcaaattattgtggaattcaccgagagcgaagcgatttctcgcgttgatgaatttaccgattctgtgcgaaagctaaaatctgcgggaattcgcgtggctatcgatcactttggcgccgggtttgccgggctagtgctgctggcgcagtttcagccggaccgcattaagattaatcgccagctggtcaaagatatccataagcacggcccgaaacaggcaatcgttcaggcgattattaaatgttgtaattccctggaaattgccatttcagcggtgggggttgagcgggcggaagagtggatgtggctggaatcagcggggattacgcatttccagggaaatttatttgccagcccgtgcttcgggggcattccgccggtagcctggccggagaaaaaaatagcctgcgagcttctttaa

SEQ ID NO: 176998 - DNA, 246 bp, Klebsiella oxytoca
atgcagcagaacggttacattcctgacacggctaacgctattgcccattacttcaataaagcttcgttgccttctcagcaggaaacgttgggacagattgttatggatatcctgaatgaaggacggaacctgaatcgcaaatccctgtgtacgaaactgctgagtcgccttgaagtggcttcagaacctgaagaagaaaaccattatcaaacgttgattggtctcttgtttgagcatcaggggtaa

SEQ ID NO: 176999 - DNA, 324 bp, Klebsiella oxytoca
atgatcagagataccgttatgaatcacaatgattatgatccattaaccgatgtattgattggagaggctgtcctctcgctactcaaaagcaaggggcctattagtaaacaagcactgatcggtaaactccaggccatgcaggccggagaacaagataaaaagcggcggaatgcaattgggcgtattatcgatgaaatcagtaatatggtagctcgccgtggaaacaacaaaactgtgggtacttcaggcgctaaacataattgggataagccgaattcattattaggctcccctcagcagccaggtactaataaaatacactga

SEQ ID NO: 177000 - DNA, 267 bp, Klebsiella oxytoca
atgcatcagcaaccggatatttacgcaggcctgaacgataccgcactctctgaatatttccgcaacgcaggagacaggctgatcgatgaatcagcggtgatgtcactggctatcagtagcatcctggagtctgaggggcatctcaacaataaagcgattattctgtggttaattacggcgctggagactaccagcgatgtcgtaaccgccgacgttatccgcaaaacgctggaaatcgtcgtaagctacaccatggatgatatctga

SEQ ID NO: 177001 - DNA, 1485 bp, Klebsiella oxytoca
atgccgctgccgctcatgccaaaacccattgcccctctgttccaggaactgttattaacgcgcggcgtgattaaagaccaggtctatcacgccctgcgccacgcgattctggatggccggttatcggcgggtgcaaaaataccctccagccgggcgctggctgagatgatggcgatctcccgcaactcggtcattgccgggtttgagcgcctgattgatgaaggctatctgctgacgcgcaagggggcaggcacctttgtctgcgaccatattccggatcacgtcattagcgagtacgggtcgccgacggtgccggaaacggcaatagccagcgttgggccgctgaaccctgatgtgtcagccctggtaccctcatggacggaaagcgaagatagcggagagatgggcgcggttttcgccgtcggtattggctgtaccgatcttttccctcatgctttgtgggggcgcttgctggggcgcgtctggcggcaatcgcgccgtgaactcgcatcgcacgcctcctcctggggattcctgccgctgcgtcaggcaatcagcgactatatacaggcgacgcgcggcgtaaattgccacgaagatcgggtgattattgttaacggcattcagcaagcattgacgatcgccgcgcaggctttactggaaaagggcgatgaagtctggctggacgatcccggatataacggcgctcgcggcgcattcgccgccaggggagccgttgttcgggccgttcgggttgacgatgagggcatggatattcaggatggaatagaccattatcccggggctaagctggtctataccgcgccgtcgcatcagtttccgctcagcggcacgctgagtctgccgcggaggcttgctctgctggagtgggcggaagctaaccgcgcctggatattcgaagatgattacaatagcgaatttcgctatgccgcccgctctctgcaggcgttgcaggggctggataaacatcagcgggtcatctatgcgggtacattctctaagatgatgtatccggcatttcgtctgggctttttagttgtccccgagcatttgcgcgaacagtttgccatcaccaaatattatactgacctctgtagcggatatctggaacaggccgttctggcgcgtttcatccgcgaggggcactatgccagccacgttcgtcggatccgtaaagcctgttttgagcgaaaaagcgcgctggaggcggcgattaaattctatttttccgggcgcatgctagtgcatcctacggattccggcgtgcatatagtctgctggctgctggatggcttacgggcacaggaggtggtgcggaaggcgcgccagataggcttaggtgtacaaacttttgcgcgctattgccagcggccaatgtcacgtgagggaatattgcttggctttgcaaaccatccgccagaggttttggcagaggggattcgccgtctggcagcggtcatataa

SEQ ID NO: 177002 - DNA, 477 bp, Klebsiella oxytoca
atgaagagccagaaaaccgacgttaacctcgcggaaattaccctccaacccgcagctgaaactgactttgccgcgtggctgccgctgtggaaaagctaccagacgttttaccgcgtcgacatcccggacaccgtcacgcaactcacctggaagcgttttttccattctgtcgaacccatgtattgcgcggtggcaaaacgcgaaggcaggattgtgggattcgttcactatctcttccaccgctctacctgggccgaaagcgactactgctatctggaagatttgttcgttgatccggccgttcggggccagcatatcggcaaacggttgattgagtatgtacagctacaggcgcggaagcgtcactcagccagcctgtactggcacacgcatgaaaccaatctgcggggtcagcgcttgtacaactgggtcgcagagaaaagcggcatgattgagtatcgtatgcgggtgaaatag

SEQ ID NO: 177003 - DNA, 996 bp, Klebsiella oxytoca
atgaaacaaaccgtttataccgccagcccggaaagccagcagattcacgtctgggatctggatcctgaggggaaactgaccctggtgcaggttgttgatgccccggggcaggtgcagccgatggtggtgagcccgaacaaagagtatctctacgtcggcgtgcgtccggagtttcgcgtactggcctaccgcattgcgcccgataatggcgccctgaccttcgctggcgaagccgcgctgcccggtagcccaacgcacatctctaccgatcatcaaggccgctttgtgttcagcgcatcctataacgcgggctgcgtaagcgttacgccgctggtggacggcctgccgcgggaagcggtggcggtggtggaagggctggaaggctgccactcggcaaatatttccccggacaatcgcaccctgtgggttccggcgctgaaacaggatcgtatctgcctgtttaccctgagcgacgacggtttcctggctgcccaggaaccggctgaggtgaccaccgttgaaggcgctggcccgcgtcatatggtcttccatccgaaccagcaatacggctactgcgttaacgaactgaacagctccgttgacgtctgggagctgaaggatccacacggcaaaatcgagtgcgtgcagacgctggacatgatgccgcctgatttcaccggcgttcgctgggcggcggatattcacctgacgtccgatggtcgtcacctctacgcctgcgatcgcaccgccagcgttattaccatctttagcgtttcggaagacggcagcgtgctgtccatcgagggctatcaaaataccgaaacccagccgcgcggctttaatctcgatcatagcagcaaattcctcatcgctgccggtcagaaatcgcatcatattgcggtgtatgaaatcgaaggcaagcaggggctgctgcaggaaaaagggcgctatgccgtaggccagggcccgatgtgggtggtggtcaacgctcgttaa

SEQ ID NO: 177004 - DNA, 819 bp, Klebsiella oxytoca
atgacctcacgcgtgattgccctggatttagacggcacgctcttaaccggcaaaaagaccatcctccccgcctcgctcgacgcgctggctcgcgccaaagatgctggataccagatcattgtcgtcaccggacgacatcacgtcgctatccatcctttttatcaggcactggctctcgatacacctgcaatttgctgcaatggtacttatttgtatgattatcatgcaaaaaaggtgcttgagtccgatccgatgccggtcgataaagccctgagcctgacggaactgctgaaccagcatgatattcacggcctgatgtacgttgatgacgccatgctctacgagcggccgaccgggcatgtcatccgcactgccaactgggcccagtctctgcccgtcgagcagcgcccggtatttaatcaggtcgactctctggcgcaggcggcgcgcgaagttaacgccgtgtggaaattcgccctgaccgatgaagataccgccaaactgcagcgctttgccctgcacgttggccagacgctgggcctggagtgcgaatggtcgtggcacgatcaggtggatattgcccgggaaggcaacagtaaaggtaaacgcctggcgcagtgggtggcgtcccggggactgtcaatgcaggatgttatcgctttcggcgacaactataacgacctcagcatgctggaggccgccggcaccggcgtagcgatgggcaacgcggtagaggaagtgaaagcgcgcgccaacgtggtgatcggtgaaaacgaaaccaccagcatcgccgactacatctatcgccacctgctgtaa

SEQ ID NO: 177005 - DNA, 1059 bp, Klebsiella oxytoca
atgcttgaactcgattttacccagacgctgggaacccactgtctgcaaatccgcgagacgctccctgccagcggcattacagcggtattcggcgtctctggcgcgggaaaaacctcgctgatcaacgctattagcggcctgacccgcccgcagcaggggcgcattgtccttaacggcagagtgctaaacgatgttgaaaaacgtatctgcctggcgccggaaaaacgccgcattggctatgtttttcaggacgcgcgcctgtttccgcactataaagtgcggggtaatctgcaatatggcatggcaaaaaatatggccggacagttcgataagctggtcgatctgctcggcattgcgccactgcttgatcggctaccgggaggactctccggcggagaaaaacagcgggtcgcgattggccgggcgctgcttaccgcgccggagctgctgctgttagatgaaccgctggcatcgttggatattccgcgcaagcgcgagctgttgccctatctgcagcggctggcgcgcgaaattaacatcccgatgctgtacgtcagccactctcttgatgagatccagcacctggcggataacgtgctggtgctggaggcggggaaggtgaaagcctttggctgcctggaagaggtgtggagtagtagcgtgatgcacccctggctgcccgaggatcagcaaagtaccattctgagcgcgattgttgccgcccagcatccgcagtatacgatgaccgccctggcgatcggcgaccagcagatatgggtcaaccggcttgacagggcgctgggcgaaaccgcgcgcatccgcattcaggcctcagacgtgtctctggtactgcagcccgctcagcaaaccagtattcgcaatattttgcccgcggaggttatgcagtgtattgaaagccatgggcaggttgaggttaggctcgaaataagcggccgcacgctgtgggcgcgcatcagcccctgggctcgcgatgatctgggcgttgccccgggccagcggctgtatgcgcagataaaaagcgtgtcgatagccgcctga

SEQ ID NO: 177006 - DNA, 690 bp, Klebsiella oxytoca
atgttcttaagcgatcctgaatggcaggcggtactgctgagcctgaaagtctcctccctggcggtggtactgagcttgccttttggcatctttttctcctggctgctggtgcgacgagattttcccggtaaagcgctgctcgatagcgttatccacctgccgctggtgctgccgccggtggtggtgggctatctgttgctgattgcgatggggcgccgcggttttatcggcagctggctatatgactggtttgggctgagctttgcgtttagctggcgcggcgcggtgctggcggcggcggtcatgtcctttccgttgatggtgcgggccattcgcctcgcgctggaaggggtggacatcaagctcgagcatgcggcgcgtaccctcggcgctggccgctggcgggtgtttttcactattacgttaccgttgacgctacccggcattatcgttggcaccgtgctggcttttgcccgttcgctgggcgagtttggcgccactatcacttttgtttccaatattcccggtgaaacgcgtaccatcccttcggcaatgtataccctgattcagactcccggcggcgagggcgcagccgcgcgtttatgcttgatttcgattgtgctggcgctggtatcgctgctgatttccgaatggctggcccgcctcagccgtcagcggatggggaaataa

SEQ ID NO: 177007 - DNA, 774 bp, Klebsiella oxytoca
atggcaggtcaatggttacgcttttttgccggaacaacgttaacgctctgcgttgccggtcacgcgctggcggatgagggcaaagtgacggtttttgccgcagcatcgctcactaacgccatgcaggatatcgctaaagagtatgagaaagagaagaacgttgaggttgtctcttcatttgcttcttcatccacgctggcgcgccagattgaagcgggcgcgccggcggatctgtttatctccgccgatcaaaaatggatggattacgcggccgggaaaaagagcattgattctgcttctcggacgacccttctcggtaacagcctggttgtcgtggcgccaaaagccagcgcgcagggcgagataaacatcaatgataaaaccgactggaccagcctgctgaaaggcagccgcctggccgtaggtgacccggaacacgtgcctgctggcatctatgcgaaagaggcgctgcaaaagctgggagcctgggaaaccctgtcgccgaagctggcgccggcagaggacgtgcgcggcgcgctggccctggttgaacgcagcgaagcgccgctggggatcgtctacggctccgatgcggtcgccagcaaaggcgtaaaagtcgtcggaaccttcccggaagattcccataagaaggtggaatatccgctggctatcgtcgacgggcataacagtgcgacggtcagcgcgttttatgactatttaaaagggccggaagcttccgccatctttaaacgttacggattcactacccactaa

SEQ ID NO: 177008 - DNA, 213 bp, Klebsiella oxytoca
atggggcgtgtttttccggcggaattcgttacaataaagtattcgtactttctggagccaaccatgttagagctattgaaaagtctggtttttgccgtagtcatggtccctgtggtgatggctgtcatcctgggtttgatttacgggctgggcgaagtgtttaacctcttctccggagccggccataaagacagcaggccgcaaaaccactga

SEQ ID NO: 177009 - DNA, 789 bp, Klebsiella oxytoca
atgcaggccgaaattctccttacccttaaattacagcagcgcctgttcgccgatccccgtcgtatcgccctgctgaagcaaattgacctgaccggctccattagccagggggccaaaaatgccggcatcagctataaaagcgcatgggatgccattaatgaaatgaatcagctcagcgagcagaccctggttgaccgggcgaccggcggcaaaggcggcggcggcgcggtcctcacccgttacgggcagcggctgattcagctctacgacctgctggcgcagattcagcagaaagcgttcgatgtcctgagcgatgatgacgcccttcccctcgacagcctgctggccgccatttcgcgattctctctgcagaccagcgcgcgcaaccagtggttcggcacgattaccggccgcgaccatcagcaggttcagcagcacgtagaggtcctgctggccgacgggcaaacccgtctcaaagtcgcgattaccgcccagagcgccgatcgtcttggcctggatgaaggccaggaagtattagtgctgctgaaggcgccgtgggttggcatcaccctggatgccgcgcaggcggtacaggctgataatcagctgtccggccgaatcagccgcatcgaacgcgggccggagcagtgcgaagtactgatggcgctcccggatggtcaaagcctttgcgccaccctgccggtggaacagacgcgcgatctggccgaaggcgcggaagcgatagcatatttcaatgccgatcgcatcattctcgccacgttatgctaa

SEQ ID NO: 177010 - DNA, 1476 bp, Klebsiella oxytoca
atgtcatcattgcaaatttcgcaaggcacgtttcgcctgagcgacaccaaaacgttaaatattgaacaactctgcgtgcaggctggcgagagctgggctttcgtcggcagcaacggcagcgggaagtcggcccttgcgcgggcgctatccggagagctgacactgctcagcggacagcgcgagaatacgttcccacgcgttacccgcctctcttttgaacagctgcagaagctggtcagcgatgagtggcagcgcaacaacacggacttgctcagacccggagaagaagataccggacgcacgacagcggaaattatccaggatgagattaaagacccctcccgctgcgcccgccttgctgaacagttcgctatcagccacctgcttgagcgccgctttaaatatctctctaccggagaaacgcgtaagaccctgctgtgccaggcgctgatgggcgaccccgacctgcttatccttgatgagccgttcgacggtcttgatgtcgcctcacgccagcagcttgcggcgctgctggccacgctcaacggcgaagggatcgccctggtgctggttcttaatcgtttcgatgaaatcccggagttcgttcagtttgccggcgtgctggcggagtgtgttctgagcgaaaccggcgaaaagcaggccctgctgcagcaggcgctcattgcccagctggcccacagcgaaaggcttgatggcatgacgctgccggagcccgatgccccggccgcgcgtcttgggctggacgacgatgcgccgctcatcgtgctcaacgacggcagggtttcctacaatgaccgccccatcattaatcatctgaactggacggtaaatcccggcgaacactggcagatagttggccccaacggcgccggtaaatcgacgctactcagcctggtcaccggcgaccatccccagggctatagtaacgacctgaccctgtttggccgccgccgcggcagcggggaaacgatctgggatattaagaagcatatcggttacgtcagcagcagcctgcaccttgaataccgcgtcagcaccaacgtacgtaacgtgattctctcgggctatttcgactcgattggcatctatcaggccgtttccgacaaacagcataagctggtgcagaactggctggatattctggggattgataaacgcaccgccgatgcgccgttccatagcctctcctgggggcagcagcggctggcgctgatcgtccgcgcgctggtcaagcaccctaccctgctgatcctcgatgaaccgctgcaggggctggatccgctcaaccgccagctggtgcgccgctttgttgatgtgctcattagcgaaggggcgacgcagctgctgtttgtctcccaccatgcagaagacgctcccgactgcatcacccatcgcctggcatttgtgagcagtggagacggttacacctaccgggtcggcccgctggaaaaataa

SEQ ID NO: 177011 - DNA, 1017 bp, Klebsiella oxytoca
atgaaagtactggttacaggtggtagcggttacattggaagtcacacctgcgttcaactgctactgcagggacacgacgtgattattctcgacaatctctgcaacagtaagcgcagcgtattgccaatcattgaacgtctcggcggcaaaagcgccacctttgttgaaggcgatattcgtaatgaagcgctgatgacggaaattcttcacgatcacgccattgaagcggtgatccattttgccggcctgaaagccgtcggggaatccgtcgccaaaccgcttgaatattacgacaacaacgtaaccggaacgctaaaactcgtttccgctatgcgcgctgcgggcgtgaaaaactttattttcagctcctccgccaccgtctacggcgaccagcccaaaattccttatgtcgagagcttcccgaccggtactccgcagagcccgtacggcaaaagcaagctgatggttgagcagatcctgactgacctgcaaaaagcgcagccggactggagcatcgcactgctgcgctacttcaatccggttggcgcccatccatcgggcgatatgggcgaagacccgcagggcattccgaacaacctgatgccgtatatcgcgcaggtcgcggtcgggcgccgtgaatcgctggcggtatttggcaacgactacccaaccgaagacggcaccggcgtacgtgactacattcacgtcatggaccttgccgacggccacgtcgcggcgatggaaaaactggccgacaaagccggcgtgcatatctataaccttggcgcaggcgtcggcagtagcgtactcgacgtggtcaatgcctttagcaaagcctgcggcaaaccgattaactaccacttcgcgccgcgccgcgaaggcgacctcccggcctactgggcggacgctgaaaaggccgaccgcgagctgaactggcgcgtgacgcgcaaccttgacgaaatggcgcaggacacctggcactggcagtcccgtcatccgcagggttatccagactaa

SEQ ID NO: 177012 - DNA, 1047 bp, Klebsiella oxytoca
atgagcgtatttaaccccgtcgaccatccacatcgtcgttataacccgttaaccgggcagtggattctggtttctccgcatcgcgccaagcgcccctggcagggggcgcaggaaacgccggcaaagcagaccttgcccgcgcacgatccggactgtttcctgtgcccgggcaatacccgcgtcaccggcgacaaaaacccgaactacaccggcacgtttgtttttaccaatgactttgcggctttgatgaccgatacccctgatgccccggaaagcgacgatccgctgatgcgctgtcagagcgcccgcggcaccagccgggtcatctgcttctcgccagatcacagcaaaacgctgccggaactgagcgttgaggcgctggaaggcgtggttaaaacgtggcaggagcagaccgccgaccttggaaagagctacccctgggtgcaggtctttgaaaataaaggggcggcgatgggctgctccaacccgcacccccatgggcaggtgtgggccaacagctttctgcctaatgaagcggaacgcgaagatcgtctgcaaaaagcgtacttcaccgagcacggcgcgccgatgctggtggattacgtgcagcgcgaattagccgacggtagtcgtactatcgttgacactgaccactggctcgccgtggttccttattgggccgcgtggccttttgaaacgctgctgctgccaaaagcgcacgtccagcgcctgactgatttaaccgacgaccagcgcagcgatctcgcgctggcgctgaaaaagctgaccagtcgttacgacaacctgttccagtgctcattcccctactccatgggctggcacggcgcgccgtttaacgatgaagagaataatcactggcagctgcacgcccatttttacccgccgctgctgcgttccgccacggtgcgtaaatttatggtcggctatgaaatgctggctgaaacccagcgtgacctgacggccgagcaggccgccgagcgtctgcgcgctgtgagcgacgtccattttcgcgaatccggagtataa

SEQ ID NO: 177013 - DNA, 1149 bp, Klebsiella oxytoca
atgagcctgaaagagaaaacccaagccctgtttgctgagaaatttggctacccggccagccatgttatccaggccccaggccgcgttaacctgatcggcgagcataccgactataacgatgggttcgtgctgccctgcgccattgattaccagacggttatcgcctgtgcgccgcgcgacgatcgtaccgtgcgggtgattgccgccgattacgacaatcagaccgatgaattctctctcgactcgccgattaccagccacgacacccagcagtggtcaaactatgtccgcggcgtggtgaagcatctccagcagcggaataacgccttcggcggcgcggacctgacgatcagcggtaacgtgccgcaaggcgccgggttaagctcctcggcttcgctggaggtcgccgtcggcacggtgttccagcagctgtaccacctgccgctcgatggcgcgcaaattgccctgaacggccaggaagcggaaaatcagttcgtcggctgcaactgcggcattatggaccagctgatctccgcgcttggtaaaaaagatcacgctctgctgatcgactgccgctccttagggacgaaagcggtgtcgatgccgaaaggcgtcgcggtagtgattatcaacagtaactttaagcgcaccctggtgggcagcgaatacaacacccgtcgcgagcagtgcgaaaccggcgcgcgcttcttccagcgtccggctctgcgcgacgtcacgctgcaagagtttaacgccgtggctcacgagcttgatccggtagtcgccaaacgcgttcgccacgtgctgactgaaaacgcccgcaccgtagaagccgcatcggcgctggaaaaaggcgacctgcagcggatgggcgaactgatggcggaatctcacgcctccatgcgcgatgattttgaaatcaccgtaccgcagattgataccctggtagagatcgtcaaagcgaccatcggcaacaaaggcggcgttcgcatgaccggcggcggcttcggcggctgtatcgtcgcgctggtgccggaggagctggttgataccgtgcagcaggccgttgccagagagtatgaagcgaaaacgggcattaaagagaccttctacgtctgcaaaccgtcgcagggagccgggcaatgctaa

SEQ ID NO: 177014 - DNA, 1044 bp, Klebsiella oxytoca
atgctaaagcaaacaacggagctggcgccggacggccagccatggaatcttcttaccctgcgtaacgacgcaggcatgacggccaccgtgatggactggggcgcgacgctgctctccgcgcgcgtgcccctggcggacggtagcgaacgagaagcgctgctcggctgcgcaacccccggcgactatacgcgccaggccgcttaccttggcgcttccgtaggccgttacgctaaccgtattgccaacagccgctttaccctggatggccagctcatcaatctgacgccctccaacgaggctggccatcagctccacggcggaccggaaggttttgataagcgccgctggcaaattgttagcgctgacgctcgccacgcgctgttttctctctcctcccgcgatggcgatcagggctatcctggtaatctgacggcaaccgcgcactaccgcctgaccgacgataaccggatcgctattgagtatcgcgccaccgtggaccagccgtgcccggtgaatctgacaaaccacgtctatttcaacctcgatggcgtgcagagcgacgtgcgcaaccataagctgcaaatttttgccgatgtttatctgcccgtcgaaagcgacggtattccggggggagatctgcaaaacgtcaccctgaccagcttcgatttccgcacgccgaaaaccctggcggacgacttcctgcgcgacgaagatcagcaaaaagtaaaaggttatgaccatgccttcctgctacaggcgctggggaatgccgatactccggccgctcacgtctggtcgcaggacgaaaagctacagatgacggtttatacttccgcccccgcgttgcagttttactccggcaactatcttggcggcacgccgtcgcgcacagcgcaggcgtacgatgactggcagggcctggctctggagagcgagttccttccagattctccgaatcatccggaatggccgcagccggattgtgtactgcgccccggcgaagagtacgtcagcctgacggaatatcagtttatcgctcgatag

SEQ ID NO: 177015 - DNA, 753 bp, Klebsiella oxytoca
atggctgtaactaagctggtactcgttcgtcacggcgaaagccaatggaataacgaaaaccgtttcaccggttggtatgacgttgacctgtctgaaaaaggcgttggtgaagcaaaagcggccggtaagctgctgaaagaagaaggcttcagcttcgactttgcttatacctctgtgctgaaacgtgccatccacaccctgtggaacgtgctggacgaactggatcaggcctggctgccggttgagaaatcctggaaactgaacgaacgccactacggtgcgctgcagggcctgaacaaagcggaaaccgctgaaaaatacggtgacgaacaggttaaacagtggcgtcgcggctttgcggtaacgccgccggagctgaccaaagacgatgagcgctatccgggccacgatccgcgctacgccaaactgaccgatgcagaactgccgacgaccgagagtctggcgctgaccatcgaccgcgtcgtgccatactggaacgaaacgattctgccgcgtctgaaaagcggtgagcgcgtgattatcgccgctcacggcaactccctgcgtgcgctggtgaaatacctcgacaatatgggcgaagcagagatccttgaactgaacatcccgactggcgtaccgctggtgtatgagtttgacgaaaacttcaagccgatcaaacactactatctgggtaacgccgacgagatcgccgcgaaagcggctgccgttgccaaccagggcaaagcgaagtaa

SEQ ID NO: 177016 - DNA, 1053 bp, Klebsiella oxytoca
atgaattatcagaacgacgatttacgtattaaagagatcaacgaattattacctcccgttgcgctcctggaaaaattccccgctaccgaaaatgctgccaataccgttgcgcatgctcgtaaagcgatccatcagatcctgaaagggaatgacgatcgcctgctggtggtcattgggccctgctccattcacgatccggcggcggcaaaagagtatgctgaacgtctgcttaagcttcgtgaagagctaaaaggcgagctggaaatcgtgatgcgcgtttattttgagaaaccgcgtaccaccgtcggctggaaagggctgatcaacgatccgcatatggataacagcttccgcatcaacgatggcctgcgtatcgcgcgcaagctgctgcttgatatcaacgacagcgggctgcccgcggcgggggaattcctcgatatgatcacgccgcagtatcttgccgatctgatgagctggggcgcgattggcgcgcggaccacggagtcgcaggtgcatcgtgagctctcttccggtctgtcctgcccggtcggatttaaaaacggcaccgacggaaccatcaaagtggctatcgacgccattaacgccgctggcgcgccgcactgtttcctgtcggtgaccaaatgggggcattcggcaattgtgaacaccagcggtaatagcgattgccatattatcctgcgcggcggaaaagagccgaactacagcgcgcagcacgttgccgaagtgaaggtcggtctggcgaaagcaggtctgcccgttcaaattatgattgatttcagccacgccaactccagcaaacagtttaaaaagcagatggatgtcggcgctgacgtatgtcagcaggttgccggcggcgagcggtcgattatgggcgtgatgattgaaagccacctggtggaaggcaatcagagtcttgaaagcggcgagccgctgacctacggtaaaagtattaccgatgcctgcatcggctgggaagataccgatacacttcttcgccagctggccgaggcggtaaaagcgcgtcgcggttaa

SEQ ID NO: 177017 - DNA, 372 bp, Klebsiella oxytoca
atgaaaatgaataagctaaccagtcttctcctcgcagcaacccttggtctggccagcggcgcggccctggccgccgataccggggcgcagtcgaataatgggcaagcgaatgcagcggccgacgcgggccaggtcgcccccgatgcgcatgaaaacgtggcgccaaacaacgtcgacaacggtaaaatcaactccggttccaccgataccaacggcaccatgctccaccctgacggctcgaccatgaaccatgacggcatgacgagcgacgaagtgcacaaaaactcaatgtgcaaagatggccgctgtccggatactgataaaaaagtcggtcaggacgaagcgacgaaaaccgacggtaccacccagtaa

SEQ ID NO: 177018 - DNA, 945 bp, Klebsiella oxytoca
atggggcaatcacactcgcataattctgcgcaacccaccgaagataaaaatgcccgtcggctactgctggcgttctgcgttactgccgggttcatggtggttgaggtcgcaggcggactcatttcaggttcactggcgctgctggccgatgccgggcatatgttgacggacgcggcagcgctgctgttcgcctttctggcagtgcgtttcgccagtcgaccgccgaatgcgcaacatacctttggctggctgcggctgaccacgctggcggcttttctcaatgccattgctttagtggtcattacgatcctcatcgtctgggaggccattcagcgctttcatcatccgcagccggtggccggtaaaacgatgatggttattgcggttgccggcctgctggctaatattctggccttttggatcctgcatcgcggcagtgaagaacgtaatctcaatgtgcgggccgccgctctgcatgtgctgggggatttactcggctcggtcggcgcgattattgccgctgtcgtgatccttacgaccggctggacgcctatcgaccccatcctgtccgtgctggtatcgtgcctggttttgcgcagcgcctggcgtttgctgcaggagagcgtcaacgaactgctggagggggcgccgcgctcgcttgatgttgaggcactaaaacgcgatctgcgtcgctcaataccggaggtgcgcgatgtacatcacgtgcacgcctggctggtcggcgaaaaaacggtgatgacgctgcacgtgcaggtggtgccgccgcacgatcacgatggcctgctggaacggatccaacatttcttacagcataagtacgaaattggacacgtaacggtgcagatggagtatcagccctgcagcggcccggagtgccgtctcaacatgacgcacgccgggcatggccatcaccatcaccactag

SEQ ID NO: 177019 - DNA, 720 bp, Klebsiella oxytoca
atggatttttttagtacgcagaatattttagttcacatacccattggcgccgggggctatgatctgtcgtggattgaagccgtcggtactatcgcaggcctgctgtgtatctggctggcgagcctggagaagatcgtcaactatgcctttgggttaatcaacgtcacgctgtttgccattatcttttttcagatccagctgtacgccagccttctgctccaggtcttcttctttgttgccaacgtctacggctggtatgcctggtcacgacagaccagcgataaccaggctgagctgcaaatccgctggctaccgctgccgaaagcgttaggctggctggcggcctgcgtggtggcgattggcctgatgacgctatttatcgatccggtttttgcgtatctgaccaggattgccgttgcgctgatgcacgccctgggcctgcaggtcgttatgccggcgctgcagccagacgcattcccgttctgggactcctgcatgatggtactctcgattgcggcgatgattctgatgacccgaaaatacgttgaaaactggctgctgtgggtgatcatcaacgttattagcgtcgttattttcgccctccagggggtttatgcgatgtcgctcgaatatttgattctgacattcatcgccctcaacggcagccggatgtggattaatagcgcgcgtgagcgaggctctcgcgcgttttcccgctag

SEQ ID NO: 177020 - DNA, 1044 bp, Klebsiella oxytoca
atgagcgtaatgtttgatccggaagcggcaatttatccctttccccccaagcccatgccgttaaaccgcgatgagaagcacttctatcgtgaaaaaattaaacgcctgctgcgtgaacgcgatgcggcaatggtggcccattactacaccgaccccgaaattcaacaactggctgaagagaccggtggctgcatctccgactctctggaaatggcgcgcttcggcgcccgacattccgcctctacgctgctggtcgccggcgtacggtttatgggagaaacggcaaaaatcctcagcccggaaaaaaccatcctgatgcccacgctgcaggcggagtgttcattggatcttggctgcccgatcgaggcgttcagcgctttttgtgacgctcacccggaccgtaccgttgtggtctatgccaatacctctgcggcggttaaggctcgcgccgactgggttgtgacctccagtatcgcagtggaactcattgagcatctggatagcatgggggaaaaaatcctctgggcgccggaccgccatctgggcagctacgtgcaaaaacagaccggcgccgacgtgctgtgctggcatggggcctgtattgttcatgatgaattcaaaactcaagcgctggcaagaatgaaagcgctatatccgcaggctgcggttctggttcacccggaatcaccgcaggcgatcgtcgatatggccgatgcggtaggttcaaccagccagttactcagtgcggcaaaaacgctcccgcaccagcagctgattgtcgccaccgaccgggggattttttacaaaatgcagcaggcggtgccggaaaaagagctgctggaagcccctacggcaggcgaaggagcgacctgccgcagctgcgcgcactgtccgtggatggcgatgaatggcctgcaggctattgctgaagcgctggagaacgggggcgctgaacatgaaattcatgttgatgaacagctgcgtaccggggcgctggttccgctaaacagaatgctcgattttgcggctacacttcggggatag

SEQ ID NO: 177021 - DNA, 1590 bp, Klebsiella oxytoca
atgcaacaacgtcgtccagtccgccgcgccctgctcagtgtttctgacaaggccggtatcgtcgaattcgcgcaggcgctttccgctcgtggtgtcgagctactgtctacgggtggtaccgcacgcctgctggctgagaaaggtctgccggttaccgaagtctctgactacaccggtttcccggaaatgatggacggacgcgtgaagactctgcatccgaaagttcacggcggcattctcggccgccgcggccaggatgacggcattatggaacaacacggtatcgcgcctattgatatggtggttgttaacctgtatccgtttgctcaaaccgttgcccgcgagggttgctcgctggaagatgcggtagaaaacattgatatcggcggcccaaccatggttcgctcggcggcgaagaaccataaagacgtcgccatcgtggtgaagagcagcgactacgatgccattattaaagagatggatgcgaacgaaggctccctgaccctcgacacccgcttcgacctcgccattaaagcattcgaacacaccgccgcctacgacagcatgattgccaactacttcggcagcatggttccggcctatcacggcgagagcaaagaagccgctggccgcttcccgcgcaccctgaacctgaacttcattaagaagcaggatatgcgttacggtgaaaacagccaccagcaggctgccttctatatagaagaagaaatcaaagaagcctctgtcgccacggcacagcaggttcagggtaaagccctctcctataacaacattgccgacaccgatgccgcgctggaatgcgtcaaagaattcagcgagccggcctgcgttattgtgaagcatgccaacccatgtggcgtagcggtaagcacctctattctggatgcctacgaccgcgcatacaaaactgacccgacctctgccttcggcggcattatcgcgtttaaccgcgaactggatgccgaaaccgcgcaggccatcatctcccgccagttcgttgaagtgatcatcgcaccgtctgcgacggaagaggccctgaagatcactgctgcgaaacagaacgtccgcgttctgacctgcggtcagtggacgcagcgcgtgccgggtctggacttcaaacgcgttaatggcggcctgctggttcaggaccgcgatctgggtatggtcacagaaggcgaactgcgcgtggtttccaaacgccagccgaccgagcaggagctgcgcgatgtgctgttctgctggatcgttgcgaaattcgttaaatctaacgccattgtttatgccaaagagaacatgaccatcggaataggcgcaggtcagatgagccgcgtttactctgccaaaatcgccgggattaaagcaggcgatgagggactggaggtgaaaggttcggcaatggcctccgacgccttcttcccgttccgcgacggtattgatgccgccgctgccgttggcgtgagctgcgtcattcagcccggcggttctattcgcgacgaagaggtgattgccgccgccgatgagcacggcatcgcgatgatcttcaccgacatgcgccacttccgccattaa

SEQ ID NO: 177022 - DNA, 1293 bp, Klebsiella oxytoca
atgaaagtattagttattggcaacggcggccgcgagcacgccctggcctggaaagcggcgcagtcgccaaaagtcgataccgtttttgtcgccccgggtaacgcgggcaccgccctggaaccagcgctgcagaatgtggctatcggcgtcaccgatattccggcgctgctgagctttgctcaaaacgagaaaattgatctgaccatcgttggcccggaagcgccactggtgattggcgttgtggatgcgttccgcgccgcggggctgaaaatcttcggcccaacggaaggcgcggcgcagctggaaggctctaaagccttcaccaaagattttcttgcccgccataacattccgacagcggaataccagaacttcaccgaagtcgagcccgcgctggcatacctgcgtgagaaaggcgcgcccatcgttatcaaggccgacggcctggccgccggcaagggcgtgattgtcgccatgacgctggaagaagcggaagccgccgttcaagacatgctggcaggtaacgcctttggcgacgccgggcaccgcatcgtcattgaagagttcctcgacggcgaagaggcgagctttatcgtgatggtcgacggcgagcacgtcctgccgatggccaccagccaggatcataaacgcgtgggcaatggcgataccggcccgaacacgggcggtatgggcgcttactctccggcaccggtggtcaccgatgaggttcaccagcgcaccatggaacgcattatctggccaaccgtaaaaggtatggcagcggagggtaatacctacaccggtttcctctatgcgggcctgatgatcgacaaacagggcaacccgaaagtaatcgagttcaactgccgctttggcgatccggaaacccagccgatcatgctacgcatgaaatcggatctggtggatctgtgcctcgccgcctgcgacggtaagctgaatgagaaaacctccgagtgggacgagcgcgcctcgctgggcgtcgtgatcgccgccggtggttatccgggcaactacagcaccagcgatgagatccacggcctgccgctggaagaaacggcagacggcaaggtcttccacgccggcaccagactcgctgatgacgatcgcgtgctgaccagcggcggccgggtactctgcgccaccgcgctgggtcgcaccgttgctgaagcgcaaaagcgcgcttacgccctgatgagcgatatcagctgggacggcagctttagccgtaacgacatcggctggcgcgctatcgaacgtgagcaaaaccgctaa

SEQ ID NO: 177023 - DNA, 1332 bp, Klebsiella oxytoca
atgagtggcgagcaggtcgatattctggtggtggacgatgacatcagccactgcactatcttacaggcgttgttgcggggctggggttatcgggttgcgctggcttacaacggcgtacaggcgctggaacaggtgcgcgagcaggtgtttgatctggtgctatgcgacatccgcatggcggagatggatggcatcgaaacgctgaaagagatcaaaaccttgaatccgtcgattcccgttctgattatgacagcgtactccagcgtcgacaccgctgtggaagcgttgaaatccggtgcgctggactacctgattaagccgctggactttgacaagctgcagctgacgctatccgaggcgttggctcacacccggcagagcgagtctcccgttgccgggaccccggccgcccagtttggcatggtgggggatagcccggcgatgcgggcgctgctgaacaatatcgccctggttgcgccctccgatgcgacggtattaattcacggcgagtcgggcacagggaaagagctggtcgcgcgggcgctgcacgccagcagcgctcgcagccgccggccgctggtgatcctcaactgcgcggcgcttaacgagtcgttgctggagtcggagctgtttggccatgagaggggcgcgtttaccggcgcggacaaacggcgagaggggcgcttcgttgaagcggacggcggtacacttttcctcgatgaaattggcgatatttcgccgttgatgcaggtgcgtctgctgcgggcgattcaggagcgtgaagtgcagcgcgtgggcagcaatcagaccctttcggtcgatgtacggctaattgccgccacccaccgggatttagccgaagaggtcagcgccgggcgttttcgccaggatctctactaccgcctgaacgtcgtgactatcgatatgccgccgctgcgtcatcgcagggaggatatcccccagctggcgcgctatttcctgcagcggtatgccgagcgtaaccgtaaagcagtacagggatttacgccacaggcgatggacttgctgatccactacgcctggccgggtaatattcgcgagctggaaaatgcggtggagcgggcggtggtcctgctgaccggagagtacatctccgaacgcgagctgccgctggcaattgccggtacgccagttgcggacgtgttgcacggtgatgatgttattcagccgctggtggaggtagagaaagaagcgatcctcgcggcgctcgaaaaaacgggcggcaacaaaactgaagccgcccgtcagttgggcattacgcgcaaaacgctgctggcaaagctcagccgttag

SEQ ID NO: 177024 - DNA, 1389 bp, Klebsiella oxytoca
atgaacgtgatgcggttgtctaaggattccgtcgccgttgggctgagctggttgttaaccggccttatcttgctgctggtgtgcctgttttctgcgttaatcgtgcgtgactatggccgtgaaaatgaagccgcacgccagactatccaggaaaaaggcagcgtgctgattcgcgctcttgagtccggaacccgggtcggaatgggaatgcgtatgcatcattcccagctgcaggcgctactggaggagatggcctggcagcccggcgtgctgtggttcgcggtgacagatgagaacggtaaaattatcgcccatagcgacccgcggcgggtcggtgagtcgctctaccccgccagcaccctgcgagagctgaatatcggtagcgaggagcgctggcgccgcctcgaacaaccgcagccggcgctggagatttatcgccagtttcgcccgcttaacagcggtgggcatcatatgcgcatgatgatgcgtcgcgaatctgccgatctccgtaatcaggcgccccaggtcatttttattgcctttgatacccgcgagctggatgccgaccatgctcgtggcctgcgcaatatggtcatcatgctctgcgcggcaggcgtagtcatgatggcaacggtgctggcgcagttctggtttcgccgctatcagcgttcgcgcaagcagctgcaggaggcgacggcgcgaaaagaaaagctgctggcgctcggtcatctggccgcgggcgtcgcccatgaagtccgcaacccgctatcatccataaaagggctggccaggtatttcgccgagcggaccccagcagatggcgaagcgcatcagttggccctggtgatggccagggaagccgatcgcctgaacagggtcgtcagcgagctgctggaactggtgcgtccggcgcatttaaaatatcaatcggttgatttaaatgaagtcattacgcattcgcttcaactggttagccaggatgccgccagccgggcgatatctctgaagtttatcgcgcagcccgcgctatgccgcatccaggccgatccggatcgtttaaaacaggtgctgctcaacctttatctcaatgctatccatgccattggccgcgatggcgtgattacagtggcggtgagagagtgcggcgatgggcgagtaaaggtgagcgttgcggacagcggcaaagggatgacggcggaacagctacaggccattttcacaccgtacttcactaccaaggccgacggcactgggctggggctggcggtggtgcagaacatcgttgagcagcacggcggaacaattgacgccgagagcactcccggcaagggcgcgctatttacgctctatttgccggttaatgggcaacagaaggatgaacaaggatga

SEQ ID NO: 177025 - DNA, 435 bp, Klebsiella oxytoca
atgaaacggaacaaaaaaatgacgctgaccctgattgccctcgccgcgctgactttcggcagtagctcagcctgggcaaggcaccactggaataacggtaccggtatgggcccccagggctatagtcagctgacgaccgaccagcaggccactgtcaagaagctgcataatgatttctatgagcaaacccgcgttttacgtcagcagctcatttcaaaacgctatgaatacaacgcgctgttaaccaccgataaacctgacagcgcgaaaatcgaatccgtcgcccaggagatggacgctctcggtcagaagcttgcccagcagcgggtgaagttcgatctcgcattagcgcaggcgggtattcctcgcggcgaggggatgggacgtggaggctgcggcggaggccgcggtcatatgggaatgaaccactggtaa

SEQ ID NO: 177026 - DNA, 693 bp, Klebsiella oxytoca
gtgtacagttttatcgaaggggcttgtcggccccttttgtctatctggcgccgcacgctggcgctggcgggcgtattgctgctcactgcctgcagccatgattcctctctcccgccgtttaccgccagcggttacgcggaaaaccagggggcgatgcgtatctggcgcaaagattccgacggcgaggtccatctccttgccgccttcagtccatggcgtcatggtaatacctcgaccagcgagtatcgctggcaggatggtcagctcgcgctgatcgagctcaacgtctacggcaaaccgccggaacatattcgcgcccggtttgatacgcaaggcgaactcagctttatgcagcgtgaaatcgatgggcagaagcagcagctttccagcgatcaggttgcgctataccgctatcgggcagagcaaatacgccagaccagcgatgcactgcgtcagggacgcgtcatgctgcgccaggggcggtggcatgctgacaggacggtaaccacctgcgaaggtcagaccgtgaagcctgacctcgatacgctggcgctggcgcatattgagcgtcgtcagaaccactcatccgtcgaggtgagcgtggcgtggctggaagcgccggaaggctctcagctgctgctggtggcaaacgaagacttctgtacctggcagccgaccgaaaaaagcttctga

SEQ ID NO: 177027 - DNA, 273 bp, Klebsiella oxytoca
atgaacaagactcaactgattgatgtaattgcggacaaagctgacctgtccaaagcacaggcgaaagctgccctggaatctaccctggctgcaattaccgagtctctgaaagaaggtgatgctgttcaactggttggtttcggtaccttcaaagtgaaccaccgcgctgagcgtactggccgcaacccgcagaccggtaatgaaatcaaaatcgccgcagcaaacgtaccggcatttgtttcaggtaaagctctgaaagacgcagttaagtaa

SEQ ID NO: 177028 - DNA, 591 bp, Klebsiella oxytoca
atgttacaaaacccgattcacctgcgtctggagaagctggaaagctggcagcacgtgacttttatggcctgcctgtgcgagcggatgtaccccaactacgctatgttctgtcagcaaacggaatttgccgatggccagctttatcgccgtatcctcgatctgatctgggaaacgctgacggtaaaagatgcgaaggtgaatttcgacagccagctggaaaagctggaagaggcgattccggccgctgatgattacgacctgtacggcgtctatccggccatcgatgcctgcgtcgcattgagtgaactgcttcattcgcggctaagcggcgaaacgctcgaacacgccatcgaagtcagcaagagttcgatcaccaccgttgcgatgctggaaatgacccaggctggtcgcgaaatgaccgacgaagagctcaaagaaaacccggctgtcgaacaagaatgggatattcagtgggagatttttcgtcttctggccgactgcgaagaacgcgatattgaactgatcaaagggctacgtgcagaccttcgcgaggccggtgagagcaatattggtataaattttcagcaatga

SEQ ID NO: 177029 - DNA, 672 bp, Klebsiella oxytoca
atggatttgtcatcgctacgcacacagcagctcagcctggcggcgtcggttgaacgaggcgatcggttggaacaggatccgccgacgctgatcggcggagcggatgtcggttttgagcaagagggggaggtcacccgggcggcgatggtactgctaagctatccgtccctggagctggtggagtatcaggtcgcgcgcgtcgcgaccacgatgccttacattcccggcttcctctcctttcgcgaaacccctgcgctgctggcggcatgggagctactttcgcaaaagccgaatctgttattcgttgatggccacggtatttcccacccgcgccgcctcggcgtcgccagccattttggcctgctggtggatgtaccgactatcggcgtggcgaaaaaacggctgtgcggtaagttcgggccgttgggcgatgaacccggcgcgctggcgccgttgttagataaaggcgaacagctggcgtgggtcttgcgcagcaaaacgcgctgcaatccgctgtttgtgagtaccgggcaccgcgttggcctggatagcgcgctgatgtgggtggagcgctgcctgaaaggctatcgcctgcctgagccaacgcgctgggccgatgcggtggcgtcccggcgtccggcgtttgtgcgttggcaagcaaatcgcgactga

SEQ ID NO: 177030 - DNA, 1065 bp, Klebsiella oxytoca
atgaccgaactgaagaacgatcgttacctgcgcgcgctgctacgccagccggttgatgtcaccccggtgtggatgatgcgtcaggcgggccgctatttaccggaatataaagccacccgcgccgaagcgggcgattttatgtcgctgtgtaaaaacgcagagctggcctgtgaagtgacgctgcagccgctgcgccgctataagctggatgcggctatcctcttctcggacattctcaccatcccggatgcgatggggctggggctctattttgaagccggggagggcccgcgctttacctcgcccattacctgcaaagccgatgtcgataaattacccgttccagacccggaaggtgagcttggctacgtgatgaatgccgtgcgcacgattcgccgtgagctgaagggagaagtgccgctgatcggcttttccggcagcccgtggacgctggcaacctatatggtggaaggcggcagcagcaaagcgtttacggtaattaaaaagatgatgtacgccgagccgcaggccctgcatgcgctgctcgataagctggcgaaaagcgtcacgctgtatctgaatgcgcaaatcaaagcgggcgcgcagtcggtgatgatttttgatacctggggcggagtgctgaccggccgcgactaccagcagttctcgctctattacatgcataaaatcgttgatgggctgctgcgtgaaaacgatggccgtcgcgtgccggtgacgctatttaccaaaggcggcgggcagtggctggaagcgatggcggaaacaggctgcgatgcgctgggactcgactggaccaccgatatcgccgatgcgcgtcgtcgcgtcggtcataaagtcgccctgcagggcaatatggatccctcgatgctgtatgcccctccggcgcgtattgaagaagaggtggcgactattctcgccgggtttggccagggtgaaggccatgtctttaacctcgggcacggaattcatcaggatgttaacccggaacatgcgggcgtatttgtggaggcagtgcaccggttgtcggcgcaataccaccgttaa

SEQ ID NO: 177031 - DNA, 774 bp, Klebsiella oxytoca
atggatcgtattattgaaaaattagatcgcggctggtggattgtcagccacgaacagaaattatggttacccgatggggaattaccatatggcgaagcggtaaattttaatcttgccgggcaaaccgcgctgcgaataggcgaatggcagggcgaaccggtgtggctggtgcgccaggatcgtcgccatgagatgggatcgctgcgtcaggtgctcgatcaggatgctggcctttttcaactggcgggacgcgggatccagctggcggagttctaccgctcgcataaattctgcggctactgcggccatcccatgcaccccagcaaaaccgagtgggcaatgctatgcagccactgccgcgaacgctactacccgcaaatcgccccgtgcattatcgtcgccatccgtcgggatgattctatcctgctggcgcagcatactcgccatcgcaacggcgtgcatacggtgctggccggatttgtcgaagtcggcgaaaccctggagcaaaccgttgcccgcgaagtgatggaggagagcggtatcaaggtgaaaaacctgcgctacgtgacctctcagccctggccgttcccgcaatcgctgatgaccgcgtttatggccgagtacgatagcggcgagattgtcatcgacaagaaagagctgctgcaggcgggatggtatcgctatgacaatctgccgcttttgccgccgccgggcaccgtggcgcgccgtctgattgaagataccgtggcgatgtgtcgggcagagtatgagtga

SEQ ID NO: 177032 - DNA, 423 bp, Klebsiella oxytoca
atgttaaaccagctggaaaacctgacggaacgtgttggaggcagcaataaactggtcgatcgctggctacaagtacgtaagcatttgcttgtggcttactacaacctggttggcctgaagcctggcaaagaatcatttatgcggcttaatgagaaagcgctggatgatttttgccaaagcctggtggactacctctcctccggccattttaatatttatgaacgctttatcggcgaattggaaggcgatacaccacttttagccgccactaagatttatccacagctgcaggctaatacccagcagatcatggactattacgattcctgcctcgaaaacgctatcgatcacgataactatcttgagttccagcaggcgccggtgaagcgctggaagcccgttttgcgctggaagattcgctga

SEQ ID NO: 177033 - DNA, 165 bp, Klebsiella oxytoca
atgtatgtaaactacgcgttaatggctcacaactcaagcggtcggcgcgatattgtcgctaacgttgtcttttcgactgtgggctacggcgagggcaatcagcgaatcttccagcgcaaaacgggcttccagcgcttcaccggcgcctgctggaactcaagatag

SEQ ID NO: 177034 - DNA, 1896 bp, Klebsiella oxytoca
atgtctacaacatcacttacgcgtcgagagcaacgcgaacacgcccagcgctttatcgacaccctggaaggcaccgcatttcccaattcgcagcgcatctatatccgcggttcgcaggaagatattcgcgtgccgatgcgcgaaattcagctgagcccgacgcttatcggcggcagcaaagaccatcctcagtatgaagcaaacgaagccatcccggtctacgatacgtccggcgcctatggcgatccgcacatcgcgataaacgttcagcagggtctggcgaaactgcgtcagccgtggattgatgcgcgtcgcgactgcgaaacgcttagcgatcgcagttcagcctataccagagaacggctggcggatgatggtcttaacgcgctgcgcttttccggtctgcttacgcccaggcgcgccatcgtcgggaaatgcgtgacgcagctgcactatgcccgtcaggggattgtcactcctgagatggaattcatcgccattcgcgaaaatatgggtcgcgaacgcattcgtggcgaagtgctgcgccagcagcatccgggcgtcgggtttggcgcgcggctgccggagaatatcaccccggaatttgtgcgcgctgaagttgccgccgggcgcgcgattatcccggccaatataaatcatccggaatccgagccgatgatcatcggccgcaacttcctcgtgaaggttaacgccaatattggtaactccgcggtcacctcgtcgatagaagaagaggtcgagaagctggtgtgggcgacgcgctggggagcggatacggttatggacctttccaccggccgctatattcatgagacccgcgagtggatcctgcgcaatagtccggtaccgatcggtaccgtgccgatctaccaggcgttagagaaggtaaacgggatcgccgaagatcttacctgggaagccttccgcgacacgctgctcgaacaggcggaacaaggggtggactacttcactatccatgcgggcgtgctgctgcgctacgtgccgatgaccgccaggcgcctgaccggcatcgtctcccgcggcggctcaatcatggcgaaatggtgcttatcccatcacaaagagaactttctctaccaacattttcgtgaaatctgcgaaatctgcgccgcctatgacgtttcgctgtcgctgggcgatggcctgcgcccgggctcgattcaggatgccaacgacgaagcgcagtttgccgagctgcacacgctgggggagctaacccaaattgcgtgggagtatgacgtacaggtgatgatcgaaggcccgggccatgtgccgatgcagatgattcagcgcaatatgactgaagagctggagcactgtcacgaagcgcctttctataccttagggccgctaaccaccgatattgcgccaggctatgatcatttcacctccgggattggcgcagccatgatcggctggttcggctgcgcgatgctctgctacgtgacgccgaaagagcatctcggcctgccgaataaagaggacgttaagcagggcctgattacctacaaaattgccgcccacgccgcagacctcgctaaaggccaccccggcgcgcagatccgcgataacgccatgtcgaaagcgcgctttgagttccgctgggaagaccagtttaatctggcgctcgacccgttcaccgcgcgcgcttaccacgacgaaaccctgccgcaggagtcaggcaaagtggcccacttctgctccatgtgcggccccaaattttgctcaatgaagataagccaggaagttcgcgactacgccgccgcgcagaccatcgaagtggggatggccgatatgtcggaaaacttccgcgcccgcggcagtgaaatctatctacgtaaggaggaagcctga

SEQ ID NO: 177035 - DNA, 636 bp, Klebsiella oxytoca
atgtatcaacccgattttccatccgtcccattccgtttaggcctctatccggtcgtcgatagcgtcgcgtggatcgaacgcttactggctgcgggcgttcgcactctccagctgcgcatcaaggataagcgcgatagtgacgtcgaagacgatgtcgttgccgctatcgcgctgggacgcaaataccatgcgcggctgtttattaacgattactggcgcctggccattaaacatcaggcttatggcgtgcatttaggccaggaggatctggaaaccaccgacctcagcgccatccgcaacgccggactgcgccttggcgtttccacccatgacgatatggaaatggatatcgcgctggcggcgcgtccctcttacatcgcgcttggtcacgtttttccgacacaaaccaagcagatgccttcctcccctcaggggctggatcagctggcgcagcatattcagcgactggaggattatccaaccgtggcgattggcggcatcagccttgagcgcgctccggcagtactggccaccggcgtcggcagcattgcggtagtcagcgccatcacccaggcgaccgactggcggcaggcaacggcacggttgcttgagatagcgggagccggtgatgaatga

SEQ ID NO: 177036 - DNA, 756 bp, Klebsiella oxytoca
atgaatgacagcgattttatgcgctatagccgccagctgctgctggaggatatcgccattgaaggccagcaaaagctgctggccagccgggtgttgatcgtgggtctcggcgggctgggttcccccgccgcgctctatcttgccggagccggcgtcggcacgctggcgctggccgatgacgacgacgttcacgtcagcaacctgcagcgacaaattttgttcaccagcgatgatatcgctcagcctaaaaccacggccgccagggcccggctggctcggctaaatccgcagattgaactgattgcgctgaagcagcggttaggcggaaaggccctgcaggaggaagtggcgaaggccgatgtggtactggattgcaccgataacatgacgacccgacaggcgatcaacgccgcctgcgtcgcgcttaaaacgccgttgattaccgccagcgctgtcggactcggaggccagttgatggtactgacgccgccgtgggagcagggctgttatcgctgcctgtggccggacgctaacgaacccgaacgcaactgccgcacggcgggcatcattggcccggtcgtcggcatgatgggaaccctacaggcgctggaggccatcaagctgctcagcggcatggcggcgccgcgtaacgcgctgcgcctgtttgatgcgcgcaccagcagctggcgtacgctgacattacagcgatctctgggctgtccggtctgtggagggcagcatgcaggtgtggtttaa

SEQ ID NO: 177037 - DNA, 201 bp, Klebsiella oxytoca
atgcaggtgtggtttaacgatgaaccgttgcagtgtgccgaagcgacctccgtcgccgccctgctcgctcaactggaacagcagttgccgggcgtcgcgctggcgctcaatcaacacatcctgccgcgcgaacggtgggaagatcatcttttgcaggaaggcgaccaaatcctgctttttcaggttatcgctggaggctga

SEQ ID NO: 177038 - DNA, 771 bp, Klebsiella oxytoca
atgttacgtattgcagataaaacgtttgaatcacatctcttcaccggcaccggtaaattcgccgctcccgaggtcatggtggaggccattcgcgcctccggtagccaactggtgacgctggcgatgaagcgcgtcgatctccgtcagcataatgacgccatcctcgcgccgctgctggcggccggcgttagcctgctccccaacacctccggggccaaaacggcggaagaggcggtatttgccgcccgcctggcgcgggaagcgctgggcacccactggctgaaactggaaattcatccggacgcccgctggctgctccccgatccgatcgaaacgctgaaagcggcggagattctggttcgggaaggcttcgtcgtgctgccctactgcggcgccgacccggtgctgtgtaaacgtctggaagaagcgggctgcgcggcggtgatgccgctcggcgcgcccatcggctccaatcagggactggaaaccaaagcaatgctggagattattatcgaacaggccacggtgccggtggtcgtggatgcgggtattggcgtgccgagccacgcagcccaggcgctggaaatgggtgccgacgcggtcctggtgaataccgccatcgccgttgccgacgacccggttaccatggcccgcgctttccggctggcgattgatgccggattactggcgcggcaggccggaccgggcgcgcgcagcgcgcaggcgcaggccaccagcccgctgactggctttctggaggcgcaggtatga

SEQ ID NO: 177039 - DNA, 1134 bp, Klebsiella oxytoca
atgaacaccttcactgaccgttggcgacagctggactgggacgatattcgcctgcgaataaacgcgaaaaccaccgccgacgttgaacgcgccctggcggccaaacagctcagccgcgacgacatgatggccctgctctcccccgccgctgctgactatctggagcctctggcccagcgtgctcagcgtctgacgcgccagcgtttcggtaataccgtcagcttttatgtgccgctgtatctctctaatctgtgcgccaacgactgtacctactgcggtttctcaatgagtaaccgcatcaagcgaaaaactctggatgaggcggaaattgcccgtgaatgcgcggcaattcgcgaaatgggtttcgagcatctgctgctggtgaccggcgagcatcagggcaaagtcggcatggactactttcgccggcatctgcccgcgattcgccgccagttcgcctcgctgcatatggaagtccagccactggcgagggaggaatacgccgagctgaaaaccctcgggctggacggcgtgatggtctatcaggagacctatcatgaaagcatgtatgcgaaacaccatctgaaagggaaaaagcaggactttttctggcggctggatacgccggacaggcttggccaggcgggaattgataagattggccttggcgcattaattggcctctccgacagctggcgcgtggactgctttatggtggcggaacatctgctgtggcttcagcagcgctactggcgcagccgctactccatctcctttccgcggctgcgcccgtgcgccggcggtatcgaacctgcctcattgatggatgaacgacagctggtgcaaaccatttgcgccttccgcctgctggccccggaagtggaactttcgttatccacccgcgaatccccctggttccgcgatcgggtcatcccgctggccatcaacaacgtcagcgcgttttcaaaaactcagcccggtgggtatgccgataaccatccggagctggagcagttcgcgcctcacgatgaccgacgcccggaagaggttgccagcgcgctggtggccagcgggctgcagccggtatggaaagactgggatagctggctgggacgcgcttcccagtcatcatga

SEQ ID NO: 177040 - DNA, 1533 bp, Klebsiella oxytoca
atggctcgccataatagaaagctctctttcacctcgccgattgtgatcgggttcgcgggtattttattcagcttcttgctgatagcggtgttcgccacgacgacgcagcgaaatgattttcttgaagattatcatcatattaaccgcaatttcacccacaatatggcgaccaactacacggagacgctgctgcagggcaatgactttatcctcacccgtgccgccactttctttgcccgcaatgatgcgctcaatgaggcggttaacgtcaatcctgaaaaaggtttgatgcagcttatgcagctgcaaaatatgatgcaaaccgtttcgtccatctcgctggcggataccaatgggcactacctgcgcgcgcccgaagttctggagacggaagacagtcagtcttttgatgccaaatcgagaccatggtttattaaacaagcggaagccagtaccttcagccggtataccagcccgtacaacgactacttcacgcatcatccgacgattaccgtctacaaacccataatttctccagaaggacggctaaagggcagtctcgcatttcatctcgatctcacctcaatgggctacgcgttacggcagatggttgctccggtccagggggaattttttgtggtgcaacgcgatggtaaagtcgttctccatccggatcctggcgccttatttaaaccctacgtcagtgaagcgttgatggacagaatgaccagcggcgaaggccagctctacgataccgatacgaacgcctggtactactactactcgtttaccaaccccgactggtttgtcatttatcgggtcgataactcgacgctggtcaacttgactcgccatgaaacggatatcgtcgcctggagctttgccctggccgcgatcgttatcgtgctgtttggcctgtatctgcgccatgcttcacgtacggtgttgatgaacatcatcaatgccattaaaaccggggatgttcagcgcgccccgcggctggaagcgatgctcagcaaagccatcgagagcaataagcagcgcgagttaacctacgttcgccaggcgaccatcgatgcgctaaccggctgcaagaaccgacgcgccttcgacaatgatatcgccgcgctgatgaacgatcatcaacctttctctctcgcgctggtggatattgataactttaaaacgataaatgacacctggggtcatctcaatggcgatatcgttctgcgcaatgtcgcacgggaaggactgcagatcctccaacctctgcaaatttcactttaccgctacggcggggaggagtttgcggtgatctttaccaccggacatagcgatgacgctctgaagctgctggagagctggcgggcccgcgttgcgcagcgctcctggcgtgaagaagggctaacggtcacctttagcgcaggtctcggcgaatggaatatggaacccctggagcagctagtcgtgcgcgttgatgaagcgctgtataaagccaagcagcagggcaagaatcgcatcgtccgcgcgtaa

SEQ ID NO: 177041 - DNA, 306 bp, Klebsiella oxytoca
atgaagaatatcgttttatgctgcgccgcaggtatgtccaccagcatgctggttcaacgtatgcaggctgctgcgcaacaaaaaggtgtggaagtctccatcaaagccgtaccggttgccgagtttaaagataaccttgccgctgccgatattatcctgctcggcccccaggtgaagtatgagcaggccaagctacaggctatggccgacccgtttggtaaaaaagttgccgtcatcgatatgatggattacggcatgatgaaaggcgaagccgtgcttgataaagccctgaagctgatggagtaa

SEQ ID NO: 177042 - DNA, 318 bp, Klebsiella oxytoca
atggaagacttagaaacgatcatcatggagcttctggttaacgccggttcagcgcgtagctctgccttaaccgctctgcagctggcgcgtaaaggcgattttgctgcggccgaacaggcgatggcggaatctcacgaatttgtcaaacatgcgcataaaatccagacccagctgatcggcatggatgaaggcagcggcaagcttccggttaacctgattaccgttcattcccaggaccacctgatgaacgcgatggtcattcaggatctggcaaccgatatgattgagctctatcgccgaattccgctcgcgcaataa

SEQ ID NO: 177043 - DNA, 1341 bp, Klebsiella oxytoca
atggaatttgctattcaacttatcattatcttaatttgtttgttctatggcgcgagaaagggcggtattgcgctcggccttttaggcggcattggtctggttattttagtgtttgtctttcatcttaagccgggaaaaccccctgtagacgtcatgctggtgatcattgcggtggtggccgcctcagcgacgctgcaggcttccggcggtttagacgttatgctgcagattgcggagaaactgctgcggcgcaacccgaaatacgtttcaatcgtggcgccattcgtcacctgcacgttgaccattctttgcggaaccgggcacgtggtatataccattctgccaattatttatgatgttgcgattaaaaataatattcgcccggaacgaccgatggccgcgagttcgatcggcgcgcagatggggattatcgccagcccggtttcggtggcagtcgtctcgctggtggcgatgctcggcaatttcacctttaacggtaagcaccttgagtttctcgatctgctggcgatcactattccgtcaacgctgctggggattctggccattggtatcttcagctggtttcgcggtaaagacctcgataaagacgaagcctttcaggcttttattgcggtgccggaaaaccgccattacgtttatggtgatacggccacgctgctcgataagaagctgccaaccagtaactggattgcgatgtggatttttctggcctcaatagccgttgtcgccctgctcggagccttctccgagctgcgtccagcctttgatgacaagccgctgtcgatggtgctggtgatccaaatgtttatgctgctttccggggcgctcatcatcatcattaccaaaaccaatcccgcttcgatttccaaaaatgaggtgttccgttccgggatgatcgccattgtcgcggtgtacggtatcgcgtggatggcggagacgatgtttggcgcgcatatgaccgagattaaaggcgtgctcggggagatggtgaaggagtacccgtgggcttacgctatcgtactgctgctggtgtcgaagtttgttaactcacaggcggctgcgctggcggcgattgttccggtggcgctggcgattggcgtcgatccggcttacatcgttgcttccgcacctgcctgctacgggtattacattctgccgacctacccaagcgatctggcggcgattcaattcgaccgctctggtacaacgcatatcggccgctttgtgattaaccatagctttattctgccagggctcattggcgttagcgtctcttgcgtctttggttgggtatttgcggcgatgtatggatttctgtaa

SEQ ID NO: 177044 - DNA, 4224 bp, Klebsiella oxytoca
gtgaaagacttattaaagtttctgaaagcgcaaactaaaaccgaagagtttgatgcgatcaaaattgctctggcatcgccagacatgatccgttcatggtcttttggtgaagttaaaaagccggaaaccattaactaccgtacgttcaaacctgagcgtgacggccttttctgcgcgcgtattttcgggccagtaaaagactacgagtgcctgtgcggtaagtacaagcgcctgaaacaccgcggtgtgatctgtgagaagtgcggcgttgaagtgacccagactaaagtgcgccgtgagcgtatgggccacatcgagctggcgtctccgaccgctcatatctggttcctgaagtctctgccgtcccgtatcggcctgcttctcgatatgccgttgcgcgatatcgaacgcgtgctgtacttcgaatcctatgtggttatcgaaggcggtatgaccaacctggaacgccagcagatcctgactgaagaacagtatctggacgcgctggaagagttcggtgacgaatttgacgcgaagatgggtgcggaagctatccaggccctgctgaagagcatggatctggagcaagagtgtgaaactctgcgcgaagagctgaacgaaaccaactccgaaaccaagcgtaagaagctgaccaagcgtatcaaactgctggaagcgttcgtacagtctggcaacaagccggagtggatgatcctgaccgttctgccggtactgccgccagatctgcgtccgctggttccgctggatggtggtcgttttgcgacttctgacctgaacgatctgtatcgtcgcgtcattaaccgtaacaaccgtctgaaacgtctgctggatctggctgcgccggacatcatcgtacgcaacgaaaaacgtatgctgcaggaagcggttgacgccctgctggataacggtcgtcgcggtcgtgcgatcaccggttctaacaaacgtcctctgaaatctttggccgatatgatcaaaggtaagcagggtcgttttcgtcagaacctgctcggtaagcgtgttgactactccggtcgttctgtaatcaccgtaggtccatacctgcgtctgcatcagtgcggtctgccgaagaaaatggcgctggagctgttcaaaccgtttatttacggcaagctggagctgcgtggcctggccaccaccatcaaagccgctaagaaaatggttgagcgcgaagaagctgtcgtttgggatatcctggacgaagtcatccgcgaacacccggtactgctgaaccgtgcaccaaccctgcaccgtctgggtatccaggcatttgaaccagtgctgatcgaaggtaaagctatccagctgcacccgctggtttgtgcggcatacaacgccgacttcgatggtgaccagatggctgttcacgtaccgctgacgctggaagcccagctcgaagcgcgtgcgctgatgatgtctactaacaacatcctgtctccagcgaacggcgagcctatcatcgttccgtctcaggacgttgtactgggtctgtactacatgacccgtgactgtgttaacgccaaaggcgaaggcatggtgctgactggcccgaaagaagctgagcgtatttatcgcgctggcctggcctctctgcatgcgcgcgttaaagtgcgtatcaccgaatacgaaaaagatgaaaacggcgaattcgttgcgaaaaccagcctgaaagatacgaccgttggtcgcgccattctgtggatgatcgtaccgaaaggtctgcctttctccatcgtcaaccaggcgctgggtaagaaggctatctctaagatgctgaacacctgctaccgtattctgggcctgaaaccgaccgttatttttgcggaccagacgatgtacaccggctttgcttatgcagcgcgttcaggtgcatccgttggtattgatgacatggtcatcccggagaaaaaatacgaaatcatcagcgaagcggaagcggaagttgctgagattcaggagcagttccagtcgggtctggtgaccgctggcgaacgctataacaaagttatcgatatctgggctgcggccaacgatcgtgtatccaaagcgatgatggacaacctgcaaaccgaaaccgttattaaccgtaacggcgaagaagagcagcaggtttccttcaacagcatctacatgatggccgactccggtgcgcgtggttctgctgcacagattcgtcagcttgccggtatgcgtggtctgatggcgaagccggatggctcgatcatcgaaacgccaatcaccgcgaacttccgtgaaggtctgaacgtactccagtacttcatctccacgcacggtgcgcgtaaaggtctggcggataccgcactgaaaacagcgaactccggttacctgacccgtcgtctggttgacgttgcacaggacctggtcgttactgaagacgactgtggcaccctggaaggcatcaccatgaccccggttatcgagggtggcgatgttaaagagccgctgcgcgatcgcgtactgggtcgtgtgaccgctgaagacgttctgaagccgggtacggcggacattctggttccacgcaacacgctgcttcatgagcactggtgcgatctgctggaagagaactccgttgactccgtcaaagtgcgttccgttgtatcctgtgacaccgactttggtgtatgtgcgcactgctacggtcgtgacctggcgcgtggccacatcatcaacaaaggtgaggctatcggcgttatcgcggcacagtccatcggtgagccgggtacacagctgacgatgcgtacgttccacatcggtggtgcggcatctcgtgcggctgctgagtccagcatccaggtgaaaaacaaaggtagcatccgtctgagcaatgcgaagtcggttgtgaactccagcggtaagctggttattacgtcccgtaataccgagctgaaactgatcgacgaattcggtcgtaccaaagagagctataaagtgccttacggctccgttatggcgaaaggtgatggtgagcaggttgccggcggtgaaaccgtagcaaactgggatccgcacaccatgccggttatcaccgaagtgagcggtttcgtccgcttcactgacatgattgacggccagaccattactcgtcagaccgacgagctgaccggcctgtcttctctggtggttctggattctgcagagcgtaccactggtggtaaagacctgcgtccggcgctgaaaatcgttgatgctcagggtaatgatgttctgatccctggcaccgatatgcctgcgcagtacttcctgccgggtaaagcgattgttcagctggaagatggcgtacagatcagttctggtgacaccctggcgcgtgtaccgcaggaatccggcggtaccaaggacatcaccggtggtctgccgcgcgttgccgacctgttcgaagcgcgtcgtccgaaagagccggcaatcctggctgaaatcagcggcatcatttccttcggtaaagaaaccaaagggaaacgtcgtctggttatcaccccggtagacggtagcgatccgtacgaagagatgattcctaaatggcgtcagctcaacgtgttcgaaggtgaacgcgtagaacgtggtgatgtagtttccgacggtccggaagcaccgcacgacattctgcgtctgcgtggcgtacatgctgtgactcgttatattgttaacgaagtccaggacgtataccgtctgcagggcgttaagattaacgataagcacattgaagttatcgttcgtcagatgctgcgtaaagcgaccatcgaaagcgccggtagctccgacttcctggaaggcgaacaggttgaatactctcgcgtcaagatcgctaaccgcgagctggaagcgaacggcaaagtgggtgcaacattctcccgcgatctgctgggtatcactaaagcgtccctggcaaccgaatcgttcatctctgccgcatcgttccaggagaccacgcgtgtcctgaccgaagcagccgttgcgggtaaacgcgacgaactgcgtggcctgaaagagaacgttatcgtgggtcgtctgatcccggccggtaccggttatgcctaccaccaggatcgtatgcgccgccgcgcagccggcgagctgccagcagcgccgcaggtcagcgtggaagaagcttctgctaacctggcagagctgctgaacgcgggtctgggcggttccgacaacgattaa

SEQ ID NO: 177045 - DNA, 4029 bp, Klebsiella oxytoca
atggtttactcctataccgagaaaaaacgtattcgtaaggattttggtaaacgtccgcaggttctggacataccttatctcctttctatccagcttgactcgtttcagaagttcatcgagcaagatcctgaagggcagtatggtctggaagcagctttccgttccgtattcccgattaaaagctacagcggtaattctgagctgcagtatgtcagctaccgtctgggcgaaccggtttttgacgttaaagaatgtcagatccgtggcgtgacctactcggcaccgctgcgcgttaaactgcgtctggtgatctacgagcgcgaagcgccggaaggcaccgttaaagacattaaagaacaagaagtctacatgggcgaaattccgctcatgaccgacaacggtacctttgttatcaacggtaccgagcgcgttatcgtttctcagctgcaccgtagcccgggcgtcttctttgacagtgacaaaggtaagactcactcttccggtaaggttctgtataacgcacgtatcatcccttaccgtggctcctggctggacttcgaattcgacccgaaagacaacctgtttgtccgtatcgaccgtcgtcgtaagctgccggctaccatcattctgcgcgcgctgaattacaccacagagcagatccttgacctgttcttcgaaaaagtggtctttgaaattcgcgacaacaagctgcagatggaactggtaccggagcgtctgcgcggcgaaaccgcctccttcgatatcgaagcgaacggtaaagtgtacgttgagaaaggacgccgcatcactgcgcgtcacattcgccagctggaaaaagacgatatcaaacatatcgaagttccggttgagtacatcgctggcaaagttgcctctaaagactatgttgacgaatctactggcgagctgatctgcccggcgaacatggagctgagcctggatctgctggccaagctgagccagtctggccataagcgtatcgaaacgctgttcaccaacgatctggatcacggtccgtacatctctgagactgtacgcgttgacccgaccaacgatcgtctgagcgcactggtagaaatctaccgcatgatgcgccctggtgagccgccgactcgtgaagctgctgaaagcctgttcgagaacctgttcttctccgaagaccgctacgatctgtccgcggttggtcgtatgaagttcaaccgttctctgctgcgcgacgaaatcgaaggttccggtatcctgagcaaagaagacatcattgaagtgatgaagaagctcatcgatatccgtaacggtaaaggcgaagtcgatgatatcgaccaccttggcaaccgtcgtatccgttccgttggcgaaatggcggaaaaccagttccgcgttggcctggttcgcgtagagcgtgcggtgaaagagcgtctgtctctgggcgatctggataccctgatgcctcaggatatgatcaacgccaagccgatttctgcagcggtgaaagagttctttggctccagccagctgtctcagtttatggaccagaacaacccgctgtctgagattacgcacaaacgtcgtatctctgcactcggcccgggcggcctgactcgcgaacgcgcaggctttgaagttcgagacgtacacccgactcactacggtcgcgtatgtccaatcgaaacgcctgaaggtccgaacatcggtctgatcaactccctgtccgtgtacgcacagacgaacgaatacggcttccttgagactccgtatcgtaaagtcaccgacggcgttgtgaccgacgaaattcattacctgtctgctatcgaagaaggtaactacgttattgctcaggcgaactccaacctggatgacgaaggccactttgtagaagatctggttacctgccgtagtaaaggcgaatccagcttgttcagccgcgaccaggttgactacatggacgtatccacccagcaggtggtttccgtcggtgcgtccctgatcccgttcctggaacacgatgacgccaaccgtgcattgatgggtgcgaacatgcaacgtcaggccgttccgaccctgcgcgctgataagccgctggttggtaccggtatggaacgtgctgttgccgttgactccggtgtaactgcggtggctaaacgtggcggcctggttcagtacgtggatgcgtcccgtatcgttatcaaagttaacgaagacgagatgtacccgggcgaagcaggtatcgacatctataacctgaccaagtacacccgttctaaccagaacacctgcatcaaccagatgccgtgtgtctctctgggcgagccgattgagcgcggtgacgtgctggctgacggtccgtccaccgacctcggtgaactggcgctcggtcagaacatgcgcgtcgcgttcatgccgtggaacggttacaacttcgaagactccatcctcgtatccgagcgtgttgttcaggaagaccgttttaccaccatccacattcaggaactggcgtgcgtgtcccgcgacaccaagctggggccggaagagatcaccgctgatatcccgaacgtgggtgaagctgcactctctaaactggatgagtccggtatcgtttatatcggtgcggaagtgaccggcggcgatattctggttggtaaagtaaccccgaaaggtgaaacccagctgacgccagaagagaaactgctgcgtgcgatcttcggtgagaaagcgtctgacgttaaagactcttctctgcgcgtgccaaacggtgtctccggtaccattatcgacgttcaggtcttcacccgcgacggcgtagaaaaagacaaacgcgcgctggaaatcgaagagatgcaactcaaacaggcgaagaaagacctgtctgaagaactgcagatcctcgaagctggcctgtttggtcgtatctatgcggtgctggtctccggcggtatcgaagctgagaagctcgacaagctgccgcgcgatcgctggctggaactcggcctgaccgacgaagagaaacaaaaccagctggagcagctggctgagcagtacgacgaactgaaacacgagttcgagaaaaaactcgaagcgaaacgccgtaaaatcactcagggcgacgatctggcaccgggcgtgctgaagatcgttaaagtgtatctggccgttaaacgtcagattcagcctggtgacaaaatggcaggtcgtcacggtaacaagggtgttatctctaagatcaacccgatcgaagatatgccttacgatgaaaacggcacgccggtcgacatcgtactgaacccgctgggcgtaccgtctcgtatgaacatcggtcagatcctggaaactcacctgggtatggctgcgaaaggtattggcgagaaaatcaacgccatgctgaaacagcagcaggaagtcgccaaactgcgcgagttcatccagcgtgcctacgatctgggtaccgacgttcgtcagaaggttgatctgaataccttcactgacgaagaagttatgcgtctcgctgaaaacctgaaaaaaggtatgccgatcgcaacgccggtcttcgacggtgcgaaagagtctgaaatcaaggagctgttacagcttggtggcctgccgacttccggccagatcaccctgttcgacggtcgtaccggtgagcaattcgagcgccaggttaccgttggctacatgtacatgctgaaactgaaccacctggttgatgacaagatgcatgcgcgttctaccggttcttacagcctggttactcagcagccgctgggtggtaaggcacagttcggtggtcagcgcttcggggagatggaagtgtgggcgctggaagcatatggcgcagcatacaccctgcaggaaatgctcaccgttaagtctgatgacgtgaacggccgtactaagatgtataagaacatcgtggatggcaaccatcagatggaaccgggcatgccggaatccttcaacgtactgttgaaagagattcgctcgctgggcatcaacatcgaactggaagacgagtaa

SEQ ID NO: 177046 - DNA, 369 bp, Klebsiella oxytoca
atgtctatcactaaagatcaaatcattgaagcagtatccgctatgtccgtaatggacgttgttgagctgatctctgcaatggaagaaaaattcggtgtttccgctgctgctgctgtagctgttgctgctggcccggctgctgacgctgctgaagaaaaaactgaattcgacgtaattctgaaaggtatcggcgcgaacaaagttgccgttatcaaagcagtacgtggcgcgactggcctgggtctgaaagaagctaaagacctggtagaatctgctccggctgctctgaaagaaggcgtgagcaaagatgacgctgaagcactgaaaaaatctctggaagaagctggcgctgaagttgaagttaaataa

SEQ ID NO: 177047 - DNA, 498 bp, Klebsiella oxytoca
atggctttaaatcttcaagacaaacaagcgattgttgctgaagtcagcgaagtagccaaaggcgcgctgtctgcagtagttgcggattcccgtggcgttactgtagacaaaatgactgaactgcgtaaagcaggtcgtgaagctggcgtatacatgcgtgttgttcgtaacaccctgctgcgccgcgtcgttgaaggtactcctttcgagtgcctgaaagacacgtttgttggtccgaccctgattgcatactctatggaacacccgggcgcagctgctcgtctgttcaaagatttcgcgaaagcgaatgcaaaatttgaggtcaaagccgcagcctttgaaggtgagctgatcccggcgtcgcaaatcgaccgcctggcaactctgccgacctacgaagaagcaattgcacgcctgatggcaaccatgaaagaagcttcggctggcaaactggttcgcactctggctgctgtacgcgatgcgaaagaagctgcttaa

SEQ ID NO: 177048 - DNA, 705 bp, Klebsiella oxytoca
atggctaaactgaccaagcgcatgtccgtgattcgtgacaaagttgatgcgaccaaacagtacgacatcaacgaagccatctctctgctgaaagaactggcgactgctaagttcgttgaaagcgttgatgttgccgttaacctcggcattgacgctcgtaaatctgaccagaacgtccgtggcgcgaccgtactgccgcacggtactggccgttcagttcgcgtagctgtatttgcccagggcccgaacgctgaagcagctaaagctgctggcgcagagctggtaggtatggaagatctggctgaccagatcaaaaaaggcgaaatgaactttgacgtggttattgcttctccggatgcaatgcgcgttgttggccagctgggccaggttctgggtccgcgcggcctgatgccaaacccgaaagttggtactgtaactccgaacgttgctgaagcggttaagaacgctaaagcaggtcaggttcgttaccgtaacgacaaaaacggcatcatccacaccaccatcggtaaagtggattttgacgctgataaactgaaagaaaacctggaagctctgctggttgcgctgaaaaaagcgaaaccgactcaggctaaaggcgtgtacatcaagaaaatcagcatctccaccaccatgggtgctggcgttgccgttgatcaggctggtctgagcgcttctgcgaactaa

SEQ ID NO: 177049 - DNA, 429 bp, Klebsiella oxytoca
atggctaagaaagtacaagcctacgtcaagctgcaggttgcagctggtatggcaaacccgagtccgccggttggtccagcactgggtcagcagggtgtgaacatcatggaattctgcaaagcgttcaacgcaaaaactgaatccctggaaaaaggtctgccaatcccggttgttatcaccgtttacgctgaccgttctttcaccttcgttaccaaaactccgccggcagcagttctgctgaaaaaagcggctggtatcaagtctggttccggtaaaccgaacaaagacaaagtaggtaaaatttcccgcgctcagctgcaggaaatcgcgcagaccaaagctgccgacatgactggttccgacattgaagcgatgactcgctccattgaaggtactgcacgttccatgggcctggtagtggaggactaa

SEQ ID NO: 177050 - DNA, 546 bp, Klebsiella oxytoca
atgtctgaagctcctaaaaaacgctggtacgtcgttcaggcgttttctggttttgaaggtcgcgtagctacctcgttgcgtgaacatatcaaattacacaatatggaagagctgtttggcgaagtcatggtgccgaccgaagaagtggtcgaaatccgcggcggccagcgtcgtaaaagcgaacgtaaattcttcccgggctacgtgctggtccagatggtgatgaacgacgcgagctggcacctggtgcgcagcgtaccgcgtgtgatgggctttatcggcggtacttctgaccgtccggcgcctattagtgacaaagaagtcgatgcgatcatgaaccgtctgcagcaggttggcgataagccgcggccgaaaacgctgtttgagccgggtgaaatggtacgcgttagcgacggcccatttgccgactttaacggcgtggttgaagaagtggactacgagaagtctcgtctgaaagtgtccgtttctatcttcggtcgtgcgacgccggtcgagctggactttgcccaggtagaaaaggcttaa

SEQ ID NO: 177051 - DNA, 384 bp, Klebsiella oxytoca
atgagtgcgaataccgaagctcaagggagcgggcgcggcctcgaagcgatgaagtggacaatcgttgtcgtgctgctggttgtggccatcgtcggcaacttcctttatcgtgacattatgctggcagtgcgtgcgctggccgtagtgattctgatcgctgcagcaggcggtgtcgcgctgttaacgacaaaaggtaaggcgacagtcgctttcgctcgtgaagcgagaaccgaagtccgtaaggtgatctggccgactcgccaggaaacgctgcataccacgttgattgttgccgcggtgaccgccgtaatgtcactgatcctgtggggactggatggtattctggttcgcctggtatcctttatcactggcctgaggttctga

SEQ ID NO: 177052 - DNA, 240 bp, Klebsiella oxytoca
atggaaaatcccgccattttgttacgtcgtcttcacccaaactgcgcccgcgcaacagaaggtctcttctgcctgccgccgaacgccgggataagcctgctctgccagcagatattaccggcggtaagccagctgcgcttaagccctgtggctgcaggacagttgcctcagcgtccttctccgggtcgggacgataagaaaatgattgcgatgacgtttgagaaagaggtgagcgtatga

SEQ ID NO: 177053 - DNA, 1707 bp, Klebsiella oxytoca
atgagcgtgaaccatttgcgcctgttatggctctgggccgggatccttgcggtactgctctgtttgctgtttctgccgctggctaccggcgggcggattctggctgttgcgctgatcctgaccgcagtcatcgttgccctgattgtcgccgggcgcaagggggaatggggacttacagaggatgcctggctggatgacattccggacgcgccgtactgcctgccggtggtgctggtctgcggtgatatcgccaggtggccggagtgcggggtggttttgcgtacggctcagggctgctggttaaatgttcctaccgccgaactgcagcagacggtacgtactcttctgcgtaaacgcccggatctgatatcgcagctggcggtgatggtctgcgtttgcccgcagttgcacggtgatgaggcggcgctggcggtcgggcttaatgagctgcgctggcagctgaaccaggcgcggagcgactgccgccgctcggtgcctttactactgagcagtcacgtggcaggggcgtctgttcctcactcgctatggcagacagcgcagaccggggaagccatgcaggtgtggcaggcgaatgacgcgccttgctgcaccgggacctggctggcgcaaaagaacggaagggagcgtctggccacacaggtgaggatgaatgcgctggttcgcctgacgcacgagacggcgctggctatgctgacggcgccctctgttgatacgcccccggtgatacccgctatgatgctgtatcacatgacgccgtcgggggcaccggttctgcctcagaatctgtggcagcgctggttgtctcatcataccgctctgggctcactacctggctggcagcctgatacctcatcagcggatgtcctgttaccggattttattctgccactgttgccattgggcgtcagcgagacgccacgcgccaggattttacgccgggcgttctgtctgttcacccttgccattctcatcgcactgtgcgccagcgcgtggaacaaccgccagctactgcagcgggtggggttcgatattcagcactatgagcagattgcgatggttgactacgcctcgaaagcccgcgccctgcaaatcctgagtggggatgcggttcaactggatcagtgggcgcgccgcggtgagccgctgaacctgagtctcggtctgtatcacggggcctatttacgcataccggtgttggccgcgattcgttcctgggaacccccacctccgccacaaaaaccagcacaaaaaaccgtgccgaaaaccatccgcctcgacagcatgtcgctgttcgataccgggaggtgggcgcttaagcccggatcgacaaagctgctggtgcactcgttggttggcatcaaagcaaaacccggctggctgattgtcgttgcgggccataccgacagtaccggtgaggaaaaagccaaccagatactttcgctgaagcgtgccgaatcggtgcgcgactggatgcgtgacaccggagatgtaccggagagctgttttgcggtgcagggcttcggcgagaaccgtcctgtagccaccaatgaaacggttgaagggcgtgcgctgaaccgccgtgtcgaaatcagtctggtaccgcaggtgaatgcctgccagccaccgggcatgccttcggccttatcgcgggagagcggcgcgtcaatcaatgaaacggagaagtag

SEQ ID NO: 177054 - DNA, 666 bp, Klebsiella oxytoca
atgaaacaggatacgaatatcgacgccctgatggctgacgcctggttgacggtgacggaactgcggtgcggggcgagactggccgacggggagggcgaacgcctctggcgacattgcgtagagcatattgaaaaggtcatggcggaactggagaccgcgggcctcagcgaggcgagccgtcggcatattctctacgcctggtgtgcgctgctggatgagacagctaaaggacgtgaaggtgaggatgatgcctgcatcgtctggtatgaccgtccgctgcaggcgaaatacttcggtgccctggacgccggcgatgcgctgtatgagcggatgcgacaggttctgcatgagcccgcgccggatgtggcggtactgacctgcttccatcgcgtgttgatgctgggctttaagggatgttatgccctggatgagccggttcgcgaccagcttatcaccagactggcggagcgcgtttcgccgtttgaaaccgaccagagccagcctgtactggcgggtatatccgggcgtagcggcctggcggacgggttgcgacgctggccggtttgcctcgggctgtcgctggttgcgatcgccgcgctgtggctggggctaaatcattggcttgattccctgattacaaccctgctgctcggggcggaaaaatga

SEQ ID NO: 177055 - DNA, 1344 bp, Klebsiella oxytoca
atgaaaacagtacgaccgttatggggacggggacagatgatctctccccaacattttcagcaggaaaccgcgcaatcggcctggcagacagagtatgtcgcccggctgggggcaattcatccctggggagtggcgcgggcggagtttaataccgcgctgctgaagcaggggaaactgaaagccgaccacctgtgcgtgcgtttcgccgacggcacgctcattgatagcgataacgccgatgcgttgccgccggtgatgaacctgccggaaacagaacatcacgaactgacggtggttctggcgctgccccatgagcatgagaacggtggcaactgtctgcaaccggagcagagagcggagcgtcccgtgcgctggcgtctggcctggcgggaggtgcgaaaccgctatggggaggactgccgccagattgcggtaatgcagccggagctgacgctgcgtgaggccgatagcgacaacgctgattaccagaccgtcgccgcgatccgtcttacgcgcgatagccagggacactggtcgcaggacgagtcttttctgccgccgctgctgaacgtacaggccagccgttggttgagggaacaaaccgaacagttgacgggtcagctccgtgcgcgcctgcagcgcctgatgtctatgcgtcgggaaagcaacgagcgaatggccgacttcgcggtagcggacgtgtcgctgttctggctgctgagtgcgctcaacagcgctgagccgttgctcagccattttgttcgtcatccgcaggtgcatccggaacgtctgtatacagcgttggccggtctggcaggtagcctgctgactttttctcttgaacacactacagccgatattccggcctatcgtcatgagcagttaacggcggtctttcctccattgtttgacttgctggggggactgctggaagccagtctgccatcgagggtggtgtcgattgacatggttcatgatgaacgacgcaagcgctggcatgcccgtctgcacgatccacgactgcgtgaagaggcggatttttatctctcggtacgatcggcgctgccggtagcgcagctactggagcagtttccgcttcagtgcaaagcgggcagcccggatgaagtcgaccgggtcgttaacggttcgcaacccggcatccctctgcgcgcgatgagccacgttccggcggccatcccgctgcgcctggagaaccagtatttcacccttgatatggcccatccggcggcgcgagcgatgctgttggaaggcagttgcgtcttttacgtccccggtctgctgggcgcccctgaactcgaactctatgcggtactgcgctcatga

SEQ ID NO: 177056 - DNA, 1617 bp, Klebsiella oxytoca
atgaagtatcctgtcaaattgacatgcggcgcgctgtggttagccagcgtctcttctcttgcctgggcggcggatgtcccgcccggcaccgtattagccgaaaaacaggtgctggtgcggcacataaaagatgagcccgccaccttagatcccgcgaaagccgtcggcctacctgaaattcaggttatccgcgatctttttgaaggtttagtcaatcaggatgagaaaggcaacctaataccaggcgtggcgactcgctggcagagcaatgataaccgcgtctggacgtttaccctgcgcgataatgcccgctggtccgatggaacgccggtgacggcagaagattttgtctatagctggcggcggctggttgaccccaaaaccacatcaccctttgcctggtttgcggcgctggccggtatcgccaatgcgcaaaatatcattgatggtaaagccgcgccggatacccttggcgtcaccgccgtagacgcgcgaacgctgcgcgttcagctggataaaccgctgccgtggttcagcaatctgaccgccagctttgcgttttatccggtccagaaggcgaatgttgagagcggcgacagctggacccgtccgggaagcctgattggcaacggcgcgtacgttttaaaggatcgcgtggtgaatgaaaaactggtggtggttcccaatacgcactactgggacaacggcaaaacggtgatccagcaggtcacgtttacgcccattaatcaggagtcagcggcaactaagcgctatctggccggtgatatcgatattaccgagtcgttcccgaaaaatatgtatcagaagctgatgaaggatattccggggcaggtttacactccgccacagctgggcacctattattacgcatttaacacacagaaagggccaaccgccgatgagcgcgtccgcctggcgctgagtatgactatcgaccgccgtctgatggcggaaaaaattctgggtactggtgagaaaccggcctggcgttttactccggatgtcactgccggcttcactccccagccgtcgcaaatcgagagcatgagccaggctgagctgaatgcccaggccaaagcgctgctgcaggcggcgggctacggcccgggtcgcccgctgaagctcagcctgttgtataacacctcggagaatcatcagaaaatcgccattgcggtagcgtctatgtggaagaagaatcttggcgtcgacgtgaagctgcaaaatcaggagtggaaaacctatatcgacagccgtaataccggcaacttcgatgtgattcgcgcttcgtgggtgggggattacaatgaaccttcaacgttcctgtcgctgctaacctcgacgcacagcggtaatatctcccgcttcaacgatccggcctacgacaaaattctcactcaggcggcgctggaaacgtcggaaaaggcgcgcaatgacgattacaacgcggcggaaaaaatcattatggcgaaagcgcctatcgcgccgatttaccagtataccaacgggcgactgattaaaccgtggctgaaagggtatccgattgccaatccggaagacgtcgcctatagccgcacgatgtatatcgtgaagcactga

SEQ ID NO: 177057 - DNA, 714 bp, Klebsiella oxytoca
atgcccgtttctcgtcctcgcccccagcgcggtgattttccgcctggaacccaacgctacggccagtcttacctgggcgcgccgctgctgtggtttccggcgccgctggccgatagccgtagcggcctgatccttgccggtactcacggcgatgaaaacgcctccatcgtcaccctctcctgtgcgctacgaaccctcaagccagagctgcgccgtcatcacgtggtgctggcggtcaaccctgacggctgtcagctggggctgcgggctaacgcacgcggtatcgacctgaaccggaattttccagcggcgaactggaaggaaggagaaaccgtctaccgctggaacagcgcggcagagcagcgcgatgtcgttctactcaccggcgaaaagccaggttcggaacccgagacccgggcgctgtgccagttgatccatcagatccacccggcatgggtgatctcatttcacgatccgctggcctgcattgaagaccccggccacagcgaactggggcactggctggccgatgcgtttagcctgccgctggtgggtagcgtcggctatgaaacgcccggttcttttggcagctggtgcgccgatataggcctgccctgtatcaccgccgaattcccggcaatatccgccgacgaagcaacggagaaatatctgcaggccatgacggagctgctgcactggcactctcagagatga

SEQ ID NO: 177058 - DNA, 966 bp, Klebsiella oxytoca
atgcgaaatctgcgagtctatgaagaagcctggccgctacatagcccttttgtgatcgcccgcggcagccgcagcgaggcaaaagtcgtggtggtggaaattgaagagaatggcgtcaagggcacgggggaatgcacgccttatcctcgttatggagagagtatcgcctcggtgatggcgcagattatggcgatcggcgaacagattgagcggggcgtcactcgagagcagattcaacgcctgctgccgccaggggccgcgcgtaatgcagtggactgcgcgctctgggactggcaggcgcgcagcgcgggtaaaagcatctcgcagctgttaggcgtgacgctgcccaagcgggtggttacggcgcaaacggtggtgatcggcacccccgagcagatggcggccagcgcgtcggccctgtgggagaaaggtgccacgctgctgaaagtgaagcttgatgaccatctgattagcgagcggttaattgccattcgcgaggcggttccgcaggcaacgctcatcgtcgatgccaatgaagcctggcgcagcgacggtctggccgagcgctgtcagctgctggcggacgtcggcgtcgcgatgctggagcaaccccttccggctggggccgatgaagcgctgacgaattttatccatccgctgcctatttgcgctgatgagagctgccatactcgcgatagcctggcggcgctgcgcggccgctatgaaatggttaatatcaagctggataagaccggtggtctgactgaagcgctgctgctggcggaggaggcagaacgcctggggtttgcacggatgctgggctgtatgctgtgtacgtcgagagcgattagcgcggcgctaccgctggcgccgctggcccgttttgccgatcttgatggtccaacatggctggccgtggatgtcgagccggcgctgcgcttcagcaccggggtgcttcatctctga

SEQ ID NO: 177059 - DNA, 507 bp, Klebsiella oxytoca
atgtcacaaaccgtgcatttccagggcaaccccgtttctgttcaaggcaccattccgcaggcaggcgctaaagcgcagccgtttacgctggtggccaaagatctctctgacgtcgcgctgagccagtttgcgggctcccgtaaagtgctgaacattttcccaagcatcgataccggcgtttgcgcggcatcggtacgtaaattcaaccaactggcgtcagaactgaacaacaccgtagtgctgtgcatttccgccgacctgccgttcgcccagtcacgcttctgcggcgctgaaggcctgaacaacgtcgtgactctgtccactctgcgcggtgcgcagttcctggccgactacggcgtagcgatctccgcgggcccgctggccggtctggcagcgcgtgctgtggtcgtgattgatgaaaacgaccaggtggtatacagccagctggtgaatgaaatcaccgaagagccggactacgacgcagccctggccgcgctgaaagcgtaa

SEQ ID NO: 177060 - DNA, 1056 bp, Klebsiella oxytoca
atgtggatctggcgtagtcgtttttttcagtggatgaaactgctggtgctctccagcgcgatctcttttgcgctgttctggtttcacctcccggccgcgctgctgctggggccgatgattgccggcatttgcctgagccttcgcggcgcggaaatccgcgttccccgacccttttttattgccgctcagatgattatcggctgcatgatcgcccgtagcctgacgccctcgattttcggtgttctgctggcaaactgggcgctggtgctgctgattctcttctccacgctcgccatcagcgcgctggcgggatggctgctggtgcgctatagcgcgctacccggcgccaccggtgcgtggggaagttcgccgggcggcgcttcggcgatggttattatggcccaggagtacggcgccgacgttcgactggtggcgctgatgcagtatttgcgcgtactttttgttgccggcgccgcggcgctggtggttcgcgttgcgctcggcggcgaagcccaggagatgactcagcaggtcgcctggtttcccccgataagctggcagctaccgcttacgctgctggtgacggcggccgcgggatggctggggctgcgtctgcgctttccgtccggtgcgatgcttttcccgatgctgatcggcgcgctggtgcagggagaaggctggctgcagcttgaactccctgagtggctgctggcgctggcttatgccgccgttggctggagcgttggtctaaagtttaataaacagatcttcctgctggcgttaaaaaccctgccgcagatcctggcatcgattatcggcctgattctgctatgtgcgctgatggcttatggactgacgcaggttttaccgctggactttatgaccgcctatctggcgaccagcccgggcgggctggacacggtagcgattatcgctgccggcacgcgggcggatatgtcttttattatggcgatgcagacgttgcgcctgttcactatcttgctgaccggcccggcgattgcgcgctttatctcccgctatgcgacgcgggaataa

SEQ ID NO: 177061 - DNA, 1542 bp, Klebsiella oxytoca
atgcgtcttgaagtcttttgtgaagaccgtcttggtctgactcgtgaattgctcgatttactggtgctgcgcggtatcgacctgcggggtatcgacattgaccctattggccgaatttatctcaatttcgccgagctggagttcgctagcttcagcagtctgatggcggaaattcgtcgtatcgccggcgtcaccgacgtgcgcaccgtggcgtggatgccgtcagaacgtgaacatctggcgctcagcgcgctgctggtggcgatgccggagcctgtgctctctctcgacaccaaaggaaaagtcgaactggctaacccggccagctgtcagctgtttggccagagccaggagaagctgcgcagccatccggtcgcacagctgattaccgattttaacgtccagcgctggctggaaaatagtccgcaggagtcccacgccgagcacgtggtggttaacgggcagaacttcctgctggagatcaccccggtttatctcgaaggcgaacacggcgagaaggtgctgaccggcgcggtagcgatgctgcgttcaacggtccgtatggggcgccagctgcaaacgatgaccattcaggacaccagcgccttcagccagatcctcgccgtaggcccgaaaatgcgccacgtcgtcgagcaggctcgcaagctggctatgctcagcgcgccgctgctgatcgtcggcgataccggtactggtaaagatttgctcgcccacgcctgccacctcgccagcccgcgagcggggaaaccttacctggccctgaactgcggctccattccggaggacgcggtagagagcgagctgtttggcgacgctatccagggcaaaaaggggttcttcgagcaggctaacggcggttcggttctgctggatgaaattggcgaaatgtcgccgcgaatgcagactaagctgctgcgcttcctcaacgatggaaccttccgccgggtcggggaagatcatgaagtccacgtagatgtacgggtgatctgcgcgacgcagaaaaacctggtggagctggtgcaaaaagggttgttccgcgaggatctctattatcgtcttaacgtgctgacgctctatctaccgccgctgcgcgattgtccgcaggacatcatgccgctgaccgaactgtttgtggcgcgtttcgccgatgagcagggtatcccgcggccgaaactttctgccgatttgaacagcgtattgacgcgctatagctggccaggcaacgtgcgccagctcaaaaacgcgatttaccgtgccctgactcagctggacggttttgaactgcgccctcaggatatcctgctgccggatcacgacgtctcgtcattagcggttggcgaagaagcgatggaaggctcgctggatgatatcacgcgccgtttcgagcgctcggtgcttacccagctttatcgtagcttccccagcacgcgtaaactggccaggcggcttggcgtctcgcataccgccatcgccaataaacttcgcgagtacggcctgagccagaaaaaaggcgacgagtaa

SEQ ID NO: 177062 - DNA, 1062 bp, Klebsiella oxytoca
atgaccgaacccttaaaaccgcgtattgatttcgacggcccgctggaggtggaaaaggcgcaaattctgaaatccgctcgcgcttttgacggcgcggatgcggagaagttcgcccctgcgcgccttgacgtgccggaagaagaagagggggcggcggaagcggtagtggagtcggtgctgcggcctaagcgcagcctgtggcgaaagatggtcagcgccgggctggctatttttggcgtcagcgtcgtagcgcagggcgtgcagtggacgatgaccgcctggcaaacgcaagactggatcgccctcggcggctgcgcagccggcgcgctgattgtcggggcgggcgtcggctcggtagcaaccgaatggcgccgtctgtggcggttacgccagcgcgcgcacgagcgcgatgaggcgcgggacctgatgcatagtcatgcggtcggcaaagggcgtgccttttgcgaaaagctggcccggcaggcgggtctcgatcaatcgcatccggcgctgcagcgctggtatgcagcgatccacgaaacgcaaaacgatcgtgaagtggtaagcctgtacgcgcagatcgtgcagccggtgctggaggcgcaggcgcggcgtgagattagccgctcggcggcggaatcgacgctgatgattgccgtcagtcccctggcgctggtggatatggcgtttatcgcctggcgtaatttacgcctcatcaaccgcatcgccactctgtacggtattgagctcggctactacagccgcctgcgcctgttccgtctggtgctgctgaatatcgcttttgccggcgccagcgagctggtgcgggaagtcgggatggactggatgtcgcaggatctcgcggccaggctatcggcgcgcgcggcgcaggggattggcgccgggctgttgaccgcgcggctgggtatcaaggcgatggagctctgccgcccgctgccgtggatcgccgatgataaaccgcggctgggggacttccgccgcgagctgatcggccagctaaaagagacgttgcaaaagagcaaaagcggcgcggaaaaataa

SEQ ID NO: 177063 - DNA, 1398 bp, Klebsiella oxytoca
atgaagcgactcaaaacagaatttaatgcgctggtgaatcgtggggttgaccggcatctccgtctggccgtcaccggtcttagccgtagcggcaagaccgcgtttattaccgcactggtcaatcagctactgaatatccacgccggggcacggctgccgctgcttagcgcggccagagaagaacgcctgctgggcgtcaagcgcgtcccgcagcgggattttggcattccgcgttttacctatgacgaagggctggcccagctctatggacaacctccggtctggccgacgcccacccgcggcgtcagcgaaatccgcctcgctctgcgctatcgctctaacgattcgctgctgcgccattttaaagagacttcgacgctctatctggagattgtcgattatcccggcgagtggctgctggatctgccgatgctggcccaggattacctgacctggtcacgacagatgaccggactgctgcaggggcagagggcggcgtggtcggcgcgctggcggcagctttgcgaagggctggatccgctggcgcccgccgatgaaacccgtctggcggagatcgccgcggcgtggaccgattatctgcacagctgtaagcgcgaagggatgcattttattcagcccgggcgctttgtgctgcccggcgaaatggccggcgcgccggcgctgcagttcttcccctggccggacgttgatgccgccggtgaggctaagctggcgcaggcggacaaacagaccaatgccggaatgctgcgcgagcgttttaaatactactgcgagaaagtggtgaaaggcttctacaaagatcattttctccgcttcgaccggcagattgtgctggtggactgcctgcagccgcttaacagcgggcctcaggcgtttaacgacatgcgtctcgcgctgacgcagctgatgcaaagcttccactatggccagcgcacgctgtttcgtcgtctgttctcaccggttatcgataagctgctgttcgccgcgaccaaagccgatcacgtcaccgtcgatcagcacagcaatatggtatcgctgttgcagcagctgattcaggatgcctggcagaacgcggcgtttgaaggcatcagcatggattgcctgggtctggcgtcgattcaggcgacgcagagcgggcttattgaggtgaacggggagaagatccctgcgctgcgggggcatcggctaagcgacggacagccgctgaccgtctatcccggggaagtgcccgcgcgcctgccgggtcaggcattctgggagctgcaggggtttcagtttgaaaacttccgcccgcaagtgatggatgttgataaaccgctgccgcatattcgcctcgacgcggcgctggaatttttgatcggagataaattgcgatga

SEQ ID NO: 177064 - DNA, 315 bp, Klebsiella oxytoca
atgcgaaaattgtttctgggtttagcgctggcgatggctttacccgccttcgcggcggagcactggattgacgtccgcgttccgcagcagtatcaaaaagaacacgttaacggcgcggtgaacataccgctggcggatttaaaatcgcggattgcggctgaagtgccggataaaaacgataccattcacgtctattgtaacgttggccgacagtcgggccaggctcagcagctgctgagcgaaatgggctacacgcaggtggtgaatgccggcggcctcagtcaaatagcgatgccgaaaagcgccagccactaa

SEQ ID NO: 177065 - DNA, 231 bp, Klebsiella oxytoca
atgaacatgaaatggcagcaggccgggcaaaaagttaaaccgggtctgaaaatcgcaggcaagctggtgttgctcaccgcgctgcgctacggcccggcgggcgtcgctggctgggcggtaaaatccgtcgcgcgtcggccgctgaaaatgctgctgatgcttgttctggaaccgatgctcagccgggcggcgcagcggttttctaaacgtcgtggatggcgtatgttatga

SEQ ID NO: 177066 - DNA, 360 bp, Klebsiella oxytoca
atgggcggactggatctgagtaaaaaactgtggcgcattccacagcagggcatggtcaaaggcgtttgcgccggtatcgcgcagtacctggacgtgccggttaagctggtgcgcctgattaccgtactggcaatgatttttggcctgttcctgtttgtggtggtggcctacatcattctctcgtttgcgctggatcctatgccggaaagcgagctgtatggtgaaaaaacgccgagcagcggagaactgctggctgctgcggataaggagctggctgcaggggagcgccgtctgcgtgaaatggaacgctacgtcacctctgacaccttttcgctacgcagtcgttttcgccagctataa

SEQ ID NO: 177067 - DNA, 225 bp, Klebsiella oxytoca
atgagcatgctttttctcgccatccctttgacgttgtttgtgctgtttgttttgccggtctggctttggctgcattacaacaaccgcaccgccagcggcagtttatcgcaaaacgagcagcagcgcctgctgcagctgaccgatgacgcaaagcgcatgcgcgagcgtattcaggcgctggaagccattcttgacgctgagcatccgaactggagagaaaaataa

SEQ ID NO: 177068 - DNA, 669 bp, Klebsiella oxytoca
atgggtattttttctcgttttgccgacatcgtgaacgccaacattaactctctgctggagaaagcggaagatccgcagaagctggttcgactgatgatccaggagatggaagacacgttggttgaagtgcgttcgacctcggcgcgggcgttggctgaaaagaaacagctgacccgtcgtattgaacaggccgttgcgcagcaggcggaatggcaggagaaagccgaactggcgttgcgtaaagagaaagaggatctggctcgtgcggcgctgatcgagaagcagaagctgaccgacctgatcgctagcctggaaaatgaagcgcagctggttgatgaaacgctggcgcggatgaaaaaagagattggcgagctggagaataaactgagcgaaacgcgcgcccgtcagcaggcgttgatgctgcgccatcaggccgcaagttcctcccgcgacgttcgtcgtcagctggacagcggcaagattgatgaggcgatggcgcgctttgaatcgtttgaacgccgtatcgatcatatggaagccgaagccgaaagccaccgcttcggtaaagataaatcgctggatcagcagttcgccgatctgaaagcggacgatgaaatcagcgagcagctggcggcgttgaaagccaaaatgaatcaaaataaccagtaa

SEQ ID NO: 177069 - DNA, 975 bp, Klebsiella oxytoca
atggcggaatacaaggacaacctgctcggcgaggccaacagcttcctggaagtgctggaacaggtctcaagactggcgccgctcgataaaccggtgctggtgattggcgaacgcggaaccggtaaggagctgatcgccagccgcctgcacttcctctcttcccgctggcaggggccgtttatctcgctgaactgcgctgcgctgaatgaaaacctgctcgattccgagctattcggtcatgaagccggggcatttacgggggccagtaaacgccatccggggcgcttcgagcgcgccgacggcggtaccctgtttcttgatgagctggccaccgcgccgatgctggtgcaggaaaagctgctgcgcgtgattgagtatggcgaactcgagcgcgtcggcggcagccagccgctgcaggttaacgtccgcctggtgtgcgcgaccaacgccgatctgccacaaatggtggaagatgggctctttcgcgctgacctactcgacaggttggctttcgatgtggtgcagttgccgccgctgcgcgaacgccagagcgatattatgctgctcgccacccagtttgctatccagatgtgccgcgaactcggactgccgttgtttcccggctttagcgaacgcgccgccgtgacgctgcagaactaccgctggccggggaatatccgtgaattaaaaaacgtggtggaacggtcggtttaccgtcacggcagcagtgaaagcgagctggataatattattattaaccccttccgccagcagcaaactgccccgcccgctgcagcagaaaaggcgcccggcaccacgttgccgctcgatttgcgcgctttccagcaggagcaagaaaaaagcctgctcgagagaagtctcgaacaggcaaagtacaatcaaaagcaggcggccgagctactggggctaacctatcaccagctgcgggcgctgctgaaaaagcatcagctttga

SEQ ID NO: 177070 - DNA, 1392 bp, Klebsiella oxytoca
atgagttctgtatcgctaagcgaagcgcagttcgtcggcaccgatcgcctgctggcgggtattgtattgagcgttctgaccttctggctgtttgcccagtcggtgattaacgtggttccggcaatgaaaagcagccttgatatttcgctggaaaccctgaccctggcggtgagcctgagcgccttgttcagcggctgctttgtggtcgccagcggcgggctggcggataaattcggccgcatgcgcatgaccaccctgggcctgattctcagcatagccggcagcgcaatgctggtgctctcccagggacccgcgctgttcctggccggacgcgttttacaggggctatcggccgcctgcatcatgccggcgacgctggcattaataaaaacctggtatgaaggtaaagcgcgccagcgggcggtcagcttctgggtcatcggctcctggggcggcagcgggctgtgctcgtttgtcggcggggcgattgctaccggactgggctggcgctggatctttgttttctccatcgcggtagcgctggcggcgctgtttttactgcgcggtacgccggagagccgcagcgccagcgcgcagcagcataagctggacattagcggcctgctcagcctgatccttgcgctggtgctgttaaatctgtttatcagtaaaggccacggctggggctggagcagcggaacctcgctgacgatgctgggcggcgcgctggcggcggggttattttttatccgcagcggtcggcgtaagggcgacgcggcgttgattgattttgcgctgtttcgtaaccgggcctacagcgccgcggtgctgtcgaattttctgctcaacggcgccatcggtaccatgatgattgccagcatctggctccagcaggggcaccatctaagcccgctggagagcggaatgatgacgctcggctacctggtcaccgtgctggcgatgatccgggtgggcgaaaagctgctgcaacgctacggcgcgcgcttgccgatgatcgccggcccggtttttaccgcgcttggcatcctgcttatttcctgcacctttctcgataaatcgacctatatcgtcacggtctttttcagcaacgtgctgtttggctttggactgggctgctacgctactccgtcaacggacaccgcggtggtcaacgctcccgagaataaggtcggggtggcgtcgggaatttataagatgggtagttcgctcggcggggcgatgggtatagcggtgacagcgtcactttttgcgctgtttttaccgctgggaatggccagcgcggcgcagtatgcgctgtggtttaacgccgcgctctgtctcggttcaatgacgctgagcgcgctgctgctgccgcgcatagctcaaagctga

SEQ ID NO: 177071 - DNA, 1170 bp, Klebsiella oxytoca
atgacacacccgattattgaggcattacaggttaatgaggcgcagtttgtcgctcttcgtcgccgtttccaccagcagccggaaatcggttttgaagagcataaaaccagcgaagaggtggcccgactgctcggcgagtggggctatcaggtccatcgtggtctggcgggaaccggcgtggtcggtaccttacgcgcaggcgacggtcaaaaacggttgggacttcgggcggatatggacgcgctgccgatgcatgagatgagcggcaaagcgtgggccagccagatagagggacgttttcatggctgcggccacgacggtcataccaccacgctattgtacgccgcggaatatctggcgcgcacgcggcagtttaacggcacgctgcagcttatttttcagccggctgaggaactgctctacggcggccgggttatgctcgaagacggcctgttcgaccagttcccctgcgatgccatttttggcctgcataatatgccgggacaaccgttaggcaaaatcggtctgcgcgacggggcgatgatggcctcatccgacactctccatattgaagtcaaaggggttggcggacacggcgcgctgccggagcataccgtcgacgctacgctggtggcatgccatatcaccctggcgctgcaatccattgtctcccgcaatatcacgccgtttgagccggctgtcgtgaccgtgggcagcatccaggccgggcatgcgccgaatattatcaatgacaaggccttaatgaagctcactgtgcgcaccttaaacgaacaggttcgcgagaccgtactgcagcgcattcacgatattgccgtcgctcaggccgagagctttaacgccagcgccaccattacccacgttaacggcagcccggttttaagaaacgatccggcagccaatgagatggttcggaaggtggcggcttcgctatttggcgaggacctggtcggcgaagtgaagccgttcatgggcagcgaagattttgcttttatgctcgagcgtaatccgaacggctgctatttcaccatcggagcgggggatgaagcggatcgctgtatggtgcataacccgggatatgacttcaacgatgccctgttgctaaaaggtgccgcgctgtggtgcgccctgacggaacattatttgcgttaa

SEQ ID NO: 177072 - DNA, 2313 bp, Klebsiella oxytoca
gtggatcatcattcaggcgactttcaggttacggttcgcgatatccgccagttgagccagcaggaaaacgagacgctgacgctaatatggctgcttgagggcagcgtcgaactccgcgatggcgagtcgggccggaacctgcaggctgatgaactggcgatagtgaatcggcatcgccgctggagcctgcacagcaagacggcgaacgtcgtgatggcgctgtcgctgaacgctggatggctgacccgcctcgacggcgatttttttgcctctgcctaccagagcagcaacgaaacccgcgatgccgaagataccctgcgctacctgatgcgccagctgctggtcctcggtctggtcaatccgcaggcccactaccggctggaggccaaccgctggcttagcgaaattgctcttctgctggcgtcacgcttcagccgtcccctcaccgccctggcgcctcgcggagccgaacgctggagtcagcgaataaatcgggtagtggcgcgaatcgacgccaactatcaacggcgcctgtcgctgcaggagatagccgccgccgaatttgtttctgaggcctggctatcgcgtctgttccgcaaagaggtgggcgtcagctttatgcaatacatcaccgggcttcgcctgcgtaaagctgctgagcagttgacgatgacgcgtaaatcgatacagcagatcgctcagcaacagggctttgccagcagccgggtgatgagcgacctgtttaaacgcgaacacggtctgacgccgcgccagtttcgccagcagcatccgcaaacggcggttgaatcccctcgtccacgcgttcaacgggctgagctgtggcaaccagtgtctatagacaggctatattcccggctcaatgcgccgcagatcaatgggttggatagcccgccgctgcggctcaatccccagcaaacccgtcatcttgatgtgcgccagctaccggcgcgcggtacgccgctgcggcacacgcgcatcgtcgttaccgttcgggaactggatgacctgctgcgcgaggatgtccgtcaggagctcgaagaactgcacaactcgctgccgatattcgccatcgacgttcacgatccgtttctcagtagccgcctgttcggtaccggctgggacgatgcgcagctggccgggtatgcgtgctggtataacctgcagcgcatttttagctggctggcgtcgatgggctgggcggtaatactgcataccggtatcaccactcgtggcgatctgctacagcgttttctgcacctgtccgccaaccattttccaccggcaaccctcgccagctggcgttttgtctggcactggtccccgcaggccagcgatgaggcgcgccagcatgcctggcggcaacaaaaaacgatcctccaggcgctttcgccgcagtcggcgctggggatctggcaccgcttttcacaaaacgtggaggacgatcccctcttctgttcaccgctgctggccgaggcggattttcttgcctgccaggcagatgcgaatgaactgctggatctggcgcagattgatagccagaggctggccgccagcgagaattacccggtgcttaaaatgcgcaagctccacagcgcgctgcgccagcggcagctgctgttaccgctttggctactgtcgtggaataccctgaccggcgatactcgcgacaccaacggccgtttctttcgcggcgcgctactgatggataatctgctggggctggcagaccaggtgtggctggcggggttctggctgaattccgggctgcaaggggaagccggcgctaacggcaagcttgatacctccagcctggcgctgcactatctccacggtttgccgcgaccggtgtattgggtcttgtggctgtggcgcaggctgcggggcgaagtggtgattaacgaaaaaaatttgctgctgctgcgcgataacggccattaccagttgctgctgcgcaatacggtggttttcaatccctggctttccagcgaggaggcgtttatccagcgctttagtcagccatggagcgtgcgcctgctcggccttgatggacgctggcgcatcaaacatcatctcttcgatcggcatcatggcgcgctctttccgcttttcgaggcttttcgcagccagagcggcccggatgaagaagagtatcgctggctgatgcaccaggcgcgcccggccctgcgcgtgagcgaagaaacgcccgcaagcgatcgatggcagctcgtcgattcgctggagagcaacgcgctggcgctgtatgaatttacgcctcttaatgacatgaagtga

SEQ ID NO: 177073 - DNA, 285 bp, Klebsiella oxytoca
atgattccggttaattcctcaacgcttggccgctatgccgcgcacgtcagcctggttcataccatgaaaagccacaaagccccggcgctcacggtcatgatgatcttttcagacctgcttattcgttcaaccgaagattcctatcgtctgcaaggctgggaaatcacgccgcaaaaaagcggcctggtgctgcgtacgtatgtcgcgaaccatcctgatggcggaaagcttgaaatcaccccaaaagactatattgcacgttataaccggctcctgccgctgtag

SEQ ID NO: 177074 - DNA, 1644 bp, Klebsiella oxytoca
atgcgcctgaaattgtcttctctcctggcagcggtgtctatgctgtacgggcaagcttttgccgcgcccgccctgcctgctaacgcggatattcgcgatagcggttttgtttattgcgtaagcggccaggttaacaccttcaacccacaaaaggtcagcagcggtctgattgtcgatactcttgccgcccagctgtacgaccgactgcttgatgttgacccctatacctaccgcctggtcccggaactggcagaaagctgggaggtgctggataacggcgccacctaccgcttccacctgcgcaataacgtgccgttccagaccaccgcctggtttaagccgacccgcaatttcaacgctgacgacgtgatttttacctttggccggatttttaaccgcgaccatccgtggcacaacgtgaacggcagcagcttcccctatttcgatagcttacagttcgccgacagcgtcgaaagcgtgcgtaagctggataaccacaccgttgaatttcgcctcaaacgaccggatgcttccttcctgtggcacctggctacccactacgcctcggtgatgtcggcggagtatgccgcaaagctggctcagagcgatcgtcaggagctgatcgatcgtcaacctgttggcaccggcccgttccagcttgaggaatatcgcagcgggcaatatattcgtctgcagcgccacccggcctactggcgaggtaaaccgctgatgccgcaggtggtggtcgatctgggctccggcggtaccggacgactgtcaaaactgctgaccggcgagtgtgatgtgctggcctggccggctgcgagccagctctctattctgcgcgacgacccgcgccttcgcctgaccctgcgcccgggaatgaacatcgcctggctggcgttcaataccgctaagccgccgctcgataatccggaggtccgtcacgcgctggcgttggccatcaataatcagcgtctgatgcagtcaatctattacggaacggcggaaaccgcagcttcaatgctgcctcgcgcctcctgggcctatgataacgacgccagaatcaccgaatataatcctgcggaagctcgcgccaggcttaaagcgctggggctggaacagctgacgcttaaactatgggtcccgaccagttcgcaggcctggaaccccagccccctgaaaaccgccgagcttatccaggcggatatggcgcaaattggcgtgaaggtgatcattgtgccggtcgaagggcgttttcaggaagccagattaatggatatgagtcatgatctgacgctttccggctgggcaacggacagtaacgatccggacagctttttccgtccgctattgagctgcgcggcgattgcctcacaaaccaactatgctcactggtgtcatcgtgaattcgacgacgtgctgcaaaaagcgctgacatcccagcagctggcttcgcgcattgaagcttataaagaggcccaacgcattcttgctgatgaactgccggtactgccgctggcttcctccctgcgtcttcaggcctatcgttacgacatgaaaggcctggtgctgagtccgtttggcaacgcctcttttgccggggtctcgcgggaaaaagaagacgaggtgcaaaaaccatga

SEQ ID NO: 177075 - DNA, 966 bp, Klebsiella oxytoca
atgattatttttaccctgcgtcgcctgctgctgctgctgattacgctctttctgctgacgtttgtcggttttagcctgagctattttacgcctcacgcgccgctgcagggcgcctcgctgtggaacgcctggtggttctggtttgagggcgtgctgcactgggattttggcgtctccagcatcaacgggcagccgatctccgagcagcttaaagaggtattccctgccacgatggagctgtgtatcctcgccttcggcttcgcgctggtgatcgggatccccgtcggcatgctggcggggattatgcgcaacaaatggcaagataccctgattagcgccctggcgctgctgggcttctcgatccccgtattctggctggcgttgctgttgaccctgtttttctccctcaccctgggctggttcccggtctccgggcgcttcgacctgctgtacgaagtgaaatcggtcaccggctttgcgctgatcgacgcgtggctttccgattcgccgtggcgtcatgaaatgatcgtcagcgcggcgcgccatatggtgctgccggtgctgaccctcgcagtggcgccgacgacggaagtgatccgtctgatgcgcatcagcaccagcgaagtgtacgacaccaactatgtcaaagctgcggccacccgtggcgtatcgcggcggacaattttacaccgtcacgtactgcataacgccctgccgccggtgattccgcgcctgggtctgcagttttccactatgctaacgctggcgatgattaccgaaatggtctttagctggccgggactgggccgctggctcattaacgccattcgccaacaggactacgccgcaatctcagcgggcgtgatggtcatcggcgcgctggtgattattgtgaacgtgatatccgatattttgggggctatggctaacccactgaaacataaggaatggtatgccctacgatag

SEQ ID NO: 177076 - DNA, 678 bp, Klebsiella oxytoca
atgtgcggacgttttgcccaatcacagacacgcgaagaatacttggcttatctttcagaagaagccgagcgcgacatcgcatacgaccctgagccgattgggcgttacaacgtggcgccggggactaaagttctactcctgagcgaacgagacgaacagctacacctcgatccggttcactggggttacgcacccgggtggtgggataaaccacccttgattaatgccagggttgagaccgcagcagccaacagcagaatgtttaaacctctgtggcagcacggtcgtgcgatatgctttgccgatggctggtttgaatggaagcgcgtaggagacaagaagcagccttactttattcatcgcgccgacagccagccaatcttcatggcggcgatcggcagcgtgccttttgagcgcggcgacgaagccgaagggtttttgatagtgaccgcggcagcagatcaagggctcgtagatattcacgaccgccggccgctggtcatgacgccggaagcagctcgcgaatggatgcggcaggatatagggggaaaggaagcctctgatatcgccgccgatggctcagtgtcagcagatcattttatatggcatcctgtttcccgtgaagtgggcaatgtgagaaaccaatctagcgaactgataaatagcatctctatttga

SEQ ID NO: 177077 - DNA, 642 bp, Klebsiella oxytoca
atgcaagaagaaaaactaaaaaaagccattgaggaatgggatgaggtaatacacaataactttcatagtggcatgataaatggagctagtttggccacaagcgagataacatctattttagataagtttagtatgtggttattggctggtgttggcggtacggctgcattgattattgcgaatattgataaggtaactccatacactggcataggcggatttaaatatattgttttatttttgtgcgcgtctgcgatttttggttttttagcaaaatacttttctatagtggtgcattcgtcagttgcagttagcattcgtatggctcagatttctgcagaagagttaaagaaataccatgagcactgtaaggaacgagatgaaatagggagtgaaataaattatgttagtgataaaaatgtagatgtcaatgaattctataatgattacatgaacttatatcctactagtttcttgagaaaaaaaataaaaaagacatttgataagataggcaaagacaagcttcatggtaatcgaagtgctgtgacatgcgtagtttatcaaagtttatgtttagtgttgcaagcactattttatgtggcatttcttatatctgtcgccttcttaataagcatcaaatag

SEQ ID NO: 177078 - DNA, 1266 bp, Klebsiella oxytoca
atgtttgcactttgcgatgtgaactcattttacgcatcgtgcgagaccgtatttcgtcctgacctgaaggggcggccggtggtcgtcctgtcaaacaacgacggctgcgtgatcgcccgttcgcaagaggcgaagcccttcgtcaaaatgggtgagccttatttcaagcaaaaggacatgtttcgccggcacggtattatcgcgtttagcagcaactatgagctttatgccgatatgtccaaccgagtgatgacaacgctggaggaactatctccacgctgcgaaatttacagtattgatgaggcattttgcgatctgactggtgttcgtaactgtcgcgatcttaccgattttggcagggaaattcgcgagacggttctgcgcaggacgcacctcacggtcggcgtcggcatagcccagactaaaaccctggcgaagctggccaatcatgctgcgaaacagtggcagcgacagaccggaggagtggtggatctgtctaatctggaaaggcagaggaagttgatggctttgcttccggtggatgaggtctggggagtcgggcgccgcatcagtaaaaaactggaggcaatgggcattaaaacggttcttcaactggcggataccgatatccgttttatccggaagcattttaatgtggttctggagcgaactgtgcgggagctgcgaggcgaaacatgcctcgggctggaggagttcgcaccggtaaagcaggaaatcgtgtgcagccgttcattcggcggtcgtatcacggaataccatgagatgaggcaggctatatgcagctatgcgtcccgcgcagcggagaaactacgtggcgagcatcaatattgtcggttcatctcagcgttcgtcaaaaccagcccctttgcgcttaacgagccatactacggaaacagcgcatcagtaaagctgctaactccgacccaggacagtcgggacataattaccgcggcgacgaaatgcctcgatgtaatctggcgagacgggcatcgctatcagaaagcaggcgtgatgctgggggatttctacagtcagggcgtggcccagctcaacctcttcgacgacaacgcaccacggaagaatagcgagaaactgatggaagtcctcgaccatctcaatgcgaaaggcggaagaggaactctgtattttgcagggcaggggatccagactgcctggcagatgaaacgggaaatgctttcgccgaggtatacaactcgattttcagatattctttcagtacgataa

SEQ ID NO: 177079 - DNA, 420 bp, Klebsiella oxytoca
atgcagttttacacacccgttgagttacgtgagatcatgctgatcccgttgtacagtgaccttgtgcaatgtggttttccaagccccgcacaggattacgttgagcaacgtatagacctgaatgagttactaatcaatcaccccagtgcgacgtattttgtcaaagccgccggcgacagcatgaaagacgccggcataggggaaggggatcttctggttgtggatagctcaaggacagcagttcatggcgatatcgttattgctgctgtggatggggaatttaccgttaagaagctgcagctgcatccgcgggttcagcttaacccaatgaaccctgcatattcgccgatagtcgtgggtagcgaggatactctcgatgtgttcggggtcgtaacttacatcatcaaatcggctggctga

SEQ ID NO: 177080 - DNA, 555 bp, Klebsiella oxytoca
atgaccaacagtttgcgtcgctataaagagttattcccgaaaacgggtcaacgggtaatgatcgacgccagcagcgtagtgatcggggacgtcagaatagctgatgatgtcagtatctggccgctggtcgcgattcgcggtgatgtgaattatgtagaaataggcgctcgaactaacatccaggacggtagtgtcttacatgttactcataagtcttcatcaaacccgcgaggcaatccacttatcattggcgatgatgtcactgtcggccacaaggtcatgctacacggctgcaccatcggtaaccgtgtgctggtcggcatgggttcgattctgttggatggcgtgattgtagaagacgatataatgattggcgcaggcagcctggtaccacagaataaacgccttgagagtggctacctttactttggcaaccctgtaaagcagatacgccccctgacggaggcggaaatcgccggactcatatattcagcgaataactatgtaaagtggaagggtgactacctgactcaggaaaaccagatccaaccttga

SEQ ID NO: 177081 - DNA, 258 bp, Klebsiella oxytoca
atgaaccagtctattcagtttcctgacagggaagtgtgggatgaggcgcaccaatgtatcgcttttccggtattagtaaacggtatgcagctaacctgcgccttaacgtcatcggtgctcaagacgcgttttggtggggaagaacctacgcaatggctggccgcatttcgtgaacatcgctgggatctggaagatgaagctcaggttctgattctcgaccagcaggaagatgctcaaggttggatctggttttcctga

SEQ ID NO: 177082 - DNA, 819 bp, Klebsiella oxytoca
atggaaacttatgccgtcttcggacaccccatcgcccatagtaaatcgccgtctatccatcgcctttttgcacagcagctgcaaattgcgcatccctatggacgtattctggctccgctcgatgattttgttaccacgcttgacgccttctttaatgagggtggcaagggcgctaacatcaccgtaccttttaaagaagaggcctttgcgcgagctgacgagttaaccgaacgtgcagcgctggccggcgcagttaatacgcttaaacggctggaagacggccggctgcttggcgacaatacggatggcatcgggctcttaagcgatctggaacggcttgagtttatcaaacctggcttccgggtattgcttattggcgcgggtggcgcttcacgtggggtattgctgccccttttatctctggattgcgccgttactattgtcaatcgtaccttttctcgcgctcatgaactggctacgctgtttgctcatactggcagcgtccgtgctttggatatagaagcatcaggcaatgaggaatttgatctcatcattaatgcgacatccagcggcattgacggggacgttcctgcaattcctgtgagtttaattaaccctcatgtctgctgctatgacatgttttaccagaaaggtagtacgccttttttatccttatgccagcaacacggtgcgacaaaatgcgctgatgggttaggaatgctggtggcgcaggctgctcatgcggtgctgttgtggcacggcattctgccagatataactccagtcattgccgctttacagaaggagctgaatgcatga

SEQ ID NO: 177083 - DNA, 573 bp, Klebsiella oxytoca
gtgaataataacctgccctcagaagccatcgttcgcgctgtagagcttctgaataatcaacatgtcatcgcctatcctacggaagccgtttttggcgtcggttgcgatcccgatagcgaaaaggccgtcatgactctgcttgctcttaaacagcgtccggtcgaaaaaggattgatcctgatcgccgctagctttgaacaactcaagccatacattgactatacgcggcttagcgatgagcagctcgcggctattttttcctgttggcctggtccggtgacgtttgtcttccccgcctgtgcttcaacgccgcgttggttgactgggcgcttcaattcattggctgtcagagttaccgatcatccgctggtggttgaactgtgcaaggcttacggtaagccgctggtttcaaccagcgcaaatttatcgggccagccaccttgccgcacgaccgaggaagtttatacacagtttggcgctgactttcccgtcattgatggggcaacgggaggacgacaaaatccatctgaaattcgtgatgccttgacgggcgaactcttccgccagggataa

SEQ ID NO: 177084 - DNA, 543 bp, Klebsiella oxytoca
atgaccaaaacagcgctgttttcggtgcgtaaaaacgaaccctgcccgcagtgtggggctgaactggtgatacgctccgggaagcacgggccttttctcggctgttcgcattatcctgactgtgactatgtccgtccccttaaaagccaggcggacggacatatcgtcaaagttctggaggggcaaacgtgtccgtcttgcggttccgtgctggtgctacggcagggacgttttggtatgtttatcgggtgtagtagctaccctgattgtgaacatactgaattgattgataagccagatgaaaccgcaataccctgcccgcaatgcggacaagggcatctggtgcagcgccgttcacgctttggtaaaaacttccattcctgcgatcgttaccccgattgccagttcgtcattaatttcaaaccagtagcgggcgagtgccccgagtgtcattacccgttgctaatcgaaaagaaaacggctcagggcgttaagcgcttttgtgccagcaaacaatgtggaaagccgatatcggcggaataa

SEQ ID NO: 177085 - DNA, 474 bp, Klebsiella oxytoca
atgttcgacgtactcatgtatctgtttgaaacttacatccataatgaagcagaaatgcgcgtggatcaggacaagctgactcgggatcttaccgatgccggttttgaacgagaagatatctataacgccctgatgtggcttgagaaactggctgattatcaggaggggttggttgcgcctatgcagcttgcttccgaccctctctcgctacgagtatatacggacgaggagtgtcagcgtcttgatgcgagttgccgggggttcttactgttccttgagcaaattcaggtgttgaacctcgaaacacgggaaatggtaatagagcgtgcgctggcgctggatacggcggagttcgatctggaggatctcaaatgggtgattctgatggtgctgttcaatattcccggttgcgaaaatgcctaccagcaaatggaagaattactctttgaagtaaatgaaggtatgctgcattaa

SEQ ID NO: 177086 - DNA, 1125 bp, Klebsiella oxytoca
atgacgccgaaggaaatttggatacgtttgatgagagtgagcagcctgtatggcgacagtgctgtcaacgtcgctcgtcagctatgttcatctccgaccttagatcatgagaatttgcgagcctgtggtttgaatctggcgcaatcgaagcactttcttagcgttaaccaatgcgagattgattccactctgcagtggctcgagcagccgagttgctatctactcaccgccgaagatccgctttacccacctcaattgcgggctattgtggattttcccggtgccctttttgtctatggaaatacttcgctacttagtagccggcagctgtcagttatcggaagtcgagcgcattcgtggtatggcgcccgctgggggaaattatttagcgtagctttagcgggttatggcattacgatcactagcggtctggctcttggcatcgatgggatcgcccatcgtggtgcgctggaaggtaagggtaaaacggttgccgttttagggaacgggttacgcgaaatctatcctcgtcgccatcaggcgctggcggagcagataattcgcaacggtggagccgtaatttctgaatttccactttttactccgcctttgccggggaattttccccggcgtaatcggattatcagcggcctgagcgccggtgtgttagttgttgaagccgcactgaaaagcggttcgctagtgacagttcgttatgctctggagcagggaagggatgtatttgccttgccagggccaattggcagtcctggttcggaaggaccccattggctcattaagcagggagcgattcccgtaacggcgcctgaagacatcattgaatactggcgggatgatctacagtacattgttcccaagccggatggcgcaaataattgcgcgaatctgccttctgtagcattgccatttccagagctcctggctaacgtaggagatgaggtaacacctgttgacgttgtcgctgaacgtgccggccaatctgtgccagtaaccgtagcccagctacttgaactggagttagcaggctggatcgcagctgtacccggcggctatgtccgattaaggagggcaagccatgttcgacgtactcatgtatctgtttga

SEQ ID NO: 177087 - DNA, 510 bp, Klebsiella oxytoca
atgtcagttttgcaagtgttacatattccggacgagcgccttcgcaaagtcgcaaagccggttgaagaagtaaatgcggaaattcagcgtatcgtcgatgatatgttcgagacgatgtacgctgaagaaggtattggtcttgccgcaacgcaggtggatatccatcagcggatcatcgttattgatgtatcggaaaatcgtgatgagcagctggtattaatcaacccggagctgctggaaaagagcggagagaccggcattgaagagggctgtctctctattcctgaacaacgcgctttagtgccgcgtgcagaaaaagtgaaaatccgcgcgctcgatcgcgaaggaaaatcgtttgaactggaagctgacggtctgctggcaatctgtattcagcatgagatggatcatctcgttggtaagctgttcatcgattatctgtctccgctcaagcaacaacgcattcgtcaaaaagttgagaaacttgaccgcttgaatgcccgagcttaa

SEQ ID NO: 177088 - DNA, 948 bp, Klebsiella oxytoca
gtgtcagattcactacgtattatttttgcgggtactcctgattttgcagcgcgtcatcttgacgcgctgctctcctctggacataacgtcgttggcgtgtttacacaaccagaccgtccagcaggccggggtaaaaaactcatgcccagcccggttaaagtactggcgcaggagaaaggcataccggtattccagccagcttcgttacgcccgcaggataatcagcaattagtttctgacctgcatgcagacgtcatggtggtcgtagcctatggtctgcttttgccgaaagcggtgctggatatgccgcgccttggctgcattaatgttcatggttcgctgcttccacgctggcgcggagcggcgccaattcaacgttcgctgtgggctggtgataccgagaccggtgtaacaatcatgcagatggatgtcgggcttgatacgggcgacatgctgtataagcttgcgtgtcccatcaccgcagaagataccagcggaacgttatatgacaaactggctaacctggggccgcaagggcttattgaaacccttaagcagcttgccgcgggtaccgcaaaaccggtcgttcaggatgaagcgctggttacccatgcacaaaaactcagcaaagaagaggcgcgtatcgactggtctctttccgctgctcagttagaacgctgcattcgcgcctttaatccgtggcctatgagctggatagaaattgatggccagccgataaaagtctggcaggcatcggttatcaatacggccacagctgccgtaccggggaccatcattgaagcgacaaaacaggggattcaggtagcaaccaacgacggtattctgaatctactctcgctgcagccggccggtaaaaaagcaatgagcgcccaggatcttttaaactcgcgccgggaatggttcgctcctggcaaccgtctggtctga

SEQ ID NO: 177089 - DNA, 1290 bp, Klebsiella oxytoca
atgaaaaaacaactcaatttacgtagcctggcagcgcaggccgttgaacaggttctcgaacaagggcaatcattaagcaacgttctgccctcactgcagcaaaaagtatccgataaagataaagcgctgcttcaggaactatgctttggcgtgctgcgtacgctttcgcaattagactggctgattaataagctaatgtctcgtccgatgacgggtaagcagcgtatcgttcactacctgattatggtgggcttatatcaactgctctatacgcgtatcccgccgcatgccgcactggcggaaacggttgaaggcgcagtcgctattaaacgtccacagcttaaagggttgattaatggcgtattgcgccagtttcagcgccagcaggaagagctgttgtctgaattttctcgtagcgacattcgcttcttacacccaggctggttattaaaacgcctgcagaaagcgtatccagcgcggtgggaagccatcgtggatgcgaacaaccagcgtccgccaatgtggttgcgcgtgaaccgtctccatcacacgcgcgacagctggctggcattgctggaagaggcgggtatgtcagggtttacgcattccgcttatcctgacgctgtacgcatggaaacaccggtaccagtccatgcactgccagggtttgaagaaggctgggttaccattcaggatgcctccgctcagggttgcgtcacattcctcgcccccaaaaacggcgaacagattctggatatctgcgccgctccgggcggtaaaaccacgcatattctcgaagcggctcccgaagcacaggttctcgccatcgatattgacgagcagcggctctcccgcgtctatgacaacctgaagcgactgggaatgaaggcaaccgtcaaacagggtgatggacgccatccatcacagtggtgcggcgaacaacagttcgatcgtatcctactggatgcgccttgttccgctagcggtgttattcgccgtcacccggatatcaaatggctgcgccgggatcgcgatatcgcagaactggcccagcttcagtcggaaattctggatgccgtatggccgcacctgaaatccggcggaactctggtttacgcgacgtgctccgtattaccagaggagaatagcctgcaaattaaagcttttctgcaacgaacagcggatgcggtactcagcgaaaccggaacgccagagttgccaggtcaacaaaatttgcctggcgctgaagaaggtgacggcttcttttacgctaagctaatcaaaaagtga

SEQ ID NO: 177090 - DNA, 1377 bp, Klebsiella oxytoca
atgaaaattatcatattgggcgcaggacaggtcggcggaactctggcggaaaatctcgtcggagagaacaacgatattactctggtcgacacgaatggcgaccgccttcgtagtcttcaggataaatttgatctccgggtggttcaggggcatggctcgcatccgcgcgtgttacgtgaggccggtgcggatgatgccgacatgctggttgcggtgaccagctccgatgaaaccaatatggtggcctgccaggttgcctattcgctgtttaatacgccaaatcgtattgctcgcatccgttcgccggattatgttcgcgatgccgataaacttttccattcagaagcggttcctatagatcaccttatcgcacctgagcagctggtaattgatagtatttaccggctgatcgagtatccaggcgctttgcaggttgtcaattttgctgaaggaaaggtcagcctggcggtcgttaaagcctattatggcggtcctttggtgggaaatgcgctttcgactatgcgcgaacatatgccgcatattgatacacgcgtagcggccattttccgccacgatcgtcctatcagaccccagggctcaacaattgtagaggccggggatgaggtgttctttatcgccgcttcgcagcacattcgagcagtcatgagcgagcttcagcgtctggaaaagccttataaacgcatcatgctggtcggcggcggaaacattggcgccgggctcgcccataagctggagaaagattacagcgtcaaactcattgaacgtaatcaacagcgtgccgcagagcttgcagaaaagctgcagaataccatcgtcttctacggcgatgcttcagatcaagaattactggctgaagaacatatcgatcaagttgatctttttatcgctgtcaccaacgatgatgaagccaatatcatgtctgccatgctagcgaagcgaatgggcgccaaaaaagtcatggtactgatccagcgacgggcttacgtcgatcttgtccaggggagcgtgatcgacattgcaatatcaccgcagcaggcaaccatatccgcgctgctcagccatgtccgcaaagcggatattgttggtgtttcctcgctgcgccgcggcgtcgctgaggccattgaagcagtggcgcacggagacgaaagcacttcacgggttgttggacgttcgattgatgagattaaacttccgccaggaacaattattggcgcagttgtacgcggtaatgatgtcatgatagcgaataacaatctgcgcattgagcaaggggatcatgtagttatgttcctgactgacaaaaaattcatctctgatgtggagaggctattccagccaagccctttctttctgtag

SEQ ID NO: 177091 - DNA, 414 bp, Klebsiella oxytoca
atgagttttttaaaagaatttcgcgaatttgcgatgcgcgggaacgtggttgatctggcagtcggtgtcatcattggtgcagcatttggtaaaatcgtatcgtcgttggttgccgatattattatgccgccgctaggcttgctcatcggcggaattgactttaaacagtttgctgtaacgctgcgagatgcccagggcgacattcccgctgtcgtaatgcactatggcgtattcattcagaatgtattcgactttatcatcgtggcttttgctatttttatggcaatcaaactgatgaacaaattgaacaggaaaaaagaagaggcgccggcagcaccacctgctccgactaaagaagaagtcctgcttagcgaaattcgtgacctgttgaaagaacagaacaatcgctcttaa

SEQ ID NO: 177092 - DNA, 207 bp, Klebsiella oxytoca
atgagccgctatcagcacactaaagggcagataaaagataatgccatcgaggccttgctgcatgacccgttattcaggcaacgagtggaaaagaataagaaggggaaaggcagttatcaaagaaaagcaaaacatgcggggcgggatggtcgggaggccagtggcaagaaagtgattacttttttaccactggccttctggttttaa

SEQ ID NO: 177093 - DNA, 426 bp, Klebsiella oxytoca
atgtaccgcataggtgaactggctaaattggctgacgttactcctgataccatccgctattatgaaaaacagcagatgatggatcataacgtgcgtacggaaggtggatttcgtctctattcggataacgacctgcagagactgcgttttatccgctatgccaggcagctggggtttacgctggaatcgatccgcgaacttctctcgatccgcatcgatccggaacatcatacctgtcaggaatctaaaggcattgtgcaggctcgtttgagtgaagtggaatcccgtattaaggaactccaggcgatgcgtcgttccttacagcggctcaatgatgcttgctgcggcacagcgcacagcagtgtctattgttccattcttgaagcgctcgagcagggcgccagtaacagaaataccgggcgttga

SEQ ID NO: 177094 - DNA, 369 bp, Klebsiella oxytoca
atgtggttactggatcagtgggcagaacgccatattcttgatgcccagcgcaaaggtgaattggataatcttccgggcagtggcgaaccactgattctggatgatgattcacatgtgccgcccgagctacgcgcaggttatcgattactcaagaatgcgggttgtttacctcccgaacttgaacatcgtaaagaagccgtgatgctaaatgacttacttaaaggcgttcaggagtgcgatccccgctatgctgagctgagccgtcgccttgcgctgctcgagctaaagctgcggcaggcgggcttaaatactgacttcctgcgtggggattacgctgataagttgctgcataagattaatgaggagtaa

SEQ ID NO: 177095 - DNA, 387 bp, Klebsiella oxytoca
atgcgccatcgtaagagtggtcgtcaactgaaccgcaacagcagccatcgccaggctatgttccgtaacatggctggttcgctggttcgtcatgaaatcatcaagacgaccctgccgaaagcgaaagaactgcgtcgcgtagttgagccgctgattactcttgccaagactgatagcgttgctaatcgtcgtctggcattcgcccgcactcgtgataacgagatcgtggcaaaactgtttaacgagctgggcccgcgtttcgcgagccgcgccggtggttacactcgtattatgaagtgtggcttccgtgcaggcgacaacgcgccgatggcatacatcgagctggttgatcgctctgaatcgaaagcagaagctgctgcagagtaa

SEQ ID NO: 177096 - DNA, 990 bp, Klebsiella oxytoca
atgcagggttctgtgacagagtttctaaaaccgcgcctggtcgatatcgagcaagtgagttcgacgcacgccaaggtgacccttgaacctttagagcgtggctttggccatactctaggtaacgcactgcgccgtattctgctctcatcgatgccgggttgcgcggtgaccgaggttgagattgatggtgtacttcatgagtacagcaccaaagaaggcgttcaggaagatatccttgaaatcctgctcaacctgaaagggctggcggtgagagttcagggtaaagatgaagtcatccttactttgaacaaatctggcattggccctgtgaccgcagccgacattacccatgacggtgatgtcgaaatcgtcaagccgcaacatgtgatctgccacctgaccgatgagaacgcagctattagcatgcgtatcaaagttcagcgcggtcgcggttatgtgccggcttctgcccgaattcattcggaagaagatgagcgcccaatcggccgtctgctggtcgacgcatgctacagcccggtagagcgtattgcctacaatgttgaagcagcgcgtgtagaacagcgtaccgacctggacaagctggtcatcgaaatggaaaccaacggcacaatcgatcctgaagaggcgattcgtcgtgcggcaaccatcctggcagaacaactggaagctttcgttgacttacgtgatgtacgtcagccggaagtgaaagaagagaaaccagaattcgatccgatcctgctgcgccctgttgacgatctcgaattgactgtccgctctgctaactgcctcaaggcagaagctatccactatatcggtgatctggtacagcgtaccgaggttgagttgctgaaaacgccgaacctgggtaaaaaatctcttaccgagattaaagacgtgctggcttcacgtggtttgtctctgggcatgcgcctggaaaactggccaccggcaagcattgctgacgagtaa

SEQ ID NO: 177097 - DNA, 621 bp, Klebsiella oxytoca
atggcaagatatttgggtcctaagctcaagctgagccgtcgtgagggcacagacctgttccttaagtctggcgttcgcgcgatcgataccaagtgtaaaattgaacaagctcctggccagcacggtgcgcgtaaaccgcgtctgtctgactatggtgtgcagttgcgtgaaaagcaaaaagttcgccgtatgtacggtgtgctggagcgtcagttccgtaactattataaagaagcagcgcgtctgaaaggcaacaccggtgaaaacctgttgactctgctggaaggtcgtctggacaacgttgtataccgtatgggcttcggcgcgactcgtgctgaatcacgtcagctggttagccacaaagctatcatggtaaacggtcgtgttgttaacatcgcttcttatcaggttaaagcgaatgacgttgtcagcattcgtgagaaagcgaaaaagcaatctcgcgtgaaagccgctctggagctggctgagcagcgtgaaaagccaacctggctggaagttgatgctggcaagatggaaggtacgttcaagcgtctgccggaacgttctgatctgtctgcggacattaacgaacacctgatcgtcgagctttactccaagtaa

SEQ ID NO: 177098 - DNA, 381 bp, Klebsiella oxytoca
atgagggatcggagtcacatcagtaatattagtgatgcggaaaccagcggcgttcagtgcacgaatagtagattcgcgacctggacccggacctttgaccataacttccagattcttgatgccgtattcttttacggcttcagcgcaacgctctgctgcaacctgagctgcaaacggagtggatttgcgagaaccacggaaaccggaaccaccggctgttgcccaacccagcgcgttaccttgacgatcggtaatggtaacgatggtgttgttaaaagaagcatggacatgagccacgccatcagagacttgttttcttacacgcttacgtgcacgaactggtgcctttgccattattcaatcaccccgattatttcttga

SEQ ID NO: 177099 - DNA, 357 bp, Klebsiella oxytoca
gtggcccgtatagcaggcattaacattcctgatcacaaacataccgtaatcgcattaactgccattttcggtatcggcaagacccgctctaaagccatctgtgctgacacgggtatcgctgaaaatgttaagatcagtgagctgtctgaagaacaaattgaatccctgcgtgaagcggtaggtaaatttgtcgttgaaggtgatctgcgccgtgaaatcaccctgagcatcaagcgtctgatggaccttggttgctatcgtggtttacgccatcgtcgtggtcttccggttcgcggtcagcgtactaagaccaacgcacgtacccgtaagggtccgcgtaaaccgatcaagaaataa

SEQ ID NO: 177100 - DNA, 1332 bp, Klebsiella oxytoca
atggctaagcaaccgggattagattttcaaagtgccaaaggtgggattggcgaactgaagcgcagactgttgtttgtaatcggtgcgttgattgtgttccgtattggctcttttattccgatccctggtattgatgccgctgtacttgccaaactgcttgagcaacagcgaggcaccatcattgaaatgttcaacatgttctctggtggtgctctcagccgtgcttcaatctttgctctgggtatcatgccgtatatttcggcatcgatcattgtccagctgttaacggttgtttatcagccgttagcggagctgaagaaagaaggggagtctggtcgtcgtaagatcagccagtacacccgctacggtactctggtgctggcgatattccagtcgatcggtattgctaccggtctaccgaatatgcctggtatgcagggcctggtaataaatccaggctttgcattctatttcaccgctgttgttagtctggtctcaggaacgatgttcctgatgtggctcggcgaacagatcactgagcgtggtatcggtaacggtatttcgatcattatcttcgctggtatagttgcgggactcccgccggccatagcccatactatcgagcaagcgcgtcaaggcgacctgcacttcctcctgttgctgttggttgcagtattagtatttgcagtgaccttctttgttgtgtttgttgagcgtggccaacgccgcattgtggtaaactacgcgaaacgtcaacagggtcgtcgtgtctatgctgcacagagcacacatttaccgctgaaagtgaatatggcaggggtcatcccggcaatcttcgcttccagtattattctgttcccggcaaccattacatcttggttcgggggcggtactggttggaactggctgacaacaatttcgctgtatttgcagcctgggcaaccgctttatgtgttactctatgcgtctgcaatcatcttcttctgtttcttctacacggcgttggttttcaacccgcgtgaaacagcagataacctgaagaagtccggtgcatttgtaccaggaattcgtccgggagagcaaacggcgaagtatatcgataaagtaatgactcgcctgactttggtcggtgcgttatacatcacttttatctgcctgatcccggagttcatgcgtgatgcaatgaaagtaccgttctacttcggtgggacctcactgcttatcgttgttgtcgtgattatggactttatggctcaagtgcaaactctgatgatgtcaagtcagtatgagtctgcattgaagaaggcgaatctgaaaggctacggccgctaa

SEQ ID NO: 177101 - DNA, 435 bp, Klebsiella oxytoca
atgcgtttaaatactctgtctccggccgaaggctctaaaaaggcgggtaaacgcctgggtcgtggtatcggttctggcctcggtaaaaccggtggtcgtggtcacaaaggtcagaactctcgttctggcggtggcgtacgtcgcggtttcgaaggtggtcagatgcctctgtaccgtcgcctgccgaaattcggcttcacttctcgtaaagcgatgatcactgcagaagttcgtctgtctgatctggctcacgtagaaggcgatgttatcgacctgaacacgctgaaagcggctaacattatcggtatccagatcgagttcgcgaaagtgatcctgtctggtgaagtatctcgtccggtaactgttcgtggcctgcgcgtgactaaaggtgctcgtgctgctatcgaagctgctggcggtaaaattgaggaataa

SEQ ID NO: 177102 - DNA, 180 bp, Klebsiella oxytoca; identical to SEQ ID NO: 75813

SEQ ID NO: 177103 - DNA, 504 bp, Klebsiella oxytoca
atggctcacatcgaaaaacaagctggcgaactgcaggaaaagctgatcgcggttaaccgcgtatctaaaaccgttaaaggtggtcgtattttctccttcacagctctgactgtagttggtgacggtaacggtcgcgttggttttggttacggtaaagcgcgtgaagttccagcagcgatccagaaagcgatggaaaaagcccgtcgcaatatgattaacgtcgcgctgaaccacggcaccctgcagcacccggttaaaggtgttcacacgggttctcgtgtattcatgcagccagcttccgaaggtaccggtatcatcgccggtggtgcaatgcgcgccgttctggaagttgctggagttcataacgttctggccaaagcatatggttccaccaacccgatcaacgtggttcgtgcaactattgatggcctggaaaatatgaattctccagaaatggtcgctgccaagcgtggtaaatccgttgaagaaattctggggaaataa

SEQ ID NO: 177104 - DNA, 354 bp, Klebsiella oxytoca
atggataagaaatctgctcgtatccgtcgtgcgacccgcgcacgccgcaagctccaggagctgggtgcaactcgcctggtggtacatcgtaccccgcgtcatatttacgcacaggtaattgcaccgaacggttctgaagttctggtagctgcttctactgtagaaaaagctatcgctgaacaactgaagtacaccggtaacaaagacgcggctgcagctgtgggtaaagctgtcgctgaacgcgctctggaaaaaggcatcaaagatgtatcctttgaccgttccgggttccaatatcatggtcgtgtccaggcactggcagatgctgcccgtgaagctggccttcagttctaa

SEQ ID NO: 177105 - DNA, 534 bp, Klebsiella oxytoca
atgtctcgtgttgctaaagcaccggtcgttgttcctgccggcgttgatgtaaaaatcaacggtcaggttattacgatcaaaggtaaaaacggcgagctgactcgtaccctcaacaatgctgttgaagttaaacatgcagataatgctctgaccttcggtccgcgtgatggtttcgtggatggatgggctcaggctggtaccgcgcgtgccctgctgaactcaatggttgttggtgttaccgaaggcttcactaaaaagcttcagctggttggtgtaggttatcgtgcagcggtcaaaggggatgtagtaaacctggctttaggtttctctcatcctgttgagcataaactgccggccggtatcactgcagaatgtccgactcaaactgaaatcgtgctgaaaggcgctgataagcaggtgatcggtcaggttgcagcagatctgcgcgcctaccgtcgtcctgagccttataaaggtaagggtgttcgttacgccgacgaagtcgtgcgtaccaaagaggctaagaagaagtaa

SEQ ID NO: 177106 - DNA, 393 bp, Klebsiella oxytoca
atgagcatgcaagatccgatcgcggatatgctgacccgtatccgtaacggtcaggccgcgaataaagctgcggtcaccatgccttcctccaagctgaaagtggcaattgccaacgtgctgaaggaagaaggctttattgaagattttaaagttgaaggcgacatcaagccggaactggaactgactcttaagtatttccagggtaaagctgttgtagaaagcattcagcgtgtcagccgcccaggtctgcgcatctacaaacgtaaagatgagctgccgaaagttatggcgggtctgggtatcgcggttatttctacctctaaaggtgttatgactgatcgtgcagcgcgccaggctggtcttggtggcgaaattatctgctacgtagcctaa

SEQ ID NO: 177107 - DNA, 306 bp, Klebsiella oxytoca
atggctaagcaatcaatgaaagcacgcgaagtaaagcgcgtggctttagctgataaattcttcgctaaacgcgctgaactgaaagctatcatctctgatgtgaacgcaaccgacgaagatcgttggaatgctgttctcaagctgcagactctgccgcgtgattccagcccgtctcgtcagcgtaatcgctgccgtcaaacaggtcgtccgcatggtttcctgcggaagttcgggttgagccgtatcaaggtccgtgaagccgcaatgcgcggtgaaatcccgggtctgaaaaaggctagctggtaa

SEQ ID NO: 177108 - DNA, 540 bp, Klebsiella oxytoca
atggcgaaactgcatgattactacaaagacgaagtagttaagaaactcatgactgagtttaactacaattctgtcatgcaagtccctcgggtcgagaagatcaccctgaacatgggtgttggtgaagcgatcgctgacaagaaactgctggataacgcagcagcggatctgacagcaatctccggtcaaaaaccgctgatcaccaaagcacgcaaatcagttgcaggcttcaaaatccgtcagggctatccgatcggctgtaaagtaactctgcgtggcgaacgcatgtgggagttctttgagcgcctgatcactattgctgtaccgcgtatccgtgacttccgtggcttgtccgctaagtctttcgacggtcgtggcaactacagcatgggtgtccgtgagcagatcatcttcccagaaatcgactacgataaagtcgaccgcgttcgtggtttggatattaccattaccactactgcgaaatctgatgaagaaggccgcgctctgctggctgcctttgacttcccgttccgcaagtaa

SEQ ID NO: 177109 - DNA, 315 bp, Klebsiella oxytoca
atggcagcgaaaatccgtcgtgatgacgaagttatcgtgttaaccggtaaagataaaggtaaacgcggtaaagttaagaatgtcttgtcttccggcaagctcattgttgaaggtatcaacctggttaagaaacaccagaagccggttccggctctgaaccaaccaggcggcatcgttgaaaaagaagctgctattcaggtttctaacgttgcaatcttcaatgcggcaaccggcaaggctgaccgtgtaggctttagattcgaagacggcaaaaaagtccgtttcttcaagtctaacagcgaaactatcaagtaa

SEQ ID NO: 177110 - DNA, 372 bp, Klebsiella oxytoca
atgatccaagaacagactatgctgaacgtcgccgacaactccggtgcacgtcgcgtaatgtgtatcaaggttctgggtggctcgcaccgtcgctacgcaggcgtaggcgacatcatcaagatcaccatcaaagaagcaattccgcgtggtaaggtcaaaaaaggtgatgtgctgaaggcggtagtggtgcgcaccaagaagggtgttcgtcgcccggacggttctgtcattcgcttcgatggtaatgcatgcgttattttaaacaataacagcgagcagcccatcggtacgcgtatttttgggccggtaactcgtgaacttcgtaacgagaagttcatgaaaattatctctctggccccagaagtactctaa

SEQ ID NO: 177111 - DNA, 255 bp, Klebsiella oxytoca
atgaccgataaaatccgtactctgcaaggtcgcgtggttagcgacaaaatggagaaatccattgttgttgctatcgaacgtatggtgaaacacccggtatacggcaaattcatcaagcgtacgaccaaactgcacgtacatgacgagaacaacgaatgcggtatcggtgacgtggttgaaatccgcgaatgccgtccgctgtccaagactaagtcctggacgctggttcgcgttgtagagaaagcggttctgtaa

SEQ ID NO: 177112 - DNA, 192 bp, Klebsiella oxytoca; identical to SEQ ID NO: 91763

SEQ ID NO: 177113 - DNA, 411 bp, Klebsiella oxytoca; identical to SEQ ID NO: 91764

SEQ ID NO: 177114 - DNA, 699 bp, Klebsiella oxytoca
atgggtcagaaagtacatcctaatggtattcgcctgggtattgtaaaaccatggaactctacctggtttgcgaacaccaaagaattcgctgacaacctggacagcgattttaaagtacgtcagtacctgactaaggaactggcgaaagcgtctgtatctcgcatcgttatcgagcgtccggctaagagcattcgtgtgaccattcacaccgctcgcccgggtatcgttatcggtaagaaaggcgaagacgtagaaaaactgcgcaaggtcgtcgcggatctcgctggcgtgcctgcacagatcaatattgccgaagttcgtaagcctgaactggacgctaaattggttgctgacagcatcacttctcagctggaacgtcgcgttatgttccgtcgtgctatgaagcgtgctgtacagaacgcaatgcgtctgggcgctaaaggtatcaaagttgaagttagcggccgtctgggcggcgcggaaatcgcacgtaccgaatggtaccgtgaaggtcgcgtaccgctgcacactctgcgtgctgacatcgactacaacacctctgaagcgcacaccacttacggtgtaatcggcgttaaggtatggatcttcaaaggtgagatcctgggtggtatggctgctgttgaacaaccggaaccggctgctcaacctaaaaagcagcagcgtaaaggccgtaaataa

SEQ ID NO: 177115 - DNA, 333 bp, Klebsiella oxytoca
atggaaactttagctcaacatcgccatgctcgttcttctgctcagaaggtacgccttgttgctgacctgattcgcggtaagaaagtgtcgcaggccctggatattctgacctacaccaacaagaaagctgctgtactggtcaagaaggtactggaatctgccattgctaacgctgaacacaacgatggcgctgacattgatgatctgaaagttgcgaaaattttcgtagacgaaggcccgagcatgaagcgcattatgccgcgtgctaaaggtcgtgcagatcgcatcctgaagcgcaccagccacattactgtggttgtgtccgatcgctga

SEQ ID NO: 177116 - DNA, 279 bp, Klebsiella oxytoca
atgccacgttctctcaagaaaggtccttttattgacctgcacttgctgaagaaggtagagaaagcggtggaaagcggagacaagaagcccctgcgcacttggtcccgtcgttcaacgatctttcctaacatgatcggtttgaccatcgctgtccataatggtcgtcagcacgttccagtttttgtttccgacgaaatggttggtcacaaactgggtgaattcgcaccgactcgtacttatcgcggccacgctgctgataaaaaagcgaagaagaaataa

SEQ ID NO: 177117 - DNA, 822 bp, Klebsiella oxytoca
atggcagttgttaaatgtaaaccgacatctccgggtcgtcgccacgttgttaaagtggtcaacccagagctgcacaagggcaaaccttttgctccgctggttgaaaaaaacagcaaatccggtggtcgtaacaacaatggccgtatcaccactcgtcatatcggtggtggtcacaaacaggcctaccgtattgttgacttcaaacgcaacaaagatggtatcccggcagttgttgaacgtcttgagtacgatccgaaccgctccgcgaacatcgcgctggttctgtacaaagacggtgagcgccgttacattctggcccctaaaggcctgaaagctggcgaccagattcagtctggcgttgatgctgcaatcaaagcaggcaacaccctgccgatgcgcaatatcccggttggttctaccgttcataacgtagaaatgaaaccaggtaaaggcggtcagctggctcgttccgctggtacttacgttcagatcgttgctcgcgatggtgcttatgtcaccctgcgtctgcgttctggtgaaatgcgtaaagtcgaagcagactgccgcgctactctgggcgaagttggcaatgctgagcatatgctgcgcgttctgggtaaagcaggtgctgcacgctggcgtggcgttcgtcctaccgttcgcggtactgcgatgaacccagtcgaccacccacatggtggtggtgaaggtcgtaactttggtaagcacccggtaactccgtggggcgttcagaccaaaggtaagaagacccgcagcaacaagcgtactgataaattcatcgtacgtcgccgtagcaaataa

SEQ ID NO: 177118 - DNA, 303 bp, Klebsiella oxytoca
atgattcgtgaagaacgtctgctgaaggtgctgcgcgcaccgcacgtttctgaaaaagcgtctactgcgatggaaaaaactaacaccatcgttctcaaagttgctaaagacgcgaccaaagcagagatcaaagctgctgtgcagaaactgtttgaagtcgaagtcgaagtcgttaacaccctggttgttaaagggaaagttaaacgtcacggacagcgtatcggtcgtcgtagcgactggaaaaaagcttacgtcaccctgaaggaaggccagaatctggacttcgtcggcggcgctgagtaa

SEQ ID NO: 177119 - DNA, 606 bp, Klebsiella oxytoca
atggaattagtattgaaagacgcgcagagcgcgctgactgtttccgaaactaccttcggtcgtgatttcaacgaagcgctggttcaccaggttgtagttgcttatgcagctggtgctcgtcagggtactcgtgctcagaagactcgtgctgaagtaactggttcaggcaaaaagccgtggcgccagaaaggtaccggccgtgcgcgttcaggttctatcaagagcccgatctggcgttcaggtggcgtgaccttcgctgctcgtccgcaggaccacagtcaaaaagttaacaaaaagatgtaccgcggcgcgctgaaaagcattctgtccgaactggtacgtcaggatcgtctgatcgttgtcgaatctttctctgtagaagcgcctaaaactaagctgctggcacagaaactgaaagacatggctctggaagatgtgctgatcatcaccggtgagctggacgagaacctgttccttgctgcgcgcaacctgcacaaggttgacgtacgtgatgcaactggtatcgacccggttagcctgatcgccttcgacaaagtcgtaatgactgctgatgctgttaagcaagttgaggagatgctggcatga

SEQ ID NO: 177120 - DNA, 630 bp, Klebsiella oxytoca
atgattggtttagtcggtaaaaaagtgggcatgacccgcatcttcactgaagatggcgtatctatcccagtaaccgtaatcgaagttgaagcaaaccgcgttactcaggttaaagatctggctaacgatggctaccgtgccgttcaggttaccactggtgctaaaaaagctaaccgtgtaaccaaaccggaagcgggtcacttcgctaaagctggcgttgaagctggccgtggtctgtgggaattccgtctggctgacggcgaagagttcaccgtaggtcaggacattagcgttgagctgtttgctgacgttaaaaaagttgacgtaaccggtacctctaaaggtaaaggttttgctggtaccgttaagcgctggaacttccgtacccaggacgcaactcacggtaactccttgtctcaccgcgttccgggttctatcggtcagaaccagactccgggcaaagtgttcaaaggcaagaaaatggcaggtcagctgggtaacgaacgtgtaaccgttcagagcctggacgtagtacgtgttgacgctgagcgcaacctgctgctggttaaaggtgcagtcccgggtgcaaccggtagcgacctgatcgttaaaccagctgtgaaggcgtaa

SEQ ID NO: 177121 - DNA, 312 bp, Klebsiella oxytoca
atgcagaaccaaagaatccgtatccgccttaaagcgtttgatcatcgtctgatcgatcaatcaaccgcggaaatcgtcgagactgctaagcgcactggtgcgcaagtccgtggtccgatcccgctgccgacccgcaaagagcgctttaccgttctgatctctccgcacgttaacaaagacgcgcgcgatcagtacgaaatccgcactcataagcgtctggttgacatcgttgagccaactgaaaaaaccgttgatgctctgatgcgtctggatctggctgccggtgtagacgtgcagatcagcctgggttaa

SEQ ID NO: 177122 - DNA, 477 bp, Klebsiella oxytoca
atggcagttgcgaacgttgtcttctttattatctacggcggcttattgctcactctcagctggcacgatctgcgctatggcttgctacccgataaattcacctgccctctgctctggagcgggctgctttactatgtatctatgtcgccggtcaatctgccgcatgcggtatggggagcgatagcaggctatctggcctttgcgttgatttattggttctacaggggagtacgtgggtctgaaggtatcggctacggtgatgtaaagttactcgccgcactcggagcctggcatggctggagagctttaccgcagctggttcttatcgcaacgattctggcatgcgctgccgtagcagtagtgattctacgcaccagagaaagagaggcattacataacccgctaccttttggcccttttctggccgtagcgggtttatcatctgaaggtgtgacctttcttagtccgccactttaa

SEQ ID NO: 177123 - DNA, 477 bp, Klebsiella oxytoca
atgaaaggtgatgtcaaaatcataagttatctcaataaattattgggaaatgagctggtcgcaattaatcagtactttctccatgcgagaatgttcaaaaactggggcctgatgcgcctcaatgatgtcgaataccatgaatccatcgatgaaatgaagcatgccgataaatatattgagcgtattttgtttcttgaggggatccctaacctgcaggacctcggtaaactccgcattggggaggacgtcgaggagatgctgcaatctgacctgaggctggaactggaaggggcaaaggatctacgagaagccattgcctatgccgacagcgtccatgactacgtcagccgggatatgttaatcactatccttgcagacgaagaagggcatatcgattggcttgaaaccgaactggatctcatagctaaaattggtctgcagaattatcttcagtcgcagattaaagtggcggactaa

SEQ ID NO: 177124 - DNA, 195 bp, Klebsiella oxytoca
atgtacgtttgtctgtgtaatggtgtgaacgataaaaaaattcgtcaggctgtgcgccagtttcatcctcagtctttccagcagttgcgcaaatttattcccgtgggaaatcaatgcggtaagtgtgtgcgtgcggcccgagaaattatggaagatgaattaacccgcatgccggaatatcaagagattgcctga

SEQ ID NO: 177125 - DNA, 1407 bp, Klebsiella oxytoca
atgtcatcacaacgtgaaattcgtctgaacgcttttgatatgaactgcgtcggccatcagtcgccggggctgtgggcccatccgcgcgaccgctcctggcaatataaagacctcgaatattgggtcgacctggcgcgtctgctggagcgcggaaagtttgacgggctgtttatcgccgatgtgctgggcgtctatgatgtgctgaacggcaacggcgatgcggcgatccgccaggcggcgcaggtgccggtcaacgatccgctggcgctgattacgccgatggcgctggtgacggagcatctgggattcggcctgaccgcttcgctctcctttgagcatccctatccgttcgcccgccgtctttcgaccctcgaccatctgacgaaggggcgggtgggctggaatatcgtgacttcctatctggagagcggggcgcggaacattgggcaaaaagcgcagaccgaccatgacgcccgctacgactacgccgatgaatacctggaggtggtctataaactgctggaaggcagctgggaagacggcgcggtgctgcgcgacagggagcgcaggatcttcagcgatccgcgaaaaattcatccgatcaaccatcaggggaacttcttctcggtaccggggatccacctttgtgagccgtcgccgcagcgtacgccggtgctctatcaggcgggcgcctccagccgcggcaagcagttcgccgccggccacgcggagtgcgtatttgtcggcgcgccgtcgaaggtactgctgaaaaagacggtggcggatattcgccgtcgcgccgaggaagccgggcgcgatccgcgcagtatcctgatcttcaatatgcagacggtcatcgtcggcgaaaccgaccgtgaagcccaggctaaatggcaggagtataaaccgtacgtcagctacgaaggggcgctggcgctgctctccggctggaccggtatcgaccttggccagtatcagccggaccaggtgctggagtatctgcataccaatgcgattcagtcgatggtggaggcgttttccactgccgatccgaacagccagtggaccgtgcagaagctggcggactgggcgggaattggcggcttcgggccgctggtggtcggcagtccacagacggtcgccgatgagctgcagtcctgggtcgaagagaccgacgtcgatgggtttaatctcgcctatgcggtgacccacgaaaccttccgcgacgtggtggatttactggtcccggagctgcaaaagcgcggcgtgtttaagcaggagtatcgcgaaggaaccctgcgcgagaagctgttcggcgccggcccgcggctggctgcgccgcatccgggtgcaggctatcgccacggcgcgcgggtggcggtcgggagcgaagagaaggtgagttaa

SEQ ID NO: 177126 - DNA, 1398 bp, Klebsiella oxytoca
atgcaaactgaaccgcacgtagtgattgtcggcggcggatttagcggcgcggcggtggcgattcatctcctgcgcctggcgccggttggcgtgcgggtcacgctgctggagccgcgagaggtgcccggcgcgggcgtggcctactccacgaccgaaccgagtcacagaatcaacgttcccgccgcgcgaatgcagcttgccggtgaagaggagggcgcgttcgatcgctggtaccgcagccagcctgcttttgcagaagatccgcaggcgctgctggaggatggcgcggtttatccgcagcgcggtcagtttggccgctacgtcgcccagcgtttcgccgaggaggcgcgcgccagcgcagggcggctgacgcatctgcgcgagcaggcgctgagcattcatcatggcgaggtcgttaccgacagcggtcggcggctatcggccgatctactggtgctggccattagccatccgcccccctctctgccgacgctgacgatgccgtttgcgactcatccggcgctcattgctaatccctggcgagcgggcgtgctggaagctatcgcaccggaagcgagcgtcgcgatcgtgggcaccggcctgacgatggcggataccgttgccaccctgacgcggctgggccatcgggggccgataaccgcattttcacgccgcgggctgctgtcccgcagcaacctgagcggcagcggtgacccctggccaggcgaatacgatcgcggatcgctgcgccagcggctgcggcagatccgcgaggatatcgctcgcgcggagcagcaggggctggcctggcaggtggtgatggacgcggtacgtaatcagggacaacgcatctggcaggggctgacggtcgccgatcgccagcgcttcttgcgtcatttgcgcagctactgggacgttcaccgctaccgtatcgctccgcaggtcgccggggttattgagcagcgccagcgcgacggcagcctgcgggtgctggcggcccggctgacggcgctggaaggcgatgcgcaaaggctgacgttaaccctggcgctccggtacggtgaagtacagcgggtgagcgctgaccacgttattttaaccaccggcccggcgcacggggcgctgaccgatagccagccgctgctgcgccagctaagccaggatgggctgattcgcgccgacgcgttcggcctcggcctggacgtcgatcttcgctcgcgggccattggccgggaagggcgagctaatcccaaactactggtttccggccctgccgcgcgggcccgcttcggagagctgatggggctaccgcaggtggctgaccatgccgctgacgtggccgccgaagcgctgcagactctgggcgtcaaacaatccgtccgatgtccggcgttctga

SEQ ID NO: 177127 - DNA, 1173 bp, Klebsiella oxytoca
atgacgcaaaaaaccgacgataaaatcaatgtgttctggtttctgcctacccacggcgatggccgctatctgggtaccgcagaaggcggccgcccggttgacctgccttacctgcagcaggtggcgctggcggccgacagtctcggctactacggggtgctgatcccgacggggaaaagctgtgaagactcatggctggtggcatcggccctggcgccgctgacccgccgcctgcgctatctggtggccgttcgtcctggcctgcagccgccaacgctggcggcgagaatggcggcgacgctcgatcgcctgtcgggcggccggctgctgattaacgtcgttaccggtggcgatccggtggagaacaaaggcgacggcattttcctcagccacggcgaacgctatcaggtgacccgcgaatttctcgacgtctactcgcgcctgctgcaaggtgaaaaggtggactatcgcggtgagcatatccacgtggaaggcgctgaagtgctgtttccaccggtgcaggaaaacggcccgccgctctactttggcggatcgtccgaggaggccatcgacgtcgccgccgatcaaattgatacctacctgacctggggcgagccgccggcgctggtggccgaaaagctggctgtggtgcgcgagcgcgccgccgcccggggccgtacgctgcagtacgggattcgtttgcacgtgattgttcgcgaaaccgaagaagaggcgtgggccgccgccgatcggctgatttctcatcttgacgacgagactatcgcccaggcgcagaaaatttttgcccgtatggactctaccggccaggcgcgaatgagttcgctgcataaaggatcgcgcgacaatctgcgtattgccccgaatctgtgggcgggcgtggggctggtgcgcggcggggccggaacggcgctggttggcaatccgcagcaggtagcagaacgcatccgtgaatatcaggcgctcggtatcaccaactttatcttctccggctatccgcatctggaagaggcccatcgctttgccgacctggtcatgccgttattgccgctggcaggccatgagcagccgaaggcgcgtagcgtcaataccggcccgttcggcgaaactatcggcggcgataaacgtccggtgaaacaggtgagcgcaagctga

SEQ ID NO: 177128 - DNA, 1944 bp, Klebsiella oxytoca
atgctgaatccgcaaaccccagccgccacgcccgcgctcatcgatccggcgtcaaaagcctttcagagcctgctggataaactggcccctaccgaagcgaccgtgctgatcgtcggcgaaaccggtactggtaaagaggttgtcgcccgttacctgcatcaccatagtccgcgtcgtcagcggccgtttctcgccgttaactgcggcgcgctcagcgaaagcctggcggaagcggagctgttcggccatgaaaaaggcgcgtttaccggcgcggtgcaaagccatcccggctggttcgaagcggcagacggcggcacgctgctgctggatgaaatcggcgaacttagcctggcgctccaggtgaagctcttgcgcgtcctgcaggaacgcgaaattacccgcgtcggctcgcgtaaagcgattaaggtcgatgtccgggtgatcgccgccacccacgtagacctgatgcaggctatccgcgagcgtcgtttccgcgaagacctctactatcgcctgaatatcgccatcgtcccgctgccgccgctgcgccagcgccgccaggatattcccgttctggcggaccatttccttacgctctacgcccgccgcctgggtcggccggttcgtcgtctggccccggagacgctggcaaggctgatggagtacccctggccgggcaatattcgcgaacttgagaacactctgcataatgcggtattgctgagtaaagaagaggagatcgcccccgctcagctccggttaaccaccctaagcgacgcctcaccggcggtaagcgataacgaactggacgactttattcgtcatcaactctccctgccgggcgagccgctgtgggaaagggtcaccggggcgttgattcgcggcgcgatggcgcaatgcgacgataaccaaagccaggccgcagcgctgctcggcattagccgccacacgctgcgcacgcagctggccaattttggcatcattaaaagccgccgccgccaggaacccctcttcggggcggcggtcaacaacgtttctcgcgatcgggaactgcgcatcggcttccagcgttttggcaatcttggcattctgaaggcgcagcaaagtctggagaaagcctttgccagccgcggcgtcagcgtgttgtggagcgagtttcccgccgggccgcagctcctgcacgcgctggcctgcgatgaaatcgactttggcaccaccggcgaagcgccgccggttttcgctcaggccaataatagcgagctggtctacgtcgcctgggaaccgcccgcgccgcaaagcgtggccatggtcgtcccacagcacagcgacattcgcaccattgccgacctgcgcggcaagcgtatcgcgctgaataaaggttcgaacgtgcactggctgctgctgcatattctggaagaggctgggctgggattaaacgacgttaaagtggtctatattccgccgaaatatccgctgaccgccagcgactacctggcggtagacgcctggatgatgtgggatccgctgcttagcgacgcggaagatagcggcgaattacgggtagtagccagcggcgaggggcgcgtcaacaaccatcagttctatctgtcgcgccgcgactacgccagccgcaatagcgatattatgcagcggctattcgccgagctggcgcagaccgggcagtttatcgaccagcatcgggaagaagccgcggagctgctctccgccgagctgggtcttaacgccgcttctctgacgcgagccctggcgcgccgcagccatcgcccgcgcacaatggaccttaaagtgattcgcgcccagcaaagtatcgccgatcggttttacgcgctgggccttatcaacaaaccggtttcagtgcgcgaagccgtatggtacggcgaagccaccaatagcgatctcggcctgctgatgcacgtcgattag

SEQ ID NO: 177129 - DNA, 756 bp, Klebsiella oxytoca
gtggccgttcatttactcatcgtcgacgcacttaatctgattcgccgcatccacgcggtgcagggttcaccctgcgtcgatacctgcttacatgccctcgagcagctggtgctccatagccagccgacccacgtggtggcggtatttgatgacgaagatcgcggccacggctggcggcaccagcgcctgcccgattataaagccgggcgcgcgccgatgccggaaaccctcgaggcggaaatgccggcgctgcgggcggcatttgagcagcgcgggtttcgttgctgggcgctcagcggcagcgaagccgacgatcttgccgcgactctggcggttaaggtggcgcaggccgggcaccaggcgaccatcgtttcaaccgacaaaggctactgccagctactgtcgccgacgatccgcatccgcgactatttccagaagcgctggctcgacgcgccgtttatcgccaaagagttcggcgtgacgccggagcagctacccgactactgggggctggcgggcatcagcagctccagggttcccggcgtggcgggcattgggcccaaaagcgcagcccagttattaaccgattttcaggatctggaagggatctacgcccggctggcggacgtgccggagaagtggcgtaaaaagctggaagaacacaaagagatggccttcacctgccgggaaatcgcgcgcctgcaaaccgatttacagctggatggcaacctgcagcagcttcggctggcacgatag

SEQ ID NO: 177130 - DNA, 648 bp, Klebsiella oxytoca
atggaacgtaatagactggcccggcagattattgatacctgcctggagatgacccgcctggggttaaatcaggggacggcaggcaacgtaagcgtgcggtaccagggggggatgctgatcacaccaaccggtataccttatgaaaagctgacggaagcgcacattgtttatatcgatgctgaaggtcagcatgaacagggcaaactgccgtccagcgagtggcgttttcatatggcggcttatcagacgcgtcctgatgctcatgcggtggtgcataatcatgcggttcactgcacggcggtatcgatcctcaatcgtcccattcccgccattcactatatgattgcggcggccggcggtaactccattccttgcgcaccctatgccacttttggtactcgtgagctgtctgaacacgtggccgtggcgttgaaaaatcgcaaagcgaccctgctgcagcaccatggcctgatcgcttgtgaagagaatctggaaaaggccctgtggctggcgcatgaagttgaggtactggcgcagctctatctcagcaccctggccatcatcgatccggttccggtgcttgatgatgaggctatcgccatcgtgctggagaaattcaaaacctacggattgcgtatcgaagagtga

SEQ ID NO: 177131 - DNA, 1311 bp, Klebsiella oxytoca
atgggaaacacaacgatacaaacgcagagttttcatgcggtcgagacagggcaaagcaagcgctacattattccctttgccctgctgtgctcgctattttttctttgggcggtcgctaataatcttaacgatattttattaccacaatttcaacaagcctttaccttaactaacttccaggctggtttgattcaatccgctttttattttggctattttgttattccgatcccggccgggatcttgatgaaaaaactcagttacaaagccggcattattaccgggctattcttatacgcttttggcgccgcgctattctggcccgccgccgaggtcatgaattataccttattcctgatcggcctgtttattattgcggcggggttaggctgtttagaaactgcagcaaacccttttgttaccgtgttagggccagaaagcggcggccacttccggcttaatctggcgcagacctttaactcttttggcgccattattgcggtggtctttgggcaaagccttattttgtctaacgtgccgcatcaatcgcaggatgtactcgataaaatggctccggagcagcttagcgcttataagcacagcctggtgctctcggtgcaaaccccctatatgatcatcgtcgcggttgtcttactggtcgctctgttgattatgttgaccaaatttccggccctgcagagcgacgaccacagtgatgccaaccagagttccttctccgcttctcttgcccgcctggtgcgcgttcgccactggcgctgggcggtgctggcgcagttttgctacgtcggcgcacaaaccgcctgctggagctatctgattcgctacgccatcgaagagatccccggcatgacgcccggtttcgccgccaactatttgaccggcactatggtgtgcttctttatcggccgtttctccggcacctggctcatcagccgcttcgcgccgcataaagtgctggcggcctatgccctgctcgccatgctcctgtgcctgatctccgctttcagcggcggccatgtgggcctgctggccttgacgctgtgcagtgcctttatgtcgattcagtatccgaccatcttctcgctgggcatcaagaatctggggcaggacaccaagtacggctcctcgtttatcgtcatgaccattattggtggcggcatcgtcactccggttatgggctttgtcagcgacgccgccggcaacatccctaccgccgagctggtaccggcgctgtgctttgccgtcatcttcatctttgcccgtttccgttcgcaaacggcagctaactaa

SEQ ID NO: 177132 - DNA, 1776 bp, Klebsiella oxytoca
atgaaaaaaatcagtttaccgaaaattggcattcgcccggtgatcgatggacgccgcatgggggtacgcgagtcgctggaagaacaaaccatgaatatggcgaaggctaccgctgcgctgattacggaaaagctgcgccacgcctgcggcgcgcagatcgagtgcgtcatcgccgatagctgcattgcggggatggcggaatccgccgcctgcgaagagaaattcagcagccagaacgtcggcgtcaccatcaccgtcaccccctgctggtgctacggcagcgaaactatcgatatggacccgatgcggccaaaagctatttggggctttaacggcaccgaacgaccaggcgcggtttaccttgcggcagcgctggcggcccacagccagaagggcatcccggcgttctccatatacggccacgacgtacaggacgccgacgacacctccattccgtctgatgttgaagaaaaactgctgcgctttgcccgcgccggtttagcggtcgccagcatgaagggcaaaagctatctttccgtcggcggcgtatcgatgggaatcgccggttctatcgtcgatcacaacttcttcgagtcctggctcggtatgaaggtccaggcggtggatatgaccgaactgcgccgccgtatcgatcagaaaatctatgatgaaagcgagctggaaatggcgctggcgtgggcggataaaaccttccgctacggcgaagaccagaacgcgcagcagtataaacgtaatgccgagcagagccgcgcggtactcaaagagagcctgctgatggcgatgtgcattcgcgacatgatgcagggcaacaagaagctggcggaaaaaggactggtcgaagagtcgctgggctacaacgccattgccgcaggcttccagggccagcgtcactggaccgatcaataccctaacggcgacaccgccgaagcgctgcttaacagctcgttcgactggaatggcgtacgcgaacccttcgttgtcgccacggaaaacgacagcctcaacggcgtggcgatgctgatgggccatcagctgaccggcaccgcccaggtgtttgccgacgtgcgtacctactggtcgccggaagcggtagaacgcgtcaccggccagccgctcaccgggctggcggaacacggcattatccatctgatcaactccggttcggcggcgctggacggcgcctgcaaacagcgcgatgcggatggcaagccaaccatgaagccgcactgggaaatcagccagcaggaggccgacgcctgcctcgccgccaccgaatggtgcccggcgattcatgaatatttccgcggcggcggcttctcctctcgctttctgaccgaaggcggcgtgccctttaccatgactcgcgtgaatatcattaaaggccttggcccggttctgcaaatcgccgaaggctggagcgtggaactaccgaaagagatgcacgatcggctggatgcccgcaccaactccacctggcccaccacctggtttgcgccgcgcctgaccggtaagggcccgttctccgacgtctactcggtgatggcgaactggggcgctaaccacggcgtgctgaccatcggccacgttggcgccgactttatcactctggcgtctatgctgcggatcccggtatgcatgcataacgtagaagaggcgaaaatctaccgcccgtccagctgggctgcgcacgggatggatagcgaaggccaggattaccgcgcctgccagaactacggcccgctgtacaaacgttaa

SEQ ID NO: 177133 - DNA, 1419 bp, Klebsiella oxytoca
atgaagaatgaagtcatcctggttctcgactgcggcgccaccaacgtcagggcgattgccgttgatcgccaggggaatattatcgcccgcgccgcaacggctaacgccagcgatatcgccgcagagaacagcgcatggcaccagtggtcgctggaggccatcctgcaacgcttcgccgagtgctgtcggcagattggcgatacgctctcatcctgcacggttcgcggcatcacggtcaccaccttcggcgtggacggcgcgctggtggatgaacagggcaagctgctctatccggtcatcagctggaaatgcccgcgaaccgcagcggtgatggacaatatcggccgctttatgcccgcgcagcagctccagcagatcgccggcgtcggcgcatttggttttaacaccctctataagctgatatggctgcaagaaaaccacccgcagctgctggagcaggcccatgcctggctattcatctcctcgctgatcaaccagcgcctgaccggggaattcacgaccgatatcaccatggcgggtaccagccagatgctggatatccaccagcgagatttcagcgcgcagattctgcaggcgacgggattgccgcgccgcctgtttccccggctggtggaggcgggccagcagattggtaccctgcaaaacgatgccgcgaagatgctgggattacccgccgggatcccggttatctccgccgggcacgatacccagttcgcgttgtttggcgctggcgcggagcaggatgaaccggtgctctcttccggtacgtgggaaattttgatggtgcgcagcgttcaggtgaatacgccgctgctcagccactatgcgggatcgacctgcgaactggatagccagccgggatgctataaccccggtatgcagtggctggcttcaggcgtgctggagtgggtacgccagctgctgtggacggcagaaacgccgtggcgcacgctgattgaagaagcgcgcgtcattcccgccggttctaagggggtaaggatgcagtgcgatctgctctcctgccggaatgcgggctggcagggcgtcacgctgaataccactcgcggccatttctatcgcgccgcgctggaaggattagccgaacagctggcgcgtaacctgcaaacgctacaaaaaatcggccattttaacgccagcgaactgctgctggtcggcggtggtagccgcaacgcgctgtggaatcagatcaaagccaatacgctcgatatgcctgtcaaagtactggatgacgccgaaaccaccgtggctggcgccgccatgtttggctggtacggcgtcggtgaattccacagccctgaacaggccagagcgcaggtgagctatcagtatcgctatttttacccgcaaaccgaacccgaactgattgagggagtatga

SEQ ID NO: 177134 - DNA, 423 bp, Klebsiella oxytoca
atgctaaaaacgatttccccgttaatatcgccggagctactgaaagtcctggcggaaatggggcacggagatgagatcgtcttttccgatgcccacttcccggcgcacagcatgggtccacaggtcattcgcgccgacggtctgcgggtaagcgacctgctgcaggcgattattccgctgtttgagttagacagctacgctccgccgttggtgatgatggccgccgtggaaggcgacaccctcgacccgcaggtcgaaacgcgctatcgcgaggcgctttccgccgccgcgccctgccctgagatcgcccgcattgaccgctttgctttctacgagcgggcgcaaaaagcctttgcgatcgttatcacaggtgagcgcgctaagtacgggaatattcttttaaaaaaaggagtaacgccgtaa

SEQ ID NO: 177135 - DNA, 711 bp, Klebsiella oxytoca
atgaaagcggcacgacagcaagcgatactagacctgctcataaaccataatagtctgaccaccgaagccttatcgctacagcttaacgtcagcagagaaaccatccgccgcgatctcagcgagcttcagtcccagggaaaagtactgcgtaaccatggtcgggcaaaagtcattcaccggcaaagccaggacagcggcgacccttttcatattcgtttaaaaagccactatgcgcacaaagcggatatcgcccgcgaggcgctggcctggatagacgaagggatggttatcgccctcgatgccagttccacctgctggtacctggctcgccagctacctgatctcaaccttcacgtttttaccaacagtcagccgatatgccaggagctgagcaagcgagagaacatacagctcacctgctccggggggacgcttcagcgtaaatacggctgttacgtgagttcatcgcttatctcccagctcaaatcgctggagatcgatctgttcattttttcctgtgaaggtatcgacagcggcggcgcgctctgggattcaaatacggtcaacgccgagttcaaatcgctgctgcttaagcgcgcctcgcaatcgcttttgctgattgataagagcaagtttaatcgttcaggggaggcccgaattggccatctggatgatgtgacgcatattgtttcggacgtgtcgcagtcgtaa

SEQ ID NO: 177136 - DNA, 1101 bp, Klebsiella oxytoca
atgaataaagttgtcctctattgtcgccctgggtttgagaaagagtgcgcagcagaaattaccgataaggcctcgcgccttgaagtatttggttttgcccgggtcaaagatgactccggctatgtgatttttgagtgctatcaggctgaagatggcgaaaagctggtgcgcgaactgccgttcagctcgctggtatttgcccgccagatgtttgtggtcggcgaactgctgcgcgatctgccgccggaggacaggatttccccaatcgtcggtatgctgcagggcgtcgtggaaaagggcggcgagctgcgtgtagaggtcgccgataccaacgaaagcaaagagctgatgaagttctgccgcaagttcacggtaccgctgcgcgctgcgctgcgcgaagcgggcgtgctgaccagctatgaaacgacaaaacgtccggtggtgcacgttttctttatcgcgccgggctgctgctacaccggctattcgttgtctaacaacaactcaccgttctatatgggcattccgcgcctcaagtttccggccgatgcgccgagccgctcgactctcaagctggaagaggcgtttcacgtctttattccggcggatgagtgggacgagcgcctggcgaacggtatgtacgccgtggatctcggtgcctgccccggcggctggacctatcagctggtgaaacgcaatatgtgggtctcctcggtggataacggcccgatggcgcaaagcctgatggataccggccaggtgacctggctgcgcgaagatggcttcaagtaccgcccaacgcgcaacaacatctcgtggatggtgtgcgatatggtggagaagccggcgaaagtggctgcgctgatggcgcagtggctggtgaacggctggtgccgtgaaaccatctttaaccttaagctgccgatgaaaaagcgctatgaagagctgtcgcgcaacctagcctatatccaggagcagctggatgagcacggcatcaacgcgcaaatccaggcgcgccagctgtatcacgatcgcgaagaggtgacggttcacgttcgtcgcctgtgggctgccgtcggcggtcgccgcgacgaacgctag

SEQ ID NO: 177137 - DNA, 396 bp, Klebsiella oxytoca
atgaccagccgttttatgctgatattcgccgcgataagcggttttatctttgtggctttgggcgcgtttggcgcgcacgttttaagtaaaacgatgggcgttgcggaaatgggctggatccacaccggcctgcagtatcaggctttccatacgctggctatttttggcctggcggtggcgatgcagcgccgcatcagcatctggttttactggagcagcgtctttatggcgcttggtaccgttctttttagcggcagcctctactgcctggcgctatcgcatttacgcctgtgggcgttcgttacgccggtagggggcgtctgcttcctcgccggttgggtattaatgttaattggtgcaattcgtctgaaacgtaagggcgttgttcatgaataa

SEQ ID NO: 177138 - DNA, 918 bp, Klebsiella oxytoca
atgtccaagcgtttgccacctctgaatgcattacgtgtttttgatgcagccgcccgccaccttagcttcactcgcgccgccgatgagctttttgtgacgcaggccgcagtcagccaccaaatcaagtccctggaggatttcctcggcctcaagctgttccgtcgacgcaatcgttctcttcttttaacggaggaggggcagagctattttcaggatatcaaagagattttttcgcagctcaccgaagcgacccgcaagcttcaggcccgaagcgcaaaaggggccttaaccgtcagtatgctccccagttttgccatccagtggctggtgccgaggctgacaagctttaattcagcttatccgggaatcgatgtcagaatccaggcggtagaccgccaggaagataagctggccgacgatgtcgacgtggcaattttttatggccgcggcaactggccggggctgcgcgtggaaaaactgtacgccgaatatctgcttccggtatgttccccgcttttacttaccggcgataaagcgttgaaaacgcctgccgatctggcgcaacataccctgctgcacgacgcttcccgccgcgactggcaaacttatacccgtcagctgggtctaaaccatatcaatgttcaacagggacctatttttagccacagcgcaatggtgctgcaggcggcaatccatggacagggggtcgcgctggccaacaatgtgatggcgcagtccgagattgaggcaggccgactggtctgcccgtttaatgatgttctggtcagtaagaatgcgttttatctcgtttgtcatgacagtcaggcagaactgggtaaaatagccgccttccgccagtggattctggcaaaagcggctaatgaacaagaaaaatttcgctttcgttatgaacaataa

SEQ ID NO: 177139 - DNA, 231 bp, Klebsiella oxytoca
atgaaaatgaataagactgccgccattatttctgcctgtgtgctgacctttggcctgagcgcctgttcctctaactacgtgatgcacactaacgatgggcgcactatcgtcaccgacggtaaaccgcaaacggacaatgatactggcatgatttcgtacaaagatgcctggggtaacaagcagcagattaaccgttctgacgtcaaacagctgggcgagctggataactga

SEQ ID NO: 177140 - DNA, 1206 bp, Klebsiella oxytoca
atgaacgcattcaaccccgcccaatttcgcgctcagtttccggcgctggccgacgctggcgtctatcttgatagcgcagcgacggcgctcaagccgctggcggtcattgaggccagcgatcagttctatcgcctcagcggcggtaacgtccaccgtagccagtttgctgccgcccggcagctaaccgaccgctatgaaaacgcgcgcgaacgcgtggcggcgctgctcaacgccccttccggccaggatatcgtctggacgcgcggcaccactgaagccattaacatggtggcgcaatgctacgtgcgcccgcgcctgaagcccggcgatgagattatcgtcagcgaagcggaacatcatgccaatctggtgccgtggttaatggttgcagagcaaaccggcgcgaggatagtgaagctaccgatcgctcccgatcgcctgccggacgtggccgcgcttggcgcgctcatcacgccgcgcagccgggtgctggcgattggccagatgtccaacgtcaccggcggttgtccggatttggcgcaggcgattcgcctggcccacgatgccgggatggtggtaatggtcgacggcgcgcagggggcggtgcatttcccggcggacgttcagacgctggatatcgacttttatgctttttcgggccataagctctacgggccgaccggcatcggcgcgctgtatggcaaaagcgaacggctggcgaaaatgtcgccgtggctcggcggcggtaaaatgatcgccgaagtcactttcgacggctttaaaacccagcccgcgccctggcgcttcgaagcgggaacgcccaatatcgccggggtgattggcctgagcgcagcgctggagtggctggacgagacggatatcgcacaggcggaaaactggagccgtgggctggcgacgctggcggaagaggagctggcgaaacgtccgggattccgttcgttccgctgccaggacgccagcctgctggcgtttgattttgacggcgttcaccatagcgatatggtgacgctgctggcggaatcggggattgcgctgcgcgccggtcagcactgcgctcagccgctgctggcggcgcttggcgtcagcggtaccctgcgggcctcattcgcgccttataacacgcaggacgatgtttacgcgctggtgcacgccgtggaccgcgctctggaaatactggtggattaa

SEQ ID NO: 177141 - DNA, 438 bp, Klebsiella oxytoca
atgacgacttctcacccttttggtacccgcgtcaccgaagcgacccttctccagacgtttaccccgctcagccagtgggaggataaataccgccagctaattttactgggtaagcagctccctgcgctgccggacgacctcaaagcgcgggccaaagagattgccggttgtgaaaaccgcgtctggctgggacacttcattgacgtcgacggcaagctgcatttcttcggcgatagcgaaggccgtatcgtacgcggcatgctggcggtgctgttgaccgccattgaaggcaaaagcgccgctgatctgctggcgcaggatccgctggcgctatttgatgcgctggggctgcgcggccagctgagcgcctcgcgcagccaggggctcaacgccctgagtgaggcggtgctcgccgccgcccgcgaggttgaggtttaa

SEQ ID NO: 177142 - DNA, 810 bp, Klebsiella oxytoca
atgtctgttgtaattagcgatgcctggcgccagcgctttggcggcacggcgcgtttatatggtgaaaaggcgctgcaatgttttgccgacgcgcacgtctgcgtggtcggcatcggcggcgtaggctcatgggcggcggaagcgctggcgagaaccggaattggcgcgattaccctcatcgatatggatgatgtctgcgtgaccaacaccaatcgccagatccacgcccttggcggcaacgtaggtctggcgaaagccgaggtgatggcggaacgcattcgcctgattaaccccgagtgccgggtgacggtggtggacgattttatcactccggaaaacgtcgccgagtatctgggcgttggctttagctatgtgatcgatgccatcgacagcgtgcgcccgaaagcggcgttaatcgcttactgtcgtcgccataaggtgccgctggtcaccaccggcggcgcgggcggacaaatcgatccgacgcaaatccaggtcgccgatctggcgaaaaccatccaggatccgctggcggcaaagctgcgtgagcgtttgaagagccagtttggggtggtgaagaacagcaaaggtaagctcggcgtggattgcgtgttttccaccgaagcgctggtttatccgcaggcggacggcagcgtttgtgcgatgaaaagcaccgctgaggggccgaagcgaatggattgcgcatccgggtttggcgccgcgacgatggtaaccgcaacctttggctttgtcgccgtctcccatgcgctgaagaaaatgctggcgaaggcggagcggcagacggcgtaa

SEQ ID NO: 177143 - DNA, 1098 bp, Klebsiella oxytoca
atgaaaggacgttgggcaaaatatgcagtaacaggcgcaatgctggcaatgctggccgcctgttcctcaaaaccgaccgatcgcggtcagcagtataatgaaggtaaactcacccagccgttttcattggttaaccaacctgatgcggtaggttcgccgatcaacgccggcgatttctccgagcaggtgagacagattcgtagcgcctctccgcgcctctataccagccagagcaacgtctacaatgcggttcaggagtggctgcgttccggcggcgatacccgtacgctgagccagtttggtatcgacgcctggcagatgcagggaacggataactacggtaacgtccagtttaccggctactacacgccggtggttcaggcgcgccatactcgccagggcgagttccagtatccgatttaccggatgccgccgaagcgcggcaagctgccgtcccgcgccagcatctacgccggggctctgagcgacaactacatcctggcctacagcaactcgctgatggataacttcatcatggacgtgcagggcagcggctacattgattttggcgacggctcgccgctgaacttctttagctatgccgggaaaaacggctggccctattacagcatcggtaaagtgctgatcgaccgcggggaagtaaagcgcgaagatatgtcgatgcaggcaattcgcgaatggggcgaaaagcacagcgaggcggaagtccgcgagctgctggagcagaacccgtcgttcgtcttctttaaaccgcagtccttcgcgccggtgaaaggcgccagcgcggtgccgctgatcggtcgcgcgtcggtggcctccgaccgttccattgttcctgcaggcaccacgcttctggcggaggtgccgctgctggataataacggtaagtttaacggccagtacgagctgcgtttaatggtggcacttgatgttggcggggcgattaaaggccagcacttcgatatttaccagggcattggcccggatgccgggcaccgtgccggctggtataaccactatggccgcgtatgggtgctgaaaaacgccccgggcgcaggcaacgtctttagcggctag

SEQ ID NO: 177144 - DNA, 2259 bp, Klebsiella oxytoca
atgcaaaagccagcagctaagcagttgattgaatttgttcatcaggcattggttctgtcgattcgttacgatgctgttattgcgaatcctccgtatatgggcggcaagggaatgaatggacgactgaaagtattcctgcaagatttctacccagactataagtcagacctgttttctgcatttgtagtcagatgctcgaagctcggagctgaaaattcaaatatcggaattatgtcaccgaatgtttggatgtacattgcctcgcatgaacacttgcgcacttttcttactgagagccgtgcactgtattcacttgttgaacttccattgacaggcttcaagggagcgaccgtacaaatttgtgcgtacaactttagcaataagcggtctcctaaccttcaaggtggctacatcaggcttgtagatttcaagggagccgatgaagagatggctgcccgtacaaaggaggccattcgaaataatgattgtggctggttccaccatgcctctgtgagagatttctggaccataccaggaagaccaattgcttattgggtgtctgaaaaattccgccaatcatttgtggaaacaaaaaacttaaaggacgttggtgagccgcgtcttggaatggcaacgggtaataacgacgtatatcttcgtctttggcaagaagtgtcgatccgaaaggtaggactcggatttgattcaagagatgcggctttggcatcaggaaaaaagtggtttccatataacaaaggcgggaaatttcgccgatggtatggaaataacgaatttgtcgttaactgggaaaacgatggtcagcttctgcgtaatacgctgcatccatctggcgagaggatttgggcacataacttcaacttggattacatttttaagccttgtctgacttttaccgcaacaagttcatcatattttgggattaggtactccgaaaaggggtttttatttgataataaaggatcatcctatttttccaatgctgagaaattaaaaccaattctggggctgctggcatcaaaaccagccactgcaattctcaaggcaattaatccaactgttgagtttcagcctggaaacatttctattattccattttttgaagaacttgtgcgaccagatgtttctaatcaggtgcagtccatagttggcatctgcaaaggtgactgggacgcctatgaaacctcttgggattttactcagtttccgctattagatgcccgtttccatcagtcgccactgttggcgagttatcaggcgttgcgtgcatattggcaggagatgactacgcagatgcaaggtctggaagaggagaataaccgcctctttatcgacgcttacggcttgcagaatgagctaacgcaggaggtaccgttagatgagatcacgctgacctgcaacccccattaccgttacggcgctaagttaaccgatgacgagcgtgaggaacgcttgcaaagcgacactcttgccgagctgatctcttacgctatcggctgcatgatggggcgttattcgctggatcaagagggcttggcgtatgcccatgcaggcaatgagggatttgatgaattagtacaagaaggtgcttatcaaacttttctcgccgatgaagacggcattattccattaaccgaccaagaatggttcaaagacgatgctaccaaccggttccgtgagtttgttcaagttgtttggggtgatgatcatctgcaagaaaacttggatttcgtcgccgaatcactatgtctcaacgccattaaaccgaaaaaatctgaatcagctctggagacgattcgccgttatttatcgactcagttctataaagaccacctgaagacttataaaaaacgccctatttattggctgtttagctcaggcaaacagaaggcttttgagtgcctggtgtatttgcatcgctacaacgagggcacgctttcgcgtatgcgtaccgagtatgtcaccccgctactaggcaaatacgatgcttatgcagagcaacttgagaagcagattgaaacggccgactcgaccagtgaagcaaaccgcttcaagaaagagttggatgccttaatcaagaaacaggtcgaactacgagagtttgatgacaagctaaaacactatgccgatatgcgtatttcactggatctggatgatggcgtgaaagtgaattacggcaagtttggtgatctgttggctgatgttaaggccattaccggttcggccccggaggttaactaa

SEQ ID NO: 177145 - DNA, 2658 bp, Klebsiella oxytoca
atgcagattagcgaactggcacaaggcgttgctgccaaacttgaacaaagccgcattgtgttttggtacgacccagagcaaagctttactgaagagcttgagcatttagctaacgccctatctattgcaaaagaagtaggcgatagcgcggcagatataactgctagggtactgccaaatgatttgaccatcctcaatatgggcaatgagtctgtattggcagtgaaaaaacgcattgaagtagatgagcgtgaagctaaattccttatctattttccaagcgctgagccagagcctgaccgcgattggttgctagacgtgcgtttgtatagcgagcagttttttgctgatcacagctcaatgctgcttaatgagctgggtatcccgaaaatggcgctacgcacgcacattcgtaagcgccagagcttttttgccaataaacagcgcatagccggtttaaaaaagtgggtgactgagaacgaagacgaactgtcgttagacaggaagatgatggcagtggttgtaaaagctgattctgcgtctttgtcggacattctgcttgggttactacgcgaatatgcggcttatatcgaagatgaaagccttggccaacctttatggagccagctaggaaagtttgatcttgagacctcactctgggcatatctgagtgagggttttggctatacagtcgaagagccaaccttcccagacttcgtgttgaaattattctgtactgaattctggagccaaattgaaggtgttgaacgcgattggttgcttaacaatgttctaaaaagcgcatcaggccgggcgacagccttggcgtttatggtgagctggcgcgacagccgctctttcgccgcttactacgaaagcatctctaaggtgcttagccaacagttggaaatttcgactcgtgctggccagtaccatccggttgaacttatcgaatgcgaaacgttcgaggctgtggaacaggccataatccgtggtttagttcgtgatttgctcgatagcagtaaagcgctagaccgggttcagtttgatacggtcttatcaagacgtcttgctagccactggacattgtcacgcaaagaatacttcgcaatttatgaagctatccgcaacgctgaagagttaatgcacttgcgaaatcgctatgtggacgggttccactttgataacgcgaaagcaatgtacgacgcctataccacagacatttatcgttttgaccaggcttaccgtttgttcaatgaacatgtgcactctgtattgagtaaaggtgcagacatactgcgtcagctcgacgacgaagtcgaaagcatttataccaactggtacttatatgagcttggccttgcctgggatcgtcacttggccaatgagaaattacttgaaaagtggcagatttctggcgtaccgcaccagtatgacttctatgaaaaagaagttcgcacacgactgagtctgaaacagacaaaacgagtgtttgtgatcatctctgatgcactgcgttttgaaattgcgaatgagcttggcgctatcattaacaacgagaagcgatttaaggctgaggtgtctacgcagttgggcgttttgccgagttatacccaacttgggatggcggcattattgcctcataaggcgctcagttaccagccagagcaaggcacggctgtttatgtggatggtatttcttcacagggtctagacaaccgcaacgccatcctacaaaaagtaggtggtatggcagtgagttctaaggaactgatgagctggagtaaccaggaggggcgtgacaaggttcgagacgtagaagtagtttatatctatcacgataccattgatgcgattggtgataaggctgcaactgaagagaaaacgtttgaagcctgtcgtagtgccattgaagagctaaaagatctcgttgggcgggtcatcaaccgtctaaacggcagccgagttgtgatcaccgctgaccatggcttcctcttccaacaaaaagtacttgtagcggctgacaaaacctcgttgaaaaccaaacctgctggcgcgatagaagccaagaaacgttatatcgttggtaataacttgccttcagatgaagcctgttggaaaggctcaataaacgatacggctcatggctctagtgataccgagttcctgcttccaaaagcggctcaacgcttccactttgttggtggtgccaagtttgtgcatggcggagcgatgctacaggaagtatgcgtcccggtactgcatgcgcgagagctgcaaaaagaacaagcagcaaaacatgagaaacaaccggtaggtgttgttgcagccactcagcccatcaaattagtaaacaatatcgacaaggtcagatttattcagacagaccctgtaggcgagcgttttgtcgcacggttgttggatgtctatatcgtcgatgcacaaggtaatgaagtatccagtcgtgaaacgattaactttgatagcgtgagtaaagttatggatgagcgtactcgcgaagctaggttaaagcttattggctctcagttcgacaggaacgctcaatacacattagttcttgagaatgcggaaatgagaacccgttatagccaatacgcggtaaccattgatttggcattccaagatgattttttctaa

SEQ ID NO: 177146 - DNA, 2076 bp, Klebsiella oxytoca
atgacaactgatttttcacaagatcataaagacgaaaaaaatcagatgcaaagcgccgatttagacgcattgctcaaccaatattttaaaggccgtgtcgttcgaaaagatctgacaaagcaattgaaagaaggcgctaacgtccctgtctatgtgcttgagtatttactaggcatgtattgtgcgtccgatgacgacgaagttgtaatgcaaggccttgataatgtgaaaaaaatcttggctgagaactatgtccgaccagatgaagcggagaaagtgaagtcactgatccgtgaacgcggcatgtttaaaatcatcgacaaagtaagcgttaagctcaatcagaaaaaagacgtctatgaagctgcgttgtcgaacctgggtatcaaggatgcccttgtaccgaccaaaatagtacaagacaacgaaaaattattaactggcggcatctggtgcattattaccgtgcagtatttctttgaggaaggtcagaagacatcacctttctccattatgagtttaaaaccgatacaaatgccgtccatgaacatggatgaggtgttttcaaccagaagacattttagtaccgatcagtggatggatgtgttgcttcgttccgtgggtatggagccaaccaacttagagcatcgggtgaaatggcatcttatcactcgtatgatcccattcgttgaaaacaactacaacgtttgtgagctcggaccaagagggacaggtaaaagccatgtctacaaggagtgctcaccaaactcattgcttgtctcgggcggacaaacaactgtggcgaacttgttctataacatgagctcgcgccaagttgggttggtcggaatgtgggatgttgtcgcctttgatgaagtagcgggtattaactttaaagacaaagacggcgtccaaataatgaaagattatatggcgtcagggtcttttgcccgtggtcgtgattcaatcgaagcgaaggcttccatggtattcgtcggtaacatcaatcaaagcgttgagacactggtgaagaccagtcatctgttggcaccttttcctgaagccatgattgacactgctttttttgaccgtttccattcctatattcctggatgggaaataccgaagatgcgtcctgagtttttcaccaatagttacggattaatcacagactatcttgctgaatacatgcgtgaaatgcgcaaaagaagttttgcggatgctatcgataagttcttcaaactcggtaataaccttaatcagcgtgatgtaattgctgtacgcagaactgtttcgggcttgttaaagctactacaccccgacgcacagtacacaaaagatgatgtaagagcctgcctgacctatgcgctggaaactagacgtagagtcaaagagcaattgaaaaagcttggcggaatggaattttttgatgtgcactttagctacatcgataacgattcattagaagaattcttcgtcaatgtaccggaacaaggtggcagcaagctaattcctgagggcttacctcgcgctggtgtcgtgcacttggttactcagggaagcactgggcagcttgggttatatcgctatgaaacccagatgatggctggttctggtaaacactcagtgtctggccttggttcgaataccgcagcgaaagaagctgtgcgtgttggctttgattatttcaaaggtaacctgaatagaatcagtgcgtcggcgaagttttctgatcatgagtatcacctccatgttgttgagctccacaatacggggccaagtacaaagtcatcgctcgctgcattaattgcgttctgttcaattctgatgaaccgaccgattcaagagcagatggttgttttgggtgagatgactttaggtggtgtcgtcaatcctgttcaagatcttgcaggcagtcttcagttagctatggacagtggcgcaaagcgtattttgctcccaatggcctcagcctcagatattccaacggttcctgctgagttgttctcaaaattccagatcagcttttatgcagaccccgtcgatgccgtgtttaaggcgcttggggttaattga

SEQ ID NO: 177147 - DNA, 804 bp, Klebsiella oxytoca
atgtgtcgggtccttaaggttgcccgtgccggattttatgtctggctccataaccctgtatctgccggagaaaaggataaccagcgactgctggaactcatccgcgactcctatacgctgagtggtggagtttacggttatcgcagggttcatggcgatcttcgcgaaattggcgaagtgtgcagcagaaaccgggttgccaaaatcatgaggaaaaacaggattcaggctatacatggttataaagtgccacgcgggagccggggacgaccgtcactgatagcgcctaatcacgtgcggcgtgaatttactgtagtgaagcccaatcaggtgtgggtcaccgacatcacctacatccgcacctggcagggctggctgtacctggcagtggttatcgatctttttgcccgtaatgtggtgggctggtcgatgaagccgacactgtcgcgcgagctggcactggatgcgctgctgatggcggtctggcgacgtaaacctgaagaaaacgtcattgtgcacagcgatcagggcagtcagtatggcagtgatgactggcagcggttctgccgggccaataatctggtaccgagcatgagccgtcgcggcaactgctgggataatgcagtggcagaatcgttcttcagttcactcaaaaaagagcgcatcaggaagcggatatacaaaacccgggacatggcccgggcggatattttcgattatattgaagtgttctacaaccgggcccggcgccacagtcatctcggcggcgtcagcccggaggccttcgaaaaggcctcgcagtga

SEQ ID NO: 177148 - DNA, 285 bp, Klebsiella oxytoca; identical to SEQ ID NO: 15281

SEQ ID NO: 177149 - DNA, 417 bp, Klebsiella oxytoca
atgaagaaaacctggatgctcgacaccaacatctgctcgttcatcatgcgcgagcagccggcagcggtgctgaagcgcctggagcaggcggtgctgcgcggtgatcgcattgtggtctcggccgtgacgtatgccgagatgcgcttcggcgccaccggcccgaaggcctcgccgcgccatattcagctggtcgacgcgttctgcgcgcgcctcgatgccgtcctgccctgggaccgcgccgcggtggacgccacgacggacatccgggtggcgctgcgcctagccgggacgccgatcggcccgaatgacacggccattgccgggcacgccatcgcggcgggcgccatcctggtgacgaacaatgtgagagagtttgcgcgggtcccgggcctggtgctggaagactgggtgaaataa

SEQ ID NO: 177150 - DNA, 231 bp, Klebsiella oxytoca
atgcgcacagtttcgatatttaaaaacggcaataaccgcgccatccgtctgccccgggacctggattttgatggcgtcagcgagctggagatcgtccgggaaggggacagcatcattctgcgtcccgtccggccgacctggggctcgttcgcgcagctggacagggccgatccggactttatggcggagcgtgaggatgtggtcagcgatgaaggacgctttgagccatga

SEQ ID NO: 177151 - DNA, 351 bp, Klebsiella oxytoca; identical to SEQ ID NO: 15282

SEQ ID NO: 177152 - DNA, 744 bp, Klebsiella oxytoca; identical to SEQ ID NO: 15283

SEQ ID NO: 177153 - DNA, 777 bp, Klebsiella oxytoca; identical to SEQ ID NO: 120686

SEQ ID NO: 177154 - DNA, 258 bp, Klebsiella oxytoca; identical to SEQ ID NO: 15284

SEQ ID NO: 177155 - DNA, 867 bp, Klebsiella oxytoca; identical to SEQ ID NO: 15285

SEQ ID NO: 177156 - DNA, 270 bp, Klebsiella oxytoca; identical to SEQ ID NO: 15286

SEQ ID NO: 177157 - DNA, 1206 bp, Klebsiella oxytoca; identical to SEQ ID NO: 120690

SEQ ID NO: 177158 - DNA, 975 bp, Klebsiella oxytoca; identical to SEQ ID NO: 15288

SEQ ID NO: 177159 - DNA, 1272 bp, Klebsiella oxytoca
atgtttgccctggccgatgtgaacagcttctatgccagctgtgaacgtgttttccgcccggatttgaaaggaaagccgatagtcgtcctgagcaacaacgacgggaatgtaatcgctcgcagtgccgaggcgaagccctggatcaaaatgggaactccgtggtttcagataaaaaacgaaagatacccggaaaaaatatatgcgttttcaagtaactatgaactttatgcctcgatgttggcgcgcgtgatgaacagcctggaggaactggcccccagagtggaacagtattcaattgatgagatgttcctcgacctgaccggcgtggagcactgtatggagcttgaggacttcggccggcagctgcgtcagcacgtgtatgactgtacccacctgaccattggcgtgggcgccggaccaacgaagaccctcgcaaaatcagcccagtgggcctcaaaagagtggaaacagtttcgtggcgtacttgctctgaccaggggaaatccgcagagaacgcggaaactgctttcactgcagccggttgaagaaatctggggggtgggtaaccgtattgcacgcaagctgaatgtactgggcattaagaccgcgctcgatctcgccctgacgaacccggccttcatccgcaaaaatttttctgtggtccttgagcgaacggtacgggaactgaacggggaaagctgcctttcgcttgaggaagcccctccgacgaaacagcaaattgtctgcagccgcagttttggcgtgaagatcacggagtacgagtcactccgtcaggctatctgtcagcacgcagagcgggcctctgaaaaactgcgtaaagagcaccagtattgccggcatatttccgttttcatcaaaacgtctccgttcgccattaaagagccttactacggcaacgtggctacggaaaaacttcttacacccactcaggacaccagggacatcattgcagccgctacaacggctctggagcgtatctggagggatgggcaccggtatgccaaagccggagttatgctgaatgacttcaccggctccggcgtttcgcagctgcagctgttcgacgaacgcccgccacgcccttacagtgctgagctgatgaaggttctggacgggatcaacaactcagggctgggtaaagtatggtttgcggggcggggtattgccccggaatggcagatgaaacgggagatgctttctcctgcttatacgacacgatggtcagatattccttcagcgaaactggcgtaa

SEQ ID NO: 177160 - DNA, 432 bp, Klebsiella oxytoca; identical to SEQ ID NO: 15290

SEQ ID NO: 177161 - DNA, 1485 bp, Klebsiella oxytoca
atgtacggagaggagaagtcggactcgctcatagtagcggcgaagcaggcgaacaacccgaaaggagcggagtcagtggagcgaaggagcggggccaaggggaacgcggaacagccacacatgcgccggacacagagccgggaaagcatgtcacagaggctgtcacgcgtgcgggaagctgcgaagcagcggaagaaagaacggtttacagcattgttccacctgctgacagtcgaagcactggaagccgcattcctctccctgagcaggaaagcggccgccggagtggatggcatcaggtggatggactacgccggaaacatgaagaacaacataacagatctgcaccggaggctacatcagggcagctacagggcgcagcccggcaggcgtcactacatcccaaaagcggatggaaaacaacgcccgctcggcatcgcctcgctggaggacaagatcgtccagtatgcgctggtgaaaatcctgaacgcagtctatgaaaacgactttatggggttctcatacgggttcagacccgggcgaagccagcacgatgcactggacgcactggccacagggctggtacgcactaacgtaaactgggtactggatgccgacatcagtcagttcttcgacagggtgagccacgaatggctgatcaggttcacagagcatcggatcggcgaccggagcgtaatcaggctcatacgtaagtggctcacagccgggacgttggaggagggtcaatggcgagcaacggaggaaggcaccccacagggtgcggtcatctcaccgctgctggcaaacatatacctccactacgtcttcgatctgtgggcgcatcagtggcgacgtcgctatgccacaggcaatgtggtaatggtcagatacgccgatgacatcgtcatcgggttcgacaaacgatacgatgcccggcgcttccgtatagccatgcagcgcagactgagggagttcggactcacggttcacccggagaaaacccgtctgatggagttcggccgcttcgctgccgaaaaccgtgccatcaggggaaaaggcaaaccagaaacgttcaacttcctcgggttcacgcacatcagcgggaaagatcgcaacggcaggttcatgctgatacgaaagacccgccgggatcggatgacggcaactctgaaagccatcaaagacggtctgcgaaggcgctggcattactcaatccccgaacagggaaaatggctcaggagagtggttcagggatacctgaactatcactcggtaccgggcaacttccccaccatgcagaagttcaggacacacgtaacaaacctctggcgccgggcgctcaggcgcaggagccagaaggatgatacgacctggacgaaagcaaacaaactggcagccgcatggctaccaagggttcgggttcttcatccatggcctgtggagcggttcaccgccagacacccgaggcaggagcccggtgcgtaa

SEQ ID NO: 177162 - DNA, 276 bp, Klebsiella oxytoca; identical to SEQ ID NO: 120695

SEQ ID NO: 177163 - DNA, 378 bp, Klebsiella oxytoca; identical to SEQ ID NO: 120696

SEQ ID NO: 177164 - DNA, 492 bp, Klebsiella oxytoca
atggaccaggaaatcgctactttaaaactcaatatcaaccagcttgccgggattactggcgtacaccgccagaccgtcgctaccaggctaaaaaatgtcagtcccgcccagggaagcaacagtaaacttaagttgtatcttgtcaccgatattctgacagaattaatgatcccgacggtttcctcatcgaatcttgaagagatgacaccccctgatcgcctcgctcactggaaagcagaaaatgagcggttgaagtttgaagtagataccaagcaacttatccccgccgaagacgtcgcacgtgaattttcaatgatggcgaaagccgtcgtcatggtacttgaaacacttccggacattcttgagcgcgactgtgcacttacgccggttgcggtatcacgcgtgcaaagcgtgattgatgacctgcgcgatcaggttgcccaaaaagtaatggacgctgaaccagaggaggatgagccagaggaggactga

SEQ ID NO: 177165 - DNA, 2109 bp, Klebsiella oxytoca
atgacaaaacgggcatctgccagggggatacgccgcgatgtctccggtattcttcgtgccccacgtcgtatgcaggtggccgatgcggtcagctcatatatgcgtgtgccgatgggggcgggtaactccgtaccatgggaccccaatctggccccttatattattgagccgatgaattgtctggcatcccgtgaatatgatgcggtggtgtttgtcggaccggcccgaaccgggaaaacgattggcctgattgatggctggattgtctacaacatcgtttgtgatcccgctgacatgctggttattcaggtctccgaagagaaagcgcgtgaacattccaagaaacgcctcgatcgcacattccggtgtagtccggaagtaaaatcgcgactcagtccgcgtcgtaatgacaataacgttcacgaccgcaccttccgggccggtaactatctcaaactgggctggccgtcagtcaacattatgtcgtcgtcagactataaaagcgtggcgttgactgactatgaccgctttcctgaagatatcgacggagaaggtgatgcattttccctgggttcgaaacgtaccactacgtttatgtccagcggcatgactctggttgagagttcacctggccgagatattcgtgacacgaaatggcgaccaaacaccgcacatgaggcaccgccgactaccggcatattatcgttgtttaatcgtggtgaccgccgccgcctttactggccgtgtccgcattgcggagaatattttcagccggaggtagccaatatgacgggctaccgggattcccttgatcccgtggtggcaagtgagtctgcatatctccagtgcccggcctgcaaaggcaggatcaccgcagatatgaaacgtgaactaaatatccgccatgtctggttacgcgatggagaaaaaatagaccgtgatggcaacagatttgggaagccgcggcgatcacgcatcgcttcattctggatggaggggcctgcggctgcatatcagacatggtcgcagatgatatacaaattcctgactgctgagcaggaatatgagtccacccagagtgaagagacgctgaaaacggtagttaataccgactttggtcggccttatctaccccgagccagtctcgaacaacgtaagagtgagctgctcgaacgacgcgctgaagacgtgccgaagcgatctgtaccagatggtgtgctctttatgactgcaaccgttgatgtgcagggcggtaaatcccgtcgtttcgtggttcaggtgactggctacggtgagcagggtgagagatggctggtcgatcgctacaacatacgccagtctctgcgggcaaacgagcacggtgaatgttactccatcgatccggcaagttacccggaagactgggatttacttttgtctgacgtgttcgaaaagtcatggcccttagcgagtaacccttcaaaacgcatgcggatcatggcgatggctgtcgattccggcggtgaggatggtgtcaccgataacgcctacaagttctggcgtaagtgccgccgggatgggcttggtaaaaagattttcctcttcaagggcgacagtgtccgacgctcaaaactaattacccgaacatttcctgataacactgacagatcaactcgccgggcaaaagccgctggcgatgtgccgctttaccttcttcagactgatgcgctgaaagatcaggtgaataacgccctgtggcgagaatcacccggcccgaactatgtgcatttccctaaatggctcggcagctggttttacgatgagctgacctatgaggaacgttcacccgatggaaaatggagcaaaccgggccgaggtccgaatgaagctttcgatctactcgtttatgccgatgcgctggccatattgcacggatacgaaaagatcaaatggccggatgcgcctgaatgggcgaggcgggcaacgtggattgaagaaagcacgccggaaactggcgaagcgtcacccacgttatcagcaaaaacgacccatagcagaaaaaaacggaaggcaaataagacggatgtcgaaaacaacccgtggactacatcatcaggaggctgggtgtga

SEQ ID NO: 177166 - DNA, 216 bp, Klebsiella oxytoca
gtgaaacaaaccgatattgaatccattatccagcgttataccgatgcggaaatagctgtgctggatggaaagtctataacattcaacgggcagcagatgacgctggagaacctgtctgaaatccgcaaggggcgtcaggaatgggagcgtcgtcttgcttccctgctggctcagcgtaacgggcgacccggttataagctcgcgaggtttccatga

SEQ ID NO: 177167 - DNA, 1500 bp, Klebsiella oxytoca
atgagcctgttagatgatgcgattggtgtcttttcccctggttggaaagctgcgaggttacgttcgagagcaatgatacaggcatatgaagctgttaagcctactcgtacgcataaggcccgcagggaaaatcgttccgctaaccagcttagtcagatgggagctgtttcacttcgagaacaggctcgctggttggacaataaccacgatctggttattggtgtattcgataagctcgaggaaagggtagttggagctaaaggaattattgttgagccacacccggtactaaaaaacggaaatatcgcaaaaaaactggcagaacaaatcagaacgaagtgggccgaatggtcagtcagccctgaggttacgggacagtttacccgcccgatgcttgagcggttgatgctcaggagttggctcagggacggggaaattttcgctcagatggtgagtggctcagcgcagggacttgatccagtggctggtgtacctttctggcttgaagcgctagaggctgattttgtgccgatgaccaatgatgagtccctgcaactttgtcagggggtatatgtagataactgggggcgcccgaaaaagtacctggtctataaaagtctgcctgttaccggccgtcaattggatacgaaagatgtcgatgccgggaatatgcttcatctcaaatttacccgccgtcttcatcagacccgagggacctctctcctttctggtgtgctcatgcgcctcagtgcgctgaaagaatacgaggatgcggagttaacggcagcacgtattgcagctgcgctggggatgtacataaaaaaaggagacgggcaaagttttacggacgagaccaccaaagacaatcgcgacgtaatgattgagccaggcattatttatgatgatctgcttcccggtgaagacatcgggatgatcaagtccgacagaccaaaccctaaccttgaaacattccgaaatggacaattgcgcgctgtcgctgccggtgctcgtctcagcttctccagtacagccagaaactacgatggaacatacagtgcccagcgccaggagttggttgaatcaacagatggttatctgatccttcaggactggttcatcggcgcaatcacccggccaatgtaccgaaactggttaaaaatggcggtagcttctggcgaaattcagctaccacgtgggctgaatatggcgtcgctttacaccgcagtttattccggaccggtcatgccgtggatcgacccagttaaagaggctaatgcctggaaagcgcaaatccgaggtggtgctgcgacagaatctgactgggtgcgagctagcggacgaaatccggatgatgtgaaacgtcgtcgcaaggctgaagttgatgataaccgcgaactgggactggtgtatgacaccgatcctgcaaatgataaaggaggcaccagtgccgaagtcaaagaaccggacgccccgtcgtccgaaagccagcgcaagaagtaa

SEQ ID NO: 177168 - DNA, 2016 bp, Klebsiella oxytoca
gtgccgaagtcaaagaaccggacgccccgtcgtccgaaagccagcgcaagaagtaattcgtggtttcgtatgcaggccagcgccgacaatcaggtagaaatttatatctacgacgagatcggctactggggcgtgaccgcccggcagtttgttaacgaccttaaagcgcttggtgatgtgacccatattaatcttcatatcaattcgcctggtggcgatgtctttgacggcatcgccatttttaatgctcttaaacatcatggtgcgtcaattaccgttcatatcgacggtctggccgcgtctatggcctcggtcattgctatggtaggtaatccggtcatcatgcctgaaaacaccatgatgatgatccataagccctggggctttgctggtggtgatgccaacgatatgcgtgactacgcagagcttctggacaaggttgagtctgttctgatccctgcttatgcagagaaaacgggtaagagccccgatgaaatagcggcgatgctggaagatgaaacatggatggacggcaaagaatgcgtcgctatgggttttgccgaccaggtcaccccctctcttcaggctatggcctgtatccagtctaaacgtattgaggacttcgaaaagatgccaaaaaatattcgcaacatgttagcgccgccgcgagcgaccacgcaacgcgatccccagcaaccacaaatgcagcagccggtggtgagccaaccttccgtaattgacgaaaataccattcgtgctcaggtaatcgctgagcaaaaggatcgcgttaatggtattaacaacctctttgcgatgtttggtggtaaacacgccgaactgcaggcgcagtgtgtagcagatatggactgctctgtcgatcaggctaaagacaaactgctggcgctgctgggtaaagatgcttcaccatcggcgaaaaccacgccagcgcatattcatgcaggtaacggtaattttgtcgccgatggtattcgccaggcattgatggcgcgtgccggatttgaagatcaggaacgtgacaatgtctacaacggcatgaccctgcgtgaatatgcccgcatggccctgactgagcggggaattggcgtatccagctataacccgatgcagatggtagggctggcgctgacgcacagcacctctgattttggcaacatccttcttgatgtcgccaacaaatcgattttgcagggctgggacgaagctgcagaaacctttgagcagtggacaaagaaaggccagttgtcggactttaagacagcgcatcgtgtggggatgggcggattcccgtctctgcggcaggttcgcgaaggcgctgaatataagtatgtgactaccggcgataaaggtgaaaccattgctcttgccacctacggagaaattttttccatcactcgccaggcaatcatcaacgatgatctgaaccagctcacagatgtaccgatgaaaatgggccgtgccgctaaggcgactatcggtgaccttgtttacgccattctgaccaaaaacccaaaactctcagatggtaaggcgttattccacgcagaccacaagaacctgtccaccggtgctatttccgtcagcagcctggacgatgcacgtaaactgatgcgcctgcagaaagagggagaacgatctctgaacatccgcccggcatttatgctggtgccggtcgcgctggagacactagctaaccagacgattaaatcagcgagcgtaaaaggggcggatattaacgccgggattattaacccgatccagaattttgcagatgtgattgcagaggcccgccttgacgaagctgatgcaaaagcctggtatctgatggcggcaaaagggacggacaccatcgaagttgcgtatctgaatggtgttgatactccttacattgatcaacaggaagggtttaccactgacggtatcgctacaaaagttcgtatcgatgctggtgtggcgccgcttgattaccgcggcctggtgaaatccagcggccagtaa

SEQ ID NO: 177169 - DNA, 327 bp, Klebsiella oxytoca
atggctaaaaattatgtgcaagacggcaaaaccatccccgtgaaaaattctggtaccgaggaaattctcagtggtacacctgtttctttaggcggaatgattgcggttgcaattaccgatattcagccgggtgatgtaggcgacggattcgctgaaggtgtctttcttttacctaagctgccagctgatgccgtgaccgccggggaaaagatatatctcaaagctggaaatgttcagctggatgacaccgatgcggtgttagccgggactgcctgggaggatgctgcggcaggcgttaccgtcctggaagtcaaaatcaatggctaa

SEQ ID NO: 177170 - DNA, 294 bp, Klebsiella oxytoca
atggctaatgcctttgacaatatggctggcagaatggatgaactgacggcgaaaaggctgggcagaacggtgactattaatggcgatgagcatattgctgttgaaagtcacctgctgcctgagctggggccggtcgcgggggatgggattaacctggttatcttcagcgctggctatcagtcggcgcggggagatgaggttatttataaaagtcaggtttacaccgttacccgatggctcctctttaatggtaagccgcaaatctggattgaggaggtcacaggtgacgattaa

SEQ ID NO: 177171 - DNA, 552 bp, Klebsiella oxytoca
gtgacgattaaagggctggaagagctcaggcagaacctgagcaatatcagtaaaaatgccattcctcgggcgacatcccagtccattaaccgggtagctggaagggcaatcagccgcagctctacgcgagtggcgaaagaggctaaggttaagcgaaaactggtcatgcagcgcgccaaacttaaacgggcaagccctaaaaaatcaatggctaccatccgggtaaatcgcggcaacctcccggcgataaagctggggccagtacgagttcaactttcacgacgaaagcgcgacaacggtagttctggaagcgttctgaagattgggaatttcagcttccctggtgcttttgtgcaacagcttaataatggtcgctggcatgttcttcgacgaaccagtaaatctcgttacccggtagaagtggtgaaagtacctctggccacccccctgactgatgcattcaaagaagaacttcccaaactgatggcatctgatatgccaaaagaaatgatggctgcgatcaaaaatcagataaggctggtgacaaaatga

SEQ ID NO: 177172 - DNA, 399 bp, Klebsiella oxytoca
atgattcacccgcaagtacgaaaagctgttctggataaactgaagtcaatcaactccgggaaaatattctggtatgacggtcggccagctttcctggctccagaagagttacccgcggtcgctgtatatcttactgatgcaaaggcgacgggcggcagtattgatgaggaagagtgggaggctgtccttcacattgaagtattccttaaagcaactgctaccgatagcgagctggataaatggatggaaacccgcatctatccggccatggctgacgttcctgagcttgccagtatcgttgaaaccatcagcgttgccgggtacgactaccaacgtgacgatgaagccactacatggggctccgccgatctccaatattccctgacttatattatgtga

SEQ ID NO: 177173 - DNA, 483 bp, Klebsiella oxytoca
atgccaactccaacacctaccacgccgacgaaaggtgccgggacaactttttggatttataccggaactggtgatccctacgatgatccgttaagtgatgtcggctggacacgaacggcaaaggttaaggaattaacacctggggaactgactgcagagtcatatgatgattcctatattgatgatgatgcgcctgactgggatgcaacagctcagggtgttaagtcagccggtcaaaccagcgtaacacttgcctggaaacctggtgaatctggccagaaggatctggttgactggtttatgagtggtgatgaaaaatcttacaaaattaaatatccaaatggggcagttgatgttttcaccggctgggtaagtagtttgggtaagactatttcacgaaacgaagttattacccgtagtgcacaaatcaccaataaaggtaaaccttctctggctgaagataacgcttcgactaacccttaa

SEQ ID NO: 177174 - DNA, 396 bp, Klebsiella oxytoca
atgacttatcttaaaaaagacacgttaaatcccgatggtgagagtattttactgtttgagttatcggcttacagtagaatgcaatatattgaatttatggttgaagagcggaagtcattaccatcagaggaaagcacacctgaagaaaactttaaattggccaccttgttgactatgcgtgatcaggccatgctcgttgcattatccttgagcgaggcggatgaagagcaacgtgaagggaaagatattttccctgaaattatacgaaaatatccaccagggttattgggcagcgctgcattacttgtgcgtatgctttcagggatgatcccaccagttaataatgaccctgagaaaactgaagaagaggaagagcccgatttggaaaagtcctga

SEQ ID NO: 177175 - DNA, 2697 bp, Klebsiella oxytoca
atgtcccagccagtgggtgatctggtcgttaaaattgacggcgatagcgcaaaatttgatgaggaagttgctcatctgaataagcagctgagcgggttaggtagagccgcgaacgacagtacagcccaggtcaccgcagccttcacgcggcaggagcgtgctgcaaaacgtgccggtatttcaatcggccaatacaataatgcaatgcggatgttgcctgcgcagcttactgatgtcgcaactcagttagctggtgggcagagcccatggctaattttgctccagcaaggcggtcaggttaaagactcatttggtggcctgatcccaacatttcgaggattacttggagctgtaagtccgttggccgttggggttgcagctttgaccgccgcaggtgccggaattggatatatcttctatcagggaacgtcaaccctatccgattttaataagacgttgacgctatcaggtaacacggctggtctgactaccgacagaatgctggcactggcaaaatcgggacagcaagcaggactcacctttgatcaaaccactgattctctgactgcattaattaatgctggcgtgggggctggtgcgcgttttgatgaactaagccagtcagttgcaaaattttctacggcatctggtatccccattgaaaaggttgcggaagcgttcgggaaactgacaaatgacccgacgtccggcctgattgcgatggcgcaacaatttcataatgtgacagccgagcagattgattacgttgctcagttacaacgttcaggtgatgaagccgctgcacttcaggcggctaatgatgcggcgacgaagggatttaacacccagactcagagcctgatcgataacatggggacgattgagcggtctgctgattcgttgaaacgcgcgtttaaatccatgtgggatgctgctctggatttggggcggcctgacaccgcaggggagatggtaagcaaggcgcaatcagcttttaagcaggctgatgacatctggaatctcaggaaaaatgatcgttatgtaaacgatgaagccagagcccgtttctggaatgacagggagtcggcccgactggctcttgatatggcgcagcagcaagcaggtattgccaaagccagcgcagcagcggccgaaaaggaagctgaggcagaatctgaaaaacagaaatatgccgctcaagcacaagccaattatgctaaatcgcagactgcgcttgaaaagtataccgccaggcagaatgaattaaataaagctctgaaagaagggcatatcctacaggctgattacgccatcaatatggccgcagccaagaaagaatatgaggccaccttaaaaaaaacgccgaaaccaaaaggcgttaaagtttctgctggtgatcgttcttctgatcagactgatgccgaaaccctgcagttgatgacccagttaaagttgctgcaacagcatacggggcttaacgataccatcagtcagcaacgtaaaaatttgtggtctttacagtcaaaattcactgttatcgaagaggcatcgaaaacacgcgcgctgagcaaagatgaacaatctttgctcgccagcaaggataaggttctggcgcaggctgaggttaatgcgaaacttggcgatcagatcgttgctcaggaacggctgaataagcttcaggataatgcattaaaatatgttacacagatgcaggaaaaatcatctgcactgacagagagtgctggattaagtgacagggatgcacaacgtaataatgagagggcgcaattaaggcagggatggaaaaatcagggtggaagcctggaagatgaagggtatcagaaagagctttccgcccttgagggctattacgctgcacaggatgaaatgcgtaataactggttggccggcgttaagtcatcatgggaaaactatgctgatatggccaccaattacaatcagatcgccgcggatacaaccaatactgcgcttagtggtgtaacaagtaatctccagcagggattatatgaccttgccactcagtccgaagatgctggcgatgctctgagcaacatggttgaaggatttgggaagacagttattcagacgctggctcaactggccgcacagtggctggtttatcagggcgttcagcttctggttggtaagaccactcaggcaaccgctgttgctccgttgatcgctaatgcgcaggctacagcgcttcaggcccaacttgcagcgtatgcatccaccgccgctatcccaatagttggtccgggtctggcacctgcggcactggctgcagcggctggcgtcacagcccctcttgttgctgcaatttctgcatccgcccttgctggcatggcgcacgacggcattgataaaattccggaaacgggcacctggctgctgaaaaaaggggagcgggttacgacggcaggaacatcagcaaaactggatgccactctggaacaggtgcggaaacagcgttcccttgccggaaacccgctgcatgttgagttcaataacacctacaccgggaaaccggacgatgcaatggtccaaatgttggatcagcggcagcgtgcatctgaaaaaaggcttaagcaatattttacttcccaggttattaatccaactgagaattatggtcgatcacttaaatcagtttatccggggaggcgtaagaaataa

SEQ ID NO: 177176 - DNA, 474 bp, Klebsiella oxytoca
atgaccgatatttattatcctcatgattgtatccccggccccacgtacgataattatggatttgaaccgactgatcctatgattcgaaccgatagggtgggggggcttgccaggcagcgtagaaaatatacatcagtgccgactgataatacggttgtctggcagtttaaaactgacgcgcaagcacaggcatttgaagcatggtacagggatgtattaaccgatggtgttgcatggttttacatgaaatgcaaaacacctgttggccttaaattttttaaatgccgatttgtaggtatttataaggggcctacctttattaaacccggtctttggcgttattcagcaactgttgagttaagagagcgtccactcgctccagttggctgggggaaatatccggagtggattgtcgggagttctttactcgatatagctctgaacagggagtggcctaaacatgacagcgattaa

SEQ ID NO: 177177 - DNA, 483 bp, Klebsiella oxytoca
atgacagcgattaaccgcctttatgcgtcctccgggtcggaggtcatcattggtacgttgcagatcgatattggcggtcagacgcattatttgtgtgagggttatgaggacattacggcggttaccgaggggggcgaaaccgtaacgtttattgcctgtgccattgtcctttcccttcctgccagaaacgaagacgggacgcaggacctgaagtttatgctgtgcaacatcgacggcgttgtatccacggctattcgcaaggtcattgatgccatatccactgccagcatcacattcagaaaatacatttccactgaccttaccgcgccagcggagccgccttacgtcatgccggttaaaggaggctcatggactccgcttactgtaaacgtcaccgccggatttaaaaatatgctcgattatgcctggccacgtgacagatacacgttgacgtacttccagggtctccgttactcccgatag

SEQ ID NO: 177178 - DNA, 387 bp, Klebsiella oxytoca
atgctcaacattgacaaatacctgactgtccgctggcagatgggcggccgcacttttcctgttctcgactgctacggcattgtacatgaggtccgccgggacctggggctgcctgaatggcccgcgtttgaggctgtgattaaagagcgtggcagcactgaaatggggaaagtctgcgagagtttttcgcgtgacctgactccctgcaagccgtgcaacggtgcggttgccgcctgctatatgggaaatatgatcggccaccttggtgttgtcgtcaaaatggagggagcgctttacgttattgaatgtaatccccggcgcaacgtaaccattcttcccctggcgcgttttgaacgccagtttctgaaagtggagtattaccagtga

SEQ ID NO: 177179 - DNA, 3069 bp, Klebsiella oxytoca
gtgacaatccgcctttacccgtcgcgtttgcctggcgaaccgctggagacgcatgaacaccgggatacgaccatacatgactggatgctccagcatgtcgataactaccgtaacgatatggtgcagcgtgttacgtttgaggtgaatggtaagccagtcccaccggcagaatggcctttatgctttatcagtgctgagagcgatgtaaaagtttacccgatccctggtgagggagtgacggcaactgctatcgctgcctgggcagcggcggccatcgctgcagcctcggctgtgtatgtgctgatcaccatgtcgaacatggataaaggcggctattcatcctcctttggtctggggctggatttaaacccagccaaagcgaaccaggcgaaacttggcgacccaatccgcgaagtgtttgggcgttgccgtatctatccagattatgtcgtacagccagtgacgcgctttaatcctgatgatccaacgctaatgactgtcgaaatgatggtttgccttggaaaggggaatttcgcgtttacaaatggtgatatccgtgtgggttcaacacctatttcagcattaggggactcgttcagttacaacgtttattcacctggagcagatgtttcaggagatcggcgaagtgaaaactggttcaactcgacagaggtaggtggtacttccagcgggagtgggcttgatatggcccagacctcgccagattcgacagatatcaacgccgacagtatgaccgtttctggcgcatccgtgacgtttaacgggctggatgatggcaacgatgatgacgatgaaggcaatgcgttgcctgagtcgtgggttgagggggccattgttacgatcgtcgccccgatgaattttctggtttcaacctcgtcgggatatagcgttctcgccagtaactctctgggtgaaattaatccctatccgggtatgccggttaccctggaaattaacggcactgaatacgaactggttattgcaacttatacggcgaagcaggacgcgatacccggggtgggtggaaatgcggccagcctgaaagcaaatgcctccccatcaacatatgattactccggtaccggccagacttttacgatcacctggcagggacatgagtacactatttccctcgttgcagactatgtgaatatgcccggcctgctggcggtgataaacgatggcctgaccgggtcaggattactggcgcaggatagcggcggtgttgtgctgattgctgaggcatcaggcccctggctcggaggaaacattacctcatcatcgctaccggtagccgtttttggcgacagtcctgtatttacctccggcaccgcgtccagcggaggcagtccggcaataactgctaacgttacgctggcgtatgggagtgcaaccggagtggcattttccgggataccggagggaacacaacgcctggcgctggctcaccgtggcaacgagtaccgcattgcggatgcggacggtacgaccgcaacggttcagcggctgattgatggagtggttgatccttcctggtctggcttctcaccccgcacgatgattgactatcaggctacagggatcagcgacaacaatacctggatggggccgttccttgcctgcccggaatctgaagtggtggacgctttcgaggtgaatttctcctttccttctggcatttgcggattcgacagcaaaggcaaaaaacgcatcaggcattgtgagtgggaaatacagtaccgtgtttatggatctggctctggctggacgagcaggcagggggtttacgcgcttaaaaatatcaacgggttgggttttacagagcgttttgatctctcttctcctgggctggttgaggtgcgctgccgtcgccgcaatgagcagggtagcaataacgcgcgtgactcgatgtactggcaagcgttgcgtggtcgcttgttggctcggccaacatcctatgctggcgtcaccctgatgggggttacggttgagacggggggcaaattggcggctcagtctgaccggcgcgtaaacgttgtggccacgcgcatttatgactctggcgtagcccgtagtatctctggtgcgctttatcacgtcggccgttctcttggtatggaaatggatactgaggcaatagatgccctggagcagacttactggaccccgaacggcgagtatttcgattttgccacgggtgacagtatttctgcgctggaaatgcttcagaaaatcgctgcagccggaaagagttattttctgctaaatacccagtctgttgcatcagtgggtcgtgaaggtgttaaaccctggaccggggctatcacccctcacgagatggtatccgagatgcagaccgatttcgtcacggtgactgacgacgattacgatggtgttgacgtaacctatatcaacggctcgacctgggcagaagagacggtgcaatgccgtctgcctggcaacccaacgccgctgaaaatagaggcataccgggctgatggtgtaggcaatcctgatcacgcatatcagattggtatgcgccgactgaaaaaataccagctgcagcgcatgacgcataaaacgacgacggaactggacgcgctctgttacaacgtcggggatcgtattgtgctgaccgatgatatccctggcagcaacactatttcgtgtttgattgagtcgatgacaactgctggtggggtgaccacattcgatgtgtcggagccgctggactggacttttgcaaatccacgcgtctatctgcgttatcaggatggaaaagcatcacggctgtttgaagcatcacccacaggtgacaactatcaggtatccgtcccgtatcaatctgagttcgccgatatcctgctggatgatccgataattgagcctccccggttaattttctgtagttctgagagcgacctgtatcacgccattgtgtccgagatagtgccacaggacgatggaacctgcgagataactgcccggcaataccgcgctgaattttacgactacgacgacgccacataccccggcgacgtcgcgtaa

SEQ ID NO: 177180 - DNA, 1137 bp, Klebsiella oxytoca
atgagcaaggatttaaatgttggaattgtcgcggattggcttgtgacttatgcgggctcagagaaagtaataaaagagtttatagaattatatcctaacgctagcttatattcagtagttgattatttatcagaaagcgatcgacaattatttaatggtaaaagggcaaccacaacatttatacagaatatgccttttgctaagaaaaaatatcaaaaatatctaccgttaatgccattagcaattgaacaacttgatgtttccaaacatgacatagttttgtccagcagtcatgctgtatccaaaggagttttgacggggcctgatcaactccatattagctatgttcattctcctatacgatatgcttgggatttacaacatcagtatttgaaagaggctggaatggattctggagttaaaggattattagcaaaatggctattgcacaaaattaggatatgggatcatcgtacttccaatggagttgatcattttattgcaaactccaaatttattgcgcgaagaataaaaaaagtttatggacgggaagctgatgtgatatatccacctgttgatgtggagcgcttttcattatgtgaatgcaaagatgattattattttacagcctccagaatggttccctataagcgaatggatcttattgtcgaagcctttagccatatgcctgataaaaagctagttgttattggtgatggttctgaaatggataaaatcaagtctaaagctacaaaaaatattgaaattttaggatatcagcctaattcagtaatgcaagaacatatgaggcaagcgaaagcttttgttttcgctgctgaagaagattttggcattacccctgtagaggctcaagcctgtggaactccagttattgcctttggtaaaggtggggcacttgaaacggtcaaaagtaatgtaacagggatactttttgagagacaagaaatctcatctattattgatgctgtaaacaaatttgaacttaatcaagatagaatctcatatatggaatgtagattgaatgctgaaaaattttctgtgccaagattccaaaacgaaatctcagcttatatctctgaaaaatacaagttatttgaagattccagaaataaataa

SEQ ID NO: 177181 - DNA, 1233 bp, Klebsiella oxytoca
atgaatgaggcaataaaagctattgaatacgaaaccattaacactagaaactatacatccgtaaaattacttatattcattatcgcactttcttgtcaattaacagacattacgatcggccctgtgaagttttgggagcttctggcaataattttttttccattctttataaggcgtgttgagaaaaaaatgctatggtttttacttgcatttactattcttcttttgctatcaatattcaaaggtatgattagttcaattcattatgagtacttttctaccttgaaaagcaagtatagtatttctctggtgcgttacgtagaacttatattatgcttaatagtagcgttaataccgttcaatttgataaaaaataaaagattagactttgattatattgttaaaaagtttctcacttataatgtatttctcacgatcattatactccttctttatgccattgatattgtcttgaaaacttcactggtatcgtatggtagtacttttagattgagagggttttacgtcgaaggtggcccatatgggctttacatagcaactttgatttttctcgaactaacattttataaaagaaaaataattacaactttctttcttattgcactgttattaacgcagtctaaagctggctttgttgctttctttgtttttttattttttatacttttccaaaataatagatttttaagtggctttttgaatcccaagaatatatttcgtttttttatgacgattttaatagtagttttaattggggttggtgccacttataagattgctaacaattattatcaagatatacagaacattgatgaagaaattaagggcagagaaaatgattcatcattagtaatgggtaggattgctgccacggatattggtccaagaattttacaggataatccatttttaggtgtgggattaggtgcatattccttagtccgtaataatgtgaattatcgtggctcttttcctgtcgtgacaggatgggatctaactggattgggaggcttttttaatttattagtagaaaatggtgtaatcggtttattgatatttatttttgcaataaaaaaatattttaagttggacaaaataggaatatatttccttctgcttttttgtgtgccttttattttcggtgctcagctttatatgatttatccttggttgtatttagggttgtattatgcttttaagaagagtagttaa

SEQ ID NO: 177182 - DNA, 1653 bp, Klebsiella oxytoca
atgggcatatcaagacgacaactttttaactttatagccccgctaggtactttatcttttttgatgcctggcacatcgagggctaaaatagataacggcgcaactctctcaaatgaaaaagatttaacaaatagtaaaacttatctagctaaccgtgtttctgtatcgccgattgattttggcgcagtgtcaaataatgctgatatagatcacacagaaattattttgagggtaattaaatttgcggaacaaaataataaagctgttgatttgagaggtgggccatggaggattactcgtgcactagattttacaaatattaaacagattattgttgactggacaggacgattaatagtaaatcctaattcatttaaagacgaaaacggttatgttgtatatattggtgtaccaggcagtaatgtcaaaaatggccgagcgatatatacctctatagttggagtattattaattatctccgaaaaccgtgatgctacccttaatggtgtattcattaagggtaactttttgactatagatagcattagagcaattaattttaacggtactggaattcatatttctgcgacttgggactcaacaatccaaagtatttcggctgaacgttgtggaaatgttaagaattttcaactacggatagagccgggtggtgatacttcgaattgtttatttattggaaggatacagagcgaaagggcctaccataaatgtttagaaattaagtgcatacgttcagttattaatactatccacgccgagagaaccttaattcagacagacgatgatggcacgaagcccttaatctcaggtttaaagtatgtaaatgtctctattcaaattggaaactcaacaattaatcagatgatatatgacaatgtttccgataaagttgccacgagtcaggtttttagttctgtagtaataaatcttgatcaatcctcgatgagagatggtcaatttaacaccagtcatgttgtatctaatttcggtcgtaattcagcatttgaaaattttgctgtatatcaatttttctctggtaaaggagttagagattctagttttagtaattttaaagttaaaaaatcttttttggctaaatcaaatataagaattattggtggcaacattaaaaatttatctttagcgaaagatgctgaaaatattttattgaatggttgcaatatttcctctgtattattaggggaaaagatgaccaatattttttttgcaaactgcacatttgccaaatcagccgagatcagcgattcgcctactgcaaactatgatcatttaaatctatctaacccagtcattttctcagactgtactttcaaaggtctggtatctggtgttgatatcactcctttaagtatcagaggtggtaatattagagaggtcaatttaaagagtaattcacgcgtttattttgaaaacgtttcgattggcagttttagttatataggtagacctttatttaccacaagaaattgttacattgaaaaattggtttcatggtcgcagccttcaaatgatgtttatcagcggggcatgaccactgaaatttccactgatgaagggataactcaatatatctataaaagtccacaagtaggctgggttaaaattgaatga

SEQ ID NO: 177183 - DNA, 1473 bp, Klebsiella oxytoca
atgagcttaaaagagaagactgttagaggcgcaaaatggtctgctattacgacaattgcaagtatcgctatatcatttctccaaataactttgttagcccatattcttgcgccacaccaatttggtatactcactatatcattgctgattattatggttgcagatacaatttctgatttcggaatatctaattcaataatacagaaaaaagaaatatcgaattcagagttaacaaccttatattggataaacgtctcattaggtatttttgtatttgctgtcgttttcttatttagtagacagatctctttgctatttaatcaacctgatgtcaaagaattgattcaaacacttgcttttgcatttttaatcattccgcatggacagcagtttagagcgcttatgcaaaaggagcttgattttacgaaagtggggatcatagaaactttgtctttgatcattggttttactgtgactttaacttcagcttatgtatacccattcgcgataacggcgatatggggatacctctgtatgtcattatctcgtactcttatgttttctattgttggtagaaaaatatacaagccatccttcagctttaaattacaagggatatcatctaatctaaaatttggtgcttttttaacagcagatgcgttgattaatcaacttaattcaaatattgctactatcgttctatcgcgttctctgggagctataattgcagggggatataatcttgctagcaatgtagctgtagttccaccgtctcgccttaatccaatactgacaagagttctttttccagcattttcaaaaatacaaaatgataatgaaaaattaaaaactaatttttataaacttttgtcatttgtcggtttgattaactttccggcattgttgggattgttagttgtttccaataattttgtccttactctattcggtgaaaaatggatattcattacacccattttacaagttttatgtgtcgttgggcttttacgctctattggaaatcctattggtgctttgctgatggcaaaagctcgagttgatgttagttttaaatttaacgtatttaaattctttctttttattcctatgatttggttaggcgcaaaatttggagggggaactggtgccgcgttaggttttttattggtgcaagtgataaacacctgcttaagttattttatacttattaagccggttttaggaagtagttatcgtgaatacatcatgagtatacttcttcccttaaaaatgacgttgcctactatgctaactgcatggttggcaggattatttagtttatccggttctccgctaataacattagttatacaaattatcgttggtatagtgacatttagtatgacattgattttcagcaataatcaatttgtttccgaaatgaagtgttatattgttaaaaaccctaaaattagaaaatttattagagcgtaa

SEQ ID NO: 177184 - DNA, 957 bp, Klebsiella oxytoca
atgcatcctatgattgctttgaagaagaaattagacgttatagagaaagttgttccatcagggagtcgtgttatttatttagatatcccattacatctcaatgtcggagatttgttaatttataaaggtactgaacagttttttcgagaaaagaaatatcaagtattggctagacgtactgataaaggtagtttaaaatacgtccagtctttaaggagcctaccagaagatgttattatacttctgcatggaggtggaaattttggggatttatatccaaaacatcaaattttacgtgaagaagtagtcaaggcgtttccaaataataaaatcgtttacctgcctcagacggtacattttaaagatcagcaagctttgaacgattcagcaaaaataatacgtaaacataaaaatttgactatcttttgtcgtgatcttaacagcgaaaaattgcttaaagagaagttttgcgataatgttattatgtgtccagacatggctcactcattatggcaaattttccctaggcaaaataagactcaagttgctcgcgatacgctatggatgttacgcaaagatattgagaaaaccgatctatcaggccttagtgatgctcctgaatcttctatgtatgaggattgggaagatatttgctcgaataaggatcgttttataatgagagctcttgtcaaagctgaacgcataaataatatcgctggaagatacattatccctacgtcccagctctgggggaattatactgatcagcttgtaaaacgtgtcaatgaatacttcctttctcataagattgtcgttacttcaaggatgcatggccatattttatgttgccttcttgatatgccaactaaacttctcgataattcctatgggaaaaactctacatattacgatgcttggacgcataccgttcctaattgcgagttagttaaagtatga

SEQ ID NO: 177185 - DNA, 990 bp, Klebsiella oxytoca
atgaacagcatcaatattcccactgtttcggtcatcatccccgtatacaatgtaaaggattatgttttacaagcaattgactctgttataaatcaaaaggttaaaccctttgaagttattatcgttgatgacggctctactgatggttctggcgatatcattgacgctaattatggccaaatcccttttgtaaaaattattcatacaattaatcaggggttgggacaagcacgtaatgaaggcacaatgttggcatccggcgagtttatctattatttcgattcagatgatttattaatgccggatctaataagcgatttcattaaaatctataaagaaaatccatacatcgatgtatttgcattttctgctgaatcattttctgatgaaagtacatcagatgcaaacattcaaaaagataaactgcctgtgtataaacgtacaatcgaaggcgtatatgatactggttgtaatgcttttgtaaaactatctcaaaatggaactttttttcctaatgcttggctttacattttcaaaaaaagccttcaaagcgataataatttattctttaaaagaattattcacgaggatgaggaatttactccccgtttatttcttaaggcttccttaacagttataactaataagaagtatttcaagcgacgagtgcgagcaggctctataatgcaaacttctcgttcagagaaaaatatcataggttatcttgagagtataaatactttggtggaactaaaaaataattcaaccgggttatgtgaaaaatatcttaatgtaagaattagacagaatattgtacatattttttcaatattaaagcaatctaatatcactttaagccaatccactaatgagtcacttgccaaagttcttaaaggaaacactgattcgttagtatttatagctaagtataacgtttttatttataaagtcgctaaatacttcttaaaaagaattggattcattgtataa

SEQ ID NO: 177186 - DNA, 1407 bp, Klebsiella oxytoca
atgtccaagcaacagatcggggttgtcggtatggcagtgatggggcgtaaccttgcgctcaacatcgagagccgtggttataccgtctccgttttcaaccgctcccgtgaaaagaccgaagaagtgattgccgagaatccaggcaagaaactggtccctcattatactgtgcaagagtttgttgaatcactcgagactccgcgccgtatcctgttaatggtgaaggcgggtgcaggcactgacagtgccatcgactctctgaagccttacctggataagggtgacatcatcattgatggtggtaacaccttcttccaggatactattcgtcgcaatcgcgaactttctgcagaaggctttaacttcattggcaccggtgtgtccggcggtgaagagggcgcgcttaaaggtccttctatcatgcctggtggtcagaaagaagcttatgagctggttgctccaattctcaagcagattgctgcagttgcagaagacggtgagccgtgcgtaacctatatcggtgcggatggtgctggtcattatgtcaaaatggttcacaacggtattgaatacggtgatatgcagctgatcgctgaagcctacgctttactgaaaggtggcctggcgctttctaatgaagagcttgcgcaaactttcactgagtggaatgaaggtgagctgagcagctatctgattgacatcaccaaagacatcttcaccaaaaaggatgaagagggtaaatacctggttgacgtgatccttgatgaagcagcaaacaaaggtaccggtaaatggaccagccagagttctctggatctgggcgaaccgctatcgcttatcactgagtcagtctttgctcgctatatctcctccctgaaagaccagcgtgttgctgcttctaaggttcttaccgggccgcaagcgaagactgctggtgataaagcagagttcattgagaaagttcgtcgcgctctctatctgggcaaaatcgtctcttacgctcaaggtttctcccagctccgtgctgcgtctgatgaataccactgggatctgaactacggcgagattgctaaaatcttccgtgcaggctgcatcatccgtgctcagttcctgcaaaagatcactgatgcctatgagcagaatgcgggtattgccaacctgctgctggcgccttacttcaagcagatcgccgatgattatcaacaagcgctgcgtgatgtggttgcttacgcagtgcagaatggtattccggttccaaccttctctgcggctattgcttactacgatagctatcgttccgctgttctgcctgctaacctgattcaggctcagcgtgattatttcggcgcgcatacatataagcgtactgataaagaaggcgtattccatactgaatggcttgattaa

SEQ ID NO: 177187 - DNA, 1485 bp, Klebsiella oxytoca
atgattaaaacctctactctcccgcgcgcctcgcgatccccggtgtttgccttcgccctgacgctgttaaccgggtgcgcattaattcaggacgatcctggccaggttccgctggtcaatccgcagcaggccgagctggcgcaggtgatccatctggcgaatagcggctggccgacggcgcgctggtgggaaggctatcaggatccgcagctaaatatgctggtcaaccgcgcgctgcagaactcccccaccatgcaggcggcgcggctgcgtatttcgcaatcgcagtccacggtcgagctggcgcagtcggcaatgggcgtgcaggccaccgccgtggcggcgcaaaaccgtctgcgggtcaccaataaacagttcacctggccctactctttctccctgccggtggataaaaacggcccctggtacacgctgaatacggttggcgtcggggcgacgctgaatatcgatttatggggcgccgaccgcgcccgcgttgccgccgcgattggcgaaaagaacgcccgccaggcggagaccgccggcatcgagctggatcttgccagcagcgtggcccagctctatttcgcgatgcaggcaactttccagaaaatcgcattacttaatcagctggaggccatcgccaggctctcggtgcaggcgcatgagcatcgtaccgcgcgcggcgtggaggatagcgtcgatgtcgccaacgcccaggcagagctgctggcggcgcagcagcaggtgattacggcgcaggggacgctgacgcagtatcgggaaacgctgcgggcgctgattggcgccgatgcgcatagcatgccggagattcatcccgtgccgctgccggcgctgcaggaaacgctcccggattcgctttcgtttgaactgctggcccgtcgcccggatctgcaggcgctgcgcggctacgtcagcgcttcgatgaaccaggtggacgcggcaaaagcggcgttttacccgcacttcgatatcaaagccttctggggctacaacgcgctgagcgttggcgatctgtttaagtcctcattccagcagatcaacctgctgccggggctctatttgccgttgtttgacggcgggcgcttaaacgccaacctgaaatcgacgcgtacggcgagcaatattttaattaagcagtacaaccaggcggtgctggacgcggtgcgcgacgtggcgattagctccagccagttgaacgatttgaaccagcaggccgcgctgcagcagcagaaagtcgcggcggcgatgatgaccacccgcagcgccagcgcgcaccatcagcgcggactggtcagctactatgcggcgcaggaggcgcgtcgtccggccatcgcgcagcagcttttgctgctggatatcgaggcccagcggctcagcaccgatatcaccttgattaaagccctgggcggcgattaccgcggcccggcggtggcgtccgctgggaaagaagtggcgcaatag

SEQ ID NO: 177188 - DNA, 1944 bp, Klebsiella oxytoca
atgcaaagcttgtggccgtttctgacccgggaactccacgatgcgccggggcgggcgaactataccctgcgcctgacgctcagctgtgcggtgctgattgtgctgtttatgacgctgcatattcccttcctcgccgtggcgctgatcgtggtgttttacgtcagccagcctaacgtcctgatgattaagctggtcagcgtggttttcgtggtgaccgtcagcgtcgccctgggcggcgtactgctgattattaagtggacctatgactatccgctaattcgcctggttgcctcggtgatcctgttcttctgtgcgatttacctgatgcgggtcctcggcaagctggggctggcgtttttcgtggtggcgctggcagtcatctacgcccagaccttcccgtcgatgaccagccagagcgaaattctggtacgcctgctgctgtggctatgggtggcgattaacaccgctattctggtgacgttgctggtcaacgcctgtttccaacaggcgttccccggatatcagtttaaagcccggctggtggtcatgctgcgccagacggcgcagattcttagccaaccggatggcggggcgccgcaaccctcctttaaagagatcgccggccagtttaaccagttgcagtccctgtaccagcaagccgcccgcgccacgccggagattgccgccagcccgcaggcctggcaatcgctgatggccgccgcgctgcgctgctaccatttaacggcgctgctacaaccgggccgcgaccattccgatgcgcgccagcggatagcccgcgagctgaacgcgctggcggataatctgcccagccccacagcggcggatatggagccgttgatggtcccgcgcgatagcgataacagcgccattttgcaggagatcgccgaggtgctggcgcggctggcgcgcggcgaaaccatcgcgttaccgcagggtgaagtggaaaaagcgccgctgctgctgccggacgcgtggtccaatccggtctatctgcactttgccctgaaaacgctgctggcgacgctgctgtgctacgttttctataccgccgccgactggcagggcatccacaccattatgctgagctgcgtcattgtcgcccagccgggtctgggcgctaccatgcagaaaacgtggctgcgtatcggcggcgcgctgctggcgacgctgattgcgctgctcctgatcgtctttgtgcagccctggaccgactcgctgagcggcctgctggcgatgaccctgccggtgttcgcgctggccgcgtggattgcggcaggctcagagcgcatcgcctacgccgggatccagataggtttcacctttgcgctggcattcctcagctggtttggcccgctcagcaaccttaccgaactgcgcgaccgggttatcggtatcctgctcggcgtgctggtctcctcgattgtacatctctatttatggccggatagcgaagccccgcagctcaaagcgcgtctggcgcagctttatcgccagctggcgcagaccctctcctcaagcgacgatgaggttcagctggtaccgctatttgccgcgctgaccgagagcgaaaccttaatcaaccgggtagccgccgagccgctgggaacctacgcccacccgtggccggaagccaaaaactggccggtgcgggcgacgttccatcaggcggaagagatcctgcgcctcagcgaaggctatcgtctgtacgccgcgccgggggatacttttttaccccgctgcgcccggcggcttgaaggctacgctgccgatatcgacgcgcagcaaactgccgtagaacgccctcaggcgcttctcccggacccggcgaatccatttggcgcgccgctggtcaacgcgctggccgctctgccggcgtggccatttgcgtcttccgatattccgcgacaggcaatgcaatcatga

SEQ ID NO: 177189 - DNA, 1029 bp, Klebsiella oxytoca
atgacccaatcccgctcaagcgttatccgcaaaaaatggcccctgctggcgctcgttctcgccgcgatcgtggcgctgattctggttatctggcagctgcaaacctcgccggaaaccaacgatgcttacgtatatgccgacaccatcgacgtggtgccggaagtgagcgggcggatcgtcgaaatgccgattcgcgacaatcagcgggtgaaaaaaggcgatctgctgttccgcatcgacccgcgtccctaccaggcgatgcttgatgatgccaaggcgcggctgaccacgcttgatgcgcagattatgctgacccagcgcaccatcaaagcgcaggagtacaacgcgcagtcggtcaacgccgccgttgaacgcgctaaagcgctggttaagcagaccacctcttcacgcatacgccttgagccgctggtaccgcaggggtttgcctcacaagaagatctggatcaggcgcgaacggccgaaaaagcggcgcgcgccgaactggaggccaccctgctgcaggcgaaacaggcttccgcggccgtgaccggcgttgatgccatggtggcgcagcgcgcggggatcctggcgcaaattgcgctggccgagctgcatctcgaatttaccgaagtgcgcgcgccgtttaacggcgtggtggtggcgctgaagacgacgatcggccagtacgcctcggcccttaagccggtctttaccctgctggatgacgaccactggtacgtggtggcaaacttccgcgaaaccgacttgcagagtgttcggcccggcgttccggccagaatcaccgtaatgaccaaccatggccgcaccttcgagggcgtagtcgactcggtcggcaccggcgttctgcccgacggcggcagcgtcattgaaggcctgccggttattcagaagagcatcaactgggtccatgtctcccagcgcttcccggttaaaatcgccgtcaaagatcccgacccgaacctgtttcgcatgggcgcttccgccagcgccgttctccagccgcaataa

SEQ ID NO: 177190 - DNA, 273 bp, Klebsiella oxytoca
ttgaatcgcattgttaagctggcgggccctgcgctcttattttcgctatttacgctctccggctgctcattatccccggcgattccggttttaggcgcagcatttcccggctggttcttctgcttattaggcgccgcgctgttacttattccctgccatatcctgattgtgcgtcaaggatggcaatcgcgattttctccactggtcttcagctatctggcgctgatgttcctgttcgccacgattctgtggttcctgttcttcgtaaactag

SEQ ID NO: 177191 - DNA, 231 bp, Klebsiella oxytoca
atggataaagaattactgcaagcgggctaccgcgcctataccggagagaaaatagatgtctactttaataccgatatctgccagcactcgggtaactgcgtacgcggtagcgcgaagctcttcaatctgaaacgcaaaccgtggatcgtcccggatgaagtggacgtggccacggtggtcaaggttattgatacctgcccgagcggcgcgctgaagtatcgccaaaaataa

SEQ ID NO: 177192 - DNA, 273 bp, Klebsiella oxytoca
atggaaatactggaaggtcataacaagttttacgtcaatgacgccgacgggaagcaggtggcggaaattgtttttgtgcctacgggcgagcacctcagcattattgaacacactgacgtcgaccccagtctgaaaggccagggcgtgggaaaaaagctggtggcgaaagtggtggaaaaaatgcgcggcgagcagcgtaaaattattccgctatgcccgtttgccaaacatgaatttgatcatacccgcgagtacgacgatattcgcgcctga

SEQ ID NO: 177193 - DNA, 1437 bp, Klebsiella oxytoca
gtggactatatcctttcgccctgctcgctggtcgccgatggattagtcaaagtgatgatggccagcggcatgcggcccgttgtgctgccgtcggatacgcagatgcttcccggcgacacgggcattcgacgccttatcgtttttctgccggaaaccccggccaggctgctcaccaccctgcagcaggccgctgcgtttcttgaacactctgcgacgccgctgccgatgctgatcctcagccgcagcccggccagctggctgtggcatacgctgctgcatcaggtcatcgatcaccgtttgcttgccgaagtgcgcaccgccgcctcggacctgcccgtccccagcctgaccgcggtgctgcaggactatattttgcaaagatatccttcacttaaacagctggccgacgaagagatacgcctcggcggaaagcgccctggcgggctcacccggccggagctaaatgccattctcggtctactcagcggatacagcgtcaacgcccaggcaaagcgccgcggcattagccacaaaacgctttataaccagcgaacggcaggactgaaaaaaatggtggaacatcatcctcagctggcaacccgattccccggcagccagaccaaagggcagaagatccaaccggatgctgcgctttccgccttcgagcgcgaatttgtccacgccattcactgtcggcaaattttcccggtattccagcccatcaccgatggtcggatgcagctaaaagggttggagatcctctgtcgctggcggcaaaagggacaggttatgctgccaggcgagtttttgccgcaggtacattccgcgtatgcctggctggtgttgaccgcctttgtgcttcgcgaggccgtggagaatattaatctgcactccggagagttttatttctcggtcaatattcccgctgctatcgccagcaatgacaacctgctccggatgatggagaccgcgcgccagcagctgcgtcagccccatatgtcttcgaggctggtactggaatttgctgaaaccctggacctcaacctgcagagtaaaattgccgacaatatttcccggctacgcaagcagggctttaccattatgctggatgactgcttttcacaaagcagcgtcatgtttccggtacgatcggtcaggttcagcgcctataagctggatatgagcatcgtcaacgacatgcagcgcgatcctcacgccctggccctaatcaaaagtctgctctactactgtcagctaaccggtagccgctgtgttgccgaaggcgtggacagtctggataaattcaaccgactgaaggcgctggggatcgaccgttttcagggttatttcatctcgccgccggtggagcgggaaaacgtcagtgaccttatccaccagcttttatccggccgcgatctgaaccttatcgccgggtaa

SEQ ID NO: 177194 - DNA, 963 bp, Klebsiella oxytoca
atgaatcagcggattaccgctccccgtagatgtcgtatggcgctggtcaacgcgctgtggctggcgcttgtgttagcgggcttttccaccagcgtcagggcttatacctgctacgactccaccggcaccatattaaacagcgataccggcgggaaagtatccaacgtctacgttaacctgcagccaagcctcggagcggggcagaacctggtcgtcgacttatccagctcgattttttgtaaaaatgacgcgccggacaggcgaaacgacatggtaagcatgctacagggctcggcctatagcggcctgctgaccaattttaccggttctttaaagtactacggagttagctatagcttcccgctaaactccccgaccgccagccataattttacttccggcaactacaccagctggaatacccagctctacctgacgccaatatccaccgcctccgggctggcgataagcgccggctcgcatatcgccacgctggtcatgtatcaggtgggttccgatatcaacggcggcggtaacgttcgtacctctaaatttacctggaacatctatgccaacaatagcgtgattatccccacgggcggctgcgatgtttccgctcgcaacgtcacggtaacgctgcctgagtacccgggttcgaccgctgttccgctcacggtacgctgcgggcaaaatcaaaagataggtttttacctctccggcaccacggcggatagcgccaacagcgtgttcaccaatacctcttccgcctcaccggcccaggggataggcgttcagctattgcgcaatggcactattctgcgctcaaacagtaccgtctctatgggaaccgtgggcacctccgcggtcaacctcggactcaccgcaacctatgcgcgaaccagcggccaggtcaccgcgggcaacgtgcaatccattattggggtgacctttgtttaccagtaa

SEQ ID NO: 177195 - DNA, 501 bp, Klebsiella oxytoca
atgaaatggactcatgcaccctggctgctggcggtaatgatggccttcgccagcgccccccgcgccgccgacgtgaccattaccgttaacggtaaagtggtggccaaaccctgcaccatcgccacgccgaaggccaccgttgaccttggtgatttatacacctttaacatgctttcacccggctcggcatcaggctggcatgacgtcaccctcgatctcagcaactgtccggtgggcacctcgcgggtcaccgccaccttcagcggaacggcggacagcacgggctactacaaaaatcagggaacggcgggcaacctccagctggaattgcaggataccagcggcgcccggtttaacaacggcacaagcaaaacggtggccgtcaacgatgccacgcaatccacccgctttccattgcgcgtcagggcgctgacggttaacggcggaccaacgcaaggaacaatccaggcggtgattaacgtcacctacacctggctataa

SEQ ID NO: 177196 - DNA, 531 bp, Klebsiella oxytoca
atgatgagaaaaaacctgtatctgctgggcgccatactctctctggtctccttcagcacccctgccgccgatagcaccatcacgattagcggatatgtcagggataacacctgcgccgtcgcaggtgagtcaaaagattttaccgtcgatctgatgaataacgccgccaaacagtttaatgccgtcggcacgaccacgccgctggtgccgtttcgcatcgtgctgtcgccctgcggcggctccgtcaccgcggttaaagtcggctttaccggcatagcggacagcgacaacaccagcctgcttaagctggacagtggcgtatcggcagcgtccggcatcggcgtgcagatccttaacggcagccgggcgcccctggtactcaacgccccctcgtcaaacatcgcgtggaccacgctgaaacccgggcagaccaacaccctcaacttctacgccaggctgatggccgcgcgcgtcccgattacagcaggacacgttaatgccaccgcaaccttcacgcttgaatttcagtaa

SEQ ID NO: 177197 - DNA, 981 bp, Klebsiella oxytoca
atgcttttcacgttaaccgtcatggggcttttctggcttctttctctgctgtattaccggttttcaattcaccactcatccacctggaaagcggaggtggcacaggtacaaagtcactggtggtatcagcatcgtcggcagttttccctggaggatgtggtgctgattggccctgccggggcggagatgatggactggttgcgtttgcttaagcgtaagcaaaaagcgccagcagaacgtcaggaggcaaacggtaaagcgctgcgtgtggcgcgttctttttcttccgatgcgacggaacgtggaaatcaactggctcgtatgctggtactacagtggaaacggcagcgcgaaggcaaaaaattgctctcgccgcagcgcttttactggcaggggagcgagagcgtatggcaggcgtttgttgcacagataaaggactcttttccaggcattgtgctgcctgaattaccgattatgtggaagggagaacgttcactgtcagatattgcagcctttctggattcagagggcgatggcacgcaaattctggtggctgggtgccagtctgaagtcccctcggcagaggatttgctgcctgccggagaagccgctgccctgtggcttgtgagtgctgagggggctgtattgctctcacagggggaatatttttccccatcggcaacggaatatttgaaggatgtctgtgaacgagcacagaagcaaagtgaacttgactcagcacctgacgcctgcattcttttttctcacccgcaacaatctgaactggcaggcagcggctggaacgttactcatcatttgcaggacaatttttggggtaatacgggaaaacttgaggctcttgtcgtgatatcacttgctgccattttcgcacaaagccagtcgcaaccctgcggctggatagccactgatcctttacaccccctggcgcttggaattgttaaacctcatgaaaacagataa

SEQ ID NO: 177198 - DNA, 258 bp, Klebsiella oxytoca
atgaaacaggtaatacgcgaaggcgataccctgcgggagtatggcggtaaagttctggccggacattatctgtgttttggaaaaggcattgccactaaaggcgatccggtaaaatgcaataagcatggtatgaccacgattattgaaggcagttcgctgtcaaaagtggatggtcagcccgtcgctcttcacggacaccgctgcgcctgtggctgtacgctggtgagttcttttcccgactgcggtattgcacagtga

SEQ ID NO: 177199 - DNA, 2418 bp, Klebsiella oxytoca
atgtccacaatgaaacctgatgtagtctggtatcctccgcaatttccgaaacagggacgtttacccacacaagcggcgttagtcggtcaaaactgtaagctgcaggacagccatgaactggcttaccgcaatgaactttgccaggcggcgggtcgactggtggaaccgccgtgctgtaagacgctgcatatcagcctgtttttcgacggcaccggtaataatctgaacaacgatctttatatcgacgttcctaaacatcccaccaatattgcccgtctttttcgcgcaaccattggccaggggcacgccggtggcgtccagggacatgccggggaactggtggatatggaagggacgtcgggtaataaatattacaagtactacatccctggcgtcggcaccccctttccggaagtgtcggatctgaattacagcacgcccggcatggcctttgccacctatggcgaagaacgaattaactgggcgcttattcgcattatcgatgccttaagacgcacgctgggcaaacctgctttatccgataatgaaagctggaaagcggtgaaagacatgacctctcgtacagaagatttcgggacttcaggtcaataccgacgtcaaatagtattccggcggcttttaaaagatctggaacccgacctgaagctggcgctgaatcagcctgaacccggtaaaccgaaactgctggggattaagctgtatgtatacggtttttcacgcggagcggcggcggcaagggcttttgtcaactggctggttgaactgctgcccaattctttcagaaaaggaacgaagccggatctctgtctgacgctggaaggcgctaactggaaggtgccgctgagcgtcgaatttctgggattgctggatacggtggcctctgttggcgtggcgcatatcgcccctcttgcggaaggacatatgggctgggccgataatgcaatggagctgcccgataacggcctgattaaaaattgcgtgcatctggtttctgcccacgagcagcggctctgttttcctctggattcgatttgccgccatgacggaatctatccgtcctatgccagagagatggtgtatcccggtatgcattcggatattggtggtggttatatgcccggtgaacaggggaaagcaacggcggatgacgacggctatttattatcgcagattgccttgcatgatttatatgctacagcatttgatgctggtgctcctctgaaagttcctgaagattcacttccctcaacaatatcttcagataattggcgtgttatgccaggtaacttaatttcagaatttatggttgctgatacattgataaatagtttcaacgcctggcgtgaattaacattaaaccttccctcatctctggaaaaaataaatgatgagaatgctgccagatacgaacctgtacgtgcatcagtcaacgttattaccgcgctggaagttcaaatcacctggataaccgcctggcgtatcggtcgctatgcgagtggcaactatacaaaacagcggttttatattgatgcagccgcaaacggcatggataaagacagcgaccccaaaataagagaggcttccgaacaggcgcgcgatataaaacagcggaaagtagagaaaacacggcgtaaaatgcaggagtctgctgaaaaagatacctatatcccctatccgccggggccgaaagattttgatcccgcgttggggcagacgcagttgcgccaggctgcggaagaatttcgcgaggactatcagctaaaacagcgtgccgtaaccggaaactggatatataagggaatggataaactgagtaacctggtttatagcttcagcgatgatgatgtaagtggcgaatatataaagataaaaaaagaggccaatgaaaaatattcaatgctctttcctcctcagggggaaagcagcaacgagcaacaacccggagggctggtcagagcattatttgacgatcaggttcatgattccagggcctggtttatgcaggcgacgcttgatgccagggaaccgtggggaagttactttttataccggatgatctatttcggtgagctgatgagtaaaaatattacacctcttgtgaaatacgggcgctttattgaggggagatttaaagatacggttcctggcgttgattttattatcgagcgagctgagaaaggaggggctattatgggtgaaaactccccgcctgaaataaaacaaaaaatatccgtggtaaacagctctgcggatattccccttaccatgttgtccgatcttccccttcaacctgcgctgacaaacgagccagcggaattaatcgcctggcagcaacaatcgcgggaagcggaaaaactggccagtacgaaagcggcgatagcctcactgtggccataa

SEQ ID NO: 177200 - DNA, 636 bp, Klebsiella oxytoca
atgtccacaatgaagcctgatgcagtctggtatcctccgcaatttccagcactgggccgatggctgacacgccttgtttttatcactgtggcgatattgctgacaggttgcgatcgacccgcgaaagaggagagcatcagtggcggtagcggcaccatagaagcggttaaccatacccactgggcgataaactatttcagcgtagacgggcagtcagggctggatattatcggcccctggcaggggggcggcggtggctgctgttacggcgtgccgacgaaatggaaaccggggatgagggtgaaagttgagtgggaaacgggtgtggcttttgccgatgatgtacctgaaatccctgagccgaaacgtcctgatacgaaagcctcttaccaagtatggcaagcatattccgataaaaaggaagagtggtataagaaaattaaggcactgaataaagtgcatacaaaaatagtccctgttcccgattattccggacaaaaaacctgcggaataaagatccactttttaccctgcgatcaaataaaagtcaccaccagctgctacgactacggtaacccaaattatccgattaaagatccgatcaaaatggaggaaccccaaatatgtccacaatga

SEQ ID NO: 177201 - DNA, 588 bp, Klebsiella oxytoca
atgtccacaatgaagcctgatgcagtctggtatcctccgcagtttccgaagcaggtacgatggttgacgcgccttgtttttatcgctgtggcgatgttgctggctggttgtgacaggtctgccagagaagagagtgtcagcggcggcagcggcaccatagaagcggttaaccatacccactgggcgataaaccatttcagcgtagacgggcagtcagggctggatattatcggccccaggcaggggggcggtggcggctgctgttacggcgtgccaacgaaatggaaaccgggaatgacggtgaaagtggaatgggaaacgggtgtcggttattcaatggattttccaggatatggagatgacgctaaatatttagaatgggaaaaaaaaataaaagctcagaaccaggaacatagccggatagtcccagttcctgattataccgggcaaaaaacctgcggaataaaggttcactttttaccctgcgatcaaataaaagtcaccaccagttgctacgactacggcaatccaaattatccgattaaagatccgatcaaaatggaggaacccaaagtatgtccacaatga

SEQ ID NO: 177202 - DNA, 147 bp, Klebsiella oxytoca
atgtatttggatagtgatacaaaagttattatctctggagcggtaatattactggttggaatcattgtctggaaaaaacaaagcttttttattgctctggtgttttgtgttttgtgttttgtgttttgtttatcaaagcgtctatga

SEQ ID NO: 177203 - DNA, 807 bp, Klebsiella oxytoca
atggacaacataaagatctggctggataaaatccagctgacgtgtcagcagattggtcacaattatgtcgatatgattatcgatcagtgcggcgtgaatttctccgtcattccggctctttccgggttttctccggcaataaaatggcagtccctctaccagggattgccggagaatatttacccggacgatgcgcctttgctggtacgtattgagctggaagatgctcagcaggtgcagtggttatatgcattggctcgtgaagctgtggcaacagcgcctttactggtgctggggtcatcctggcggttcgaagttttggctgaatggttgatccgttgcattgatgcgcagcatgaggggcgtgcagggatatttcgcttctgggatacgcgtatattttcgtatctttttacccatgttcttagtgatgaacagcaaagtcagctccacagaccgacattattctggagctggctggatcgcgacgaagcacctgttttgctggaaggcaatggggcggcattaggtgaagaggaattgagtgagcaaatcatatttactgataatcagtttgaaagtctgatgtgtctgtgtgatgcaaaacaattattggtttatcagccattaccgaagaacctttttatgaacagagaaagtgaattttctgcttgctttaaggctatgctggctgcgacaaaagaaggtgtgcttttcgaagataaacgtaatgagtgggtggctgagtatattcttaaaaataaaatttattctgatgaatgcggttctggtgtcaataatctataa

SEQ ID NO: 177204 - DNA, 690 bp, Klebsiella oxytoca
atgaaagcgcaggggcagcagctggcgatggagcctgcaaccagcctgttgaggggggcgcaaaaccttattgccggttgggggagtgtgacgcaaacgcaccgtaatttctcaccagatatggatacgttaaagcagtttgttgaaaaggcggaccagataaagaaaccggtattgttgatggaagcaccggaggggatagggagcgttacgccagaaagcattcttctgcacagtggcaacggtttgtatatgcagagtattggagaagtcagtattgccagcgagcagaggcttgcagtgaatgccagccaggcgatatcgttactttcccgccaggaaggtgttcgtctggtatctgcaaaaggcccgctgaatatcgaatctcatagcgatattctctcattaacgtctcttcaggatgttaccgtacagtccacacagggacatcttcagcttacggcgaagaatggtatcactattgggtgtggcggcgcttacattcgcttgactccgcagggagaaattgaaattcatggacctggcctgttaagtctgaaaggacaacataatttgcaggggccagccagcgaagattttcagttgcccgatctgccttcatcagtatgtaaagaatgcctcaaacgggctcaggaactggctcagggttttgtgccgagggacgcgtaa

SEQ ID NO: 177205 - DNA, 504 bp, Klebsiella oxytoca
atggcgcacaagcttggttctcagttccacattcctcacggtctggcgaacgccctgttgatcagtaacgttatccgctataacgccaacgacaacccgaccaaacagacggcattcagccagtacgaccgtccgcaggcccgtcgtcgctatgcggaaatcgctgaccacctgggtctgactgcaccgggtgaccgcaccgcagcgaaaatcgaaaaactgcttggctggctggaagaaattaaagctgaactgggtattcctaagtctatccgcgaagctggcgtgcaggaagctgacttcctggcccacgttgataagctgtctgaagacgcattcgatgaccagtgcaccggcgccaacccgcgctatccgctgattgccgagctgaaacagattctgctggatacctactacggtcgccattacgtcgaaggcggcgtggaagagaagaaagaagccgcgccgggtaaagctgagaaaaaagcgaagaaatccgcttaa

SEQ ID NO: 177206 - DNA, 528 bp, Klebsiella oxytoca
atgcgtactctggtttataccgcagagattgacgatcgctttggttcagggaaagtgagttcaaggattggcctctcctcgccggcgcggttgtataatacgcagacagcgttatttaccgacattgccgacgaacatagacgtcagccgattcactgcgtattagttgatgagagccagtttttgacgcgcgaacaggtgcatgagctgtctgaagtcgtagaccagctggatattcccgtgctgtgctatggactgcgtactgattttcgcggtgaactttttaccggcagtcaatatttgctggcgtggtcagataagctggttgaattaaaaactatctgtttctgcggtcgtaaagcgagcatggttttgcgcctcgaccaggaggggcggccgtacaatgagggggaacaggtagtgattggcggtaatgaacgctatgtgtccgtctgccgcaagcattataaggaggcgttgagcgtcggttctttaagctttgtgcagaacaggcagcacacctactaa

SEQ ID NO: 177207 - DNA, 408 bp, Klebsiella oxytoca
atgagcgaagcacttaaaattctgaacaacatccgtactcttcgtgcacaggcaagagaatgcacccttgaaacgctcgaagaaatgctggaaaaattagaagttgtcgttaacgaacgtcgtgaagaagaaagcgctgcggctgcggaaattgaagaacgcactcgtaaactgcagcaataccgtgaaatgctgattgctgacggtattgatcctaatgaactgctgagcactatggctgcagttaaagcgggaactaaaaccaagcgcgctgcacgtccggctaaatacagctacgttgacgaaaatggcgaaactaaaacctggactggtcagggtcgtactccggcagtgatcaagaaagcgatggatgagcaaggtaaaacgctggacgatttcctgctgtaa

SEQ ID NO: 177208 - DNA, 903 bp, Klebsiella oxytoca
atggctgcgcttaattcaaaagtaagaaaagctgtcatcccggttgcgggattaggcaccaggatgttgcccgctactaaggctattccgaaagaaatgctgccgctggtagataagccattaattcaatatgttgttaacgaatgtatcgccgccgggattacagaaattgttctggtgacgcactcttctaaaaactccatcgaaaaccatttcgataccagttttgaactggaagccatgctggaaaaacgtgtaaaacgccagctgctggaagaagtgcaatctatttgtccgccgcacgtgactattatgcaggtgcgtcaggggctggctaaaggtctgggccatgctgtgctgtgtgcgcatccggttgtcggcaatgagccggtcgcggttattctaccggacgttattcttgacgaatatgaatccgatctgtcccgcgataacctggcggaaatgatcgctcgttttgacgagaccggagccagccagattatggttgagccggttgctgacgtgaccgcgtacggcgttgtcgattgcaagggccagtccctgcagccgggtgagagcgtaccgatggtcggcgttgttgagaaaccgaaagcggacgtagcaccgtctaacctggcagttgtaggtcgctatgtgctgagcgccgatatctggccgctgctggcaaaaacgcctccgggagccggtgacgaaattcagctgaccgatgccatcgatatgctgatcgaaaaagagaccgttgaagcctatcatatgaaaggcaaaagccacgactgcggtaataagctgggctatatgcaggccttcgttgaatatggcgtgcgccataagtcgctgggcgctgaatttaaatcctggctggaaaaagccatcgcgaagtaa

SEQ ID NO: 177209 - DNA, 1014 bp, Klebsiella oxytoca
atgacgcagccattggcgggaaaacagattctgatagttgaagacgaacccgttttccgctcacttatgcacacctggttagcttcgctgggcgcgaccatcgtccaggcggaagatggcgtggatgcacttcaaaaaatggccgagtcaaaacccgatttgatgatatgcgatatttccatgccgcgaatgaacggcctgcagctggtggagcatgtgcgcaatcagggtgagcagctgccgattctgatgatttcagcgacggaaaatatggcggatatcgccaaagcgctgcgccttggcgtgcaggacattcttcttaaaccggtaaaagatttcgatcgcctgcgagaaaccgtgtacgcctgcctctaccccaacatgtttaattctcgtgtcgaagaggaggaacgcctgtttgaggattgggacgcgctggtcagcgatccctccgcggcgtcaaggctgctacaggagcttcagcccccggtccagcaggagatgtcgaactgccgtattcactatcggcagcttgtctccgtcgataagcccggtctcgtgctcgacattgcgccgctatcagaaaacgatctggcgttttattgtctggacgtcacgcgagcgggtgataatggggttcttgctgctttattactgcgcgcccttttcaatggcctgctgcaggagcagcttgctcatcagggacagcgtttaccggagatggggagcctgcttaaacaggtcaatcaattactgcgtcaggctaacctgccggggcaatttccattattggtagggtattaccatagcggcttgaaaaatttaattttggtttccgcgggtttgaatggcacgttgaatacgggggaacaccaaattcagattagcaatggcgttccgttaggtaccctgggtaatgcctatctcaaccaaattagtcaacgctgcgcatcatggcagtgccaaatttggggggccgggggacgtttacgccttatgttgtctgcggagtga

SEQ ID NO: 177210 - DNA, 900 bp, Klebsiella oxytoca
atgagaaagctcaagatcggtctggcgctaggggcaggagccgcccgcgggtggtcgcatatcggtgtgattaatgcattacagcgtgcgggcatcgacgttgatgtcatcgcagggtgctctattggctcactggtgggggcggcttacgcctgcaaccgccttccggcgctggagaaatgggtatgctcttttagcaactgggacgtcctgaaattaatggatctctcctggcagcgagggggcttgctgcggggcgaacgggtatttagccaatatcgtacactgctaccggtcaccgagattgaacgctgcgagcgtcgttttgcggcagttaccaccaatttaagtaccggtcgcgaactgtggtttacggaaggggatctgcatctggcgattcgtgcctcgtgcagtatgcctggtctgatgtcgccggtcatgcataatggttactggctagtggatggcgcggtggttaatcccgtgccggtatccctggctcgggcaatgggcgcggatatcgttattgccgttgatttgcagcacgacgcgcatctgatgcagcaggatttattatccatggaggtgccgcgtccggaggccgaagaagatttttcgtggcattcacggctgcgctcccgcctggcgcgtatgacctcacgtcgggcgacggtagcgccgacggcaatggagatcatgtcgacttccattcaggttctggaaaatcgtcttaagcgaaaccgtatggcgggcgacccgccggatatcctgattcagcccttttgcccgcaaatctccacgctggatttccaccgtgccggcgaagctatcgctgccggacatctggcagtggaaaagagaatggatgaactattacctttagtgcgtacctccgtgtag

SEQ ID NO: 177211 - DNA, 459 bp, Klebsiella oxytoca
ttgtcgccattatgcccctgcggcagcgctctggagtatagcgcatgttgtcagcgttatctggctggcacgcagcttgcgccagatccgtcacagctgatgcgttcccgctatagcgcatttgttatgcaggacgccgactatctgattaaaacctggcacccctcctgtcaggcgcaacagtttcgcgcggacctggagaacgggtttaagcaaactcaatggctgggtctcaccgtctttgctgccgatgaaggcagaagtcccgatgaaggctacgtcagctttatcgcgcgtttcactgacaataaccgctccggcgccattattgaacgatccagattcttaaaagaaaacggacagtggtactatattgacggaatgcgaccgctgatcggtcgtaacgacccctgcccttgcggttcaggtaaaaaatttaaaaaatgctgcggccagtaa

SEQ ID NO: 177212 - DNA, 843 bp, Klebsiella oxytoca
atgcattcactacaacgtaaagtactacgcaccatttgccctgatcagaaaggcctcatcgcgcgtatcacgaatatctgctataagcacgagctgaacatcgtgcagaacaatgagttcgttgaccaccggaccggccgcttctttatgcgtaccgagctcgagggtattttcaatgactccgttctcctggctgacctcgacagcgcgctgccggaaggttcgattcgtgagctcaacccagcaggccgccgccgtgtcgtcattctggtgactaaagaggcgcactgcctcggcgatctgctgatgaaagccaactatggcgggctggacgtagaaatcgccgccgtcatcggcaatcacgaaaccctgcgctcgctggttgaacgctttgatattcccttccagctggtgagccatgaggggctaacccgcgaagagcacgataagcagatgggtgatgctatcgccgcccatgaaccggattacgtcgtgctggcgaaatacatgcgggtgttgacccccgagtttgtctcccgcttcccgaataagattatcaatattcaccactcattcctgccggcgtttatcggcgcgcgtccgtatcatcaggcctatgaccgcggggtgaagattattggcgcaaccgcccactacgtgaacgataatctggatgaaggccccatcatcatgcaggacgttattcacgtcgatcacacctacaccgcagaagatatgatgcgcgctggccgcgacgttgagaaaaacgttctgagccgcgcattgtaccaggtgcttgcacagcgggtgtttgtttacggcaaccgaacgattattctttaa

SEQ ID NO: 177213 - DNA, 1140 bp, Klebsiella oxytoca
atgaaatatccgcggctttatcctgattaccggggagttgttcccccctgtaaaaaacgctggggagtggcatggctggtgggtaatttactgtttacattttttatcctctggttatggcctttagacaaggccacccatactgcagaattctggttctggactgccgtttttcctaccctttttatcggatttctgtttgctgcacgagtcttgatttatcaggtggcttcggggaaccaacgggcttatcgccatatactgcagcaggaggaagtgcgatggtggcggcaacgagcggccggacttccgatagaaccatggtgtttgctggggccgggcggtgataaaccagagcatcatctggctgctctggcgcgagatagctctccgccagaatatttaataacccagcatggtttcagggttttgcgttgcccacaaatactggaaaacgacatttggcgccgggaggcggcattaactcgacatttagtgcgcacgttgattgagacatacgcattaaaaagctcatgtcctccagtatttcaggcgttgtactggtgtggttcgtcacaagcggggcaacagtttatgcagacgttatgtgattcaggatggcagtttcagcagccgcttttaccgctgaacgatatcgatcagttagatgatgctatcgaccattaccatcgtctctcccggcataaaaatagattactgtgtgctggcatttattcggcgagccacatcgactctacgcagattaccggagaagcagggtttgtctggtgcgtcggggtagaaaaaaaagttatcgtgcaacgtgctgaacggcaggatactccagatgaaaccgccctgatgctaaccaggcaggttgaaaaaatttcccttatgacttctccgcctgaacactgtctgtcatttaataaccgtgcagcagaatatttgcaatcgggaggatggccgacgctggaacacatccttgccccatattggggggacctgcagcaaatgtccccatttgttgcaatttctatggctgccttcagaagccttgaggctgggcaatcatgtggatggatagcccaggatcaaatgcgtaaatgtattattggagtaattaccattgataaatga

SEQ ID NO: 177214 - DNA, 267 bp, Klebsiella oxytoca
atgagcgcgttaaaaaaaatagtccgacagggcgatactttacgggaatatggtggaactgtcttatccgggaaatatcttgcttttggcaagcctattgcccgcgtgggggatgcggtgcagtgcaataagcatggagctacaacaattattgagggagcagcaggaaccatgattgatggtaagtctgttgctctggatggacaccgttgcacctgcggttgcgctttggtgagttcattacaggagatggatatcgcgctatga

SEQ ID NO: 177215 - DNA, 2466 bp, Klebsiella oxytoca
atgccccaaatgaatgtcaggtcggttttagcacctccgtatttccccgctgaaggccggttgcccaaaaatattgacttggtacaagccaatgtagatttacagacacgtgaggagaaggagtttaaactaacgctgaatgcgcaaaatggtcttaataatacccctccttgttgtaaaagcctgcatgtcagcctattttttgacggcactaataataatgaaaaagcaagcgctgaggcaaaaagaccgaaccccagcaatatcgcccgactttatcatacggcgcttgaagatatcgatagcggatattatagctactatatacccggtgtggggactgcttttccggaaattggcgagttggattttagcgatgcggggttaagatatgccacggggggagaggcgcgaattaattgggcactgctgcgcattgtcgatgccgtcaggcatacattaaccggagaacgtctgggtgatagcgaagcgaaggggttggcacagtctctttcaagggacatggcaggcaaggcgaaagtaaacaaaccaataagaacgatgaggcggcaggtcgtattccgtcacctgtttgccccactgcgcgctagagcgaaaacccatcagccgaaaatcctcaaaatcaagctgtttatctacggtttctcccgcggcgccgccgaggcgcgcgcctttgtgaactggttaacggacatcctggatgcggcattgctacaggagaaaactccgctacccactctgctgggctggccgatagccgttgagtttcttggtctctgcgacaccgtggcctcggtagggattgcacgcatagcccctggatttcaggggcatatggcgtgggcggatgataatctggcgctgccggatgaaagtcaattccccggatttattcagcgctgctgccattttgtctccgctcacgagcagcgtttgtgctttccgctcgattctgtcagacgcacggagggaaattaccccgccagtacctttgaggtggtttaccctggtgttcactctgacgtgggcggcggctatgcccggggggagcaggggaagagcgttgaggatgcgctgattctctcgcagattgtgctgcacgatctttatgccgcagcctttgctatgggcgcccccctgatggtaccggaacagatgatcccgcccgatttagtatcgcgtaagccttcacggaatatgagtgaggacgttctgcaggaatttaaaatcaaacaaccgcttatcgagcgcttcaatgcctggcgcaccactttgcagccagacctgccgcagaacgccacctctggttatcaacctgttgacctgaagcatgcgctggaaaatgtgattgaacagcagatggcgtggataactgcctggcgtataggacgttttgcgaatggcagttaccagcgtcagtccttttatcaggaagcggcatggaatagtggggatacggaccagcagcaccgtgacgcaagtgagagggcgcgtgatgaaaaacagaaagagcgtgaaaaggctcgcaagataataccggatacgccgggagtaccaatattcgaacctgctctcgatcagcagcagttgcagcaggcagcggacgaatttcgtgcagattatcacgctctctctccttacacggtaggcatgacgcggaataacactggcggtggatggcagatgctggttgatggcatcggtgggaggattacgtacatcttcgatcctgacgatcaggcggctgaatatacgcagatgaaaaccgcggctaactcgttaaaaggaatactctttaaagacgatcgtggcgcgattaccgatgatagtcactatgcccaagtttgtaagttgtatgacgatcatattcatgattcacgtgcgtggtttatgcaatctagtctggggtatcgcgaactgtgggcgggttattttcgctaccgtaccatttatagcggggatgatgctaataaagagacttctttgttaaaaatgagccaaaaaggtggcgaggtgcttattggtataaatatttatttagttgctgaggaaaataaagcatttgccgcagtggatcggggtgtggataagttaggaaacgtcatgaaagacggcatggaattatcggcacaggcgcagcagctggagaatgaggctatcgctgccagaaataaaaagatccgtgaaatgggcgggaaagttatccgtggcatggtcgagaaagtaaggcatatgtcttctatgcaaacatgtcctgtttccgatatcaatggcgaaatgatatgccaggttccgctatatgtgaatatagttttccccacgcgtaatgttacccagttacgcaaaatttataatcagcaagaagcagcgagtgataaaaaacagttggatgaactggtggaaaatttaaataactttgtcgagccagccagtaacaggagatag

SEQ ID NO: 177216 - DNA, 531 bp, Klebsiella oxytoca
atgatcaagatgtttactaaatgcaggggctatacgctgtttttgtttgcggcattattattgaccagttgtgaacaaccggaaaccaggagcagcggtgatttgcgtggggttaaccatacacgtcaggagattcccggcttcagcgtcaacggcagtatcgggccgaatattggttccttcggggaaaagggaggagcttgttgcatttccctgcctgataaatggcgaccaggtttaaaggctgatgttgtgtgggtggtcagtacgacttcagacataatcaactttcctggatatgaggattgggagaaatataaggcatgggaaaaaaaagttatagaggggagggttaaacactacaccacagtcgatattcccgactacggtgacaggaaatgcggattaaccgtccattttttgccctgtaatcaaatcaaggttactgcctcttgcaaaacatatggtgccgctgaatatccgattaaagagccccgtgaaatggaggagcctgagcaatgccccaaatga

SEQ ID NO: 177217 - DNA, 834 bp, Klebsiella oxytoca
atggacgcagatactgataattcaatattaaattggttaaaacagatcgaacaagtgtgtgcttgtctggataccgtgtcagtaaatattattgtggatcaggctggggatgccccctctttagttcatgatttgatgcggtttcaaccgcagattgcctgggtttcgctattagagaatgaaccggaaaatgagtttattgaagatgcgcctctttttttgcaattatgtattgatgtatggcagcacaaagagtggttgtcagccttacttcggcaatataatgatccggcgcgaatattgctctttttttctgtgtgtgattttagttcgttggcaaaacatttgcagaacctgattattgcggaatgggagggccgtaagggcttaatgcgattttatgatacccgagtattcccggcattggtaacgtcagtattgactgagcaacaaaaaaattattttctacatattgcgcaactatggagctggcgtaatcgcaatgggcaatccgtctggtttcggggtgaaaactgtgaatataactttagcgagacgacattattaacgcttaccgatgctcaatacagccaattaggtatgattagtgatatcgaaggatttatcagaaaatatcacttcaggtatcctgagtttacaaagcaaacattatttaatcatttgtggcagcgattgcagatgatggatgaagaaacaccgcttgataatgagcgcttttttagtgagtatttatcgggagggggggtgaacagcaaaccatcgataaaaagaagagacctgattaataatggctctataatttttcgcgcataa

SEQ ID NO: 177218 - DNA, 657 bp, Klebsiella oxytoca
atggggtcagcaataagccttgttaaaggtgctattcatcaggctactgagtggggagagattgctgagagtcatcataacgtgcaacccgacgcacaatgcttacgtgactatttaaaagcggccgaacggcttcaaaaacccgctatgttgttgacagcccctgctggagtagggattgtcagtccggatacagtgatgctacagacggggaaagcactctatgcccaaagtatgggcgaagtacatattgccagcagcaaacgcattgcgcttaatgctaattacgctatttctttattagctcaaacagagggagtaaggattgtctctggtaaggggccttgcgaactggaatcgcatgcagatactctgtctattactgcgctcaaagatattactattcagtccacgcagggccatttgcaattgacagccaaaaatgggattaccctggcatgcggtggcgcgtatattcggttgtctcccgatggtcgaattgaaatacatgggcctggtttgttaagccttaagggaaaacatgtatttgaaggcccgacaaggcaggactttccattaccagaactcccacaatcgatttgtaaagagtgtctatgtaaagcacaggaagctgccgctggatttatccctcgctaa

SEQ ID NO: 177219 - DNA, 1005 bp, Klebsiella oxytoca
atgaagtttttagtgactggagccgcaggattcatcggttttcatgcgtgcaaacgccttctgcaggcgggtcatgaggttgtcggactcgacaacatgaacgattactatgatgtcaatctgaagcaggcccggctggatttgctgcaatcccccctgttcagtttccataaaatcgatctggcggatcgtgaaggtattgcccaactttttgctcatgagaaatttaaccgggtgatccaccttgctgcccaggctggcgttcgctactcgctggaaaatccgttcgcttatgctgattccaatctgattggttatctgaacattcttgaaggctgccgacataatcacgttgagcatttgctgtatgcctcatcgagctcggtttatggtttaaaccgcaagatgccattctcaaccgacgattcggttgaccatccggtttctctgtacgccgcgacgaagaaagcaaatgagctgatggcgcacacctactctcacctttacggtattccgaccaccggattgcgattctttaccgtttatggcccgtggggccgtccggatatggcgctgttcaagttcacaaaagccatgctggaaggaaagagtattgatgtctacaactacggcaagatgaagcgcgacttcacctacatcgatgatatcgtcgaggcgattgtacggatgcaggacattatcccgcagcccaatcctgaatggaccgttgagacaggttccccggctgacagctctgcgccctatcgtgtgtataacatcgggaacagctcaccggttgagctgatggattacatcactgcgctggaagaagcgctgggtatggtcgcggagaagaatatgatgcctattcagccaggcgatgtgcttgagaccagcgcggatacaaagccgctgtatgatatggtgggattcagaccgcaaacaacggtcagtcagggggtgaagaacttcgttgactggtataaggcatattataaggtgtaa

SEQ ID NO: 177220 - DNA, 1167 bp, Klebsiella oxytoca
atgaaaattactatttccggtaccggttatgtcggtttatcgaatggcatcctgattgcgcaaaaccacgaagtggtggcgctggatatcattcaatccaaagttgatatgattaaccaaaagatttctccgattgtcgataaggagattcaggaatacctggcggaaaaaccgttgaattttcgcgcaacaactgacaagcatgatgcttatcgcaatgcagattatgtcattatcgccacgccgactgactatgatccgaaaacaaactacttcaatacgtcgaccgttgaagccgttattcgcgatgttaccgagattaaccctgatgcggtcatgatcattaaatcaaccatccccgttggtttcactcgtgatattaaagagcgcctgggcattgataatgttattttctctccagagttccttcgtgaaggccgtgcgctctatgacaacctgcacccgtcgcgtatcgttattggcgagcgttcggaacgcgcggaacgttttgctaacctcctgaaagaaggggcgatcaagcaggatatcccgacgctgtttactgattctaccgaagctgaagcaatcaaattatttgccaatacctatctggcgctgcgcgtggcttatttcaatgaactggatagctacgctgagagccagggcctgaacagtaagcagattatcgaaggtgtgtgcctcgacccgcgtattggtaaccactataacaacccgtcctttggctacggtggttactgcctgccgaaagataccaagcagctgcttgcgaactacgaatctgtaccgaataacattattggcgccatcgttgacgctaaccgcacgcgtaaagatttcgttgctgactccatcctggcgcgtaagcctaaggtcgttgggatctatcgcctgatcatgaagagtggttctgataacttccgcgcttcctcaatccagggcatcatgaagcgtattaaggctaaaggtattccggttattatctatgaaccggttatgcaggaagatgaattcttcaattcccgcgtagttcgcgattttgaagcgttcaaacaagaagctgatgtgattgtctctaaccgtatggctgaagagctgtcggatgttgctgataaggtatatacccgcgatttatttggcagtgactaa

SEQ ID NO: 177221 - DNA, 1029 bp, Klebsiella oxytoca
atgagccactcacttaagccctggaataccttcggtcttgaccgttccgccagcgcgattgtacgcgccgaaactgaaaaacagctactggatgcctggcagaatgccgttgcaaagcgccagccagctctgatccttggtgaaggaagtaacgtcctgtttctgaaggattattccggcacggtgattatcaaccgtattatgggtatagaagtgagtgaaacacctgacgcctggcatttgcacgtgggcgcgggagaaaactggcatcagctggtacagtttgcgctaaataatggaatgcctggtctggaaaatctggccttaattcctggctgcgccggctcctcgccgattcaaaatattggggcttatggccttgaattaaaaaaggtttgccagtacgttgattgtattgagctggcgaccgggcagaagcaacgactcaccgctgctgagtgtcgctttggctatcgggatagcatttttaagcatgagtatcaggaccgctatgccatcgtagccgttggtttgatcttaccaaaggcatggcagcccgttttgacctatggcgatttaacccggctggatccgcaaaccgtcactccgcaacaggtatttgatgccgtatgccatatgcgcatgaccaaacttcccgatccaaaagtgaatggaaatgcgggaagcttctttaagaacccggttgttagcacggagaaggctaatgcgctactgaccgcctatccaaacatccctcactatccacagcccgatggcagcatgaagcttgccgccggctggcttatcgatcaatgccagcttaaaggaaaagtgattggcggtgcagcggtacacagccagcaggcactggtattaatcaatgataatcaagcaaccagtgaggatgtggttaagctggcacactatgtacgtcagcaggttggtgaaaagtttgatatctggctgcaaccagaagtgcgctttattggcgaaacgggcgaagtgaatgccgaggagactatcgcatga

SEQ ID NO: 177222 - DNA, 963 bp, Klebsiella oxytoca
atgaaagactataccgtccctctgacgctgatatccatattagctgacgctgaattccattcaggtgaacaacttggtgagcgtttagggatgagccgcgccgcaatcaacaaacacattcaaacgttacgcgactggggaattgacgtcttcaccgttccgggtaaaggctacagtttacctgagcccattcagcttctggatgaagagcagatcgccaggcagattgaacacgggcgggtcaccgtgctaccggttattgattccaccaaccagtatcttatggaccgactcggtgagctgcaatccggtgatgcctgcgtggctgaatatcagcaggccggtcgcggccgccgcgggcgtaagtggttctctccgtttggatctaatctttatctatcaatgtactggcgactggagcagggccctgccgccgccattggtttgagcctggtcatcgggatcgtgattgccgaagtgctgcaaagcctgggggcggataaagtacgggtaaaatggccgaacgacctctatttgcaggaccggaaactgtccgggatcctggtcgagctgacggggaaaaccggcgacgcagcgcatatcgttagcggcgcagggattaatttaatgatgcgccgcgttgagtctgacgttgtcaaccagggctggatcagcctgcaggaagcggggatggctatcgatcgtaatacgttagcagcttgtctaattaaagagctgcgggcggggtttaaactttttgagaacgaaggcttagcaccctatctgacccgctgggaaaagttggataactttattaatcgcccggttaaacttattattggcgataaagaagtcgtgggtatctctcgaggcattgatgctcaaggagcattattactggagcaagatggggtaataaaaccctggattggcggtgagatatcattgcgaagcgcggaataa

SEQ ID NO: 177223 - DNA, 951 bp, Klebsiella oxytoca
atgagcctaaaagagcaaacgttaatgacaccgtatctacaatttaaccgcgaccaatgggctgcacttcgtgattccgttccgatgacgctaacagaagaagaaatcacgcggttaaaaggcatcaacgaagatctttccctggaagaagtagcggaaatttatttgccgctgtcgcgtttactcaatttctatatcagctccaatttgcgccgacaggctgtactggaacaattcctgggcaccaacgggcaacgcattccgtacatcattagcattgcgggtagcgtggccgtcgggaaaagcaccaccgcgcgcgtactccaggctttacttagccgctggcctgaacatcgtcacgttgaattgattactacggatggttttctgcatcctaacgccgtactgaaagagcgcggcctgatgaagaaaaaaggcttcccacagtcttatgatatgcaccgcttggttaaattcgtctccgacctgaaatccggggttcctgacgccaccgcgccggtctattctcatctgatttatgacgtcattcctgatggggataaaaccgttactcagcctgatatattaattcttgaaggattaaatgttctgcagagcgggatggattatcctcacgatccgcaccatgtatttgtttcggactttgtggatttttcaatttatgtcgatgcgccagaagaactgcttaagacctggtatatcaaccgttttttgaaattccgcgaaggcgcatttaccgacccggactcctattttcatagctatgctcagctgtctaaagatgaagcaattaatgttgccacatcgctctggaatgagattaatcttctgaatttaaaagaaaacatcctaccgacacgcgagcgagcaagccttataatgaccaaaagcgcaaaccactcagttaatcaggtgcgtttaaggaaataa

SEQ ID NO: 177224 - DNA, 726 bp, Klebsiella oxytoca
gtgacgataaaaggggtaaacgtgagaacaacactggcgataacgcgcggtttactggcgggagcgctgatgatagccgccatgggatttaccgctcgcgccgaggctggcgtggcgctgggggcgacccgcgtcatctatcctgccgggcaaaagcaggttcagctggcggtcaccaacaacgacgaaaagagcacttatttgattcagtcatgggtggagaatgccgatggcgcgaaggacggtcgctttgtcatcaccccgccgctgttcgccatgcagggaaaaaaagagaataccctgcgcatcattgatgccaccagcaaccagctgccgcaggatcgggaaacgctgttctggatgaacgtcaaagcgatcccgtcgatggataaatcaaagctcagcgataacactctccagctggcgatcatcagccgcatcaagctctattaccgtccggcaaagctggcgctgccgccggatcaggctgcggaaaagctgaaatttcgccgcggcgcaggcacacttacgttgatcaaccccaccccctactacctgacggtcaccgaactcaacgccggtacccgggtgctggaaaatgcgctggttccgccgatgggtgaagccagcgttaaattacccgccgatgcaggtcgcgagattacataccggacgattaacgactacggcgcgctgaccccgcggatgcagggcgctacgcaataa

SEQ ID NO: 177225 - DNA, 1401 bp, Klebsiella oxytoca
gtggctgaacgggatactgacgttgagcgccagcatctgatcgcgcccctgctgccaggcgtttctggtcaggctgtagctcagggtccagttgatatcgtcgacggcggcgttaagcccggcctggagctgctggtcggcgctgctggttccccagtaggtctggtggctaccgctcaggtagagcgtggcggtacgccccagctgctgggtgatgctgagctgtaccctgccgcgcttgttgtacgcgaggttgtagtaatcggtgaacttcggcttcatctgcaccacgccgtcctgggtctcgacgttgtagccgctcatccggttataggtggtgtcggcgaagctgaaatagccgcgcgtcgagtagcggtagcccaccagctgaatattggtgccggtatccgtcagcgacttgttatagaggaaacgcaccgactgcccctgatgctcgctgtcatcgggcagggtggcgttggcctgggtgatatccagcgacagcgcccccagttggcccagatttttgccaacgccgaggttaaaggcgcggtagcgatccgccagctgggtgccgccgtacagggtccagcccgccgggagaccgtgcaacaaagttccctggaagaacttcggtttttcctgctgattgctgccgctgcggtactccccggcggtgaccgcatagcgggtatggccctcgcgctggagcaccggcacggacgagtaagggacggtgaaaacctggctgctgccgtcggcctctttgatggtcacctgcaggtcgccgccgttgccggcggagtagagatcgttgatggtgaacgggccggggggcaccgtgctctggtagatctcatagccgttctgcttcaccgacacctgagcggtgccgcgggcaatcccgtggataaccggggcaaatcccttctggctgtccggcagcatgttgtcatcggaggcgagctgcgcgccgcggaagttaatgccgtcgaagacgtcgccgttggtgtagctgtcgcccagggtcagacgcgagcgcagcgcggtgatgtcgcgctccagccaggtattgacgtgctgccacttgttttcactggtcgacgaactgccgctgctgctgtagctccaggtggtgttatcgcgcagacgccaggcgccgagattcagcccgctctgcaggttcaggtacgcgtaattactgctgccgccgatgtcgttatggacgttgttgccggtgaagttgtagttcagcagcccggcgttaatcccgtggtcccagagttcgggcggaatatagccgcgggcgcggttgcccataaacgcctggggtacggtcaggtacagccgctgcaggccgacatcgaagcgggtagtggcgtccttgatggtttcggttaa

SEQ ID NO: 177226 - DNA, 687 bp, Klebsiella oxytoca
atgctggcggttaacggcgaaggagaccaggctgcccgccccccacagggccatcagcgacagggcaataacccccgatgtgcgctgccagggcagaccggcccgcacgccccgcgcctgagcgcagtccgccatcactccctgccagaccgccggagcggaccagcggtgaggatgtggcgtctccccggcggtcgtgtccggcgccagcggcgggctgaacatcaggccgcgcagcggaacgcgctgcaggcgctccgtcagccagggcgtcagcagcgtacgccagcgggcaatgccgctcccctcaagcgtgcgccccaggcgcagcagataatcatgggccgggtcagcgcacagctgctgcattcccctttcccccagggacggcagaatggcgcggagttgttgcgccaccccctccggcgtggcgccgggcgggaacagcgcccccaccgtctggctgatgcgggtatcctgcggccaggcgctgtcagtcacctgccacaggtacaccggcggctgccagcgcagggcctctccgacctgctcgagggtgcgaagatggttatccaggctagcgctggtcgcctgcgcctcatcaagcgccagcacgatgccgtccagcggacggctgcggcgcagcttgcgcagggcggccaggcgttcagtatccggcgccgatga

SEQ ID NO: 177227 - DNA, 2232 bp, Klebsiella oxytoca
atgaacgttggcgggacgctgaccactaccggccggacaatggcatcaggagaactcgtcgctaaaattgataatcgcatttctgaatctgaaggcgaaaatattgttgaaattcatgacagtgagaaaaacattgttggtcttcttgataaagatggttatttctttttaccttatttgccggaatccgtgcagaatacaatcaatcgattgttatcgctggtttcgtcacgtagtggaagtgatattttcagattaggtgatggtgagaatgataccttcatacaggattgcgacggtcgtgtattcgttccgctacttaatttgtccatccaggattattttaagtacattgaatcctatgcttcgttaactaccggggacgatatcctgcgctttggtgatggcgaacatgacacactcattcaggcaaatgacggccgcctgtatctacctttgctggctgactcagttcaggatgaaataaataacctgaaaaacaatcaaacgcccgaatcatcggttgtttcgattgatatccgtaatcaggtagatacagctgcttatattaatattcccgatggttattatgctgagaaaataaaatggttacgtgataacgtagctattccagatgctaccgggtacgcatatgtattaacagctgacgatatgatgaaaaatattacgcttagcattgagagtttattgggtggaaatagggtatcagataaaaccaccggacagattggcgggataatgctggagagcgccgggccggctggctcaatttatgaggggtacactctttctgctggtgacgatttcaatacgctggatattttgagcccggcgaatcctaaggggcgttggtttactacccgcacttacctcaacccgccgcggggctctgatacgcagctgggcacaatgtacgacactgaccccgcctttacgggctttaatgactcgaaccggggcgtgccggtgggttttgataatatgcgcgttgaagatggtgttctgaggcttcaggcccgtgcagctactgcgaatgaaaaaccccatctgcaaggctcaaggcatgacctggcggcgatggtgagctctgtaggcgcattttcatttttcgccggtcccgccgggactggagattgtattattgagtggtatgcgatgttcactcacaaaacacaaaacccgccagggtggcacccgtcattatggacccaaagttcgctgccatcctacacctacaattcggatgagctggatattatcgagggcatcagccagtttgcaacgtcaaattataatctctggggagcagatggttcgaaaacaggcggaggaacgcttggaccggaaaaatatatatttgatggcaagtaccataaaattagcgccatcctcaatcaaagtaatgtccagatattcattgatgatacctttagcagcatattaagtcttgatgccaattcagtacgtgaaccgggttacttgttgatgagtagtcatgtatataaaggcactttccatggtgaaacctattctgcctgggcatgggaaaaactctggaagggggcgacaatcagtgttgactggtgccgcatctggcgtaaaacaggattgagtcatatcaagccgctcgtcaccgttccttcagtcaacattgattatggcagcagcggcacaatagtacttccggctaagtcggttctgtggggccgtgacgatgtttcagagcatgtccagacagtcatgactgaagagaatgaacccggtggcagtcatacagtttcctatgactcccttcctccttttgttacttacgatgcatccacccgaagcattactatcagtaacggatacacgaaagcgggacgtcttaacttcgttatttatggctatctgcaggatggctcaagctgcgaacccgcccgcacatgggccaatattggacctcgtttttcaggtgatgcattaacactgaaaccaggaaaaagtgttgatttatatcctctctgggattgcggaatccttgtcactgatggcgagaaatgtaccaaaaccatcggcgtttattcactacccgaaggcgtgatctttgacaccaaaagctgccagttaatcaacttcggtggtgaaaatggctcatatgttatcaccagcgcctgccagaacagtgtcggacagacagcggtccaaaaaataaatctgattcttaattaa

SEQ ID NO: 177228 - DNA, 1416 bp, Klebsiella oxytoca
atgttacttcctgtgattatggcgggtggcaccggtagccgcctgtggccgatgtcccgtgaactctatccaaaacagtttctccgactgtacgggcagaactccatgttgcaggaaaccatctcgcgtctctccggtctggatacccatgagcctatggttatctgcaatgaagagcaccgctttctggtggctgaacagctgaggcagctcggtaaactgtcaaaaaatatcatcctcgagccggtgggccgcaacacggcaccggccatcgccctcgcggcgctgcaggccacgcagaatggcgatgacccgctgatgcttgtcctggcagcggaccatatcatcaataatcagcaggtcttccacgacgccattcgcgtcgcggagcagtatgcgcaggctgaccatctggtcaccttcggtatcgttccgaacacccccgaaaccggctacggctatatccagcgcggtgatgcgctgggggaaggggagcacacgccttatcaggtcgcccgctttgtcgagaagccggacctggagcgtgcgcaggcctatctggcctccggagaatattactggaacagcggcatgttcatgttccgggcgaagaagtatctctccgaactggcaaaattccgcccggatattctcgaagtctgcacggctgcggtccgcgccgccgacagcggcagcgactttatcagcatcccccatgaggtgttcagcacctgtcccgacgaatccgttgactatgcggtgatggaaaagaccgccgatgcggtggtggtggggctggatgcagactggagcgacgtcggctcctggtcagccctgtgggacgtcagcccgaaagatgagctgggcaacgtgctgaccggcgatgcctgggtgcacaacagccagaactgctacatcaacagcgacgaaaagctggtggcggctatcggcgttgaggacctggtgatcgtcagcaccaaggatgcggtgctggtgatgaataaaaatcgtgcccaggacgtgaaaaaggtcgtggagtacctgaaggccaaccagcgcagcgaatacaaacgacaccgcgaaatctaccgtccgtggggccgctgtgacgtggtggtccagacgccgcgcttcaacgttaaccgtatcaccgtcaagccgggcggggcgttctccatgcagatgcaccaccaccgcgccgagcactgggtgatcctcgccgggacggggcagataacggtcaatggcaagcagttcctgctgactgaaaatcagtcgacctttattcccattggtgccgagcactgcctcgagaacccgggacgtatcccgctggaagtgctggagatccagtccggctcctatctgggcgaagacgatattatccgtattaaagaccagtatggtcgttgctaa

SEQ ID NO: 177229 - DNA, 1947 bp, Klebsiella oxytoca
atggacgcagtacagaaagccaaatccggccacccgggtgccccaatgggtatggctgacattgccgaagtcctgtggcgtgatttcctgaaccataacccgcagaacccgtcctgggccgatcgcgaccgcttcgtgctgtccaacggtcacggctcgatgctgatctacagcctgctgcacctcaccggctacgatctgccaatcgaagagctgaagaacttccgtcagctgcactccagaaccccgggccacccggaagtgggctacaccgcgggcgtggaaaccactaccggaccgctggggcagggcattgcgaatgcggtggggatggcgattgcggagaaaaccctggcggcgcagttcaaccgcccgggccacgacattgttgaccacttcacttatgcgttcatgggcgacggctgcatgatggaaggtatctctcacgaggtatgctccctggccggtaccctgaaactgggcaagctggtggcgttctatgacgacaacggcatctccatcgacggtcacgtcgaaggctggttcaccgatgacaccgcgaagcgttttgaagcctacggctggcacgtggtgcgcggcgttgacggtcacgatgctgactcgattaaacgcgcggtggaagaagcgcgtgcggtcaccgacaaaccgtccctgctgatgtgcaaaaccatcatcggtttcggttcgccgaacaaagctggtacccacgactcccacggcgcgccgctgggcgacgcggaaatcgcgctgacccgcgaagcgctcggctggaaacacccggcgtttgaaatcccgtctgaaatctatgcccagtgggatgcgaaagaagccggtcaggcgaaagagtccgcgtggaacgagaaattcgccgcctacgccagagccttcccgcaggaagccgccgagtttacccgccgtatgaaaggcgagatgccggctgatttcgacgcgaaagcgaacgaattcatcgcgaagctgcaggctaacccggcgaaaatcgccagccgtaaagcgtcgcagaacgccattgaagccttcggcccgctgctgcctgagttcctcggcggctccgctgacctggcgccaagtaacctgaccctgtggtccggctctaaggctatcaacgaagacgctgccggtaactatatccactacggcgtgcgtgaattcggtatgaccgccattgccaacggtatcgccctgcacggcggcttcctgccgtacacctccaccttcctgatgttcgtggaatatgcgcgtaacgcggtacgtatggcggcgctgatgaagcagcgtcaggtgatggtctacacccacgactccatcggtctgggcgaagacggcccgacgcaccagccggttgagcaggtggcttccctgcgcgtcaccccgaacatgtccacatggcgtccgtgcgaccaggtggaatccgccatcgcgtggaaatacggcgtagagcgtcaggacggcccgaccgcgctgattctgtcgcgtcagaacctggcgcagcaggagcgcaccgaagagcagctggcgaacgtcgcccgcggcggctacgtgctgaaagattgcgcgggccagccggagctgatcttcatcgccaccggctctgaagtggagctggcggttgccgcttacgaaaaactgactgccgaaggcgtgaaggcgcgcgtggtttccatgccgtccaccgatgcgttcgacaagcaggatgcggcttaccgtgaagcggtgctgccgaaagcggtctctgcgcgcgtggccatcgaagcgggtatcgccgactactggttcaaatacgtgggcctgaacggcgcgatcgttggcatgaccaccttcggtgagtcagcgccggcggagcagctgtttgaagagtttggcttcaccgtggacaacgttgtcgcgaaagcgaaagcgctgctgtag

SEQ ID NO: 177230 - DNA, 1536 bp, Klebsiella oxytoca
atgccccaggttcagctggctcttgccgccgtactccgtgctgaccttgatgtgctcttttccccgcgcgtcgtcgaggcggattttgttgttcgccggcgtgcgcagcacgttacgtttatagttccggatggtgacagggtccgggtgcgccgagtcgtgcaggacaccggctatatacggccggtccgggtcgccctgctcaaaggcgatggccacctcggtgcccgccagcaggggcagatgcaggccgtacgtgtcaccggcatacgggcgcgcctggcgtacccacagactctcttctcccggctgccagtggtcgcggtcgaacagcaggttgaccctgtaacgcccgtcgcggtcgatatggccgtagatatcactgcttttcgtgctggtgacccgcgccggcagcgtcccggccatcaccggcctggcgatagtggccgggcggaagccgtaatcttccgaatacgggatggcgtggaaggccacctcaaaactgcggtcgcgccgggcgcggctgtggaggtgggttatcatcaccccctcccggaaggtgccggtgacctcttcgccgccgctcaccttcagttcctgaccgggggcgagcgtcgcgcagctgctctttccgctcagccgggtctggtcgttcaggtagcgctcgtgacgcaggcgggcataaaacgccccgctctccgccgccgggtcgcgcggatggctgtcgcccggcgtcaggtagttatccccccagtggtacgcctcgccataagtggtgctgtcgccccggctgacatcgatgctgaggctcatctccgccggcgcgttgcggtagttatagtcccgggtgaacaccgactgcggcaccacgcgatgccggcttttcagcgcccacacggattccatcccgctgtcgtgctggccggagggcggcaccgacggcagaaccagcccctgcccgtcgtgccgctggtcgtcgtaaaactccaccacgtcgatgttcagccgggtgtcggcggtgaagcggaaccagataccgacctcgcccagcaggcgggtgataaagcgcaggtcgtcctcgccgtactgcatcacctgctcgcgacgcgggtacgcctgcgccagcgtgaagataaagtcctccccgcgcatgccgtggcgggtgcgcaggatatgctccacgatatccggcaccgacatatcctggtaaatccggttctggtggctccgggagagcagcgccagacgcggctgcagggtcagggaataatgcgtttcgtcccgggaggcggaaaggcgctcaaacgccgtcaccacgccctgaatcgtgcgtaccggctgccggatttttaccccgaagccctggtcaaccggggcctgcagggtgaaggcggcatcctgcatcagcatctgctgcggcgtgagggttttgtcggcgctggtgaattcaatctggtagctgaacggttcgctcagggcctcatcgccttcaaaggccagcacgtccagcagggcgcggcagccgcgcaccgttaa

SEQ ID NO: 177231 - DNA, 387 bp, Klebsiella oxytoca; identical to SEQ ID NO: 15296

SEQ ID NO: 177232 - DNA, 945 bp, Klebsiella oxytoca
gtggctgccttcgtcaagtgcatcgggggtgtaactccagcgtccgtcctcgccggcaaccaccatacccagcaccgtgtcgccgtcatagatcgtgaccgtgacccccgcctcagcggtaccgctcagggccggtgtggcgtcgttggtcagatcgccgctggtcagcgggcctgtatgcccggccacgtcgtcggtcacctgcagaccgctgaccggagtcaccgtcgtgtccactgtaatttcaaacgccggagagcgctcgctgacgttccccgccttatccgtcacggtggtgctcaggctgtggtcgccctcgttcagggtgtccggcgtgaaagtccagcgtccgtcctccccggcaaccaccgtacccagtacggtgtcaccgtcgtagatcgtgaccgtggcgcccgcctcggcggtaccgctcagggccggcgtggcgtcgttggtcagatcgccgctggccagcgggccggtatgcccggccacatcgtcggtcacctgcagatcgctgaccggagtcacaactgtatccaccgtcagttcaaacgccggagaacgctcgctgacgtttccggccttgtcggtcacggtggtgctcaggctgtggctgccttcgtccagcgcatccggagtgaaagtccagcgtccgtcctcgccggcaaccaccgtacccagtacggtgtcaccgtcgtagatcgtgaccgtggcgcccgcctcggcggtaccgctcagggttggtgtggcgtcgttggtcagatcgccgctggtcagcgggccggtatgcccggccacgtcgtcggtcacctccggtgcactggcagacggcgcggtggtatcaatcgtcagctcaaacgccggggaacgctcgctgacgttcccggccttgtcggtcaccgtagcgctcaggctatgaggaccttcgctaagctccggtaa

SEQ ID NO: 177233 - DNA, 1023 bp, Klebsiella oxytoca
atgaatattaaacgtattggtctcgacctggcaaaaaatgtcttccagatacatgccgtggatcaccgtgagcatgttgtccttcgtaaaaccctgcgccgtgaccgcatggcggcctttttcacccaactctcaccgtgccttatcggtattgaagcctgtggctctgcccactactgggcccgggagctgacccgtatggggcataccgtacgcattatcccgccccggctggttaagccttatcttaaaggccagaagaatgatgccaacgatgccgaagctatctgcgaggctgtcagccgccccgggatgcgcttcgtggcgatcagaacggaaaggcagcagacgctgcaggcggagcaccgcgtccgggccagactcatccgtgcccggacagccctgagcaatgagatacggggtctgctgggggagttcggtgtggtgttgccagcgggaatagcgcaactgcgtaaggcgctaccggagatagtgtcgcagcaggtgcagtgggatgagtgttttattcgtctgctgtgcgaactgtcagaagagctgcagggactggatgagcgtgtcgcccgccacgacaggcggcttcagcagtcagcacgggatgatatccggataaaaaggctgctggcgatagaggggatggggccggtggtggccagtgccctggtggctgcagtgggtgatggcagacagttcaggagcggccgggaaatggcggcttatctggggctggttccgcggcagcactcaagcggaggaaaggcgcgactgggccatatcagcaagcggggggaccgctacgtgcggacgctgataatccatggagcgcgggcagtgctgaatgcgtgtcagaataaaactgacaggcgcagccagtggttgcagggggtgtcggagagacgaaaccggaacatcgcgacggtggcgctggcgaacaagaatgcccgtatagcatgggcgctgctgagtcgtgaagaggattaccatgggatacaggtcaccggttaa

SEQ ID NO: 177234 - DNA, 1194 bp, Klebsiella oxytoca
atgcctgcctgccgagtatgtcagaatttcttccgggatgccttagctccgtttcacaaataccgacaaaatgccctccttgacgccacgcttgccttaatcaacggcgcgtcactgacgctgaccagtatcggacgttatttacccggcgctgctcaggtcaaaaacaaaatcaaacgagttgatcgtctactgggcaatgaatcactccatcgggatattcctttaattttcaatggtattatcaccatgctgacgcggaaattatcgctgtgtgttattgcggttgactggagtggctatccgtctcaggaatatcatgtgctccgcgccagtctgctttgcgatgggcgttcgcttccgctgttaagctggatagtcccgtcagaaaagcagcagaatggacagatacaaaaggccttccttgatgcccttgccggggcggtgaacccgacggccagagtcatcatcgttaccgatgcgggcttccagaatgcctggttccggcatatccggtcgctcggatgggattttattggccgtgtcaggggtaatatccagatgcgcctgaatagaaaaggtgaatactggttcagacgtcaggaattacaggccagcagtaaaccagaatatctggggccaggcacgcttgcacgggcggaatatgcccggtgtgagggacatttttacctgcacaggaaagaaccaaaaggccggaaacaccggcactcaaggtgtcgtataaaacgaaaatctcaggttcgcgacgggcgctcttcagcaaaagagccgtggctcatcttcagcagcacagacgactttaagccacgtgaaatcatgaagttatacagtcgccgcatgcagatagagcagaacttccgcgatgagaaaagcgaacggttcgggttcggtctgcgtgccagttacagccgttcagcgggaagaatgctggtgctgagcctgctggcaacgctgagcacaatagtcctgtggcttattggttatcatgcagaaagtaaaggattacatgtaaggtatcaggccaacagtattaaatcgcggcgggtaatctcttatctgacgttagcggagaatgtcctgcgacactccccgttaatattaaggcgaacggtgctgagcaccgttcttaaccacctcgccagagcctaccgaagtatggtgctggtttattag

SEQ ID NO: 177235 - DNA, 672 bp, Klebsiella oxytoca
gtgactcggactcagacagcgattcggactctgacagcgactcggactccgacagcgattcggactctgacagcgactcggactccgacagcgattcggactctgacagcgactcggattccgacagcgactcggattcggacagcgattccgactctgacagcgactccgattcagacagcgattcggattccgacagtgactcggactcagacagcgattcggactctgacagcgactcggactccgacagcgattcggactctgacagcgactcggactccgacagcgattcggactctgacagcgactcggactccgacagcgactcggattcagacagcgattccgactctgacagcgactccgattcagacagcgattcggattccgacagtgactcggactctgacagcgattcggactctgacagcgattcggactctgacagcgattcggattctgacagcgattccgactctgacagcgattcggactctgacagtgactcggattcggacagcgattcggattctgacagtgactcggattccgacagtgactcggattctgacagcgattctgatactgaagcacccactgcagcacagaacatcacggttaatgacaatgttggttccatcactggtgtgcttcattccggtgatgtga

SEQ ID NO: 177236 - DNA, 510 bp, Klebsiella oxytoca
gtgccgctgttatgttttttactgctgggctgtgatccggcagaaaaagaagcaccgcgcggcagcgggaagagcagctacgtggcggctaatctgctgggctataaccatatggcaggcacgaatatcaactggttctctgttaacggctaccggggacacgccggggggtttacctgctgcatatcgctgccggaaaaatggcggcccaatatgcaggtggcagtggagtgggaagtggatcctgacccgtttccgaaggatatccccagattcagcgaccctaagtatgatgaatatatagaaaaacacagggctaactatcgccattataaagcggtggccactattcccgaatatgaagattcctgcggcctgcaggtgcatttcttgccctgtcagcagattaaagtaacggccacctgccacgggccgacccatcctgaccacccgattaaagaacctttcgatctgccggagtctgcccagtgcccgccagaaacgccatga

SEQ ID NO: 177237 - DNA, 570 bp, Klebsiella oxytoca
gtgattgattccaccgggctgaaggtctttggtgaaggcgagtggaaagtcaaaaagcatggccaggaacgccgtcgtatatggcgaaagttgcatctggcagttgacagcaacacacatgaaatcatctgtgcagacctgtcgctgaacaatgtgacggactcagaagccttcccgggtcttatccggcagactcacagaaaaatcagggcagcatcggcagacggcgcttacgacacccggctctgtcacgatgaactgcggcgtaagaaaatcagcgcgcttatcccgccccgaaaaggcgcgggttactggcccggtgaatatgcagaccgtaaccgtgcagtggctaatcagcgaatgaccgggagtaatgcgcggtggaaatggacaacagattacaaccgtcgctcgatagcggaaacggcgatgtaccgggtaaaacagctgttcgggggttcactgacgctgcgtgactacgatggtcaggttgcggaggctatggccctggtacgagcgctgaacaaaatgacgaaagcaggtatgcctgaaagcgtgcgtattgcctga

SEQ ID NO: 177238 - DNA, 216 bp, Klebsiella oxytoca
gtgggcgaaggaccggggatagcgaccggcgtgggcgttgctctgtttgataaaaccggcagccagatcccgctcaatgcgccgccaggaagctggtcgccgctgcacaccggcccgaccaccctgcattttgtcgctaaatatcgagccaccgggaatcaggtgaccgggggagcggccaacgctcaggcatggttctccctgacctaccagtaa

SEQ ID NO: 177239 - DNA, 219 bp, Klebsiella oxytoca
gtgcgtgaaccgtttaatgaagagaaattacgtagcggaatgctgcgggcgctggaaaaacgtccggtgagttccgatgacgtcgaaatggcaatcaatcatataaaatcgcagctgcgcgccaccggtgagcgcgaagtgccgagcaagatgattggcaatctggtgatggagcaattgaaaaagctcgataaagtcgcctatatccgttacagttaa

SEQ ID NO: 177240 - DNA, 3108 bp, Klebsiella oxytoca
atgttctcccgtttctttgtgcgacgcccggtcttcgcctgggttatcgccattctgattatgctcgccgggattctggctatccgcaccttgcctgtcgcccagtatcctgacgtcgcgccgccggcgataaaaatctccgccacctacaccggggcctctgcggaaaccctggaaaacagcgtcacccaggtgattgagcagcagctcaccggactggataacctgctctactttacatccaccagcagctccgacggctcggtcagcattaccgtcacgttcgagcagggtaccgatccggataccgcccaggttcaagtgcagaacaaagtgcagcaggcggaatcccgtctgccgagcgaagttcagcagtctggcgtaacggtggagaaatcgcagagcagcttcctgctgatcctcgcggtgtatgacaaaaacaacaaagccaccagctccgatatctccgactggctggtcagcaacatgcaggatccgatggcgcgtatagaaggcgtcggcagtctgcaggtgttcggcgccgaatacgccatgcgcatctggatggacccgaccaaactggcctcctattcgctgatgccatccgatgtgcaatcggctatagaggcgcagaacgtacaggtgtccgccggtaaaatcggcgcgctacccgcctccaacgcgcagcagctgaccgccacggtacgcgctcagtcgcggctgcaaaccgtcgcccagttcaaagagattatcgtcaagagcaagagcgacggttcggtggtgcgcctgagcgacgtcgcccgcgttgaaatgggcagcgaagattacaccgcttccgccaatcttaacggccatccggctgcggggatcgcggtaatgatggcgccgggcgctaacgccctgaataccgcgacgctggtaaaaaacaagattgccgagttccagcgccagatgccgcagggctacgatatcgcttacccgaaagacagcaccgagttcatcaaaatctcggtggaggatgtgattcagacgctattcgaggcgataatcctcgtggtctgcgtgatgtatctgttcctgcaaaacttccgcgccacgctgatcccggcggtggcggttccggtcgtactgctgggcaccttcggcgtgctggcgctgttcggctactcgatcaacaccctgacgctatttgcgatggtgctggcgataggcttgctggtggatgacgccatcgtggtggtggaaaacgtcgagcgtatcatgcgcgacgaggggctgcccgcccgcgaagccaccgaaaaatcgatgggtgaaatctccggcgcgctgatcgccattgccctggtgctctcggcggtatttctgccgatggccttcttcggcggctcaaccggggtgatttatcgccagttttcagtgaccattatctcggcgatgatgctctcggtagtggtcgccttaaccttaaccccggcgctgtgcggcgcgctgctgagccattcgaaaccgcataccaaaggcttcttcggcgcctttaaccgcctgtggggacgcaccgagcagggctatcagcatcgtgttgtcggcggcctgcgtcgctcggcgatgatgatgggcgcttttgtcctgatttgcggcggcatggcgctggcgatgtggaaattgccgggcagcttcctgccgacggaggatcagggcgaaatcatggtccagtacacgctgcctgccggagcaacggcggtacgcaccgccgaggttcgccgccaggtcaccgactggttcctgacgaaagagaaagccaataccgacgtgatctttaccgttgacggttttagctttagcggcagcggacaaaacgccgggatggccttcgtgtcgctgaaaaactggtccgaacgtaaaggcgaagaaaataccgctcaggccatcgccctgcgcgccaccaaagagctcggcagcattcgcgacgccaccctgttcgccatgaccccgccgtcggtagatggcctggggcagagtaacggtttcaccttcgaactgatggccagcggcggcaccgatcgcgacagtctgatgaaaatgcgcagccagctgctggccgcggcgaatcaaagttccgagctgcagtcggtacgcgccaacgatttgccgcaaatgccgcagctgcaggtcgatatcgataacaataaagccgtctcgctcgggctgtcattaagcgatgttaccgataccctctccagcgcctgggggggaacctacgttaacgactttatcgatcgcggtcgcgtgaagaaggtctatatccagggcgaaagcgacgcccgcgccgtgccgtccgacctcggtaaatggttcgtacgcggcagcgatgacagcatgacgccgttctccgccttcgccaccacccgctggcaatacggcccggagagcctggtgcgctacaacggctccgccgcctttgaaatccagggcgaaaacgccagcggcttcagctccggcgcggcaatggacaagatggaagccctggccaatgacctgccggccggtaccacctgggcatggagcggcatgtcgctgcaggaaaaactcgccagcggccaggcgatgagcctctacgccatctcgattctggtggtcttcctgtgcctcgcggcgctgtatgagagctggtcggtaccgttctcggtgatcatggtgatcccgcttgggctgctcggcgcggcgctggcggcatggatgcgcggtctgaacaatgacgtttacttccaggtggcgctgttaaccactatcggcctgtcgtcgaagaacgccatcctgatcgtcgaattcgccgaatcggcggtggaagagggctattccctgtcgcgtgccgccatgcgcgccgcgcagacccgcctacgacctattgtgatgacctcgctggcgtttattgccggggtgctgccgctggcgatcgccaccggagccggggccaacagccgcgtggcgatcggtaccgggattatcggcggaaccctgaccgcgacgctgctggcggtgttcttcgtgccgctgttctttgtgctggtgaaacgcttcttcacccgccatcgttcttctcaggagtaa

SEQ ID NO: 177241 - DNA, 519 bp, Klebsiella oxytoca
atgacatctgaagtcgccacccaaccggcggtaccctcgatccgcctgctcttcagcgccctgctgctggtgatgctgctctcggcgctggatcagaccatcgtctccaccgcgctgccgaccatcgtcggtgaacttggcgggctggataagctttcctgggtggtcaccgcctatatcctgagttcgaccatcgcggtgccgctgtatggcaaatttggcgatctgttcgggcgcaaaattgtcctgcaggtggcgattgtactgtttcttgccggttccgttctttgcgggctggcgcaaaatatgacccaactggtgctgatgcgcggcctgcaggggctgggcggcggcggcctgatggtgatcagtatggcggcggtggctgacgttatccctcccgccagacgcggccgctatcagggactgtttggcggcgtctttggcctggcgacggtcatcgggccgttaattggcggcttcctggtgcagcacgcctcctggcggtggattttttaa

SEQ ID NO: 177242 - DNA, 1008 bp, Klebsiella oxytoca
atgaaagcgatcgccattactcgcgcagcgaccgaaggcagcaacattccttttttaaccgacatcgagctgccgcagccggttgccgaggggcatgatctgctggttgaagtgaaggccatttccgtcaacccggtggataccaaagtccgcgccggctttaacgccgataccccgcgcgtgctgggctgggacgcggttggcgtagttaaagccgtcggcagcgcggtaaccctgttcgccgcgggcgatgaagtgtggtacgccggcgcgctgggccgtccgggcagcaacagcgagtttcagttagtggacgaacgcatcgtcgcccgcaaaccgcgttcgttggataacgccgccgccgccgcgctgccgctcaccgccatcaccgcatgggagctactgttccaccgccttggcgtagaggaaggcggcaacgcgggcgacacgctgctgatcgtcggcgcggcgggcggcgtcggttcgatactgacccagctcgccagcaagctcaccggtatgacggtcatcggtaccgcctcgcgtccggaaagccagaaatgggtacgggaagcgggcgcgcatcatgttatcgatcacagcaaaccgcttgctgaagagctggcgcggattggcgtcaaagcggtaacccacgtcgccagcctgaccaataccgaccagcactatccgcagctgatcgccgctctcgcaccgcagggcaagctggcgctaatcgacgatccgcaaaccctcgacgtggtgccgctgaaggcgaaaagcatctccctgcactgggaatttatgtttacccgctcgatgttcgaaacgccggacatgatcgcccagcatcagctgctgacccgcgtggcggctctgattgacgacaacaccattaagaccaccctcggcgagcactacggcgccatcaccgccgccaatctgcaaaaagcgcacgcgcagctggaaaccgggcgctcggtgggcaaaatcgtgctggagggtttttaa

SEQ ID NO: 177243 - DNA, 456 bp, Klebsiella oxytoca
atgactacactgactcatctcaaccttcccgatcgccaggagagcgaacttgcgcagcgcggacagcgtgagcttgcggcgtatctttccaccaggctggaaacacagcgtattgccattgtaggagaggatgataaagctcataccatagagctacctacaagtgcgctgacattgctgatggagatattgggggagttggctagcggaaatgcggtacaaatcgttcccgtacatgcggaactcacaacccaggaggcggcaaatatactcaatgtctctcgtccgcatatggttaagctcctggaagcgaggaagctcccatttcataaaacggggcgtcatcgcagagtgttgtttgccgatcttatggagtataagaaacgcagggaacaggagagcctggacgcgatgcaatcattggccgatcaggcgcaggacttagggatgtattaa

SEQ ID NO: 177244 - DNA, 504 bp, Klebsiella oxytoca
atgcacctggggattgccgggctgtatcaaccaaaatggagccgctgcattcaggatgaatggtgcagaaacttggttgctaatcggcctgacattctgccagagacgcttcagcgtactgtcaaaatgatgaattccgccttaccagatgccaatgttacgggatataagggattaataagtaatctgcatctgccggatcccaacgacagacatgttcttgccgcagcgataagagcgaaagctgaaattattgtaacgcttaaccataaggactttccgccagaacttctgggtccatatgaaatagaaacgcttcaccctgatgcgtttatttccgatctcttcgatcttaatcatgctctgacgcttgaagccgtcaggcggcagcgactgtctctaaaacatccatctatggcggtcgatgaatttcttgaaatgctgctaaagcagggtttaccgatgacggtaaaggaattagcgcattatcagtatgctatttaa

SEQ ID NO: 177245 - DNA, 186 bp, Klebsiella oxytoca
atggatgcgttttttcacactctgagcaggcagcgccttttcccggaggcgatgctgcgcatctgtccgggctacctgcccgcaaacaatgctgaacctgtagcccgggcaaggcgctttgcgccgcccccgggagcggtgtgcggtgcggctgaaatccccggaggcgatgctgcatatcagtaa

SEQ ID NO: 177246 - DNA, 4053 bp, Klebsiella oxytoca
atgaaaagagccagcagaatgaatacccatgcagcccgtcaattttctacgctgtgcctgtccggcgcgctgacgcttggcgcattcggcggagcgcacgcggcgggtaacgatgccgcgctacaagcgttgttcgcacaggccaactactggcacgaaaaatcgcatgacgaactggcgatggaatcgctgcaaaaagtgctatcggtggatgccaacaacgctcaggcgctgtacctgatggcgctatgggcgcagcaggggggcaatctgcaggccgcagcccagtggcgggcgcggctggagaaagcggcgcccgacagccccggactacaggatctggatagcgcaaaaaaaatggcgcaggtgccgcagggacagctcactctggccagacagcaggcgcgcagcggcaatgttcccgccgcgctggcgacctggcggagtatgtttaacggcaacgttccgccttccgggctggcggccgaatactatatgaccatggccagcgacaaggcgctctacccacaggcgttgagcgaactacgtcaatacgtcgcgcagcatccgcaggagaacgcgccgcgcgttgccctgggcaaagtgctcacctggcgcgaagagacccgccgggaaggcatcgccatgctggagccgatggccagcggcagcaaagaagccgatagcgggctgcgtcaggcgctgctgtggctggggccgcagccgggggatgagccgttttacgacacctggatgcagcgtcatccgcaggatactgaagtccagaactactttcgcgaacggcgcagcggtcaggcgcgcggccagggctattctgacctcaacagcggcaataccgccgcggcgaagcagcagtttgaacaggttctgcaaagcaacccgcaggacgctgacgcgctggccggaatgggctatatcgcccagcgcagcggcgattttcaggcggcctctcagtatttgagccgggcggcggatctcggcggcgatggctcggaaacccgtcgtcagcaggcggcggatgcgctgttttacgggcagctcgctcaggcgcagcaggcttacaagcaagggaatattagccaggcgctggcgctctctgcgccgctggcgcagcagagcgggacgcagggcacggcggcgaagctgttccgcgccgacgttctgcgccataacaaagatttgccgcaggccgaacaaacgctacgggcgctgctcaacgaccagccgcaaaacggcccggcgcgggagaatctctattacgttctgcgcgaacagaataaaacggcagaagcgcaggcgatgctgcgcacgctgccggaaagcctgcagcaaaaactgcagccgcgggtggtcatcggacagcccggcgattcgctgcgtcgccaggcgcaggagcaggccagcgccggtaacgtgacggcggctatcgccatgctgcgccaggggctttctcgctatccggacgatgcgtggatgcgcctcgatctggcccgtatgctgcaaaaagccggtaacgacggtgaggcaaatgcggttatgggcgccgcctggcgtcccggcgccggcgccagctcgctgtacgctgcggcactttttgccagcgagaacggcggctggcagcaggcgcaaaccctgctggcaagaattccccccgccagtcagaccagccagatgcgcgacctgaaacaacgggtgaactacaacctgcagctggcgacggcggagagctatctggcgcagggcaataccgttgccgctgctaatacgctcaggacgatgaccgcaacgccgcctgaagccccggcgtatgtgggtaaactggcgcggctgctggcccagagtggcgatgtcaccaccgcggtatcgctggtgcgcaacaatattaacggcggtatctcaggtaatgccggggattatgccgatcaggtgacggtacttaaccaggcgggcctgacaaccgaagcgcagagtctgctcactaacccgcagctgcaggcaagcagtacgccgacgcagctggccagtattcgcaacggttatgtgattaacgaagcggaccatctgcgcgagcagggcaactacgcggcagcgtatgacaagctgatgggcgcgatgcagaacgacccgcaaaataccgatctgatgttcgctatggcgcggctctatcagagcggcaaaatgaacaaagaggccggtgtcgtctatgactatctgatgacccgcgatacgccgacgcaggatgcgcgcagcggggctattgatgtcgcactctcggcggggaatagcgaacgggcggcgcagctggcgggtggactgcgcccggataattcgccggaccgtttgctgctgctggcgcgcgttgccgagtcgcaggggcatcatcagcaggcgatgacttacctgcgcagcgcccgcggcaggctgctgggacaacagagcagcaatggcgcgcaaacgccgaccgtgggcggcgcgctggcggcggataatccgtttgtcggcgtttcgcgtacccccggggcgacgcgtgcggcctccgcctacgggcaatatatgccgtggcaggtctctcaggtatcgaccggggatggcggcgcgctgccggggatccagcgcaccgatctgccggtcgaaaccgcccagacccggatgctgcgccaggtggataccatgatggagacgttgcaggaaaaaaccggcacctggctgcaggggggcatggaggttcgcggtcgcgacggcgaatccggcaccagtaagctcagcgagataaaaaccccgctcacctggtcctcatcgccgtttggtgattcgcgtttcgattttaccgttacgccgattacgctgaacgcggggacggcgaccggcgacgcctggcggcgttacggcgcgaacccgctatccaatgcagtctccaatatgatttccaccgcgaccagcgagcaggcggcgattgcggcgatgaccgcgaccgagcgcacgacgtactttgccaacaatccgggggcggaagccttgagcggtctgggcacgctcaaggcctctgactttaatgccaccaccagcagcggcatggagaatctggcgaaactcggaacttacgattccgggcaggtcgccagctatctggcctcttccagcctgaagccgaatgtcgatcaggcgagcggctcaaccgattcacaaaaagccaacggcgtggagctggctctggcgctgagcggcgacgaataccgcgtcgatatcggcagcacgcctctgggccaggatctaaataccgtggtgggcggcgtaaagtggtcgccgaagctgaccaactatctgtcgttgatttttaccggcgagcgtcggtcgctgaccgacagtctgctctcctgggtagggctgaaggattcctattccggcaagacctgggggcaggtgaccaaaaacggcggtaccctgcagctaagctatgacgacggcgatgccggtttctacgtcggcggcgggggctatagctacctgggacaaaacgtcgccagcaataccagcataaacgccaacgccggagtttatttgcggccttaccacgatgagtatcgtcagctgcagaccgggttgagcatgagttacatggattactcgaaaaacctgagctacttcacctacgggcaagggggctacttcagcccgcagaactacgtcagcgtatcgctgccggtgagcctgacggaaaaatatgacaactggacgatgaaacttggcggctcggtgggctatcaatcctatagccaggataagagcgcttatttcccgactaacgccgggtggcagcaggccctcgagaccgcagtgagcaacggttttgccaaagaagcctactattcagccacttcgaagagcggtatcggctataccctacgcgccggcgcagattacaaagtcaacaaacaaatgacgctcggtggtcaggttggctatgacaccttcggcgattataacgagagcaccgctggtctctatatccgctacatgctgggagataactga

SEQ ID NO: 177247 - DNA, 306 bp, Klebsiella oxytoca
atgcttatggttcgggaggggagtattcactttgcatcgcagcggctgagtattgccccttcgctaataacaaccagcatatgtgcgcttgaaaatgaactggattttaacctgattacgcgtggcaggaatatcagaaaagttattttaacggagaaagggcacgctttttatcgacttgcaccggatttactgagattgcttaatgcgattgctgatattcgtgcgggaataaaacagcccggcaagacgtgcccgccgggtgcaataatcaattcaggccaagaaaatactgggcgattttaa

SEQ ID NO: 177248 - DNA, 558 bp, Klebsiella oxytoca
atgttgaaaaacagggttaatctccaggttattatctggactacgctgattgggggctttattagctccttggttaagtcgggaacggaggccaatatgccgcctcgcgtggcgggagaaatatcgcctccggcggcgcatatcgacgcctggcttggctggctcggtattaattcacactcgctggactacgtttaccagggagtgacgatccccggcgccgtcatgctttatcactggttattcagttttgctttcgcctttctttatgtctttatttccgcgtactggccaaagattcggctctggtacggcgcggcctatggtctgattattactctcgttatgcacggctttctcattcccgcgttgggcttcaggcacccggcctatttaaacggggaaaccggatggctgtggaacctgaatggctacgagctgtggagcgaaaccctcggtcatatttgctggtcgttttcgattgaaatcagcatgattgccgttcttgccctgctggcaaaaccgctacgaggcgcatgggctaacgagccagcatga

SEQ ID NO: 177249 - DNA, 765 bp, Klebsiella oxytoca
atgattcgctgtagatttgcgctgtttacattcgctttatctctcccctgctccgttatggccgcaagctccgtcctcgtttggcccatcttccagactatcgaaagccacgaaaaggggtcagagctgtggctggaaaaccgcggcgctagcccggttaatttacagctgcgcgttttttcctgggaccaaaaagggtcgtccgatgcctatgccgatcagcgtgacgtcgtcgccagcccaccttttaccaccgtcgcgcccggccagcgtcagctggtacggttgatgcgcatcgcccccgtcacggctggcaaagaacaatcctaccgtattgttatcgatgagattcctgccgctgaaccgacggcgcagaaggaacagaattccgccggactgaaaatgcgcatgcgctatgtcctgccgttgtttacctacggacagggcatcaacccgctgaagaacaatggatccgtggaagcggtaagaaccacgctgcgctggtcgctctcgcggcaaaatagccgccagacgctgtgcatcgacaataccggcaatcagcatgcccggctcagcgcggtttactgggccaatgccggtggcaagggccagatagctcaggccaatggcctgctcggctacgtgctggcgcagaaaaagagctgtttcccgctggtaggaaacgcttcagtcccctcaggcatgcacctgttcgcgaaattaacggataacggccaggcggtggaaattccggcggatcgttga

SEQ ID NO: 177250 - DNA, 2334 bp, Klebsiella oxytoca
atgcgcgatctgaaaagggcagcgaccggagggctgttggcactagcgtcggtaacggcctgcgctgcgacctatgattcgttgcctgcgccagcagcttcatacagcgataagcaggagtatgagctgtatctcagcgtatcggtcaacgggaatctcctggcgagcgccgctccggtaaaggttattgcgggtcgctattggatcgccgccgaggttttgcgccaggcgcatattcccttacagacccaagatgcgctggttgacgtgacgacgatcccctcggttaaagtggaatacgatcggccggggcaaatgctcaatctccgggtgccggacaattggcttcccgagcagcgcatcggggagacgacgggacaaaactaccaggccgcgataagcagtcccggcatgttatttaactatgacgcttacagcctcttctcgtccggcggaacgcaaaccaccagcacctataccgagacgcgcctcttcgggccgccaggcgttctttctaacaatgccgtcatccggcaaaactggtcttcgacgggctacgagcagcagggctttatgcgttacgacaccctgtggaaatacagcgacagcgaacagatgattagctaccaggccggggatgtggtcagtaacgccctgacctggagcagttcagtacgtatgggaggactccggctgagccgtaacttcagcgttcgcccggatctggtgacgtatccgctgctcaatttatccggcagcgcggcggttccttcaagcgtcgatctgtttattaacggctataaaaccagctccgcgcaaatcaatggtggcccctatacgctgaccaacgttccctggatcagcggcgccggcgaagctaccgtggtgaccaccgatgccctcggtcgtcaggtgtccaccagcattcctttttatgtctccaacaccctgctacgcgaaggcctgagtgattttgatttcacccttggggccctgcgcaacaactacggtatcaagagtgccgattatggcgccggcgcgctgagcgcaatttatcgctatggagtcaacaactggctcacgctgtcgacgcatacggaagaccgcaaaggattaaccaatgccggaataggcagcgatatcggcgtggggaacctgggcaccctcagcctgtcgaccagcgccagccggggcgacggcagcggcaatcaactcaccgccggatactcttattacgccagcagctggggagtgaactatcagcatattcgccgcagcgccgactacaacaacctcagcacctacggttctgtcgccgcattaagccgtcagtcagatcaggcgacgctgagcctgagcccatgggacagagcgctcggatctttcagcattggctattttgatatcaaagccgaggataattcacatacccggctcatgaacctctcctggagccgcagcctgtggcaaagcagcagcctcaacctgagcgtaaaccgcgatctgcaggacaatagctacgccagcatgttgcaaatcattatccctttcgattcgcaaagctccgtgcagctaagcggtcaacgatccagctcaggccaatggggggaaaatatcaacgttagtcgctctgccccggcggaaggcgggctgggctggaacctcgcccattcgatcggcggcaataactatagtcaggcggatctgacctggattaatcgcgtgtccacgctgagcggtggctattacgggtcgcgtgacgatcatcacagctggtttgaggccgcaggctcggtcgtgctgatggataacagtctgtttttcgcccggcaaattaacgacgcctttatcgtcgtttctaccggcaactatccaaacattgcggtgaattatgaaaaccgcaaagtcggcgtgaccgataaaaatggtcatctgctgatcccctgggcttcggcctggtatccgggaaaggtcaccctcgatacgctgccgttgcccacggataccgaagccgtcacggtggaaaaacgcatcgccgtacgcgaaggcagcggcgcgctggttgatttcccggttaaccgcgtgcgctcggcaacgctcatcttcgtcgatgctcagggacaaccgctaccggtcggtacgccggtggaggaagttaatagtcaacagcgcgccctggtgggctacgacggcgtggtctggttctcgcacctcgggcgcattaacgaagtcaaaataaatgccggagagcttcgatgcagcatcccgttcgagcttccggagaccacgccggttccgcagcggataggcccggtcagctgtccctcttcatag

SEQ ID NO: 177251 - DNA, 912 bp, Klebsiella oxytoca
atgtctacccgtcagctgttgccgctcatcggggcgttgtttgcgctgtatatcatctggggttccacctatttcgctatcgccgttggcgtcgccagttggcctccgctgatgatggctggcgtgcgctttctttccgctggcgcggtgctgctcgcctggttgctggccacgggccataagctcccgtcgcgcaaaccgctgctcaacgcggcgctgatcggcgttttgctgctggccgtaggcaatggttttgtgacgcttgccgaacaccagcacgtcccctcaggtattgcggcagtcatggtcgcgacggtaccgttgtttaccctatgttttagccgtttttttggtattgcgacccgcaagcttgagtggttagggatcgcgataggtctggcaggtattgttctgcttaatagcggcggcaacctgaacggtaacccctggggagcgctgctgattctgatcggctcgatgagctgggcctttggttcggtctacggttcgcggattgagctccccaccggtatgatggcgggcgcggttgaaatgctggcggcagggattgtgctgatgattgcctccgcgctgagcggtgaaaagttaactcagataccctcatggtccggcatttttgccgtcgcctatctggctatcttcggatcgcttatcgccatcaacgcctatatgtatttaattcgtaacgtgacgccagccgtggcgaccagctatgcctacgtcaacccggtagtcgccgtcctgctgggcaccggttttgccggggaaagcttatctcccgtagagtggctggcgctcggcatcataatttttgcggtcattctggtgacgctcggcaaatacctgttcccggttcgtcgcgagattacgtcctgtaaggcgcagaagtaa

SEQ ID NO: 177252 - DNA, 651 bp, Klebsiella oxytoca
atgaatccacccgtcaataaaatgaatcaggcctatgaagccattgaaagcatgattatttttcaggatcttgcgccaggctcgatggtgtctgaagcgcagctcatggagctgaccggctttggtcgtagcccggtaagggaagcgttacagcgtctggccaatgaccgactggtggaaatctatccctataagggcgtatttattccggcgatttccgttgaagtacagctcaaggttctggagctacgccgctgtgtaggcgagttcgctgtgcgtcttgcgacccggcgtggcacgcaccagcagaagaaagagatgctgctgctggcggaatcttttgaggcgattagcgatatttcgcatatgcggcagttcggcgcgctgttgaaacaaacctatgccttgattggcctggccgccgagaacgaatatctccagccgtgcctttctccgctacaggggctttctagtcgtttctggtttgcgcagcttagcgccagcaaccagcaagagctggtaaaagcatcgcagctgaatgccaccatgctgcgtaatatctgtcatggtgacgaagaactggctgccagcgcgtcgaaaaacgtcaacgattacttcaccgagtttacctataagtctctaactcgctga

SEQ ID NO: 177253 - DNA, 774 bp, Klebsiella oxytoca
gtgaatctacataaccaggtcgcactggtgacgggtgcgggaaatatgaaagggatcggcaaaggtattgcctgcgcccttgccgaagctggcgctgatatcgtcatcaactacgttgtgaatccagaagaagcagaacaagttgccggcattatccgcggactcggaaggcgcgccctgcttgtccaggccgatatatccaatcctgaacaagtacgccaaatgtttaatgatatcgatactcactttggacgcctcgatattctggttaacaacgccggcgtatgcgtctgggaaccgttcctcgaaatcagtaaaccggcttttgaccatgcggtgaatatcaatattaaaggaacctatgactgcgcccgccacgcagcccgcatgatggtaaaaaaaaggatccgcgggcgcatcatcaacgttgcctcaggccacgcgcgccgtccaatggcgctgatgggagtctacgctgccaccaaagctgctatcgatcagatgagtcagtcgatggccttcgagctggcacgctacggcatcacggtgaaccagctctggccggggtttgtcgatactaatatcaacgatcctaaacctgaactggccacgcgcgaggggcgcaagaaactgctggcgacaattcctgttggtcagccagcaaccatcgaagagcttggcgcggctgcagtgtatttagccggggacaaaggcgcggtagttaccggtgattttattaaaattgatggcggccagcatatccgctgtatttaa

SEQ ID NO: 177254 - DNA, 711 bp, Klebsiella oxytoca
atggaacacaaaaatacgattctgattgctggcggcaaggccgaacccgaactgctatccaccctggaaaatctgtatttacagcagggttgggaggtttattttagccagcaaaccgaatatgaaaaaataaatcaggctatcaataccattattattgacgggcgaaagctaaacgctttcatttatatttctccgccgccgcttcgtggctcaatgctggacaacgatgataatattattgcgaacaccatgaacgacgacctggaacgcggactatggtgggtacaaagcgcctgtaaaaagatggtgcaacagggggttgaggggcgcgtcgtcacgctggcgcacatcgccgcgctggtgccgacggagtattattcttacggtgccgccagccagctagcgctgatgaatacctgccgctccggcattcaggaactggtatcctatggcataaaaatcaacaccctgtttcgcggtttcaccagagaggatccgcagcaaaaaacgttcgtcgagcagctcagagagttacataaagatgatggtattccgctgctggaatatactggcgcaacggagatagccaaaacctgcgcgctgttaaccgatccgcaaattcacagttttaatggcgcgatgttaacgcttgacggtggtttttatgtcacccggaaaatacgttacctggatcccatcagggagtga

SEQ ID NO: 177255 - DNA, 1281 bp, Klebsiella oxytoca
atgaatacgcaattccgtcgtgtcattttagttatgctgacgctggcgatggttattaactacctcgaccgttccgcgctggcttacgcaatgccctttattaccaaagactttcatctaacgcctgaggaaaaagggattatttttggcagtttctctattggctatgcgttatttaattttatcggcggcgtactggccgataaattcggccccaagcgggtattttgctggtcgatgtccgtctggtcaattatctgcggcctgacagcgggctgctttaacttctggaccatgtttattgcccgcgcctttttcggcgccggagaaggccccatctccacaacggccaataaagtggtcaacaactggtttccgctcaatgagcgcgcacgcgcggtcggcattaaccaggccggcggcccgctgggcggtgccatttccggccccgtagtgggctttctgtgcctgacgtttaactggcggatctcatttatcattattgcgtttatcggtattacctgggccatcatctgggcgctgatcgcgaccgataagccgcgtgataacaaacgcgtttctgcggcagaagcgcagcttattgaaggcgaagaagaagacgtggctccgcagaccgcaccgggaacgcctgccccctccatgtggagcgcaatcctccagccctcaattctggctaccgccctgtcgctattttgctttaactatgtcctgtttttctttatgaactggttcccgacgtttcttgttgatactaccgggatcagcctgaaagacatgagtctggtcggcgtattgccctgggttgccggaacgctcggctacgtatccggcgggttcattatcgactttatttaccgtaaaaccggcaagcagcttttctcccgtaaagtagtgctagtgacctgcttcggcatctgttctatctgcgtagggctgatcagccagacgcagaccgccatgggtgctgtcacactaatgactatcgccttcggctttatgcaaatcgccgccccggcctactggacactcattcaggacgctgcgccgaaagagtacgttggcagcgctggcggactgatgcatggactggccaatatctccggcatcgtcgcgccaaccgtcaccggctttattgttggctccggctcctattctgccgcctttattcttgcgggctgcctcggcgtactgggtgcaaccgtggtggctttgttcgtcaaaaaagccgcccagcgcgatgagcataaagccctggcctga

SEQ ID NO: 177256 - DNA, 1140 bp, Klebsiella oxytoca
gtgaaaattattgattttaaatccgggctgtaccgcgtgccgcttaccgaaaactgggggtcgtcgaactacgccttctccagtctggaatttgtcgtgctgtggttaaaaagcgataccgggcatacgggtaccggctggacattcagcacgggcatcggcggcagtgcgtttaagaacctgattgaccattatcttgtcgccaaagtgattggcgaagatccgcttaacgtcgagcgactgtggagccgcatgtggctggagagccacgatattggctcagcgggcatcacaacgcacgctatcgccgcagtggatatcgcgctgtgggatctgattggccagcagctaaatcagccgctctaccgcctgctcggcggctaccgggaatcgcttcccggttacggcagcggtgtcaacctgcatctctcgattgatgccctgctcgcacagatggaagggtttctgaccgcgggctaccgtacggtcaaaatgaaaatcggtagtgagaacgtcgaagacgatctggcgcgtctgctggcggtacgcaaatttgtgggacccgcgatcaacatcgccgtggatgccaacaagaagtggtcttccgccgatgccgtgcgccgaatggcggtactcaaaaatgccggtgtgtactggctggaagagccgctactcagcgacgatatcaacggccaccgtttgctacgccagaaatgtccggtccccatagccgtgggagaaagcctgtacaccaaataccagttcgcccactggattggacaagaagcttgcgactacatccaaccagatgtttatcgcgtgggcgggattactgaattcgtgaagatcgcaaaattagccgaaagccacaacgttcccgtgatcccgcattttggtatggagcttatcgcgcatctgggctgcggcttgcccaatatccagctgtttgaggggctaaaaggcgcgagcctgagcgaaatgggcattatcacgacgccttgcccggtaatgaacggcacaattcgccctggtgaaaagccaggacacggcattgagttcgacagccggacgctggcgcgctatgccgtaaacgatacgcagcttcggcagcaaaatattactacccgcacggatgtctga

SEQ ID NO: 177257 - DNA, 882 bp, Klebsiella oxytoca
atgagcctgattaaacagctgtttaccctgccggtactggagacgttaagtcccggtattacccggcgaaaaatggatgaactggaggttgtggtcattcagacgcccttctgcaaggccgcaattgcgcttcagggcgcgcatttattgacctggaaaccatcccgacaggcataccccgtactgtggttgagtgactgcacaccgtttaaaatcggcgtgcccattcgcggcggcgtgccggtatgctggccgtggtttaccgatctcggcggcgaaccgtttcacggctttgcccgcattttaccgtggcgactgacggcgcttgataacaacaaaacgtcgttcgcgctgacgttgacgctcaatgacactccacaaacacgacagctctgggatcacgcttttcaactggagatgacgctgaccttcaccgcagaggtttgcgaattgctgctcactgcccacgggagtttcagcgccaccgcagccctacatagctacctctcaacgccggatatacgagcgacgcagatttatggcgtgggcatgcaaggctacgacacggtcgccggggaacccgtgcagaatctgccgtcccccctgtcgctcagcggggaatttggcacgatcttccctcaggcaaaaaaacaaactgcacttgtcacgcccgccagaaccttgacgcttacccatgttaataacagcaacgtagtggtatggaatccctggcagcagcgggcagaacagataagcgacatgtcggacgatggctggcagaactttgtttgtcttgaaacggcggctatcgacagcccccttgtcagcacgcctcaacatccggcgtcaataggcgtgcagttcgcgctatcacatcattaa

SEQ ID NO: 177258 - DNA, 1119 bp, Klebsiella oxytoca
atgcgtattacgaacatagaaagctttctggtccgtttgccttatacgccagcactgacgcgcactaccaacaaagaggggcgctttaacgccgcgcgggcgctgcatcctacgctggattcgctgttagtgaaagtcgaaaccgatacgggcctgacgggctggggagaggcgtttggccacgcctgtaacccggccagcatggcattgctcagcggtctcctcgcccccttctttacgggggaggaatgcgctgacccggcggcgttaatgcagagagcgcattacgcttttcacagctacggtcgcggcggggtgatgatgtatgcgctttccgcgctggatatcgccttgtgggatctgcgcgctaaagcagagaacctgccgctgtggcaattgctcggcggtacccgtgcgcaggtggaactctatcccagcctgaccagcttcgatggtgatgtcgctaaattaatggattgtattaaccctttaattcataagggatacagacatataaaactgcacgaacgagatcccctggcaattgctgaagtcgccagggcgctgccggataatatcaccctgatggttgataccaactgcgcgtgggatgtcccgcaggcggagcacatcctgccgcagctgcaggcggctggcgtcgcgtttgtggaagagcccacctttccgccggaaaatttaagccagctccgctatctgcgccagacaacgggtgcgcacattgctgcgggcgaaaatttcaataacagtgaggagttcgcgctcagtatggccttagacgcggttgatgtattgcaaccgagcgtagccaaaattggcggtatttccgccgtactggagattatcaaacgcgcgcgcgagcatgaaaacgtcagcctgctgccgcactgtttttactacggccctggcctgctcgccagcgctcacctgctcagcgtgatgccagagcccgttccgctggaagtgccgtggctgatgttcgaacaaacgctgcatccgtttatgcgcttccagccggtgatgaatctgccgaacgcgccgggtctcggttttaatccggatttcgatgtgctggaacggcatctggttgcacagggataa

SEQ ID NO: 177259 - DNA, 720 bp, Klebsiella oxytoca
atggatatcgttatttcagaccgcctgctggtaaaaacacctgtactttggttccgggcagatgatgacgcagccagtgacaggccgcttatcattctgtttcatcgcttcatggcatccagagaactggatgccaatctgggatatatgctggcgcaggcgggctacagcgtggtgtgtccgcaggcgatgatgcatagcgccagggatgatactacacttcgcgacgcctctttctggtcaattttacagcactcgttagagacatttcccgcgctgctggccgcttgccagcaggaaaagctcggtgatgtttcacgactgggcgtaatgggcacttcgatgggcggtttcgctgtactggggacgatggcgcagtatccggaaattcaggccggagcagcctatatggcaagtggttattttaccgaggcaataagcgagatccatcccccaacggccagcgcattggcagcctgcctgcatgggattgcaccttatgacattgccgggaaagaagaacgcctggcgcagcgtccgctgtttgtctggcacggtcagcaggacaccgttgttgatgttaaatatgctgaacgcctcagagaggccatcggcagtggcgacctcacctgtcttatcgatccgctgtcggggcataaaatcaaccagcaatcggttgaggcgggcatcgattttttccaccgggttctgccggtttag

SEQ ID NO: 177260 - DNA, 714 bp, Klebsiella oxytoca
atgccggacaagaataaatttacgatgatccctattaagcgcacggatgtttttcagacgatcattcaacacattacaaatctgctcgacagtaagcagatcaaacccggcgagcggctgccctcggagcgcgagcttgccgagatgctcaacgtcagtcgcacgtcggtgcgccaggcgctgaaggtgcttgaatcctccgggcgtattgagactcgtgtggggagcggaaccttcttaaccgagccaccggcggtgtcgcttagcgatactcatagcctgtcgaagctgattgaaggcggggtaacgaaagagtttctgcgcaatcttatcgtggcgcggacctctattgaacgagccatctttgaagactacgcctggcgcgctaataaaacggggattaatcaactgcgggagcttatcgagtttaaccgggaaaagttttcgcgtcaggattgtgatgacgatgatagcgcgctggatctgagcttcgagaaaaaagtggcgcagctcggcggtaaccctattttgatcaacatgcaggaacagatccatcatctttgggtactggcgtggaaacagtatggttttactccagagcagactcaggtgctgcatgaagaacacttaggcattctggatgcgctggcggcgaaaaactcgcagcgggtggcggatctgattgtgcagcatgtagataaagagattgactga

SEQ ID NO: 177261 - DNA, 1713 bp, Klebsiella oxytoca
atgtacagaagcaatttcaagccgggatccacccgctgggcagtacgtcgtgcgcaatggcgcagcatggggatccgcgaagaagacatgtataaaccgaagatcgcgatcattaatacctctaacaaactctcctgctgctatgtccatctggatgaactgtgccggatcgtcgagcaggcaatccgcgatgcaggcggactaccgtttgaagtgcgcaccgtcgcccccagcgacttcgtcaccagcgccgggaaaaaagcgcgttatctgatgccgacccgcgacctgatggtcaatgaagtggaatgcatgatggaaggcgcggtgctggacgggatgatctgcctctcctcctgcgataaaaccacgccagcgcatctgatgtcggcggcgcggctgaatgtcccttccctgctgctgacctgcggttatcaggtgggcggcaagtgttcaaatgaaaaattcgacgatcagttcttcgatattgatgacgtttacgagcaggttggcgcgctggcaacaggtgccatcagcgaaaaagaactgaccgacatgaccgatgtcgcaatccagtcgccgggcgtctgcgccggtttgggtaccgctaactccatgcatatcgtcgccgaagcattaggcatgacgctgccgggcaactcaccgatctgggccaacggtcgtaaggtaaaagagtacgcccaggccgccgggaagcggatcgtcgaactcactcagcaacaggttttgccgcgcgacatccttaccgaaaaagcgattcagaacgcagtgatgaccgtgctggcggtcggcggttcagtcaatactgttcgccacctttctgcggttgccaccgaggcggaactccccatcgatgtggtcagcctgtatgaaaaatacggaaaagacatcaagttgctgacctctgttcgccctaacggtcccttccgcactgaagatctggaagcggcgggcggcactacggcggtgatgaatcagctgcgcgacttcctcaatctggatgcactaacggtcacgcaaaaaaccgtcggtgaaaacattaaagacgcggtagtaaaaaatcacgaggtgatccgcacgctggataacccggtcagccagcgccctggcgtcgccatcctgcgcggcaacctcgctccggacggcgcgattgttaagctctccgccgtaccgggagagctggaacaatttaccggtccagccaatatctacgaaggtgaagacgaagccattgaagcgttgagcgaagggaaaatacagaaaggcgacgtgattgttctgcgcaatatgggtccagctggcggccccggtacggtgtttgcctgtagctttgtagcagccctcaacggcgcgggaatcgcggcgcacgtagcggtgatcaccgatggtgaactctcgggcctgaatcgcggaattatcgttggccaactaatgcctgaagccgccgcaggcgggcccctggcggtgatagaacaaggcgaaaccgtacatatcaacttcaccgacctcagcatcaatatggatgttccgcaggaagtgattgatgcccgtctggcgcaatggcagcccaaacctctgccgctgggcggcggaagcggcacctatctgtcgcaatatgcccaactggtccagccgattgcgcagggcgcagtgctggggaaacgacgcatccacgcgaaaaatatcgactaa

SEQ ID NO: 177262 - DNA, 1305 bp, Klebsiella oxytoca
atgcaaacctggcacgaagtcgccaacaagatccccgtcacctacgacgttgatgttctggtagtgggtggtggtccaaccggtgttgcggcagccaccgccgctgcgcgagctggggaaaataccctgctgattgaacgctacggtttttgcggtggtatggcgacagcgggtatgtcgggcgcgatttgcggcctgtttacctccggcaaaggcccccataagcagctggtgcacggttttgccggtgaattttaccagcatctgaaacaccggggtgccgtcagcgaaccgttcccgtttggcgaaacgcggctggtcgtccatgagccgcacacctggaaagaggtggccgacgatttactctccgacagcggcgcacgggtgctattccacacccttgccactgacgtagtaatggatggcaatcagctgctcggtgtgattattgagaacaaaagcggacgccagttaataaccgcccgccgctttatcgatgcctccggcgatggcgatctctgcgtcaaagcgggcgtcccgtacacctgcgggcgcaacggtatggtccagtatccgaccatggtgtttcgtatgagcaatgtcgatatcgaacgcggcattggccacccggtcgcccaactggaggcctgggttgaagctgcgcaggcacagggatatcacctgccgcgcaagcatatctatctgctgccctcacctcgccccgacgaagtgatgtgcaacgtcaccagcattttgcgcgacgatggcagaccgattgacgccacctgcgcagaggatctgacgtttgccgaactgaagggacgcaaacaggtacgcgaatacgagcgtttcctacgcgcctgggttcctggattcgagcaggcgcgcctgaacgatgtcgcggcgcaaattggcatccgccagagtcggaccattgcaggtcgctaccgcctgaccaacgacgatgttttccaggcgcgcaaaagcgaacgcaaagttgccagcagcgcctggtgcatcgaagcacacggccaggacggcatctttatgttctacctcgacaatgattggtacgacattccgtacgacacattggtgccagaagacgttcccaacctaattacagcaggccgtacgctgagcgccgagcatgaggcgttggcctcggcccgcgtcaccgcgcaatgctttttgacgggcttcgcagccggaacggccgcctggttaagccatcgcgaagggtgcgcattcgcagatatcgatgttgcggagctgcgcagcattattgaataccaaacttattaa

SEQ ID NO: 177263 - DNA, 897 bp, Klebsiella oxytoca
atgaaaccagttttaggctttattggtctgggcattatgggcaaaccgatggtacgcaatctgctgaaagcaggctacagcgtccatatttacagcatcgtggcgcaggatgtggaagagattgcccgtgatggcgctatcggtcaggcatccgctcgtgcggtcgccgaagcggcagatatcaccatcaccatggtaccgaatacgccgcaggtggaagatgtcctgttcggtgaaaatggcctggcaccagcgctgcgtgaaggtaaagtcgttatcgatatgagcaccatctcttcgctggcgacaaagcaatttgctgacaccatcaagtcgctgggagcacgaatgcttgatgccccggtaagcggcggtgataaaggcgcgaaaggcggtacgctgtcaattatggtgggcggcgaaaccgaagtctttgaacgctgtaaaccggtactcgaagtgcttggctgccgcgtcactcatgtcggcgacaacggcgcaggccaggtggtgaaatcctgtaaccaggttctggccgccgccactatggctgcgctgggggaatcgctggtgatgggggcaaaggctggcgtcgatccggccaaaatcgtcgaggtgctctccgccggatacgcccgctgtggcgcgctggatattcgcggtagcctgctgctggagcgtaacttcgagcccggatttatgactcgtctgcagtacaaagatctcaatctggcaatggagctcagccagggtattgactcccccatgccaatcgccagcctggtgcgcgaattatataaaacctgcatagcgcagggcgttggcaacgaagatcactccaacatcataaaagtgtttgagcagctctccggcatccaggtcaaagcaaggagctaa

SEQ ID NO: 177264 - DNA, 762 bp, Klebsiella oxytoca
atgcgttttcccgatttgaaacaacggctccgcgacgggccgttacacggctgctttgttaccttcccttcagcagcaataactgaatttaccgctgccatcggatttgattttgtgcttatcgataacgagcacggcaatatgaacccggaaacggtggaagatatggtgcgcgcctctcattgtcagcaggtgccgtgcctggtgcgcgttccatacaaccgggctgaatatatgcgcaaagcgctggatttcggcgccgatggcgtacaggtaccgctggtcaatactgtagaagatgcccgcgccgccgccctgcccacgctgtttcccccgcagggcgaacgcggagttgccttcctgccgcgcgcagccagctacggaatgtgcgctgataaagcgcgttatctggctgaagccaacgcctcgcggatactatcggtacatattgaaacaatagaagcggtagaaaacctggatgagatcctcgccaccgggctggccgacgtctacttcatcgggccgggggatttggccgtttcgatgggttatggacacgatctcaaccatcccgatgtgctggcaaccatagagcgctgtattcgcaaaatcgccgccagcggcaatattgccggaacctacgtgggaactccggagcgcgcggctgaggcgataagctggggcgctcattatctggtgactgcgctcaccccacatctggtgagcggcgcaagacactacttacaaataaaaaaccaataa

SEQ ID NO: 177265 - DNA, 1350 bp, Klebsiella oxytoca
atgagcattgcaggcaagaaaacgcacgcccgatattacatcttatttatgataacccttgtcttaacgctggcaaccggggatcgcgccacgctctccgttgccgggccggagatgcaaaaagagctcggtattaccgccgttgaaattggttatctcttctccgcgttcagttgggcgtacgtcatcagtatgacgcctgcgggctgggtggccgataaagttggctccaaacgggccatgtttctcgggatcctgctgtggtcagtgatgacagtatttatgggactagtcagctacatcacttttgttgtcccggccctgctaatcctgcgcttcttgctcggcgtatgcgaatcgccagttggcccctcagccggtcgtatcatcgcggcctggtttccctcgcaagaacgcggcgttgccggcgccatctttaacagcgcgcagtacgcttcactggcgatattcactccgctgatggcctggctatgccacgccttcggctgggatcacgtatttatcgtcatgggcgtcatcggcatcatcatcgctttctgctggtctaaattcttttacgtcccgaccaggcatccaggaatcaataacgaagagatggagtacctgaaggaaggcggcgcactggttgaactggacaccgttgcaagcgtaaaaggcgaacgcaagcgcgcaggctggcaggagatcggccagctgttcaaaagccggatgctgatcggaattttcatcggccagtactgcatctccgcgattacctggttctttatgacctggttcccgatttatctggtgaaagagcgcgggatgtcaattcttcaggccggttttatggcctctgtcccggcaatttgcgggctggtgggcggcattatgagcggttttttctccgactggctgctgcgtaaaaccaacaatctgagcctggcacgtaaggtcccgatcaccatcggtctgaccatgagcgccagtatgatcctttgcaactacgtaggttcagaagcgctggtgatgttcctgatgagcgccgcgttcttcggcaaaggctttggctccctgggctgggcggtggtcgcggataccgcgccgaaagagatcatcggtaccaccggcggcctgttcaactcgctgggtaacatcgcgggcatcgtcacgccggtggtgatcggctacatcctgcaagaaacaggctctttcgccaacgcgctggtcttcgttgggacccacggcattatcgccgtctgcagctactggttcatcgtcggtaagattgagcgcctgaaaattgctccacgtgatgacgctgcctccatgcaaaaacgtgaagcctga

SEQ ID NO: 177266 - DNA, 1524 bp, Klebsiella oxytoca
atgacaaaatctccggttatccgtcttgatgaaaaagacaacgtcgtggtcgcccgggtcgccatcgcctccggtaccccgatcgctggcgagaatataaccacgctgcaggatgttccgctggggcacaaggtagcaacaagacttattaaaaaagacgaaccgatcctcaagtacaacacagtcatcggcttcgcgcctgaggacctcccgccaggcacatggctacatagccacaacatcgtgtttgaagattttcagcgtgactacgcctttagtcgcgactatcgcccggtacaaaccgttccgccagatcagcgacggaccttcaacggctacgtgcgtgaagatggtcgagtcgggacgcgtaatattctcggcgtgttcgtggttggaaactgcggcgcgacggtggcgcgtaaaatagccgctcactttactgaagaacgcctgcaagcatggccaaacgttgacaacgtcgtgccctatgttcatgaactgggctgcggcatggagatgagcggggaacccatggatctactgcgccgcacattagcaggttatatcaacaaccctaataccgctggcgcgctggttgtggcgctgggctgcgagcgcaacaacatccacggtttctttgaacaaatgggtcttgaagagtctcccatgctgcgcaaactggtgattcaggataccggaggaacgcggaaaaccattgatgaaggtatcgctattatcgaatccatgctgccgcaagctaatacaatcaaacgccagccggtctccgttgagcatctgaccatcgggctacagtgcggtggctccgacggtttctccgggctttccgccaacccggcgctgggcgttgcgatggatctactggtcgaacaaggcggaaccgcgattctctcggaaaccactgaaattttcggagttgagcacactctcaccgcgcgcgccgtcacccccgaagtgggacaaaaactcgtcgactgcatcaactggtggctggaatataataaaggacgcgattgccagatcaacggccgggttagccctggcaataacgcaggcggactggcaaacgtgctagagaaatcactgggcggggctaaaaaaggcggtaactctccgctaatggaggtgtaccgctatgcgtatccggtaacgcaaaaaggattggtctttatggacacccccggatatgaccctgtttcagctactggccaggttgctggcggggccaacatgattgccttcaccaccgggcgcggctcctgctttggctcaatgcccgcaccgacagtgaagcttgccagcaacactccgatgtatcagcgtatgacggaagatatggatctcaactgtggcgcggtcatcgatggcgacgccacgctgcgtcagatgggggagacgatcttcgaaaaaatcatcgccattgcctccggtgagcaaagtaagagtgaagcgctgggattaggggaaaacgagtttgttccctggccgattggggtactggcgtaa

SEQ ID NO: 177267 - DNA, 1467 bp, Klebsiella oxytoca
atggtaacctctgcaaaaatagtcgggctggttgaggttatggcgcaaaatttatccaaggaaaatcccccgtcttttaaggttgagcataccgaagaagacgcgcagacgttattgcgccagctaatggcaatttatgacgttaaaacgctggtggcgcagctggttgccgtcggtgagcagcactggagcccggctatcctcaagcgcgttgcgacggtatcgcgcgcggcagggcgcataagcgcgcaggagcaggcacatcttcgttcgctcctgccgcagcctccagctcatcatccccactatggattccgcttcgtcgacctgttcgccggcatcggtggtattcgtcacggttttgaggcgattggcgggcaatgcgtgtttaccagcgaatggaataaacatgcggtgcgcacctataaagccaactggtactgcgatcctgagcagcatcgctttaatgaagatatccgcgacgtcacgctgagccatctccctgaggtgagcgatgaagaagccgcgcagcatatacgccaggcaatcccgcagcatgacgtactgctggccggcttcccctgccagcctttttcactggccggcgtctcaaagaaaaatgcccttggacgcgctcatggttttgcctgtgaaacccagggaacgctgttctttgacgtggtaaggatcatcaccgcccgccagccgccaatttttgtgctggagaacgtcaaaaacctgaagagccacgacaaggggcggacctttcgtatcattatgcagacgctggatgagctgggttacgaggttgccgatgcggcgcataccggagcggacgatcctaaggtgattgatggacgccattttttacctcagcatcgggaacggattgtgctggtgggtttccggcgtgacctccagctccatgaggggtttaccctgcgcgatattgcccacctctatcctgccagcagacctacttttggcgagctgctggaacccacggttgacgacaagtttatcctcaccagggtgctgtggaagtatctctatcgctatgcgcgtaagcatcaggagcgagggaacggttttggctacgggctggttgatccaacgaatccgcacagcgtggcgcgtacgctctctgcccgctattacaaagatggcgcggaaatcctcatcgatcgcggctgggatcggccgttaggcgaaaaatattttgatgacccggagaatcagttgcgtcgtccgcgcaggctgacaccgcgggagtgcgcgcgtctgatgggttttgagacgccgcaggggtatcgttttcgtatcccggtctcggacactcaggcctatcgccagttcggcaactcggtcgtggtgccggtatttgctgcggtagcgaagctgctggcaccgcgaatcgaaaaagcggtagccatgcgtgaatcggctgagttcagcgaaagccattga

SEQ ID NO: 177268 - DNA, 2688 bp, Klebsiella oxytoca
atgaatacagaaaaaccgggcggcccgttctatcagctctccgtcgaagaaaccctgaccagcaccaacagtaccccggacggcatcagcggtgctgaagcggcagcgcgcttgcagcagtacggcgagaatgctctaccgcaaaaagcaggaaagccggcatggctgcgctttctggcgcattttaacgatgtgctgatctatgtgctgctggcggcggcgctgctgacggcggtcatggggcactgggtggatactctggtgatcctgggcgtggcggtgattaacgccctgatcggccatattcaggagagcaacgcggaaaaatcgcttcagagcattcgcaacatgctttccagcgaagcggtggtcgttcgtcagggcaaccatgaaacgatcccgacaaccgctctggtacccggcgatatcgtcgtgatccgcgccggcgatcgcatccctgctgacctgcgggttatcgaagcgcataacctgcgggtggaagaggcgattctgaccggcgaatcgacggtggtggagaaaagcaccgaggcgcttagcggcgagctgccgcttggcgatcgtaccaatctgctgttttccggcaccacggtgagttcgggcggcggaaaaggtctggtggtggccaccggcggcgataccgagctgggtcatatcaaccagatgatgtcggatatcgaaaaacaccgaacgccgctgctggtgcagatggataagctcggtaaagccatttttatcatcatcctggtgatgatggccgcgctgtttgtctttagcctgctgttccgcgatatgccggtttctgagctgatgctgtcgttgattagcctcgcggtggcgtcggtaccggaaggtttaccggcaattatctccattattctctcgctcggcgtgcagaccatggcccgtcagaaggcgattatccgcaagctgcctacggtggaaaccctcggggccatgacggtgatctgctcggataaaaccggcacgctaaccatgaacgagatgacggtgaaagccgtgataaccgccgataaagtttatcgggtggagggcgacagctacgagccgatagggaatattcacccgatcgatgtgcctgcgccggtaaccgttgcgccgggcacgctgctggaacgttatctgcgcactatcgatctgtgtaatgacagtcagcttattaaagatgaaagcgggctgtggaaaattaccggcggcccgaccgaaggggcgttgaaagtgctggcggcgaaagtcccgctcccggcgctcaacactgagctgcgcagcaaaatccccttcgattcacagtataaatatatgtcgacgctgtaccgcatcggcgatgaagagatgattttgattaccggcgcgcccgatgtcctgttccgcctgtgccagcatcagcaaaccgaccatggcctggagccgctcgaccagccttactgggaaggcaaaatcgaagagtatgcgcgggaagggctgcggatggtggcggcggcgtggaaacccgccgccgacggtcaaacggaactcacccatcaggatttgcagcagggcgtcattctgctcgggatcgccgggatgatggatccaccgcggccggaggcgattacggccatcggcgactgcctgcaggcggggatccgcgtgaagatgatcaccggcgaccatccgcaaaccgcgatgagtatcggcaagatgctggggattggcaatgcggaaaacgccattaccggcagagagctggaggtgatggacgacattcagctcagcgaagccgcgcagaaattcgatatctttgcgcgtaccagcccggaggataaattccgcctggtgcaggcgctgcaaagcaaaaaagaggtggtcgggatgaccggcgacggggtgaacgacgccccggcgctgaagcaggccgatgtcggtattgcgatggggattaagggcaccgaagtgaccaaagaggccgcagatatggtgctgaccgatgataacttcgccaccattgccagcgccgtcagggaaggccgccgagtgtacgataacctgaaaaaaaccatcctctttattatgccgaccaacctcgcgcaggggttgttgattattattgcgctactggcgggaaatttaattccgctgactccggtgctgatcctgtggatgaacatggcgacctccgccacgctgtcgtttggtctcgcttttgaggcaggtgagaagaacatcatgcgccggccgccgcgcgatcctaagctgcatgtgatggacggctttgctatctggcgggtgatttttgtcgggtcgatgattgccgtcagcgcctttgttcttgaagcctggctacagccgcgcggctattcgcctgagtttattcgtacggtgctgttacagacgctggttactgctcagtggttctatatgctcaactgtcgcgtggcggatggcttctcgctgagtaaaggattgctggcgaaccgggggatctggattgtcagcggcgtgctgctggtgctgcagctgctgattatctacgcgccatttatgcagatgctgtttggtaccgaagcgctgccgttccgctactgggttatcacttttattatcggttttgtgatgttcctgattgtggaagtcgagaagccgctgacccggagatggcgtacggcctga

SEQ ID NO: 177269 - DNA, 1452 bp, Klebsiella oxytoca
ttgaacgtcacctccgcattacgccagtccgtcgaacgcacgtcctggtttaaaaaacgcaagacctatcgcgtcctctactggcgtgaaatcagtccacttgcggtcccgattttgctggaaaacgcctgcgtgttgctgatgggcgtgctgagtacttttttggtcagctggctcggtaaagaagcgatggcgggcgttggcctggccgatagcttcaacatggtgatcatgtctttttttgccgccatcgatctcggtacgaccgtggtggtagccttcagtctgggcaagcgtgaccggcggcgggcaagggcggcagcgcgacagtcgctggcgataatgaccctgttctcgattattctcgcggcggttatccatgcttttggcgcggaaattattaattttgtcgccggagatgcgacagaagaagtgaaaggcctggcgctgacctatcttgagctaacggtattgagctatccggcagcggcaatcgccctgatcggcagcggtgcgctgcgcggagccggaaccactaaaattccgctgttgatcaacggcgggatgaatattctgaatatcattatcagcagcatcctgatttacggcattttttcgtggcccggcatggggtttgtcggcgcgggtctgggattaaccatcgcccgctatattggcgcggtggctactatctgggtattaatgatcggctttaacccggcgctgcgcatttcgctgaagagctactttaagccgttcaacttcgccattatctgggaagtgatgggcattggtattcccgccagcattgaatcggttttgttcaacggcggcaagctgctgactcagatgttcgttgccgggatggggacaaacgtgattgccggcaactttatcgccttctccgtggctgcgctgattaacctgcccgggaacgccctgggttccgcatcgacaattattaccggcaggcgtctcggaaaagggcagatcggccaggctgaacgtcaggcgtggcacgtcttctggctatcgacgatcgtattgacgctgatcgcctggggaaccgcgccgtttgccggcctgatcgcttcgttttataccagcgaagaggatgtcaaggtggtggtgaaagagctgctgtggctcaacgccttctttatgccgatttgggcgatggcctggacgttgccgtgcgcttttaaaggcgcacgtgacgtgcgttacaccatgtgggtatccatgctcggcatgtggggctgtcgcgtcgtggcgggctacacgctggggattgtgctgggtatgggggtgattggcgtctggttggggatggtgcttgactgggcggtgcgcggcgttttgttttactgtcgaatggtcagcgggcggtggctgtggaaatatccgcgtaccaaagcgcaggcagatgagagtcaggcgcagcctgaatag

SEQ ID NO: 177270 - DNA, 198 bp, Klebsiella oxytoca
gtggtattctctttgccgaatatggaatcgaatatatggcattggaattttgctaaaatgttgctatgcgacgatggtgaaagtggacccgatactccgatactaagaaaagattttaccgcagatggtaaaaaaatgctgattcgtatcgttaatattttgtttgctaaaaccttgtctcattgcaacgtgcgttga

SEQ ID NO: 177271 - DNA, 486 bp, Klebsiella oxytoca
atgaaataccaggataaaatcaggaccaaaagcatttacatactctttctggtgttggtgatagggttgatttttctctggctggtagggcatctttatcgcaaagacgactttgattgctcagccaacctgagaattgaatcaacttcatttgcctttgatgcaaaatttaaaaccttcttgcttatgcgggaaaataataccggctattttgatgtatccgggaaggtgctagtcgatgacgtgaagtacaacgtcgaaagggcgtaccatttcaactatgaaaagaaagcgaataatatttatcacctaaccaataccacagtctctaagagaaaggccgacaccatgatcgagggtatgatgcaaaaagtcttttttagtcccgatccggattcaggacgctatatcaagatacaaagaatgaaaaacgcctggatcgttcaaagtctgtattccccttcgtttatctgtgtaaccaattga

SEQ ID NO: 177272 - DNA, 540 bp, Klebsiella oxytoca
atgcaaaggatgaagtcaggtctgttgatattcctgctcccgccgctggcgctggccggtaaccagtggaacgttatgctgcccggcggaaacatgcgctttcaggggatagttattgccgagtcgtgccgcgttgaagcgggcgaccgccagatgacggtcaatatgggacaaatcagcagcaatcggtttcattcggccggggaagacactaaccccgtccccttcgatatccacctgcaggagtgcagcaccgccgtcagccagcgcgttggcgtggcgttttacggcgttgccgatggtaaaaacccggacgtgctatcggtgggcgaaggaccggggatagcgaccggcgtgggcgttgctctgtttgataaaaccggcagccagatcccgctcaatgcgccgccaggaagctggtcgccgctgcacaccggcccgaccaccctgcattttgtcgctaaatatcgagccaccgggaatcaggtgaccgggggagcggccaacgctcaggcatggttctccctgacctaccagtaa

SEQ ID NO: 177273 - DNA, 714 bp, Klebsiella oxytoca
atgaaaaacacactggctacccggcgcgggatgcgcggtttactggcggctctattactgctcgccaccagcggttttagcgctcaggcccaggccggcgtggcgctgggagcgacccgcgtcatctatcctgccgggcaaaagcaggttcagctggcggtcaccaacaacgacgaaaagagcacttatttgattcagtcatgggtggagaatgccgatggcgcgaaggacggtcgctttgtcatcaccccgccgctgttcgccatgcagggaaaaaaagagaataccctgcgcatcattgatgccaccagcaaccagctgccgcaggatcgggaaacgctgttctggatgaacgtcaaagcgatcccgtcgatggataaatcaaagctcagcgacaacactctccagctggcgatcatcagccgcatcaagctctattaccgtccggcaaagctggcgctgccgccggatcaggctgcggaaaagctgaagttccgccgcggcgcaggcacgcttacgctgatcaaccccactccctactacctgacggtcaccgaactcaacgccggtacccgggtgctgaaaaatgcgctggttccgccgatgggtgaagccagcgttaaattacccgccgatgcgggtcgcgagattacataccggacgattaacgactacggcgcgctgactccgcggatgaagggcgctacccaataa

SEQ ID NO: 177274 - DNA, 2628 bp, Klebsiella oxytoca
atgtcacatctgaaatatggactcgaccacctgggctcccggcgtgttactccaggagctgctcgcgcatttgcgcagatcccccttgcccttttgctggcctcaccggctttttacgcgcaggcagaactctatttcaacccacgttttttagcggacgatcccgctgccgtggcggatctgtccggttttgaaaaaggccaggagctgccgccgggtacctaccgcgcggatatctacctcaatgacgggtatatggccacccgcgatattacctttaatgttgatgaaaaaggccacggactggcaccctgcctgacgcgcggacagttggccagcatgggcgtcaacacgtccgccattgccggtatcgatgtgatggcggcagatgcctgcgtaccgttaaccgaaatgatcaaagacgccaccacccgctttgatgccgggcagcagcggctgtacctgaccgtaccccaggcgtttatgggcaaccgcgcccgcggctatattccgcctgagctctgggaccacgggattaacgccgggctgctgaactacaacttcaccggcaacaacgtccataacgacatcggcggcagcagcaactacgcgtacctgaacctgcagagcgggctgaatctcggcgcctggcgtctgcgcgataacaccacctggagctacagcagcagcggcagttcgtcgaccagtgaaaacaagtggcagcacgtcaatacctggctggagcgcgacatcaccgcgctgcgctcgcgtctgaccctgggcgacagctacaccaacggcgacgtcttcgacggcattaacttccgcggcgcgcagctcgcctccgatgacaacatgctgccggacagccagaagggatttgccccggttatccacgggattgcccgcggcaccgctcaggtgtcggtgaagcagaacggctatgagatctaccagagcacggtgccccccggcccgttcaccatcaacgatctctactccgccggcaacggcggcgacctgcaggtgaccatcaaagaggccgacggcagcagccaggtcttcaccgtcccttactcgtccgtgccggtgctccagcgcgagggccatacccgctatgccgtcaccgccggggagtaccgcagcggcagcaatcagcaggaaaaaccgaagttcttccagggaactttgctgcacggtcttccggcgggctggaccctgtacggcggtacccagctggcggaccgctaccgcgcctttaacctcggcgtcggcaaaaacatgggggagctgggggcgctgtcgctggatatcacccaggccaacgccaccctgcccgatgacagcgagcatcaggggcagtcggtgcgtttcctctataacaagtcgctgacggataccggcaccaatattcagctggtgggctaccgctactcgacgcgcggctatttcagcttcgccgacaccacctacaaccggatgagcggctacaacgtcgagacccaggacggcgtgattgaagtgaaaccgaggttcaccgattactacaacctcgcgtacaacaagcgcggcagggtacagctcagcgtcacccagcagctggggcgtaccgccacgctctacctgagcggcagtcaccagacctactggggcaccggtaaggccgaccagcagcttcaggccgggcttaacgccgccgtcgacgatatcaactggaccctgagctacagcctgaccagaaacgcctggcagcagggccgcgaccagatgctggcgcttaacgtcaatattccgttcagccactggatgcgctccgacagcaaatcggcgtggcggcacgccagcgccagctacagcatgtccaacgatctgaacggcaggaccaccagccttgccggcctgtacggcacgctgctggaggacaacaacctgagctacagcgtacagaccggctacgccggcggcggcgatggcaacagcggcggcaccggatacgcggcgctgaactaccgcggcggctacggtaacgccaacgtcggctacagccgcagcgacggtatcaaacagctctactacggcctgagcggcggcgtgctggcccacgctgacggcgtcaccctgagccagccgatgaacgacacggttgtgctgatcaaagccccgggcgccgacaatgtgagggtagaaaaccagaccggggtacaaaccgactggcgcggctacgccgttctgccctacgccaccgaataccgggaaaaccgggtggcgctggacaccaatagcctggccgataacgtcgatttggacgatgcggtagccagcgtagtaccgacccacggcgcaattgtccgcgcggaatttaaggcgcacgtcgggctcaagctgctgatgtcgctcatctataacgggaagccggttcccttcggcgcgctggtgacctctgacgacagccagggcagcagtatcgtcgccgataacggccaggtctacctgagcgggatgccgctggcgggcaaggtgcgggcgaaatggggcgaaggtccgaacgccagctgtgaggccagctacagcctgccgccggaaaatcagaaccagacgctgagccagctctccacggagtgccgctaa

SEQ ID NO: 177275 - DNA, 1254 bp, Klebsiella oxytoca
atgaaaagttatagaaggcgagatttcattgatttagcagcaaaattaggaataagctcaatttttatagggacttcatctcgatttgcattcgcttcaggaataactattttaaacgtcgcagacttcggagcaaaaggtgatggtgtgactgatgattcttttgcctttcagaaggcgttcttaaaagctaatgaatttggtggtgctaaggtctacttcccaaaaccaagaaaagaatatcttttgaagtttcctgtatttctttttaacaatactgaggcatatggggatggtcaacaaactcgcatagtgtttgaaaatccggtctttagcaaaggtcgagggggttttgtaatcggttccagtcttgaggccaaccgagaattggcgttaactcgtttcaacagtaaatctctgtcaacgaccattaataaaaactttaagaatcctattcaaaggcattatataagagactcccctgaacttgcacaagctaaaggaagcagtttacatgacatctatattgaggctcgttatacgactgactccgaaagcaactggggcggatatgggattaatttcgtaaatgctattgactgtcatgctaaaaatatatgggggaaaggttggactcaacttataggtatgggttccgatacaccgcctgaaactccatctaatcataattgtagtgctacaaatttatatatacttcagcctgacttagtaaggacgtattactcagtgggcttcatggctaattcaagcaactgcaccatacagaatgccaagcaatgggagccaatgaccgcgggcagtaaaaatggcagtggtgtagcgctgaacttttgtgaggattgcattgtttcagatatcgatattcctgacctaggaagaacgcaaacatcagaaggaatattgattaacaattcatcaggatgtctaatacaaaacatcaccattggaaatgccaaaaaggctgtctccacattttttaactttaaagatacacagaaagagtttaagccgaatttgataaagaatgtgaaaggttcgaactgcgatattgttctatctatatattctaaattcaacataatcaggaatattaagggtgaaaagtcacgccggattatagccttaatgaattcaaatgctgcccacaatattattagtgctcctgaggcagatatctctaccccaggaaagtcgccaatcaatatgctgatgaaactgaacacaatagaataa

SEQ ID NO: 177276 - DNA, 894 bp, Klebsiella oxytoca
atggtggataccgtgacgaccaaaggcattgccgtctctgccaggacggttgccaggcaaggctactggcgcggcgtgtttggccgcctgctgcgcgacccgggcggggtattcgtcggcgcgatcattctcgttctgctggcgctggcgctgttcggcccctggctgatcgttaaagatccgtatcaaacgtcgatgtttttacgcctcaagccgatcggcaccgacggctttccgctgggctccgatgagctcgggcgcgatatgctatcaaggctgattctcggcacaaggctatcgctgtttatggggattgtcccggtggtgttggccttttttatcggtggggccatcggcattatcgccggctatgcgggcggcaaaaccaacaccctgatcatgcgcaccgtggacgtattttatgctttcccctcggtgctgctggcgatcgcgctttccggcgcgctgggcgcgggtatcggtaacgcgctgctatcgctgaccctggtgttcgtgccgcaggtggcgcgtattgccgaaagcgtcaccgcgcaggtgcggcatatggactacatcgacgccgcccgagccaccggggccagcgcgttcaccattattcgcgtccaggtgctgggcaacgtgctggggccgattttcgtcttctccaccggcctgatttcggtgtgcatgatcctcgcctccgggctctcatttctcggcctcggggttcgtccaccggagccggagtgggggttgatgctgaacaccctgcgcacggcgatttatacccagccgtgggtggcggcgctgcccggtctgatgatttttatcacctccatttcgttcaatatcctcgcggaccgcctgcgtgcggcaatggcgattaaggagtaa

SEQ ID NO: 177277 - DNA, 1623 bp, Klebsiella oxytoca
atgaaaacggcatggagcggtctgctgctggggttaagtgctttaccggcggcggcgatgaactgtgaatccccttcgttacagggagagctggaggggaagttcgacgccagcggtgaggtctgttttgacttgcccaggctaggagagaactacgtcgcggcgacgctctccggcgttaccgatgcccgactgctggatgaacataaccgccgtctgcgcacgctgctggcgggcggcccggcggatggcgagcaaaccctactgttttctctgccggtaaaccgcgcctcctcgctggtgctccacggtgaagaaggagcccgctggcgctttcagtggcagatgcgggaaaccaccgcgctggccaaaatccagacgctggacccggtcagcccgcgcctgcagctgctgaagaaggaactggcggcgggaggctcaacggcgactttctggcgggagcgcgaactggagggaaccccaatggtggaatcggtggacgccagccataagcgggtgaccttcttgtggcgcggagcgagccgcaacgtgtttattctgggttcgccggcgggggatcacgatccgctgtttcgtctcggtgattctgacgtctggtttcgtagctacgtcgtacctgccgataccttaatgcagtataagctcgccccggatgtgccgcaggtagccggcggcgcgcgcgagcagcggcgggctattctggtcagcgcccaggccgacccgctaaacccgaatagcgtcaatgccgcccacgaccgctggagccgttactccctgctggctcttaaccccgcgcgtttttgctcggcgccgcggatggcgcagccgctacgctacgggacgctgacccgccatcagctgcgcagcgactttttgcaaaacgcgcgtgaagtcatgatttatcgcccacgtttgccgcagcccgcgcgctggaccctgctgctctttgacggtaaaacttaccaggacgaataccgcttcgccaacgtgctggacgccctgatcgccagccacaggctaccgccgattaacgtggtgtttatcgatagcctcgatcatccgcggcgggcaaaggagctgccgccaaatccgcactttgccgattttatggcccatgagctgctgccctggctgaaccgccaggggctcagcctgacccggcaaaaaaccgtggttgcaggatccagctacggcgggctggccgcgtcctgggtggcgctgcgctatccccggcagtttggcaacgtactgagcctgtccgggtcgtactggtgggcgccgaaaggggaagaggccagctggctgacccgacagtatcagcactcgccgcgctatccggtccgtttctggctacaggcgggaagatttgagacccgcgggccggacggcggtatttatgccaatacgcttgagttcgggcgggtactgagcgagaaggggtatacggtgagctttcatccctcctcgagcggccacgattatgtcgcctggtgcgaaggcctgatcaacggtatgcgcgacctgagcggattagcgctcaagagagaaccagcgacgccagacccagcgcagcgccagatactcgatggcgcccagcgctaa

SEQ ID NO: 177278 - DNA, 876 bp, Klebsiella oxytoca
atgcgaaaaaaactccccagcagcgcctctctgcaggcctttgaggccgccgccaggcacggtaattttgcccgcgcggcggaagagctgtcgcttaccgaaggggcgataagtcggcaaatcgcccgcctggaatcgctgctgaactgcaaactgtttgaacggacgggaagccgggtgcggctgaatcctaacggcgcgcgctatgcgcaccatgtgcgcgagacgctggagcggctggaacgcgacgctcagtatctgatgggcgtcgcggacggcagccgaagcctggaaatcgcctcccccccgacctttgccagccgttggttgattccccgtctgggggattttcatcgccgctacccggacatcatgctgaacatcgcggtcagaaccgagccgtttattcttaccggcagtggttttgatgcggcggtgcactttgagcatcccgcatgggccggaatgcgccggcaatttctgtttgaggagcggctggtgccggtatgccattctgcgttgttcacgggaggcgaagccttgagccagttgaacctgttaccgcgcattcaccgacggcaaaaccccgacgcctggccgcgctatgctgaagagtgtgggatcgcgctggatcatccggcgcggggcgtgcgctacgatctgcatgagatggcgatagccgccgcgctggccgggcagggcgttgcgctggtaccgcacgtgtacgttgaaaaagagcttgaaaacgggacgctggttgcgccctggcctttggctcgcagcctgagcaagcgcttttgtctggttaaaccgctggagcccgggatcaatgaatcggcgctacaggcgtttgaacagtggctactggcgcaataa

SEQ ID NO: 177279 - DNA, 1977 bp, Klebsiella oxytoca
atgcgcaataccttccgaccttcatgccctatgctggcgctgactatcgccctggccggactcgcaggcggctgtaatgacagcggcgtaaaccgcgataacccggcggaagcgcccgcctccgcgccgcagaacgtcatggttcccgtcctgtctgctgatgaaaatagcctggtgctggtttgggaaaagccggaatcagagacgcagcaggtggtggactacgcgatttaccgccagggcgagcggctgggtctggcgcgcgaaaatcaaaaccatttttcaccggccaaaccctatattgataacttctatcagcggattgccagcgacggctggcagcagccaatcgatttgcgtacctttacggtcactcacctgcagccggatacggaatatgcctttacggtgcgcgcggtctacgccgatggccaggaatctccggacagcgcggtggttaaagcgcaaacccgcaaaacgccgcacgtcatcgaagccagaacctttggtgcaaagggtgatggcaccacgctgaatacccaggcgctgcagcaggcgatcgataactgtacggtctcgcactatcctcagggctgcaaggtgctgatttccggcggcatattcaagagcggcgcgctgttcctgcacagcgatatgaccctggagattgcggctgacgccaccctgctgggttcagacgatccggcccagtatccgctggaaaaaggctattacctctatccctacagcgatcatccgcagccccgtcgcccgccatcattaattaacgtgctggaagcggacgataagggcgagtctccggccgggacgtttcgcaatattcgcctcgtcggtcaaggtacgattgacggcaacggctggacccggggcgtcaaaagcggcggcgaggccacaattatcgatgaaatgggcaatgaactgccgcagtaccgggccagtaatgccaataaagttggcgcagacggtattctggcaaagcatcagaccgaagcggctattgcggaaggcatcgaaagcaatagcgcctataaaaatcgccgctccagcctgatgactctgcgcggcgtgcacaacctctatcttgccgggctgacaatccgcaaccccgcgttccacggggtaatggcgctggagtcaaaaaatatcacgctcaatggcctggttcaccagacctttgacggcaataacgccgacggcgtggagttcggcaatagccagaatgcgctggttttcaacaacttctttgataccggggatgattgcgtcaatttcgccgccgggtttggtaaaggcgcggaaacttttcatcaacagccgcaaagcggggcgtggatctttaataactatttccgtaaaggccacggcgccgtggtgaccggtagccataccggagcatggatcgaaaaagttcgcgccgaggataacgtcatgtatatgaccgatgtcggcctgcgcatgaaaagccgcccttactacggcggtggcgtaagggatgtgctgttccgccataatgcgatgaaagatatcgccaaagagccgttcgtttttactatcaaatacagcgccgacgtgaatgatacgacccctgccgacgagcccgctcagttccgcgacgttcaggtgcaggacctcaccgtcgatggtacttcggctaagcacagcatcctgattgacggcatgacggtagccgaaatggcagaatcatttggactgacctattctcgcgatgcctaccaccagaatctgcgtttttccaacgtcagtttccgtaacaccaaagcgaccagtatctccttcctgcgcgacagccagtttgatgaggtaacgttcgctaatacaccgcaggcctgggcgtttttcgccgtcaatgacgtgacgctcgctgacagcctgcatcagcagagcatcacccggggagaaaaggacaaacttatccttgagggggcaataaagtaa

SEQ ID NO: 177280 - DNA, 504 bp, Klebsiella oxytoca
atgacgatgatcagacctggcagtaaattggcgaccgggaatgatttaataccgcaaattctcaaacccgtcacaaacataataaatccgcctaacccggagaaatcagcaaccatatcaggcgttagcattggcattattgattgcccgattaagagcagaatcatttggacgataaattgcgggatcgcgatagtggcgaccgaaagaccaagcagggtggcaaaaataccggcagtcaggatatcgagaaatgatttagttaacagtatcgatatgtcgccggttattccttcctgcatagcgccaaagatgcccgttcccgaagccacgaagagcaccagaattccaacgaatttgtcgagatactcctcttgcgataacgtgctgccgcttttctgtggggcaattttatcaatgataaaacgtagttttgatgcgccacggccaatgtttctctcgatagaaaatatttcaccgataattgcgccgaagagtaactag

SEQ ID NO: 177281 - DNA, 789 bp, Klebsiella oxytoca
atgaaacacctgaaactgcgcttacttattcttattacttttttttcttcatcctgggtaatagccgagactccggcacctcaggctatagatattatacgtttggctgatgatatacgttcgcctaatgtacctttccgctatacggtaactgttcttgaatataaagagggtggcgagcagccggagagtaaacaaattctcgatgtgtcaatgcgttttatgaaacctgaaaatggctcgcgggcagatgcgcgttctttagtccggtttatttatcctccacgggataaagggaagattatgctttctgattggtacgatctctggttttatacacctgaactacgaaaaccgatacctatttcaccggcacaaaggctgagtgggcaaatctcaaatgcagacgttatcgtcactaattttgagtacgcctacgattctacaatcgaaggtactgaaccttgcggacagaaagtctgttatagactatcactgatacgcaaatcggataaggtaacttatccaaaggtgatataccttgtagaacaaggagatgatttcaggccttaccaggcatcttattactcccttgataaccaattgctcaaaaaagtctcctataaaaattaccagaaaattttaggtaaatatcggccatctgaaattgtcgtacagagtgctcgatatgcaaaaggctattcagtgatgaaatatagtaacgtaagactggaaaaattacctgagtatttttttacaaaagaggcgatgttaaggggggggcaatga

SEQ ID NO: 177282 - DNA, 738 bp, Klebsiella oxytoca
atgtcttttacctcccgcttactgagcactatccccggcatccggtatgcctttctcgacgtccatgaaaccgccgcctttccctatagcgaaatggcgccagttaaactggttcacagcaacatcgtgcatgagtatctggcgccgcaggcggagcgaccccatgccgatgcgatgtttaccgccctcagcgggcaaaagataggggtagtgaccgccgactgtctgccgctgctgatggcgtcgcgcgatgggcgctatatttgtagcgtccacgcaggctggcgcggcgcggccagcggaattattgaaaatagcctggcgttgtttcagcgttatcacgtcgccccgcaagatctggtggtggtgagcgggccgcatattcacgcctgctgctacgaagtcaccgccgacttctatcaggctctgctggcaatgcccgcaggcgagctggcaaagcgccatcgggagcagctcttcctgccccatcaggcggcgtcagtgggggagcaggcgcaagcgaccgctgacgacaatgtctggttcgatctgcgggcctttgcccatctcctgctgcgcagcgcgggggtgccggaagaaaacatggagtggctggggagctgtacctactgcacgccgcagctgctggggtcgtttcgtcggcgcacgcatttcccggcgccgaagtcatttcagtactcatggatcatgcgtgaacctgatagtgcgggccgatga

SEQ ID NO: 177283 - DNA, 1404 bp, Klebsiella oxytoca
atgaaattgaacccgttcgctttaactcttgcgccgctgctggccgccggcgcgttttctgctcatgccggcccgcaggcccacgtggtctgcgcttatcaccatacgttgggcgatgacgccattatgatgttcggcaaaccgaatcaggctatgtggcatgatttttttggcaacacccatactgacgcagtgtcgacctatcagacgctgcgcgaccagccggaaaccacctgcgataacaaagccgacagctccgcctactgggcgccatcgctgaagctgcctgacggtcaggtggtcgcgccggcttatcaaaaaacctactaccagaccagcaaagtcgaacagcatccgctgcatccgttcccggccggtctcgaactgctggcgggcgatcatcacggttctgctcccagttcgcgcattacctttctctgcgccaacggcaatggctataccaataaggccgatcagatttgcgggctgcgcaaagcgggggatgcggtacagtttaatatcggtatccagttccccaactgctgggatggcgtcaacctgaaaccgacgcacggccacagtaacgcgacatacgacgtcaatggcgcctgtccaggcgattacccggtgaaaattccgaccgtaaacatgaacgtggcatacgttctgccgcagataaaaacgctggatacggcaaaaattcagctttcaatggatccggtcatggacggcgacaagcgtcaagagcgctggggcagcatctatacggcgcacgcggatttcatgaacggctggacggttgaggcagcgcactatatgaccgagcgctgcatgaataaggggatcgactgcggtagcgcggtgccttatggcttctccacggtagaggagaacgcgctggtggacagcaccgagccgacggtgacccatgccgctccggaaaatctggtggtcagcgataactggaaaaacggcgggcgcacgcataacccggaaaccatgacgctggtgaaattcccgatcccgccgctgccgcagggacaggacgcttcgctgtttaaatatcagttgcggatctacggtggaaaagtggaaaccaacggcgcggatcagatttttctctatccggcgagcaacgactggagcgcaaacagcgtgacctggaatcatcgtccgtcctgcaactacagctctgatggggttctgtatcttaattcaaagcgtgaataccggacgatcgatgttgataaagcggtgcgcaaggcgctggctgagggcaaatccgagatctcgtggtatatcggcggagaccgtcagggcaaccgctatcatttcgatcccgcggggtcgcagcaggagccgatgctgatgctgatgggctttaaaaatacgccggagatctga

SEQ ID NO: 177284 - DNA, 240 bp, Klebsiella oxytoca
atgtcggtaaaacattatctcaacagcttagcgcgcgtcgcgctggttggtggcgtcactcccgttcagcatctgcagcggctgtcggaatatttgcagcgcgatatctctataaaacgtgacgatatttcgcatcctggcatgggcggtaataagttcagaaagctagagtttctggcggcagatgggtctgaagtgcgcagcgctgctggagaatcccattcaaaccgcggagcctaa

SEQ ID NO: 177285 - DNA, 255 bp, Klebsiella oxytoca
gtgcgagcagatgtgtgcagtccgtggtggtgtcctccggcagcgcggggacgcatgccgaataccgcagggatggaggcggtggcgttgctggcgcgtctggaggggatcatgcttgatccggtctataccggcaaggcgatggcgggcctgatcgatggcgtgaaaataacgcgtttcaccggcagcgggccggtgatgtttgtccataccggcggcgcgccggcgctctttgcttactatcctcgcgtctga

SEQ ID NO: 177286 - DNA, 912 bp, Klebsiella oxytoca
atggtatcgacaaccgcagtagccgccgtcaaagaatggcggaaacataataaatttatttgtcaggttaaactcagctataaaaaggtactgcgtaaatgcagagaaatatctttaaccggagggaaatacaaagaatatcagacattatgcgccagctatgcttgcgcgaaattaacgggagccaccgaggggttggttaactttgaagataaaccctttaaagcctatttaaataaaaagatgtcaaaaagagcgaaactcgatatcgctcatggctctttgaattttatagaaaaaagctttcgtcccgaggccttgccgcagctgtatgatatggcgaactttggccgtacgcttatcgccattccgctgaaaaacggtagcagtattgatgtgaagctcctggcatcgccttttcaggaggaaggggagctcatgttgttaatgttccttggcgataaacgcgtctacagtatctgtttttcctgcactgacgatggccgcgcctggattggcggtattcagggagggaaagatatcgataatgaagaggtgaaggcgctgacgaaagagctttacggcacccgtcctaaaaacttaattatcactctgctgtacggttttttagcctttttcaatatcaaggagatctatgctatcgacagtgattttcatgttaaaagcgacagagtaaaaactcgttattctgagctttggctggaaattggcggcgagaagcatcgacgcggctggtataaattaccgccaaccgagattaagaaaagcctggaagaggttaaaagtaagcaccgtagccagtttatcaagcgtgaaggtctgaaggagctggcgcagttggatcttgccgccgcgctaggcgacatctgcctctgccgtaacgccggataa

SEQ ID NO: 177287 - DNA, 966 bp, Klebsiella oxytoca
atgagtcatgaatacgtgattgaagtggatgggctaaaaaaacacttcccgctacgcgatgggctattcggccagcagaccggcgtgctgcgggccgtggatggcgtgagctttaagattcgccggggcacgatttttggcctggtaggcgaatccggcagcgggaaaaccaccgttggccgcacgctgctggggctatacgagaagaccgccggcagcgtgaagtttcgcggccaggagcttgccgaactgtcgccgcaggcgatgcgcgcgctgcggcctaaaatccagctggtttttcaggacccctacagttcattaaacccgcgcatacgcattggcgtcgccatcggcgaggcgatgctggaacacaagctctgtcgccgggcggagctgtatgacaaaacccttgaggtgatgcgcatctgcgggctgtctccgcagcattacaaccgcttcccgcacgaattttccggcggccagcgtcagcgcatcggcattgcccgtgcgctgatcttaaacccggattttattattgccgatgaaccgatttcagccctcgatgtgtcgattcaggcgcagattatcaatctgttttccgacctgcgcgacgaccatggggtgacgtttttgtttatctcccacgatctgggggtagtagagcatctgtgcgatgacgtagcggtaatgtatctcggtcagctggtagagaccgccagccgcgatgcgctattcagcagccccctgcatccctacacccgggcgctgctggcggcggtaccgaccctcgatccggacagcgagccggtcgcggcgctacaaggtgaaattcccgacccgtcccggcccccttccggctgtcgtttttcctcgcgctgcccgcaggccagcgaccgctgccgccgtgatattccgcttctaagggaagttgccgacggccacctcgtcgcctgtcacgcggtttag

SEQ ID NO: 177288 - DNA, 990 bp, Klebsiella oxytoca
atgaagctacaggccctgacgtggcgctctcttccctggattaaggccagccgtccgcagtggcgctatgccctgcgtaacgggattgccatgtgcctggcgttgagcgtcgcctactggctgaatcttgacgaaccctactgggcgatgacttccgccgcggtagtcagctttcccaccgtcggcggcgtgatcagcaaaagctttggccgtattgccggcagcctgctcggcgcctgcgcggcgctgctgctggccggccatacgctcaacgatccgtggctatttctttttagtatatcggcgtggatagctctctgtacctgggcctgcgcgatgttcaccaataacgtcgcctatgcattccagcttgcgggctacacctgcgcgattatcgctttcccggttatcaatattaccgatgctaacgaactgtggactatcgcccagtcgcgcgtctgcgaggttatcgtcggtatattgtgcggcgggctaatgatgatgattttaccgagtacctccgacggcaccacgctactgagcgcgctaaaaaatatgcatgcccgcctgctggaacacgccagtctgctgtgggtcccggaaacaaccgatgctatccgcgccgcgcacgagagcgtgattgggcaaatcctgaccatgaatctgctgcgcattcaggccttctggagccattatcgctttcgccggcaaaatccgctgctcaactacctgctacatcagcagctacgaatgacaagcgtcatttcgagcctgcggcggatgctgcttaactggcccgccgcgcccgctcgtactcgcgagattctggagtctttgctcagcgagttagcgctttcaaacgccgatgcttacagcgttgcccgcattatcgcgccgcttgcgccgcccgccgatgccgactaccgacacatcgccttctggaagcgcctgcgctatttttgtcgcctgtatctggagagcagccgctag

SEQ ID NO: 177289 - DNA, 1512 bp, Klebsiella oxytoca
atggaaccaacattgtcattaaccgtgatgttctgtgctgcagtgggtgcttcagtatcagaatcgctgtcagaatccgagtcactgtcggaatccgagtcactgtcagaatccgaatcgctgtccgaatccgagtcactgtcagagtccgaatcgctgtcagagtcggaatcgctgtcagagtccgagtcactgtcggaatccgaatcgctgtctgaatcggagtcgctgtcagagtcggaatcgctgtctgaatccgagtcgctgtcggagtccgaatcgctgtctgagtccgaatcgctgtccgaatccgagtcgctgtctgaatcggagtcgctgtccgaatccgagtcgctgtcggaatccgaatcgctgtcagagtccgagtcactgtcggaatccgaatcgctgtctgaatcagaatcgctgtctgaatcagaatcgctgtcgctatccgagtcactgtcagaatccgagtcactgtcagaatctgagtcgctgtccgaatcggaatcgctgtctgaatctgaatcgctgtccgaatccgaatcgctgtcagagtcagaatcgctgtcgctatccgagtcactgtccgaatcggaatcgctgtcggaatccgagtcgctgtcagagtcagagtcgctgtccgaatccgagtcactatcagaatcggaatcgctgtcagagtcagaatcgctgtcggagtccgaatcgctgtcagaatccgaatcgctgtcagagtcagaatcgctgtcggagtccgaatcgctgtcagagtcagaatcactgtcggaatccgagtcgctgtcggaatcggaatcgctgtccgaatccgagtcactgtcagaatcggaatcgctgtcggaatccgagtcactgtcggagtcggaatcgctgtcagagtcggaatcgctgtccgaatccgagtcgctgtcagagtcagaatcgctgtcggaatcagaatcgctgtcagaatccgagtcgctgtcagagtcggaatcgctgtcggagtccgaatcgctgtcggaatcggagtcgctgtccgaatccgaatcgctgtcggagtcagagtcactgtcggaatcggaatcgctgtcggaatccgagtcgctgtcagagtccgagtcgctgtccgaatccgaatcactatcagaatcggaatcgctgtcagagtcagaatcactgtcagaatccgaatcgctgtcgctatccgaatcggtgtcagaatccgagtcactgtctgaatccgaatcgctgtcagagtcagaatcgctgtcggaatccgagtcgctgtccgaatccgagtcactgtcagaatccgagtcactatcagaatctgagtcactatcagaatcggaatcgctgtcagagtccgagtcactgtctgaatcggaatcgctgtcggaatcagaatcgctgtcgctatccgagtcgctgtcagcatccgagtcactatcggagtccgaatcactgtccgcatctgagtcagtttctgaaatcgaagagtggtga

SEQ ID NO: 177290 - DNA, 1224 bp, Klebsiella oxytoca
ttgtgctatcaattcaatgagatcacctctattcctgcctgccgagtatgtcagaatttcttccgggatgctttagctccgtttcacaaataccgacaaaatgcccttcttgacgccacgcttgccttaatcaacggcgcgtcactgacgctgaccagtatcggacgttatttacccggcgctgctcaggtcaaaaacaaaatcaaacgagttgatcgtctactgggcaataaatcactccatcaggatattcctctgattttcaatggcattatcaccatgctgacacggaaattatcgctgtgtgttattgcggttgactggagtggctatccgtctcaggaatatcatgtgctccgcgccagtctgctttgcgatgggcgttcgcttccgctgttaagctggatagtcccgtcagaaaagcagcagaatggacagatacaaaaggccttccttgatgcccttgccggggcggtgaacccgacggccagagtcatcatcgttaccgatgcgggcttccagaatgcctggttccggcatatccggtcgctcggatgggattttattggccgtgtcaggggtaatatccagatgcgcctgaacagcaaaggtgaatactggttcagacgtcaggaattacaggccagcagtaaaccagaatatccggggccaggcacgcttgcacgggcggagtatgcccggtgtgagggacatttttatctgcacaggaaagaaccaaaaggccggaaacaccggcactcaaggtatcgtataaaacgcaaacctcaggtttgcgacgggcgctcttcagcaaaagagccgtggctcatcttcagcagcacagacgactttaagccacgtgaaatcatgaagttatacagtcgccgaatgcagatagagcagaacttccgcgatgagaaaagcgaacggttcgggttcggtctgcgggccagttacagccgttcagcgggaagaatgctggtgctgagcctgctggcaacgctgagcacaatagtcctgtggcttattggttatcatgcagaaagtaaaggattacatgtaaggtatcaggccaacagtgttaaatcgcggcgggtaatctcttatctgacgttagcggagaatgtcctgcgacactccccgctaatattaaggcgaacggtgctgagcaccgttcttaaccacctcgccagagcctaccgaagtatggtgctggtttattag

SEQ ID NO: 177291 - DNA, 807 bp, Klebsiella oxytoca
atgagcgccctgcaaattatctatcccaacgatatgcttcatccgtcacaacctgacgagatgtttttagctgagtacacttatgcctgccaaagcagtattacctgcctgttactctcatcagaggctgtggcgctgggcgactaccgcttttcatccagtttttcagccaatatgccggtactgtggcgcggatggatgctgcacccggatgagtacgaaagtttatcccgagcggtggaaaagcgaggcgctcgcttattaacgtcatgccagcaatatcttcaatgccaccatttgccgggctggtatgaaagttgtcgggatctcacgccagaaaccatcgtgactagcgaagatgctgactttgctgccctcactaaggaatatggttggcctgcttattttgtgaaggactatgtaaagtcgctcacaacctcccgcggctcaatcgctcgcaatgcgcaagaaattgatgaaatcatcacattgcttaaacagtttcgcggtgaaattgaaggaggagtttgcctgagacgcgtggagaaatttgatacatccagcgaaaggcgattctttgttctcgatggcaaagttcatgccgcaaacggcgatattcctgccagggttagcgaaatcgccgcacgtataaacagccctttttactctatagatgttatcaatgatgaagctggtgctttgaggctcgtcgagatgggtgacggccaggtatcggatatcaaagagtggtccgttgagcgttttgtgaaaatgctgagtgactatgcggtaagtcaggaaatttaa

SEQ ID NO: 177292 - DNA, 1158 bp, Klebsiella oxytoca
atgagctggcagcaccgtatcgaacaagcgctggcggagcggcaggcggcggatgcgttgcgccgtcgcctgccggtgacccagggcgcaggacgctggcttattcgtgaagggcagcgctggctcaatttttccagcaacgattatctgggcctcagtcagcatccaacgatcgtcaaggcctggcagcagggcgcggagcgctacggcgtcggcagcggcggttccggccacgtcagcggctacagcgaggcgcaccacgtgctggaagaccagctggccgactggctgggctatccgcgcgcgctgctgtttatttccggctttgccgcgaatcaggcggtgattgccgctctcgcgggcaaagaggatcggattgtcgccgatcgtctcagccacgcctcgttgctggaagccgccagccttagcccggcgcagctgcggcgttttcagcacaatgactcccgacatctgcgggaactgctggcgaaaccgctatccggtcagcagctggtggtgactgaaggcatttttagcatggacggcgatagcgcgccgctggcggaggttcagcaagcgtcgcgggaggccggggcgcttctgctggttgacgacgcgcacggtatcggcgcgctcggcgaagaggggcgaggcagctgttatagccagcaggttcatccggatttgctgaacgtcaccttcggtaaagcgtttggcgtcagcggggcggcggtcctctgtagcgaagcgctggcggattatctgctgcagtttgcccgccatctcatttacagcaccgccatgcccccggcgcaggcagtggcgctcagcgccgcgcttgaggtgatacgtagcgacgatggccggcagcggcgggaaaagctggctggccatattgcagattttcgccgcgaaatgacccattattccggcgaactgacccattctgacagcgcgattcagccgctgatcgtcggcgataacgctcgcgcgctgcggctggcagcctgtctacgcgagcgcggctgctgggcgacggcaatccgcccgccgacggttcccgtcggtagcgcccgcctgcgcctgacgttgaccgctgcgcacgattccgccgatattgcccggctgctggaggtactgcatgacggtggtgaataa

SEQ ID NO: 177293 - DNA, 1536 bp, Klebsiella oxytoca
atgaacgctttaacactgattccgggccaactcagcctgtcgcagctgcgcgacgtctacagccagccgctgaacattacgctagacgaaagcgcgttcgcggcgattgatgacagcgttgcctgcgtcaacgcgattctggcggaaggccgcaccgcctacggtatcaacaccggttttggcctactggcgcaaacccgtatctccaccgaagacctggaaaatctccagcgctcactggtattgtcgcatgcggcggggatcggcgaaccgctggatgacgatctcgcgcgtctgattatggtgctgaaaattaatagcctgtcgcgcggcttttccggcattcgcctgagcgtgattcaggcgctgatcggcctggtcaacgccggggtaacgccgtggatcccggcgaagggatcggtcggcgcgtccggcgatctcgcgccgctggcgcatatgtccttaaccctgcttggcgaggggaaagcgcgggtgcgcggaggggagtggctaccggcgacggaagcgctgcgtcaggcggggcttgagccgattactctggcggcaaaagaggggctggcgctgctcaacggcacgcaggcatcgacggcgtttgccctgcgcgggctgttcgaagccgaagacctgtttgcttccgcagtggtctgcggggcgttaaccaccgaggcggcgcttggatcgcgtcgtccatttgatccgcgtattcatgaagcgcgcggccagcgggggcagattgacgccgcggcgctctatcgccacctattgaccgatgacagcgcaatttcccaatcccaccataattgcaccaaggtgcaggacccgtattctctgcgctgtcagccgcaggtgatgggagcctgcctgacccagcttcgccaggcggcggaagtgctgctggttgaagccaacgcggtctccgataacccgctggtatttgccagcgagaacgacgtgatctccggcggcaacttccacgccgaaccggtggcgatggcggcggataatatcgcgctggcgattgccgaaattggctcgctgtccgagcgccgaatcgccctgatgatggacagccatatgtcgcagctgccgcctttcctggtgaaaaacggcggcgtcaactccggctttatgatcgcccaggtgacggcggcggcgctggccagcgaaaacaaagcgctgtcgcatccgcacagcgtggacagcctgccgacctccgctaaccaggaagaccacgtctcaatggcgccagccgccggtcgccgcctgtgggcgatggcggaaaatacccgcggcgtgctggccgtagagtggctggctgccgcgcagggtctggatatgcgtgaaggcctgaccagcagtccgctgctggaagaggcgcgccacctgctgcgcgagcgggtgacccactacaccgaagaccgcttcttcgctccggatatcgaaaacgccattgcgcttctggccgcacgtcatcttacgcggctgctgcctgccgtgctctcagaccaacgctaa

SEQ ID NO: 177294 - DNA, 1689 bp, Klebsiella oxytoca
atgtcgcaaagcaaataccgccagcaggacgtacgtgcaccgcgtggcacgacgttaaatgcgaagagctggctgaccgaagccccgctgcgtatgctcatgaataacctcgacccggatgtcgccgaaaacccgcatgagctggtggtgtacggtggtattggacgcgcggcgcgcaactgggaatgctacgacgccatcgtgaaggcgctgaaaaacctcgagagcgacgaaacattgctggtgcagtccggcaagccggtgggcgtcttcaaaacccatgaaaactcgccgcgggtgctgatcgctaactccaacctggtgccgcactgggcaacctgggaacactttaacgagctggatgccaaagggctggcgatgtacggccagatgaccgccggcagctggatctatatcggcagccagggcatcgtgcagggcacctatgagacctttgttgaggccggtcgccagcactatcagggtagcctgaagggccgctgggtactgaccgctggtctgggcggcatgggcggcgcgcagccgctggccgcgaccttagcgggtgcctgctcgctgaatatcgaatgccagcagagccgcatcgatttccgcctgcgtacccgctacgttgatgaacaggcgacgtcgctggatgacgcgctggcgcgcattaaaaaatacaccgccgaaggccgggcgatctctatcgcgctatgcggcaacgcggcggaaatcgtgccggaaatggtgaagcgcggcgtgcgtccggatatggtgaccgatcagaccagcgcccacgatccgctgcacggctatctgccgaaaggctggagctgggaagagtatcaggctaaagccgagtctgacccgcagggcactatcctggcggcaaaacgctcaatggccgaccacgtgcaggcgatgctggcattccacgaaatgggcgtgccgacgtttgactacggcaataacattcgccagatggctcaggagatgggcgttgacgacgcgtttgctttcccgggcttcgttcccgcctatatccgcccgctgttctgccgcggcatcggtccgttccgctgggttgccctgtccggcgacccgcaggacatctataaaaccgacgcgaaagtgaaagagatcgttaaagacgacaagcacctgcatcactggctggatatggcccgcgagcgtatcagctttcagggactaccggcgcgtatctgctgggtaggactggagtggcggcagaagctggggctggcgtttaacgaaatggtgcgcagcggcgaagtctccgcgccgatcgtcatcggccgcgaccatcttgactccggctcggtcgccagcccgaaccgcgaaacggaagcgatgcgcgatggttccgacgccgtttccgactggccgctgctcaacgctttactgaataccgccagcggcgcgacctgggtgtcgctgcatcacggcggtggggtagggatgggcttttcgcagcactccggcatggttatcgtctgcgacggtaccgatgaagcggcggcgcgtatcgcccgcgttctgcacaacgacccggcgaccggcgtcatgcgtcatgccgatgcgggttacgacatcgctattgagtgcgcgatagaacaaggtttgaatcttccgatggtagcagcaacgcaggggcacgctaaatga

SEQ ID NO: 177295 - DNA, 1008 bp, Klebsiella oxytoca
atgaaatatgcatggaaaacgctcaccgtcctgatgatcgcttccccttgtcacgtgctggcggatgccaacacgccaacagacgacgtggtaaaacagcagtttgctgaacagactggcgggattatgcgcttgcaaaacgtgacgctgaagcagctcgacgccaggggaaatcaggcgacctatatgctggaaggcgatatggccgccgcggaagatctctatattcgcgtcggcgtcgcgggagattactttttttatgagcgagtctggaccagggggcggccggtaaagttctccgccatgatgaccgcggtagggaccaaagactccggctggcagaccgaattcttttcgctgcagatggcggcgaagaggggcgggagaacctttaaggaaatcggaggggatgaaagtaaaaccctgatcgtcaatgaccacaaatttatggcgcaatttgccaaaattgacgccatctttgccgccagcaaagccacgatgaagacgctgcaagggcaacaggatgcgctgaaaaccgagatcgccgcgttagaggagcggattaaccgttcatggggtacggatgcgaacggcaagccgctcgatcgcagcgacgtgcagcaggcgatgctggaaaaaatgtatgaagtagaccggcaaaacgatccgctgaagttcgagaatcattactacaaaactctctatgaacccgcactggccgcctgtcagaaaaaagcggtttgcgatgccgcgccgctgcgcgccgagcgcgatgccgtgctgaatgagcagaagcgtaactattatcgccagcataaagagatgagtgaaaatatcaaagcggagatggccgcgcgcgataaaaagatagcgccgctgcagaagcaaaaaggcgaactgaacgcgcagctgatggcgctggagatccgctaccgggagttggctcgcgacgaaaaatactggcaggaggggctggagaagatgcgccgcaacggggttctaaagtag

SEQ ID NO: 177296 - DNA, 312 bp, Klebsiella oxytoca
ttgatttattcccggataatcccggatatttggctggtatcaaataaattagttcttcacaagcagctggtaaaccaggcgatgggcggcatcctgcaggacagcatcaatgagatgggcgcgaaggcggttctcaaaggcggcggtaacccgctgcaggggatcctcggcagccttggcggcctgcaaaccgccattcaggatgaatggaaaaatcaggaagccgatttccagcagtttggtaaggatgtctgcagccgcgtggtttcccttgaggatagccgcaaagcgctggtggggtccttaaagtaa

SEQ ID NO: 177297 - DNA, 1800 bp, Klebsiella oxytoca
atgagtaacaggctgaatacagaaattctgattaaccttactggcaacctgaccgccaaagcccgccagtatggtgccaatatgtccgagttcgcgcgacgtagtgagcgggctatgtctgtggtcaaagcaacggcctcagctgcgggacgaggtattgatgctctcgggaatcgttatacagcagcaattgctggcttcggcggcagcgccatgttgagagattacaccgccacagaacgccagttgacacaactgggcattgtcgccgggaaaacccgcgctgaaatgaaatcaatgtacgagggtattcaggaccgatccttcaatgttggtattaatccaaaatcactcctggaaacctataacgtcatcaatggcatgatggggggtgttgaatttgcagctaaaaatgatgatacgcttgctgcaacccttgccgctactggtgtcagcggggaagatttaggtgctctggtttctcagttccctaaatttcctggctttgataaagacagcccccgggatttaaaactggctgtagacggcctgaaccgtctgggtaaggaaggttccttcgagctgggccacatggcaaaatacctgccctccctcttttctgcggcggctgcgatggggcagacgggccagcaagggattatgaatgtaggtatcctgtctgaggctgcaaacgacctcacaggcaatcccgcaataagcgccacgcatattcagagcttgtttaccgatgtgcaaagcggaaaaacggaaaaagcgttaaaagatgtgggtattcgtacccgtaataaggatggcggatttcgcgatattgttgaactcgcgacagagattgccagaaaatcactgagctacagtctaaaaagtggaaagtcgcaaacctcattacttgaaggtgcgggttttactgattattcagtgcggtttttacagtcaatgtccacgcctgaagcaataagccgcatggaacgttatcgtaatgttgtcgctgacggaaaaagtatttttgaagatgctaaatatgcatcggatgatttcgcttcctcattacagcgattgtctatttcgtgggaaaaattctcgaactctcagctttcaggccccgtcagggaactggctgattatattaattccgtggatcagaattccgttcagaactggcttgatgtcggcaaacaaattgctatcgcaggtgctggtattattgcagctcgcaaggcttttcagttgggtaaaggcgcgtgggatttgtttggtggtggtaagtcaaaaggcattcccaaaggcgtttcagatacgttcggctcaggcgttatgcccgtctatgtggtgaacatgggcgcaggcggtatgggagtgcctgacatgggcggcggtaaaaacccgcgcggcggctggcgtaactcgctaggctctgtggcgatgatgtcacctctggcggcaacgataccttttcttgccgaagaacctaagctgactgataatgagaaagccgggatggttaagtgggcacaggaacgcgccaaagggccttcagtgtggtcgagagtgtctgactggatcaattcggccagtgaagccccccagattgcagacccaaggccgtgggcatctatgcagccagagaatcagccgggatatccattcttaccgcagcaattaaaaggcagtattgaagtatcagttaaagatgaccgggtacaggtgacgcgcgtaaaagttaatgcgccaggtataacaatgagcgctcagtcaggcgtaagtaacgtagaacaagattga

SEQ ID NO: 177298 - DNA, 900 bp, Klebsiella oxytoca
atggttgattctgtaaatattgatggcatcgttgctgatgctcaggttgcctttaacgttaagtttgaacagggtactaaagcctaccagcccagccacgttcagcttgctaatgaggttccgtcttcctccgggtctaatgcttacggctttctggaagaattcccggaaattaaagaatggcttggcgaccgccagttaaaagaattgtccactcaggactatactctcaaaaataaaacgtttgaaagcagcatttcaatcaagcgtgaagattttgaagataatgactatggcaaatattccatgattttcgaacagtacggacggaaagcagcgcagtttccggacaagctcatgttcgaagccatgattaagggccacacttcaacgggtattgatggtcagaatttctttgatactgaccatccggttaatgatagtacgttatctaatatctacggcacagcgccggaatcgaacccgaagccaaaatggtatttatttgatgccactcaggggctgaagccttttatctatcagaatcgtcgccctatcgttatgacggcggttacgcgcccggaagatgccgaagtcttccttaaaaaccgctacctgtttggcgtggatggccgtctgaatgtggggtacgggatgtggcagtgtgccgccgcatcttatgacgatctgacggaagaatctttcggccaggtctatgacggcatgttatccatcaagggcagcagcggcgatccactcggtattattccgtcgattattgttgttccggtctccctacggtcggcagcagagaaaatcctcttacgccgccagctggataacggtgaagacaacccgaactacaaacgtgttgaaatcatcgtcagtccgtacctttaa

SEQ ID NO: 177299 - DNA, 819 bp, Klebsiella oxytoca
atgaacgtaatggctttatgttctgagttaaacgcagaaaaagcggccccggaatggatcgagttacttccggccgggccggatattgttggccgtgatggtcgtagctggcggctgagcgatcctaaaaaagttgctgaggctttcaacaaacaaggcatgtctcttgttattgactacgagcattcaacagaagttaaagcaccaaaaggtgacgaggctcccgccgctggctggatagaatctgtagaggttcgtgatgatggttcggtctgggggaaagttgactggactaaaaaagcgaataattcaattgtcgataaagaataccgttttatttctccggcattcaaccacacaacgagtggcgaaatcacccgcctcagaagtgtggcgctgaccaataagcccaatttaaccctgctggcacttaactcgcaggatgaatggggggaagtggctcaggcgttaggggtggaaagtatccgttctcctcaggatatactgaaagcccttaaccgggaaaaagaatcgacaaccaataaaatcgttgatgaagttattgctcaggcaattttctgtccggctcaacgcgagcaccttattgcgatgtgctctcaggttggtgaagagcaattccgcgagtttaccaaaattcagttaaacactttcggaaaaatggtgaatacgactaaaggtcatcgtgattattcgaaaatgagtaatggtcgattaaatgagagtcaggttgcggtatgtcgtaatactggcgtaagcgaagatgattatgtaactgctctggggaaagagaatggttga

SEQ ID NO: 177300 - DNA, 414 bp, Klebsiella oxytoca
atgaaattatctaaagaattattcaacgcaggtatcagtcttggtatcgaaacgatgcgcaagaatcttcctgaacctttaaaaactgtggaacagggtgttattgccgcctgtaaagatattggacttgacccggagcatcaaattaacggcattccctttgtcggtcgggtaatggtgcgggtaatggaggctcagtttggagagaacctgatgccggaggcagaagaggattgtgcacatctcattttctgcaccaaagttgccgcttacgccgacgtttatggcacagaaaaggccgctgacgaatatgaactgaccgttaaacaggttgaagaaatcagcctgctggttcacggattccaggatgaggttgcaggcatcggggaaagcctgaaacaaaaaacgcattaa

SEQ ID NO: 177301 - DNA, 729 bp, Klebsiella oxytoca
atgacgaatacaaaatttaatacattgctggcccacgctccccataaagacataacagcaataaataaatttattacatcttcctgttttacccgcacaggacgggaaactctttcgtttatccgcaggatgggatacagatataacctttctgatacaagtgtctatatctgtctggttaaagaacagtttgaagaggctcgtagaaaatttggtgacagtgtagaaattgattttttctgtgatgttgctggtacgaagtatttcgaagacttcatggctgtttatgataaagattcattttatcaggaaatgataaacttcaatcccgacttcaattacacggggaatctgaagagtattcggaatcgcgcattcacggctgtcagagaaaaagacctccagaatccgggggaaggtgtttcttatcttattggcgcactggaaaatgcactaaagagaattggtgtaaatcctgaagatgagatgaacggaatgaccaaggcgctcataatggctatgactgttatgaatgatattggcggcatgcaattttatctacccaaaggtgaattacttaaacgggtggttaataaaatagatatttataccgatagctacacgatgggtacgcagcaactcgcaataaagtatggcgtttcatttaaagcaatcacgcttgttattaaatccgtcagacaggcaattaaagaatatgaggggaaataa

SEQ ID NO: 177302 - DNA, 318 bp, Klebsiella oxytoca
atgaaaacttgcaaccttgttgaaatgcttcagttcagcctggatgatgaccacatgaagaaaatcatcgccagcgtcggagaagaaggtgcattttcatttcatgaagaggctgacgccatgagagaggcattatctttttgtgctgatgaaatgttagatcacattgcaggtttaacgcccgacgatcctaattttgttaaaaggttgtcagcgcttggggaaattaacagacttcaggagtacattgcatttgttaataattctatttgttggtgggacagagagttgaggaatagtaatggacgtcaggggtag

SEQ ID NO: 177303 - DNA, 174 bp, Klebsiella oxytoca
atggctaccagtaagtttacctatgtgttcgcggcaatcaaccgccacctaccgaaatctcgcccggtcatgctccgcaccattgcagccgatgaaaaaagcgcccgtgaacgttatgcgccggactatgatctcattttctcctgccgtctgcctgctgggggtgcaaaatga

SEQ ID NO: 177304 - DNA, 468 bp, Klebsiella oxytoca
gtggttcactggaaggatatagaaaaaacggctgactggggcgtgctgttattattcggcggcggtatctgcttaagtaatgtgttgaaagagacgggcaccagtctgttcctggcaaaccagattagcgggatggtggctcatatggggatatttattattatcctggtgattgcaacattcgtggtgtttctgaccgagtttgccagtaatacggccagcgccgctttgcttattcccgtatttgcctcagtggccgaagcgttcggcatgtcgcctgtgattctgtcggtattgattgccattgcggcttcatgcgcttttatgctgcccgtggcgacgccgccaaacgctatcgttttcgccaccggccatatcaagcagcaggagatgatgcgcgccggcctgtttttgaatattgcctgtatcgtcgttttgaccggatttagcatgttattttggatgtaa

SEQ ID NO: 177305 - DNA, 1170 bp, Klebsiella oxytoca
atgattacgggcatgaccattgaggccggtgccagccttacaccggcatttatgctgacactgaacagccaggacattaccagcaattttagtgaccggctgatttctctgactatgaccgacaacaggggttttgaggctgaccagctcgacattgagctcgacgacaccgacggcaaagtcgagttacccctgcgcggggcggtgctgacgctgtggcttggctggcagggctcggcacttctgaataaaggcgatttcaccgtcgatgagattgagcatcggggggcgcctgatgctctgaccatccgggcacgcagcgctgactttcgcggaacgctcaattctcggcgcgaggaatcatggcacgataccacactcggcgaactggtcagcaccatcgcaaagcgcaataaattgacggccagcgttgcggattcgctgaaacaaatcccggtaccacatattgaccagtcacaagaatccgacgcggtgtttctgacccgcctcgccgaccgcaatggggcggcagtatcagtgaaagcgggaaaattgctgtttctgaaagctggcagtgcgatgacggccagcggcaaacccatcccgcaaatgacattaacccgcagcgatggtgaccgtcatcagtttgccattgctgaccgaggggcctacaccggcgtaacggcaaaatggttgcataccaaagacccgaagccgcaaaagcagaaagtaacactgaaacgtaagccaaaagaaaaacaccttcgagcactggagcacccgaaagcaaagccggttagtaaaaaaacaaaggctaaaaaagagcaggaagcccgcgagggggagtatatggccggtgaggctgataatgtgctggcgctgacgacggtctacgcttcaaaagcgcaggcgatgcgcgccgctcaggctaagtgggataaactgcagcgaggcgtagcggagttttcaattacgctggcgctcgggcgggctgatttattccctgagacacctgtgcgcgtgtcaggctttaagcgcgtcatagacgagcaatcttggttaatcagtaaggtgactcacaatctgaataatggcggctacacgacgggcttagagcttgaggttaagctttccgatgtggagtacagtgatgagtcggataatgaataa

SEQ ID NO: 177306 - DNA, 486 bp, Klebsiella oxytoca
atgatgcttgctcttggcatgtttgtatttgaacgccgcaccctgccttatcagtcgatgcagcactcgaaggattatcgatgggcgtctaacgaccgggtaggcaaaccgcctgtatatcagtttctcggcgagggagaaaactcgatccagcttgccggtacgctttaccctgctattaccggcggtcgcatatccttgttggctgttgagctgatggctgacgagggtagagcatggccgctaattgagggaaccggcaatatctttgggatgtatatcgtcgataaggtgtcgaccacgcataccgagtttttcagcgatggcgcggccagaaagattgatttcacgctttcgcttaaacgggtcgatgaatcactgacagcaatgtttggcgacctgaataaacaggccagtgagcttctcggctctgccggtaatctgaccgataagctacaaggtgcgctcggagggctgaccgcatga

SEQ ID NO: 177307 - DNA, 2442 bp, Klebsiella oxytoca
atgagtaataacctgaggcttgaggtattgctgaaagcggtcgaccaggcgacccgaccgcttaaatccatccagaccgcgactaaaaccctgtcgggtgatattcgtgacacacaaaaagggctgcgtgacctgaacggtcaggcgtcaaaaatcgacggttttcgcaaggccagtgcgcaactggctgtgaccagtcagtcacttgagaaagcaaaacgcgaagccggtgagctggccgtgcagtttaaaaacacgaccagtccgacccgcgcgcaggcgcaggcgctcgaagcggcgaaacgcgccgcctctgagctgcagacgaaatacaacagcctgaggacgtcagtgcagcgccagcgctccgagctgatgcgggctggtattaatacccgcaccctgtctgccgatgagcgtcggctcaaaacttccatcagtgaaacgacggcgcagcttaaccgccagcgtgaggcactggcgcgcgtcagtgcgcagcaggcaaaattaagccgggttaaagcccgataccagtcaggcaaagagcttgccggtaacatggccggagcaggtgctgccggggtaggtatcgcgacagcgggaacgatggccggggtgaaattactgatgcccggttatgactttgcgcagaaaaattccgaactgcaggccgtactcggggttgataagcagtcgccagaaatgcaggcgctacgcaaacaggctcgccagctcggcgacaatactgccgcctctgcagatgatgctgccagtgcgcagattattatcgcaaaaggtggcggtgatgccgccgcgattcaggcaacaacgccagttactctgaatatggcgcttgctaaccgtcgcacaatggaagaaaacgccgcgctgctgatggggatgaaatccgctttccagctctcaaatgacaaggtggcacacatcggcgacgtgttgtcgacggtgatgaacaaaaccgccgcagactttgacggcctgagcgactcgctgacctacgtcgcgccggtggcgaaaaacgccggggtgagtatagagcaggcagcggcgatggttggtgcgctgcacgacgccaaaatcactggctcgatggccggcaccggaagccgtgccgtgctcagtcgtttacaggctccaaccggcaaggcttatgacgccatcaaggagctcggcgtgaaaacggcggacagcaagggtaacacccggcctattttcagtattctgaaagaaatgcaggcgagttttgagaaaaataaacttggtactggtcagcgctctgaatacatgaaagccattttcggcgaagaggcaagttcatctgcagcggtcctgatgactgccgcatcaaccggcaagctcgaccagctaaccgccacgcttaaagcctcggacggaaaaacggcggagctcgttaaggtcatgcaggataacctcggcggcgacttcaaagagttccagtcggcctatgaggcagtaggtactgacctttttgaccagcaagagggctcgctgcgcaaactcacccaaaccgctacacaatacgtgttaaagctcgacggctggatccagaaaaacaaaggtctggcgacaactatcggcattattgccggtggcgcacttgctctgattggaatcatcggcggcattggtctcgttgcgtggccggttgtcatggggattaacgccattatcgccgctgctggcgtgctgggtacggtctttactgttgccggtagtgccattgtgaccgcactcggcgcaattactttgccgatagtagccgtcggtgcggcgattgtggccggggcgctgcttatccgtaaatattgggagcccatcagtgcgtttttctcgggggtgattgagggcatcatgagcgcctttgctccggtcggtgaaatgttcgctccactggcacctatttttgacggcctcggtgagaaactgcgcggcgtctggcagtggtttaaagacctgattgcaccagtcaaggcaacgcaggagacgcttgatagctgtaaaaatgtcggtgtcatgtttggtcaggcactggcctctgcgttaatggctccgcttaatgtcttcaataaactgcgcagcggggtcgactggcttctcgaaaagctcggcatgatcaacaaagaatcggacagtctcgaccagactgccgccaaaactaacgccgccacgcagggtaattcctacattccggcgaccagcacctatggcgggtatcaggcttatcagccagttaccgcaccggcgggacgctcttacatcgaccagagcaaaagcgaatacaacattacgctaccgggcggtgttgcgccggggcatcagctcgaccgccagctacgcgacacgctcgaacaaattgagcgcgaaaagcgtgcgcgtcagcgcgccagcatgagccacgactaa

SEQ ID NO: 177308 - DNA, 336 bp, Klebsiella oxytoca
atggcaaaagcaccacgcaacacccctgaatttgttgatacggctggcaatgaaattgacaccgtaaacccgaacgtcgtgaccctcgacaagccgattaagcgcgccggtcagacgattgataaagtcaccctgattgagccgaacgccggaacactgcgtggtgtcagtctggcggcggtggcgcagtcagaagtcgatgcactgattaaggtgctgccccgcatgacctatccggcgctcaccacgcaggagctaaccgcgatgaacctgcccgatatgctgtcgctggccgcgaaggtgattggttttttgtcaccggcttcggcggagtag

SEQ ID NO: 177309 - DNA, 519 bp, Klebsiella oxytoca
atggcacttccccgcaaactcaaatatctgaacatgttcaatgacggcctcagctacatgggcgtagttgaatccgtgacgctgccgaagctgacccgcaagctcgaaaactatcgcggcggcggcatgaatggcgcggcggcgattgacctcggcctcgacgatgatgcgttaaccgtcgagtggtctgtcggtggcctgcctgatgtggcgctgtgggcgcaatatgccgcgccgggtgctgatgctgtgccgttgcgttttgctggctcttaccagcgcgacgacaccggcgaaatcgtggcggtcgaggtggtcatgcgtggccgtcataaagaaatcgacggcggtgagaataaacagggtgaaaacacctcgaccaaactgtcgaccgtttgcacctactaccgcctgacgattgatggtagcgacatcatcgaaatcgacaccgtcaacatggtcgagaaggtgaacggcgtcgaccgtctggaacagcaccgccgggcaatcgggctgtaa

SEQ ID NO: 177310 - DNA, 1188 bp, Klebsiella oxytoca
atgagtgattttcaccacggcgtacaggtgcttgagattaacgacggcacccgcgtcatatccaccgtatcaacagcgattatcggcatggtctgcacggccagcgatgcggatgctgaggcattccccctcaacgaaccggtattgattaccaatgtgcagagcgcgattgcgaaagccggtaaaaaaggcacgctgtctgcttccctgcaggccatcgccgaccagtcaaaacccgtcaccgttgtcgtgcgcgtagccgaaggtgtcgacgatgacccggatgcagctcaggcgctgaccatttctaacatcatcggcggaacggatgaaaaaggtaaatacaccggtatcaaggcgctgttaactgccgaagccgtcaccggcgttaagcctcgcattctcggcgtgccgggcctcgatacgcaggaggtcgccaccgcacttgcttccgtctgtatcagcctgcgcgcgtttggttatgtcagcgcatggggctgtaagaccatttccgaggcgatggcctatcgcgagaatttcagtcagcgagagctgatggtcatctggcccgattttctgtcatgggatactaccgcgaacgctaccgcaacagcctgggcgactgcgcgcgcactcggcctgcgcgcctacatcgaccaggctgtcggctggcacaaaaccctgtctaacgtgggcgtgcagggcgttaccggcatcagcgcgtcggtcttctgggatttgcaggcatccggcaccgatgctgacctgctcaacgaggccggggtcactacactggtgcgcaaagacggtttccgcttctggggtaaccgcacctgctctgatgacccgcttttcctgtttgagaattacacccgtaccgcgcaggtgctggccgacacgatggccgaggcgcacatgtgggcggtcgataagcccatcaccgcatcgctcatccgtgacattgtcgacggtattaatgccaaattccgcgagctgaaatcaaatggctacatcgtggatggtgaatgctggttcgacgaggcatcgaacgataaggaaaccctcaaggccggaaaactgtatatcgactacgactatacgccggttcccccactggaaagcctgaccctgcgccagcgtatcaccgataaatatctggtgaatctgaccgaatcggtcaacagctaa

SEQ ID NO: 177311 - DNA, 1161 bp, Klebsiella oxytoca
atgagtaaaaaatttctatccctggtcacaaaacaaggtacggaagccatcgccgccgccattgtaaacgacgaacgggtcgcctttgctgaaatggccgtgggtgacggtaacggtactgtaccggtaccggatgtaaaccagacggcgctgattaatgagcttttccgcacgcagcttaacagtgtgaaaatcgttgatgatgagaaaaatatcattgcggcggaaatgataatgcctccgaacgtgggcggttttaccatccgggaggctgcgttatttgatgccgggggtgtctgcctggctgtggccagcgtgccggaaacctataaaccgctgctggcagaaggttcagggcgttttacggttttgcgcatctggctgacggtcagcagtacggcgaatattgagctgactgttgatcccgggattatactggcgacggtagaagacgttattcaggtcgggaatggtgcgaaggattacacggataatcaactgagtgagcacgcgcagtcccgcaatcaccctgacgccacgctgactgagaagggttttacaaagctcagtaatgacactaacagcgaggacgctgaccgggcggcgacgccggcagcggtaaaagctgcgattgctcaggctatccgtgctgcatgggaactggataaccccgtggggacgacacgattttttaatcagaacgtcaacccgaatgaaaagtggccctggtcacaatggttgtataccggcgaaaataaaacgatccgcgtcggcaaagcggacggttcggacgtcggacagaccggcggcagtgatagcgtcacgttacagaagtctaacctgcccgccgttcagattgatgtgaacggggaaaccagtgaacaggaagagcagaagctgacgaccacgcgtggcggtgttcacaatcatggcggggtagccggtaaagatgacccctgggaaatcggcggtgatgtgcgtcagctctttaaccctaaagagctgagagtgacagatgatgcaggagagcacgaccacgaagttacggtaccgccgcacaaacactcgacaagtggcaaaacggcaaacctcggagagggtaaatcgttcagcgtggttgaagcccacaccctgctgatgtgctggagtcgcgtcgcctga

SEQ ID NO: 177312 - DNA, 255 bp, Klebsiella oxytoca
atgcagggtactgatgctaaacaggccgatacattgtatcggggaattattgagtattaccgttattccgggctgggtatcaccgctgcgcagatttcacagcgggatgcactgattgcgcagaatgccattatttgtgatgactcgctggatgagcgcgtgctccttctccaggacgaatatattgcagcggaaggcaatatggataaacaaaaacagattattgaagccgttatttctttgctggctgcgtaa

SEQ ID NO: 177313 - DNA, 2106 bp, Klebsiella oxytoca
atgacgaacatgacagaatcgccatcgtgggaagacagcattgagctcatagccagaagcgaacgcgtttcaggcggtcaggatggcgttgcaaaccggccattaaaaaaactggcgaaccgtactcggtaccttaaagaaaaatatgacgggctgaataccgaccttttcggcaaggttgaagcggttaaaacctttgccggtggtgcggtgctgaattctcctcgtgatgaaattctctacggcgtgctgcgtctggtctggacgggaacttttccgaaagaagttgctccaggttcatccccgcagacaaccggcggggttggcgtcggtgcatgggcgtatacctcagatgcggttattcgtcatgacctcgcctcttatctgggctcgtcctttatggggatgcctgagggcggaacgctgtttgacctgctgggcggctgggtctgcccggaaatgtacggcgccactgccggtgatgaatccgccgcgcatgcaaactcaaaggcattctaccggctttttgaagtgcttcgccgccgtggtggcggggtgatttatatgaaacccggcgcgacatactgtgtcgattttatcaatttcgtccccgccaatgtcaggctttacgcctgcggcgcgaccattaaacatattaatcccatctccgctttcgggcgcggcgggctggttatcggtggcgggcaggagtggaactacgcgacagcaaaagctgcgtatgaatcggatacttacccggcagcggtacgcgatgacacgctgaaagacctcgctatcggcgattatctggaattcaatgaagaccatgtgcaggcggaaaacgttgatatctatgatttacgcatggaagccacctttaccgacagcacttcatggggcggctatgctatcaacgtcgctaatgcgcggcatgtccgtattcacaatctcagggcgaagggctggacgcaggcgtttaactttggctctgatgttcacccttccagcccgtcatgttatgacgtgcgcatttataacctggtcgtggaagaggctgaccctgtcaggacgtattacgcattcggatttatcgcgaattcgacagagtgtgaggtgtgcggcgctacactgctgaaacctttgacggcaggtacacgtaacggctccgggctggcggtgaatgctgtggaacggtgtcgcctttctgatatcaatattcctgaccttggccggacggtatccagcgagggggtgctgataaataacgcccgcgatatttgggtggatgatgtgcgggtggggaatgcgaaatcagcgctgtccactttttactccgttgacagttataacgacgccagtcatcgcaatattatcgggcgggtctatgcgaataactgcgaccaggccgtcgccattggcgcaaaatatgcggttattcaggacgtgaaatctgacaactgcacgcaggatatttatttcaggaatatcaatgcgaccgggaacatcctgaaatttgaaccgggaagaatgattatcagtgattccagtgtgaataagctgtactggtatctgatttataacaccgtgaagggctgggcgagggaatacatccgggtcaggcccattgatatgtttcggggggatttcgctaacctgtattcatgggataccaataaatcaatcaagatgaataccggtatcaccgcagagtttatttataagtttccggggcatattaaagcgctggatgccgtcacgttcatgggttatttcagcgcgggggcgcaggtggctgctgaccccgcccagaccaacccggcgcgaccctctcaactgacggcaatggtcaggtatatggcaacagatgattcgtcaacgtcggaagaacccgttatcccggcaaacggaagattcacggtgtccgcccttactcagggtgacggagatttcatcaaaacttatgacctgcacgcggaagcgctgggctttctgcccatgaccggttcggcttacggcgcggataattcaatggatatacgtttttcatttgtgaatggtgtggcagctaacaccatgaaacatgtcattttcagagtatggagataa

SEQ ID NO: 177314 - DNA, 564 bp, Klebsiella oxytoca
gtgctggaacagcgagccgccgaagcgtgcgccgtcatcagtgatttatccgtcccgctgcgtgacctgtggaatccgtggaaatgcccggtcaaatttctgccctatctggcgtgggctttttccgttgatagctgggatgagaactggagcgaagaagaaaaacgaatcgcaaccagtgaagcattctggctccatcagcgtaaaggaacgattgcagcagtccgctttgtggtcgaaaaaatggggtattccatatcaatcgacgagtggtggcaggttgccgaccccgccggaacttttcggctggaagtggatgtgaatgacattggcattacatcacggatgctggatgaactgacccgcctgattaacgacgcaaagccagtgagtcgccatatttcccggttttcagtcgcggcaagggtgcagggaaatattcatacagggtcatcgctacactgcggggaaatcgtcagcgtgtacccggaaacgtatgaaccggatgacagcattttttataacggcgtgatttttcacgatggtaattttagctacaggtga

SEQ ID NO: 177315 - DNA, 909 bp, Klebsiella oxytoca
atggctgttattgacctgagccagctccccgcgccggatgtggtggaaacactggattttgaatccatcctcgccgagcgcaaaacgacgctgatttcactgtacccggaagatgaacaggatgcggttgcaagagtgctgacatttgagtcagagccactggtgaaatatctggaggagaatgcgtaccgtgaggtgattttacgccagcgcattaatgaggcagcacaggccggaatggtcgcctatgccatcaaaaatgacctcgaccagcttgcggcaaataacaacgttgagcgccttgtcatcacgcccggagacgatacccagataccgccagtggatgcggtcatggaatccgacagcgatttacgccagcgcatcccggcggcatttgaggggatgagcgttgccgggccgaccggtgcttatgagtttcacgccctgagcgccgatggccgcgtggcggacgcctcggcgaacagtccggccccggcagaggtcactattgcggtgttatcgcgggagggtgacggcacggcgtcggatgatttattgcagaaggtaagctccgccctgaatgatgagagcttgcgcccggtgggtgaccgcctgacagtcgtctcggctgagattgttaattatgcagtcgatgcggtgctgtacgtgtaccccggcccggcaactgagccgattcttgccgccgccagagcgcagttaaccgcgtatatcacagagcagcgccgcctcggtcgggatattcgcatgtcagcaatttacgccgcgctgcatgtgcagggtgttcagcgtgtcgaactgcgtgagccactggccgacgtggtgctcaataaaacgcaggctgcatactgcacgaaaaccagtgtcattatcgggggctctggtgaataa

SEQ ID NO: 177316 - DNA, 348 bp, Klebsiella oxytoca
atgacggctcgttatctcggtatgaatcgcacgaccggtgagcgcatttcggatgttgaccatatcagccagagcatcggggatattctgcgtacccccatcggctctcgcgtcatgcgtcgtgaatatggctcgttgttgtcgcagatgattgaccagcctcagaccccggctcttgagctgcaaatcatggcggcatgctatatggccatcatgaaatgggagccgcgtgtcaggctgaccagtatcaccacggcgcgacagtttgacgggcagatggtcgtcgacgtgactggccagattgccgatacgggcgagagcctttccttaacgattcctgtgagttga

SEQ ID NO: 177317 - DNA, 642 bp, Klebsiella oxytoca
atgaacactctcaacagcatacaagaacttgctcgtgcgattcgcaacctcattcgctcaggtgtggtgacagaagtcgacaccgcgcaggggctttgccgggtgcagagcggcgggatccagacaacatggctcaattggctgactacccgtgccggtcgttcgcgcacgtggtgggctccctcgatcggcgagcaggtgatgctgctggcaattggcggcgagctcgataccgctttcgtgctgccgggtattttctccaatgataaccccgctccgtctgcctcggcggatgcgtggcatgtggctttccctgatggcgcggttatcgagtacgagcccgaaaccagtgcgctgacggtcagcggcattaaaactgctgacgtgacggcatcggattccatcactgcgaccgtgccggtcgtgctggtgaaagcggagacccgcatcaccctcgatacccccgaggttgtgtgtaccaacaagctgaccaccggcacgcttgaggtgcagaaaggcggcaccatgcgcggcaacattgagcacaccgacgggaaatttaaatcaaatggcgtgcaggtggatgaccacggtcacggtggcgtgcaaaaaggcggtagctggacggagggcacccaatga

SEQ ID NO: 177318 - DNA, 726 bp, Klebsiella oxytoca
atgaattggctaatccctctaaccaaaaaaggttcatcaggcgcatataatttaaactttcttattcaggataaggatatatacatcagtgacaatcatagaattgccttgtggtgctggatgcaaaaactaaaacccggaaatgatattgcattattccacatcgatagacactatgacacattacccttacacactccgtataaaaatgcatttccgggggtattcaacttaaaatcccaccaagaatacttagagctcaagactttggtttgtagagaagaaacaccactgatacgctgggataattacttatcttttttcatttccgatgacacgattaaaaacaatatcgaaagcatttactttgccacacacaaagatggagcatatccagacaatccatttgaacactgtttcacggaggttgaaccttatgagcttctggaggatttagatagcgcaattgacaatcataaaaagataatcatcaatgtcgatctagattatttctttactaataaatccgagaaagcgtattttcagttccttgatgatgaatatatcaccgaactattcaaaatagtaaaaacaggcattaacaaaaacaaaataacctgtctaacaatatgcctaagtcctgagtgctgtggtggttggagtaattcagagcatattttagacattgcaaaaaaagaactaggcattgatttcaccttacaatga

SEQ ID NO: 177319 - DNA, 450 bp, Klebsiella oxytoca
atgagtgagttaatcgcgctgcaggaacgtcttgccggtctgattgccagcctgtcaccggcggcgcgtcggcaaatggcggctgacattgcgaaaaagctgcgcgccagtcagcaacaacgcattaagcgacagcaggcacccgacggcaccccgtatgccgcgcgaaagcgccagccggtgcggagcaagaaaggtcgtattaagcgcgaaatgttcgccaaactgcgcactaaccgctttatgaaagccaaaggcagtgacagtgcggcggtggtggaatttaccggcaaagtgcagcgcatggcgcgggtgcatcactacggcctcaaagaccggccaaaccctcacagccgcgacgtgcagtacgaggcgcgcacgttgctcggctatacacgtgatgatgagcagatgatagaggacgtcattatcagccacctcggcaaataa

SEQ ID NO: 177320 - DNA, 468 bp, Klebsiella oxytoca
atgcagaagcacaaaagcctgcgcaaagcgctgattaacgccgtgccgcagctccgaaataaccccgatatgctgcgcctttttgccgataacgggcataccgattcccgactggcgagctcgctgtcgtttgaaaaggtgtacgtgcttaacgtagtggtgaccgacttcaccggcgacctcgatttgattttcgtcccggtgcaggcatggctgcgcgagcatcatccagacatcatgaccaccgacgaggggcgggaaaagggattcacctggattattgatatcaataacgacgattcgctcgatatcagtatcagcctgaggctcaccgagcgcacgctcgtcaaagaggtcgacggcgcgctgcatgtcagttatgcccctgagccgccgctgccagagccggtgacgcgcccggtcgagctgtacgttaacggcgaacttgtgagtaagtgggatgagtga

SEQ ID NO: 177321 - DNA, 414 bp, Klebsiella oxytoca
atgaaaatcctgataacgcttcttgtactggccgtgcttggtctggtgtggttacgccatgagaacggcaatttatcccgcgcctttgagacggcaaaccgcgtcgcgagcgagcaaaagacgacgattggcatgctgaaaaatcagctcagtgtcgccggtcagctcgccagacgtaatgaatccgcgcaggtagcactgcgcgaacagctcgcagaggccagtgcagaagccagtcgccgtgagcagacgataacgaggttactcaatgaaaatgaagcctttcgccgctggtataacgctgctctgcctgatgctgtgcgtcggctgcacacccgcgccgcctgcgccagcgccggtgattgtggtcaacggatgcccgagggtgagcctttgccggatgccgggaagtga

SEQ ID NO: 177322 - DNA, 498 bp, Klebsiella oxytoca
atgccggtcattaatactcatcagaatatcgccgcgtttctggacatgctggcgtattcagagggaacggcgacgcatccactgacaaaaaatcgtggttacgacgtcattgtcactggccttgatggcaagccggagattttcagcgactacagcgaccacccgttcgcgcatggccgacccgcgaaagtgtttaaccgtctgggcgaaaagtccacggcatccgggcgttatcaacagctttatcgatactggccgcactatcagaaacagctcgcattaccggatttcagcccactgtcgcaggacaaacttgcgattcagttaatccgggagcgtggcgcgattgatgatattaaggcggggcgtattgaacgtgcaatttcccgctgccgcaatatctgggcgtcattaccgggtgccggttatggccagcgtgagcacagtctcgaaaaactggtgactgtctggcgcacggctggcggggtgatggcatga

SEQ ID NO: 177323 - DNA, 297 bp, Klebsiella oxytoca
atgacagaaggggaaaaaggcgtcctgtcgttgtttttgattggcgcgatgattgttgtcggaaaagtgctggccggtggtgagcccatcaccccgcgcctgtttatcggtcgcatgttgctcggtggttttgtctcgatggtcgccggtgtcgttctggtgcagtttcctgatatgtcactgcctgctatctgtggaattggatccatgcttggcatcgccggttatcaggtcgtggaaatcgccattcagcgccgctttaaatcgcaaaagggggagagtgatgccggtcattaa

SEQ ID NO: 177324 - DNA, 204 bp, Klebsiella oxytoca; identical to SEQ ID NO: 92327

SEQ ID NO: 177325 - DNA, 510 bp, Klebsiella oxytoca
atgacgacagtgatactgaatcagcccgatgaacagcaggacattccgggcgtggtgattcccgcccccgagacgggcgacgcagtgattaaaaacacgttcttttttcctgatgtggatccgaagcgggtgcgcgagctgatgcgccttgagcagacggtttccgatgcgcgcctgcgcaacgccatcaagaccggcatggcggaaaccaatgcggagctttacgactaccggctgcgccagcttgccgcagggtttaagcggctggtcgacgtgcctgacgccgaggaaatcgacggcgagaatgtgcgcgttttccactacctgagcgccgtaacggcgatgacaaccgccaccctctatgagcgttatcgcggcgttgaggctaccggcaagggtgacaaaaaagccgacagcgtcgaaaccaccattgatgacctgtggcgggatatgcgctggtcggttgcgcgcctgcaggataagccacgttgcatcgtgggtcagctctga

SEQ ID NO: 177326 - DNA, 750 bp, Klebsiella oxytoca
atgacgagtcccgcacagcgtcacatgatgcgggtctcggcctcagaagccgcgcagcgggaaaaagccccgctgcgccatgcaaccgcctatgagcagatgctggtaaagctggccgaagaccgccgcacgttaaaaaacatccgttcaaacgagcgtaaagccgagaaaaagcgcgagctgctgccgttctatgcgccgtgggtcgccggtgtgctggctgatggccgtggtgcgcaggatgacattgtgatgaccgtcatgctgtggcgtctcgatgccggtgatatcgctggcgcactggacattgccccttatgcgctgaaatacggcctcacctctgaccatcgccgcacgacgccttacatgctggttgaggaggtggcgcttgccgcacagcgcctgcgcgatgccggtgagtctgtcgacctcgcattactgctgaccactatcaacctgaccgacggtgccgacgttcccgatatggtgcgcgcccgtctgcataaggtgaccggcctgaccctgcgcgatgccggtcaggacgccgaagcgctggcgcagtttcagcgcgcaatgcagctcgaccgcaatgccggtgtgcgcaaagcgattgaacaactggaacgcgcattaaagccaaaaccagaaacggcaccccgtaaaacgactaaaccgcgcacgcgcaaacctgccaccaaaccggcggcaaagcgcgggcgcccaccaaaggcggtaaaaaccgccggttaa

SEQ ID NO: 177327 - DNA, 1068 bp, Klebsiella oxytoca
atgcgtcaggaaacccgctttaagttcaatgcctatctgacccagctcgccaaactgaacggcatcagcgttgatgacgtcagcaaaaaattcaccgtcgagccgtccgtcacgcaaaccctgatgaacaccgtgcaggcgtcatcctcgtttctgaaaacgattaatattctgccggttgcagaaatgaagggggagaaaatcggcgtcggtgtgaccggttctatcgccagtacgaccgacacctcgggcgatgatgagcgtaagacggcagatttcaccgcgcttgagtccaacaagtacgagtgcgaccagattaactttgatttccatctgaaatataaaaccctcgacctgtgggcgcgctttcaggacttccagcgccgtattcgtgacgccattgtcaagcgtcaggcgctcgatttcatcatggccggttttaacggtgtcgctcgcgccgccacctcagaccgcagcaaaaatccgctgctgcaggatgtggccgtcggctggctgcagaagtaccgcaacgaagcccctgcgcgcgtgatgagcaaaatcaccgacgctgacggtaacatcgtttctgcagtcattcgcgtgggtaaaaacggcgactatgaaaacctcgacgcgctggtgatggatgctaccaacaatctgattgatgagatttatcaggatgacccgaacctcgtcgccatcgttggccgtaagctgctggccgacaaatatttcccgctggtcaacaaacagcaggaaaacagcgaatcgctcgcggcagacgtcatcatcagtcagaaacgcataggcaacctgcctgccgtgcgcgtgccctatttccctgcgaatgctgtactggtgaccacgctggaaaacctctctatctactttatggatgagagccaccgccgcagcattgatgagaacccgaaaaaagaccgcgttgaaaactatgaatcgatgaacatcgattacgtgattgaagcgtatgccgccgggtgcctgctggaaaatatcaccctgggcgatttcaccgcacctgcagcaccggaaagcggagagtaa

SEQ ID NO: 177328 - DNA, 855 bp, Klebsiella oxytoca
atggcaaaaaaagtctcaaaattctttcgcattggtgtcgagggtgatacctgcgacgggcgtatcatcagcgccagcgatattcaggaaatggccgaatcgtttgaccctcgcgtctacggttgccgcattaaccttgagcatattcgcggtctctttccagatggcgacttcaaacgcttaggcgatgtggttgagctgaaaaccgaaaagattgacgacgattctgcgcttaacggcaaatgggcgttgttcgccagaatcaccccgaccgatgacctgattgcaatgaataaaaaattgcagaaggtctatacctcaatggaaattcagccgaattttgccaataccggcaaatgctacctcgtcggccttgcggtcaccgatgacccggcgagcctcggcactgaatacctcgaattctgccgtaacgcgaagcacaacccgctgcagcgctttaaggctaaccctgaaaacgtcttttccgctgccacgctggccgagctggaatttgaagacgttcccgacacggtgctcaacagtctggctgataaggtgaaagccattttcagccgcaaacaggtcagcgacgatgcgcgcctgaatgatgtgcatgaagcggtgaccaccgtcagcgagcatgtgcagaccaacctgaccgcgcaggataagcgtatttccgatatggaaaccgcgcttgccaccttcaaacaggagctgaccggcaaggttgaagaaaccagccaggcattttccgaactgaaaatcaccctcgataaaaccgaaagtttcagccagccgcgacgcacaaaagccagtggcggtggtggcgatgagctgctgaccgactgctga

SEQ ID NO: 177329 - DNA, 1770 bp, Klebsiella oxytoca
atgaccatttccaccgatacaactttgttgcatgacccgcgacgacaggcatcgctgctttactggcagggcttttccgtgccacagattgccgaaatgctgcaggtcaagcgcccgaccgtgcagagctggaagcagcgcgacggctgggacggcatcgcaccgatttcccgcgttgaaagcagccttgaggccaggctgattcagctcatcgccaagccgcaaaaatcaggcggcgacttcaaagagattgacctgctcgggcggcagattgagcgactggcgcgcgttaaccgctacagccagaccggcaacgaggtcgaccttaaccccaacgtcgccaaccgcaacaagggcgagcgcaaaaagccgaaaaagaactttttcagcgatgaggctgtcgagaaactggaggaactatttttcgaccagtctttcgagtaccagttgcagtggtaccgcgcagggctggtgcaccgtattcgcgacatcctcaaatcccgccagattggcgcgacgttctatttcgcgcgcgaggcgctgctgcgcgcgctcaagaccggccataaccagatatttctgtcggccagtaaaacgcaggcttacgtgttccgcgaatacatcatccagtttgcgcggctggtcgacgtcgacctgacaggcgacccgattgttatcggcaacaacggcgcaaagctgatttttctcggtaccaattccaacaccgcgcagagccataacggcgacctgtatgtcgatgaaatattctggatcccgaattttcagaagctgcgcaaagtcgcctcgggcatggcctcacaaaaacacctgcgctcaacctatttttcgacaccttccacgctggcgcatggcgcttaccccttctggtctggcgagctgttcaacaaggggcgcagcagtatcgccgagcgtatcgatatcgatatcagccatagcgcgcttgccggcggtcagctctgcgacgatggacagtggcggcagattgtcaccattgaggacgcccttgccggtggctgcacgctgtttgaccttgaccagctcaaacgcgaaaacagcgccgaagactttaaaaacctgtttatgtgcgaatttgtcgacgacaaagcgtcggtattcccgtttgaggagctgcagcgctgcatggtcgatgtgatggaagagtgggaggacttttccccgttcgctgaccatccgttcggctctcgcccggtctggattggctacgacccgtcaaacaccggcgacagtgccggatgcgtcgtgctcgcgccgccggtggtctcgggtggcaagttccgcatgcttgagcgccatcagtggaaaggcatggactttgccgcacaggcagaggggatccgcaagctgacagagaaatataacgtcgaatacatcggcattgacgcgaccggcctcggcatcggcgtctaccagttggtgcgctcattctacccggcggcacgcggcatccgttacacccccgaaatgaaaaccgcaatggtactcaaggcgaaagacaccattcgccgtggctgtctggagtacgacgccggggcaaccgacgttacgcagtcgtttatgtccatccgcaaaaccatgaccagcagcgggcgcagcaccacctacgaggccagccgcaccgaggaagccagccacgccgatatcgcatgggcgaccatgcacgccctgttaaacgaaccgctttctgccggtagcggcatgcagcctaaatctattctggagttcaactaa

SEQ ID NO: 177330 - DNA, 1047 bp, Klebsiella oxytoca
atgggtaagcaaaaatcccgcaaagccgctgcgcagaaagcccgcgcgccacagcagccaagagccagcgccccacaaaaaatggaggcgttcactttcggcgagccggtgccagtgcttgataagcgcgacattctggattatgtcgagtgcatcagtaatggcaaatggtacgagccgccggtcagtttctccgggctggcaaagagcctgcgcgccgccgtgcatcacagctcaccgatttacgttaaacgcaacgtgctcgcgagtacctacattccgcacccgctgctttcccgtcaggatttcagccgctttgctctcgactatctggttttcggcaatgcctttcttgagcagcgccacagcgtcaccggccagttaatcaaactgctggcctcaccggccaaatacacccgacgcggggtcgacgagtcgattttctggtttgtggaaaacttcactctgccgcatgagttcgcacctgattccgtgtttcatctgcttgagcccgacattaatcaggagatttacggcctgcccgaatatctcagcgcgcttaattccgcctggctgaatgaagccgcaacactattccgcctcaagtattataaaaacggcgcgcatgcgggctatatcatgtatgtgactgacccggcgcagagcgcgaccgacgtcgactcgctacgcgaagcgatgcgtaactctaagggactcggcaactttaaaaacctttttttctacgcgcccggtggaaaatctgacggtataaaaatcgtgccgctgagtgaggtcgccacaaaggatgactttttcaacattaagaaagccagcgccgctgacctgatggacgcgcaccgcgtgcctttccagctcatgggcggcaagcccgagaatatcggctcactcggcgatgttgaaaaggtggcaaaggtctttgtgcgtaacgagctgtcgccgctgcaggacaggttcagggaggtaaacgactggctcggcatggaggtcatcaggtttaaaaattacaccctcgataacccggaataa

SEQ ID NO: 177331 - DNA, 798 bp, Klebsiella oxytoca
atgttgagtattatggctatagatgtcaaaaaatatcttgagatgtttgatataaagagaacaccaagtcatacaattagcttaatgtttgataaagcaatacattatgatatgtattcagtttatattaaagatgaaaatggtgatgattatctttttgatagatacgtcaatggcgaaataaaagcaaggaaatgggatcaggaaaatagcatttttcaaattgactctattctcatgcctgagcggcttaatccagattcattttcaggaatttattattatcacgcacatgagttaaagtttacttccttaaatgatttaagtttttttagggttttcaaattcaaaagaaatgctgattatgaaaacaaaaagctgagtcgtgaaaaattcctgtatcgtcagcgtaagcaagagattactgatgctatgactgttttaacatctgttgtcaggatttatcgtgagcagcagggagatagaccattcagcgagatacttataatgactgacgttgcagggaaattatgggtttatcatgataatcaggcaagacttagaaaagagcttggtctatgccttgattcgctagtagaaaatggcgacctttcaaagactccagaagggtataaacctaccggaaaagcagtcaatacccttgctaacttcaataaaaccgagcaacgttacaaagagaatatacgcagccaacaaattatgatgttggcaacttgttttgcagctgccggaggtgtaggaagcatggttgccgcttttcttggactgataaaatga

SEQ ID NO: 177332 - DNA, 732 bp, Klebsiella oxytoca
atggatatcgtaatagcatttttatctttggcactctttattgcttttatcgtgggtttaatcaagccgtctctggttcggatgccgaaccgtaagcgctccagtgcggtttatctcggtggctgtctggtgctgggtgtaattggctcaatcttatggccgactgaaaaaagtcagccagtggcaaaaactgacgtaacggtggttaaagcagaaccggctaaaccaacgtttgagtatgcagataaaaccctcaaagattatcgcaacgagccaaaagaaacccggcacgatatcgttaaagactatgtcggcttcaaaggtgtaccggtcagctctgctgatgcgttttatgcctgtatgagtgagtacacttttactaaagataatgcattaaagctcggtgatgtgttggggtggtgtttcaatgacttcgagaaagagccgaaatctctaaataataaaatcaaccttgacgtatttcagggtaattttagcggttgggatggctcctatcgtccgttggaaaaactaataaaatcgaacatgaatgatgattcgtcttacaagcatgtttctaccgtctatcatctgattttgaacaaagacccgcatgccattgtaaaaaccacgtttagaggtacaaactcatatggcgcagttgtaaaagagactattgccgctcgcgtcgatgtcagaacgggcgagattgaatcaataatcgaaaattaa

SEQ ID NO: 177333 - DNA, 213 bp, Klebsiella oxytoca
gtggatagagagttaaacgagcaagtcatgattgaacgggtcgagatgattgcgcgtctgacgacagagggtgtttgtcaggaaagagatcgtgaaattgctttgaatttaattgcggaaattgcgagagggaacttgatgaaaaacaactctttttcagttgttttcgctcccgctcctgttgaacaaagattaaaaaaaggggcgaagtga

SEQ ID NO: 177334 - DNA, 2220 bp, Klebsiella oxytoca
ttggcggttcaattcgcttacccgtggaatgctccacggtcggcaatagccagcccatatcttacctatgaccaacagcatcgccgcgaccgtatgttcgcggctttgctgcatgcgagaaaagtgctttctctccagcctgagtgtgtgcgttttgatgtttatcgaaccgctacggtgctggagcaaaatcagggcagtcaacgagctaatgcctttttaatcagcttttgtaaaaaggcattaccgcgtcttgaactggtcgcaaaaaaatacgagtgcgttggcatcaacagcaatgtatcaaccgctgttttcggcggtcatcttgatacccagcttatgcaatatctggcatcacgcatggtcaatatggtcgccagatttaaccgactcccggacatgtcccgcgccgatattgacttactggcctctgatatcgctaatttcatccggtcagagctggccgacattgatgacaccggattaagtgaactcaaaacgctgtacacgtggtacatgcaagctgggattatttccctgcaattcaatgttatcccgccacattgggagcgggtgacaaagaaatatgtcggcgaggacgaaatagccccggctatcacccgcatgtttaacgatgtgtggtggcgtggtcgtctgcggcgcattgcggctacatggcgcgaacatctgcacattgccgtcggcaatgtcagcaaaaaaagacacgcatacgcgagtaaaaactgcgtgactgactggcgcgagcagaagcgccgcacgcgtgaatttctcaaggggctggatctcgaagacgaagacggcaaccgcatcagcctgattgaaaaatacgacggttcggtcgctaaccctgcgatacgccgctgcgaactgatgacccgcatccgtgggtttgaaaatatctgcaatgagcttggatacgtcggggagttttacaccctgactgcaccgtctaaatatcacgccacgactaaagcgggataccgtaacagcaaatggaacggtgccaacccgtcggacacgcaaagctatctcactggcctttgggcgcgtattcgcgccaagctgcaccgggaagaaatccgcattttcggcatacgtgttgccgagcctcatcacgacggaacgccgcactggcacatgcttatgttcatgttgccggaagatgtcgagcgcgtgcgtctcatcatccgtgattatgcgtgggaggaagaccaccacgaactgagaagcgataaagccaaaaaagcgcgctttcatgccgaggccattgacccggaaaagggcagcgctaccggctatgttgctaaatacatttcgaaaaatatcgacggttatgctctcgatggtgaaaccgatgatgaaagcggtgagctgctcaaagagaccgcccccgccgtttcagcatgggcggcgcgctggcacatccgtcagtttcagtttattggtggtgcgccggtgacggtctaccgtgagttgcgtcgtctcgctgatacagagactgcgcacggtctgagcgttgagtttgccgccgcccatgatgcagccgatgccggtgactgggctggctacgttaatgcgcagggtggtccgtttgttcgtcgcgatgatttgcaggtgcgcacgctgtatgaaccgcgcgccgagtttaaccagtacggtgaggaaaccgtctgcatccgtggtgtgtacgattccgctgtcggtgctggcactccgattttaacccggctaacgcagtggaaaattgtgccgaagcgtgccgttgatttggccgttgacgttaagggcgcttctgcgccctctcggagttctgtcaataactgtacgggaggcgaaagcgaaccaccggagctggatttatccaaatcgttgagtcgaagtgaaaggcggaagctaacggccagactcagggacaaaaaacgggtcaccaggcgtgattttgtccacggaacggataaacaaagcgctgccattgacagaacactagacgagattcagctcacgaccggcgaaaccatcagccggggtgaggctctgcacctgatggccggaggaaaaagttgcataaacggcaaatggtgccgtggttcatcaaacggtgatattttcccggcagcaccgccacaccgggcgaagtccagacaaatcctaaatcgagttgcggggttagcgtcagttactaagttgagactgtaa

SEQ ID NO: 177335 - DNA, 222 bp, Klebsiella oxytoca
atggccgacgcaatggatttagcacaactgcgcgagcaggaagaccgcgaacgccacatcagcaacgcgcgtagccgtatcgctgcaccttcccgttttctctgcgaagaatgtgacgcaccaatcccggaagctcgccgcattgcgattccgggggtggccttttgcgtgacctgtcaggaggtcaccgaattgaaatctaaacattatcggagggtatga

SEQ ID NO: 177336 - DNA, 228 bp, Klebsiella oxytoca
atgcgtaataccgtaacccatagttttaatacagatagcgatgcgctggtcgtattgctgactgatgtcaaaaaagaagagcgtaaagaccgcgcgctcgctgtttcaatccgtcttgaggcactggcgatacatatcaccaaagaggggatgagcggtaccgaagccgccgaactgctgcgccgtgaagccactcgctttgagaatgaatcacaggagctgcactaa

SEQ ID NO: 177337 - DNA, 339 bp, Klebsiella oxytoca
atggctatcgaagctgtttccgcgactgttccgctaaaagcgggtgaacgtctggccggtctcaatcatgtggctgaattgcgcgcgagatattggggcgatagctgggaagaggttgaacgttttgtcgatcatatgcgcgataaacgtgacccacaatttgaagaaaataatcgggcgctggccgctattttctttctggcaaaaatcccggcggctcgtcatgagctccaattaagtgagctgactactgacgagaaaaaagcgcttattacagcgatgaatcattttcgcgcagtggtgagcttatttccaaaacggctaacaatgccgaattaa

SEQ ID NO: 177338 - DNA, 201 bp, Klebsiella oxytoca
atgttgaataatgaaccgtcattcgcgtctctgcttaaaaagcaaagtcccggcatgcactacggccacggctggatcgcaggtaaggacggcaagcgctggcacccgagcaactcacaggctgatttactggctggtctctctactcaaaagcagggggaatcatggctatcgaagctgtttccgcgactgttccgctaa

SEQ ID NO: 177339 - DNA, 510 bp, Klebsiella oxytoca
atgtttgattttcaggtttccaaacatccccactatgacgaagcatgccgggcttttgcgcaacgtcacaacatggcgaagctggccgagcgtgcgggtatgaatgttcagacgttacgcaacaagctcaacccggaacagcctcaccagttcacgccgcctgaattgtggctgctgactgacctgacagaagactcaaccctcgttgatggctttcttgcgcagattcattgtctaccgtgcgtgccggtaaatgagctggctaaagacaaattgcagtcttatgtcatgcgagcaatgagtgaactcggcgagctggcaagcggtgcggtctctaatgagcgcctgacctctgcacgtaagcacaacatgattgaaagcgtaaatgctggcattcgcatgttgtcattgtcggctctggcgctgcatgcgcggcttcaggctaacccggcaatgacaagcgttgtagacaccatgagcggcctcggtgcctcattcggtctgatgtga

SEQ ID NO: 177340 - DNA, 264 bp, Klebsiella oxytoca
atggcttctgaaatcgcaatcatcaaagttcccgcaccaatcgttactttgcaacaattcgcagagcttgagggtgtttctgaacgcaccgcctaccgctggacaaccggcgataacccttgtgtaccaatcgaaccacgcaccatccgtaaaggctgcaagaaagcaggtggcccgattcgcatttattacgcacgctggaaagaagagcagttgcgtaaggcgttgggtcattcccgttttcaacttgtcatcggcgcttaa

SEQ ID NO: 177341 - DNA, 576 bp, Klebsiella oxytoca
atgagaattgaaggtcttggtttaaacaatgaagaagtgctggacaggatttgcgaggcttacggattttctcagaaaattcaattagctagacacttcgaaattgcatcaagctctcttgctaacaggtacagtcgcgattccatttcttatgactttattgtgcattgcgccctagaaactggcgcaaatctcgcctggctactcaccggcaaagggtcacctacaaccggcaacatgaataccgatacccaaaatgtggagaaattcacattaagtgaagagtctctggttagtgatggcgatttgagtattgctggcaagttctttagcaagccgcttacaaatccaattgccgtctacgctgacggaaaactccatttcatcgaacgagacgcatccctttcagatggagaatggctcgttgatattgaaggtgctattagcattagagaattaacaaaattgcctggtagaaaactacatgtagcagggggcaaggttccctttgaatgtggatttgatgacattaaagcattaggtcgcgtgatgggtgtatacagcgaggttaactaa

SEQ ID NO: 177342 - DNA, 999 bp, Klebsiella oxytoca
atgaccgtgcgtaaaaatccggctggcggttggatttgtgaactctacccaaacggcgcaaaaggcaaacgtatcagaaaaaaattcgctactaagggcgaggctctggcgtttgagcaatacaccgttcaaaacccgtggcaggaagaaaaggaagacaggcgcacgctaaaagaactggttgattcatggtatagcgctcatggcattacactgaaagacggcttaaaacgtcagttagccatgcaccatgcttttgagtgtatgggcgaaccactcacacgcgatttcgatgcgcagttgttttcccgctaccgagaaaaacggttaaaaggtgagtatgctcgttcaaacagagtgaaagaggtatcgcctcgcacacttaatcttgagctggcctacttccgggcagtattcaatgagctaaaccgcctcggagaatggaagggtgaaaacccaatgaaaaatatgcgcccattccgcacagaagaaatggaaatggcctggctaactcacgaccaaatttcgcaactgctcggagagtgtaaacggcatgaccaccctgatttagaaaccgtggtaagaatctgtctcgccactggcgcccggtggtctgaggctgagagtctgaaaaaaagccagcttgcgaaatacaaaatcacatacaccaacacgaaagggagaaaaaaccgcaccgttcctatcagcaaagaactctacgagtctctgcctgatgataaaaaggatcggttatttagtgattgttatggcgcgttccggtcagctctggaaagaacaggcatcgaactaccggcaggacagcttacccacgttttgcgccacacctttgccagccattttatgatgaatggcggtaatattctggtcttacaacgcgtgctaggccacactgacataaaaatgacgatgcgctatgctcattttgccccagatcacttagaagacgcagtcaaactcaacccactaaataaacaataa

SEQ ID NO: 177343 - DNA, 1449 bp, Klebsiella oxytoca
atgtacctcgatgaatctggattaaaccctaagcttaaaggtctttggttaatgttaaaaaatcaaggtctaatgtctcacatcagcttggatgatataagagagagagcgcaaagaaagggtatatcaattttagaaataaaagaggttgattttggttatcaacatataatgaaaggtgtactacttaaaagcgacattggaacaatcatactaccaagaactaaaatagaagacgtaacacattaccaatcaaatatagagccgacaaaaaacatacgagagttttggaaatctgttgattggtttattcctgtatatattaataatttaaaacttcatgatgctttcaaattcacaggggcaacaccaaagacccgtaaacattatgataaactcaagtttcaggaaatgttcgattatgcatttcctcaaatttacgatctatctacaattattcctatcactatgcaagtgctacctaaatcatcctcttttaacaagcacctaccaattataagggaggcaattcttgcgttctacagcggcatgcaggtatcagcaacagcctcgctgataccaattattgaagacattataagaagcattcttggtgtacaaagtagacgttctgataccattagtaatgtgaacaagtgcattgataatgcctgcctaaatgcactcctgatggatatacataatgctgactggattccaagagaatattgtgaagaaacatttttaatcacgacgaatgaacgaatattaatattagaaacaataagagattggcttattgagagtttctatgcagacaccaataattatactaattattccggcttcaatagacatcactttgcacattcattgtctaatatctggcatcataaaactaatttctttagagctattggccttattcaagcattagcttttgtagagtgttttgcggttaaaggaagtaaactaagtattttcagaccctcctatgatgaaaattctgaatcacttcatttggaaatattagcatgtttagagctacaggctcataaaaaaatggctattgcagcaattcaagccagagaggggcttcctcatacatcaacagcatcagatgatggatggctcttacgagctggaatactgagtgaaaggatggataaagaggtaattgcaaaccttaaaaataaaggatggcaatgttacaactttgaagacccaataaaagaaggcgagtatattaccgttgaagcaaaaaatgaccagagaaacataaaagtcgcgcttctctatagttgtgcaacttcaagagaaatttatttggcgttagaatccacatgtgattatattctttttcaaagcgccgcttataaaattaaagaatttactcaaggaataacaaaagaagtgcagcctttaagtgcctggctcgctcctgattaa

SEQ ID NO: 177344 - DNA, 225 bp, Klebsiella oxytoca
atggaaacagtagtggggcttttccccagttatcccatttttctgtggataacatggtgtaagatcctgttcattgtcggtgaccagttctggaaaacccggttttacaaatttcatcgcggcaaaaaatcgcaaaaaaagctatatgaatcatcaaattgtcatacttacccaagaaaaggtaaactctatccacaacggatgaaattaccgctcattttttag

SEQ ID NO: 177345 - DNA, 738 bp, Klebsiella oxytoca
atgagtaagaataagtacctaattgataagaaagtcattcttgattgcgagcggatgaccttatcacgcgatcgcgaaagcttaaaaatttctgaatctgaatgcaatttgctccttgcttttcatcagggactttttaaaaaagatgatttaatcgcttgggtgtggggacgaaaaggtgtggtggtttccagtgccagctattacaaattaatcaatcaattacgcggttcgtttgaaaaaatcggcctttccagttctgcggtattaacgcgccctaaggttggtgtgacgctctcggtaactatcgaaccactgccagatgaatcaacacccgcaacgcaaaatagagccagcgacaccgttgcgccagttgcagaatcgttgcctgaaccaacgcagtcttcgcaggcagtttcaaaccgaaaagagtggctatttttaatctgcgcaacgctgttcctgctgatggtcatttatctctacagcaaacgccatccagactacttttctgagctgggaacctataacggatataccttttatggtgtcactgaagataatcggtctctcgaggatgcggtgggggctttttccgaactgagtcagcaagtctataagcaaaacggcaatttcatttattatattcgcgttcctgacaccaatatttttgttcagtgtctgaatcaactgaatgtttcggagcccaaatgcatcactatcaaagaacggtattaa

SEQ ID NO: 177346 - DNA, 636 bp, Klebsiella oxytoca
atgtcgttggttcttttgcgcatgaacaaagattcttctttcgtcaatattggacatttagcctggtgcgctttggtggctctcggccttcagcggcacgatcggcttgttgttaccgaggcgcaggaaaacatatttctgatccgctggttggccgatgccagaaaacagaagagattccccagaaatttaactgggcatatagactggctacttgctcaggggcgtcgacttggcgttcgggcgcgtctgaatcagaaactgcattatttatggcttatgagcagcgacgatcttcacaatatgccggatctacttcgattgacctatgctatcgaaatggcaaaagccggcggttggcagtatgaccttgttgatgagaagaagatggcggctggtatcagcaaattccagaatatggattcgttttgcctggaaagaacagctgtcgaggaaggatttgatgctaacgggaagcaaatagccccactttatgtccgcgtttttggtcaagttgagaaactgctgtcacttctgaactgctttggacttaaacttgacgtaatcgaatcgtattcaaatgaattctctgtaaccaaatcttcgatttttttgctacagccagtgatggcctga

SEQ ID NO: 177347 - DNA, 561 bp, Klebsiella oxytoca
atgagcgttcaacaaaacactttaaatatcctgagcgaattgcagcaaaatgcgatgaagattgatgatgcccaggctgcgcaattcgtcgcacagattaagaatgctaaacatatctttctgcagggggcgggtcgtagcggcatcgccatccgcggttttgcaaaccgtcttctccacctcggtttttcagtaagcgttgtcggcgaaatttcttctcctcatacgaaaccgggcgatctggtcattattggttccggcagcggtgagaccggcagtctggtgagcctggcgcagaaggccgtagcctgtggcgtggatgtggcgcttgtcacaatgaaagcggagtccacaatcggcaaactggccaaaagcacgcttgtgttgcctggaaccgtgaaagaagacaacgagcgtgaagacgatgctttttcacagcctatgggatcggcttttgagcagctctgctttatcgcctatgacgcaatcgtgcttgagctgatggcccagctcggcgaaaccagcgaaacgatgtttaagagacacgctgaccttgagtaa

SEQ ID NO: 177348 - DNA, 753 bp, Klebsiella oxytoca
atgagtaattttgaaggtaaagtcgcgctagtaaccggtggggcacatggcatcggtaaaggtattgctaagcaattcgctgaccgtggggctcatactgttattgtcgattacaacgaagaaaatggtaaaaagacggccgaagagttaactttcgctaatgttaaatccttattcgttaaaaccgatgtatccgatccgaaagctctggaaaacgttcgcgagcaggtttttaaaaccttcggtcgcattgatattctggtattaaacgcaggcgtggcgtttgctaataaggtcaataacatcacttttgaagagtggaataaaacaatcgccattaaccttaccgggctgtttaacaccgtcaaggcgttctacgacgacttcaccactaatcatggatctatcgtttatatttcatccggctctgcgctttccggcaccggcggcggcgtgagttacccggccagtaaagctggcggtgagggattgattcgcggcctggcaaaagaattagggccgaagggggtcaacgttaatgctatcgctccacgtctgattgataccggtgaaatgatgcgtgtcaattatcctacccaggccgatcttgatgctgttctggaaaaaattccggtacgccgccttggcaccattgacgatgtggctaacctggcaatctttttggctgataaagacaattcgtacatccaggggcaaaccattctgatggatggtggtcgtaccatcgcttaa

SEQ ID NO: 177349 - DNA, 645 bp, Klebsiella oxytoca
atggcacaaattttaccatcagtatttggtgcaaacatattacgtttgcaggaagagattcagtttctggaaacagaaaaaacagaaattctgcatgttgatttaatggatggtacttatgtaagtaatatcgcattcggtccgaaccaaatcgcggcaatgaaaaaagccagctcaatgacatttgacgtgcatatgatgctggcaaacccggaaagacatattgatgatgttattaaaaccggtgcggaaatgatctcggttcattatgaatcaacgccgcacgtgcattatattatccagaagatcaagaaagccgggcgcaaagctggcgtagtgcttaatccggggacgccagaaaacgtaattgagtatcttctggatgatattgattacattttaattatgaccattaatccaggtcagcccggccagacttttattgaaaaaagtctggagaaaatcaggaatactaaaaaaatggttgccggtcgtaatattcagatcgaggtcgatggcggcgtcaacgttgaaatcgcgaaaaaggtaaaggatgcgggtgctgatttaattgtcgttggtggtgcgctatttaacggttctccgaaagaaagctatcaggcattaagggcagcgatccaataa

SEQ ID NO: 177350 - DNA, 1254 bp, Klebsiella oxytoca
atggaaatgttaaaaagcatcatgtttactattacaagcatgggcgctacagcaatattgccgcttgttattttccttttaggtctggtttttcgaatgaaagttggtgctgccattaaatctggcatcaccgtaggtatcggtttcatcggcctgggactggttgttgggctgctaaacacagccctgcagccagcaattgcgtattactcaaaaattggcagcgggttcaccgtggctgatattggatggcctgccgttggcgcagctgcgtgggttgcaccgtttgcggcaatggttatcccaattggtatcattctgaacctgatcctggttcgcctgaaactgactaaaacgctgaacgttgacatctggaactatatgcatttcctggttcctggtgctcttgcgtacttcgtctttgacagctttttcctcgggttgggtgttgccgtggctctgagcgtagccgcactgtttattggcgatcttattgcgccaagatggcagaaatactacggcctggagggaacgacctgtaccacaatgatccacatcggatggacacttccatttgcatgggtggttaacaaaattatcgatttcattccgggtttaaacaagctggatgtggatttagagagcgttcagaagcgactgggtgtattcggtgaacccgccatcatcggcgtgatcgtcggttgtctcctgggattgttaaccaaacaacccattacaaccatcgtgccaatggcgatgggcgtggcaggcgtcatggtgctgttgccaaaagtggttggggtccttatggaagggcttaacccgataggtaagagtgctaaagaaatcatgcaaaagcagatgggtaaagatgctgaactgaatatcgggatggactgtgccctggcgcttggcgatccagcaacggtgactgtcaccgttattactatccctctgacgatgctttgcgcgctggttttaccgggtattcagatattcccaatcggcgtgctgatgtcaatcatctacatgacgaccatgacggttatggtcagtaacggcaacgttattcgatcgattatctcaaccttactgttctgtgtggtggttatgtacctggggggatatgtcgcgcccggtgcaactcagttcctcaacggtgctggcgtcggcttgaatggccagggtacggacttcgtattaaccggcccatgggaacttttgacctactggttgagcacagttactcattaa

SEQ ID NO: 177351 - DNA, 294 bp, Klebsiella oxytoca
atgattactatcctcgtagcctgcggaagcggtgtagcaacctccacacttgccgctgatgaagttaaatcggtttgtgctgaatacggcattgccaacgtaaaaattaataaatgtagtatgtccgaactggcctccgaaatgcaaagtgctgatgtggttctgacaacgaataattataaaggtgatattggtaagccgcacatgagcgtcgcaggttttattaccggtattaacgaagccgcgctgcgtaaaaaattaggtgaactgttaagcgaaatttccaaaggctaa

SEQ ID NO: 177352 - DNA, 450 bp, Klebsiella oxytoca
gtgggcacaatttctatcaatgtcgctgatggtgcggcatacaaaaattatgatgaagtgctggagcatattcaccagaaacatctggctgatgggatagtaagagacacttacctccaggcgctgcgtgaacgtgaagccgactacccaaccggaattttacttgatggctatgctgtcgctatcccacattgcgatagccagcatgccgtcagcccggcgatttacatcatccgtttgccacaggaaattgaagttaatcaggcagatggtgacgagaaattgtgggttcgcctggttgttaacctggttgttactcaaccagcagatcaattgcagttgttgaaggcgttgtttaaccatcttcagctagctgatttttaccaccagatgctggaacttcctgctgaagaagcaagagcattgtttattaacacgataattaaataa

SEQ ID NO: 177353 - DNA, 756 bp, Klebsiella oxytoca
atgtacctggttgaagagaggagaaaattgatcctggaagagattatttcggctggtaccgtttacgttagtgaccttgcgaaaaagtacgaggtcacttatgaaactatccgcaaagatctcactcatctggaaaaaaaaggactgttggttaaaagccatggaggggcaaccttaaagcagggggctgtcgaacatcctttccaggtcagggaaaaagaaaatagtaccttcaaacaagctatcgccagaaaagcgctggactttatcccccccaacagctcaatgatcattggcactgggagttctaactatgaactggctaatctgttgtgcatgaaatctggctttaaaatttttaccgattctttgccggtggccagtgtgctgatcgaatctgataaccaggtctttttgttcggcggagaactgaggaagaaaagctcttctgtctttggcgggtgggctgtgtcaatgattaatgatattaacgttgatctctgctttatcggcaccgatggcttcaacaatatgacaggtccctccacgccgtcctcctcggatgcctttctggatcgaacgatcattgcccattccgagaagaaatatatcctgggcgattacactaagttccagcgaagcagcttatttaagatctgcgactggtctgagattaccgcgctgatcactaatgatattgcggataaagacggtattgccgaagtttcgaaatatacaacagtggtaacttgttga

SEQ ID NO: 177354 - DNA, 537 bp, Klebsiella oxytoca
atgaaaacgaaaattgcaatcgcatgtgatgatgtgggatttgatcgtaaggaggagattaaaaagtacctcgaagaagagaaaaatgccgaggtcgtgtacgatcccgttaaacgaaaagaagatggtttcaacaacttcgctcgtcttgcggatgaaatggcaggtgttattcagcgggacgaatgccgcctcggtatctacatttgcggaaccggtattggctttacttgccagataaataagcactgggggattcgtgctgtcgccgtcactaatccttactcggccaagcgagcaagactcagtaacaatgcgcaggtgattggacttggctgcagagttaatgatcttgaatacacaaaaatgatcgttgatgcctggtatgacaacgcgttcgactttgccactgcaagggaaaattccaaaaagaatctactggaagcagaacgcagtgacaacgcattgctgacgaaacctgaagatgttcgatggaatatgggtttcagaccagatgatgagaaatctgagggctaa

SEQ ID NO: 177355 - DNA, 1371 bp, Klebsiella oxytoca
atggaactgatcacacagtttatcaatgacctgggtaactttatttttataccggtcatcttccttatactgatgaaacttttggggcggcccctgtcggagtgtatttcatcagccattaaagtcggcattggttttatcgcattaaccatgaccatcaagctgatgcttgaaaaaatgcagccagcggtgacggggcttgctgaggccaccggctcctcgctgagcgccattgatgttggcggcgcagccacagccgtaatgggttttggctcaagtatgggggcaattattatccctctgtgcgtcgcggtgaatattgccatgctggtggcgcgtctcacagactgcgtaaacgttgacgtgtttaaccttcatcagaatgcctctatgggggcaattgttggcgcttactccggcagcttcctctacggtgttcttactgctgcattgttccatgtctgggcacttattgcggctgacctgggtgccaaaaacaacgaaaaattcttcaacctgccaaaaggcgttgccatctcccacccggttgcaaacacctatttgctgttcgcttatccgtttaactggatttacgatcgcatccctgggttccgtaatctgaacgttacggcggaaagtattcagaaacgatttggtatccttggcgatccgaccatggttggtttcattattggtattcttcttggcttctgtggttatggttgggaatcgccgtatcacaccattattgccagcctgcaactgggtatgtaccttgccgccgtgatgctcctgctaccgcgcatgacctctatcatgatggaaggtctggttccgctgtccaacgtagcacgtaagaaactggttaaacgtttcccggaccgtgagatcactgtcgggatggataccgcgctgattgttggtcatccttcagttatcgcgcctgcactactgctgatcccggtcattgttatcctcgccgttgtccttcccggcaaccgagtgatgccgctgggggacctctcgcagttcgtattctttattgcgtgcatggtgccggtttttaatggcaacattattcgtacctgggtgacttccatcatcctgtttggcggcggcttatacatcgcatcctggatggctccagcaacaaatgaagtgttccagaaattcggtactaatcctgatgccagcgtaatgtactcatcgctaaacccgtcagctaacccgttcaccggtctctttgctggactcagccatgttggcatcgcaggttatgctctcgccgctgtgttgctactgtccgtaggctatttactcaaacagaaagcgcgccgtcagttaaaaactgaggcagaaaaaacggcttaa

SEQ ID NO: 177356 - DNA, 285 bp, Klebsiella oxytoca
atgaaaaagattttagttgtatgtgggaacggtattgcctcctcttccattatggtttctgtcctacaggactacctgaaagaacagaatatcgaagcgcaggtcgataaatcctctttaatggcctgcaccacggacacgtttaacagctatgacctgattgtttcttcaaccaagctggataacccagggatcaccactcgtgtgattgtgggtgcaggcctgttaacgggcctgggcgaagatgaaatttttgatgctgttaaagaagaaatgcttaagtag

SEQ ID NO: 177357 - DNA, 459 bp, Klebsiella oxytoca
atgaaacttgagattctggtaaatgacgtcgagggtacgatcgctgactggcatgcagcaattgagtttgccggccagaagctgttggaaaaaggctatatcactcccgaatatattcaggcctgcctggagcgtgagaagacttatccaactggtttattgatggcgaacggtcagggcattgccatcccgcatgcagactatacgctggtaaaaaccaacagcataagcatcgtgcgttttgataaaggagtcgtgtttggtcagatggaagatgctgacctcaccgtggaatgcggcattatgtttaatctcgcattcgccaccagcgatcagcatatgtctgtgctgcgccgcctctttacgctcttccaggatatttcgttcatcgagtcgtgccgtaaccttaaaacgcacgaagtcgggaaatatgttgaagagatgcttgtagcatcctga

SEQ ID NO: 177358 - DNA, 522 bp, Klebsiella oxytoca
atgaaaaagtacgccctcgttttaaacgagttatcttcgcttgtggataaaatcgatgagcaagaatttaacacactggttgattctattatcactgccggacatgtatttcttgccggtgctggtcgctcagggcaaatgataaatgcttttgctaaccgactgatgcaccttggtctgtccgtcagcgtggtaggagaaattagctatccacattctcgcaaaaacgacttgatgatcgttggttcaggctccggagagactcaacgcctgatcaaccaggtgaaaatagcaaagaataatggcgtgtatatcgctctcatcactaccgcaccagattcaactttggcaactctggcagattacatactcactatcccggcaggtcacagcgcccaaccgatgggttctctgttcgaacaggcttccctactgacctatgacactattgtgcagtcattaatggccaatcttaatgaaacaagccagacgatgaaggaacgccacgccgatattgaataa

SEQ ID NO: 177359 - DNA, 966 bp, Klebsiella oxytoca
atgccaaaagagaacaaaaatccgaagctacgtaactacgatcctcgttttatctactctcttgttgttaagcgttacttctctgaaatgaagacaaaaatagaaattgctgaggagctcggtctgtctcgcttcaaagttgcacgcctgattgatgaagccattgcgcaagagtatgtaaaatttacttttcctaaacagcaggctctggacgaggaaatagcgcaaaatttgtgtaaaaaatacggattgcaggatgccgttgtgctctctgtttctgaatcctggtcttcgcaggaacaattaaacgtcaagctgggagggataacggcgacctacttgagtgaaattctcaaagagggaatgaagtttggtctcgcctgggggcgcgtactctcaagtacggtgagtcaactgacgacattacctgttctggatgtggttcagctttctggcgttcatccaggcattgaatttagtcaggggcccattgatttgattcacaaagttgctgctatttcccacggaagagcgcacccaatgtatgtccctatgtgggtggatgacgaaagtttagcccagaaactcgcagacgatcaggctgttcaggatacgcaaaagttttactcaagtatggatgtcgttattacgggcattggggcctggaaaaccggttcttccagtctgtgcgatatattccctgaagcatggcgtgagactttaatgagccaggacattaccgctgatgtatgcgtaaccctggtaaatagtaaaggggaaatactcgatagcccgctaaaccgcctggggttcggcattacgacagaacaattgcgggccacaaagaaactgattggggttgctgggggggacgaaaaatatgaaggcattgttgcctctctcaaatcaggccttctgaatgtgctgatcactgattttgatacggctatcaaactgctggattaa

SEQ ID NO: 177360 - DNA, 654 bp, Klebsiella oxytoca
atgcctgccatcgaaacgtttattactttccttttcgcgctgacgcttctggagatttctccggggccagacatgatgctgactatcgccagaggagtcgggcagggaagacgtatcgcgctgcttacggttgtgggcaatgtatttgtagcaggatttgtgcaagtttcttttcttgttctggggctggtaaccgttgtacatgcctggccggttgcgctggatctgctaaggtgggttggtgcggcttatctgatgtggctgggcataaaaatgattgcgacttcaggtactgatacgcggctgcgaaaaacggcaaaaatttctgactggaatgccgtaaaggaaggcgctctgaacagcctgactaatccaaaatctctgctgttcatgtttgcttttcttcctcagtttgtcgatcccaccgcgggtcctgtctggctgcaattgcttgttctgggtagtatccaaaagctggcaggaattgtttccctgggctcagtcgcgatggcatcgggaacatttggaaactggctgggtaaacacccaggctttatcaaatggcaggaacgatttacaggagttgtcatgataggcctcggtatccgcatgttgtttagtgggtctggcgtagtatcgaaatctgccagttaa

SEQ ID NO: 177361 - DNA, 852 bp, Klebsiella oxytoca
atgccaactgtaaaactgaacaatggtattgaaatgcccctgctgggctttggtgtcttccagatgacggatgctgctgaatgcgaaagagccgttattgatgccatcgatacgggataccgcctgatcgataccgccgcgtcttaccagaatgaaacccaggtcgggaacgcgctgaaacagagcggtatcgcccgtaacgagctctttgtcacgaccaaactgtggctgcaggatactaactacgaaggcgctaaagcccagttcgaacgctctctgaatcggctacaacttgattacgtcgacctgtatctgattcaccagccttatggcgatgtccatggggcatggcgtgctatggaagaattgcagcaggcaggcaaaattcgcgccattggcgtcagcaacttccatcctgaccgactggccgatcttatcgccttcaacaacgtttccccggcggtaaaccaggttgaagttaaccccttcaaccagcagctgtatgccgtgccatggatgcaaagccgtggcattcagccggaagcctgggctccgtttgcagaaggaaaaaatggtctgtttgagcatcccatgttaacggcgattggccagaaatacggtaaaagcgtgggccaggttgtgctgcgttggattttccagcgaggcatcgtatcactggcgaagtcggtgcgaaaagaacgtatggcagagaacatcaacattctcgattttgaactcagcgctgaagatatgctgcagattaccgctatcgataccgccaccagcgctttcttctcccaccgcgatcctgccagagttgaatggttggccagccgcaaactggacgtttaa

SEQ ID NO: 177362 - DNA, 1434 bp, Klebsiella oxytoca
atgaaaaaaatccctttaccaaaagactttttatggggcggtgcggtcgccgcacatcaggttgaaggcggctggaataaagacggcaaaggcccgagcatctgcgacgtgctaaccggcggcgcgcacggcgtaccgcgtgagataacccagcaggtcgagccgggtaaatactaccccaaccacgaagccatcgacttccacggccgctataaagaagacatcaagctgttcgccgagatgggcttcaagtgcttccgtacttccatcgcctggacgcgcatctttccgcaaggcgacgaaacccagccaaatgaagaagggctaaaattttacgatgacatgttcgatgaactgctgaagtacaacatcgagccggttatcaccctctcccactttgagatgccgctgcatcttgttcagcagtacggcggctggaccaaccgcaaagtggtcgatttctttgtgcgttttgccgaaacggtcttcgagcgctataagcacaaagtgaaatactggatgaccttcaacgagatcaacaaccagcgtaactggcgcgcgccgctgtttggctactgctgctccggcgtagtctataccgaacatgaaaacccggaagagaccatgtaccaggtgctgcatcatcaattcgtcgccagcgcgctggcggtgaaagcggcgcgtcaaatcaacccggaaatgcaggttggctgcatgctggcgatggttcctctctatccgtactcctgtaagccggaagatgtgatgtttgcgcaggaatcgatgcgtgaacgctacgtctttaccgacgtacagctgcgcggctactacccgagctacgtcctgaacgagtgggaacgccgcggtttcaatatcaaaatggatgaaggcgatgcgcaaatcctgcgtgaaggcacctgtgcgtatctcggtttcagctactacatgaccaacgcggtgagagcggaaggcggcaccggcgacgcaatttccggctttgaaggcagcgtgcccaatccgcatgtcaaagcctccgactggggatggcaaattgacccggttggcctgcgctatgcgctgtgcgaactgtatgaacgctatcagaaaccgctgttcatcgtcgaaaacggctttggtgcgtacgataaagtagaagaagacggcagcatcaacgacgactaccgcatcgactatcttcgcgctcacgttgaagagatgatcaaagcggtgacctacgatggcgttgaactcatgggctacaccccgtggggctgcatcgactgcgtctccttcacaaccggtcagtacagcaagcgctacggcttcatctacgtcaacaagcatgacgacggcaccggggatatgtcccgctcgcgcaaaaagagctttaactggtacaaagaggttatcgccagcaacggcgagaaactgtaa

SEQ ID NO: 177363 - DNA, 2526 bp, Klebsiella oxytoca
atgggcatcctgtcatctcttgcggataatattgaggatttcaggctagccctgctacagaaggaaaatggtattactgatagcgcacgtttttcagaatggtttgaaaacgcacgggcggccgaagtactacatgaaatcgattgtcctgaattatctgaggagattattgcctcgctcgataacgctgcgctgtgggcatataaggttggcagggacgcgttgatacaggccggcctggttaactgccctcgttgccttgatgagatgggcttaatagttggcgtttcctctgcgggtacagaagccttcctgccgctttttgagcagcgaattcaggatttttccttacgtaaggcgatgtattccggtggcttctcttcctgctgttccagcgtttcgacattgttagggctgaaaggtggagtcgaacttgttgccacggcctgtacagcaagccctaatgccgtaggtatggcattcgattatattcagaatggcaagagtagcgctatgctggcagttgggacggagccgatctatttaccgacctttgctggcttttatgctctcaatgtcatgcatcccgtatcctgttcacctttctctggccaatccggtatgtcaattggcgagggggcgggggctattgtactggaagagtatgaacacgccattgcacgcggcgctaccatctatggcgagattctttcttatgccacatcctgcgacgcttaccacgaaacagggcccgatccgcgagccagcggagcagtacaagttatgttaaaggccatggctaatgcggggattacacccgatcaggttgattatattaatgcgcacggaacaggtactgaagctaacgatcaaatcgaaacgttggcgatgaaaaaagtgtttcgcgacattgaaaatattccgatcagttctacgaaatcctactttggccataatattggcgctgccggaatcgttgaacttatagcttgcctggtcactttgcctgaccaacaggtactacctacccttaatttcactgaggcacggcctaactgcgatctggattacgtcccgaatgagttcgtaaaaaaagatattaatatctttatgaagaataactatgcattcgggggtaacaactgctgcatgattgtaagcaccaggccgggctcggttccggtgacttcatatgaggccaaaagggtagcgataactggcataggagctgtatccgctattgggcatcgtatcaatgaaatacttacgaatattagtcaaattgaaagcagcgccgtcgagcttgaggagatcattttccctcaagatgtattaattgaagctgaagagctgctgcatgttttaataaagagcaggcagtttgaggagctttttggggcaaattatggcattgccagctgtgaagcatcgcatgaaccatccacctttaaaactttccaggtcaaagggattgagccgcgtaaacacctgcgtcgcttcgattcgcgtaaggctactcgcggcggtaccttcgcgctaattgcgcttacggaagcgctaaatatggctaagcgacgtattaagcgcgatggagaagaactcggtctggttatgggcatggcgcgcgggccacaagagacaacttataaatatttgcagagtctgaagccagaccctggaaaggtacgtacgtcggagtttcctggttcactgatgaatgcgattgcaactttttgcggtatttctgaaggggtaaaagggtacaccactactcttgcaaccggtgaaaatgcggctcttggcgcattaacttatggttatgagatcattcgccagcagcttcagccgcaagttattgtcgggggcgctgatgagtatttcccttccatgtctctatacatggatggggtgacgcagaagattcacgcggcatctgatgtcagggactatcaggtctatgctaaagaagcgaagggctacgtacctggcgaaggcgcctgtatgttaatgctcgaagatccgcttgcggccgctgcgcgcggcgctgaggttttagcggaagttgtcgggtatggtaaatcatgcaacaacagctattttgatgttactcaaattgatgaaaaatccagcgcaatggccttagccatcgaacgcgcgcttaatgatgcaggaatttgtgccagagatatcgatttggtgtgtggcaccagcaacggaagcattgagaattcaacaattgagttgaatgccatatatgaatcatttcgtcaggttaatccaatagtcccggtagtcaactacaacgccttttttggcttcgtggcttcgtgtgcaggcttgttgaatctgatcatacttcttgattgtattaaaaagcaggcagttcctgctataccgtataccagtgactttgttgatcagcgtataaattttgtgcgtcagcctctgaatatcaaaattaaatatgtattgctggtaggggcgacggaaggcggcaactattacgcaattattatcaaaggataa

SEQ ID NO: 177364 - DNA, 210 bp, Klebsiella oxytoca
atgaatgtcggttctaccacgcttaagagctgggttcgccagctcaggcgggagcgtcagggtattacgccctctgcaattcccattagctcagagcagcaacgtattcgcgagctggaaaagcaggttcgccgcctggaggaacagaatacgatattaaaaaaggccactgcgctcttgatgtcccactcgctgaacggttcacggtag

SEQ ID NO: 177365 - DNA, 1359 bp, Klebsiella oxytoca
atggcgggattcagttatggtggtttcggtgacggtacaacctggagtaaagagcggggaacgggtccattaccaggtggaggatcttcaggcaacagtgggaaccatagtaatacgacaccagctgagcagaaacagatcaatgccatacgtgctgataaaaacgtaagagccaggctttcaaatctaattaaggccgcgcgcaagctcaacccttcagtgaagattacagtgcacgcaatctccccggaagggactatggcgataagtatggaaggtcttactgccactcaggccagacaggctggtctcacggggctagtcatgggaataactgtacccggatatattggttcggtcggagattttgaaacaggacataaatacaatctgaaaaatccggaaaagctcaattctatcggagtcggtactccactggatggttttaacggaggtgaaaatatagatactaccccaaaaaaataccggaactggagagcgactgacgagaaatccttttattatgtcggaacgacagtaccaatgcggctactacaccatcttacagtctcaaggaataaagagactgatacatacaccatgtattttaaggctaaagatatcaaagcactgtataaaattgaggtaaaaaacggtgacctggataacatgaaactcaccacccttgcgcaggggcatcctttatttactgcagaatttgctaaagatattgtcagaaattttgcatcagttaaaaatgagagtgataaagaggttctggataaaaccagcggagtcatcatcagcgtcggggataaggccggtgctcttctgggagaaaaatataaagcgctatcccgcgaagttgccagtaatatccaaaattttcaggggaagcagatccgcacctatgatcaggcgatggcttcaatgaataaactgatgactaaccccaatatgaagatcaaggctgcggataaaactgcagttattaatgcatggaaagcatttaatgttgaagatatgggaaacaaattcactgcgcttggtagagcctttaaagtggctgattatgtcacgaagggaaataatgtcagggagaagtcaattacgggttacgagaccggtaactgggggcctctgatgagggaagtagagtcctggactgtcagcggactaacctcatcagtagctctggccgttttttcggccacattgggggctatgctcgttgctgctggtgtgtctacagctgtggtcggcattattggcattattatcgcgggtctcataggggcgttgattgacgataagttcattgacaagctgaacaacgagattattcgcccggcctactaa

SEQ ID NO: 177366 - DNA, 528 bp, Klebsiella oxytoca
atgggcaacactactgtagataaccggtatgctaaccgggcgttactgtttgttacgctggcctgcatcataccgttgctgattatcttctctgtttctctcagcaacccgggcagcccgtttcttaatcagatcgctgatgccacccgcagcactccttccgtaacctcggcattcaatccggtgatgactaaagtgatggatatctacgttaagtcggcgcctgttgcaggtatattggcctttatgttcttgctcaaaaaaagaaaacctctggaaataaaaaaacgggccgaacttatacgggcatgttttttaagtcctttcgtttatgtgttttttatttatttctttcttatgcacaaccttgagctgaccactgccggaagaacgattagatggatgtctgaaaataactttagtttattgcttttatatatcatgctttatatagcaacattcttcataacctatgctgtttgctacactcctgttctcgcctgtaaattaatgagagaaaggcagtaa

SEQ ID NO: 177367 - DNA, 1290 bp, Klebsiella oxytoca
atgatattggttcagtttctggtggtgctgctgtttctgtacatcggcatgcgggtcggggggatcggcgtggggtttgccggcggtgccggcgtaattgtgctcagtgcgctcggcgccacgccgggtgatatgccgatgctggttatcgtatttatcatggtggtgatcgtggcgattgccgccatgcaggaggcgggcggtattgaatatcttgttgacctcaccgagcgtctgctgcgccgctatccgcgattgttagtcatcaccgcgccgctttccacctggctattgaccatgatggccagcaccggtcaggtctcctttgcctgtatgccggttattgtcggcgtggcgaaagagaacaatataaaacctacccgggcgcttgctctttccgtcagcgcctctttgctgggcattgtggcgtcgcccatttctgcggcggtgattttcttctcggggattctggaaaagggccattccggctggggctatattgagctcattgcggtatccataccctccacctttctggcgctgctggtcacctccgttttttacctgtgctgggacaggatccgccatcaggatcggctcgatgacaatccggttccgattaaagcaaggactgagcgggcgatcccgccctgtgccggacgttcggtgctgatttttatcgtcggactggttgtggtgctggtttatgcgattgtcaccagtccaaaattagggctgattgtccatccggccatgagtagcggacaggcgcgggtaggggtgatgctgggcgttgcgctgctgattgtggtgtgctgccgggttaacgtacacaaggtcccgtccggatcggtgtttaaaaccggcatgacctcctgcatctgtatcctcggcgtcgcctggctgggttcaacttttatggatagcaatcaacagtggttgcaaagcgcggtctcgtcacacttgttggattcgcccattatgttggccatcattattatggcggcctcatgcttcttgtattctcaggcggcctccacaaaaattttatttcccgccgcgctgagcatgggcgtagccccggctattttggtggcctgcttcccggccacggcttctctttttattttgccaaactatccgacgctgttggcggcggtagagctggatgataccggctccaccagactgggccgacatattatcgatcatccttttctgctgcccggcctggcatcggtgctgctgtcaatgctcttcgccgcggggctggcttatggcattcagtga

SEQ ID NO: 177368 - DNA, 849 bp, Klebsiella oxytoca
atgaaactattaagctttcgcgttaatgataaaaacaaatatggcctggcgaccgctgacggcgtcattgatctacaggcgcagtttcctcaatatggcagcctgctggaatttataccgcatcttcatcttgttgatactctgccgccgtctgcgaaacaagcgaactactctttcgacgagatcgcttttctgccggtcattactgaaccgaaaaaaatcatctgcgctggcgtgaattatcgcgataaaaacgctgccggtaacgagaagtcctctaatcccgtgttgtttatccgctttgcggattcacagaccggccatctgacaccgctcctcaagccggagtgcagcaatgagtttgactatgaaggcgaaatggcgctggtgattggccgtggggggcgcaatattcctcagcaggaggcgctgcattatgtggctggctacagctgctatatggatggctcggtgcgcgactggcagcatgcctgctttaccggcgggaaaaactggcctgcgacgggcggcttcggcccctggctggtgacggcggatgatatccccgacccgcaaaatctgaatattaccacccggctcaatggccagacggtgcagcaggataatacgggcagcatgttgtattcaattgccgaactcattgcgtatatcagcaccttcagcgcgctctctccgggagatgtcattctgaccggtacgcccggaggtatcggaaaaaaacgtaccccgccactctttatgcagcccggggacagggtggaagtcgagattgagcagatcggatgcctgatgaataccgtacgcagcgatgccgctgtagcgcgataa

SEQ ID NO: 177369 - DNA, 930 bp, Klebsiella oxytoca
atgattaacatcgatctgagaggtttgactccggctccggttacaccattcactcgcgatggacgcgtagactatgatgccattcagcgcctcggtagctggctgggcagcatcgacggtgtgaaaggtctggtggtgcttggacacgcgggagaagggacttttctgacccaggaagagcaggcgaatgtgatccgcgcatttgtgaagtccgtggatgataagcttcccattattgccggtatcaccggggaagggacggaagtggccgcgctggaggcgaagcgcgccgttgccgccggcgcatccgcaggtttgctctatccttcacacggctggctgcgctttggctatcaggacggcgcgcctcaggatcgctaccgcgtggtgtatgaggaaagtggcctgccgctgattcttttccagtatccggatgtcactaaagccacctacaacctgaaaacgctgctggatatctccgcgcagccgggcgtatttgccatgaagaatggcgtgcgtaatatgcgccgctgggatactgaaattccggttattcgccgcgagcgtccggatctgcaaatcttaagctgccacgatgaatatctgctgcataccgcctttgatgtggatggcttcctcgtcggctacggcaatatcgcgcctgaaccgttaattgagatgatcaaagcgggtaaagcgggcgattacgttaaagcgcgtcagctgcacgatcgactgctgccggtgaccaaaagcgtctaccaccgcggttctcacatggaagggaccgtggcccttaaacatgctctggttgcgcgcgggatccttgaacatgccaccgttcgctctccgctgctgccgctggaaaatggcgctgaaaaagagatccacgacgccatgcgcgccgctgagctgggccgcgtcggttaa

SEQ ID NO: 177370 - DNA, 1032 bp, Klebsiella oxytoca
atggatcaagaaagtgaactgaacgatttgccggaaaaaaagctggcgacaatgcgggatgttgctcgcgctgcgggcgtgagcgtctcgaccgtttcgcgcgtactcgatgaaaggttacccacctcgcgcagcgcctcggcagataaaattcgccaggtggcgcgcgagcttggctaccgtcgggactatgttgcttccagcctgcggcgtggcgataccggaacgcttggcgtcctggttccgagactgaccgatgccgtcacggcgatgctttttgaagagatagccagggcggcggcccggcgaggctactttgctattgtcgcgacctgcggagatagcaaggagcaggagaaaaacgccgttgaatcgctgctggatcgccgcgtcgatgggctgatcatgtccacctgccggctggacgatcctttgccgcaaaccctgcgtgaacgggatgttcctcacgtactggcgctgcgcaccgatggctttagcccctcttcggtcggggacgatgagcttggcggctatctggctacccgacacctgattgatttaggccaccgggatattggcctgattggcggccctgattttgcctccaacgcgcgcaaccggcgtaagggttttgagcgggcaatgcaggaagccgggctcaggatcgaagcggaatggtgctgtcactctgattttaatatcgcctcgggggagcagcagggaatgaagatcctcagccagcctcatcgcccgagcgcgctgtttgccgttaatgatgagctggcgattggcgtcctcgcggccgcgcaccagcaggggctggtgattggcgaagatctctccctggtgggctacaatgacattcccctggtgagcagactccccgtggcgctgacctcggtcaggacgccgctggagcatattgccagcaatgcggttgatatgttattgaatccagagataaataataatatgcgggttaccacgccctcccttattccacgtaagtctacctcgtctccacgtaaataa

SEQ ID NO: 177371 - DNA, 1398 bp, Klebsiella oxytoca
atgtcaactcaggccattgcttcagattacgccgttgccagcggaacggcgtccacgccagatgcgctgctggcaaggctggaacgcctccccatcacccgacggctgaaagcgatccgcgttatcgtcggcttatcgacgttttttgatgcttataccattattgcaatcgcatttgctctcccccagcttactcaggaatggggtcttacgccgacatttgtcggtcttattattgcggccagctatgtgggacagctgtgcggcgcacttttttttggctcactggcggaaaaaataggccgtatcggcgttttacgtatcaccattatcatgttcgtgctgatggatgccgcctgcctttttgcctggaacggctggtcaattcttatcattcgctttttacagggcgtgggcatcggcgccgaggttcccgtggccagcgcctatatcaatgaatttgtcggcgccaaaaagcgcgggcgtttctttttgttgtatgaggtaattttccccatcggcatgatgtttgccgggttggtggggtattttctggtgcccatctatggatggaaagtcatgtttttaatcggtctggtgccttctgcgctgaccgttcccctgcgctggctgatgccggaatcaccgcgctggttgaccgcaaaaggccgactgaaagaagcggagaacgtcgtatcaacgctggaatctgaggttatcaggcgcgggatgtcattgcccgaaccggaaataaaagccccgacggtgcacaaagcggctccggaaggagtaaaagccctcttcggcggtatctacaaatcccgaacctttatgctgtgggggctgtggctgaccgtatatagcgtcaacaatgggatgatcacctggttccctaccctgtacaaaacctggtttaacctctccctcgacaccagcctggcctacggctggatcacctcctcctgcggcgtcgtggcttcggtgatctgcgccttgatgatcgaccgtgttggccgcaagcgctggtacacatgggcctttctcctggccgtcgttccgctgattgcgctttctgttctgggggcaaaatccgccgttgaaattctgattctgggcagcctcacctacgccattctgcaaaccatcgccttttcgctttatctgtacgcggctgagctttatcccacccgactgcgcgctatcggcaccgcctattccagcgcatggctccgggcggggtcttccataggcccactgatggtcggttttatcgtcagcggcttcgggatccgctttgtgtttatcactttcgcggtcattgcgctgattggcggtttaattacctggctttttgccattgaaaccaaagggaaatcgttagaagagctgtcgccatag

SEQ ID NO: 177372 - DNA, 1341 bp, Klebsiella oxytoca
atgaataaactcatccacagcggcacgatgctgctggctttactacatccttttctggcgctggccaacgagacgcttttttctcccacggcaaaaaatatgaccggagagtggggaggtgtgcgtacggatctgcgccgtcatggttatgattttacgctggaatatagcgcaatgacggccacaaatatgtccggcggttacgatcgcgataaaactctgcgctatagcgaccagtatattctcggcatagatatggacctggaaaaggtttttggtattcaggacggtgaatttaaagcctcggtgaataatcgtaacgggcgagacctgactcaggatcgcctgcaggatccgcgtgcgccggtaataggctccggcgttcagagcaactacggtcgggggcaaacatggcacgcgacgcagttttggttcaaaaaaaccgggtgggataaaaagctggatctcaaggtgggcctgatgccgccgggagaggattttgataacaacggctgcttttttcaaaacctgtcgctgtgcggctctttagccggccacggcagcggcgtctggtataacacccccataggccagtggggcggccgtattaaatacagccctgccccggcgctttacgtccaggccggcgcgtttcagtacaaccctgcctacgccacccgccacggaagcttccagctggatggtaccgggcatctggggtacatgtacctttttgaactgggatatcgacctactctcggcgcggcaaaactccccggaagctggaaactcggcggatggtataacacggcggacgccaatgatgtgctggatgacgacaatggcgatccctatgtcctcacgcagcaggccgcccggcgacacggagggcgttacggaggttatctctatattggccagcagataaccccctcgagcagccagcgccaaaatggcctgagccttttcggccatctggcaataaatgataaaaagacggcgaccatggattatcagatccaggcgggggctatttataaaggccctttcgccagccgtccgcaggactttatcagcttcggcgtcagtaaaatgcacgccaacgacagggtcgcccgtcgggcgcagctcctgaaccagatgcgggggatagatgattatgataaccccctgtatgtcccggttcgcagagccgagtatgccgcagagctgcattatagctttcgcgcgacgccatggctgagcgtccgccctaacctgcagctgctcgttcatccgggaggaagcgaagagattaaaaacgcctgggtgctcggcaatcaggtaaccatcaaattctga

SEQ ID NO: 177373 - DNA, 1044 bp, Klebsiella oxytoca
atgatgaaaacaaaaccgtttcgttccgccaggcgctttctggcactcgcttgcctcggtaccgcgctcatagcaggtagtgtactgaccgcttcagcacaggccgccatcaattttcgtgtgtactcttctttgccggctgatgattcctccgcccactatatttggttcaatcgtttccaggaaaatatcaataaaaacgagaagttaaaaggccagatcaagctcaattacttcgcaaacgcgatgctcggaaaagaggctgatgctactcagcaggtgcgtatcggcgccattaacatgatgatttcaggcacttcaatctgggcgacgctggtacccgaaattggcgtactggatttggggtatctgttcaaagattacgatcaggtgggaaaagcgctggatggcaaagtcggcgaaaagctttccagcctgatgatggataaagcaaacgttatggtactgggctatggctataacctcggcgcacgtaacgtgtataccaaaaagacgattgaaaaaccggcggatttaaaaaatctgaaaatccgcgtgctgccggttcccaactttatcgccacgctaaatcacatgggtgccgttgccattcctatgccgggcggggaagtctattccagcctgcaaatgggcgttatcgacggagtggaacacgatgccccaaccatctacgccagcaaatactatgaaattatcaaaaacggtacgctgactcgccacagctataacccgctgatgattgccatgaacaagaaaagcttcgagcaaattccgcaacccttacgcgcagacgtactggccgcggcaaaagaagccaccgagtacgaacgtcagcaggccagtcaaaaagagcttgaggcaattaaaaacctcgaggctaaaggagtgacctttcgggaaaccgatcgcgcttactttgcgcaggccgtacagcccgtgtggaaaaccttccttgataaatatcctgatttaaaaccgatgatggatgagttcagcgctacggcgtcgagcgctaaaccctaa

SEQ ID NO: 177374 - DNA, 1875 bp, Klebsiella oxytoca
atggctgatatctctatgaaaaaaaaggatgaaaatactttgttgacgctgttggggcagctaagcaaatgcttaacctgcttcacctcctgggccggagcgctggtgttatttatcaacgtcctggtggtatttgcttccgttatctggcgttacgcgctgcattcgcccattcattgggcagaagaggtggcgcgcgcgctgatgatagcgctggtcttttttggtgtcgctacctcaacgggcagaggaggacatattggcgtcgatcttttcctgcgctttctacctgatgccattagaccgtatgtcgtgcatgccagtcgctggatcctgttcctggtctccgtcggcctggtcatctccagctacgatctcgtccaggctgcgcggctacaaaccaccgaaacgggcctaccgcaaaccatctatgtgatcccggtcctgatcggctccgtggtgatgatggtggctgcgctggaacatgccctacgcgaacgagcaaagatcgttctgctcagcggtgcggggatcctggcgctagcggcactgggttatctgaaactctcgctgatggccgatccggccagcgcggctgccggactcatgctgatttgctttgtcatgggcatcctcgccggcgtgcccattgccttcacgctcggcatgtcggcaatggtattttttatctgcgacccttccctgccgtttgttttcttttctcaacaggtcgcggctggggttgatcactttgtcctgctggcaattcccttcttcttacttgccggtgcggcgatggaaatcaacggcatgtcaacgcgtctggtggagcttattgtgcgtggcatgggacgatttcgcggcggcctgaatatgacaaccgtactgtcgatggccttcttttccggcatctcgggttcaaagctggcggatgtggcggcagtaggcggcgtgttaatgcctgcggtgcgccgggcgaaacaagacggcgaagaggccgccggggtctttgccgcatctgcggtaatggcagaaaccattccaccctgcgtgaacctgattgtgatggggttcgtcgccaatatctctatcggcgcgctgtttatcgccggtctggtgccggcagcctgcctgttggtgctgttaatggtggccgccaaccgcttcggcgggaaaatcaacgtcagcgaagcgtacccggaattgcgcccgcgaacccagctttatcttggcgccgccgtcggtctggttatgatcttcatgattggccgtggagtgatgatggggattgccacatcaacggaaatttcagcttttgccgtcatctacgccattgtggtgggccgactggcgtttcgtgagctgacgctgaaagcgacgataaaaatgttcgtggatattgcggcgatgtcgggtgttttgctgttcatcgtggcctgcgcgaccagcttgtcctatgccctgacgatacaaatgatcccccagcagatcgctgaattgctggtcggaattggtatggagcaaggtgcctggctgttcctgatattaaccatcgtgattttgataatctttggcgcggttctcgaaggcgcgcctgcgctgattattttcgctcctatcctggtgcctattgccattcagcttggctttaatcccttgcactttggcatcgtgatgatcatggcgatgggttttggcctgttttcccccccgatcggtctgggattatataccacctgcgctatttgcggcgtagagatgaagcacgtgattaaacccatggcgaaatatctggcggtggtttttgtcggcatcattattgtcgccatggctccccctttaaccacctggttgccaggactcgccggctattag

SEQ ID NO: 177375 - DNA, 765 bp, Klebsiella oxytoca
atgggattattaacgggtaaaaaagcgtttattaccggcgcagaacaaggtattggtaaagaaagcgcgaaaaaacttatcgaggccggatgtgatatttatatacattatttcagcggcgaggaaggccccagggaattacttgcatttgccgaacagcggggagctcgcgcggcctgcggtttcgctgatttaaccaatgaggacgatgccgcacgctgcgtggcggaggcggcagaatttttgggcggcattgatattctggtcaataacgtcggcggtattattgcccgcaaatggctgggagagattgacgcgcatttctggcgcacggtcatcgacgtcaatatgaccacgatgatgaacgtcacccaacaggcgctcccctggctgaaagcggcctccgaaggcgcaagtatcgttaacctggcttctttagccggacgttctggcgggcatgctggatctctggtctattccaccaccaagggagccgtactgacctggacgcgctcgttggctgcggaattgggcgaacacggcatccgcgttaatgccgttgccccggggctgattctggggacgcgttttcataaccagcatacaacccaggcctctgccgatcggacaattcaggagattcctttaggcagagcgggcaccgcggaagatgtagcaagggttatttgcttcctcgcatccgaatatgacggttttgtttccggagcgaccatcgatattaatggtggagtttatcgggcataa

SEQ ID NO: 177376 - DNA, 420 bp, Klebsiella oxytoca
atgatcaacgcagagattattcatcctgatttattacaggcgctggcgcaatgcgggcataaggcgaaaattttaatcaccgacgctaattactcttttttaaccaatacttcaacgcaggcacgtattatctggcttaatttttcaccggggctgatcggtagcgtaattatactcgagaaaattctccggtatataaatgttgaaaaagcaacgttgatgagtagcccggcggaattcgataacacgattgagcgtgagtatcgtagcctgctggcagaaaccatcgaatttgaacatgttgagcgtaatgcattttatttacaggcgaaatcgccggacaccatgctggtcatcgcttctggtgaaacgcgccgtttcgccaacattcttctgaccgtggccccaacgctggtatga

SEQ ID NO: 177377 - DNA, 1047 bp, Klebsiella oxytoca
atggcgaacattcgtgatgtcgcaaaacacgctggcgtttccgtgagcaccgtatccaacgtgctaaacggtcgtaccgatcaaatgcgggctgaaacgctgacgcgcatccagcagagcatgcagacgctgaactacttcccgaatcgcgtggcgcagcagttgaagaccggccaggccaaaatgattggcttgctggttccctccattgtgaatcccagttttgccgcgctggcgcgtgaagtcgatctggcggcgaaagaacgacagtaccgggtactgattggcaacacctatcggcaaatcgaagaagaagccgcctttcttgatgatatgttctcccatggcgtgcgggggattatcgtcgccgcttgcgatatcgaaaagccgcattttgcccgcgcggtagagcagggcatggtgatggtgaactatgatggccgtatgcctgtgcgggcacaggcggataatttttccctcgacagcgtctcaatggacaacattgctgcggggcgaatggccgcagaacatcttatcgcgcaggggtgtcgtcgtctggcgtttgccaccgtggctggaatgacgccgagtcgcgctcacaaaatagaagggtttctttgcgcggtgaaagagcaggggatatatcgcgatgggatgatcgtggaaggacaggcgatggcggcctatggcgacaccgaaatgaccgaactggggcgcgcgctggcgttaaaaatcagccagcagcctacgctcccggatggcatcgtagcgattaacgatgcgctcggcatcgggctgatgaccggcctgcaccaggccggaatcacgataccgcagcaaatttcccttgtgggcatcgataatatctccctttccgggttgattttcccgggtctcacttccatcatgccgccgctgaaaacgatggcagaggtgatggtagaccggttgattatgcgcatagataacccgtctatcccgcctgcggagtttttattcccgccatcgctggtttcccggcaatctgtgcgtagcccggaggcctga

SEQ ID NO: 177378 - DNA, 1188 bp, Klebsiella oxytoca
ttgaagctgaatgttcccaacacattaagacaaatgaacgcctctgtggtcctcaacgtcatccgtgagaactctcctctttctcgcgctcagatcgccaaggcaaccggcattactaaagccacaatttctgaaatcgtgagcgacctgctggaagagaaaattatctacgaaagcggcgtcagcgaagaaggcggtctcgggcgcaaagggattctggttaacttcgatcccaaccatggccttgggatcggcattgacttaggcggaacgaaaatcaccttctccctcttcaatctcaatgcgcagcttctggcccagcatcaggaatcaacctatgaggtcacgactcgccgggagtttctcgaccgattcagcgccagtatcgaggcgtttatcgaacggcagcctatttctcgcgacaagctgaaagtcatcggcatcgccacgccgggcatcgttgattaccgtagcggaacggtgcttgaaggctcccccaatctccctgactgggacaacattccgcttgccgatgagctcaacgcgcgtctgaacatcagggtggtactggaaaatgatattcgggcagcgctgattggcgaaatgtggcaggggaaatgtcgccacgttcatagcgccgcacttattggtatcggcaccggcctgggctcggcgctgctgatggatggcaaaattatccggggtatcaataatgctgccggtgagatcggctatatgctcttcgaacgcaaccatctgactcagaactggaaaaataagggctgcttcgaaaactactgctccggctccggactcaaagagagaatgtccgcgctcagcggccaaagcatgaacgcccatgaaatacttatcgccgctgcccagggggaaacggtacccgccatgttgctggaggagatggcggactacttaaccatcggcattctcaatatggtgacaatagccaaccttgagaaagtcattcttaccggcggcgtttcccaatccgcagagctttttctcccaagagtacaagccaatctcgacaggcatctgtttgccaatacccgggtatccgttgagctttccgatttaaaagaaaaagcaccgctgtatggaatggcgatgctggcgctccatgcggtgtatccctcgattcaatttatgcccgacacgcagcttatttaa

SEQ ID NO: 177379 - DNA, 1278 bp, Klebsiella oxytoca
atggccgggatccatctacacccacacgatattcttgatgaaggcgtcgattcagtactggaacgtattaacaaaatgaacggcgtcgatagcctctttgttgaggttaacaccatttttgaacgtaacccctaccctaccggccgcctgccgcacaatccaaaacatgagtttgtgcaaggtaccgccacgctgcatgtcaaactcgatatgccgccactacgtctgcaccagcgcgttgatcctacgattgttgcgggcgccgatcctctgctggatctgcagcaggccaccgatcgcggcccttataaagtgatcccctgggtgaatattctcaacggcgattttgccgggcagatcgaaaacaatcaggtgatcgattttcgcggcaatccggttgaacactggctatgccctaatggccctgacgtcattgaactgtggatcaacaccttcagcgcgattaaggcccggtacggttattcgacgtttctgatcgaccgcatccgctaccccgactgggcaggaaagagcgtgagccccagaggattattcacctgcttctgcccgcactgtcagcgcgaaatgcatcggacaggcatcaatgctgatgcggtccgccaacgtctggccaccctcacggcgcaaatgcacagcggccagtatgatgcgaccgtcgatgcgttattaaatgatgaacttctgcagcgctggatggcattccgccagcatagcgtctcccgctttgtacagaatctgctggccggcattagtgaccgggatgctggcggcagcgaactgtggctcgatctctggcccccggcttactcgtggattttaggtcaggattatcagtctcttacccgttattctaaagcactcaagcacttcccctaccataagctcggcggcggtgcggacgtgcagggactcattgaacatttcgccaaagatgatgcccagcgtgaaagcgccttcagcgcctttatgcgcctgttcaaactgccttacaacattagctatcaacagttcaaagccgaaggcttcccgattgaatttgtaaaacagcaaaacaatctggtgcgtgaaaaatcacagccaggcaccttcatttacagcggcatccagatgtggaacctgaccccgatggcactactggaagccatcgatgcggcagaacagagcgactgcgacgacctgctctattactgctacggctgggcggaacagtcgcttttcgacgccgctggccaccattaccaaaagcccacttgctaa

SEQ ID NO: 177380 - DNA, 1164 bp, Klebsiella oxytoca
atggctaaccaacaaaaatggaaagtatttttcctgctgttcgtcaccatgttccttcttggcggcatacagaacaccaagggtctgattcttgagcaggtccagcacgatatcaatctgaacatggggcagataggcacgttgatcatgttcttccagataggctttctggtcgccagtctgctcaccggctactttaccgataaaaaggggctgaagatcatgatgctgattggctcgctgatgatggccgttggtctggtcggcaccagcctggcgttcagcgtgctgctgtttttcggcttctatttgattgttggcctgggtatcggctcgatgctggtctccatcattaccgtcatcccgaccttctacaaagaaaaagccggcatgatgttcaacgtttccaacgcgatgttcggcgtggggatgatcgtcactccgctgattttacagcagcttttctcgcatcatgtctcatggcgcctgttctatgtcgggattgccattattgttgcgattatcattctggtactcagcagtctgcggttggaaaaagcgcaggggatggatatgcagctctctgattttatgcatatccttggccagaaacgcctgatgctggtgattggttttatcctgttctacgttgctgcggaagcggcttttctgaactttttccctatcttctatagctcgctggatatcgtcggcgctaccgcagaagagaagattgtgacggcggcctacgtcatatccagttttgccatgctgttcaccgttggccggtttattggcgggtttatcaatctgaagttgggcgatcgcaaaacgctgatcctgttttcactattctcgctgattgccattattgccagccgctactttgccagccagtttgtctggctgtttatggtatttggtttcgcgatgtcggtactgttccctacggcctccgccgtggcgacaaaactcaccgataaaagcggctcaacgatgggactgatctatgtcgcctcaggcatgggcggagcctttgcaggctggctgattggtcaggtttctcagatttacggcgtctcgctgggcttcaacttgattattgctttcgtggcgattttcttcgtgctgacgttgtttattaaagaacatccgcaacattaa

SEQ ID NO: 177381 - DNA, 1362 bp, Klebsiella oxytoca
atgaagacgccgcactcttcatttatcagcccgttccgcacgggcggcgatccctgtacctttcgggaggccggcgaactgcaggccgaaataggcaaacttacgcatccggcgcggccggatgtggactggggcagggtagagagcctgagtctggctctgtttcggcaaaacggcgtggagttgcaaacgctggtctgttacgcgctggcgaggacccggcagtatgggatagcaggaatggtggacgctctggatgccctcgcggcattgataaaccagcgctggggagatttctggccgctgcaggtccattcaaggatcgcgctgctggcgtggcttgccgagaagatgaagcaggcgctgcgcgcgcaggatcttcagtatcaggatctggcgcagattaaccactgcagccagcacctgacggaaatagagaacgtgctgcggcggtgcgaggtctggcatatgtcaaaactggagcaactggccgttcagttgcgaaatgcggcgatgcgcctggagcggctggcgccgcagggcgaaaaaacggcggcgaagaaaatcgccagggagcgcccctggccgagagatgtaaaaaatggggccaaaaaaaccgctgaagcgcaggcatcgcgaaagcatgacgaaagcttgttattgaagaaaactacggagagtcctcgccagcggcgggtatggcccggctttatcgccgggatgctgacgatggtttgcctgggaggttgcggtttctggggttggtcatggctgaacccgccagaaatgggcctacgtgaggcacagaccgcgacgtcggtgttggcgttgccctcagcgccggggagggatggcaacaagatgctgagctgggcgcagggaatggcgacgacccgcgcgcagctgaagaggctgaatgacctgccgccgctgtggcccctgcgccaggaagaggcgctgctcctggcccttgaacgccgctggccgaataattcgcaaattaaggcgatgagcgccgagtggcgtaagcagcgggaagccagcgcgctgccggtgcctgacttacagcgctatgcccaggcgcaggcgaagctacggcagctttcgctaaggctggatgcgctggatgaacgcaaggggcggtatatgactgcttctgagttgaaatcggcaattttcagcatccggcagctgttacagacgccgccgctggaagaacagctcaggcaactggaggctcaggtacgagccggaagtctctcaccggtgctgcaaatgcagattgattttcattttaagcagttgctaagccgctacgctattttgctggatagcacggaagtgaaaccgaaccctcagtag

SEQ ID NO: 177382 - DNA, 606 bp, Klebsiella oxytoca
atgaataagttaaccattgcggctgcatcaattattctggctttaggctcagcctccgcatttgctgatgatacggtaaccacgccgggcaccgatgttggcctcattacgtttgatggcgccgtttccgacaccacttgcaccatcaccaccaacaacggtgttgacgccagaaacgtcaccatcagcatgccggtggtgaaaaaagccgatgtcgaaggcaccaccgttgacgcaggcgttggctcgaaagagtttgaactgcacctgagcaactgcccggacacgctgaccaaagcatccgcgacctttacttcccagcagtttgccgaactctctaacggcacgctgaaaactgacccgagcgttaccggtcatgctgataacgttagcctggcgctgtttaacaacagcaccaccgataccgatcgtattcaggttggcctgccgaataacaacacccaggtcgctaccctgaccagcggcgaaggcgtactggcttaccgcgtggcttacgttccaagcgccgattgggttaaaggcaccaacgatatcaccgcgggtaaagtgaccagcaacgcgacttttactatgtcttacgagtaa

SEQ ID NO: 177383 - DNA, 723 bp, Klebsiella oxytoca
atgcatcgttttacccaacttacgctgacatcgctagtgtgcgccagcgcggcgttcagtacatttaatgcctgcgcggatattgttatttccggcacccgtgtgatctacccgcaatcagccaaagacgtgaccgttaaaatggaaaaccgcggcactaaaccgctactggtacagtcgtggcttgatgacggtcgcgataccgttaatccgcaggaactgaagctgccgtttatcgtcacgccgccggtatcacgtatcgacccgtcgaaggggcaaaccgtgcgtattacctggacccagcagcctctggcgcaggatcgggaatcgctgttctggtttaacgtccttgaagtcccgccaaaagcgaaagacggagacagccaaaacgtattacagctggcgtttcgtacccgcattaagatgttttttcgcccggatggtttgccgggagatccggctattgccgccggtaatcttaaatggtctcagcaaggcaccgcgctcattgccaataatagcagcccttattatgtgtcaatggctaaagcgaccgttaccgtcaacggtaaaaaaatagaggtcgattcccacactattccaccgctctcgaatgaaaccattccggtaaaaaatgcgccagcgctgcgaggcggaaaaattgaatacaccgcgatcaatgattttggcggtaccgaaaaacatcaggccgccatcaattaa

SEQ ID NO: 177384 - DNA, 2556 bp, Klebsiella oxytoca
atgttttttcgtcgatcattattgtgtaccactatctatattgcactccagtcctcagtaatggcggaagaagctccttcagttccagcagatgacattgaatttaacgatcagtttttatttagtaccggcgacaatattgacgtcagccgcttttctaaaggtaacccggtaccgccgggcacctataaaacgcaaatcttgctaaacagcaagccaaagatgctggtggattttacctttaacgataatggtacaccccgggctacgccctgttttaccagtaagctgctggcgcaaacaggcgttaacacagaaggactggatctcgaatccgccgcctgcatcgatattgcacaacagtatccgcaatcctcatggaattatgatattggcacccaggagctggcgatctccatgccgcaaatctatgtccttaaacgccctgatggctacgtcgatccctcgctctggcaggacggaattaccgctgcaatggtctcttacgatcttaacgcctggcactctgaaagcgatggcagcggttcggattcggtttatgccggactgaagtacggggtcaacatcggtgcctggcacctgcgcgccaggggaaacgccaactgggatcaggacagcggcagcgattacgcaagccaggatatctatctgcagcgtgatatcacctcattgcgctcacagtttctggtgggagattcctatacccgcggcgatggcttcgattcatttagcctgcggggcgtgcgcttttacaacgacgatcgcatgctgcccggcggcgcttccacttacgcgcctgagattcgcggcgtggcaaagagcaatgcgaaggttgtgattaagcaaagcggcaataaaatctatgaaactaccgtgccgccaggtccatttgccattaccgatcttagcaccaccggctatggtagcgacctgaacgtatcgattgaagaggccgatggcagcgtgcgcgtcttctcggtgccctactcttcggttacgcaaatgctgcgcccgggctatggtcgctgggacatcggcgccggcgaactgcgcgacaagagtttaaaagagaaaccagggctgggttacgccaccggttattacggtctgaacaacaccttcactggctatgtcggcgtgcagtatatggatgtcggctattacgccgggttagtgggtatcgccaccaatacgcccgtcggcgcattcgcatttgacattacacactccacaaccgccattgatgacctggatactctgacgggccaaagctatcgcgtgacctggagcaagctgattgaagaatcccgcacctcattcaatattgctgcctaccggttttccactgaaaactatatgtcgttacgggatgcggccacgttaaatgacaacctcaggcacaacaacgacgatacgccgcaagaatttacccgttttcaacggatgaaaaaccagttccaggtcaacattagtcagccggtctctctctggagcaacagtaacggcaacctgtatgtcagcggcagctgggaagattactggaataaatcctcctcgacctctcagtactcggttggctataacgactcattttcatgggtcagctatagcatttcagtccagcgttcctataacgaatatggcgataaggacgacagcgtctatctcaacctgagcattccgctggaaaacctgctggggcgcaataagcggccgctcggtttttctaccgtcaatatgagcgtcaacagcgatctgaagtcgaacaataatttctctaccagcgccaacggcaataccgacgactatcgcttcagctacagccttaacaccagcgccagccggtcagatggctcgtcaatcaaccaggttggcggttacggcagctacagcagcccgtgggggcccttaagcctgtcggcttcagcttccgatgatgccagccgccagtactccatgagctacagcggcggcatgctgctgcattccggcggcctgactctggcccccaacagcatcggcgataccgataccctggcgctggtgcacgctgcgggagccaaaggcgctcgtttaaccaatggagacgggcaaatcaacggttcgggatacgccatccagccctatttatcggcttaccgtgagaacaacgtcggcctcaatatcgacaccatggaagaggatgtggaggtaaaaaacaccagcacggtcgttgttccccgcagcggtgccgttgttcgggtcgattttgagaccgatgaagggcgctcgctgttacttgaactacagcgttccgacaacggatttatcccgctcggcgcggatgtgcaaaatgaacggggcaaatctatcggtaccgtcggacaggcgggaatggcctatatccgcggcgtcaccgagagcggaaagctgcgggttatctggggaagcggaagcgggaaccgttgcaccgtgaactaccggctctctgacggtggggaggataagaaaattggccttacccgtctgctaaataaccaacgttgccagatgtaa

SEQ ID NO: 177385 - DNA, 582 bp, Klebsiella oxytoca
atgaagataatgagtctgaaacaactttatctggtgggctgtagcggcattttgttcgccactgcgttaccggggcaggcagcctcgctggatgtcacctttaccgccaacctgcgcgaaactacctgcgatatggccattgagggcggcagcggtgatggcaaaaacaacaccatccctatcggtacgaatggcgttgtgagcctggataaaatcatcagcggcgacagcgcagcgcaggcaacctttaagttgaaaatcaccgaatgccccgaaagcctgcaatcgcttaaaaccaccatcagcgggacgaaatcagggtacaaagaaaccgtgataataaatggcgcgacaacggcggatgccgctgactctcttgggatcgccatcgccagagcgtcagcaaccgatgcgcctttcattattaatgccggtgcggacgatgggcgtctgatatggaccagccaggagataaaaaataaagaagtgccgctagtcgcgacgctggttgaaacgcaagcaggccagggcgctacggggacttttagcgcgctggctactttcaatttcacctatgaataa

SEQ ID NO: 177386 - DNA, 558 bp, Klebsiella oxytoca
atgaaaaaaatctcttttctgggcggtgctatcgtcacattactcttttctgcgccctctttcgccgcgataaccggaaccagtagcgtttcggctacttttacatccactattgaagccggtacctgtacggcgcagatccagaacgccagcggtcagcccgtaagtacgctcgatttcggcgatgtctttaaatctgacctggtcaaacaaagtcgcagcgaaccgttcaaagtggccttcaccgattgtgcaggcgtaaagtctgctaaatatcaggttattcccggaagcggcggcggctgctcgggccccagttctaacggcgactcgtttgccggaggcaactctacgggttttgaagtgtggcaaggagaatcaggaaccggaacgttactgagctgcaataccaaaccttcgcaaacgctcgccatcagcggcagttcgctcaacgtcgatttttcttcacgcatcgttatcgcaaaagacagaaaaatcgccaacgtgacagcgggtagcgtcagctcgcctgtgacgtttgttatcacctatcagtaa

SEQ ID NO: 177387 - DNA, 618 bp, Klebsiella oxytoca
atgtcattctgtatccgtattattgccccaatagggaaggcattgttggctatgggaatgactggcggtctgtgcatagcttcttgttttgctgatggaaataacgaaggactggacgtcactctgcaggccaatattgtggagaatacctgccagatttcactttccgataatgggacagtgcatttacccattgtttcccgcagttggttttataacaacgacggcacccctcgtttgcagcctgacgacgccgccagcggtacgctctttagcgtaaatgttgaaagctgctcaggcgatggcgcaacggtcaataccatgacctttagtttccaaccgcaaaacgggatctggcctgcggaaagccagcaggtatttattaatgaaacaccggcgacggcaggcggagcggaaaacgtgggaattgttattttttcttcccgcgataaccgtaacgttgtgaatagcgacggcagctccgctgtcgctttcgatgtctcaaaagcggaaagctatttaaccagctacgatttttatgcccgctatcagagcaccggtacggtaagcgctggaaaagtgaccagccacgttttagtggatgcgatatacaattaa

SEQ ID NO: 177388 - DNA, 1086 bp, Klebsiella oxytoca
atgctgaaaaaaacaaagccaggaaccctatgtatatccaccctcactacagtaatagctttatgcatcttattctgtagccagcccgcccaggcggctatagagtgccgttttaacagcggcaaaggtggtagcacaacgctggttaacggaagttataaagaaatcaggctacccacgccaaccagtggccaatctcatatgatagcccaatttgacacaaagctaaccccgacaattacaggagattgtagcgcaggtaatgatggcgaagacttgtgggctaaaacctcgccaaatataacaggacagggactgtataattttgcctcttttctcactaatattccaggcattgagtaccaggtgcgaataaatacaactaccggctccggaaacatgtttgcgcaaaacacacaagactttcaaataatttcttataacgatgggtatgaagataactgggatgaaaaaacatttaaagctacaatttacgtctacctaaaagagtcatttaatggcaatccgcaaaaattaacctatttaaaaccccaggcgggcttactaggctgggcgagtctcggcgttccctcggatagcaacaatcagccttatgccttttatgtcacggaagataccttctccattcctctggttttaccaacctgcagtgtgatggcgcttggcgacggaggtactaatgttgccatgggggattatttcatatcagacttaaaaaatggcaataccactaaagatgtgccttttaacattgatgtcagcgactgtaccagcgtggcaaaattcacgacaaaaatgaccaccctcaagacaacgggaagtggggcggatctgctgggtaataccctgaatacaaacgcggctaccggtattggcgtaaaaattctttacaataaaacgactcaacttattcccaacaacgccaattctaattacgtggtaagcgacaacaccattccaggcagcaaaactttcaactttatcgcccgtatggaaagagatggtaacccgcttgttgttggtcaatttaaagcaactgccgtttttaacatgacctatgactga

SEQ ID NO: 177389 - DNA, 144 bp, Klebsiella oxytoca
atgcagttgctcatcatgttcgctcaggagcaaaacctttgctactggcgccacgttgtatcggccgaatggttctggatcataggcgatatcacgctcagcttcttcggcaaggtaagccaggtattcttcgcgtgtctgtga

SEQ ID NO: 177390 - DNA, 414 bp, Klebsiella oxytoca
atggactgcattgctgtcaaagtccgtcagaatggcagagtaatcaacaaagccgtcttcctggcgctgggtatcaacatcgaaggccagaaagaattactgggtatgtggttggccgaaaatgaaggcgcaaagttctggctgagtatgctgacagagcttaaaaatcacggtcttcaggacatcctgattgcctgcgatgacggtctgaagggcttcccggatgcgataaacagcgtctacccgcaggctcacatccagctgtgcatcatccatatggtgcgtaacagcctgaaatacgtgtcctggaaggactacaaagccctcaccagcgggctaaaatctttatcaggccccgatcgaagaggcggcgctaatggcgctggatgcgttcacagaagcatgggaggctaa

SEQ ID NO: 177391 - DNA, 177 bp, Klebsiella oxytoca
atggcgctggatgcgttcacagaagcatgggaggctaagtatccccaaatcagcaaaagctggcgtgcacagtgggaaaacttgaacacgttcttcggctacccaccggatatccgcaaggccatctacaccacgaatgctatagaatcgctggacagcgtgatcgggcggcgataa

SEQ ID NO: 177392 - DNA, 366 bp, Klebsiella oxytoca
atgattacaaaagatgaatataaaaaaaggaaggaagcccttgaaggggcatcaatggttacgatttgggaaaatattcacccagctagcctgtcaggtaagataacgctgtcatttgatgaagagaaagagttatttctctggtttattgagcgtttaatgtatgaagggaaagtaaagcttggaaacggtggcaagttctggacgggaacaataaaagagcaggtctctaagtttagagaaagtttccctaattctcctgaagagatggagtgtggcgcttttaatgggtattggtttttatctgatacttgtcctgctgggcttgtctggattcacgaaaatggctatcaggattggacttag

SEQ ID NO: 177393 - DNA, 570 bp, Klebsiella oxytoca
ttgcgtttctttatcgccgcccggatactgcggttgcaggaagtcttaaagagtaacgaggcaaaagagcagacggcacgtatgattggcgcattgaccggggcactcattacgcacacacccgaaggggtatacagcggtgcagacagtgcccagaacgtctatcgctacaacatgacggaacatatgctgcagcagtatgccctggataatcagcgggatattctggccgcgagtaaaggagatgcggcggcggcgaagcgtgttcaggcccggagagaagcggcgattatcgtggcagcggccagcggtgggggtatggcactgacagcaggtggtatgactctgattggtgctgctcccgagctggtgctggctgcaaggctggttatcgccggttgtaaaacaaatcctgcgctctgcctgaatcaggcgggtatttatgcggcagatattgtggcaccagaagcacttatcggtaccggagccattaccacttccagtacgctgattatcgggaaaaccgaagatagcctgaagaagctttcgcagcagttggtgaaggtctag

SEQ ID NO: 177394 - DNA, 372 bp, Klebsiella oxytoca
atgaaatatttaactgaggaacaatatcaggatcgaaaagatttattgcgaggagcctctacaacgatgttatggaaaaatattgacccagagagtgtggatggtgcctataaactaacctatcaggaagaaaaagctctatatatctggttcatttcacgcttactgaaggatggtgacattaaactcgctcgctatggaaaatttctcccaggaagcattgaaaaacagatcgatgtttttgaaatggcatttcccaaaactgaggatgaaatggattgtgatgcatttgaaggattttggtttttaagtgaaaactgccccgcaggtattgtctggattcacgaaaatggctatcaggattggacttag

SEQ ID NO: 177395 - DNA, 216 bp, Klebsiella oxytoca
atgaaaacatggtcgctccatgacctgagaagaacaatagcgacacgcctgtccgagctcggcgcgccgctacatgttatagaaaaattgctcggccatcatatgtccggcgtcatggcgagatataacctgcatgattaccttgatgatcagcgccattggcttggggtatggcagactcatcttgaaaagctgattggtcagcctctggtttaa

SEQ ID NO: 177396 - DNA, 693 bp, Klebsiella oxytoca; identical to SEQ ID NO: 175045

SEQ ID NO: 177397 - DNA, 1140 bp, Klebsiella oxytoca
atgtcgatagcagacacgctaacaacagcagccgaagggtatttagaaaaattaagtgaggtcgtaaagacaccggattttagtatcacgttgggtggggtctccctgactgaactggccgaccgcatcacctcgctatctgttacagataacaacggttttgatgctgatcagctaactctgtcagtagatgactctgacggagtaacggatttacccccacgcggtgcggagctggcggtgtccatcggctggctgggtgaggcgttgatctacaaaggtctctacaccgttgacgaggtggggcatagcgggccgccggatgtaatcgacatcaccgcgcacagcgctgattttcgcgaagagatgaacgtcaggcgggaggtgtcctggcatgatgtgacggtagagcgggtggtatcggccatagcccggcgttatgacctgaagccgatgattagcgaggccctgatcgacattgagatcgaccatgcggatcagaccgaagagagcgacatgtcgtttttaacgcgcatggcggagatgttgggggccattgccaccgtgaaaaatggctgtctgctgtttatcctgcctgggggcggcgtcagtgcatccggtagggcgctgccatcggctgagataacccgtgccagcggagatcgtcacaggttccgcattgccgatcgtgatgcttacactggtgtgcgggcgtactggctggatcttaatttcggcaagaaaaaaccggtcaaggtcactaagcgcaaaacaaatactgccagaaaaaaggctgaggagaaaagcagccgcccggaaggggattacatggagggcgctgaaggtaacgtgtatgttttgcgtaaaacctatcagaacgaaacggcggccaggcgcgcagctgcggcaaaatggatacagctccagaaaggcgcggcacagttttcgataaccctggcgcgcggccgcgccgatttatatccgggtatgcatctgaacgtgtcgggctttaagtctgaaatcgatactcaggattggatcattgccagagcggaacatgtgatcggtgataacggatttatcacgaaaatggagcttgaggcgaaaataagcgactggattgcagaaactgaacagtag

SEQ ID NO: 177398 - DNA, 1173 bp, Klebsiella oxytoca
atgtctgaaactcgttttcacggcgtccgctctcgcgaaaataccgacctacagcaggcaatcaatgacattgattccagcgtgatcggtattgtcgcggttgctgatgacgccgatccggaaaccttcccgctcaatacgccggttctgctgactcgggtgcgtaacgtcctcggcaaggcaggtaaaaccgggtcactttacaaagctctcaaagccatttccgatcagtgcagcccgcgtgttgtgattgtccgggtggaagaggcttccgataacggcgccagtcaatctcaggccgttattggcggaacagatggcgacagctacacgggaatgtatgccctgctgacggcggaggccaaaaccggctatcgcccgcgcatcctggcggtgccggactacgacaccgaggaggtaacgtcacagctttgcgtgattgcccagaatctgcgggcttttgtttatgccggttgcaacggctgcgcgaccatggcggaggctatcgcttatcgcaaaaccttcgcttaccgcgagcttatgcttatctggccggactttatcgcttacaaccccctgacggatgataacgaaacgtttcccgccccggcttacgcctgcggcctgcgcgccgctattgataacagccagggctggcacaaatcactgtccaacgttgtggtgaataacgttctgggtatttcgaaagatgttttctgggcattgcaagcagaagacagcgacgcgaacgagctgaacaacaacgaaatcacaacgcttatcaagcgtgacggtttccgcttctggggtaaccgcaccacggacaccgaaacctacacttttgaggtgttcacccgtaccgcgcagatcctggcggacagcattgcggaggcgcaatttacctctgttgacagcccgctcactccggccaacgtgaaagatgtggtaagcggcatccgctctgctctcagcaaaaaagtcactgccggccagcttatcggcgctgactgctggtttgatacgctggacaacggcaccacggatttgcgccagggaaaactgattgtgcgctatagctacagcccggtcccaccgcttgaagatctgacgctataccagacctttactgatgatttttacgaaccggcgttcgcgtcgctcgggggtgaataa

SEQ ID NO: 177399 - DNA, 516 bp, Klebsiella oxytoca
atggctattcctcacaaactgcggctttttagctgctttgttaacggcgacaactatctgggaaaagtgacctctttcactcgccccaaactgtcacgaaaggtagaggactatcagggcggtggcatgctgggtgcggtcggtgttgatctcggccttgaggctggcgcgctggattccaccgttgtttttggcggcgtcattaaggctctgtttctcgaatacggagcagaaattgacggcacgcggctacgctttgcgggtgaatatttcactgatggcgaaagccagcttgtcgaggtggagctgcgcgggcgatttactgaactcgacggtggagactcaaaacagggagaagacacggaggaaagctacacatttaaatccacctactacaaattctccattgatgatcagcccattatcgaaatcgatctgctgaacttcatctacaaaaagaacggtcagaacatgttcccggaccgcatcacttccgccctgggtatgggcagttaa

SEQ ID NO: 177400 - DNA, 312 bp, Klebsiella oxytoca
atgaccagcaaaaatacttttaaattgactcgtccagttgtgcgtaaagatggcgagattagcgaagtggagatcaccggcgcaatcagtcaggcaggatccctgcgcggtctgaaccttatccgggttgccaatatggatgcggactccatagccacgctgttaacgcgagtcaccgcgcctgcgctgacgcaaaaagaaatcaacgaaatgcacatgctggactttatcgggctggcagagaagatggtccctttcttgaatccgccggagcctggaacgtcgagcgcggcggagacggagagcgagtaa

SEQ ID NO: 177401 - DNA, 2976 bp, Klebsiella oxytoca
atgaagaatcttgatatccgcgttgcattcagcgctatcgacagatttacccgccccgttaatgctgcccgccagagtgcgggcggcctttccgactccctcaaaaaaacacaatccaccctgaaaggcctcgataaaagctctgctacctttcagcgtatgactgccgccgtcagcaaaacagatcgctctatctcacgtgcgcgcactcgctttgaggggctgtcagagacacagcgcaaaaacgggacgctgacggaaaggcagcaaacactgatgacgaggctgggtgagcgcctcgacaggttgagcgcaaagcgcgtgacggaagtggcccgcctgcgcgagagcgcatcagcattgcgccagcatggcgtgatgctttccggtagtagcgccaccatcggcaacgcgatacgtcgcacagaacaatacaaccaatcccttgaacgggaaaaacggcaacttgctgctgtcactcaggctcgtaaacgttacgagggtgcgcagcagatggccgggaagttgcgctctggcggtgccatagcattaggtacagcaaccgctgccgggtacggtgccgggcgcttcctgtcgcctgcggttggttttgatgaggaaatgtcaaacgtccaggcgctaacgcggcttgataagggcgattcacagctggccgccttgcgcactcaggcaaaaaaactcggtgctgaaaccgccttcaccacacgtgacgccgccagcggccaggcctttctggcaatggcgggcttcacgccagatgctatccgtgccgcactgcccggcgtgctcaatatggcactagcgggcagtatggaactgggtgaaacggcagacatcggctcaaatattctttcacagttcgccctcgacgccggggaaatggaccgcgtcagcgatgtgctgacaggtacatttacccgtaccaacaccacgcttagcagcctcggcgagacaatgaaagttgtcgggccggtagccgcgggacttgggataagcctggaagaagccgcagctatgaccggcacgctggcgcgcgtgggtattcgcggtagcgaggccggtacggcaatgcgtcgctccctctcccgcctggcctcccccactacggcagccaaaaaggcacttaaagagctgggagtggaaactgccgacgcgagcggaaagatgcgacgtccgttcgatattcttctcgatctacaaaaacgcgtttcccgctttggcgaggtggatcaggtttcatttttcaaagatatcgccggagaagagggttttacgagcctccagtctttggtcaacggcgcaggtgatggctacctccagtcactctatgaacaaattgcagaagcacataaaaatcaggaggcgttcgccgtcgctaacaagaagaaagacaacctgggcggcgatttgaaggaactggacagcgcgtgggaggcgttccgcatttctgtagctgagacagtggacggcccattgcgcagactgacacaggggcttagccgggttattggcagtattcaaagctgggtagaagaaaaccccagactttcacgaacgttgttactcgccggtggtactgcactggcattgaccgcagtaattggcggtctgtcattagctgctggtctgctgatggggccgtttgcaaagctcaggctggggtttgcgctgctgtccggcgggagtggaatcggaggtacggtatcagcgttccgcatgatgagtgctgcgggcggtagctccctagcaaaaattagcggatggggtgctttactcagcggcctggtcggacgcctgggcgcattaaccagattgatggtaccactgcgcggcgcgttacttagcgccttttcctctccggggacggcgataagcgccctgtcaaaaggcgttggcgggctggcgctgcggctaaccgggatccctgctctgctcggtattgtgaaaggaggaattgcggcgctgggcggtggattgtcattgctgttgagcccaatcggtctactgggcgctgcgtttgtagcggctggggtgctgatctggaaatactgggggccaatcaaggccttctttagcggtttttttacaggcgtcatccaggggctagcgccagttcacaacgcattttcccggctggctcccgttttcggggtcattggagatggcgtcaaaaacgtctggaactggtttaaaaaagtattaacgcccgttgaggatagtcgtgaggcgctgaacaagtgcgccagcgccgggcggacctttggggaggttctggggaccgcgcttagcgtactgctttggccacttcagaagctaatggaaggcgttggctggttactggagaagctcgatctcattcccgacggcattgaaagagccaggctggaagcagccagactcagggctatcccggttatgtgggtatgggatgaaaaatccggacgcatggttaaaagggagtggcaatggtcaactgaaaagccagcaagcaaaggcagcacaccaccgcctaatgtgctcgggggtgactccggaacagagcgacggctgggccaaatcgcggataacaccaaaggccttttagatgaggaaaagcgcaaacgtatcgggccgggtgacattgtatttaaaaatctccctccagcctttgcggtgcgtggtgaatggcaggagtcgaggcttgtccgccagtctgtcagcactcgcccggctattgccgccggtgaaccattaataaaacagacaccagcatggcaaccggtacgccggaatcaaatggcccacacggcagttgcggcttctggtggtagtttttccggtgatattcacgtccatctgcatggcgtccagagcggcaatccgcgcgaactggcgcgacttgttggcgaggctgtccgcgcacaaattgataaacagcaacgcgctgcccgggggtcattccgggataacgattaa

SEQ ID NO: 177402 - DNA, 474 bp, Klebsiella oxytoca
atgatgatggtattcgggctttttgtatttgaactcaggacactgccctatcagcaattacagctgtctcgtaactggcggcacgtcaagaatgatcgtgtgggccgtagtgcaaaatggcagtacgttggcgcaggtgaaaatcaactgacactcggtgggttgctgtatcctgaaattaccggcggtaatctctcgttgggtgccgtctcgacaatggcctacactgggctggcttggccactcatagatggcgtcggatccatttatggaatgtatgtcatcacgggcttgcaggaaacgcatcaggagttcgatcgctacggcaaggcaaagaaaatagagttcacactctcgttgcagcgggttgatgaagatatcagggagaggctgaaaaatacctccattactgaactgatgccaaccctgaaggaaaggacagaaactgttttaaatacaatctatgagatgtaa

SEQ ID NO: 177403 - DNA, 2460 bp, Klebsiella oxytoca
atggatgtttacgaattaatagatatcgaagtaaaaaaaagcattttacactccagcgactatgatacaactgaactactaaggcttttagatattgtctatgattatatttatgagtgtcgagatgctgatctaattagaaagtccataaataaaatatcaaatatttttcattctgtgggtgataattctgttgtggttttgacgtttgtattaatgaataagttgagtgatcttaatggaattaaaatactgaaatattcaaagggtcatgtagaacctgatttggataagcttaaagagtttattaaaaatgaaataattgaaaataatggtgagtttgattttttcaatcacaagaaaggttcaacaaccctcggtaagaataagttgtacgcttctattttgtctatgttaagacataatctacaaagtaccattaaagatgatgtcgatataaattgttccttggttttattaataaacatgtggatattatcaccaaaagtagataggctttatgaattctacataattttttgctcttttttgcataaactacaccttagtcagaaaacacaaatggtaagggatttagcagacactgcacttctattaggttttcgagacaagaggttgaattattcattttatgtaagaatggctgtttattctcggcaatacaatgttattgactcgcttttgtcagcacagcttatgttgcacggatataattatattcaccaggaaaatgaaatttttctttcgaagtctcttctggagttggctataacgttacgtaacttccggctttaccctttcgttgaacgagttaaacaagcgcatgatcaattaaatattgaagatagatatgataaacatcagtttgatatggcaatatttaatatgaaattattaatggaggatgaagggctatttgaattggttgatgagtatctaaatgataatgatgttttggaattcgatgttgcttctggaataccatggctagttttattatcgaacttaaagagaagtgatatttcacggttcgaaaattatcagaatttaattcagtcactgagtagactcgaatcaaatgaggaaatttataataaccctgtggtagaggattataggaaggccatgtccagtacagtctctgaaaacaaagaagcagtacagaaaggcatttcaaacatacttcaatctcgaagctttactgacgtaaattatgagcttactatgctacagccagctgtcataaatctactcaaaaattcgatcgcatcagatgatatagaaggggttttaatcgcgcattctttgtcctctggtgcctcagggttcgatattagcactgaagaagcaacgacggagtttagccctctaaaaaaagtgttcaatatatcttcgccaacaatatttgatggttatttgagccatctatcaaaactgatagagcaatcagatatgtcagtttttatatgggtcggatgctgtgatgatttttgttatagcgtaagtctaaaagaaagacgattttctctatatataaacgattcttttaataaaaatgatttaagaaattgggaggctacgcaaacagaattacttgcttttaatgatcagcctaatctagagtccatattggattctaacatcaatcactgggagttcgagtctcgtgtaataattgaaagtctgccagctttgactgatatatatgaggctaggaatatagttttgtttcgtgatgttaatatgtcgcatttgccgtctaaccttataaaaacaaccgcgggaatattactcgctgatttggcccctttgcatactccctcaacagttgagtcgtatattaaaagcgagtcatttattgttgggtacaaaaatatcaagctttgggctcctgtcgaagagggtgatttcgcaatcaatattgcttatgataaaattcaatctttatttaatgatgcatctttgttaaaaataacttcgcttgattctagaattgaacttaatacagatatcaatatatttatttcgcatggaggaaaagatgggttatatggatttaaaagtatctcccctgctgaaggtaaatattttataaatgaaaatgatgtttttggacgaggtaaagtagctattttatttatatgtcattcaggaagctctaaatcatctatgtttgctacgaaaccagatgggctggttagtaaaattttagagttaggttatgaatgtgtattagctccagcttggagttataatgttattcttactggtatctggacaagaagcttcgtcgatgctttaaatgatggtaagaatctgtctgaatcaacatattatgctaataagtccgttaagtctgagtaccctggcgtgggagcctatgctgcgatgcacctatttggtaatgatggtttaattttagttaacgatcggagctga

SEQ ID NO: 177404 - DNA, 1098 bp, Klebsiella oxytoca
atggcaacaggactgacactaacgacggcgggcgccgctgaaatcgaggccgcgtatcaggcgggagaggttgtggatattaccgccgtactgatcggcgatggtggcggcgtgacattgccgaccgatcccgatgacctggcggcggtgacggcgctttttggtcagtttggccgtgaaacctttgattctgattcaagctatgaggggtttatcagcggtcagattgttatcaactgccgggattatccgggtaagacgctcagagaggcggggctggtcagtgctaagggtacgctcattgcttacggcgcatacccggcgacatacctcccggcgcaatctgattccatcatcaaagagatcattctgacgctggtgctgacgttgacccatacttcaagcgtgaagcttgttatcgatccggcgcttgccacacttacgcaggaaacgggcgataaacgctatctgcggcgagcacaaaatctttctgatttaaacgatcccaaagaggccaggaataatcttgaactgggtaactcagccccgcgggacgtgggcaccgagacgggaacggtagctgcgggggatgactcgcggatcaccggtgcacttcagaaagaaaataatctttccgatctgagcgatacatccgaagcccttaaggcgctgggactcaacagcgacggagcggcctataaggcaattgttgacgccattttttatgtcggaattgttgtctctggcgagcaaagtccagcggagcggttcccctggcagacatgggctgacttaagcgaaacctttgctgatagggttgtcagaattggttctcagtatggcgtgactggcggcagtaataaggtaaaacttgaagctgataacctaccaccgcactggcatcgttcgggtgaccgttctccaggcgcaacatgggatccaacaacaactcacggaacagataatcagaaaagcggaccgctggcacttactgatggaacttacattgattcgacaggccttaaagaaacagctaatttagcaatagatgtaactaacaaatatttaaccctttgtatgtggatacgtacagcgtaa

SEQ ID NO: 177405 - DNA, 216 bp, Klebsiella oxytoca
atgaaaactttcaatcaaattaaaagcctgatcggattttgccagaccgatgaatttttcctggaatacctgcaaatgctccaggctgcgggggttattcatcccgttgaaagcgatattgatagcgatagcaaaaccgtcagtgaagatttttatgatcgtcttgccagtgtgtatggcattgaagcagaggaaacactatggcaacaggactga

SEQ ID NO: 177406 - DNA, 3030 bp, Klebsiella oxytoca
atgaccgctaattatcccgccagcattctgccgcccaatgccaccgccgtggagcgggccattgacagggccagcgccgccgcactggcgcgcatacctgtgtatcttatccgttgggtgaaggatcccgacagctgcccgctggcgctcctgccgtggctggcgtgggaataccaggttgatacctggaatattaactggtcagaacaaaagaaacgcgatgcgatcaagcgcgcccactacatccaccgccatcgcggtacggtcgccgccgtccgtcatgccctggtggacagtccttttgggacggatattgttgaatggttcaaccagaacccgaaaggggatccgtatacttttcgcctgaacgtgtatcagaacgatttgccggtgacggaatacgaccagcaggatctgaaactggcggtgctgcgcgcaaggaatctgcgcagctggttttccgttcacgtatttggccgacttcagggaacctcatatgcggccggttacatgtacgccacggagaaaatcacgccgcgatttgtcccgttgcaggtgattttatcccgctacgagctgaatctggcccctggtgactcagaaacggtgacggtgaagatcctccctgaatatgctgaagataaaacctttacggtaacctcgtcggataaaacaatcgcggccgccagaatagtcaacggcgatattctggttacgggcgtgaagcggggcacctgttcggtcaccgtcacgacggctaacggcgtcagtgcagtgatcagtgtgaaagtggtcgcggtgatgaagttcatcacccgcatcgacaatgcaagccgtccgttgttctacgtgcgcatggatgaggatttcacgattgattatggcgacggaacagacagccgggaataccgttttgatgctgccagtgctgtgtacggctgggttattccgacgcgtgacgttgtggagggagaagagtacacaataacggttaagaacacagaaaccgccagtttccagcgcacgtcgggtaacgtttcagtgacgttgaaccctgtgcaggaaatcattcttttgacgggagacagggacaatcttgtttctttcgcgagtggcgcaactggccttcacaaggtccatgcaggggcttttgacgatctgccaaatatccagaaatgtacctccatttttcggggctgctcatcgctgactgaactgccagagggtttattcacgcggattactggtgtcacagatttctcagcggcattttatggctgcacggcactggctgctgttcctgatgggctgttcagcgaattatctcaggtgacgctattcacctcggtgtttgagaactgcacgcgcctgctgagtgctggcaaaaacacattccggggctgtgctgctgcgacgcatttcaccagtgcgttttcgggatgtgcatcccttatcgataccgggacgggcatttttgacgggtgtgtcagtggaaataacttcggttataccttcgatggatgccgtgcgctgacaacattgtcagcagatttattcagcgatgtacctggtggcgtctttacggcgattttcaggagctgcacggcgctgacgcagctaccgccgcgcctgttccgcaactgcctggaagctacgcatttcggcggggcattcagtggatgcacgcaactgctttctgtacctgatgaattctttaaggatttacccctggttaaccattttggaaccgttttttccggctgttcttcactggtaaaagcgggaaaagctgtgttttctggctgtgcgcttgcgcaaacattttcctccgctttttactattgtcgtgttctggaagaagtgggcgatgatatttttgaggggtgtgttagtgcaactacctttgccagtgtcttcaatagttgcacagcattaacggcgctaccgtcgtttgtggactgtaacaaggcaacgagctttgaccgggctttctatgcctgttcttctctgacggacgtcagagcagagtcctttgcaggtaaatcactggtcacgacgttctattacgcattcacccaatgtacatccctgaaaagcatcggggccggggcattccgcgactgtagttccctgactaacctgacctatacatttatgggctgcgcggcgctggtatcgctggccggggatatgtttgcaggatgcagcaaagtgacgaatgtcaccggcctgtttaatcagtgctcgggccttgccgtactgcctgaaaagctgttcagcgatctgacctctctgacggcaatggggagcaccttccaggactgcaccgctctgacagcgctgccgtccgatctgtttgcgggttgtgtcaacctgacttccctgacgctgacgttctctggctgtactgcactggcggtattacctgctgacttactgaaacataacaccctgctgatcagtgccggttctacgttctacggctgcgcggcactggtgaacattccgccgtcgctgtttgcatcgtgcccgcttatcaccgcattcggcgcaacgttccagaataccggcgtggtggaaataccggaaaatctgttcagtggtaatccgctggtgacggcctacggccagaccttcagaggatgtaaaaacctgcgttcagtgcctgccggtctttttgtcgccagtatcaacgccacgacattcaccagtgtgtttgccgagtgcgtcgcactggaagaggttggggccggtctgctgaataccgtacccgcgacgacaatcggctacctgtttgacggctgcccgcagctgagaactaacgtcagcacgatattcaacctcaacagttattcgacgattgtcaccacgactgccacattcaggggatgctctgcccttacgggtaaaggcctggtatttatgggcaaagtgccgaatgtcactgcgcattattacgcgttctatagctgcaccagcctggacgacttcgcagatttacccggtaactggataacaaataaattatga

SEQ ID NO: 177407 - DNA, 924 bp, Klebsiella oxytoca
gtgcaaacgtccgtcgatttatctcagatcccgcagcctgatatcgtcgaggtgcctgattttgaaacggtgctgactgatatccgggcgcttatcgtggcggccatgcctgcggaacttcaggcttctgtatctgctgcgctgctgctggaatctgaaccgatggccgcgctggctcaggccttcacctatcgcgagatcaatctgctgcaacgtatcaatgaagccgtgcgcgcggtgctgctttccagcgccctggaggcggatctcgatcaggtcgcggggaattttgacactgaacgcctgctgattaccgaagccaccgacgaggcggacgccgtatacgaaagcgatgaagagctgcgcgcccgcactctgctctcatgggcgcgcctgagcacggcaggtgcccgtaatgcctatcactattttgcactgggagctgatgcggatgtgctcgacgtgcgcgcctatggtccggagacgcacgatcaggaggggcgcgttttcctctatgtgctgtcacgcactggagatgggaccgccccgcaggctctgctcgataaagtcctggcagcagttaacccggaggacgtgcgcccgataacggattatgtggctgattatgtccgttccgccgtgattgtgaattatcaggtggttgctgacatttacgtcccttacggcgtggacaccgccacggtgctggaaaaagccaccgcagcactgaacgaatacaccgcctctgtgcatcttatcaacgccaccgctgcacggtcaggcatcgacggggcgctgcatcaggacggcgttgtcaccgtcgatttgcattcaccggccgccgacgtcgttgcgacgatgggcgaagcgcctcattgcacctctgtgaaaatcaatcttgtggtaatggactatgaccgctaa

SEQ ID NO: 177408 - DNA, 351 bp, Klebsiella oxytoca
atgacagccagttacaccgggatgaacccggaaggcaccggcgcgctgaccgatcacgatcagctctggcagtccgtgacaaaaatcctcaccacgccaacaggctcgcgtgtgatgcgccgagagtttggcagcgcgatccctgatttgctcgatgcgccgcagaacgccgtcacccgcatgcagctgatgggcgccgccgctatcgcgctggcgcagtgggagccgcggatcagcctgaccaccgtcaacgtggtgttttcagaaacaggcgcagtgaccgccgagctgagcgggaccatcacggaaaccatgacagaaaccagcaacaccatcaggttaaggagctag

SEQ ID NO: 177409 - DNA, 588 bp, Klebsiella oxytoca
atgaatgccgagctgatgcgcctgctggaaaacattctgcgccagggtgtggtggagcaaatcagcgctgacaagaaagcggtgcgcgttcgctctggcaggctgctgaccacttggatccgctggaatgtcacccgcgccggggcgttcagcatctggctgccgccctccataggggagcaggtctggatcggttgcccgggcggcaatactgaaaacgcgtttgttattggctctgcatacagcgcagataatccgccaacgggcagcagcctgctggaaatcatcatcaccgcaccggatggcgctcgcctgcattacgacgcagccgacgatgccggagcgctgtccgtgaccggcattaaaaccgcgcatatccaggcagaaacccgtgtcacgctggacgcgcccgaggtggtatgcacagaaaaacttaaagcgcgcactttcgaactgacccacggcggcacgatggccggtgatgtgactcacagcaacggtgcgttaacgtccaacggtgtccaggttgacagccacggtcatggcagggttcagaccggcggaagctggacggagggcacgcgatga

SEQ ID NO: 177410 - DNA, 636 bp, Klebsiella oxytoca
gtgagcgatcgcatgttcagcgagctggatcaagtctttcaggacatcctcgacggcgtcagcccggcggggcgcacccataccgcgcgcaaaattggcctggcagtgcgccgcagtcagcagcgccgcatcgcctcacagaaaaacccggacggtagcggctatgctgtgcgccgtcgtaaagtttaccgcacccagcaggggatcaagttcttctggaataacgaggtacgggcgctgaaaaactggcggggcgggcgcggtaaatatggccggacgatcacgggatttgatgagaagcgccgtgatatacgtaccttctaccgggccgatatcgagcggtatctggaaatcaaaacgcaatcagcgacgcagacggagacaaaaaaagcgccgatgtttacccgcctgcgcaccctgcgttttatgaaggtcagaccggacgcgggcggcgtcactgttggatttgacggcatcgctgcgcgcattgctcgtattcaccagtacggcctcaaagacgaagttggtccgggcgcttacgcacagtacccggtgcgcgaactgctgggcatgactccggcagacctgatcgctacggaaaacgccgctatcagcagtctgggcggcgcgtcatga

SEQ ID NO: 177411 - DNA, 468 bp, Klebsiella oxytoca
atgctgaagataaacacactccgcgccgccatagagaaagcaaacacctggtgccgggcgaacccggaagcctggacggtgtttgttgaagagggtggcattgaaacgaccggtgaaacgccgtctttcatgtaccgctattctctggtgctgttcgtcatgaactacgccgggagcattgacgacttcacgctgccgctgatggcctggctctggtttaatcagcccgatctgctgctgaacccggataaaaaccagcagattaaattcaccacgttgattaacagcgatgacaccgccgatcttatgtttgagctgccggtgcgtcagcgggtactggtgcagctggatgaaaacggggtgccgtatgccgagcatttgccggagccgcgcccgcgcgtgctggcaccccacgccgcaggctgggggctggtatttgaaggcatgcttcaggaggccggagcgtga

SEQ ID NO: 177412 - DNA, 345 bp, Klebsiella oxytoca
atgagggcgggcagcgtgattgtgatgcttgtccttttggctgctgtctggtggcagaccgaccagttgagcgaggcccggacccgcaacaagctgctgaccgaaacggcgaccggctacgaccaggttatccaggaagtgaaggcgaccgccatacaaacccataagttactggcagaggtaaaagtccgtgagcaacagcgtaatgcagaaggggagcgccgacgtgaagcaatgcaggccgcgttcaatggtgacacgtgcgctgttactcctgtgcctgacgctgtcagccgcagcctgcaaaaacgcaccgcccgcgccgatcattcagttggtccgtga

SEQ ID NO: 177413 - DNA, 546 bp, Klebsiella oxytoca
atgaagaacatcatcaaaaaatgttcgattgcgctgattgtggccctgggcatttcactggcacccggaagcgtcagaacgacgaaagaagggcagcagaaaattgccggttgggaagactgccgcagcacgccttattactgcacggcgggtgctctgaccattggtatcggctccacgggcggcgtggaaaaccgcgaatacagcaaccaggaaatagcgcggcgctggatcaacgatctgcaacgggcagaaaactgcatcaataacaatttccacggcgccgacatgccgcagctcacctttgaggccatgacggatgccgccctgaatctgggctgcaccgggctgatgtggttcaccgataaaaacggatgcaagcagagaaccacgatctggaagcatgctcaggccaggcaatggccgcagatgtgcaacaggctgactgattttgtcaatgcgggaggtaagcgctcccccggactggttaaccggcgcaacgattttaaagcctggtgcctgttgggcctgagtacgccgtcatga

SEQ ID NO: 177414 - DNA, 279 bp, Klebsiella oxytoca; identical to SEQ ID NO: 88479

SEQ ID NO: 177415 - DNA, 201 bp, Klebsiella oxytoca; identical to SEQ ID NO: 88480

SEQ ID NO: 177416 - DNA, 516 bp, Klebsiella oxytoca; identical to SEQ ID NO: 88481

SEQ ID NO: 177417 - DNA, 867 bp, Klebsiella oxytoca
atgctgacaccggcacaaagacactttcagaaggtcatggcagagaggcggggcatcagtgatgagcgtgacgcggagacgcgcaccgcgcatgagcagatcctctttcgcctgcatatgcataaatcctcgctgagccagatccagtcccgccaggcgaaggctgcggtaaaggccagcatccttcctgagtttcagggatggattgacggaacgatcgagggcgacagcggacgcgccgatccggttatcaccacgctgatggtgtgggcggtggactgctccgactatgcgctggcgctgcgcatcgggcgctatgtcgttaagcatggcctgagcatgcctgatgacaactatcgccgcccggcacccacggtgctgaccgaagaaatctgtaatcccattctgaacctcgccaccacggacgccggagccgatttgtcaggctttatcgccatgctggacgagctggcagaaattgtggctgacagtgacatgccggatgaggtccgcgcgaagctgtgcaaggtgagggcgttttgccgtcgcgacacggaagacgcggaaaccaaaggcgaagcgctgaaactgttccgggaagccatgagcctgaacccgggcgcaggcgtgaaacgggagatcgcctctctggtcagcgcgctgaagaaggcgccgcagaccagcacggcgagtggtgatgcggaagatgagccttcatccagcgatacagcggcaaccgaaacacccgcagcagaaaaaacaacacgaacgcgcaagcagacgaaaacggcggccggcacccaaaaagctacccgcaaaacggcggcaaaaaagacaacgaaaaccgccgtcaaagtaaacgcctga

SEQ ID NO: 177418 - DNA, 1035 bp, Klebsiella oxytoca
atggaaaacctgacccgcgaattatttgataagtacattgtgcgccaggcacatctgaacggtgtctcaccctcagccgttgccaatcgtttcagcgtcgatccgactatccagcaaaaactggaacaggccgccatggagtcggatgacttcatgaagctggttaaccactttggggttaaagagcaggaagggcagaaagtaaaaatcggcagtaaagggccgatggcgagcaccaataacagctcggacggcaccaaccgccgtaaccctgcaccgaaccataacaaagagccgcagaactaccactgccgcaaaaccaattatgactatgcgctttcgtatgcggaactggatgcgtgggccggtcatcctgaatttcagtcattaatcagtaatgcgatggctcgtcagttggggctggatcgacagatgattggctttaatggcacgcattactctgaaaactccgaccgcacgacctacccgttattgcaggattgcggcgttggctggctgcaaaagatccgcaatgaagcgccgcagcgcattatgccgggtatcacgctgacctcccgcgatgagaataacgcggtgattgcgtctggcacctacggcaatattgatgccgccgtgcttgatgcacgtcacagccttatggatccctggttccgccgcgctcccggcctggtgactgtgctctcgtccgatctgctgctgaaagtgaacctgccgaaagtgaacgcgctcagtcagaccaatcctaataccgaactactggccgcgcagctcattgtcagccaggaaaagatcggtggtctgccgacggtctttgttccaggcattcctgaagacgtggtgctcatcaccaacctgaaaaacctctctgtgtactaccagaaaggctccctgcgtcgctctatccgggaagagccgcactacaaccgcgtggcgacttaccagtccagcaatgatgactatgtcattgaagagtacggcatgattgccatgatcgacggcgtgacattcgcctga

SEQ ID NO: 177419 - DNA, 840 bp, Klebsiella oxytoca
atggccagcacgactaaacccgcccgcaaaaagtttcgcgttgcggtttccggcgccaccgttgacgggcgcgagatccagccgcagcacctccgcgatgcggcggcgagctacaacccggccgtttacggcgcccgcgtgaacgtggagcactatctctccatgcttcctgacagcaattttggcgccatgggggatgttgttgctttaagcgcggaggatatcaccgaagggccgctggccggtcgtacggcgctctatgccgagatcgacgcgtcggcacgaatgaagcagctcaccgatgaaggaaaaaaaatctattccagtattgagctgcatccgcagtttgcccttaacggtaaggcgtatgtggtcggcctggcgatgacggacaccccggcaagtctgggaactgagcgccttaaattcgctgcgcagcagcgcacgcaggtgatggcgttcaataaccagcagatcgaggcgccgctgttctctgatgcgcttgaagctgaagtgatcgaactggccgcccagcgtagcgaggagggcgtcaactggttcaaccgcgtgatgggcatccttggtaaaggacagaaaaccgacgatcagcgtttcagtcagttgcatcaggttgttgaagccgttgcacaatctcaggccgatcagattgaccggttcagtgctctggagcaggaacgccagcaggacaaaaacaccattcagcaactgaccagcgaacttaacgagctgcgcggtcagcttcagctccagcccgcagaaaattacagcgcacgaccggcggcaaccggcaacagcagcgcgcagcttgcagaattctaa

SEQ ID NO: 177420 - DNA, 1728 bp, Klebsiella oxytoca
atgattcaggatgcgtttattcgattgagggcaaagcagctctactggcagggttacccgcccgccgaaatttcgcgactcatgggtatcaactcaaacacggtttattcgtggaaaaagcgcgacgcatgggatgacacaacgcccatcaaacgggtgacgcaatccattgatacccgtctctgccagctgagcgcgaaagacaataaaaccagtggcgatttcaaagagattgatctgttaacccggcagttgaaaaagctggataccgggcaggcctccattaccaccggcgttaaaaaaaccagtcgtcgcaagaagaaaaatcacttctccgaggagcagatcgaggcattgcgctcaaaaattctcgactctctcgcatggcaccagcgcggctggtatgagcaacgcgatcagcgtaaccggatgatcctcaaatcgcggcagattggggcaacctggtactttgcccgcgaggcactgttgggcgcactcaggacagacattgaccacagctatcagcgcaaccaaatctttctgtcagcgtcacgaaagcaggcgcttcagttccgcaactttatccgtgaagcggctgaagaggtggacgtcgaacttaagggcggcgaccaaattacgctgtcaaacggtgcgcaactgcattttctcgggacgtcggcggcgacggcgcagtcgtacaccggtcacctgcgatttgatgagtttttctggaccggtaactttatcaacctgcgcaaggttgccggagccatggcaacgcttaaaggcttaacgcgcacgtacttctccacgccatcgagtgaaagccatgaagcctatcagttctggaccggggaccggtggaatgcgaaacggcctaaagcgcagcgcgttgactttgacgtgtcatggaagaaaacccatagcggcttgctttacccggataaaacgtggcggcagatcgtcactatccaggacgcagttaacaacgggtggatgcataccattattgatgagatcagggatgagaacagccctgatgagttcgaaaacctatacatgtgcgagttcgtcaaagacggcgaaagcgcatttaacctcagccagctgttagcctgcggtgttgatggttatgacgactggcccgactggaaaccgttcgccggccgccccatgggtcagcgcgaggtatggctgggttatgatgccaacggcggcagcggcaatggtgatgccggtgctctgtccgtaacggtccctccccttgtggctggcggcaggtttcgcacggttgaattgaagcaactgcgagggctggagtttgagcagcaggcggcggtcatcaaagaggctgccgagcgctacaacgtcactcacatcgccatcgacggacaaggcgtcggggaggcggtctggcagattgttaaaaattggttcccggcggctatttgctaccagatgagcctctcttccaagcgcgcccttgtcctcaaaatgttgcaggtcatccgcgccggccgctgggaatatgaccgcagcgagcagggcctggtcagagcctttaacgctgttcgcaaagttgttacgcccggcggtttcatcacttacgaaacggaccgatcgcgcggcgtaagccatggtgatatggcgtgggcaaccatgctttcgattattaatgaaccgttgggccaggaaagtggcggcggtggtttcgcaatgggatggtaa

SEQ ID NO: 177421 - DNA, 1062 bp, Klebsiella oxytoca
atggtaactttgaaaaagaaatacggtaaaaagccgatagccagcaccgccggccctgacattgcagagtcactgaaggccgatcccgcgttgacagcgttcagctttgacggcccttatcccgtgcgggatatggccgatttgctggacaatctctattgcatggacaacgggcgatactatgagacgccggtggatttttacggactgtctaaagctccgcgccagagcgcctggcatgagtcggcgttgtacttcaaacgtaatgtgctcaccggctgttttatcccgcacaagctgctcaatcgccagaccttttccgcgtttgcgctggactggttcacgtttggcaatgcctatctcgaattgccgcgtaatcgcttgggcggcccgcttcccttcaaacactctcttgcaaagtacacccggcgcgggagcacagatctcgatcaatactggtttatccggcgctggaaagaagagcacacgttcaaatcaggaacggtttgtcacgttctgaaccctgatatcaatcaggaggtctacggcatgccggaatatatggcagcactgctggccgccagcctggcccactccgctgacatgttccgtaagctgtactacgacaacggatcgcatgctggatgcattgtctatattggcgccggacaggttgacgataaaagcatgaaggcagtcaaagagacgttgaccggtgcgcgcggtaaaggcgcatttaaaaacctgctgctgcatgcgccaggcggcggcaaagacggcgtgcaaatcctccccttccagcagatcacggcgaaagatgagtttatcaacattaagaacgccacacgtgacgacatactcgcagcgcaccgtatcccgccgcagctcatgggcgccatgccagagggaaacggatcatttggggatatcgagaaagccgcccgggtctacgctatcaacgaactgacacccgtaatggaggcgctgaaagtggtcaatgagtggatcggagaagaagtgatccgctttaacccttacgcgttgcttacccctcagaaataa

SEQ ID NO: 177422 - DNA, 1365 bp, Klebsiella oxytoca
atgaatataactatagacactcaatgtttcgatactggattcagtattgaagctgatatatttaaacgcaaaccactattcgagcaaatgaaaagattaatactcaatgcacctgattcaaatttagtttttgctttggatgacatatggggcagtgggaaaacatcatttgtcaaaatgatgcaatcagaattcaaaataaatcatagtgatgagatagatgttatatatttcgattcatttgaaaatgactatcaatccgatccatttatttcgatatcatctgcgctttatgcattattaaaatcaaaaggagtatgtgctgaaaacatagcatctaagattctccaaaccgcaacaagaataggcgcaagagcattaagcggaagcgcaaaaattgcccttagcactttaactgcaggagtcgtgaatggaaatgtaatcgataaatctgctgaagtaatcagtaatactattagtggtgagattgagtcttttgtcgaagataaaataaaatcaatggagcaagaaaaaaaagcaataattgattttaaagattcactagaacaaatatatgcaaatacaggcagaaagacactaattataattgatgagctggaccgtgctcgcccagattattcattagaattattagaaaaaataaaacatcttttttcagtgaaaggcttggtattcttactggttatgaatcgagaacaatttgaaaaagggattgcatatcgatatggtgacattaacactaacttatatttaaataaatttatacattattggtttaccttacccaaggttagtatgcatgatctacctcatgaaagaaaatatggaagaacaacaatagatgaatatattaatagacttataaagaaaaatagtagccttggcattagctataatggtgcgtttgcaatattaatatctcttttgattgaaataaatagttgctctttacgtgaggccgagcgttgcatttctacattgctggtagtagataatcatacaagaattgcaaataataacgacacatatcatatgatatcacttgctcttgtgtgctttttaaaagtcgtaaatccatctttactcaaacagattttgaaaaaagagtcaaatccagataacttaatggaagctcttaatttgaatcaaaatgatatgctaaacaacaataacataaaattattgaaagatatattaacttattattatctcagctatgaagaattagataaacttagaaaagaaaataatgatctagtaaatagaatcgaaggagagtatcgattcgaagctaattacattcaagacatttccaaatcccttaacaacttgaccattcaataa

SEQ ID NO: 177423 - DNA, 1689 bp, Klebsiella oxytoca
atgagcataattcatgtaaatcaaattggtagtaaaataaacaatttattttcagatagaattgacaaaggtgatttaaatcctcaagataaagacgttcaaactaaaattctttcaagatgtctagctgcttatgccatttattgtgttggtgatacatctttagatgatgccgctattgctgttgttgatggttctgacgataatggtattgatgcgatacattattcaccatccaataaaagaatgataatagttcaatccaagtggaaaaaggatggctcaggtgagcctgacaacggagatatgagaaaatttaaagatggagttttagatcttataaattttgaattggataaatttaataaaaaaattaatagcaaaaaacaaatgatcgaaacagcattggctgagtttgacacaaaatttgatctggtattaattcatactggcgcaaattctttaagtaagcataatcaacaagtgatagactcgatcttaaatgaattaaatgatgcaggggatggtacaagcgaggatgttgtaagttttcaccatctaaatcaagcgattatacatagtggactcgcgtcagggatggatggcgaaccaatagatcttgaaataggtctttcacaatgggggagaatggaagaacctcatcaagggtattttggtatagtagctggtgaagaggttgctaattggtgggggaaaaaaggaaagcgattatttgcaaaaaatatccggcaaatgttaggtaacacagaagttaatgaagaagtgagaaaaacaattgaggagcaaccggagaatttctggtattacaacaatgggataactatcgttgctgagtcaattaaaaaatcaatggtaggcggtaatagcagagatatagggtctttcaaagctagcaatattagcattgttaacggtgcacaaactgtgagtgttataggtaaatatgcacaagatggaggcgcaaatcttgcgaaactacggttgccgatacgtttaatttcactggagggtgcacctgaggattttggcgcatctgtaactaaaactaacaaccgacaaaacaaaattgaaagccgtgattttgtatctttggatgaagaacagttaaggttaaagagagaattatcacttgaggcaattgaatacaatattgtccgaagtgaaaatataaaaacatctgcatcaataattgatttatcagaagctacagtggcgttggcatgtgcatcgactcaagttggacttgctgttcaggctaaaagagaaattggccgattctatgataatttaaataaatctccttataagacaatatttaatcctcaaactaatggaatttatttacggaatgtagtcttttccttgaggaaaatagatgagatcattagcttactggtttctgaattgccaaaaaaatcaggtaaagagtatggagttttagttcatggcaataggatgcttgcttttttagtgtttaggaaaaacgtaatgcataaaaatgcaaacagctttgatttcgatattaatgctgtcaactggcttaatgatacgaaagtagtacttgaaaaactcatgaatgaaattgagagtaattataaagataagtttcttgcaactctgtttaaaaatgcaagtatatgtaaggccatttctgatagcatagcatag

SEQ ID NO: 177424 - DNA, 2181 bp, Klebsiella oxytoca
atgacaagcccgagttttgcctgggactggaatgtcccgttaaaggccataaatccatatgctctggctaagccagcgagaaggccctctgcgctggccgtttggattgctctttatgagcaggataaaagcgatcaacgcgagcaggctgaagcaatgagtcgtgcagcagaagagtacctcttttctgttgcacattgcgatccctggcgctatgacgaactgaatgatgcgctgattgagaaagctaagcgacatgcggaactccatcgtgttgatcctcttaccctgattcgtgatgacgtcgccagcctaccaggtttcctgcgcaagccgctggaatcaaggattaagtatttggaaaaatcagaagatccgcgccatttacctacctatctgaatgaggtcattactccctcattagtgagaattgacaaggtccgtgctaaccaggcgtcgctgtcattccaggccatggctggcagggatagccttgatcaactccttcgacttgctgaactgaatcagcgggaggttaagcggctttcaacgctggtcgcagcgcacattgatatgatttttatccagctttgcgacgagatgctgaccgatgaattagcttctcctattgtaatactggagctctatcgccgtgtggcggccgaagtgtcacgcctcgatgttatcccgccgggttatgaagcgctccgcagcaaacataatcgccgcaacccgattaactacgagttgataccgggcgcgcttgctcgtatgcgttgtgctgactggtggcaacgtaagctgtggcaactccgcaacgaatggcgggaagagttgcttcgggcagcgtgccttgttcatcggcacgcatcaccttatgtcagccatgacattctgttgcagaagcgggaacaacgccgtaaggcgatggattttttccgcaaccatgatctgattaacgaagatggcgacacgctcagcatggaggatgtggtgcttgcaagtgccagcaatccagcgcaccgtcgtaatgagatgatggcctgtgtcaaaggcctggaattgatagctgaaatgcgtggcgactgcgccatgttctataccatcacctgtccttctaagtaccacgccacactgatgaacgggaagcctaaccctacatgggatcactcgacagttaggaaaagcagcgactatctggttgatacgtttgcggcattccgtaaggcaatgcataaaaaagagctgcgctggtacggcgtccgcgtagccgaaccacatcacgatggcactgtgcactggcatttattgtgttttatgcgcaaaaaacatcgacgtgcaatcacagagctgctgcgtcgtttcgctatccgagaagatcgcgccgaacttggcaataacactggcgctcgtttcaagtcaaagctgatagacccgcgaaaggggactccggccagttatattgcaaagtacgtcagtaaaaacatcgatgggcgtgggctgggtgacaccgtcagcaaggagacgggtaaatcactacgtgatagtgccgagcacgtcactgcgtgggcatcgttgcaccgtgttcaacaatttcgtttttttgggattccaggccgccaggcgtaccgcgagttacgattgttcgcatcgcaggcaactcgtgcaatgaaaaccagtaaaccgggtgctccggtacttatggatccaaaactggacgctgtgcttgctgctgctgatgttggctgttttgccacttacatcatgaagcagggcggtgtacttgttccccgcaaaaattacctcattcataccgcctacgagccgacagtcgaaccaggaacctatggcgatcacgggattcgtatttatggcatttggtcgccaatcaccggtaaggaaaacaaaatatgcacgcatgtccatacctggaagatggtgaagaaggctcccgctaactcaggcgctgacagcgccgcccagggcgaccccgtcgccccttggactcgtggcaataactgtctcctatccttaaaagagaaggaaaaagggacatggaatgatagtgggctatcgcaacaacaacttcaggatgaagagtcaggtccgctagaggtgggtagtttgtctattaaagaaagaaaagttgttttttaccgacttcatgaaaatgtagagtaa

SEQ ID NO: 177425 - DNA, 1017 bp, Klebsiella oxytoca
atgtctctaatcaaatacccaaaaatcttgtttcaaaaggacacatacagcgttttatctgtttctgggggaaaagatagccttgcaacatggttacttgctgttgaagcaggaattaaccatagcgttgtatttgctgatactggacacgaacatcctcagaccatggagtatctcgattatctcgaaacgaaactagggccggttgttcgcgttaaagccgatttctctgatcgtatcatgaaaaaaagggagtttattagaacagcttggccgatttcactggtaaatgagtgcggacttacagaggagcaagcggattatacagtagagcgagcgcttaaaattttgtggcccactggaattccttttctggatctctgtatgtggaaagggcgtttcccttcgactcgggtgcgtttttgtacttttgagttgaagcatgcccctatcaagaaccaggttattgatccgctacttgataagtatgacaacgtaattagttggcaaggggtacgagcacaagagtctccagcaagggctgatttacctgagtgggaagaagatgcagatgaaagacccggcttatgtatttatcgtccgatccataagtggctgcatgatgatgtttttgctattgcacgccgccatggcatcaagccgaaccccttatatttacaaggatgcgggagagttggatgcatgccatgcatccatgtcactaagggggagttagcagaaattttcgctcgctggcccggagaaatctcgcgagtagctgaatgggaaaaacttgtcgctgctgtaagccgtcgcggtaactcaacattttttccgtctacaaacgatccccacaaatcggaacgtcgaattgaatttatcactctagagaagtacgggattgagtcatatcgcgactgggccatgacgacaagaggggggcgtcaattcgatttattggctggcatgaataatggcgtcagctgttcaagcatctatgcgggcgtatgtgaatga

SEQ ID NO: 177426 - DNA, 228 bp, Klebsiella oxytoca
atgcattcgcatttatctgttgtttgtaaagcgccgttaccggtctgtaagagggcgcttgccgccctgaattgctttgctcgtggacagcgtaattacacccgcgtcaagccacacgcctatctcgtgatccgcattggcctccgttggcgtttgctaagtaaaaacggtggcaagcagtggcgactgatgacccatgaaacctataaccaggaatgtcgaaaatga

SEQ ID NO: 177427 - DNA, 567 bp, Klebsiella oxytoca
atgaatcacttaatgatcgatttgattaacgttaataaggaaccgtcatcacctctgtgcgccattgaagctgtgttttttgaaccctcaacagggcagatcggaaaggttttttattcttcgatagacattcgtaaatctgaaagcttgaagggccgtatcagcattagtacggcattcgattggatgaaaaaagactctcactggcgcgccgaagtgatgagcgcaaccgaagctgaagaagatgtactttgcagccttgctgctttcatcgccgataacacctatccccggaacgcggcgttattcgtatggttcaaagataccccggaaaaactggtttcacttcgctatgccgtggatcgctcagaggtgtcaggcatttttcctgaaggcacaaaataccgctgcattcgttcacttctcgaccttgctgcggccacagactatgcgcctcatgcgagaagcgctctggcacgttacacgctcactgacgcgcgatatcaagcggagcaagtctgcgaaatctggcagcgattgacctctccacacattggatcgctgtga

SEQ ID NO: 177428 - DNA, 225 bp, Klebsiella oxytoca
atgtcggttacgtcaataaagccggaaggtggaataagcgatccagagtttatgggaatcagcaccaatgcgcgcaaaggcgagcgcgcccacttactcggattgctgcgcattcgtatgggcctgctgaaagagcaaggccttacccccgaagagatttattcagcacttgagcagtggatagccaaccacgaaacaatcaccagcgagggcagtagaccatga

SEQ ID NO: 177429 - DNA, 273 bp, Klebsiella oxytoca
atgttcaccgaagaaaaaacatcttgggaacaggaaatgctgattcgagaagcagtggaaattgccgagcaggggttcactgtacatctaaaaaatggtgctcgtatcaccattagctcaaaaagcccgtctaaagatttaataatttacgggctcgaaaaagcaattcgcggtaatcacgatcgcgcgcgaatgacatttattgatttcatgtattactggcatgaaaggatatttaagcagattaaaagaaaaccgcgtccaaacaattaa

SEQ ID NO: 177430 - DNA, 378 bp, Klebsiella oxytoca
atgaaactcgaatatgcagaaaaaattaactcgcttttacaatgcttccatttcaataaagagtttctggaatggaatcatgattactctctccagcttttacgccatggcgtatcccacctttatcatttcgcaatgcttcaaggcgagaatgatgaatgcactcttgaagaactccgcaacatcattatttccgtgaccgatggtgatatccctaaaccatacgacctgctatcgctggacgctgagcaactgaagaaggctatgaagtttgttcagccgcaggaggtaaccgtagaggttacaccggagatcttggaacacctgaaactgggagctagagcctcctggcggctggagccccctcgctttaactga

SEQ ID NO: 177431 - DNA, 219 bp, Klebsiella oxytoca
atgaagagtggggttggtaagggggtgttgcagttgaatagcaaaaccagtctttactgtggctttactattctgaaactcccacgcaaaaaaccgtacaaccgccagcgctatcaaattacgcacacaggccattattacggcattgactttgctttatcagaagcatgccgaacgattgacagaatcatgagtaaaaagcgcttcactgctttttaa

SEQ ID NO: 177432 - DNA, 216 bp, Klebsiella oxytoca
atgtctagtaatgaagttcgtaaggatccctatgttatcgccaagcaatatggttacgtcgaaggcgaatctggtatggcttttattggctttggcttcccgcaaaaagtctccattccatccaccgaccgtttctttgttgggctcgccttggatgagatcgaagagttggccgccattctgcaagatcacgtcaacagaaatcgtggcaagtaa

SEQ ID NO: 177433 - DNA, 270 bp, Klebsiella oxytoca
atgagcaaacagcttgtaagtagcacggatgctgtgccttaccaggagttcgccagactcatcgggaaaacccctgctgcggtgaagggcatgatcgaaaaagggaagttacctgtaatcgagatgaccgatccccagtcaacttctggccgtgcgggcgagtactgggtttaccttccagcctggaacaacggcatgaaactggcctacgaaagtcgtccgaaggagatcagggaagggtggttgatgtggcttggactgggagaatga

SEQ ID NO: 177434 - DNA, 153 bp, Klebsiella oxytoca
atgaaaatccttcagcacccccgctttatcaaatacacactgtggtttatgaccgatcaggtgtcccctgaatccggtcaaatcgcaccggccctcgcacactttgggcaagacttaacaacctcgcagcactcagaccaaaagactggttaa

SEQ ID NO: 177435 - DNA, 984 bp, Klebsiella oxytoca
atgactattaagaaactcgatgatggtcgatatgaagtggacatcaggcctgctggtcgcaatggaaagcgtatccgcaggaagtttgataagaaaagtgaagcggtagctttcgagaagcatacccagttcaaccaccacaccaaagaatggttgtcaaaaccgacggataagcggcatctgtctgaactgatacagctttggtggaatttgaaaggtaagcatgaggagcacggtcggataaaccgcaacaagttagatattttttgcaggattaccgacgatccttgtgcttttcagattacgaaagcgctgattagtcagtattacgcggcaagaagaagtcagggcattaaagcttctaccattaaccgagacctaaatagcatcagtggcatgttcacagcgcttatcgaggccgagttgttttcgggtgaacatccgatcagagggcggaagaagttgaaagaagaagtccccgaaactggctatctgacagaggacgaaatcaagcacttgctctttaaactggatggtgacaacaagaagatagctgttctctgtttaagcactggtgctcgctggggagaagcggctcgactcaaggcggaacacatcatacagaaccgtgtgacgttcgttaaaaccaagagtaacaagcagcggactgttccagtttcagcggaagtggcaaaactcatagcggatggtaagcgagggttgttatttggtaaggcgtcatattctgacttcaggcagatactcagggaggtaaaacctgatcttccgaccggccaggcgacgcatgcactacgccacagtttcgcgacgcactttatgattaatgggggaagcatcattacgttacagaggatccttgggcatgcgcgaattgagcaaactatggcctacgctcactttgcaccggaatatcttcaggacgcgatctcgcttaacccgctgagaggtagcgccgatgcgtga

SEQ ID NO: 177436 - DNA, 1014 bp, Klebsiella oxytoca; identical to SEQ ID NO: 175041

SEQ ID NO: 177437 - DNA, 879 bp, Klebsiella oxytoca
atggcgctgtatgtgtcgccgattgtctccgggaaagtgattcgctctcgtggcggcagcacgtcagaatttacacctggctatgtgaagccgaaacacgaagttaacccacaaatgactcttcgtcgcctgcctgatgaagatccacagaatctggcagatcctgcttatcgccgtcgccgcatcattcttcagaatatgaaagatgaggagctggcgattgcacaggtcgaagagaagcaagcaatcgaagctgtgctttatgggaaatacaccatgagcggggaagcatttgagccagttgaagtggatatggggcgcagtgccagcaataacattatccaggcgggggcggcagcatggtctggccgtgataaaaaaacctatgatccgaccgatgacattgaagcctatgcgcttaacgccagcggtacaatcaacattatcgtgttcgatccgaagggctgggcactgttccgttctttcgatgccgttaaggagaagctggatactcgccgcggctcgaattctgaactggaaacggccctgaaagacctgggtaaagccgtttcttataagggtatgtacggcgatgtcgccattgtggtttatgccggtcagctcgttgaaaatgatgtcaaaaaaaatgctctgccggatctgtctatggtactgggtaacacccaggcccgcggtctgcgcacctatggttgcatccttgatgcagacgcccagcgcgaaggtattaacgcttcaactcgctacccaaaaaactgggttcagtcaggagaccctgcacgcgaattcaccatgattcagtcagcacccctgatgttgctggctgatccggatgagttcgtctccgtaaaactggcctga

SEQ ID NO: 177438 - DNA, 420 bp, Klebsiella oxytoca
atgaccaaagaagagttaattgctcgcctgaaagagctgggcagcatgctgaaccgtgagatcagtctgaccggatcgaaagaagagctggcgctgcgcattgcagagctggaagaggagcttggggatgatatcgacgatggtggcgatagcaatgaaacgggggccggaaatacggcatccggaagtgaggagaaggatggcgatgcgcagggtaacgcattaacgccggcgccccaggaaactaagtctgcttcagatgacctggtcgcggtgaaaacgcttaggacgttacacctcgaagcgctgcacgcggtaaagaatgaacaggtgagtcttgttttgccgggtactaccgttcgtgtcagcgccggggatgcagaagagctgattacacgggggctggctgtcgaactgtag

SEQ ID NO: 177439 - DNA, 354 bp, Klebsiella oxytoca
atgaccgatttcgataatgttttcgatgctgctatatcgcgggctgatgaaacgatccgctcaacaatggggacggtggcgctaatcacctcgggtgggctttccgggctgagtatttccggtgtctttgatgatccagaaaatattggctatgcggttcctggtgtgagagtggagggcacaagcccttcttttttcgtgaaatcgacagatgccagcgagttacagcggctggataccctcaccattaacggaatctcctactggattgacaggattggtccggacgattgcggatcctgccatctctggctgggcaacgggcagccccccgcaggaaaccgccgccgatag

SEQ ID NO: 177440 - DNA, 585 bp, Klebsiella oxytoca
atgggtattaagggtctggaacaagtcattgcaaacctcaatagccttgatcgcaacatggtgcctaatgccagcgcctgggctatcaatcgggtcgccagaacagcagtcaccgctgcaacccgaaaagtagctaaggaaaccatcgcaggggataaccgagtgaaaggcctcccggtcaaactggttaaacagagggtaagggtcagcaaagcatcttcaaatggccgaatgaacgccaggataaaggttaatcgggggaacttgccggcgatcaaactgggcgctgcccaggtccgcttaaccagaaagaaaggggcgcttctacggagagggagtgtcctgaagatcggaaactatcttttcagggacgctttcattcagcaattagccaacggtcgctggcatgtcatgaagcgtattgaaggtaaaaatcgctaccccatcgatgttttgaaaatcccactggctgcgccgcttacaactgctttcgaagcggagaagaaacgcatgcttgatgtggagatgccaaagcaactggccgctgcgctcaagcaacaactgaggttacacctgaaacgatga

SEQ ID NO: 177441 - DNA, 399 bp, Klebsiella oxytoca
atgaaacataccgaaatacgccaggccgtgatcgatggcctggaaagcgtgatagggaatagcgccattttttttgatggtcgtccagctgtcattgaggaagaagattttcctgctgtggcggtttatctgacggatgccgaatacaccggggaggagctggatgctgatacctggcaggccactctacatattgaagttttccttcctgcccaggtgcctgactccgaacttgatgagtggatggaaacccgggtttacccggcaatatcagatatctccgagctgaatggactgattaccgtgatggtacagcagggttacgaataccagagggatgacagcctcgggctctggagctccgcggatatgaaatattcaattacttatgacatgtga

SEQ ID NO: 177442 - DNA, 744 bp, Klebsiella oxytoca
atgccaacacctaatccacttgctccggtaaaaggggcgggaacgacactctggctgtacaccgggaccggggatgcttatgcgaaccctttgtcagatgctgactggcagcgcctggcaaaaattaaggaactgacgccgggcgaaatgaccgcagaatcttatgatgacacataccttgacgatgaagatgcagactggaccgcgactgcgcagggggcaaaatcggcaggggatacgtcattaacgctggcctggaagccgggagaagaagggcaaaaatcgctggtggcctggtttgtcgatggctctgtacgggcgtacaaaattaagtacccgaatggcaccgtggatgtattcaaagggtggtgcagtagcctgggtaaagccatccccgcgaaggaagtgatcacgcgaaccgccaaaatcaccaataccgggaaaccggagctggcggaagaaagtggcaacccgccgatcgcggtgaccagcatcaaactcgacaaggccacggccagcgtggccgtcggcgcaaccacaacgctaaatgtcaccttcctgcctgccagcgcgtcggaacagtctttccgtgcggcgacctcggatagcgcgaaggcgactgtggccgtgagtggtaaatctctgatcgtcaccggcgtggcggctggcgctgccgacattattgtcctgagcaatgacggtaattttgtggcgacctgcaaaaccaccgtgacggcttcctga

SEQ ID NO: 177443 - DNA, 429 bp, Klebsiella oxytoca
atgagcatgtttttgaaaaaagacgaatttacccataacggcgctacggtgccgatcacagaattgtcggcactgcagcgcattacttatctcgaatatctggccgcagaagaaaaaaccttatccgccatttctgatgacgtggatgaccagacaatgtccgccgggctggtcagcatgagtattcgcgcaggcgcacgccttattgcgctctcgctctggcataacgatccgaaggggccatctgaagaggaactccaccagcaggtgatgagtacctggccggcggaagcgattggcaaagcggaaatgcagatcaagctgctctccggcatgctggcgccggttgtcgaagaagatcaacccgcggatgaacacattgatgccaccgcgctgggtgatgaacctgttactgcggaaaagccctag

SEQ ID NO: 177444 - DNA, 273 bp, Klebsiella oxytoca
atgcttgctggcatgacgtcctccgagctgggcgactggcatcacttttaccgggagcgtttttttcaggacgcgcagctcgatgcccacttctccgggctgctttacaccatttcaaccttcttataccgggatccggacatcacccctgcacacttcagcctgctgtccccctccgctgaggctgcagcggatcatgtgcaggatgatgacgccatgatgctggccgcagagggaataacgggaggcaccagatatggcccagcagattag

SEQ ID NO: 177445 - DNA, 3147 bp, Klebsiella oxytoca
atggcccagcagattagcgatcttgtcatcaacctggatgtcgacagcgccacattcacagaacagatcgccaggattaaggggcaactgtccggtatggcggatgaatcggacaaagtgcagacacgcatgcgtagtgcggcagaggcgcaaatcagcgcgctgaaaaccaccagcgccgccagcgcaggcgccgtgtccgatatgcagaagcgacaggctgatgccgccgccggtcttcagagcgaattgcagcgagtctccaaatcggtcgatgagacttaccagcgcgtcaccgggttaaaccagcgttatcgggagaacgacgcgcaggcaggggcgctggcgcggcgacaggatgcgttggcggaatcattctttaggcagatagatggcgttcggtccctcagtggcgaaacacggtctctggccagtgtacaggaacaattccgcaaggcccgcgcacagggaaacatcactcagggtgattatctctctttgatttcccgcaccacggcgcggcagaaagaacttcagcaggttgaggaaaaagcgaaccaggcacgcgagaaatttcttcgtcagttgaaggcgcaggttgttgagcaaaagctttctggcacagagctcctgagaatgaaagcggcgcaggttggcgccggcgatgcagctgaagtctatatccgtaaactggaggcggcaaaggtcgccacgcacagccttggtctcgagagtgctggcgcgcggagggaacttggcgtgctgatgggggagctgctgcgtggtaactttggagcgcttcgcggctccgggatcaccctggctaaccgggcaggatggatagatcaattaatgacgctgcgcggtctcggcatcgctggtgttgtcggcggcatagcggcatccgtcgttctgctggggaaggcctggtacgacggcgggaaggaagcagaggagtttaacaaacagctcattctcaccgggaattatgcagggaaaacctctggacaactgcaggcgctggcgcggaacatctcaggaaatggggtcacacagcatgccgcggcagccgtattagcgcaggttgtcggaagtggggcattcggtggcgccgacgtcgagcgggttgccaacgtggcagccaggctgcagcaggcgaccggccaggcggtggatgaaaccatcaaccagtttaaacggctgaaagaggatccggttaatgcggttgcagcgctgaatgagtcgcttcattttctgaccgcaagccagtttgaacagatttcagctgctcaggcgatgggggattctcagcgcgctgccgagcttgcgatgcgcgcctggtccgacagcgttatccagcgtgcgaatgcggtgaaggaaaatctggggacactggaaaccgcgtggaactgggtgaaaaatgctgccagcggcgcctgggatgccatgatgggcatcggtcgcaatcctgatacggccatgaagcggcagggggcttttgcggactggcagacagccgaaaaggaatatcgcgcgctgtcgtcaaaccttaaagtcgatcctgactatgcggggaataacccgctggtgaaagctgatgcagagcgtctgcgaaacgcccgtgagcagctgtctctcaaaaagcaggcctatgatgaggctgataaagcatacgcccaggagggtttagccgcggcacgcgagaaattgcgtaatgatcagcaacagcaggcaataaggaaccagcagcagtttaatcaactggtggagtcgggtgctacagcagcagaaaaacgtgcctctgcggagaaaaaactcaatcagcttattgagaaaaaccgtcgggatgcgaaagatggcattgtcactttatggaccgaaaaggacattgccgcggcgagagcagggattgaaaagcagtggaaggaccctaaaaccccgaaaggaaaaagctattcgactccggccgggaacagagcagaagaagctgcgcaggccgaattgctcactctagaagcgcaactgaagacgcttcaacaacatatcagtgttaatgatgttatcagcaaacagcggcaggaactgtgggaaacggagaataaatatgctgtcctgcaggaggccgccagccgtcgccagctgtccgcgcaggaaaaatctttgctcgctcacaaagatgaaacgctggaatacaaacgccagctggcagatcttggtgataaggtcgcccggcagcaaaagctgaataaccttgcggatcaggctgctaaattcgcccaacagcagagcgctatcagagcggggattgaggctcgatctggggggctttccagtcggacggcggacaggaaagcgacacttcagagactaagtgaaacctattcctttaatcctgatacgcagaggaaggtgctggccgagcagcaagccacatatgaagccgaggatgcattacgcagtaactggctcgccggcgccaaacagggctgggcggagtatcaggattcggccacagatgttttctcatctgtgaaagatatttctcaggccacattcagtggtctggccaaccagctgacagcactgacaacaaccggaaaggcgagctttaaggagttcacaacatccattctgaagatgattgttcaggtcatcaatcagctgatcgtggcctataccattcaggcggctatggggtggatcaacggtagcgcaagcaatacatcatctgggcaatcagttccggtaccctcttatcgtccgccaggatacgacggcggcggctacactggccacggcggtaaatatgagcctgctggcgttgtgcaccgcggtgagtttgtattcacaaaagaggcgaccagccgcattggggtgagcaatctttaccggatgatgcgcggttatgctgccggcgggtatgtcggcaacgctgccagcccggcgagtgtctcccctggcggtgtgatggtcaacatggggggcgtctatatcagcagcggcagcgaacagcagtctacgcagcggtcagcgattgacagtaacggtatccttaagcaactgaaacccgccatcatcagcgtcgtcagcgaacaggcccaacggcccgggacgccgctgtggaaggcaataaaagaagggcgttaa

SEQ ID NO: 177446 - DNA, 348 bp, Klebsiella oxytoca
atgactattgaaacattttcctggcgaattcaggctgccagtcagcccgcgataacgagtaaggataatattcgcaaggcgcaatttggcgacggctatgcgcaggtttcaggggagggaataaacccggaaaccttaaattatgcattttcatttaccggagaactgcaaacaggactggatatttataaattcctgcgacggcataaaacaaaatcctttgcgtttaaacctccgtatgacgagctggcgctatggcgggttcaggctgacagtctgcaaaaagccgttctgaacaacagagtcatgacagtcaccgcaacatttgaacaggcattcgtaccatga

SEQ ID NO: 177447 - DNA, 756 bp, Klebsiella oxytoca
atgattcttcacgctgattatcagaaactggagccgggagatgaaatccggctttttgaaattgatggtagtgcttttaatatgggggatattttatatttccacggatataacattccccatactgaagcggaaattttagccgctggtggcgatgaatcgaaattgcccgctaaaagtatctggtggcagggaaccgaatataaagcgtggccgtgtgaattagaggggatcgaatcctcgacttctggaagcgacgctcagccgacactgagggtgggcaacattgatggttcgatttccgcgttgtgtttgcattatgacgatctggcaatggctcgggtcattatccatgagacacaaaagcagtatctggatgcgcgaaatttccctgagggtaatgccaccgcggatccatcgcaggagaaacggcacctctattttatcgacaccaaaagtcttgaaaccgatgaaacggtggagttcgcgctagatagcccgatggggctgcaggggaagctgatcccaacccgtcagtatcattcggtttgtacctggtgtattcgcaataaataccgcagtggcgatggttgcgattatgccgggacaaagtatttcgacaagaataacaagccggttgatgacccatcgaaggacgtctgcaacggaacactcactgcctgcaaactgcgttttggcgagcataacgaactgacgtttggcgggttccctggcacgtcgctgataaggagctga

SEQ ID NO: 177448 - DNA, 738 bp, Klebsiella oxytoca
atgcgccagaaaacgattgaggcgatacaggctcatgctgcagctgattacccgcgtgaggcgtgtggcttgattgcccaaaaggggcgagtagagcgatatttcccatgcaggaacctggccagagagtcgaatgataattttgtactgtcatcggaggattacgcagcggtagaggactggggaacgatcatcggcattgttcacagccatcctgatgcgaccacgcaacccagcgaactggacaaggcgcagtgcgatgcaactctgctcccctggcatatcatcagttggccggaaggagatctgcgtaccatccatccacgcggggagttgcctctcctcggccgaccattcgtacttggccactacgattgttggggattggtgatgagctatttccggctgacccacggcatcgagctgcacgattaccgcgttgattatccctggtgggaaaatgactatccagaaaatttctaccacgattgttggtatgaatgtggtttccgtgaatttaaaggcccaccgcagtccggagatatggttatcatgcaggtgcagtcggacaaatggaaccatgccgggatccttctggatggtaatatgctcctgcatcatctgtatggtcatctcagtcagcgtgtaccttatggaggttattggatggacaggacgatgaaagtcgtcagatacagtaaatatgatagaatctgttcaaatcgattaatggagtga

SEQ ID NO: 177449 - DNA, 591 bp, Klebsiella oxytoca
atgaaagaggttatgtctcgcattgaattaaatggaccattaggtaaaaaatttgggaacgttcattatcggcttatttctaccacgaaggaggcagtagttgcattagcaaaaacaattcctggctttgaaaagttcatgattaccagtaaagatcgtggactaacctacgcggtgtttaagaatgaaaaaaatatagggttggatgacctaggtttccctgtaaaaggtgaggtaatacgaataacaccagttgttattgggagtaaaaaggctggccttttacaaactattctcggtgcagtgcttgtggtcgcggggttcatctccacattcactcctgctaatgccgctgcaccatatctttatagtatgggcgcatcaatgatgcttggaggcgtgatccagatgctctctcctcagcccggtggccttgcccgtaaagaatcctccgacaataaagccagctatgcctttggcggcgtaaccaataccgcctcgcagggctatccggttggccttctttacggcaaacgacgaattggcggcgcgattatttccgccggtatttatgtcgaagaccagcaataa

SEQ ID NO: 177450 - DNA, 9213 bp, Klebsiella oxytoca
atggcaaataacatcattaaagggcgtaagggtggcagctctaaacagcgtacgcccacggaacagccggacgatttacagtctgtagcaaaagccaaaattcttatcgcattgggtgagggggagtttgctggtggtttaaccgggaaagatatttatctcgacggtacccctcttgagaatgccgatggttcgcaaaacttcagtggtgtggcctgggaattccgacctgggacgcaggcacaaagttatattcagggtattccaggtactgaaaatgaaatttcggtagggacggaagtttccagtgagaccgcctggacccacacatttaccaatacccagctttctgccgttcgtgtccgcctgaaatggccctccctgatgaagcaggaagacgacggcgatgtagtggggaataccgtcaagtatgcgattgacctgcagaccgacggcggcgcctggcagacagtactggagaccgccgtctcaggaaaaacaacttccgggtatgaacgtagccaccgcatcgatttaccgcaggcaggtagcacctggacactgcgtcttcgcaaggtatcgccggacgcaaacagcgtcaaaatcggcgacgtcatgacgctgcagagctataccgaagttattgacgcgaagctgcgttacccacatacagcgctgctttatatcgaattcgactccagccagttcaatggttctatcccgcaaatctcctgcgagccgcgcgggcgtattgtccgcgtcccggacaactataacccggaaacgcgtgaatataccggcacatggacagggggcttcaaatgggcatggactgacaacccggcatggatttattacgacatcgttgtctctgatcgtttcggtcttggcgatcgtctaaccagtgcgaatatctccaaatgggcgctttacccgattgcgcagtattgcgatcaactgatacccgatggcaggggtggcgatggcatggaacctcgccatctctgtaatgtttatgttcaggagcgcaacgacgcctacaccgtattgcgtgatttcgctgctattttccgggggatgacctgctggagtggtgaacagattatcgtgcaggccgatatgccgcgtgatgttgatttcaactatacgcgcgcgaatattatcggtagtcctcgttattccagcagcaccagtaaggcccgatacaccaatgcgctggtctcatggtctgatccggataacgcctatgccgatgcgattgagcccgcatttatccccgaactggtttcccgatacagttttaaccaactggaagtcacggccattgggtgtacgcggcagagtgaagcccatcgtaaagggttatgggggatcctaactaataacaaggaccgcatggtcgagattgatgttggtcttgacggcaggatcccgcagccgggctacatcattgggctgggcgacgaacggctggccgggcgagttaatggtggtcgtatcagcgcggtgaatggacgcgtcatcacgctcgaccgtgatatcgatgcaaaagagggcgaccgcctgcatctgaatctgccatcgggtatctcgcaggccaggaccatccagtcggtgaatggccgccggcaggtaacggtcacgacgggatacagcgagacaccagaggcggagtgcgtctggatcgttgaatataccgacctggtgccgcagcagtaccgtgttatcggtgtaaaggacaacaataacggcacgctcaccattaccggcgtggctcacgacccggataaatttgcgcgtatcgataccggcgcaatcatcgaccagcgcccgattagtgttatcccgccaggcaatcaggctccgccagatggcatcctcctgacgtcattctccgtggtgaatcaggggatcagcgtcgaaaccctgcaggccaattgggacgcggtgcaaaatgctatcgcctatgaggcacagtggcgccgcaatgatggtaactggattaacgtgccgcgcagctcgaccacgtcatttgaggtcagcggcatttatgccggccgttatctggtacgcgtccgtgcaatcaacgcggcggaaatttccagtagctgggcgtactcggaagaaaagaccctgaccgggaaagtcggtgagccgcagccgccgctgtcgttgacgaccgtttcactgaccgcaggtatcgagattcgctgggaattcccggaaggttcagaagatacccagcgcacagagctgcagtacagcccggacaagagcgggaacggtgcgatgccgctgaccgatttagcgtatccaggcaagcagtatcagcagatgggcctgcagatcgccacgcatttctggtatcgcgcgcggctggttgaccgcctgggtaatgtctctccgtggaccagctgggtgcagggaatgtccagcgataacgttgatgactattaccagcagctcgacgatgcgctgaaaggctcggatacttatgaggaactgaacaaaggtattcaggacaacagcgctgcggccgacgctgcgcagcaggctgcgaacgccgcccagggaattgctgaccaggcggcgaaggacgtcgccgcgcagaattctattgtcacgcagcagggcaaagacctggctgccaatatcaccaaaaccaacgatacgaccaacaagctggcgcaggaagtgaaggaccgtgctgcaggtgataccgccacggcgcaaaaagcggccagtgataccgctgcagcggtggcgaaagcagaaactgacgatgccgcccttgcgaagcaggccgcagataatctgctgagtgccaaacgcgaagttgaagcggcgattgaaacgaccaacgtcaccatgcaggacggctttgacagtctggcgcagcaggtcgcatcgatttcagcgggtacaggcgagcagtttgacagcctcaaaatctggtatttcgacaatgataacgagggctggagttctgacgacggtggcacaaatccgctcctcacaaccgacgacgggtggatacttcctgccgggtctggttcgacaatgcgaagcccgtccggcgctggcacgctgattgacggtggcgcttataagtacctacgcctgcgcatcaagaaagtcggtaaccctgcatggggcggtcggttgtactggattggtgctgacgagactggctggacagaagcacgccgcctggtattgcctgcacctgattttgacccttccactggcatcagcactgtcgcgatcccggatattccgtggcagtcatccggtaccatccgccgcctgcgtctcgacttctcacagggcggagctgctgacgcaaataattattatgccgttgactggctggccgttggtcgtccaacgcctggcgcatcgcaggcgcagattcaggatctgaaaacggcgatgactgccgctgattcagccgaggcgcaggcgcgtaaccagctggctgtgcaactgcgcggtaatgaggaaggcaccaacccagataaactggtttctggcctgatttttgaagagcgcaagatccgcgtaacagcagaaaaagctattgggtcaagagttgataccctgcgagtggattacgataaatccactgcagcagcaacctcccgcatggataccatcgcgagcgacctcgaagcgaccagccagaagacagaccaggtaacagcggaccttgccacggcaaacagcacgatcacggcccaaggccaggcgattaccagtattcaggccaaaaacaccgcgcaggacgggcagatcaccagcaactcgcaaaacatcgcgggcgtctcttcgcgtctcgataatatgcgcgttggtgggtctaacctgctgccgaattcgggtgagcttaccggatacaacaatgtcagtaagaccgagcgctttaaaggtaacgcgtgcattgcgctgattacggcggcgaatgcttccggatacgcgcagagtgaaatcgttcttgccggaccggtggacgggacagaatacgtctattcgttttatgcgaaagcgacagaagcggtgcagattcacgcctacttctaccagccaaacaccacccagcgcgccgagtcgaaccagggaaaaaccggcacgagcactgacggccagatcgcctttgatttgaccactgaatgggtccgttattgggtcaagtggaaacaggttgctggcactggctcgaagcgtctaattttcggacgtctgcaaccggcggccacagcgcggacggtcctgattagttcgccacagcttgaactcggcaacgttccgaccgactggaaagaagcaccgcaggacaacgccagcgcggacgccgtcaccggactgacgactcgtgttacagccgccgagggtaagatcgagacgacggccaaccagacgaccagtctcgttaaccgcctgaataccggcaacctgctattaaacggcgacgccacagccagcgtgtcttcgtggaccctatccgggaccggcgacggtgcgccagtctacgatacaacccaaaaggccatgaccaccgacaagccagcgtttcgtgtggcgaacggaaccaaagtacccgtggaagccgggcagacacttaccctgactttcgacgtcaaagtgtcagacgccacgattagcaccggttcgcagatgttcaacatcggggtgataaagacatggagtgacccgaccacgtggttagtgaataaatacgactggaattccggccttaccaccgtctggcagacgaaaactatcacgctgaagatcccgaatgatttccccggacagtgggtctatctgcgcctggcgtgcggcggctggactccggcggcggcccgcttctatttccgtaacttcatgctgtcagcgtctaacgggatcgccgggatggcgtcggcgcaagccgttacggatctatcatcccgcgtaacgaagacagagaaggatatcaccacacaagccgggcaaatcaccagcctgggcgggcgcatcgattcgactaacgcagaagtcgcgaagaaggcgaccacggcagcggttgatgcgctgaaggccacggtaacgcagcagggaaaagatattaccgcgcaggccgagcgcaccactagcctgtccaatactgtcgacgcgaataagaaggacgccgacgccaaagacaccgcccagggccaggccatttctggattgtcgcaacgtgttaccaatgctgaaggtgcgctatcgacgcagtctcagcagttaaccagtctggacggtaagattgacacggttaaaaccgacctcaataaaactattgccactaaggccgatggcgccacggtttccgcgctatcgcagaccgtgacgcagcagggtaaggatatcaagaccaccagtgacgcggtaacgtcgctgaaaggccgcgtgagtacagtagaaggtgaagtagcgaaggcggcgacggtagaagcgctgaaccagctaaccacccgcgtgacttctgccgagggcaagctgaccacgacaggccagcagatcaccggcatcaatgccacgctcaacgccacgtctgcttcgggcggtgactacatcctcaacccgacatttgatccggcatatgaaagctatggctttacccgccgcgacaccgtggataactccgacaacgataatatcccgtacgatgcggatatcccagcgggatgccctaaccgttatgtcgtcatgatcaaccgccgtgaccacttcccgacgttcccggcgatcccggtcaaacctggccaggtcttcgaaatgaccgcatgggtcgccgcgcgcgccgacgccactgcgccgtttaacctgtatatcgcgagtaccaccacgccgaccggcggcggtaccgcgcgcaactcttacggtaacgttgcgccgacgcagacctggaaaaagctggtatggcgctggacggtcccggctacgtggacctatggatatctgcgcccgttcttgcagatcaaccagtccagcccgttcgggtccacatggtacgtcaccgactggcacctgcgcgaagtcaccgccgcccaggaggccaaagctgccgcagatgccgctgccggtagtgtgtcgagcctgtctggtacggtcacgcaacagggcaaagacatcaagtcaaacagtgacgctattactgccgtaacaggccgcgtgaccaacgtcgagaaggccgccagcgcgaatagccaggccgtcacgaagctggaacagaccaccacgcagcagggtaaagacatcgacacgaacagccaggcgatcaccaccgtgggcggttggatagatgcgcttcgtgatgtaggcgatcagatggtccccaactttgatttccgcaacggtactgtaggatggcagattaacggcaccagcggcgggtcaacggttacattcggcgactttggcgcgggtaagccaggtgtgcgtctggttaaaacagcgtcaggcggcaacccggcgatcttcgtaaacgagaaacatgcgtttccgatgaacggtaaacgctcctaccgcatggttgtgaaagcgaagggcgcgaaggcgggtaattctcttctcatgcgtcgatggaacaataaggacaacgtagaagaggggacctattacgacaaacaaaatactgtttccactggctgggcgttgtatacattcgacttcaaaagtgcgtcgaatacagctaacggcgccgccttcgggatctactgctacccggaagcgaataccctcgacgtggattatgtggcggtctatgacatcactgacgcgatcgagatagaggccaacgccagcgcaacgcagacgcttacccagcgcgtcacgcagaccgagaaggacatcacagcaaacgcagcagctaccaccgcagtatcctctaacctcacggcagcgctggcggacatcgataataagatggccggtaatcttgtcgcgaatggcggcttcgagcgaggcctggactcctggacgcaaggctcaaccaccgttgccactgttatcgacgcgcagtcgccgcactcaggcggtcgtatcctgaagctgtccgcacacaactccgcgcaggacaccattgcgcagaagtatgacatcccgatccagaaaggccgcacgtataagctgggcgggtggattcgtgccgatggcaatgccgagatgccatcgacggcgcagggcaataacaaaatccgcatgggtatcaccggccagaccaacccggttatcgaagtccagtttgacccgaaaaactaccagaccggatcgcagtggacagagattagtaagacatggaaagcgacggccaccacgttcgcccaggtcagcttcatggcgttactgtccaaaggtaacctctatgttgatgatctctatctgctggatgtcaccgactcggtagacatcgcggcaaatgctgccggcatctctactattcagaccacggtcaagaaccagggcgaccttatcagcgcccaggctgacgcggtgacacaggttaaagcggacctcgggaccgtgtcgcagaagtctctgaacccgttcattgacggctcgtttgaatcgtatgcagataaccagcggatcgcaggtgcgcagttcatcgcgacgacgcaggcaaagcgcgatggcagcaagtccggtaaggtgacccgtaacagcggtgaaaccgggaacagcgacaagacaaccggtacctggttagctattcgtagcggcggtaaatatcgtttcagcgcatgggtgatgatgcaagggactgaatccccgccgtctggctggtctatggcgatcggtatgatgacacgcggcgaaggtggttccggtaactcctggccagcagggattgtggtaaacgacaccgcaacttccctggggggtaaacgtgatcaatgggtccaggtgaccggcgtcgcaactatctccggcacccacgcacagggcgttttgtgggtctcgtgccgtggtacgtcaggcggtgccgggtattcgctattcattgacggtctgaccatcgtcgatgtgaccgatgcacaggatgcgaaagcggacgcaaaagccgccgccgatgccacaacagccctctctgccaccgtgaagcagcagggtgatgatatcaaggcacaggccgagcaaacctccagcctggtctcacgtgtaggcgatgcagagtcgcgtatcacaaagcaggacgaaacgatcgccgcaaacggcctggcgatgtcgaacggctttaaccagatgcgcagcatgattggtgacaacagcgctgcaattacaacgacgagcaaaaccgttgctgacctggaaaaatcaaccactgagcagatcaccacgctgacctctcaagtcggggatatgtcagcgaccgttcagcagacggcatcaaccgtggcagatttaaacggaaaactgggtgcgcaatggggcgtgaaggtcaacacgtcttccggcggcaagaactacgttgcggggattcagctggggattaacggcagcgggcaatcacagttcctggtgcaggctgaccagttcggtgtttatgtgcccaacggcgataaaagcaatctggccttcggtgtcgacgggaacggcgcatatatgcagcaggcgatggcccgaaatctggtcatcgactttgcgcagattagcaataatatccagtcgacaaactggaacggcgacaccgccgggtgggcgatcaacaaggccggttcagcggtatttaataacgtgaccattcgcggacatgttgaggcgtcaagcggatcattccgtggaacaatcgacgctaccgatgggacattcagggggaccgtgcaggcaagcaattttatcggagacatttgctctgctggggtgttcaagaatggggtaagacccgacattactcactatgattctggcgtggggctatctaaaacttatgccgtctccgccgttgtcgcctgtgatgtgaattttgtgggcaaaatcatggtatggattaaaggtgagaaggtaaacgagtttagtgtgacttccgcagcgtctaacgcatcaactcgctatatccctgtgatgggagttaaggccggaattacagatcagaacgtcagatgtgagcttacggtagagggaagcggtatttataggtgggcgggcggttttgcacttatgacccgctcgacaggttcatggagataa

SEQ ID NO: 177451 - DNA, 1143 bp, Klebsiella oxytoca
atggcaacaatcagcgacgcattagcagccagtattcagaagtgcttcgacagaacttatacagacctggccaatcagcagcaatttctattcggctccggtaacgtgacggtaactaaaccggatggcacgaccgggactgtgaaatcgtggtcgcaattcctgagcgaatatagcacccggcagactgcaatcgacaatgccctgaaaggcgtggcgaagactactgtaacaaacacatttacgcagccgcagacgtttagtaagggcgtgacgttcagcgccactattacagcggcagggcaaatactcaggaagaacagcagtacgcaattcacagcgattgacgccggaagcctggaaatcagcagcgacacaacgccgtacattgattttcatcataaaggcagcgctgcagactatacgcatcgaattatcaccgaggatggggcgttagctgtttatccgggtttgcgagttcgtggcggattcgggatttactcaggagcatcaacgatatatagcggctcttattcgctggggtatgtttcaaggctggatgtcgatccgacaaacccggcgaatggggcgattgttgccaccccgcaaactctgtacaggttcaactaccgggggggtgacagtaacggcgactcaggcgccgcaggatcgtggtacgaagagcaggtaggcacaaaccacaggtatgttttgatggttcgcggctacgctaacgcggttcagtactggcagttcctgaacgatgggagaatctacagcagccagaacgggaacgttcagttccagggcacatcggatgcgcggttaaagcatgacattcaaccgactgacggccagctgtcttttgaacgcattcgtcaacttgagctggtgacgttcgtctataacgacgacgagcagaacaggacgcgccggggaataatcgcgcagcaggcacagcaggtcgatcaacagtatgttaagcagattaacacgtcgtatatgcgcaacggcgaacaggtgaatgacgaccgcctacagctcgataacaatgtgctcttgatggatacactggcggcggtaaaagtgctgattaagcgagtagatgatttagaaactaagctaaacaatatcttaggataa

SEQ ID NO: 177452 - DNA, 384 bp, Klebsiella oxytoca
atgggctttccatctccagcagcagattacgaagaaatgcgaatttcgcttgatgaaaaattcattaagcatccggcggctacgtattttatgcgggctgcaaacacctgttatcgggcgggtattttacaaggtgctcttctcgtcatcgatgcatcacttaagccatgcgatggcactctgcttgtatgtgcaatggctggggagttcagagtcaagcgctaccggctggtgccaaaacctcatcttgaggacctgacatcagggagaaaagagccactgccgagccaggaggataattgtccaccacctgtcttcggtgtgatcacatacataatcaatgatgcacgtttgggggagttcgatgattgccctgttatgtga

SEQ ID NO: 177453 - DNA, 2160 bp, Klebsiella oxytoca
atgacatcagcaaaaaataaaacagcagttaaagatcccgatgaaatcgatttacgacgtctcgttggggaattaattgatcaccgtaaattgattttgtcggtcacatcattatttacattaatagcattagtttatgcattatttgcaactccgatatatcaagccgatgcgttggtacaagttgaacaaaagcagggcaatgcccttttaaacagtttgagtcaggtattacctgatagtcaaccacagtctgcacccgaaatagccttattaaggtcacggatgattctgggaaaaacagttgatgacttgaatcttcaagcaaaaattgaagaggattacttccctgttttcggcagaggattagctcgactgctgggtaataagcctaacaatttaaatatctcacgtttatacctttctatcccgggggaagaggttccagagatagatgttaagattttagataatgaccgatttattgtaacaggcgaaggtattgaaataacaggtaaagttggtcaactcatcgaagctaaaggtttatcattgctggtctcggaaattgatggagaaccaggaacaacgtttaccgtctcttatatctctcgtctaaaagcaataacaaaccttcaagacaatttagtcattgctgatgaaggcaaggatacaggtatattaacgctgtcactaacaggtgatgatcaaacgcaaataaagaatatcattgatagtatcagtactaactatctggcacaaaatatcgccagacaagcagcgcaagatgcaaaaagtctagagttcctgaatgagcagttgccaaaggttcgtagcgatttagatctagctgaagataaattgaatggctatcgtcagcaaaaagattccgtcgatctctctttagaagctaaagcagtacttgaccaaatcgttaatgtggataatcaactaaatgaattaacaattagggaatcagaagtttcacaattattcactaaagagcatccaacatataaagcgttgatggaaaaacgtaagactctacaggatgaaaaaaataagctgaataagcgtgtatctgcgatgccagaaacccagcaagaagtattgcgcctaagtcgtgatgttgattcgggaagggcagtatatatgcaactcttgaataggcagcaagagttaagtattgccaaatctagtgcgataggtaacgtccgaattatagataatgcaataacgcagcctaaaccagtaaaaccaaataaagtgttgattattttgttaggtttggttattggattgtttatatctgtaggtttggttcttgcacgtgtcgttttacgtaagggcattgaatctccggaacagttggaagaactagggataagtgtctatgcaagcgtgcctgtatcggaggaatttgcgaaacgcgtagaacgctctagcaaaatgaaaagcaaaaaacttgatgaagctgccgttttcttggcagttgaaaaccctgcagatttagcaatcgagtctattcgtggactacgtacaagcctacattttgctatgatggaagctagaaataatgttttaatgattactggcgctagtcctaatgcaggtaaaacatttattagctcgaatcttgctgaggttatttcgcagaccgggaagaaagtactattcttggatgccgatttgagaaaaggttacatacataagttatttaatactgataataatagcggtttatctgaaattttgtcaggaaaaattccggttgaacaggcagtcaaaactttaccaaaaattggttttgattatatttcacgaggaatggtcccaccaaaccctgcagagttactaatgcataaacgttttggtgaacttattgattgggcaaatgagcattatgatttggttatcgtggatacgccgccaattcttgcagttacagatgctgcagtaataggtaattacgccggtaccacactattagttgctcgttttgagcaaaatacagccaaggaaattgaagttagtattaagcgcttcgagcaaagtggtgtaaatattaaaggttgtatactcaatggaattgtgaaaaaagcgagtaattattatgggtatggatataaccattacggctatacatacaccgataaataa

SEQ ID NO: 177454 - DNA, 798 bp, Klebsiella oxytoca
atgaaagcgcaggggcagcagctggcgatggagcctgcgttgtcgcggctttcagcggcgctggtggaaatgcagtcgctggctgccagtgcacaacaggcacaggcgctggctgcagatgtggggcgtcaacagaagttgctgcaacagaacatagaacagattcagaaggaaatattgctggcgacggcctctcaaggcgtggtgctggcaagtggtgacgatatgttgctgtcagcgcaggagaatctgacgctgatcgccggtaaacaactggatctgggtgcgcaaaaggacttcacgctggcagcaggaaaacaaattagcctctggagccagaggggggctaaatggtttgcatcgcagggggatattgatattcaggcacagagcggaaatattaccacctggtcaacgcaggatacgtttatttcgagtggtaagagactggtcataacggcacaggatgagctgacgctgatatgcgggggcggatatatcaaaatcaaaggagggaatgttgaagttggcggtcctggaaaattgctgataaaaaacgccggtattaagaaagcaggttcgggtagtatgcagggggtgatgaaatcgtttgagtcgggaagttttgatgagaagtttgtcattcgaaattctctgaccaaagaacctttagccaataaggcatattcaataaccatgccggatggaagaattgtttcaggggtgacagatttaaatggttatacatcattaaatacttcggatgttatcgatgatatgatcattactcttatttaa

SEQ ID NO: 177455 - DNA, 195 bp, Klebsiella oxytoca
atgttactgatgattttttctttattaataatttatgcgctaatcgcagggagtttgcttacattagttgcatggctttgttgtaagagagttcatggtttacgtatcatattactgatttggtttgggtgtgtctgtgtggtgtttgttgctttctatgctctgcaatttactgaatttggtctcatacgataa

SEQ ID NO: 177456 - DNA, 1968 bp, Klebsiella oxytoca
atggtacataagactgagccagttagagagttagatattaaatatgatgataacggccatccttcttggtgttcttttccatcgcataagaatgttcaggtgcgtggggcttgcgatgtgccacctcatctgcctgggcttataatacttgtccatggtgttaactccacaggtgaatggtatcaaaaagcagagtctgcattatgtgcaggattgaataaacgccttggacttgaaggcactaattttgagttaaaggctaacatatatagtggggatgacaaaataaaattagatgagaaaggtgtcgaaaaaagaactccaatgtctccagtagtagaaagaaaattagttactgacaatggtcggtcacctgtaattcgatttttttggggctattcatcaccattaggtgccgaagataagtttgttattcctttggtaagtattaaaggtgatgattatcatcagatgaagcgagatggcatcccattggatgatattttgaaaaaaggtccttatatatggggcggcggtccttttcagaatggcacgaataatcttcattcgctttggagtaaaaaaggattcaatgaagatttagccaatatacctggtgcaaaagttcaatatggtaatgaagacaaagatcgcttactaaccacagcaccaccacgaaactattatgctcatgccgcgaagcggttagctgatttattggatcttattcgagggaaatatcctaaggatacagttaccataatttcacatagccaaggaactatggtttcaatggctgctactgcactggcaaataaagcgcctgatgctctgtttataatgaattcaccttacgcccttcataatagtcaattgaataccttttcaatgccacctgaagaatgtatttcaccatctggtcgagaaagtactctgtcagcaataattgataaagttgcacttcaatcaacacatttatcttcgttaggctatgaggggttgtgtgtaggtcaatcacaggataataaaaactggaagccagatataattcttgtaacttctgacaaaaatgaaacgagaaatatccaggaaagagataatcacgggaggacttatgtttatttcaatccacatgacagagttatgggttccctccctctgcattcgatagggtggcaaggtttcccaaatgatgaaaaagggaatcctcatccacttatcactcagcataagggatatttattccagcgaatgcttgccaggaatacaccttgtggtatagctcccgagtcaaaaactccattcggtcgattgccagatggtaaacccttttgggatgatgaaggagatgaataccagagcagtggttttgtgtacccagatccacctcactggcaaactgtattcattaatgccgaggaagtacctgaaccaattaaggaaaatgaactaagtgatttcgataaaacaagagtcggtgctgagcatggcccacaggaaaaaaacggttggggagagcgtgatcctaaaactggttataagaatgacgatacttacgataatttcattaatttgtatcccgatcaggatgtcgttattggtgtcaaaaaacaatcggaatatggtacttacggtagcgtaactccagtaacccgtaaggagacgtttgacgaaaaagatcgcaggatacgttcatatgttgcacaacctacagatcacagtaccttacccagtaatttgaattttatgtcacgagtcgttgcttatgatttacccattggttactgtgaatcgggttgggataaggcttttatcactgatctacgccgtcgagcagactggactcagggactggatacatatttaaaaaccggaattccaaacaatgttactgagccagaaataatcagcacagaaacagcattggaagaaatgattcgagtgaagtccaaagaatacggatattga

SEQ ID NO: 177457 - DNA, 201 bp, Klebsiella oxytoca
atgggaaagaaaatagttgtgcttggcgatgctacctcgcatggaggtaaagtagtctctgtattatctactcatcttttttttgaatggacgggtgaacgcgtattctggatttcgctgttgggtacggtttttctgactagtctgttgagtgtgctgatttttttcttatccctttccagaaaaacgacaccccggtga

SEQ ID NO: 177458 - DNA, 300 bp, Klebsiella oxytoca
gtgactccgcagtgtagtcgcccggcaggcgaggcggctggtatacaggaaggagatgtctccctttcttcgctaaaaaagcgcctctgctgtcgctatacccccttctggcgtagtaacgtccgtctgctgctgatctgtggcgaacccgaacacatcgccgccatcatcccaggccttgccgaaaaacggtggctgatttacggcggcagtctgtcatcggcgccggatactgaacgtctgaacgccctgcgtaagctgcgccacatccttaccgctccggcggtctggcaggggtag

SEQ ID NO: 177459 - DNA, 1260 bp, Klebsiella oxytoca
atgtttcgccgtctggtcattgccatgctggtcggcgtcttcgccgccctcgcggttgccctgttccgccatgcaatggcgggactggaaagcctgtttctgagcaatgacagcggaagtctggtgaacgccgctgagtctatgcccggatggcgtcggctgttaacgccaatgctgggcggccttgccgcaggcgccctgctatggttctggcagcgccgcagtgttgaacgtccgcacgcgccaaccgactacatggaagctctcgagaccggcgacggcaggtttgataccccggccagcctggtaaaatcgctggcctctctgctggtggtcaccaccggcagcgctattggccgggaaggggcgatgatcctgctggccgcgctggctgcctcgctgttcgcccgccggtttacgccaaaagatgagtggaagctgtgggtcgcctgcggcgccgccgccgggatggccagcgcataccatgcgccgcttgccggcagcctgtttatcgccgagatcttattcggcactctgatgctggcgtcgcttggtccggtcgtcattgctgcggtaaccgccctgctgctcaccaatctgctgaacggaagttcggcgccgctctaccatgttgagtttcacgccaccctgcgcgcgacccactatgggttaatgctggcaacgggtttgctggccgggctttgcgggccgctgtttatctggctgatgagctatagccatcactgctttgtccggctgcgtctgtcgcccccctggcagctggcgctgggcgggcttattgtcggcctgctctcgcttctcgcgccggccgtctggggaaatggctacagtgtcgtacaaagctatctgctttcgccgccgctcttcagcgctatcattcttgtctttgtctgcaagctgctcgccgtgctggccagcagcggttccggcgcgccggggggggtgtttacgccaacgctgtttgttggcctggggctcggcatgctgttcgccagcctgacgggactgtggctacctgattaccaggagatcgcgataatgataggcttaaccggcatggcggcgtttctggcggcgacaacccatgcgccgattatgtccacgctgatgatttgtgaaatgaccggacagtacgttttactgcccggtttattgattgccagcgtactggcatcggtgctgtcgcggacgttacgccgggattctatctaccgccatcatctcgccgagcatcgataa

SEQ ID NO: 177460 - DNA, 561 bp, Klebsiella oxytoca
atgtctaaccaggaacataccgacggccttacccgccgaacgctaatcaaatcaaccgcccttggttcgctggccctcgccgccggcggtttatcgctgcctttcagcctccgcaatgccgccgccgctgtgcaagacgctacgcgcggtgaagaacggattgtctggggggcctgctcggtcaactgcggcagccgctgcgcgctgcgttcacacgtgcgtgacgatgaagtcgtctgggtcgaaaccgacaataccggcgcggatatttatggcgatcaccaggtgcgcgcgtgcctgcgcggccgttccattcgccggcgcattaatcatcccgatcgccttaattatcccatgaagcgcgtcggtaaacgcggcgaaggcaagtttgtccgcattagctgggaagaggcgctggatacgattgctggcaatctcaaacgcatcgtcaaagattatggcaacgaagccgtttatattaactactcttcggggattgtcggcggcaacatgacgcgttcgtcacccaccgcctcaccggtaatgcgcctgatgaactag

SEQ ID NO: 177461 - DNA, 753 bp, Klebsiella oxytoca
atgtttagcctggcgttcattcgggacaattttacgtttattttaagcgcgctgccggtcaccctgacgataacgttattatccttactgttttccactttgctgggcgcagcgctggcgtggacgattattcgtcaggtacccggcgttcaatggctggcgaaggttttcctctcctttggccgttcggtcccggtcctggtgatgctgtatttctttttttacgtctggccgtggattgccgccgggctgttcggcggcccgcaggacacgatgtaccgctataaactttcgccgctggcggcggcggtcaccgcgttatcgctgatcttcagcgcgtatttcgccgaaacctttcgcgcgggatggaacgcggttgataaggggcagcgcgaggctgcatggtcaatcgggctgagcgggttcacgcagttccgacgcattatttttccacaggcggcggtatccgcgctgccgaactttaccagcgtgctgatcgatctgattaaagacacttcgctggtttacaccatcaccgttgttgatctgatggcgaaagccaatatcgccgccgcgcgcgggtttcattttgtcgaagcctactgcgtcgtgctggtgatttatatcgtgctgtgcctggcgattgccagagcattgcgcagggcagaaagatttctgagcgtccgctggcaaggcaacgcagaaaagagtgttccacggttatcattttggggaaggtattttgaaaaataa

SEQ ID NO: 177462 - DNA, 843 bp, Klebsiella oxytoca
ttgaaaaataaaattttactggtgagtgcgctggtgttggcaatgggaatggacgccgcgcaggcggttgaaaaaagcccaaacgcgaaaacggttgaggttgtcgtcaatgctaacggttttccctttagctttgttgacgataacaacaatattacaggctacgatggcgacctgttaaaggtgctggaccagcggttaacggactatacgtttcattttaatgcggtctctcgcgatgcgatgatcgtcggcctatcgaccggcgcctataccctcgcggcggatcacttttatctcaccaaagagcgggcggaaaaatacgaccactccggcgagccgaccgggatcagcgatttacgcctgattgtacgtaacgatgagaacgatattcataaccttggcgatctcgccagcggtaagaaaaaactggtgccgattcatacctccgacgcccgttatacggtgattgaaaactacaataaaaaacatccaggccaacaaattaatctgcagcccaacggcgagcagtctgccgccgatatctttaaagcggtagcctccggggaatacgatgcggcgatttatcctattggcgcgctgctggcgttaaataaggcgctaaatcttaatctgaaagcttcggattccgtcggcctgtttcctaacgtctatttgtataaaaaaaataccgatccgcagctaatcaaagcgattgacgcgcagctggttgccctgaaaaaggacggcacgctcgctgacctctcgcggaaatggtacgccgaagatgtatatgccctgccgggcgccagcgacgtgaaagtgaataccgactgggaataa

SEQ ID NO: 177463 - DNA, 789 bp, Klebsiella oxytoca
atggccaggatccattttattggcgccggacagatggcggaggcgattattcgcgcgtcattaagccacggtgcgctgcgggcggacgcgatctcgctcgaggatatcgacagcacgcgagtcgaggctctgcgcgcccgttatcggctgtcgggcgacggtggtgtaaacgaggcctctttgctggtgctggggatccgtccgcaggacgatctggcgggggtggcgaaccgcgtgcgtgcgcagctaaacggctcgacaacggtggtatctctgatcgcgggggtgaccctggaaaagctggcctccctgtttggtgcggcaacgccgattgccagggcgatccccaataccctgaccgataccggatttggctatagcggtgtgaccttaaacgcccacgccagcgcggctgagatcgagccgtttctgcgcggctttggcaaggtgctgtatctgcctgagcggttgatcgatatctttaccggctttggcgtcgcgggacctaactatatttactactttattgagtcccttaccgatgccggcgtactggcgggactgccccgaccccaggcaacggaggtggtgctggaaaacctgctcggcgcggtcgagatgctgcgccaaagccagaagcatccgcgccagcttctggatatcaacaattccccggcgggtgtcgggatccacggtctgtatgagctgaacaacagcgattttgccgcggggcttcagcgcagcgtacaggcggcggtcaggcgcacccgtgaactgggacagtgctaa

SEQ ID NO: 177464 - DNA, 534 bp, Klebsiella oxytoca
atggtaaaaatatcgcgttatctgatcttgagtgggttattaggcatatcaccgttgtctctggcgtccgatcaggggcggggactggtcacgatgaatggtcaaattcaggagtcggcctgttccattcataccaacgatgcctggcaggaaattccattcggcgtgatttcgtataacgatcttaatgagcaaggcaaggcggtcatcaaacccttcgcagtacgactggtgaattgctcactggaacggagccgcggtggcttatggcaaagcgtaaatatcacctttagcggggaaactgaggtatttcgcccggatatttttaaagtcaatggcgaggcccaggggcttggactgcgtattcacaatcaggctggcgatgtggctcgcgacggaataccgatgccggccgtaatgatacaaaatgaaaacaatgagttacgttacttattatcgttagtacgcggcagcaaaacgctgtcggaaggcgactggtacggaatcattcgtttcatggtgacctatcaataa

SEQ ID NO: 177465 - DNA, 2502 bp, Klebsiella oxytoca
atgaaaaaaagcagaccaccagctttttacctgcgacgactgggtatttacattgttattgccatttttggttctacatcaccggtagtggcggtagagtttaatatagatattctggactcggaagaccgggaaaatatcgacttgtcgcgtttttcccgcgccggttatattatgcccggaacctacacgctcagcatgcgcttaaacgagcacagtatttctgaccaggaaatttcttttattgaaagaacccgtgacgatggagtggttgtagaaacctgtctgacgcctgcacaggtagagcttctcggtctgcgggaagacgcgtttaaaacgattaagtggctcgacgaggggcgttgcgctgatttttccgctcttgaaggcgtcgtcctgcgcggcgatctgtccgagtcatccctgcaaatcgcggtgcctcaagcctggctggaatatcaggatgcttcctggttaccgatttcccgctgggaagagggtatccccgggatgttggttgactataacctgaataccaatgtcacctggccgcgtcaggggaatcagagccagagcgccagcatcagcggtacgacgggcgtcaatttgggaccctggcgtctgagaggggattaccaggggagctattacaataccaccggacgttcggataaaaattcacgtaattttgactggagccgtttttacgcctatcgcgcattacctggaatgatgtcaaaactcaccgtcggtgaagactatctctcttccgatctctttgactcatggcgctataccggtttgtcgctggcaagcgatgaaagccagctgccacctaagcttcgaggctacgcgcctgaagtatccggtatcgctcgcaccaatgccaaagtgacggtcagccaacagggcagagtcatccatgaaacgacggttgccgctggcccgtttcgtattcaggaactaaacagcgcgctaaccggacgcctggatgtgcgggttgaagagcaggatggctccgtacagacatttgcggttgaaacggctcaggtcccttatctgacgcgtcccggccagctacgttataaaatgaccaccggtcgtccgcgcgattataaccacagcactcaaggaccctactttgccacaggcgaactctcatggggccttaccaacgcgtggtcgctgtacggcggcggcattatttctcaggactacaacagcctggcgcttggcgccggtcgtgatatgaacgcctacgggacgctctctgctgacgttactcatgccagtgctcgtttcccggatgataaaagcaggcaaggtcggtcctggcgcctgagctattccaaacggtttgatgaaatcaacagtgaagtcacgtttgccggttaccgtttttccgagcgcaactatctcaccatgggtgaatatctggatatgcgctatcgggatggctacgtcgggaacagcaaagagctttataccatccaggcgaccaaaaactttgccgacctgcgtttgtcaacgcacatcaactggtcgcatcagacttactggaaccgcccggcgaccgatcgctatagcgtatcgttgaataaatattttgacctcggcgactggcgacatctgtcgttgtccctcaacgccgctcgcagtgagttcaatggccgcaaggacgacagcgcctatatctcactgacgatgccgtttggttcgggaaccgtgggttataacggcagcataagccgcgaccgttatacacaaaatgccagctggagccaaaggctggataacaacgactattacagcatcaacgccggcaacagcgtcgggggcggtgagggaacgcgtagccagatgagtggctactattctcatcccggcaatatagcggatgtcaccaccaactttaactgggcgcaaagccagtacacctcctttggtatttccgccagcggtgggatgaccgccaccgctgaaggcgtggccctacactccggtggggtgcagggggggacgcgtttgatggtcagtacggagggagtaagcggtgttccggtgggcttacagggctataccaatgcttttggcatcgcggttatccctggagtgccaaattattatcgaaccagggctgagattgacgttaatcgtctgccggatgatgtcgagtctggcggaacgccggttgtagagctcgccctgactgaaggcgctatcggtttccgtcgctttgatgtgctgaagggttctaaggtcgtggcaatccttagccaggaagatggacgccatccgcctttcggcgccacggtacacaatgcaaaagatcgcgaactgggtatggtcagcgacagtggactggcctggttgaccggtgtgaatccggatgaacgcttaaccgtgcactggagtggttccgctcagtgtgaagtcgtactgccacgggttatccctgcacagcaactattgctgccgtgcaagccggtcactcgaggctga

SEQ ID NO: 177466 - DNA, 735 bp, Klebsiella oxytoca
atgaaaagcaaaaagatagcgatgacgatagtgctgggaagtctggccgcgggtctgataaacgaagccggggctgcgatcgcgctggacaggactcgggccatttttcccggttcggaaaagagcatttccctgagtattactaacgacagcacatcaatgccgtacctggcgcagggatggattgaagatgagcacgggaaaaaaatcagcggccctcttgttgtcgtcccgccgctgcagcgtcttgaagctaaaggtaaaagcatgatgcgtatcaacgccatgccggatgccgcgatgttacctcaggacagagagagcattttttatttcaacgtgcgcgaggtaccaccaaaaagcgagcgacccaacgtgatgcagctggcgttacacaccaaaattaaactgttctatcgtcccaaagccatcctgccggagaagtatagccgctgggataaccagctggtgctgcataaagtcaacggcggttatcagatagaaaatccgacaccctattacatgacggtaattggtattaccgccgcgccgaaagtggcggtggctagcggatttcaaacggtgatggtgccgcctaagtccaccgcgatggtcaatagttcgcactataccacgccgcacgtcaccacgattaacgacttcggcggtaagccaaccctgccgtttagctgcagcggtaacatttgccgagctgcagaaaccccggctacctga

SEQ ID NO: 177467 - DNA, 594 bp, Klebsiella oxytoca
atgaaaaaaggatttggtcgaaccaccctcatattgtggcttttgacggctggaatcgtttctgctgcgagcgccgcaaactgggacaccgatggcctgaacggtgggatacgcgctagcggaacgcttgttgcgtcaccttgcgcgttgctgcctgagtcggctgaacaagagatcgatttgggcagtaccattgcctgggggctggaacggccggggagcgtgacgccatcagtacaggtgtacatcaaattagatcgctgtccgggagagtatcagtttatgcgcgatcgccaacagatgcgcggtgccacgatgttaaacggacagtctgcggtaagaatgactatctatggggaagcagaaccgatggatgaccgctttttccgggtgcacggtggggtcgaaggcgttgcgctgcgcctcagcgaccgaaagggagagctcctgcgacccgcgattcagagtcggccgcagattctctaccccggacgcaacgatttggtgttacaggctcagctatggcgtcttcccgttccgttgctggctaatgaatggcgcagcgtggtgaatatcggcctggagtacgaataa

SEQ ID NO: 177468 - DNA, 528 bp, Klebsiella oxytoca
atgcaaaaaaacaaagtgcgcgtacttagcctggcaagctttcctctcatgcttttgctggctggcgtatcggtcacgcatgctgatactgacgtctatttctccgggaatttgattgccgatccctgcgaattgcacgttgactcggaagatcagattgtcgattttcgtaacgtgccttctaagacatttatgaaatatccccgcagtgaacgtgagcgtttttccatctggttgacggagtgcgatctctcgcttggcgatacggttaccgtaacctttatgggaaccgaagatagcgctcagccaggactatttgcggttagcggaacagcgagcggcattgccattgcggtggaagatgagaatggtgtaccggttaaaccgaatgtacctatgcgaccggcagcattgagatcaggagacacctttttaaattttcaggcctttatttctgcaccagtacacagtctggtcagagaaggggactttgagtgcgtcaccacttttcttctggaatatgattag

SEQ ID NO: 177469 - DNA, 390 bp, Klebsiella oxytoca
atgtttagattaggatgcatagccgcgatcattgctggtacatttttaacgggttgcgttggaaaaaaaattccttctcaggtgacttcgtccatggaatccgtagagcccccagtgacctcagacggagagctggatatggtccagtgcgaaaaagagcttcaggcactggagtcgattaatcatattaagcatgtcgatctcaaatcacgctttgagcgagtgatgctcggcgcttccggttataccaatgtaagaggttccgttaatcctgaaacacgtaatgctattgatgctttgtataagtttcaggcggtaaaattatgctcggagatccgagccgaaatgctcaatagcctggcagcgaagccaaccggtgagagtatctaa

SEQ ID NO: 177470 - DNA, 1380 bp, Klebsiella oxytoca
atgggtcgtagagcagggaatgttttggtcctgattatgagtatcatttcgatttcatcttcgcaggcagatgtgttgaattatgcccgtgaatggacgtcacgcaaggacgaaaacaaagccatcacatccccgtctcagccccagacggaggaagaaaaatcctctgctacgcgtcaaaaatctgctgtaaagcgttctctgcctgataaggagaaatcgacagctcagcctccagcagtcatcagaaaaacaatcgcgccgccggctgttggcgctgacaagcgaatgcaatcaccggctaacaggccgacggaaccgacagctaagaaggcccgaacggcttcgggtgacaacgtcacctcagccgctggtgtcacgaaaaatagcgctttaccggaaccgcacgttttagggggctggattaaggctttgatacaacatttgtcgcttagcccggcagagatcgatttacgtaaaaacctccagttggcccgtaaagaggtacagagattgaagaatgaactcattctgcttcgccgcgaagtacaacagtcagatagtacattggcggagcaggtcgtggctctccaggcaacttatgagcaactggctgcggcagaggaaaaaaatgttactcaacagaatgagctccaggcgcttactgcgcgcactacccagctggaagaaaaaaatgcgcagtggcaagtattaaccagaaaattacagtcgagccttaaggaagcgcactatcccgcactgccagcaactgacggtgaactggcggattttgcggccgggatggcgatgggttatgacattttggcggtactcgaacaacgggatgaacaacagatacatattgataaggaagtctttctggccggcattacggaaacgatacgcggcgaacgccgattgtcgcaggaggattttgagcgccaccttaaacgcgccaatcagcgagtagaagaagcgatgcacaagttcaggcaacaaaaggaagcgcgggatagcgcatggctggcgcaatttattcaagaggaagggacgcagagtgcaggtgaacaggcctggtataaagtcatccatgcaggcgagccgctgttcgaggatgagcactctgaagcggcgctaaccatttcggtcaatcgtcgtctgtctgatggtaccgtgattgcggacacagatataactggcctggtattacaagaaaaattttccgacctccctggatggcttcggaaagtagtgaaagatatccgtctgtacggtgaagcagagttagccgttaaagttgatgaatatggtgttccacaagaacgcggtaattatattgaacattggcgcatacgtgtaattgaacgacagactatgtaa

SEQ ID NO: 177471 - DNA, 975 bp, Klebsiella oxytoca
atgatgagtgataccagtggtacatatttgccagtttatgtggcaactgagaacaattatttttctcagggaataatctttctcctggaggagctgtttgaggatgagtttagcggaaaaattactgtatccttagtcagaaaatcgcgcgaagccgatctcatcgtgcaggtccaatcacctggagaaaaagcgtttgactgggtcgattgtcaacagtttcgcacccacaatgactataagtttaagcttctcaataaaaagtggctaagcgtttatccacgtagtgaacattacgacaaaaattttcattgcccggttgtcagttcagtcatcgcgatgagaaattcggtaaccactatccggagaaaattgttcatgctgttttttgccgatctcatgtgtggccctccggacttacgtaaaccaaactgtagcaaatgtcctggcccctaccagttgacatggcgggaacagctaatgctaggctatttgagccagggattaggccacgatgaaatttctcgcagaatgggctgtagtattaaggcgcttagcagttatcgacgctcgattatgcgtaaagtcaatatcacccgctatagcgatttcgttatgtggctaggtaaaaaatccgtttctgataaatatactgaggttgttaataatcacgagcgtgatgcggatgaagaccagctaatatggaaaacaacgttgtccggtaatttggagagacagctggatgataaagagcgagctttgcaaagtattaaacgattggtcaataaacggttaagaaaaagcgagctggatgatgaggtatggttaacaactcgagaaatagccaatgagatggatatcagtatctacagcatgcgttatttattatgccagatggaaacaaacggtaaagtgattagcatcaaaaccgggaagggtagaagccatactctgcgctggaaactggcaagttaa

SEQ ID NO: 177472 - DNA, 756 bp, Klebsiella oxytoca
atgaaacttaaattaatgacttttctggggattatcttgtttaccggaagccagcatttggctcaggcggcattatccgtagagcgctcccgggttattttcaatgaaggggagaaatctgttggattgagcgtgaaaaataataatacgcaggatccttatctcgcccaagggtggatggaaaacgagaaagaagaaaaaataaacggcccgctgatgattttaccgcccgtacaacgtattgagcctgatggtcgaacgatgatccgcgtccagcaggtcgccgaaacgccgtctctgcccaccgatagagaaagcgtcttctggcttaacttacgcgagatcccaccaaaatccgataagcctaacgttttgacgctggcaatgcagacccggatgaaagttttctggcggcccaaggccctcaaggtcgatccgcttctcgacgtggtgccgggggctgaaacgctgacccttacccgcaagggggaccgctatgaggttgagaatcctacgccctatcatttttcgtttgtcgaagcgcgcggcagcctgcacggtaaggcgctggatgattttgagcctgtcatggtttcgccaaagggcaaagcgcagctgccgttatccgcatcccggatgggcacgacgccgacgctgatgtttatcaatgattatggcagcgcacggttactgccgtttacctgcactggcatcgcctgccgcgccgggaaggtggcacaaccaaaggaaggttaa

SEQ ID NO: 177473 - DNA, 528 bp, Klebsiella oxytoca
atgacacgccaacgcttaacgataatccggatgcacctgatgatggccggagccgcactgcttcttgctggcggacaggcgagcgccgctgaaggagacaccaccactatcaccatcaacggcaccctgatcgatggaccgcagtgcgttattgacggtaacgataccgtagacgtgaaatttggtgatgacctcattactcggctggtagacggggtgaattataagaaagagatccagtacggtctgacctgtactgatctgaacagcaatgccctcaagctgacgattcgaggctcgctggcgagttttggctccgggcttctcctgaccagcaagggggggctgggtatacagctttacagcggaagcgcaggcaccacggttatgacgcccggcagctacgtcaacttcaatggcatagccaataaacccaggctatgggccgtacccgtggcgcaaaacaacgctacgctcaccgcaggtccgttttccggcacaggcaccatggtcattgactaccagtga

SEQ ID NO: 177474 - DNA, 486 bp, Klebsiella oxytoca
atgagccctgtaaacctgcgtaagctactgcttcttcttacggtgtgtattagtggtagcgtgctggccgacgcaacggtcaactttagcggcacgctgatagaagccccgccgtgcgtggtgaataacaataatgttatcaccgtcaactttggcaacgaggtgatgaccacccgtatcgacgggacgcagtaccgcaagccaattgacttcgatttagattgttcaatggcggtatcgtcgaaacagaaagtgcgcattacgggtaccccggcaagttttgacagtaccgcgctggcgggagggaaaagcgggttaggcatcgctctctacaatggtgatacccgtcttaacctcggctcctggctgaattttaccgatcccaatatccccaggctttacgctgtccccattaagcaaagcgggataaccctgagcggcggggcattcagggttatggcctcgctggtcgtggagtatcagtaa

SEQ ID NO: 177475 - DNA, 525 bp, Klebsiella oxytoca
atggcacagggaatcaacataatgagattgattggatatgcaccatttcttctggccgcattgatgatgacagggacctcatcacttcaggcggcagacccggaaaaccttgaatttatcggcaccctgataacgcctccgtcttgctcaataagcgaagatggcccggtatatatcaacttcaatgatgtccgcataaaaaaagttgcggagggaagatatcgtgaaaccgtcccgctgaccttgaagtgtgaagagagcagtctggcctggcagttgcggctcagcgtacgcggtaatccggccgggtttgacgccgataacgccaccgtggtgagcgcagaacaggccaatcttggcgtgaaaatcttccagaacggccagccgtttaaactgggcgaggccattaacatcaatagcgtgacgttgccgactattgaagccctccttgttcagcgtgatggggtggaattggtggaaggattatttaacgccaccgcgaccctgcgagccgaatatcagtaa

SEQ ID NO: 177476 - DNA, 855 bp, Klebsiella oxytoca
gtgaagaaaaagctatttctggccgcctttgcggctgctataaccgtgccgatctctgttcccgtgtacggtgaaaactatcggtggaaaacaatcactgcagtaaggttggtggctttcggttcgggtactgagtggattatcaccacaggcgatattaccgtgagttcaggtagcgtcagcctggacacaccagcgaacttaggtagtcatggcggacttttggttgcaaatgcgctgactgcggatggctacttttggggtacctctgatgttgccactagttatcctccgcccggcgtcccgtataagggaacctggcgagaagtccttaacgcgagcgtcgggagcgtcaggaatcagatttccatccgaaattatggtgtcgttgggggctcttctaccgtctgttttggatacacaattcgtgaagccaatggcaactttgatttttccgaccttgtttatcccccaggtgccggtagcggtataaactgcatgacggcaccaccactaaacgaatggtgtgctatgaccgtaccgcaggtgacgctaagtttcggtacgctaatgcttgaccaggcagtgggcaaaacggctgatagtacggtgggcgtttcctgcacctcttcctcggttagctatgtgttaaagctacaaacaggcaatacttacatcccgctcagtaacggcatgcgcgcaaatctggggcttgggacaactaactcggcgccggggaatacgacctactctggatctcagtcctcgctacggttaagaggtacgctggctggaacgcctacctcaaccggcacctttaacggttcgggcgtgatgatggtggtttataactaa

SEQ ID NO: 177477 - DNA, 435 bp, Klebsiella oxytoca
atgggactttacaggagttcatcacatgtatattggcgttgcaaataccacatagtctggacgcccaagtaccgattcaggatcctgaaagataagctgggtaaggagctgtacaggacgatctatatcctctgtggaataaaggattgtgaggttctggagctaaatgttcagcccgatcatgtgcatctggtcgtcatcatcccaccgaagatctcgatatcaactctaatgggccatctaaaaggacgcagtgcaatcaggctttacaatcgttttccccatatcaggaagaagctatggggaaaccatttttggtcccgaggctactttgtcgatacggtgggagtgaatgaagaaattatcagacgatatgtgaggcatcaggagaaaacggaacaaacgcatgaacagcaaatggaattgctagagtag

SEQ ID NO: 177478 - DNA, 690 bp, Klebsiella oxytoca
atggaactgctgctattgagtaactcaacgctgccgggcaaagcctggctggaacatgcgctgccgaccattgccgggcagctaaatggccgccgttccgcggtattcatcccttttgccggggtgacgcaaacctgggatgattacaccgcgaaaaccgccgccgtcttcagcccaatgggcgttacggttaccggtattcacagcgtcgcggacccggtttcggcgattgagaacgcggagatagttatcgtcggcggcggcaatacctttcagctgctgaaagagtgtcgcgaccgcggcctgctggcgccgattgtggatgtaatgaagcgcggggcgctgtatatcggctggagcgcgggcgctaaccttgcctgcccaacaattcgcaccaccaatgatatgccgattgtcgaccctaacggtttttctgcgctggggctgtttccgctgcaaattaacccccacttcaccaacgcgctgccggaaggccacaaaggggaaactcgcgaacagcggattcgcgagctgctggtggttgcgccagagttgacgattatcggcctgccggaaggcaactggatacaggtgacgcagggccacgccactctcggcggcccgaatccgacgctggttttcagagccggagtggaagcggtaaccctgaacgcaggccatcgtttctga

SEQ ID NO: 177479 - DNA, 303 bp, Klebsiella oxytoca
gtgcgtgaacgtacggcaaatcaaggtgattcggagaaatctgagggggttttaaggaaaagacaggaggatattctggatatttccgggggaaagcttagcggagggatccgggcgacagcaccttttggctctgccgcccgaacaacattaatgcagcttcagacgcgggcgaataatacggttgatacgccctaccagcatcatcaggccggttttgaagtaaccgtgcagcgcaatctggtgcatacggtacagagagatatagacgaaacgcgcaatgcgcccttcaatcatcattga

SEQ ID NO: 177480 - DNA, 1584 bp, Klebsiella oxytoca
atgcaaagtcatgttgctgcccacgggatggcggtcgccccccatcatctggccagccaaagcgcgctggcggtactgcgcgaaggcggaagcgccatcgaagccatggtcgccgccgccgcgaccattgcggtggtttatccgcatatgaacggcctcggcggcgatggtttctggcttatcgtgccgcccgagggcgaccccatcgccattgacgccagcggcgcggcgggttcgttagcgacgccgcaggcctacgccggcctcgcgcagatcccccatcgcggtccgcaggcggcgctgaccgtggcgggcaccgtcagcggctgggacgaagcgcttaaggtgtcgcgcgagttaaccggcgcggccctgccgctcacgcgtctgctggaagatgccatcggctacgccgcgaacggtatcccggttaccgcgtcgcaggccagcgcgagcgccgataaattcagtgaactgcgcgaccagcccggcttcgctgaaacctttctggtggacggccagccgccgaaggccgggagccgctttctgcagccggcgctggcgaacaccctgcgccgattaaccgaagaaggcctggatagcttctatcgcgggccgctggcggagcagctggcccgcgggatggaaaagtacggactgcccgtcacccttagcgacctgcagcagcatcgcgctcgccgcccccagccgctcaggctggcgcatcgacacggcgaactatggaacctcgcgccgccgactcaggggctggtttcgctggcgatcctcggcatcaccgacaggctggcgatggccgacgccgacgatgcgatgaccgtccaccgtattgtggaggcgaccaagctggccttcggcctgcgcgacgcgcacatcaccgatccgcgccaccttgatgttgatattcagagcctgctgacaccggcggcgctgcagccgctggcggataacatcgacgaccagcgggcggctccgtggggcgcaggtaaaggcccgggcgataccgtctggatgggggtgatcgataaaagcgggttggcggtctcctttatccaaagcctgtaccacgaattcggcagcggcgtggtgctgccggagagcggcattgtctggcagaaccgcggggcatcgttcagcctcgacccgagccacctgctggcgctggcgcccggtaaacagccgtttcacaccctcaacccggccgcagcaaagctcaacgatggccgggtgatggtttacggctccatgggcggcgacggccagccgcaaacccaggccgctatcttcacccgctacgtcatgcaaaacgcgccgctgcaggaaagcatcacccgaccgcgctggctgctggggcgcacctgggggcagacttccgactcgctcaagctggagggccgcttcagcgccgaaagcgttgaccgcctgcgtcagttggggcacgaggttgaagtgctggccgatttcagcgaagccatgggccatgcgggggcgattgtacgtcatcccaacggcctgtttgagggggccagcgatccgcgcagcaacggctccgccgccggatattag

SEQ ID NO: 177481 - DNA, 228 bp, Klebsiella oxytoca
atggacaacatcgttcttcaaaaggtcatcgccatctttctgatggtttggtggggttgggatattctgaaaagaaaaaagaaaaagcagaaccccgatccccttattgcgcaggcaaacgctgcggagcgctatcagtggcgctacttgcgttggggatggcgactcttgcaattcgcctgtggcgggtatttgctgataatgatggtcacctttctgttacgctag

SEQ ID NO: 177482 - DNA, 1173 bp, Klebsiella oxytoca
atgattaacggtattaaacctgttggccggtcgttacgctggggtatggtgggcggcggcggaagcagccagattggttatattcaccgctccgcggcgctgcgcgacggcacgtttaccctgctggccggggccttcgatattgacgctcagcgcgggcgtgagtttggccagcagctgggcgtggaggccgggcgctgttaccccgactacgaaacgctgtttcgcgaagaggccgcgcgggaggacggtattgaagcggtttccatcgctacgccgaacaatacccactacgccatttgccgcgcggcgctggaggccggattgcatgtggtctgcgaaaaaccgctctgttttaccggcgaagaggccgatgcgctggtggccctgagcgaaaaacagcgcaaaatcatcggcgtgacttacggctacgccggtcatcagctgattctgcaggcgcggcagatgattgagcaggggctgctgggcgagatacgcattatcaatatgcagttcgcccacggttttcataaccagcctgtggagcaggaaaaccccagtacccgctggcgagtggacccgaagtttgttggtcccagctacgttctgggcgatctcgccactcacccgctgtttctggcggagaccatggcgccgaagctcaatatcactcgcctgatgtgctcccgccagagctttgtcaaaagccgcgcgccgctggaggataacgcgcatgtgctgatggagtacgacaacggcgccgtgggttcgatgtggtgctcggcggtcaacagcggctcaatgcacgggcagaaagtccgtatcgtcggagaaaaagccagccttgagtggtgggatgaacagccgaatcagctgcgctatgagattcagggcgagccggtgcgcattctcgaacgcggtatgccctatctggacccgctggctctgcacgatgaccggatcggcggcggccatcccgaagggctgtttgaggcctggtcgaatttgtaccgccgcttcgccatcgccatggatgctaccgatcgtcgcgacgctgctttgctggaaaacttctggtacccggatgccaaagccggtgcgctcggcgtgcattgggttgagaactgcgtacgttcagcagacagtggcgccagctgggtcgatttccattaa

SEQ ID NO: 177483 - DNA, 1572 bp, Klebsiella oxytoca
atgtcacaggcaattcagcataattctcaggtctcgatgacccgccacccggattttctacgcaccgccgagacgctccggcccgcgctacgccgccaggcgtacccgccgatcgccgtggtggaagcccacgccgacgccacggcgctgtttggctggcgcgccgaaccggtaagttccccggccgcgttttaccagcgcgagctgagcagcggcgatagcgtcattattgattttggcagccactttgttggctacctgcattttctctgtcagagcgtcgggagcccaccggacgctccggcccatctgcagttcaccttcggcgaaacgctgagcgaagtgtgtgagccgttcagcgattaccagggctggctaagcagcagctggctgcagcagcaggatctgtggcttgatgtcctgccggccgaagttgatctgccgcgccgctactgcttccgctatctgaaggtggaggtcaaagccgtgtcgcgcaagtttcgtctgcagttcaaccagattcaggtgaatgccgttacctccgccagcggcgcatgcccggcagcgacaaccgccgacccgcagctcaaggccatcgacagcgttgccgttctgaccctgcaaaactgcatgcaggaggtgtttgaggatggccccaaacgcgaccgccgcctgtggctcggcgatttacgtttgcaggcgctggtgaacgatgtgaccttcgcccgtcacgatttagtacgccgctgcctgtaccttttcgccgggcatactcgtgaggacggtatggtatcggccaacgtgttcgtgcagccggatgtcattgctgacgatacttttctttttgattattctctgttttttgttgacgttctctacaactatctgcaaagcgcggaggatattgctacggcccgcgagctgtggcccacggcccgtcgtcagattgaactggcgctgaaacgctgcgacgcctccggggttgtgcgcgatagcgacgactggtgggtgtttatcgactggcaggcatcgctgaataaacaggctgctgcgcagggcgtgctgatttactgcctgcagcgcgccgtctggctggcggagcgtttcgaacctgagctggctgtcagctatcgccagcgtttacagcagcttaaagctgcggccctcgatgtcttatgggacgagcagcaaggcttctacctcagcggcgagcagcggcaggtctcatgggcatcgcaaatctggctggtactggcggaagtcggtactcctcagcagcgccgggagatcatgcataatctggagcaaaatccccccgcgatcgccatgaacacgccatacctgcgtcaccactatattgccgcccttctgcagtgcgggctgcgcgacgacgctattgcgcagatcaaagcctactggggagcaatggtcgactacggtgccgataccttctgggaaatcttcgacccggcgcatcctgatttttccccttatggcagcaagctgataaacagttattgccatgcgtggagctgcaccccggcctggtttattcgccagtacggactttaa

SEQ ID NO: 177484 - DNA, 1002 bp, Klebsiella oxytoca
atgtcttatcgaatcagtatcctggataaaagcccgctggcagccggagaaacggccgcccaggcgctggcgcgcacattaacgctcgcgcaacaggcggaagcctggggatatcaccgtttctggatcgccgaacaccacaacaccgaccagctcgccagcccgtcgccggaactggcgattgcctggatcctcggccagacccgcagcattcgcgttggctccggcggcgttatgctgcagcactacagcccatataaggtggcggagaacttcaatatgctggcttctcttgccccgggccgcgtggatctgggcgtgggcaaagcccccggcggactgccgctctccactcgcgcgttgcagcagggacttaatctccagcaaaaggggagttttgccgaccagctggcgcagctcgacaactggctgtcgctgaccgaaaccgatggtgaagagagcgtccgcgcaaccccaatcccgccgcgtcgcgccgacggttttctgctcggcgccagcctggagagcgcgcagctggcggcgcagctggactggaacttcgtcttcgccgcccatctcaacggcgataagcaactgctgcgggaggtgttaacccgctggcgcgaactgagccgtcgcgacgccattatcgccgttcaggttattgtggccgaagaggccgcagcggccgcggcgctggcaaaatccgtcgaagcatggggcgttgagctggaaaacggtcagcgggtgaccgtcggcagcgaagcgcaggcggccgcctttgcccgtcaggcgggcagcaggccgacgcgtatcgcccggcgggaatcggccgtgctgttcggcacccccgagcaggtgaaagcgcagctggatgccttgcagtcggcgtggaacatcgacgaatttattatcgacacgcccattagcgacggcgcggcgcgccttaactccctgcggctgttggcccgggcgcatctgagcgcggaggtccagccatga

SEQ ID NO: 177485 - DNA, 144 bp, Klebsiella oxytoca
atgggtgaagatcataacgtacggtttattaaggttattttaaggttttttttacgtcgtggatcgaatttgacccttcgctatggcaataaattcattatttcgtgtatccatttgtacatcattgaaatttattatttttaa

SEQ ID NO: 177486 - DNA, 300 bp, Klebsiella oxytoca
atggctgcctcacaggaaatggatataaatatgatttacctgaaccatcacgctacaactatcaccgcttctgcagttcgctctaccgtcactgcgttttggttccagacgcatttccagcggcatacaatgcctgcgcgcgttttattgatttaccatctgcatccggtttttccgagctatttgctctctggttattgcgtaaaacgtttgctgcgcatgttattttcggcggcggggtggatactgtcagggatgagctttccgggcatatctaaagattttttcgaatcgtactaa

SEQ ID NO: 177487 - DNA, 531 bp, Klebsiella oxytoca
atgcagggaatagttaaagcagtgccgctgttatgttttttactgctgggctgtgatccggcagaaaaagaagcaccgcgcggcagcgggaagaccagctacgtggcggctaatctgttgggctataaccatatggcaggcacgaatatcaactggttctccgtcaacggctatcgggggcacgccggggggtttacctgctgcatatcgctgccggaaaaatggcggcccaatatgcaggtggcagtggagtgggaggttaaccctaacccgtttccgaaggatctccccagattcagcgaccctaagtatgatgaatatatagaaaaacacagggctaactatcgccattataaagcggtggccactattcccgaatatgaagattcctgcggcctgcaggtgcatttcttgccctgtcagcagattaaagtaacggccacctgccacgggccgactcatcctgaccacccgattaaagaacctttcgatctgccggagcctggccagtgcccgccagaaacgccatga

SEQ ID NO: 177488 - DNA, 375 bp, Klebsiella oxytoca
atgaatttatttgatgagtgtaaagaggcccttggtgctgatttcgaagtgcttgaaggacagagagagaaggatgcgcttaatattttgtataagttcccatttattaatgggaacttattgtgggatgattttaactattcagattatgaagatataaatcatctcatatccgattgttataataaaaaacatgatgtgtttgtttttgtggataacattaacattcctgtttttagaactaacctagtattggttgctgaaaatatttatgacgttacagctttatctcctaagctgttcatttttaacaatgaattgatattacaacctctatttccaacagacataattcgtctgggtataaaaaattag

SEQ ID NO: 177489 - DNA, 7941 bp, Klebsiella oxytoca
atgctgatagtggtggcggaaacgacccgctctcatcgggcgggcgtgtcgccgcaatctggcgccgacgcgcgaaccgggtcgacgctgacgtccatcctggcgccgctggcctttgggtttctgctcgcgttttcctgtctcaccccggctaaggcagcgattgtcgccgataaccatgcgcccggcggccagcaaccgcagatcgccaatagcgccaatggcactccgcaggtcaatattcagacaccgagtggcgcaggcgtttcgcgcaacgtttacagccagtttgacgtcgatgggcgcggcgtggtgctgaataacagccacgccagcacttcaacccaactggccgggatggtcgccggtaacccgaatctggcgaaaggggaagccagagtgatcctcaacgaggtgaatacccgtgatccgagccggctgaatggctatatcgaggttgccgggcagaaagcgcaggtggtgatagctaaccctggcggaattagctgcgacggctgcgggtttatcaatgccaaccgcgcgacgctgacgacaggtcaggtgcagtacagcaacgggcagattagcggttacgatgtcaatcgcggcgaaattatcgtacagggaggcgggcttgatgcgagctcggtagacagcaccgacctgctcgcccgcgcggtgaaaatcaacgccggggtttgggcgcaggagctaaaggttactgcagggcgtaatcagatcgatgcggcgcacagtctgacgacggcgaaatcatccgacggcagtgcggcgccagcggtggcgatagacgtcagcgcgctaggtgggatgtacgcccataaaattcgtcttgtcggtaccgagcgaggcgtaggcgttcacaatgccggcaatatcggcgcggcggcgggggacgtagcaatcagcgctgatggcgcgctcagcaacagcagcgtgattcagtccgcacagaatctgcaactgtccgttaagggcgatcttcacaatcagggccagttgtacgccggaaaagatagcctggtgacggccagcgcgacgctaaccaatgacggcattatcgccgcgcaaggtgatacgcggattgccgccagcactttgcgtagcgcgcaaaatagcacgctcgcagccggattaaatagcgatggttcttccgccagcagcggcgcgctgacgctgaatagccagacttcgctggcgttgaatggccgcaatatggcggctgggacgctgacggcgcagggcagggcagtggatcttgataacagtcgaacctcgggggcgcggattgtggtcagcgccgcgtccggcgatatcacaacccgagatgcggtggtggcggccagcgaaaaactccagttggccgccagcggcaaactcaaaaaccacagtggcctgttgacggccagccagcttgagctgaaagcaatggcgctggataaccagcagggcgtaatccagcagacgggcgaggacgatctacgccttgatttttgcgcgggattggataaccacggcggtgagatcgccagcaacagccatgcattgacgctcagcaccagccagttgctcaatcaaaacggaacgctgttgcataccggcagcggcggcatgtcgattaccagcgatggcgtgctggacaacggcgaaggcactattgccgctaacggcaatatcgttttgtactccgataacattaataatcgcagcggtaagatcagcacgacgcaaggcaatactcagctcactacgcgtcatgagctggaaaattcacaagggaatatcgttgctggcggtagcctttctctacaagtagcaagccttcggaaccagcatgggcaattgattgcggcgcagggcgacctggccatgagctctgaaggagggctggataaccgcgaaggcgttcttgccgcaaatggcaatatcaagcttgacgccgacaatctgatcaaccatggcggaaaaatcagcgcggcgcagggcgacgttcagctcactgcgcgccatggggtggataactcgcaggggaatatcatcgccagcggcgacatccggctacgggctcaaaatcttaacaatcgtcacgggcaggttggctcggcgcagcggggcagcgtcaacctgacgacgagcggtttgctggataatcagcagggcacaattaccgccgttgatgccctgcgtattcagagcgccgctgttgataaccgtcagggagaactgcagtccggcggtaacctgaacatcaccatccacaatcgggggctggataaccggcaggggcagatcgtctccgccgccgctctggatatagcaggcgtcaacctggtgctggctaatacgggcgggacgctacttgccgcgagcaaacttattctcgatgccgattccctcagcggcgatggcgaggtgctctctcagggcgatatgtcactaacgttgcgtcaggcgtttcatcacgccgggaggatcatcgccaacggcaacctgcagtggaatctctccggtttgggactgattaatcagggtgttatcagcgttggccaggtgctcaatctctatgtggcgaagctggataaccgtcaggaaggtgaaatcagctctggcgagaaccattttacggtcaacggcgagttggtcaatcggggactgattgacggtggtttaacccatattgtcgccacgacgttaaccaatatcggtagcgggcgcctgtacggcgacgccgtcgcgctgcaggtggcaacgctgactaacgccgcggagaacggcgtggcggcgacgattgctgcacgagcattgctggcaatgggcgtcggcacgctcaataaccaggatcacgcgctgatctacagcgacggtacgcttaccattggcggccaacttgccgaagacggttcgctcagcggccgggcgggagtctttaataaccacagcgcaacgcttgagtccgccggtgatatggcgatcgatatccaacaaatcaataactacaacgaccatctggtgacgaaagatgtgatggtcgagcagtcatggcgccatgaagcggcgctgaaaggatcggtacagcgcttcgactggtcgctggtcgataccagctataaaaacaaatacggcgttcacgacgccatcatgccggacggtagccgtggcgatgagttctatgaatatcagtaccagcgtaccgttgtggaaacgcaggtggtggaaagcgatcccggcaaaatcctctccggcggccggctcatcatcaacagcgataagctgaataactacgacagccagattatcgccgggggagcgctcggtggcgtgattagcgaactaaacaacgtcgccacgaccggtaaacgggtgaccaccgacgtcggtacccagactcgttggtatgagaaaaagaccagccgcccgtttggcggcaccaaaaccagccaggggaaaaaaagtagcgaatatgaaccgacgcccacggttcagactatcgatctgcaaaccataaagtggcagggcaatacccaaattgatggccatagcagtgtgattaccccgcgcgatcgcgccgatgagccaggtgaactacctgccggacgactggtggaagtgacgccggttaacgctgacggaacggttattcgcctcgtcacgccggatacccgtcttcctgtcagcagtctgtatcagatcgatccacaggctaaagcaggctatctggtggaaaccgatccgcgttttaccaacggtaaagcgtggctcgccagcgactacatgcaaaatcagctgggcgttgatcaggcgatgaagcggcttggcgacggctattacgaacagcggctggtgcgtgagcagatcgttaaactgagcggcgagcgctacctccagggctacagtaacgatgaagagcagtaccgggcgctgatggacgcgggcgtcgccttcgccaaacagtacaacctgacggtcggggtggcgctgacgccagcgcagatggcgctgctgaccagcgatatggtctggctggtcgccagagaggtcacgctagcggatggctctgtgcggcatgtgctggtgccgcaggcttatgcgcgggttaaagcgggcgatcttgatggcagcggcgcgttgctcggcggtgaaaacgtggcgctcagtgtgagccgtgatgtgaccaacagcgggcacatccacagccgcggcgtgacgcaactaaccgcggaaaacattcataacagcggctatatcggcggcaaccagctcacgctaaacgcgcgtactgatatcaacaatattggcggaacgctgcagggcggcgatagcctgatcgcgcaagccgggcgtgatctcaacagcgccagcaccctcggcggcggcccaggtaacatcagcctcgatcggcctgcggggatttatgtccagaatgaaaacggccagctggggctgcaggcgttacataacattaatctgacggcaagcatggtgagtaacagcgcggcgggcagccagacgaagattatcgccggcaacgatctcaacctgcggacgctcgccactacccacagcgaaagcggaaattgggggaaaggcaacgatcgttctttgacccagcgtagcgatatcggcacgcaaattaatggcggcgcggttgcgctgtccgccgtccacgatattcatgcctgcgccgccagcgtgacggcaaccagcagcctgacggttgccgccggcaatgacattaacctcagcagcggcgagtcctcatggcatctgacggaaaacaaccatcaaagcagcagcggcctgctggctcaccgctcgctcaccactcacgatgaagtgtgggcgcagaacgccatcggcagcaattttagcggtgacagtattgtgatgcaggccgggcgcgacctgctggtgtccggcagcagtgttgccggcacccaggacgtcaaccttgtggcggggcgtaacctgaccatcgccaccgccgaggagagtcgccaggaaaaccatctacgtaaagagaaacatagcggcttttccggcactggcggtgttggcttcagcgtcggcagttcgtcgctgaaagccaccgacgtgacgacaacgctgagtagcgccgccagtaccgtcggaagctcacagggcaaccttagcctgagcgccggtaatgtgttgacgattcagggatctgacatggtggccggcaacaatatggcgttgaccggtaaaaccgtgaatattctggcagcggaaaaccagagcacccagacccataccgtggaacagaaaaccagcggcctgacgctggcgttatccgggatggtgggcagcgccattaataccgcggtttccagcgctaaccaggccagcaccgagagcaatggccgtctcgccgcgctgagcgggctgcagtcggcattatcgggcgtacaggcgtatcaggcatcgcagatgcagactgcggattccagtccggagagcatgataggggtcaacctttcctggggtagccagtcatcgaaatccactcagcgacaaacgcagaacaccagccgcggcagtagcctgatggccggcaccaatctcagcattatcgccactgaggcggatatcaacgttgagggcagccagctgcaagccggcggcagcgcgttactcaatgccgcgcgcgatgtgaatttattctctgcggagaacgtcagcaccctgagcggtaaaaacgagagccatgggagttcgtttggcgtcggtattaacttcggtcagggcgcgaacgggttgacggtcagcgccagcgccaatgccgcgaagggccacgagaagggcaacagcctgatgcataacgaaacgcccctcagcgccggggaacgggtgactatcgtcagcggtcgcgatatgacgctgaccggggcgcaggtgagcggccatcaggtgacaatggacgtcgggcgtaacctgacgctgagtagcgaacaggacagcgataactacgattcgaagcagcgtagcggcagcgtgggggcgagcggcagcatgggcggcggttcgggctctctcaacctgagccagagcaaaatgcacagcacctgggcatcggtggaggcgcaaacggggatttttgccggcgagggcggttttgatgtgaaggtgggcgggcatacgcaactgaatggcagcgtgctggcgagcacggcggcggagctgaaccgcttggataccgggacgctgggtttccgggatattaaaaactctgccgagtacagcgtggagcagcagagcgtgggggcgagcacgagcggtagcgtggcggggcagttcctggggaatgcggccagcggtctgctgatgggtgcgaacggcagcggcagcgacagttcgctgacgcgggcggcggtaagcgagggcagtatcgttatccgcgacggcacgagtcagcagcaagacgtgacgaggttaagccgggatgcggcgcatgcgaaccaaacgttgagtccgatatttgataaggagaaagagcagaaccggctggcggtggcgcagaagataggtgaaacaggtcgccaggtgagtgatgtgctcgtgacgcagggcaagctgaacgcgcaggcggcgcagagcgacccggctgcgcgggcagcggcacgggagatgctggtagcgggagggaatgcccatccgagcgaggaacaaatcagcgcgcaggtgagccggacggcgacggcggactacgatacgggcggaaagtaccagaaggtggcgcaggcgataacggcggcgatggagggtctggcgggcggcaacctggcgcaggcggcgagcggcgcagtgagtccgtatgtggcggaaatcattcacagccagacgacggacagcgcgacaggcaaggtgaatgtggaagccaatgcgatggcgcacgcggtgtggggagcgatagcggcggcatcgggaaataacagcgcgctggcgggggcggcaggcgcggtgagcggcgaactgctggggcgctggatagcggcagaatattatccggatgttaagacagaagagctgtcggatgagcagaagtcgacgataagcgcgctgagtacgctggcggcgggactgatgggggggcttagcggaggcagcagcggggatgcggtcgcgggggcgcaggccgggaagaacgcggttgagaataactcgctgagcggtgataaggcccgagaagcggcgaaacaggctgctgaatccctgaaaaatcaggtcagggaaaagctgggtgaaggcaccacttctgccatcgcgaacgccattatcaatggccttgctgataccggcgatgcggcattaggttctgttgactatgctgctgatgcggccatggtgctggcttcctgtgctgtgggtgacagttactgcagtaaagcgatgagcgacctggccgggaagaatcaggcgctggcggatactgttaccacgctgatgcagggtgaaacctggtctgcggttgcggatacggttaaacaggcggctggcgggaatcaagctgcactggaagcaacgggcgggctgctggcaggcattatgttgccagggaggaaagtaccaagtccagcgactcgaattgaaacaatattaaaatctgaaaaaaactgggaaaatgctcgaaataaggcgctaaatattgtgggtaatttgggtgctgactctaagcctgtaattgggcgactagaagtgagtgctgggaatggaaaaataattggacggcaatctaatgatggtaaggttggttggcgtgttgattatgatcctgaaaagggaacgcacatcaacgtatgggattactctcaagggaaagggccgggcaaagcagtcaagcaggttataccatttgaaggtaatgaaaaagcgtttgaaaccatattgaaacagttgaataggtag

SEQ ID NO: 177490 - DNA, 1683 bp, Klebsiella oxytoca
atgaataaacggagtttaattcataaggcttttattatctctgcgctgccagtgtgggggtacgccgcgcctgcggatatcgtacgtgagcagcagttcatcaaccagcagcagcgccagcaagccctggaaagtcagctcgcgccgccgtcaccggatattcatttatccgcggaaggagtaaatatcgatgatgggctatttcccgttgaacaaccttgctttgctatttctcgggttattttgcagggcgccgaagccttaccgcattggcttccgctccagcgccagacaaataaagtgaatgggcgttgtctgggaggaaagggaataaatctactgatggcccaattgcagaatatattaatcgaccgcggttatatcaccagccggatccttgctccgcagcaggacttaaaaagcggtgttttacgcctggtggtgatgccgggttatatccgtgaagccaggcttacggcgcagagcgatgattatctgtggctggcgagcgcatttccggcgactgacgggaaactgttggatttgcgcgatattgaacaggggctggaaaatctgcagcgcctgccgacggttcaggccagcatggaaattgttccgggcgagacgccggggcaaagcgatattgtcattaaccgccaacaggagcgcttctggcgcatcgacgcctcgctcgatgattccggctctaatgccaccggccgttaccaggggaacctgacgctgtcactggataacccactatccttaagcgatcttttttacctttccggttcacataacctcgatggcaacggcggtaaatcctcaaagaacctgaccggccactattcggtcccgctgggctactggcagttcgtattaaccgccagccagtacgattacgtgcaaaccgtggcgggggctaacggcgattaccagtacagcggtaaaagcaagaacgttgatttccagcttagccgcgtactgcaccgtagcggtagtcagaagaccactcttagcgccgatgtgttagcccgcgagcagcgtaacttcattaacgacaccgagattgccgtccagcggcggcaaacggcggcctggaagcttggtctgcagcatcgccattaccttggcaacgccactctcgatagcggagtgagctaccagcgcggtacccgctggttcggcgctcaacctgcgccagaagagcagtggggggaagcaaccgccctcagcaagatcctgcaatttaatgctcagctcaatttgccttttgccttgggcgggcaacgttttcgctttaccagtcgctatcagcggcagatgagcagcacgccgctgacttcgccggatatgttttccatcggcagccgctggacggttcgcggctttgacggcgagcgcaccctgaccgccagccacggctggtacgtccgtaacgatatcgcctggtcgaccccgttgccggggcaggagttttatctgggagcagattacggcgaagtcggcggcgctggcagtgaaacgctggtgggcaaacacctcgccggaggcgtggcagggttgcgcggccagtacctacgcgccagctacgacctgttcgccggtatccctttagacaaacccgatgattttaaaaccgagccagcaacttttggtttcagcgtcagctggagctactga

SEQ ID NO: 177491 - DNA, 5214 bp, Klebsiella oxytoca
atgaaaacggataaacattctgttgattttaataaaattctgtctttcgatttagagcttacgcgtgatgaaaagttaaggcatatgggggccgtgctggcggaacgcacgttgagtttgaagataaatcaggatgaagcgattcatcaattggatgaaatggcaggcgatgcagatttaatcctcggtcataacatactggatcatgatttaccctggattgccaaacaacgcgtacgtgctcaaatattattagataaaccaatcattgataccctttatttatcaccgctagcttttcccgcaaatccataccatcggctgattaaagactataaactggtaagagatagcattaacgatccagtgaatgacgctaaattatcgcttcaggtattcaccgagcaaatatgtgcgctgcaagaaaagccgctggctcagttgcagctatatcagtatctttttgagcacggcgttgccagccatttcagtacacgtgggatggccagcattttttccgcactgacgggtcaggcgtccatatccgccgtagttttacctacgctagttaaatcggttgctcagaataaagcatgccctaaccagcttaatcgggttattggcgatgctcttaaacagcctttgcgcttactaccattggcttttgcctgtgcctggctccccgtatcgggagggaattctgttttaccgccctggatatggcgccgttttcccgtcaccgctgatatcatccgcgaactgcgtgagcaaaaatgccagtctgaaacttgccgctactgctgtgaaaaccatgatgctcgtcggcatttacagaaaattttcgagctgaacgattttcgtaaacttcctgatggctcgccgttacagcgcaatatcgttgagtacggattagctagtcgttcactgcttgggatattaccgactagcggagggaagtctttatgttatcaacttcctgcgattgtcaggaatctgcgaaatggttctttaaccattgttatttcgcctttacaagcgctgatgaaagatcaagtggataatttacgtcataaggcaggtattaaaggcgttgaggccatttcagggatgctaactttacctgagcgcggcgctattcttgagcaggtccgtaagggggatattgcgattctttacctctctcctgagcaattacgtaaccgcgcggtaaaacaagctatcaagcaacgtcagattagtggatgggtttttgatgaggctcactgtttatcaaagtggggccatgattttcgtcctgactatctgtattgtggcaaggttattgaatctttggcgcaggagcagtctgtgcagattcctccggtattttgctataccgcaacggcgaagttggatgtgattaatgatatttgtcggtattttgacaaaaaattatcgcacccattagctcgtttttcagggggagtagaaagaattaatcttcactatgaaatcattgcaagtaatggcttgagcaaaattagtcagattttgaatttgctcgataaatttttttctaatgatgatgaaggtgcatgcattatctattgcgcgacccgccgttcggtagatgaaatcagcgatgtgttgacccaacagcaacctttaccggttgctcgtttttatgcccggcttgaaaatagtgaaaagaaagaaatccttgaagggtttattgctaaccgttatcgagttatttgtgctactaatgcctttggcatgggaatagacaaagaaaatgtacgtttagtaatacatgcggagatccccggttctctggaaaattatctccaggaggcagggcgtgctgggcgggatacgctggacgcgcattgtgtgctattatttgatgagcaggacattgaaaaacagtttcgccttcaggctattagtgaagtaagctttaaagatatttatgcaatatttaagggaatcaaaaagaaagttaatgaaaataatgaagtcgttgccacaagtattgagctaattaatcatcctatggttaaaaccagtttctctatcgatgataacaatgcggatactaaagttaaaacggggatagcgtggctggaacgtgttggttatgtggagcgacttgataatataactcaggtttttcagggaaaagtggccttttcttctctggaagaagcgcaaagtaagatggcagcgctgcacttgaatcctgcggcgatggttctctggaatgctgttttacaggcgctattaaatgctaatgacgatgacggacttagtgccgacagcattgctgatgaggttgcccaatttcttccgcataaagaaaataatacgtcaggaattgaagcaaaagatgttatgcgcgtattgacacagatggctgatgttggcctggtcaccaggggaatgctgctgaccgtacgtatgcgccccaaagggaaagataatgcgaggatcacaactgagttaattcacaatattgaaatcgccatgttagggctgctgcgcgaagctcatcctgatattgaactggggatgccatggcctctccagattgcggttatgaatcaagagattattcagcaaggctatgatagaagtaataccacgttactacaaaatatattatttagctggtctcaggatgctcgagcaaacggtcataaagggcttattgattttcgttatggtacaaggaacagctaccagattattatgtatcgtgactgggcatatatcgaaagagccattttacaacgtcatcgtgtgacaagctccgtactgaattttatttatcaattggcattggatagtgatgaaagcagtatcaaaaaagtgatgctttctttctcactggaacaggttatcgattatttaagaaaagatgttgatattattccaatgatccaacagagacaggggggggatgagcagcagtggctgatggctggtgcagaacgtgctctactttatcttcatgaacaacatgccattgtgctgcaaaatgggctggctgttttccggacagcgatgagcttgaaattgcaggctgaaaaatcgcaacggtatgtcaaagctgattatgaaccactggctctccattatcagcaaaagacgcttcagatccatgtgatgaatgaatacgccaggcttggtcttgaaaaacctaactatgcccaacggctcgtacaggattactttgctatggatgccgagtcatttgttccactttattttaaagggcggcgaaaaattctcgatctggcaaccagcgaaagctcatggaaacgcattgttgaaaatttgcataatcccgatcaggagcaaattgtgcaggcgagccttgaacaaaatacgttagttcttgccggaccaggctcagggaaaagtaaagttattatccatcgatgcgcctatcttttacgcgtgaagcaggtcgacccgcgtaaaatcctgttgctctgctataaccgtaacgcagcgatttccttaagacgcagattgaagtcgttgcttggtaaagatggcgccagcataatggtacaaaccttccacggattagcattgagccttacgggataccagattgagcggaaagataatgacgaaatcgattttgataacctgctctggaaagcaatagctttactcaaaggcgatgaaacgcagctcgggttagaagttgaagaacaacgtgaatacctcctcggcgggcttgagtatttactagtggatgaatatcaggatattgatgagccacagtatcagctgattgccgcgctggcaggtaaaaatgaaagtgaagatgatgctcgtcttaatctcatggcggtgggtgatgacgatcaatctatttatggtttccgtgatgccagcgtgcgatttattcgtttgtttgaaagcgattactccgcccgtactcattttttaacgtggaattaccgctctacggccaatattattgcatgttcaaattatcttatcagtcataatcaggggagaatgaaatgcgagcatccgatcgtaatcgatcgcgctcgccagatgcttccgccaggcggagagtggagcgcacttgaaccttcggaaggcaaagttgttatccagcattgtaccggcgcggctcagcaggcggcagaagtcgtgcgccaaattcagtatattcaacggctgcagccggaatgccctcttgagaaaattgcggttattgcacgcaatgggctcgacaaaaaggagcttatttgggtccgttcagcccttgcggatgcaggtattccttgccgctttgcgctggagaaagattatggtttccccattcgccactgtcgggagatcgccaattatctgctatggctacgagaaagagcgctcgagtcgctgacgccagcagagctgtgtcagcaactaccggggcgagaccaggcgaaccgttggcacgatattatttatgaattaattgagcaatgggagctaagccagggaggcgagccattacctgccgcttattttgaacatttcatactggaatatttacatgcccagcacagccaggttcgctttggcctgggggttttgctgagcaccgtacatggcgtaaaaggtgaagagtttgagcatgtcattatattagatggaggttggcgtagttcgcactctctgcaacctgaaaataacgaagaagaacgaaggctcttttatgttggcatgacgcgagcgatatcccgacttgttattatgcatgatgatcgtgcgccaaatccctatatcgaacagttagatccagcggtcatcagccatactgctgcacaagccgttgcgcctgggatcttacgtcgtttctcgatcatcggattgcgccagctctatatcagttttgcaggtggacatccggctggtcatcccattcattcgttacttaccgatacgcaggttggggatagcgtccaactggtctctgtcgggaataccatcaaggtgaatgctaatcaatcggcaattgcgcagctttcaagtgccggaaagagccagtggcaattttctctttccgggatccgcaaaattgaagtgcttgccatgctacagcgcagcaaaacactaacagcagaggattatcaagttgcggtgaaagtggacaattggtatgtaccgatattattggttgaaacccgtgaagaagccgcttatgacaatattacttga

SEQ ID NO: 177492 - DNA, 465 bp, Klebsiella oxytoca
gtgccacaacatgttttcagctcgcttagccacggttttcttgttaatcaggtgcttcggcccgacgttttccgagatcgagttgccgccccaggagccgcagccgagggtcagggaaggggcgaggctgaagttgtagaggtcgccgatcccgccgtgggaggtcggggtgttgatcaggatgcgcgcggttttcatcttttcgccaaacagcctgacgcgatccgcctggttatcctggtcggtatacaggcaggaggtgtggccgatgccgcccatatcgaccagcttcaccgctttctccacggcatcggcgaaatccttcgcccggtacatggcgagcgtgggcgacagcttttcgtgggcaaaaggctcgctgtcgtcgatgtcccggacttcgccaatcaggattttggtgtccgcaggcaccgcgatcccggccattccggcaatattgaccgctga

SEQ ID NO: 177493 - DNA, 870 bp, Klebsiella oxytoca
atgaaatcttgggtaaaaatgaatagttggacatcagatgacaccaaagcagtgaaaacgtggtttgatttggacaaatatcgaaagtttgaaaacatttctattaatatgctttaccatgaaatatgggcgagaacctattttttcaaaccagtaatagaagaaggaatgcagaaaacagtattgaaaaattatatgcagatattggatggtgatccttttcttatcaaagggaagcacttaaattatatggatgccgaaaataaattatatcaacccccatacttttttattactactgttgatcgaatagcaaatatcagttttgattgtatgagaaaggctttattcattagagcaaatacagaacaatataaaattgattccactattgaaaatgaatatatttccgaaaaaattcctgaacagtttcctactacgattatgttagaaatcgatcttgcgggtggaagcgatgatgagatagctgaggccctgcgagtatcattaccacaatggcgaaaagtaaaaggcgttaaacctgcaccacttgatgcagtcagatttggttatggggcaataaaaaaattaattagctatcgaattatccctatgcttgatttgctcgcatggtcagaaagaaaaaaagtacttctgtcagacgacagattatctcgattgctatacacggatgaagatgatgataaggcgattcgccaaggatatcatataagagatgctgatcggcctttcgcaatgaaaactgtagaaattgattttttgagacaatttaacttttttattaataaaaatcagcatgttaaagaaatgagggtttcggatgttatgaaactgtcagatactgattga

SEQ ID NO: 177494 - DNA, 426 bp, Klebsiella oxytoca; identical to SEQ ID NO: 86493

SEQ ID NO: 177495 - DNA, 204 bp, Klebsiella oxytoca; identical to SEQ ID NO: 79423

SEQ ID NO: 177496 - DNA, 1206 bp, Klebsiella oxytoca
atgggatataaagtaaagaaattcatcatgagtagtggggagcgaggatgcctgatccttgataaaaaaaataatctaccagcttactaccaaaatctatttcttactacagacataagaaatagaggcgcaacggcctcaacgatggaaatagttgcaactaacttactaattttcagtaatttcttggatggtaggggaattaatatagttgagagaattgagcttaaaaaatatctctgcgttgcggaaatagatgaactggtaagatatgcgaaacaaagattcgacagacagaaaattataaatataaaatcagcaaattatagatttattgcgaagagaacctttagttatagaatatacgttttttcacgctatcttaagtggttatgtggattagttcattcgtcaaaagggattcatgcaaagtatgaagtagaattatttattgaaagtatcagagcacatattccaagaaacagttcattgaatatgaatgaaatatctgaaaaatcgttaaatgaagaagagatcaaagtacttttccgtctattggaaattggtggggttgcaaaccctttccataaggaagtacaggtcaggaacagactaatatttactttgctcttaaatttaggtttaatggctggagagttgctcaatcttaaaatagatgattttgatctcagagacaacactctaagtgtggtcagaagacatgattcaaaagaggatggaagatcttatcaaccgttagtaaagacaggcgaaagggttattccgttatctgatgagttagccagtgaaatttttgattacataagcaatagcagggaaaaaatgacaaaaaggaaaaaacataatttcttatttgtggctcattgcacaggaaaaaacgcaggagaacccttaagcatttcagcttatgagaaggtgatatcaacactgaaacgagcaagtccagagctatataatctttcaggtcataggctaaggcactcttggaattacatgtactctaaaggaatagaaggcgctgaattagaatatattagaagaaaagatttaaggaattatctaatgggttggtcaaaggagtcaattatgtgtgatagatataatttaaaatatatatcccaacaagagaaagatgtcattctaaaggtctataaatcagtaagtaaaatgattagtgaggtttag

SEQ ID NO: 177497 - DNA, 1311 bp, Klebsiella oxytoca
atggaaatcaaatgtattgaaagtgagcaaatatattttgctaagatgaatgggtatagtttcaaactgtcagataagaaatggcaactggataaagaaaactgtgtataccctcataaagttgtagatagaatgcctacaaacatgaaacttagctacttaaaaacattggcttactatgcgtctgaatatagttctttctatattaaaagcattaacaatttattttataagtggtttggtgcgatgactatcgatactattgatgacaaagccatatatcaattgaatgttcatttaggttcagcgagaaactacatgctaaacatagttaaggccttcatcactaaatggaaaaaactcaattaccctggagtagaagcgactgcccttagaatgttggagaaaataaaaatcattccaaaccaaacaggagaggcagttaaaagacgagatccaaataaaggacctttaactgaaacggaactaaattacatccttaaatctgttagcaaactttatcttgaaaagaaaattcaacgcttcttatattgttatattcttctgttggcaataacaggaagaaggccattacaattaatctctctaaaagctaaggatctcattaaaaatgagaaagggtactttttaaatgtaccaaaagtaaaacaaaggaaatcattcagaaatgaatttaacatggtaatgatagaaaagttcttatatgacagcttatcaatgctaattaatgaaaatcaggtgtttgtagaagataaattcagtgttgggattaataactatagaggcgaattgccaatcttcatggatttagacaagattacggaaataaaaaggattgagggttttctatctgatttaacaacagattttttccatatgaaaaactcagtcatgtcaaagctattaaaatgctttccttcaaaattcgatgttagatcagaaaggactaacagctatatagagcttaatgccagaagattcagatatacattaggaagtcgactggctaatgaaggagcctcaattgaggtgattgctaaagcgttagatcataaatcagcaaactcttctatgatttatataaaaaataatcccgacagtgtttatgatatcgataagaaactaagtgcattttttaaccccttatctaatatacttatgggcgtagagattgaagaaaacaagaacttttttatcaagtatgttttagattcatttttattattagaagatacgaaagaggaatttaaatgtttatcttgtaaaaaattaaacccctggagagcataa

SEQ ID NO: 177498 - DNA, 1632 bp, Klebsiella oxytoca
atgaataatatatttatttttgaaccaagtaataaaaacaacccacacgacaatgttattaagttcatcgagttttgtaaggataccatttctaataataattcaacaacttcttgggaaagcaataaatggaaaggtttatatagatttactaagtttaacttaaaaaacaacctaagcagcaaggaacgcttagatgataattttattaatttcgctaaagcatatatgttgcatgtgcattcattcaataaatctaagacgaaacactcaacattatcaatgttgaagattgtagaattcgttttactgaaaatcaatatggaagctaatgtaagctattgcaacaattcagtttttgatgaatgcataagaatagcctctgaaaagtattctaaagcacatgcatttgctattgggaaagaacttgagaaattgagttcatttttaagtgataataggatgactaactcatcttatttattttgggtaaatccaattaggtataggattactcagtcttggactggttatgattcttcacttgaaggccatcctagattgcctgatatcaaatcagttattgcaattgctgagattttttcaaagcgggatgaacaattatcttcaagagatatatttactacatctgtgcttgctttacttatgtgcgcaccaagtaggatatcagaaattttagctttgccagcggattgtgaaattacagaatgtgatggtaagggtattcaaagatacggattgagatttttttcagcaaaaggatatgaaggtaatataaaatggattccaactttaatgatacctatagctaaaagggctattagcagattaaaagaattatcaagtcaagcgaggttattggctgctgaatttaaaaaaaatcaatctaattcaacgatggtaaccctaaaagagaatatacctcatgatttcccttggtatgatagagagaagaaaattgaatattctaatgcgctttgcttgttaactgaaggacagttaaatcaaaacaaaaagaaaatgttagataagttattcagacctacaatgagtttttttaaaactgacattgttgattctgattatataaaaggaaattttaatatctttaaaagacatggttatgtaaatgaagatggtagcccatatttgctaagaacacatcaactgaggcatcttctcaacacatttgctcaaataaatggtatggatgaatttagtattgctcgctggtctggacgtaagcttatttctcaaaatgtttcttatgaccacagatcgcatcttcaaatgtctaaagtaataagagaacaaaaattatcagtgtgtattaatgagcacagaataaaggatattccagtagtggatcttaatgagtttgattcacttagtagtggtgcagtacttgtatcaaaatatggctactgcaagcactcatatgcgtttaagccgtgtgaacattatccgattgataattctggtttagataacgaaacgatttcaaacattcacgataaaattttaaaaagaacactgtatgataaaaatgatgggaacataaatgctgatagatggtatgaattccataagagaataaaaaaaggagaataa

SEQ ID NO: 177499 - DNA, 399 bp, Klebsiella oxytoca
atggctaagcatataaatggttatcatgagaagaagattgttgatgttattaacacatggtctatagatgaaaaactaacctgggatgctttgtgcgacagtttagtaaggattattgggaaaagaccatcaagacaatccttaagtagtcatgtaaggattgcagaaagcttcagtgtgaaaaaagccactatcaaatctggtgcaatacacactgtaaaacctgctaatttaaaagtggcttctcaacgaattagaagacttgaagcagaaaatgaagctttgaaggcattaaatgaacgctatttagagcagttcaaagtatggctttataatgctcaccttaaacaaataacgattgaagaacttaataatccgttacctgcaaaatacctttaa

SEQ ID NO: 177500 - DNA, 471 bp, Klebsiella oxytoca
atgctatttattttcttgtcaggacgacaaaatttcactattgcaaggatgcatattatggataaaacaaatattaacttaatggaaaggtatctacttctgcttgatcgattcgttgataaactcgctggatctggtttctcagagcaacgtattatagaacaatcatatcttttttgtgcaggattttatatcaaataccaaagtggtatcgaaaaaatgaccttctccaacagggaggtcgttttaacctttctgctactttcatattatagtcatataaataaactggatgatgatttgatcaacaaagagcgtatgaaacatgtatgttcttcattgattaactttatagtcagtaatggtagccgaacagagaaagtctatgctaatgagaaaaggaaatatgaggcttcaactctaaaaagagaattatcgaaaaaggataaaaggaaaagatatggattgtag

SEQ ID NO: 177501 - DNA, 1170 bp, Klebsiella oxytoca
atgaaatcattcatggaaatgatcatccgtggaatggatgatttttacattaagacaacgagttttgaatgcccatacgagctatgtaaaattaaagccacaccttgtagttttactatgaaacatgttaatcaatcatattttagatatggtgataaacataaggatggctgtggtattcatgatccaagatataaaaacaatcatacttcaaatgacgaaagaaaacataattcgccacctgctccggttatatcacttttaaaaattgatgtgaaaccaagaggtggtattaaaaataccagaaatagtaaaaatgaaaatcacaagactgaaaataaaggaaatgaacatcctgtatcttcatcaagtattaagccagtcgtagactattacataaataatagcaatcattatgaacagctatcaatccctccatatggcacgcgatcttataaagatacattccaacttattttttacaaaaacaacatacgttattacaaacctgctatttattatggtgtaatccagtctaatattcgtctgcatgaagattcagaaaagcattgtcttactttccttgcaagggataagaaaacccaaaaaccatttacgcttgaaattgatgtttctgactggaatgaaagtcagaaagatgtgttttggaaagaatatgaaaagcaaaggaaggaagctgataggtattataaggggcttaaagataaaaggaatgctaaaaaattcctgacggttttcttttttgggatgccggatgaaaatgataaatttctatttaagacaaaccactttaaattagtatatgtggctttcttgggtaaatttgaaagctcatataatgacagtaattattacattgaaaatgatctgtccgtatcatcattgaatgaacaacccatttcattatctgatatagaccataaaaatcatgaatataatattgaaacttcattagattttagttctcctttgccagagccagagccagagccagagccagagccagagccagagccagagccagagccagagccagagccagagccagagccaataaaatcctctttaaaggaaaatattgagactgtagaaatgaagagtaaagtttgggggaggctgaaaaagataatcactttctttaaaaagtga

SEQ ID NO: 177502 - DNA, 375 bp, Klebsiella oxytoca; identical to SEQ ID NO: 79441

SEQ ID NO: 177503 - DNA, 669 bp, Klebsiella oxytoca
atgagcatctccgctacaaaaagcaggaagaaagaagctgaagctggtctttctgatgatcctcggcaaacggaaatcacgacacccaattttgtgctgtttggtgaaactttcacatttattgagactttctctgccactatcattgactccgatccaggcaatggtcatatctgggtaaaaaccaacacaggggatgagaagcagatttctgactatggtattcctttcagaagttcacacactatccataaatacgaacttcgccaatatagtgaggatggttcgtatgatgcatataaagatgcgcttatcgttaataagcaaacgggtgaacacgaggtaaacttaaaaagaaaaaccattattatccccgcttttctgacaatgctatttcatactgcctccacagcagcgtattacagagcaatgcctgttccaaagtttctcaccgttattttcattttactttgtgctgctgcacttatttcatttctcacactaccctggggatttaaagacggctacatgtggagcgaccacaaatacatgtggtttacatatcttttctcaagagttggaagttttatttgtatcaatttgatgaaaagaagaagccagaaatttgaaaatgaacttagaaatcttattgagtcaataaagcgctaa

SEQ ID NO: 177504 - DNA, 1272 bp, Klebsiella oxytoca
atgaaggggatgcagaagataaagcgaggtaagaacttcgctggcgtagtgttttatgcattgaggccagcttcgcatcataaaactcccccatcagtaattggtggcaatatggatggaagcaatgccggagagttgattgcagaattcaatgcgactaaagcgcttcgcccggatgttgctaaacccgtctggcacaattcgcttcgcttgccgaaaaacgaagcgctgacagatgctcagtggtcagagattgctgatgattacatgtcccgaatgggcttctctgaaacgcacctcagatgctatgtcctccatgatgatgcggccggccagcacatccatgtcatcgccagtcgcatcgacctcagttcggggaagctctacttaggtaaaaatgagaaccttatcagcacccgtatcatccaggatcttgaacaagactatcagctaacaagaaccaaaggaccgaaagcatctccagcagcgccctcacctaaaccgaagctcaaaaaatcccgtaatgagatgatgatagaaaagagaactggtgagctatgccaaaaaggaatcatccaaaacgcccttaacgaactgcttgataccaggcaatcgattaccgacttcgtgcaacagcttgtggcacaaaatatcaggccaatccctaacattgcctctactggacgcatgaacggcttctcattcgaatacaacgggattgctttcaaagcatctcaattgggaaaagggtattcctggtctgccttgcaaagcagaatcgactaccaacaggaacgtgataatgctttcctgtttaaactgaaatcatctgtcagagaaacatctgttagtgcaactcatgatatggtcataactatagatgctcctgaaaccacgacagaatacgttaaccgccccatagaagcacttatcctcgataaacgagctgctggtcaggacgaatactctatcgcttctgtcgaagcgcttctcccagaagctgttgcaactaacaaagaagcgatagcaaccgaaacgttaaaagtagcgcccaagcgaagctatagggcttcaacgttcagatggttagagaccatcccctatctcaataccatcattaccatcttcaaaaacctcaaaatcccaacccttaaacgccctcaaaaacacaagaccatcactagcgtgagagtggtagagattacgcctctcccccaaaaaaatctcattgaatcagcacctcaatccagaagagcttcgctttcgatgtaa

SEQ ID NO: 177505 - DNA, 438 bp, Klebsiella oxytoca
atggtcgaaagtaatacttttaataagatcgttgtaagtaagcattcccgtaatggaagcgttaacgaagcgaagctctcacacaaccagcttcgttctcattgcgtcagtgtcagattaaatgatgaagagctaacgcttctcaatgagaaacgaggccgtcatcgtaaaggcgagtggcttcgcttatctttaattaataaacttcctgctgtcgttccagccatcaattttgaagcctggaaaacccttggtgagatttcgcagaagctaaacaagcttgtggctcatcttgatagcaagagctatgaaagccctctgacgcaaactgaactcttcgccgtaaagcgccaggtctcagagcttcgcttgcatttaattaccgctgacctgtggagagcttcccatgaaggggatgcagaagataaagcgaggtaa

SEQ ID NO: 177506 - DNA, 654 bp, Klebsiella oxytoca
atggataaagacaaaatcgatttgattattaagtcattgacaagaactgatagctatttgaactatgcaaatactaaatctaccatattgctaacattggcatcagccatattgacgattgttggagttaatctgtcaaaggtgcttcctgataaactttatgaattaagttatttatcgttgtttttcttcatgttatttttagtaataggtattttattgaatattgcttctattatgaagtcattaggttcaatggcaccatttattaaggaaagcgaaaaggaaaacaatttctcgtttgtagatattgttcattactacaaagatggaatcgattatttcaataagttatccgagacaaaatatttagatttagggcaacagctagcaattctgaattacactttgtccaatgggttaataaataaatacaatggacaaaatagatcgattttatatttgaaattatctctcctttccttttttacatcgatatctatcccttgggtagaattatctttagggttattcaaaaatgaagagaatagtgtgatagttctaagtcttatcattatttttcttttattaattatcgtattgatgatgtgcgtcgtttattacttgctgctgataggaagaaaaacaaaatga

SEQ ID NO: 177507 - DNA, 1398 bp, Klebsiella oxytoca
atgagtattaaaaacttatataaaaatttaaactctgacatggaaagtatagccaaaagaaataaaggcgatacttataatgtttttactaaaaaatccttcgactctgctgggatggaaaatttagaaccagtgtgggaagatgcaaatgacatttctttggaaagttttaataaaacattgtatgaaagtgtgaattcagaaagtgccgtcgttagaaatggtattacaccactaagagattatgatgctgtccgtgggctaagagaagcttttggtaagcctgatcgagaggaagagcctacaattggaacacatcctgattttaaaaatttggagacaaataatataacgcaatttgggtatgtggttaccatgtttatggacattataggctcgactaaacttggtctttcatatagtccatctgatgtttttctttttaaaaataatatcattagcggttttattgagactatcaatgcatttgatggacatgtccatagaattatgggagatgctgttatggctttcttccgaagcaatgaaaatgaaaacctcaatacattagaaaatagtgctatagatgctattaactgcgcttcatactttattgaagtaatgaatgaaatcgttgttccacaaattaaagaagtcgctgatgagaatattggtattagaattggcatagatatcggtgaaagtgattatgtgttgtgggggaactatggtattccaggtattaatgaagtaactgctacatcattctttgtagatatagcatctaaattacagcacaaggcacctaaaaactctataatgcttggggaaagtttagttaataaattagggcttactattaaggattatctggattacaaaataaaaaataacgaaccagatagatatgttattgattatacttctaaaaataaagaaagattgcgatatcgtcaatatttacttaatcaggaaaaatacttttcacttcttcctcatggtatcataccctcccgtataaaaattgaaatcacttatagtagcgatcagtttggtttttcaaacaaaaaaaattataaaagttgtggctctgtaattccaaaaaataaatgggtaaagttccatgctattttttctgaggtttatggagagaactatgattcgcttaaattcaagtttcgtgttgtaaataatggaattgaagccagtaaaaagcacgactatgacaatcatgaaactgaaataataaaaaaagctcacgaaaaagaaggaggcgtatttcatgctattcacaaagaaagaacctcttacaagggacttcatcttatgtatgtttctgtgatctctaatggaagagtggttgagaaagaggtcccttgtagtatatttatacagtaa

SEQ ID NO: 177508 - DNA, 246 bp, Klebsiella oxytoca
atgagtatgctaaaagctgtgtggattgtcatgactaatttcaaatcaatattaattacagttattgtatattcagtgatatgtttatatagcttgataataagtttttctgatgcggctaatttttatgcaagagttgcatttggaacggttgcccttacattaattatgttttctcctgtgctttgtgtatggattaaagcatcgataaaagaaataatgaaaaaatttaattttcatagttaa

SEQ ID NO: 177509 - DNA, 495 bp, Klebsiella oxytoca
atgaaggataaaatacaagttaataacctcaaagaaaaagaacttgatactgatatcataaaaacaaacagtaaaactgagataaaaaacatgtctactagaagttttttatctggtgctatgatagtaataattgcagcgataataataatcccttccgttattctttttttaattaaagtgtccatttctccacttcttccacctgagtctttatttttttcaccaatagtaatttcattaatcttaggtcttatttattatttttgccccaaagttagacaggccttaaataatgtttgcgatattggcattacagtaccagtagcagtggtatcacttattactatatcaaaacctcttggcggagatttttttgattctattacaatggaaaacaatatagtttcaattataattcttagctttatagctgtgtgtgctatcactaaaacaattatttttttgcttcctagctttgctaaggctaaataa

SEQ ID NO: 177510 - DNA, 273 bp, Klebsiella oxytoca
atgtgcgaaaggacgttaaaaaaagatgtttattctgaatgggttatacgcaatagcctatattggatgacttctcttactcagtggaaactttgtgaagatatatcctcctggacaatctcttttgaaaacgatggtcccgaatgcctctatgaattcgagaggctgctgaatgattatgctttgcgagaaaaactacagcataaaacgggggcgttgagagattctattgcccataaagtgcttcgcagtgtcgatgaaaggctttcgtaa

SEQ ID NO: 177511 - DNA, 1389 bp, Klebsiella oxytoca
atggaattgatgccattcaattttgacagattgcctaatggacgggtttttataagcaacctcgctggctttcatcacttcattaatgagcaagagctgcttgatctttctgatgagcaaatcagtgcggagcaatcaaacgcactagaaagcaagctattcataaccaacgaaagctcatcagctattgctccctatgctttaagttctgcttttgcaaaacgattgatgaatgaactggcgatcaggccaattttcatgattgtgcccacattgcgctgcgaccatacctgcaagtattgtcaggtcagtagagcttcagtgaacgcctctggttatgatctagatcccgatctcatccctgatatcatttcgactatcaaaaaactatcaactccaccttacaagatagagatacagggtggagagccactcttgcggttcgatttaattcagtctatctatgagcaatgtgctgaaacgctgggaagcaccgattttgagatggtggtagcttcaagcctgtctgtcttgaatgaggatatgcttgaatggtcgagagataggaacataacgttctctgtttcgcttgatggtgaggaagttgttcacaacagtaatcgaattcttggtcatgggcttgcgtacagtagaacagtgtcaggggtagaggctatcaaacagtctttaggcgctggtcgcgttgcaacggttactacagttactaaagatctcactaggcatcctgaatcgattgtccaggctcacttgtctcttggcctcaaggacatgtttatccgacctgtaagtccctatgggtttgcacaaaaagcatcgttcacattttctatggaggaatacttcagtttctatgcctcgttgatagatgaaatccttaagatgaataatgaagggataagggttgtggaacattcggcctccattcatctgaaaaggatcttcaatcccggctttagtggttatgcggatttaaagtcgccaagcggggtcgtgcttaacagtattcttttcaattatgacggtcgagtatatggtagcgatgagagccgtatgttgcagaaggtgaaccctgaaacggagttcagtgcgggtgaggttaaaacgctatcattttctaagagtccttactataacgcagtgttgagttcatcgttcaattttgctctgccaggttgtgatacatgtgcatatcaaccattttgcggtgcagatccatgccagaacataagtatacagggtgagcctgttggtgataggagtcgttcaacgttttgtcagtatcacaaggggatgttcaggtatctgatgaactgcatctcagaaggtggtccgaaggctgagatgctaaaaggatgggcatatgtctga

SEQ ID NO: 177512 - DNA, 1113 bp, Klebsiella oxytoca
atgtctgaggttatcaggaacgatatctttcattttgcttcaaaaaagaatgtgcccacggggttctatcggttatgcaaacaaaaaccaatgaaccctttattctttttgcccaatttactggtagttgctgaaggcaataatgatgccattcaaccatgctttgatttctctgttattagcactgaattatatgagtcaattgaagatggagatattgggataatcaacaatggcaatatgatacgcgtaattctgtcccgcagagccaatcataatactgtcttagtaacggaacgctgcaataacttgtgtctgttttgttcgcagccaccaaagaaatcaaatgatgactggctacttacccaatcagctcttgctatagcttcatttggtttggatggagttgttggggtcagtggtggagaacctttgctgtatggagatgatttccttcacttcattgattttatcatcgagaattcaccagatactgctttgcatgttttaacaaacggacgcaaatttgctgatatcaactttactcaggaaatggcaaagcgaagcaaaaagatcaaaatcacctttggcatcccgctctactcatcaagaccacttgtgcatgatcatctggtagggagtgatggcgcatttaatgaaacggttaaggggttaatcaatgcaggaaactcagggattaatatcgaacttagagttattccgacactggctaactatacagaattggatgatattgtagagttcgttggccgagtgttctccaacattaatcagatttcccttatggggctggaatctatcggttgggcacgaaagaactggtcaacaatcttcattgagcacagcagttatagtgagaaaataacctccgccatagacgctgcacacaggtcaggcatacctctaacaatttttaattatcctttgtgtcatcttcctgaaagagcctgggagcttgctgctcagtcgatctctgattggaaaaattactatccgaaagaatgtgatgaatgcactcagaagtcttcctgtgctggttatttcagttcctcaacaggccgttttcatcaaccaccgagaccaattttatga

SEQ ID NO: 177513 - DNA, 1770 bp, Klebsiella oxytoca
atgtggtctgatgttgaatcaagtgtagactatttgaactttggagaagtctcaagtttggctgtggatattttaaagtcaaataatatgcttccggtgtctattgggatctttggaaactggggggcaggcaagtcatcattattaaaaataatagaaaaacagatcagtgaagaagatggtgaagatattttagtggtaaactttgatgcttggctttatcagggttatgatgatgctagagctgctttattagaagtgattgcaataaaattgaatgaagcagctcaaggtgatgaaaatattgttaaaaggacattcaatctctttaatcgcgtagataaggtcagagctttagggctaacaattgaaggcattgcactggcacatgggattccaactggtgggatagtttcacggggattaaacgcaattaaagatgtctttaataatggcatcaatgaaggtaattataaagagtctattgattcaggtaaagaaatagctaagattggattaattagagaaaaggagatagctactcctccccagcaaataaatttatttagagaagaatatagtagtatacttaaagacttaaataaaaacctgattgtatttatagacaatttagaccgctgtttacctcaaaatgccattcaaactcttgaagctataaggctatttttattccttccaaaaacagcttttgtgattgctgctgatgaagatatgatacgaacttcggtttctgaatactttaaaggtacatctgcaagacatcatattgattatttggataaacttattcaggtacctataagagtgccgagaacaggtcttctggagattagatcatatctttttttactccatgcagtaaatgcaggaatagaggaagatttaattgaagatctacgactggctttagagaaatctttacaagagtcatggcatgaagatccgatgaagaaagaagatgctcttaaggttctaaaatgtgaaggaaacatagagttagctattgcttttgaccaagttgatcgaatcgcacctattttcgcaacatctcctataatccatggtaatccacgtattgtaaaaagattactcaacatagttaagatgagatcaaatattgctaagagaagaaagatttcgcttgatgaaaatgttataacaaaacttgttatatttgaacgttgtgctggcgaggaagccgcaaatgcactctattccatgatcgatacaaataaaaatttcaaaaagataattagtgaattagaaagtaaaaaattagatgaacttcctgattcagtgccttcggtatggaggaaagatgatacaacaagtgattttattcttaaatggcttgagcttgaaccaaagttaagtgataaggatttacgtgcggccgtatatctttctcgtgagacaatgcctgcgggacattatgttcttggtctttcgccaaaagcaagggaggcattgaatattttggtagcaaccaaaagaaaaagttcacaagcggcttcgagagctttgaaagatatttctaacgaagaattcattccggtaatggaagggataattgaacatcttagaaatataacagaatggagcagccagccagatggttttgctggagccatattaatcgctgacaataatatagatgcagctaagatacttaaaagattcatcgctggtatcaatgaacaacctcattggatgaatatgcttataaaagacaaaacatggaataaataa

SEQ ID NO: 177514 - DNA, 744 bp, Klebsiella oxytoca
atgggtacatctcagtcaagtaaagggcctaaaaatggaaacgaactcgtaccaccttgggctgatcaaacaaaaaatgggacaaaccaaaacctaagtggatttagaactttatttggtagatttgctcgtaatagagattccgtcgcattgaaaggggctttgtctcgttatgcaagacaagtaacgggcggttctgaatcagctaatgctcgtttaggaaatattataggcgctggtggggggttatttgaattattgaatgaaggtattaccaatgattctggtatgaagccactggtagatcttgacagtcttaaaggactaccctgcgaagatgtgattgctaaaatatcacattcattgtctgatggtagtgaagatgcagacaaaatacaaaccgccatgaatgatgcgttagttgaagcattgaacggtaaatccacctttgacccatccgatataacagacgatgtgattattgagacaatgatttgttatttgactgacagtatttttttgcagattactatggatgccggtaaagcatggaataatgctcaaaatgcaaaagaattacaggtagctgaaaattctttgcatgagttgattagtgcgactgtagacaatatcatggagccaaaattaagtaaaaatataagatctttttcaaaaactgattttataatcatccaaaaggatgttatcacagaagtttggaatgaatggaaaggatatgaataa

SEQ ID NO: 177515 - DNA, 1341 bp, Klebsiella oxytoca
atgaatatttatgttgaatatgatcatacaaaattaccattggcggatgaaaaaactgtttctgtgcagatttattcgcgtgatggtgtagttattaaaaatggcattaagcctagagatgatattgcaactataggtaagccaatatttgatgctataaaaagactgggagtaagtatatcagatgaagttatggactttttaactatctctcttgcagtaactgctgccgatacatttattataagagataattgttttgatggctggacaagaaatataaatctatttgtttcattaaataacccagcaatttggaaaaaaaacaaaccacttttagaaaaagctttacaatttttgagtggtgatgtatggaatttcaattttaaaggtgatggtcctaagccaccgcaaccattcaaagctgttaatggacgaaaattgattaatttagaggggttagattgtgtgtcattattttctggaggtcttgacagtgctataggtgttatagattttttatcttcgggaagaaaacctttgctaatcagccattcgtataaaggggataaaactaaacaagatcaaatagcccataaaattcgtgagaagggcaccttttcaagacttcgttcaagtgccaaccctattggcagagggatgacaagagacattactatgagaacgcgaagtttaaacttcttagcgtttgcacttgtaggtgcatatgcggtaaaacagattaataatcataaggatctatcaatatttgttcctgaaaatggttttatctctttgaatgcaccattaacgcatcggagagttggctcgcttagtacccggacaacacatccgtatttcattgaaatgattcaagaactttttaataatcttggcttcggtgtaagattgattaacccttatcaattcatgaccaagggccaaatggtgagtaattgtaaagattctaagatgctttctgaaattgtggatctaaccgtttcatgtagtcattggaaaagaaaaaatcaacagtgtggatattgcgttccatgtatgattagaagagcagctttaatgaaaggtactctaaaagaatctataagttatcatcatgcctcatatccaaccctacgtgattttgttaaaaacaaacaagatggtcgtgatgatgttatcgcggtatcagtagccttagataaatctaaaaaaataaatttgaaatcatgggtattaaagtcgggaaagcttaaatttgaggatcttgacaagtatgaacaagtgttttcagatggcttacttgaagttgaagatttcttgaaaaaggaaaaggtgatttga

SEQ ID NO: 177516 - DNA, 726 bp, Klebsiella oxytoca
ttgaagcttgatatgcactgtcatttggatctttataaagatccaagtgatattatccaaaagtgtacagagaaaggactttatgtcctttctattacaactacacctaatgcctatattggcactcatcgactgtctgctaataacagtagaatcagaacggcattaggtcttcatcctgaactagcccatctaagataccatgagttagatattttcgatattttactcccacaagctaaatatgttggagaaatcggacttgatggtgggaaagattataaagagcattcggaagtacagcttaaagtatttaaacatatacttaaaaaggtacataaccaaggtggcaggattatgtcaatacattcaaggggttgtgctgaagaggttgttgaacaacttaaaggaattgatgggattcctgtatttcattggtttacgggttcagaatctgaattaaggagcgctattgatattggtgcatggttttctgttggcccggcgatgttaaactctattaaaggacgacggatattacaattgatacctaaagatagattattaactgaaactgatgggccattcgcaaaatatgctggtaaacggctatttccttgggatgtagatatagctattgagggggtttcgaaaatatggggatgtagctcagagtatgtagaatataaaatcgaagaaaacttcaggaatatccttcagttatga

SEQ ID NO: 177517 - DNA, 744 bp, Klebsiella oxytoca
atgggagctattaacgagatagatattgcaaagctggttttgctacccgcgattttatatgtggctaaaaagatcatcgactgggcgggaaaagtgatgtccagcccgcaaacgaagcgaaaaattcgctttgaaaaggtacctattgaaaccaaaatagaggtgctgaataaaatcgctgagatagcgaacgctgacatacccgacaccaaactctcgaggacgcatcagaccgtacaaataaagtttttgtatgagcagatcgggattaccctccctgtctggcacgcccatcagttgatcgcgtttatcgctgataaaaatatcggctcatatgatgtacgattaataagtttccttaaaaacccatccttatatcgttgtgaagaaaatcatttttctgtagatgctaaaaaaattaaaacttttcacctcgttagcggggggttctggctattttcaatactcatttttgcttacgcctggtggacgacaatacaatcgttactagccagcgggggcgtaaattcggctatcgcattttcactgttttactttatttccgctattgtggtcactggctttatcttgagccaggttggagaaacctggcaaagcgccagattcgccaggctgtttgaaaggtggtgtgaggatgaagcgcgggtggatagtggggagagtgctgtgctagccgcatcggggccagaagaacagatgcctcaacaggagcttttcaaatga

SEQ ID NO: 177518 - DNA, 699 bp, Klebsiella oxytoca
atgaaaaaatcacgcacgctttgtatcgccataccgctgtcctgctttacgctaaatgcaattgccgcagcaacctgggttgataatcgctacgctcacacgacggcctctgagaaaaaccagtataaaattggcctgggtcatatatttgataatggcgcaggcgttctggcttccgcaatgtacgacctcgggcaagactttaatcaaatgaaaagctcatttcaggagtttgaaggctggtatccgctaccgcttaatgaaaaatggacgctgacgcctggcggattaaccgatattgataataaaggaacaaaactggctccttatatcagtctcgactataaaatcagtaaaacattgagtttcagcagccgctatcgctataaccatatgacccataaagatcgcgattataatggctatatggattataacgacagccatcagctcgacctgttccttaattaccaggcgaccgaaaaactgtggctccagctcaaccctgagttcttcgtcaacgctaacgacttcaatgcctctaacgggcagaaaacccactgggagccaagcattgtggcgcgctaccgcgtcgataaacactggcttccctatgcagaagtggcctggctcgatcaggatcagaatcacgacgatcaggtacgattccgcctcggcattcgctattacttcgattaa

SEQ ID NO: 177519 - DNA, 843 bp, Klebsiella oxytoca
atgactgatatccaacacagtgcgctcagcgcacaaaatgacagcaaaggcgaaaaaaagatgttccgtcagctgttcttccgccagttccagctgctgggctccatgaactttacccgcatggaggggctgagctacggctggatccttgcgccgctgctgaaaaaaatctataccggcaatccacacggctatattgagtcgttaaaacgtaacagccagttttttaataccaaccagcatctggctccttttattatgggcctgacgctgtcgatggagaaagagaacgcagccaatccgaactttgatacttccagtattaacggcatcaaagtggcgctgatgggacccttcgctggcgtcggggattccttcttttatggcgtactgcgtattatcgccaccgggattgcaatcggtctggcatcgcaagggaatccgctgggaccgctgctgttcctgctgatttacaatattcccagctatctgctgcgctattacggcggcgtcatgggctaccgtttaggctctaagtatatcgccgaagcgacgcaatcagggttgctgagctgtataacgaaagcctcatcaattatgggtttgatgatggtgggagcgatgagcgccagcatggtgaagtttaccaccacctttaaaaccaccatcgccggccaaccctttgtactgcaagagatcctcgacaaaatttgcgtcggattgattcctctgcttttagttctgggctgcctgaagcttctgaataaaaaagttagccccaataaagtattaattatgttgattgtcttcggttttgccgctgcgggtattggcataatttaa

SEQ ID NO: 177520 - DNA, 801 bp, Klebsiella oxytoca
atgttaacgtctgcactccttgtcgcgctggtgatgtatatcgccaagttcgcggatcacaccctgggacaaccgctcatcgaaaggccgctgatctgcggcgcgatggtaggactggtgctgggggattttcaacagggcattattatcggcgccacgctggaactcatttttctgggcactatcactatcggcggctccgttcccgcagatctggctgtgggttcagtcctggcgacggcctttaccattcttactcacgcggaaccagcggtggccgtcgcgctggcgctgcccatcagcctgctggcggttttcgtctatcaggtactaaagctggtttataccggactggttgaaaaatatgacgccttactggaagaaggccgcgaccgtgcggcgctgggtatcactttcggcatgaccctgttttacggcgtgccgtttgcggtactggcgttcttcggcattctgtttggcaccgacgtcattcgcagtctggtcgaaagtatcccggatacggtgatgcgtggaatgactgccgttggcggcattctcccggcgctgggcttcgcaattttgctcaaagcattatggaacaagaatatcgccgccttcttctttatcggttttgcgatggcggcctatctgcagctaccgattatgggcattgccattatcgcggcctcggtagcggtctatctgtgctttaacgaatttaatcagcttaaagccaataaacaggcggcaaccgctgccccagtgtcagttgatgataaggatgggtttttcaatgactga

SEQ ID NO: 177521 - DNA, 498 bp, Klebsiella oxytoca
atgatttctttagtacgtattgacgatcgtctaatccacggacaggttgccgtggtctggaccaagcatctgggcgtgaaccgcattctggtcgccaatgaccagatcgtgaataacgaagtgcaaaaaatgtcgctgcgcatggcggcttctgataccgcaaaatgcgccatcatggcggtaaaggatgcaggggatgtgcttaacgacccgcgttcggacgcaatgaaaattatggtgatcgtcaacaacgccgccgacgcccgtcgactcgtcgaacaggttccgggaataaaaacgttaaatgtcgctaactttgggcgcatcaccgacaatctggcggcgaaaaagcgcatcagcgataccgtctacgtgacgccggaagatgtggcggatttccacgccatcgtcaaccgcggcattgccgttgaatatcaggtcctgccttctcatccggtaaaaaacctgattgagatgctgggcaacgccgccagctaa

SEQ ID NO: 177522 - DNA, 1179 bp, Klebsiella oxytoca
atgactatcgcactcgaagcgcttgatactcgctacttctcaccgcagccagggctggaccgcgcctggcttgacggcgccatcggcgacgttctgatccgcctcgacgctatgctgccgcgctttacggcgacctttccctccgccagtgcgacacggggccgttatgaaagcgtggagaaagtcgactggaccgagggattctggaccggcatgctgtggctcgcctgggaggtcaccggcgatgataaatatcgggcggtggcggaaagcctgctcgatagctttgaagaacgtctcgataagcagattaaagtggatacccacgatctgggctttctctatctcctctcctgcgttaacgcctggaagctcaccggcaacctgcgcgctcgcgaactcgccctgcgcgcggccgagctgctctatcgccgctttaacgccacggcgggcgtcattcaggcctggggagatttaaacgacccggcacgccaggggcgaatgatcatcgactgcaatcttaatgttccgctgctgttttgggccgccaacgaaaccggaaatcaacaatggcgcgaagccgcctgccgtcatctggcacaggccgcacgctatctggtacgtgatgatgcttctacttttcatacgttctatatggatattcataacggtaagccgctacgcggggatacgcaccagggattcagcgatagctcttgctggtcgcgcggccaggcgtggggaatttacggttttgcgctgggatacacccacaccggcgatgcctggcagcccgagctctctcgccgcctggcgcactattttcttaaccgcctgccggaagattttgtctgctactgggatctgattttcaccgccagggataaccagtatcgggacacttccgcagcggcgatagccgcctgcggtctggcggaactactgaagctgttaccgctcaccgacccgctgcgcccggcctacagcaatgctatcgaactgatgatgcgcagtttacacgagcgctaccttgcccacacgcaggacggcctgctgcgcgaaggcgtttataactttggccgcaatatgggcattaacgaaccaaacctctggggcgattacttctatttcgaagccctggttcgcctttcccgcgtctggacaccctacttttgctaa

SEQ ID NO: 177523 - DNA, 483 bp, Klebsiella oxytoca
atgcgagagatgtacatcgcaactcacggccgctacgcagaagggatagtgtcggcattaaatctgctgattggcgacgaccatggcgtcacgcccgtttgcgcctactgcggcgaaattggctcaaccgcagagttagcagcccgttttgatgttatagcccaacaggctgccggtcgcggcaatgagctggtgctgtttaccgatatgccgggcggcagtgtcaacaataccgctgtacagatgatggttaaatatccccacgctcacgtaatcagcggcgctaacctgattatgctgatggagttttgtatgtcggagcacgctgataccgcccagcgcctccaggacgcatttgccgccgccagcggagcaatgcagtacatgaaccagctgccggaaatcatcactgcgcgccagacgaaacagcctcactcccaggatgatattgacgatttttttgccggggagggaaagctatga

SEQ ID NO: 177524 - DNA, 2601 bp, Klebsiella oxytoca
atggcgctgtcggcaaaagaaaaattattccagaaaatagtcacccattacgcgcagaaagccgcaggattcacggctcaggactgtgcggattttatgcaggttaatcgcagcgtcattagtcattatctcaatagactgagcgatgacggtcatctgcgcaaagaaaacacccgtccggtacgcttctatgtacagcaaaaaggcggggaaactactcaggcgtctcgcatagtgtcgaaaaaacatgacgcctttctgccgctgattggtgcccacgggagcctggcggaagccgtcgcgctgtgccgctctgcggtggactatccggacggcttacctatcctcttgtccggagaaagcggcgtcggtaaaagccatctggcgacgctgatctatcaatatgctattgagcgcggggctatcgcggcggacaaacccttcgtcgagcttaactgcgcggattacgctaacaacccggagctgctttcggcgacacttttcggctatacccgcggcgccttcaccggagctgaccgcgagaaacgcggcgcctttgatgatgccgatggcggatttctgtttcttgatgaagtgcatcgcctctcggcagagaatcaggaaaagctgtttctgtttatggacaaggggtatttctaccgtcttggtgataatcgcacgcgccaccctgcatcgctgcggttcatcttcgccaccacggaaaatatcgacaccgtactgctcaatacctttcgccggcgtatcccggtgcgcgtcacgctacccaactatatttcacgcccgcttaccgaacgcgtcgctcaggttagccattttttgcatcaggaagcgctcagcctgcggcgcagtatccatctcgataaccaactgatgcatcagctggtaacctccccggtacgcggcaatatcggcgagttaaaaaaccagatcaaagtaatgtgcgccagcgcctggagcgatagtcgcgaggccgacgccatcacgctacgcggccccatatccggcggtgagataattagcattaacgctaacccacatgatgatgcgctgaatattagccatctactgccaaaagcaatgcgcgacgacgttatttttcgcgacttttgccatagcggtaacgtgctgttgctgaatcgcaaaatggaacagcggctgacgacgttcggcggcgcagttgccgccgagtcgctgtacagcggctatatctggcagaacaccgttcatgctctggaggagctggagaacttgaccggcgtctcctgtagcctggagatccgcaaggcggtctggctctgtctaagctatgcgctccatgctccggaagaggcggtcgacccaggcgaactgcaaacgatttccgattatgtttccggaaaggcgcgcctgctggccgaggagtgcctggctttacttagcaaacatgtcacccggcagccgctgcccctgctgctcccgctactaagctgcgcatttcacaccctcgccggtgaagacgatccgattcagggcattatcgtttcccacggccgcgccaccgcgtcgagcattgccgggatcgccaaccagctgaccggcggctattactttaaagccttcgacatggcgaacgcgacctctacccgagagatcatcgacctgctgattgctcacgtttcgcgcctcaggcaaggagccgggctgattatcctggtggacatggggtcgctgaaagagatctatgaagagataaagctccatctgcatggcgaactcctggttatcaataacgtcagcacggccatggcgctggatattgcgggtaaaattcaggataagctgtcgatggaggcgattattgaaagcgctaaaggtgcgtacgaggtggaaacgcgctactacgcgggcgtgttaccgggcaataaaattattatctcctgtatctccggcgaagggatctcccgcaagctaaaagatattgtccagcgcttcctggcccaggaggagatcgacattattacgatggagtatgacgatctgaaatggaaaatcgcccatgctgacccggcgctaaacggtacgcggctaatcatcaccacgaccgatctggaagcaggctatattcctctgcttagcgtggaacagctgattaaagaaaagacgctggtgttaaaacgcgactacttcaacgggctgttgatggaaggcggtctagagcccatgattgatgaagtggttaaactgtttaccgtcgaaggcgtcgccagccgccttaacttcctcaatccggtagtgattattgatgaagtcgaagcggtcattaagcagtatgaatccttctacaaaatccattttgaaagctatctgcgcatcaacctgttcatgcacatcgcgctgatgatcgaacgggtcatggtcaacaatggggtccgccatcgcgaagaggcggagttaacgctggaacagcaggcgtttgtcgccgtccatgacaccttttttcaggctctgaaccgcaaatacaatatcaccctgccgcttaccgaagtgctgatgatttatgaaattatggaaccgtggattgcctttgatcccggccattaa

SEQ ID NO: 177525 - DNA, 1368 bp, Klebsiella oxytoca
atgaatagctttgtagagtttatcgtcaaagatttgctcggccaggcttcgatattaattgcatttattgcgatgctgggcctgattttgcaaaaaaaatcagcgggcaaaacggcggagggaacctttaaaacgctgctcggtttcttaataatgatggccggaatcaacattattgtcgccacgctaacgttccttaacgatatcttcacccagggattcggcatgaaaggctacattactgatgttgccgccatcgccgggttagccaatcgtgaattaggttccgaagtggcgctgaccctgatggtcatttttgccgttaacattattatcgcccgcctgacgccgctcaaatatatcttcctgaccggccaggctctgctgtggatggcgaccatcggcgcggtaataggctataaagccgggctgaccggactgtcgctgattttaaccggcggtattttcggcggcgtaatggcggtattgatgcccgctcttgcgcagccggtggtcagacgtattaccggttccgatgatgtggcgctggggcacttctgcaccatcggctatctggtgcaggcggcggtggctaaagtggtcgggaaaggttcccgctcaaccgaagatcttgagctacctgataactttaagttcctccaggatacctaccttgcgatggcggtggtaatggtgccgatgtacctcattcccgcgcttgccgcaggcccggaatatatcgcgcagttttccggcggtattaactacctgatgtacgcctttatgcagtctatacagtttgtggcgggggtattcgttctctatagcggcgtgcgcttattgcttaacgagctggttccggcattccgcggcatcgccatgcgcattgtcccggatgcaaaacccgcgctggattgcccggtactgttcccctatgcgcccaatgcggtgattgtcggcttcctggcaacgaccgtcggctccattatcggcatgctggtattcccgatgtttggtctggcgatgatcctgcccggcctgttaaccaacttctttgccggcggtacggcaggcgtgtttggcaacgcgctgggcggccggcgcggagcgatgattggcggcgtcattcacggcctgtttattacctttctgcccgccattttagtgccgatgctggaaagctacggctttaccggcgtcactttcagcgattctgacgtcattagttccggtctggtattgggccacgccttccagaataactggctatttgttgctctgttcattgtttttgttgccgcactggcatggttcgtaaacggtaaatcagctaagccaaaaggggaaaacattcatgagtctgtataa

SEQ ID NO: 177526 - DNA, 1869 bp, Klebsiella oxytoca
atgattaaaaaagcttcgctgatgacggcgctctccgtcacggctttttccggctgggcgcaggacagcaattcagatacgttagtggtgacagcaaatcgttttcaacaaccggtcaacacggtccttgcgccgaccgatgttgtgacgcgggaagagatcgatcgctggcaggcgaaagatttgaacgatgtaatgcgccgattgcctggcgtggacgtcgcgcaaaatggggggatggggcaatcttcctcgctcttcatccgtggtactgaagccaaacaggttctggttctggttgatggcgttcccatggcccgaccgggtatcaccaataatcctgacctgaaccagattccgctatcgctggtgcagagagttgaatatatccgcggcccgcgttcggcgatttatggttccggcgcaatgggcggcgtgattaacgtcattacgcattccgataaagaacaatccaaaattaccgctggggtgggttctaaagggtaccaacaatatgacggtactctgcgccatcgctttggcgatacggtcgcgacagttgcgggctcttatgagggcaataaaggctttaacgttcagcctgattcaacctgggatcacgacggcgatcgcgatggtttccgtaataaaacgttttggggcagtcttgagcataaatttaacgagaattttgacggtttcttccgcggacacagctacaccaacaactctgattacgatcttggaagcccgccgtatagtccggccaacagcgcagatgaaaaccagctctataaccaaagctgggatgccgggctgaacttcaattccggtatttactcctctcagcttatcgccagctatcagaaggtaaaggactataactacagcagtatttatggtcgttataatgatgggacgacgctcgacaggatgacgcagcgtaatcttcaatggggcaataacgttattgtcggtcacggctcggtcagcgcaggggtcgattggcagcagcagcgtttaacgtcgtcagatacggcgctgtcggatacctacaagcgtgataacacggggctgtatctgacgggccagcagcaagtgggtgatgtcaccctcgaagcttccggacgtgaagatcacgatgagcagtttggctggcacggtacctggcagactaccgcaggatgggagtttgttgaaaattatcgcctgactatcggttacggtaccggcttccttgcgccttctttaggacaacagtttggctcaacccgatttggtatcaacgcgaatcctaatctgaaacctgaagagtcgaaacagtgggaggcggggctggaggggcttaccggccctgttgactggcgcttatccgcgtaccattacaagattagtaatctgattacctattactccgatcctgttacctatgagggggagtacgacaatatcaatgccgccacgattaaaggcgtggaatggacgggaagtattgataccggtatttttagccatcgcgtaacgttgcagtatgttgatccgcgtaacgatgataacggtgaagtgctggcccggcgttctaaacgacaggcaaagtatcagctggactggtccgtgtttaatgtcgatatggatgtgtcgtggcagtattatgggaagcgttacgacaacaacacctcccaatacaacaatacgcaaagaattttgccgagctacagcacggtagacgtttctgcagcgtatccgatcaccgatcgactgacagttcgtggtaaaatagctaacctgttcgataaagattacgagacagcttatggctaccaaactgcaggacgagaatactacttgtctggcagctacaccttctga

SEQ ID NO: 177527 - DNA, 366 bp, Klebsiella oxytoca
atgaaaatgggtgatctggctaaaaagccacaagccgcggaagaagtttcgcaatccacggagtcagaagtaaaacaacctatgcgctccccgactcgaccacagggaagacctactcgtgggaagtccagtatcaagagccggacgatgagcatcgaggatgagttcatcagccttatctctgtcatggagaacgttgaccgctggaatcgcttcacgcgttcagacgttattcgtgccgccatcatgaatctggccagcgaatcgcctgagcgtattgcggaaaccattgccgtgcttcgcgagactccagcgtctgaagcagaaatgcgcggcgaacaaatccgccgtgagctggagaagtag

SEQ ID NO: 177528 - DNA, 669 bp, Klebsiella oxytoca
atggaaaccaaactcatcatcgtcggcgggacgaagggtgggccgggtaagtctacggtcgcccagcaggtagcagcaggtctgcaactgaagagaggccaaaaggttcacattaccgacatcgacatccagcagacgacaacctcatggtgcgaagagcgccgcaataataaaaatctcgatctcatcgccttttcttacattgagaatgacattgtaaagcaccttcagtctttgaatggccggtatgagtacatcgttgttgatgctggcggcttcgactcagaaattcagcgtgaggccatgcttattgccgacatcgttctgctaccgctcagaccaaagcggcgcgatctgaagtcactgcgagatctggacactgtgctcgaaagcgtaaaatcatcaaacccggaagttcaaattcgtgccgtcttgaatcagtgcccgtcactgccgtctcaggtgtctcgtatcctttcgtccaaagatattatcgagtctttcggcattaaatgtgttccaaccaatatctacactcgtaacgtgtatgacgatgcagaagaggctggacggtccatcttcgaaatgaaaggaaaagaccgcgataaaaaggcggagtcggagattgaagagttggttgattatttgatgagtctggaggcgcagtaa

SEQ ID NO: 177529 - DNA, 201 bp, Klebsiella oxytoca
atggcgctgtggacgatgagctttctgctaactggatgcgtgattaagcaacatcaaagcctttcattctgtgagacggccagtccgatatacatttcccgagacgatgtgctgactcaggagaccaaaagacagattctggcgcatgacgtcgtcggtgagcgtgtttgtggatgggggagaagcaatcacaccagttaa

SEQ ID NO: 177530 - DNA, 252 bp, Klebsiella oxytoca
atgattgaaggcttaattgcccgtatcaaagcgttcgtaatgacggcttcggccgtcattgcggtactttttggggcgtatattttgggtggccgcgcagctcgtcgatcggcggagattaaaaatcaacgtgaagagaataagcggctaagcacgactattgaggtaaaaaatgaaacgactgataagatcaggcgcatgggtgatggcgctgtggacgatgagctttctgctaactggatgcgtgattaa

SEQ ID NO: 177531 - DNA, 693 bp, Klebsiella oxytoca
atgactccaagaggaatacgcaacaacaacccaggcaatctggataacacgaatccgtggcaaggtctgatagctaacccggcagaaagtcgatttgccaccttcaaagacccgacatggggtgtgcgtgcgctggccgttacgctcattacctatcacgacaagcgcaaagcaaaagacggctcacgaatcgatacgatccgcgaagtcatcgaacgctgggcgccgccgagtgaaaacgacaccgaggcgtatgttcaggctgtcgccaaagcggtaggcgtttctcctgatatggaaatcgatctgcatcagtacgagattatgcgaccgaccgttgaggcaatcattcgccatgagaacggcaaaggcccgctgcgaactgataacacctggtacaacatcgacgtcattgacgaagggttgcgccgggctggtgtcgttaagcccgtgaagaccaccgcatccattccggtcactaaggaaacggccggcgcaaccgtcacagcaggtatcggtctggcgcaactggccgacgttgctccgcagatcagtgcggcaatggataaggctcagggcaatatttcgagcggggatactgttcgcattgtctttgggatcgcgacaatcgccgtagcggtattcatcgccatagcccaggtgcggaagtatcagcgaggtgttgcgcaatga

SEQ ID NO: 177532 - DNA, 315 bp, Klebsiella oxytoca
atgtcaaacgagacgcccggtgtaagccacaaggaagtggaacgcattgctcaaatcgtcgcacgagaggttctgcaaggtcttcgtgacgaggttggggaagaggtggataagcgactgaaagcgtacctgggagatatgaccgcgacccagcacagcattcagcacgcgaatctggacaagctactgaaccgaatggacgccatctcaagtgggttcttcggcggtgtcgtgtccaaagttacttctttcctgatcaccgccttgctgctgggactggcagcgtatggcgtaaaaagcggcattggaaactaa

SEQ ID NO: 177533 - DNA, 1542 bp, Klebsiella oxytoca
atgagtatgtatgaagtaggcaccgtaactggtgctgcaaatcaggcgaaagtgaccggtgtaacgactaagtggtcgcagaccgctcttggcgttcaacagggttccattcttgtcgtgtatcggaacgggagcgcggacttgtacgcgattaaatccgtcgacagtgacacgcagctgacccttacccgagacatcacgacagcgttctctggggcgtcctatggcattatcacatcagagacagccagcacctccgcatttgcaaaccaactcgccagcgccttttctctgtggcggagtgttgttgaagggtggtcgaccgtgctgacgtcgacaggcaacattacaatgactgaccctattaccggaacgtcagttactgttcctgctattaaagggatggcgaaaattgctgggggcaataatctcaccgggacacaaagtctcgacagtgacgactccggttttatcctcggaaaaaatggcgacataggtcttatcaagaaaagcggaacctatgggaaggttatggtgggaaaatcatctcgattctcagtcgttcgaagtgatcaagaccggatatcggcaactgatgggcagactgaaatttttggcgttgaagctaacggtgacgtcaaagtcgtgaattcactttatgccaaaggcattctgcaaagtgattatcaggttaaagcacaaagtatcgagctttcattttcctcgccttacatcgattttcattatgggaatagcgcagccgactatactcatcgaattattgcggatgatcctgtggcacttggttttgaatgcagtataagagtttccaaaaatataagagcgcaagaaggtataaaagcagataagtatgtacgcgctgcgagtagagctggtttaattgcgcaatatgacagtgaccccggcggaaatatcggtgatattcgagttgccccaatcttgtgtagccaattcgcaactgtaggctctgatggaaacgggaacgctggtgcgaatttttggtttgaggaacacataggttacaaccaccgtctcgttacccaagtcaaagggtatggtgcatccgtacaatactggcatcatcgcagcgacggaatgatctggaatagtcagcgaggtgatgtagcgtgggccgcaacttcagacaaaaacctcaagcatgatattaaacccacagatggattacagtcgctgaaaaatatcaatgccatgaaactagttactttcatctataacgatgacgagagagggcgccagcgtcgaggtgtgattgctcagcagcttcagaaaattgacccgtgctacgtgaaggtgagtaaaggtgtggtaaaccgcccagccataaaggatgatgaaggtaatgaaattgaaccagaacatcaggaggtaattgaaaaacttgtgctggactccaatcctttattaatggacgctctaagtgctatccaggtattgtcgcgggagattagtgaactcagagctgagaacagagatttacgcgcatttgttcattctgaatag

SEQ ID NO: 177534 - DNA, 12702 bp, Klebsiella oxytoca
atggaagttccaaatttcaaaaaatcccgcttatcccagctgatcacccatggcctgattatctcaggtcgtggtggtagcaaaggtggcggcggcgcaaggacgccggttgaagcaaacgacacggtaaacagccgcgctatggcatccgtgttggacttacttggcgagggtgttatcggtggtctggttgatggcgcgaaatccatcctcttgaacgacacgccgcttcagaacgctgacggctcctataacttcagcggcgtgacctggtggttccgagacggctctcaggatcagactgttatcgacggcttcgatttcatcgagacgccaaagtctgttgggatgcagctgaagcaaacgagccaggttaacgtttctctggactccgctgacagcgatcgtgttcgcgttgttatgaaattcccgtcacttcgcaaaatcgacaagaaaagcggagatacaaacggcacaaccgttcagtacaaattccagattgatgcgggaaatggaaaaggttttgttgatgcgatagctgaaggcgaaggttcgtcgatcattactttgaccgccaaaaagacaggcgtttattaccgcagctatgtgtttgatttgccgaagccggccaaatcctacacattgcgtgcaattcgtctgaccgaagaccataaagacgacagctatttgtacgacgacacctacatcgattcaatcggtgagatcgtaaacaccagtctaaactatccgaactctgcgctcgttggcctgaaaatcaactcagagcagttcggctcaactatgccttctcgttcatacctgattaaaggtttgaaaattcgagttccgtcaaactataacgctgacacgaactcctacgacggtaattgggacggtacatttaagctggcatcgtcttctaacccggcatggattctcttcgacctgttgacgaacactcgttacggtctgggcgaatttgtgaaggagtcgatgattaacatcggcgagttgtatcagatcggccgctactgtgatgcgttcgttgatgatggcttcggtggcaaagagaagcgtttcgctatcaacacccagattaccagtcgccaagatgcttatcgcgtcgtgcaggacatcgcaggggcattccgtggcatggtttattgggctggtggcatggttcacatcacgcaggattctccagcagaccctgtgatgctgttctccaacagcaacgtggtgaatggatcatttgcctacaaaggttcagcgcgtaaagatcgctattccgttgctcttatcacctacaacaacaaagaggacggttacaagcagagcgtcgagtatgtagaagatcaggaagcgattaaacgctatggcatccgcaaaactgagtcagtcgcattcggctgtacttcacgcggccaggcgcatcgtgttggtctctggacgctctacacctctcgcatggaatctgacgtcatcacctttgcagtaggtatggactctgtattcctgatgcctggcgacatcgtgctgatcgcagataaattccgcgccggccgtcgcaacagtggtcgtattatcggctacacctccaatagcatcaagctggacgctccggttgatctgacttcagtcggaaaccatatcaccttcctcagcgcagaagggaagatggttgagcgtgatattttggagaatgggaagaacatcaccaccgtcacgtttaaagccgctctcagctccaatgagacaccggtaaatgatgcagtgtgggtcattgctcagccagacttaactccgctacaggcacgcgtcgtgagcgttgctgagggtgacgatggcacgtcgttcaatatcacggccattcagaacaacccgaccaagtacgaagctattgatagcggcgcacagctgattccgcaaaacaccaccgttcttgacccaacgttctcgaaaccatcaggtctggcgattactgaaggcacttacctgtcttctccgggcaacttgtccgtctctctgaccgcgacatggcaagggaagtcagctcagtattacatcagctggcgccgctccgatgccgggaatgtttcaaactggaaatctgagcgcgtaactgaagaacagttcgaacttcgtggagtagcggagaacggccagtacgacttccaggtgtacgctgtttctgttggtggtcgcaaaactgatcctatcagcatcacctacaaagttctgggaaccatgacggcgcctgatgccccgaccggtctaactgcggtaggcgattatcgctcaattgttctgaattgggtaaacccggcttccgttgacttggatcacatcgaggttctggcatccaagaccaacgataagtctaaagcgcagctgattgccaaggtatctggcacaaccttcagtcacaacggtcttgaagactctgtcacctggtattattgggtacgtgcagccaacaaacgtggaatgctcagtgcgctgaactctccactagcgacggtcgcaacgacgcgcgacgttctttcgttcctgcaaaataaaatcaccgagtccgagctgggtcaggatctgattgctgacattaacagcaaggctgtggcgacggaggtggacgcggccatagatgaagcgaaaagtgagactaaggcccaggttgatgacgctcgcactgaggcggctaacgctgtcaagtcggccaaggaagcgctaagcaccgccatcgacaaagagactaaggatcgcgcacaagccattgctaatgaaacgaccgcacgtaataaagctatcgcagatgaggcgtctatacgcgccactgccatctcaaacgaagtaaccgcgcgtaccaatgcgattgcggcggaagtggaggctcgaaccaaagccgttgccgatgaagcgaccgcgcgcgcgaaagctgtctccgatgaagcgattgctcgtgcctcagcgattacagactccgttgcggttgaagcaagtaaccgtgcgaaggctgtctcggacgcaacagccgcactcgatgcaaaaatcagcaaagaagccagagatcgtgcgtcggccgtttccgcactggacatcaaaactgcaaacgcaatcaataccgaaaccttaaatcgaatttcgagcattgaggacgaggcacgcgcccgtgctgacgctcttcttcaagagaagaataatcgccagtccgagattagcaacttgtctacgcaggtgcagacggttaacgaatctctggctcagcaaatttcccagattgccgctggcaccggtgaacagttcgatagcctgaaaatttggtactttgataccaacagtgagggatggacagaagacgacggtggcactgtcccaatgtccgttaccgatgatggttggttgaagtcttcaaacagcacagcttcttgccgctcgccaaataacatggttatcgacgccaatgcctatcgtttcctaaagctgcgcatcaagaaagtaggtaaaccgacatggtcaggcaaactgtactggatcggggcatcagagcagggctggagtgagtctcgctctctcgttatcgacgagccagaatatgatgctaatggcgttgccacgctgaccattcacgacattgactggcgggcttccacgaccattcgccgtttccggtttgatttcctgaagaaccagagcgacacaaacaacctgttgattgactgggttgcagtagggcgcccgacgcctggcgccggcatggccgctctgcaggatgagaagtccgctcgtgtggacgctgatgccgctgaagctgcgaaccgcaatgccttggccgtccagatgcgcggatcttacgaaggcaatgatctttctaaagtgggttccggtcttatcttccaggagcagctggcgcgtgtcaccgcggataaggcagaggccatggctcgccagtctcttgagacaaaggtggacgacagcgtctctaacatcaacaagtccctcgacaccctgaacactcaggataaagcgatggcgtcggacatcaccggtcttaaatcatccctgaaggacaaggctgacgcttctgcattgcagactctgaagacgtcagtggatcagcagggttcgagcatttcgactcagggtcagtcgatcaccaaactgcaaaatgacctgagtactaccaacgccaatgttagtaaaaaggccgaccagacagcgctgaccgcactgcagggaacagtgacgcagcagggtaaagatatttctgccgcgaatagcagcatcactaacctcaaaacgtctcttgataccacaaacaacaacgtggcgaagaaagcagacgcgacggcggtcaatgatctgacatctcgtgttagcgcaaccgaggataaagcatccagccaggcggacagcatcgttcaactgaacaactcactgaacaacgcgatcgccgatactgacgcgtccgccgcgatgccgaataacctcatcgtaaacccgtcgtttgagcgaggactggatggttataccggacggtcagcggcaaccagtgtggttgagatttccactccacatggtgggacacgggcgctgaaggttgatgctggtaatgtgtcaccgggacagtatgtaagctttgtacagggtcggacgtatgaaatcggggtatgggttaaggatctcggagcgaccactgataacggagcaggcaacaacaaactgcggatcggtaactccgctggtcagccggtgtttgagcgaccgtacaatagcgggacgatcggttccgactggacgctgatttccggtcgctggaaggctacggagacagccaagcttccggttacgctgagtaactatttgacagccgggagtcgttgctttgatgatttctatgtcatcgatgtgacagatagtgtcaaaatcgacgccaacgcctccgcattgtcttctctccagaatactgtaacccagcagggtaaagatattgcgtcgcagtccaccagcatcacttcgctgtcaaaccagatggttaacggccgccagaacatgtgggtgcgtagcgtatacagcgtacaactggcgaacaataccaccgagccgacttttagcgatatcaacggtaaggcgccaatctcgatcgatgaggttcctgacgcggcaaaactggactttgcgagcgccggcagttacgtgatcgcgcattacaaagccttcgtgaaggttaatgctgataccaccatcactatggcaccagggtcccgtgtttttgatgatacgggcgccgtgtacgtgaacggtgttagggttgcctttggtaatgcaggctggaatacggttagctttgatctgaaagctggctggagcacggttgagttcctggtaaaccaatggactggtcaggcttatattaacctcggctttaaactgtccgagaaggtagcccagctgaattctgctcttgggatgaacgcgctttcgaatgccattagcgccgtcacctcaaacgtcagcaccgtaggtgatcgcgtcacgagcacctcgcagagcgttactgatctgcgaaacagcctcgaacagaccaacgctaatctagcgaataaggcagatgcacaggcgctgtctacgctgcaaaatacggttacccagcagggcaaagacattgcttcagcctcaagcagcattgcaagcctgcagaacaacctgagcaccaccaatgccaacgttgcaaagaaagctgatgcgacggcgctgaacgctctccagaacacagtgactcagcagggcaaggatataacgtcggcgtccagcgatatttctttactgaagaatagtctggcgacaactgatgcaaacgttgctaaaaaagcggactcttctgcgctgtcttcgttacagagtacggtgacgcagcagggcaaagatttgagcagcgttggtaatcgcacaacgaacctggaaaacaatctcaagaccacagacgcgaacgtctcgaagaaggcagacgcatctgcggtggataccctccagaatacagtaacgcagcagggtaaggacatcacttcagccagtgacgcgatcaccagtctgaacaacagcgtcggcgccatgacgaacatgggcgacaatctgattcaggatgccaatcttgaaggtgatggctcagcgttcaggacgcagcagaacagcggcacgacaggcagcattgttgcatttggtgcatacggtgaaaactcggctggcgctcgaatgctgaaagtgaatgcaacctctccgggtctttttgccaatggtaaaaaaccaaccccggtaaatggctctcgcaaattccgctatatcgttcgcgccaagggtgtgtcgggttcgatgaacatgcttctgcgccgctggaacttcaatgggtctgccgagggtaattacgaagataaaaacgtcacgctaacgagcgactggcagactattacatgggatacgtctttctctccgagaactggcgcggatggtcaggcttttggtatctactgccacccaagtaacgcggaaatctggattgattcattccaggtgttcgatattactgatgcagtcaataacgatgcaacggccagcgcgttgagcgatctgtcaacgaaagtgaccaagcaaggtgacacggttagttctcagggaacgtcgatcaccaagctacaaaacgatctgacttctacgaagaccgatgtgtcgaaaaaggcagacgcctctgcgttgcagacgttgcagaacaccgttactgatcagggtaaaacgctgaccagccaaggcaatgcaatcacggctctgaccggcaccgttgacacggtaaaaggtgatgtggctaagaaagcggatgcgacggctttgaataacctttcgactcgggttagcaatgctgaagataagatcagcagcagcagtgacgccatcacttcgctgaacagctcgctgaatcagcagtctaagcgcggcgcaaacatcctgccagacgggacgttcgagagctattcgagcgggtacaatatcaccaatggtcgcgtcatcgtgactactgacgattctcacggcggaaacaaatgtatccgtgtgacgcgtccgaacgactacaatgccaatgcgaccgacaacagtgataaccacattttcagcggcttccaggttcgcgacaacgcggtattctatgttgagtgctgggttaagctggacgccaagagcacgacgatggatggctcggtgcagattgcggtcggcatgtcgttgcagtatcaggataactcctggcagtggccggcactcattaagtcggcaaaagatctgtccgcagacacctggacgaaagtcagtggctatctgaagagcagcaagagcggtatcaaacaggcgatggtgcggatctccatgccaaacgtatcgactgttaaggcgggtaactccttcctcgtcgatgattttgtcattaccgacgtgacagacgcctataatgcccagcagacggctgatgccactgcgagcgcggtatcaacgcttcagacgactgtatccaagcagggcgatagcatcacctcgcagggcgacagcatcacaaccctgaataatggtctggctacggcgaacaaagccattggcacaaaggccgatgcatcagcactgcaaacgttgcaaaatgccgtcaatcagcagggaaaagatgttgcttctaacaccagcaatatcaccgctctgtctaatcagattgttaacggcaagcaaggcacctggtcacgccgcatctataaatgccagttatccagcgccgctgctgagcctacatttagcgatattcagggactttccccggtattcatggatgaagttgccgacgccgcaaaactggatttctcgggtgcaggttcatatgtagttgcgcactacaaggcaatggttcgtgttgctgcggataccaccatctcggtgtctccgggttctcgcgtatttgatgattctggcgctgtgtacgttaatggcgtgcgtcaggcagtcgctatatcaggcaccgctactcttggctttgtactgtcttcgggctggaacaccgttgaatttttggtgaatcagtggacgggaaacgcctatattaatctgggcttcaagctgggtgacaaagttgccgaactatattccggtctgggtgtttcttctctgtctacggcaattaattcgatcaactcgaatgtcaataaggttggagatcagacttcaagcaacagcgcggcgatcacctctctgaagaacagtctgagtgataccgactctgctgtggctaagaaagcggacgcttcggctcttcagacgctgcaaaacacggttactcagcaaggtaaggatattgcaagccaaagcgacagtgttacgaatctcagcaacgcactaagtaacgtttctattggtggcgtcaacctgatcaaaaactcaggcgacatggccgggtggtctggtaaaaccaatgaaatcttccgtggcaatgcggtgattagcgcgactactaaagcgggcagttcctaccgagatctcaaggagattactctcgacgctccagtcgacaatgcagagtacgtttacagtttctttgcaaaaggtggtgagaacggtcaaagcatgaccgcttacttctacaaccctaactcgacgacatctggggttagtagtcaaggtgtgtcagacggcagtgttgatggtcgtatgtcattcactttgacaactgagtgggttcgttattgggttaagtggaaacagaagccgggaactggatctaagagaataatccttgcacgcatccaagcatcttcgacgaaagatcagactgtctctatcaccagccctaagctggaagttggcaatatgcctacagagtggtctccggcgccgagcgatatggcatcgtctaacgatctgtcatcgctgaagactacggttgatgcgaatagcagctccattcagtctgtgacctctcgtgtccagaaaactgaagacaatatctccacgcagaataccgcgatcactaagcttcagggtgatttgtcgaccactaacaatctggtttcgacaaaggctgattcagctgcgcttcagacgctacagaactcggtgacgcagcagggcaaagatatttccagccagggaactcgtgtgacgtccatcgagaatagtctgacgtctggcgccaacctcatccctaacgccaagatgctcaacggcgcacagggctggggtggggcggcgacaactgtcgacggttacgcggctgtaaatagttcagctggatggcagccagtctcaccactgtttgaagtgacaccgggtgatacactggatttaagcatgatgtgtcttgcgggtcaggcaattactgtgggatgggggttgcgttttgacggccctagtctctctaacgccaccatctacgcaagcaacttgagttatcaagctggtgagaagaaggctgtaagcggtacgtttgtcgttcctgtcggcgcgaccacagcaaggctgcaaccgaacactggcgctaccgcgagtctgacagtctataacgtcgtcgtcactcgtcgagacgcaggaactatggccaatagttccgctattgattcgctgaccagtacggttcagacgcagggtgatgcaatcagctctgtgggcggtcggacgacatctctggaaaacagtctgaagacgacgaatgacaacgtgtctaagaaggctgattccactacggttcagacacttcagaacaccgtcacgcagcagggaaaagacatttctgccgctggcactaacattacctccatgcaagcgtcactgactcgtcgcactgtatttacggtaacggcgaaagggaatggcaacagcgtaactcctggggtttttgatgaaagcggcaagaacctgtttacccctggtcgcagctgggcgttggtcacttttgcaaaacaaagcgacggatcaacggtgattgcgacctccaaaacatacgatgtctttggcagcgcgaataatggcgccacgatgtcggctgatatcgaggcgttggctagtggcacttacgtttgcgtcctgacattcgatgagccatctggcaaccgaggtaagatattgtctgctctggaatctcttggtggtacatccgaagtagtcaactctctgccgtatcgtggtgcctatatcctccttggccgcaaaggcatgaaaccgggcgatggtctggaactgcgtgcgccaaccggtggcgacggcaccgcccacatttcgacctcagtcgagttcgtgaacggcgtaatgatggggcttggggcagctggtggcgtgatgatgaaagcagatgcaaacgcatcggcgattaccacactccagaacacagtaacgcagcaaggtaaagatattacctcgtccagtagcgcaatcacgagtctccagaatggactggtagcagcgaacagcaacatcgacaagaaagctgacgcaacggcgcttcagtcactccaaaacacggtaacacagcaaggtaaggatatttccacgcagagcggtaatgtcaccaacctgcagaacagcctgagtgccacaaataccggacttgccaatctggttgcggacagcgatgcgtcgaaaaaaatcattggaaaccttctgaccaactcatcgtttgagcgcggtctggaaggtttcagcggcggcgcgtcatttataaaggtcattgatgctcagtcgccaaattcgggaagtaagatcctgtcatgtggagccggtacggggacagtctcccaaagcatcgcagtgacgaaagatcgcacctacaaaatcggcgcgtttgctcgctgtcagtctggcaccgttgtcgataatcagagcaataacaagctgcgtatcggcaactcgtctctgctcgctgatttcatgtttaagccgacagaccttcctactggctcgacctggaaggagatctccgggacttggaaggcgacggtatctggtagtgttgatgtctctatcaactcgtccctcaaatcaggtaatcagtatttcgatgatttttacttcatcgatatcactgacatagtgaacatcgacgcgacgagcaatgcggttgctagtctgacttcgcgagttaccagtgcggagggtactgtttccagtcacaccggaagcatcacgaatctgagcaatagccttaattcgttgaataacacggtttctggcaaggccgacgcttcggcacttcagtcactccagaacacggtaacacagcaaggcaaagacttgtcttctgcgagcggaagcatcaccagccttcagagcagcctgaatacgatcaaggttcagagcaacccttggattgacggtacgtttgaaacctatgacaacaatcagcagctgggcggcagcactgcgattgtaacgacggacttcaagagcagcggcagcaaatgtctgaaggttactcgcccggccaataccagcgggaattccgacaagacgatcggctcttattctgcggtacgccagagcgcgaaatatcgcgttgagttttgggctatgatgccggcaagtgaagccccgccgtctggctggactgtggtcgttggtctgcactccatcaacaaagatggtgggaatgactggcagggcattacgttcaacgaggctggtcttggcggtcgcgaccagtgggttaagtttactggtgtagtgaaagtgagtccgagcgttacccgtagccatgtatggatttctactcgtggtcagagtggctccaacacacctggatacgcggtgtacattgatgatttcgtcattaccgatatcactgatgctgcggatgcacaggctacggcggatgcaaacgcaacagcaatctcatcgttgcagacgaaggtcagcgatatcgatgggaaagtgactgcccaaacgtcgcaactgtcttccatgcagtcgaaggtagacgcgtcttcttcgaaagtggatcagctgtctaagaccatttcggacagtcagagcactcaggcatcgttgaacaccagtcttcagtctcagattgatgctcaggcttcggccaacatcaaaaaccaggctgatctgaactcggcgacaacgagcatcgcgtctatcaaatcgactcaggcgactcaggcgactcagattagcgcaatggcaaaaacgcagactgacatgaccgcatcattgaatagtcaatctgcatctatccagacgctgcaagaggctgtttcaaacaatgacgcgctgaacagtacctggatggtgaaaatgcaaaccaacaacaacgggcagaagtatgcggcgggtatcgctctcggtgttgatggtaaaaatatgcagagccagttcttggttcaggcagaccgcttcgcgctaattaatacatcgaacggcaatacgactacgccttttgttattgacaacggcgtcacctatatgaatgctgcctacattaaggatggttcaataggcagtgctaaagttggggatttgatgagttcgggtttccaagaaaacgttagaggttggcgaatctctcgcgatggaacgatgaatataaatggctcagggccgggtagttccagaacggtaattaccaacggtagaatcgaagtctatgattcaaacaaccgtctccgtgtgagaatggggattttctaa

SEQ ID NO: 177535 - DNA, 612 bp, Klebsiella oxytoca
atgtctgaactagttcatgtccagctgggcggcgcacttgcgcatcgcttcggtcggcactggcatttacgcgcttctaatgcggcacaagccatcaatctgattgatgcaaatcgtccgggcttaaacgcctggattcgccgcaatgccaaggtctacgaccgctatcacgtccagatcacctctaaaagcggtgttacatggtcggttgatgaaaccgaatacctgatgaaaggggttggcaaggatgtggcaaagatccgcatcactccaatacctaaaggccgcggcggaaagacgcttggttatgttcaggtcgcaatcggcgcagcaatggtcattgttggggcgtttacgacgttcttcaccgcaggcacctcttcggctctggttgttgccggcatgagcatgatgatgggcggtcttgctcaaatcctctcgccacaagcgaaaaacccagaagttcgacaggcggataactccgactcgttctatttcgatgggcctcaaaacacaacaaatcagggaaatccggttcagctgaactatggggaagaaattctcgttggttcgcagatcgcaagttcctctatcacgattgaccagatttaa

SEQ ID NO: 177536 - DNA, 804 bp, Klebsiella oxytoca
gtgttcagtgacatcaaatcgattaacggctctctggttacgcagtcgctctatcagtgcgcgattgctcgttacccgaatgaagcgtgtgggttcattgttcagtcgacaggggagaagtaccgctttgtcgaagcgcgaaatgtctcggaagacccggtcaatgagttcgtcatgcaccacgaagacgtaatagccgcagaggatgagggggagatagtcgccatctggcatagccacactgatcgctcacccgaagcctctgatgctgatcgagctgggtgtgaggcgacggaagtgccatggctgatcctctctgtcacaaaaaacctaaacccggacattgatgccgagtttcggttaagtgagctggaagtgattacgccaagcggtttcgaaatgccctacacaggccgaccgtatgttttcggtattttcgattgctggatgctctgtcgcgactatctgaagcgcgagttcaacgtcgagattaacgccaatgctcacctgcatatcccatcgtggtatctgggcaatgaggacattctcgacctgaactatcgcaatgaaaatctggtcaggctggcgccaggcgaagagccgatgcgcggtgacatcttcttcattcagtacgggaagatgccagaccactgcgctgtttacgtcggcgacaaccgcattctgcatcaccagatcgacagactcagttgccatgcaacctacggtggcatgtatcagaaaaacacgacacatcatcttcgccatcgggcgttattaacagggaaggaaaaatgtctgaactag

SEQ ID NO: 177537 - DNA, 699 bp, Klebsiella oxytoca
atgagtattcgcacggaaattcagaggttggcgccatcctccgttatcgagcttttcgagctggatatggctgtgacaacttcaggcggaaagatcttctttcacgcaggaacgaacaatctcgataagccggtcgtttggcagggcgtcgagtacaagccatggcctattaaggcgagtgggttcgataaaacagggtccggctctttgccgcgtccaaaactaaacgtttccaactacgcaggtgtcatctccgccgaggctgctgccaatgacgatctggttggctgcacagtcacccgtcgccgtactttggctcgctttctcgatgcggttaatttcccagcaggaaacgctaccgccgatgcgtctcagcacttcccggatgaaatttggttcgtggaacagaagacgctggaaacaaaagagagtgttgaatttgagctgtcgagtgtgtttgacctgatgggtgttcaattacccgctcgccaaatcatcaaaaacagctgtccgtggaaataccgcggcgcggagtgcggctacaccggcccgtacttcgacaaagacaacaatcagacgacttcggccagtgctgactattgcacaaagcggctagatgcttgcaaagcgcggaagaacttcttcgccaacaagatcatcgcattcggcggatttccgggggctacgcgtgttcagtga

SEQ ID NO: 177538 - DNA, 336 bp, Klebsiella oxytoca
atggcaagacaaacctttaactggttcccggattttgagtcagagaaaaccgtaaagccagaagtgaccgttctgaagtttggtgacgattacgagcagcgccagtcagccggtcttaaccgcattaaagaagaatgggcgctgacgtttaaaagaccttacagcatcggtaatgctatcgacgattttctgacagctcgcggcgcagttgagtcattttactggacgaccccgcgcaataagaaaatcatctgtgtgtgtgactcccacacagtgaaacgttatccggggtatttggagatcagttgtacctttagacaagtttttgaatcttga

SEQ ID NO: 177539 - DNA, 4566 bp, Klebsiella oxytoca
atgtccgatattgtagattttaaattgacgttgaatgacaaggagttttcaacgtcaattaaaaacgcgggaaatttgttagagacattcggtaaaacggcctctaataactccaaaaaaatgtcctctcttgaacggtctgtcgtcgccacaggccgttcgttttcagttctaagcgtctcccttggtaaaggcgcggacaaaatggaagactttgcggccggcactgaactagccagccaaagtcttcgagccatccgtgaaaacatcgccgccatcaaccgtagtctgtccgtcttctcgacgagagtagatcagaccagcggtaaagttggtgcgctgacttctgtactgaagaaggctcagtctgagcttttggatttcgctgatttcgcggatcacgccggcaaatctgccaaaagcttctcaaaccatgcctcagacatgggtaacaccacatcgtcactgaaccgccgtttgtcgaacaccagcaaagtattagatcgctggaaagggacaactgacaaagcggcagacgggcttaaaaacgttcgtgaccagatggatgccgtcatcgatcgccagaagtcactgagtgggagaatccttggtggcggtcgagtaggtggctctggcggtggctctggcggtagcagaggtaattcgggtggcggtcatggacgctctgagaacggtttgttcgaagggctgcgaggcaatattttccttctgggggaaattggcgacgctgctcgaaccgttaaagaaatgctgttcggatggcaacagccgctgatcgaagccatgagcaagatgcaaaacacgcgcatcttactgcagggtctggagaaggacgcaaagaatccgcaggatgctgccgagaaagacatgaacttcatcatggggctttcggaaaaggttcacgtttcgctcgatgcagtatctgatgcattcgtgaaactgaagtctggcggtatcgatccaacgacgggatcgctaaatgctctggttaactccgtagctcagtttggtggtgattcggaaatcctgaagcgcgcggcgatagcgattcagcagatgtcgggcaaaggcgttatctctatggaagagttgcgtcagcagttgggtgaggctgttcctactgcaatgcagtcgatggccgacactatgggcgtcagcatggcgaagctcgtcaaagacgtttctttgggaaccgttgaggcgaagtctgctcttgatatgcttttcctcggcatggagattgatagcgccggcgcggcagatcgtctgtctcattcgtttaccggcgcattggctcagatgcagacggcatttatgcgcttttccgataatatggcgaaaggcgggtatctcgacgcattgtccgatggcttaaagcagctatcgacttatctaaacacaaccgaaggtcagttattcgcctacaacttcggccagggcatgactgctatcgttaagacattgacggaaatggcctcgtggattgggaagaatattgagctggtcaaaaccattgctcaaattgtcggcttaggcatgggtttcaaacttttgaaaaccatcgttaccggttcactaggcactgctctggagatgttctcttcattgaacaagtctcttggtctggcgaccaaaggggtgacgagtttcctctcggtaacaggcaaaatagttcaggatattcgcaacttcggtttgtttgctgctgcggtgattaacatcacagaggccattcgcggcgcaaaaactgcgtggttggcgtttacagctgttttgcaatttaaccctatcatcatcggtatcaccgctgttgttggtgttgtggctcttctggcgtcgacgtttgagagtgtttcagagaaagcatctgatgcgcttgagaagattaaggccgtcccggaagcgatggggaaaaatgaacaggctgctcttactgcaaggttaaaccagctcgacatagaagaggcggattataagcgccgtaagagcatttatatgtcttcgacgccagagcagcaaaaagggttggcgaagagcgataagttcaacattgataacattaatgccggcctgaaggatgtgcaaagtcagcgtcaggacatccagaacgccatgggtggggcggtggttgctgttgccagtaaagagatttctcgcaacctgcagtcaggtctgaagaagatcgatgaccagttcacgaaagacgccgcctctctttcaaaatctgctaaggattatcgtgatcgctctgatgctatcagtaatgataagtcactaagcaaagatgagaaaagcagtcaactggagaagttgaacgctgaccgtcaaaagggactggtcgacgcgactcagaagcgcttagacggttatcagaatctggtaaaaacgcttcaagatcagaaggccagtgtagagagtcagctgaagagtgaaagcttgacggctgagcagaaaaagacgctcgatacaaaaaatatcgcactgtctaagcaaattaacgatctgaacaacaatcaggttcagatggcgcaagcagatctcgaccgtgcaaaaaaatcgatgtctggtgatacgccgaagctgagcactcagacgaagacgggcgatcgcataaagcttatcacggacaacgcgggcaaaaaggttggtgatttcgtcaatccagatacaggcgaagcgctgcgagaccttctcgggaatgtgatcaccggccagaaccagatgagcgtaaaccagcgctatctctcggctgtaggcgataagaaatttgacgacctgagtcgatctgagcagaactcgattaaaaagggtcttgccgatgcggctaaggccgacaaaatcgccgcggacaagcgccttcagagcgccaatattgctgcctctaagcagcaaagtattgatgcgatggtagccaaggccaatcagcaggtcgtttccagcgcgaacgagttggccggtcagttgggtcttacgtctaaggcaagtgcaagcttcgacgagtcggttaaaaaaacactgagtcaaatcgataacgcgttgaaggatcaggacatcaacggcaaagccttgccgccaaactctcgattcaccgacgaccagaagcgccagatgattcgtgatcgcgatttcatcaaagccaatgcagcggactactctcagcgtcttgaccgcgattctgctgaacagacagtgtcgaaattcactacaacgaccagcgggattatgtcgtcggttgatggtgctaatcgacaggctgcgatggctaagtggatggaagactatcagcgcgacatcaagacacttcagagttatatcgcaacgactcagtcggatgtaatgaaggatgtgtaccagcgcagtctgaaagcgatgagagaaggtggtagtcgtgcctttatcgagcagtttgggactgaaacgcagaagatggcgctggagtacgaagacgtcgccggtcaaattgagaccgtgtggagtaatgcgttctccagtatgacggacacaattaccgacttcattatggacggtaaggctagtttcagtgattttgcaagatcgatcgtcaaagacatagccagcatcattgttaaatcgcagatcactgcaccgctcatgaatatgatgggcatgggaaccaacggcgcgggtaataccggcaacattgctggggctatgctgaatcagggcgtaagtctcgtcagctccggcggcgccggtgttaacgtgaataacggtgacaaatccattggtcagtccgcgaaggagaccagcgcgggtattagccaaatgagtacggccaccgagaatgctaacagcggattgtctgggatggttagtagcgcctggaattctacaaagtcattccttggtcttggcacggccacgggtaatcagactaaggcaatcggcgccaacattctgacgatgaataatctatcttcagtggcagcaggtttgacggctgttttcgcttcgatgggggctagttcgacttcatcgaaggggcgttggctgaactttggtatgtccatggtatccgcggcaacatcggtctgggctggtagcctcgcgagtggagctggtgggtctggtgggtctggtgggtctggtgggtctggtgggtctggaataacgcaggccaatggtcagaacattccgcccattcctaaatttgagaagggtgggatcatggggccaaatggtgtaattccactgaagacttactccaaaggcgggatcgctacttcgccgcagctggctctatttggtgaagggaaagacaatgaagcctatgtccctctgcctgatggtcgttcgattccagtaacgatgacggggaatattggcggcggcggaacaattgctccggttgccatcaacatcagtgttaattctgacggctccagctcaacgtctggctcggatgcggacggcaaaggttggaacgatgcagcccaacgcattaaaaacatcgttctcgaaacgattacgcaggaaaagcgccctggtggttctctgaacaaaaacaccaacggcaacaggtaa

SEQ ID NO: 177540 - DNA, 318 bp, Klebsiella oxytoca
atgactaagttactggatctggattccattcttccgccgaaaaaagaaatcaaagtggctggaaaaacctatgccgtcgcggaaatgactgtcggtctgttcgccaaagtaaaagcctttgaaggcaaagacatcgaagctatgtcaatgctggatcaggttgaagcttatgccgaactggtggccgaagtcattcctgacgtaccaaaggaagtgattaatcgtctgagcatcccgcagctgcagcagatcttttctttcgccatggaacaggcagaggaagagaacgaagccgcggccggagaagacgtaaagtaa

SEQ ID NO: 177541 - DNA, 492 bp, Klebsiella oxytoca
atggctaatacccatgtaaaaaacatcaaattaggtgcgtgtgcggtttcattcgctggcaccgatctcggttacaccaagggcggcgtagaggtagaagtctctactgaaactctgaaagtgaccgtagaccagctggggcaaaccacgatctctgagttgattcagggtcgtaacatcaaagtaaccgtgccactggcagaaagcgtgctggcgaacatggttaatctgatgcctggctccaccatgtccaccgacaccaaaactctaagcatcaaatcagcacagggtgtaaacctggttgacgtagcgcagcagctgatcctgaccccgcaggacggcaccgacttcattctgactctgccgaaggccgctactggcggtaacttcaccatggcgtataagtctgatgacgttcgtgtgttctctgtggagttcaatgcgtacccagatgataccggcgttttgggaactctttctgccccaaagtag

SEQ ID NO: 177542 - DNA, 450 bp, Klebsiella oxytoca
atgaaaaaaacattcatcgcattaacactttcagtgacctttcttgtcaccggttgcggcgaagacaaaatgaaggatgaggctgttgagtttacgaaagaagcgatactgaagaagctggcagacccggagtcggcgtccttttctgatatcaagttcgtcaacactaacgctgagaaaacgctccctatcggcgaatatattgtttgcggaaaagtgaagggcaaagatgctcatggagaggattttgaaaccgagttttcttcggatttgatgcttgaagtgtcaaagtttaatgacgaaaaaaaggactttatgatcgaagttttgcctcggtataactttgacaccgggatcattgaccgcagatactatgattatgaaatagcctgctcaaagggtgttgaagccttcaacaagaatcgtgaagaaaagtcctcatccaagtaa

SEQ ID NO: 177543 - DNA, 381 bp, Klebsiella oxytoca
atgtttgtagagggtctggctttgtatttggcgaagatgggggttggcaaagtcggctccactatttttgctgatgcaatgccacaagatgccaaaagcgccgtgatggtgacttcaccaaccagcggcattgaagtcgatcatgaacttgccggcttctatatggactcagtgctgattgttgtgcgtgatatttctctatcagccgcacagaggaaaatgcaggtgataaatgatttgtttcctgtcgacaatgtcacgtcaaagagtgttttttttaggatgcttcgacccatgacactcccgattgtgtatccccgaaatgatggtgctctgttcgagattgggcttcctgtggaatttgccgggtatatgttgtaa

SEQ ID NO: 177544 - DNA, 495 bp, Klebsiella oxytoca
atgggtttaaacatcaacacgctgaatctgaagaaggcccagagtcgtctcagtaacagccagaaagcctataaacgcgtacttgtttctgaaatggcaaagctggctaatgtcgctcagagaatggcaagagcaatggccccgatggaaaccggatctcttgaaagtgccatttttgctcgcgtggtgaagactggttacgacagcttgcacatcgaaatgaaggttgatgaaagccgaccaagacagagcagtggggcggtgaaggttaaacctggcactacagttggtgattatgcgatctatatggaaaagcacaaatacagcctcggtgccggttctattctgaagcagatgacacaggggccggtagatactcgacgggttaacgtcgggcgtcggtacatggaaagagccgtcgaatacattcgaaagcggtttcctgaaatagtagaaaactcagccaggaaagcagggtttataaggagacgatga

SEQ ID NO: 177545 - DNA, 345 bp, Klebsiella oxytoca
atggatattgcctggcaggttgagggtactctgtacaagaagggtggtatggacttgtacggagaggcgaaatacgagttcgctgctcagataaagatgggcgtagtttcgttcgttgacagtatcgataaaacgtctgttcgtgctgatagttccgcaagccgtggcaaggcggagattgcgctgtttgatgcggtctttatcgtgccattgtcggcgccgatcgccaaagaggatgtgcttatcgttaacggcaaaaaaatgcgagtcgaaagcatccaccagcgatgggggttgcgcggccgtccggggcattatgaagtcggggcgaatatatgggtttaa

SEQ ID NO: 177546 - DNA, 834 bp, Klebsiella oxytoca
atggagcagcttggcgtttataaagacggggatgatgtcacgttacgcttttctctcgatgtgatgagcgctacctcagccagttactctgtgaaagacgccagcggaaatatcgtcacgtccggcgtcgatgtccctgtctctgatgggcagatgttcgtcactgtcactgtccctggggcgattaacgctctgggtgagcgtgaacgcgatttgcgacgcgttacgctgtcagttgatgcaggtggcgctttcattaccaaagagcagcagtacatcgttttacgcagttttgagctgtctgtcccgaagcagtcgtttatctccattggcgaagcgcagctgcaggcgatcgacatgcttaacggcggaagtttgctaaccggtggcgaaggggacttgcgacgccagctgatagaggcgacgaagcgcattaagtcgatgtcgttttcaattcgtcggatctacggcatggattgggatgactatgatcgccctcagaatatgcttcagacgtcgactctgcctttccgctgggctggtcagtacacctccgacattgttgattgggataagctgaccgacgatgactttatggagtttccagaagcctttcggaacgcacttgctctggccgttgtgaatgaagccagtgagattgccggcggcagtgatattcagcgtgcgcgtgaggatgggatcgtctctgagtcgattggtgaaacgaccatggcttaccgccagggtaaaggtgctgtctctattgtcgccaaaacgacgtggagaatgttgctgaagtacatggataaccgcgtcatcgttcgcagacagtaa

SEQ ID NO: 177547 - DNA, 426 bp, Klebsiella oxytoca
atgaaaagtgcaaaagtgaagttgctggaatcgacctttaagggatacaccggtctgctttgtggcgttcagttcgaagatggtgtttctgtcgaagagctaccgtttgtggatcagcagcgtatctgcgcgtcgatgcgtgcggaaaccgttgatggccgcaatgtttcggcagctggcgcttatagcgagcgatactccgttaatgctgaggccgttaaggaatatgccgcagagccagtgaccaatctcgttcgcggtactgtcgagcctggtgttcagatctacacgcgtgaagagcttgaggctgtcgctgatagtgaagggatcgcgggtctgcgtttgattggtggggtaatgggcgtgaaggccaaaggcatcgtagagatgattgacggcattctgaaagcacaaggcggcgtgtaa

SEQ ID NO: 177548 - DNA, 444 bp, Klebsiella oxytoca
atgcctgagcaaaaaatggaaatcacggacgagcagttcgctaatttcaccggaacgatgtttaacacgtcgtttaccaaatcagtgtctgacgcgccgatgaccgaatatcgccagaatcgcctgactgcatgtttcaagtctaagccacacgccgatacagccgctgtcattcacgtccagagcgtaacggttgccccgaagacggcgactgtgctggtgggtgatacggttcagttgggaggctctattaagcctgatgacgccaccgaccgctcttaccattgggttactgaagattccggcattgcgaccgtcgatgtgtctggcctggtgacgggtatcgctgaaggcagtgtgaagattcgtctggtagcaaatgacggctctgtattcggcgaagcggctatcaccgtaaacaatccagagacagtccaagtttaa

SEQ ID NO: 177549 - DNA, 873 bp, Klebsiella oxytoca
atgcctttactgcgtgaagaagctgaaaagctgagtaataacgaactggagcagggcgtaatcgagacgattatcgaccgtgatgacctgttcgcaatcctgccgttcttcaaagtgaacagcaaagcgtacctgtataaccgcgaagcgactctgtccgaagccggtttcatcgacgtgaacgaagttatcccggaaggcgcggcaaccttcaccgagcataccgctaaactgcgtattatggccggcgatgtggacgttgataaattcctggctaccaccatggatgacaccaacagccagctggcaattcagatccgcgcgaaagttaaaggtctggctcgcgcattccgccgcaatctgatccagggtgatgaaaccgtcaacccgaaatcctttaacggcattgctaagctgatggctgctgaccagcacatcgcggctaacgcttccatgaccttctccatgctggacgaactcgtcgatgctgtgaaagatctgggcgctgactgcctgatggttcgttccgagcacctgcgtgcttaccgtgcgctgctgcgtaccgtgaacgccggcccgagtgaaatcatggtcgagaacttcggtcgtccgatgctgacccacaacggcattccgttcatcgtgaacgactttatcccggttactgacggcgcggctccgatttactgcctgcacatgtccgaagagaacggcctgtccggtatctacggcggtgacaatgccggtatcgttgtcgagtccatcggcaccgttcaggataaagacgcaacccgtacccgtgttaagtggtacaccggtctggttaacaagcatgacaaagccattgcagctctgggcggcgttaagatttaa

SEQ ID NO: 177550 - DNA, 885 bp, Klebsiella oxytoca
atgaaattatggcagtggatgcagctgaccaatacccatcgcgggtatatggatgttgcaggtaaagaagagttaggtggcggcggtggcgaagcatctgtcgaagacaagatcgccgcaccggaagacaaaggcgataagagcgaaactacagctgacgatctggaaggtctgagcgctgaagagctgatcgctaaggttcgtgaagagcgtaaaaacgccgcgtctctgctgaaagagagcatgaagcgcaagagtaacgagcaaactctgaaagaaaaactggctaagtacggcgatatcgcaccggagcgtgcgcttgagctggttcaagccgagtccgctgctcaaaaagctcgcgaagacgctgagcgtcaggagcttgagcgccgcggtgaatttgacgctgtgaaaaagcagatgatcgaagcacacggaaaagacctggaaggtcgcgacgctcgtattgctgaactcgaagctgaaatcgcaggtatgaagaacaagttggttgagaaaaccatcggtacttcgtttggggagtccccattcctgcgtgaaaaagtcctgatgactccggcaaaagcccgcgttatttacggctctcacttcgaaattggcgaagacggtcaggtagttggttacgacaaaccagctggcgcgaaagatcgtgcggttctggttgatggtcaaggcaacccgctggcatttgagagtgcgattgaacgcattctgcgtgctgacccggaggctgatgctctgttgcgcagtgaagcgaaacagggtgctcattccaaaaccaccaccaaaccgaaactgaataccgaaaccaaaaagtcgacactggataagttgaccgccggcatcggtaaattgaacaagtaa

SEQ ID NO: 177551 - DNA, 1575 bp, Klebsiella oxytoca
atggaattgtcgaacaaaatgattcaggatctggtgaatcgccgccatcctgattatgagctacgaaaagctcattgggactttatcgcagccacctacgccggtggccgcacttggtttaaagataacatcttccgctactttaaggagggtgatgccgagttcaaggagcgtctggaacgcgcttaccggtttaaccatacccgcgaagtcgtgaatctgattaataaatatctgttcaaagaggacattcagcgctgcgaggatgatgccccgccgtcagtgaaggagttctggaagcgagcaacccgtcagaatatgaacattgatgattttatggttgaagtagacctccagtcttcaatttatggccgtatctgggtggttgttgatagcaccgtatcgggcgacatcgagtcgaaagaagaccagaaaaagtctgatggccgtgcctatgcatattgggtttcacctcagcagatgctggactgtgcttgggatgaagaggggaatctgagttggattctgatctgcgaagtgagccgcgacgacgctgaccccttcacctcatcgggtaaagagtttctgcgttaccgtctatggacgaaagaccactggtatcttttccgcgaagatcgcaaggggcagcggtcaggtagtagaacgaaagttgttttggaagatactggagagcacggtctcggcatggttcctgtcttccctgttgactgtatgggtcagagcgaatcgccgtacttcagtccatcactgattgacgatattgcctatctcgaccgggctgttgccaactatctgtctaaccttgatgccatcattcaggatcagacattctcgcagctggccatcccggttcagtctcttctgcctggtgatgagaatcacaaaaaagtgctggagtttggcacgaagcgcgttttcacctatgacggtgaaaatggcgcccagcctttctatctgtcgccagacccaaaacaggcgagcatgatcatttcgaccgtccagcagatcatcaacgagatttatcactctgttggtgttgccggagagcgcacgaagcaggacaacgcaaagggtatcgacaactccagcggcgcagccaaactgtatgacttccagcgagtaaatagtctactcatcaataaatcgagtcgcctgcagcgagccgaagaaatgttgatgacgctggtaactgcatggatgggtgagaagatgccagagagcgaagaattggtcacgtacccggagagtttcgacatccgtggactggttgatgaattcgaagtcgcgagcaacctgaaagatctggaagcgccagattctgtccgtcgttatcagatggaaatccttatcgataaaatcttcccgaatctttccaaaggcaaaatgaaggatattgagaaagatttattgcaatttcctccaaaaaatgacgccttggcccttgaaagtaagttagcacttacttatgataaagatacggcccgagaaaatgggcaagaaaaatcccaaggaaccgggaaaccatcacccaagaaaccgggtaatgacgaataa

SEQ ID NO: 177552 - DNA, 1257 bp, Klebsiella oxytoca
atggctattccatcatccctgagtctggttcagttgcattcggggcagatgaaggtcttcaagtctccacatcgttttaaggttgtttgcgccggtcgacgttggggtaaatctcgtctgtcgatctccaaaattatcaaagccgccgctgccgatcgtaagcagcgcgtttggtacgtcgcgccgacataccagatggcacgtcagatcctgtgggacgacctgcaggaagttttgcctcgcaaatggattgcgaaaaagaacgacactacgatgactatcgtcctgaaaaacggtagtgaaatcgcactgaagggtgcagataagccggatacgcttcgcggtgttgcgctgaactttgtcgtgcttgacgagtttcaggacatgaagccggacacctggtacaaggtgcttcgaccgacgctgtcatctacgcgcggcggtgcgctgatcatcggtacgccaaagggattctctgagttccataagctgttcatgataggtcagaaccctgagatgcaagcgaaaggcttgtggaagagctggcaatttgtgacggcggactccccgtttgtaccagacagcgagatcgaagcggcgaagaacgatatggaccctaaatcgttcgcgcaggagtaccttgcgtcgttcgaaaacatgtctgggcgcgtatattacccgttcgatcgcaacgtgcatgtcaggccgctacagttcaatccgcgtttgccaatctgggttggtcaggacttcaacatcgaccccatgtcctcggtgatcctgcaaccgcaacccaatggtgaggtctgggcgattgatgaggttgttctgttctcttccaacacctcagaggtgtgtgatgagctggagagaaggtactggcgccagaaaagccaggttacggttttccctgacccggccggcgcatatcgacagcacgctcgcggtgagtctgatgtggacatcttcaaggagaaggggttcatgcgagtggatcacccgaagaagcacccaccgattgccgaccgcgtgaacgcagtaaacaggttgctgctgaccgcttcaggtgacgttcgtctgtacattgatccgaagtgcaagcacctgattgaatcgcttgagaaggtgatttataagcctggcggccgagacattgataaaacaggtaacgtcgagcacagtgccgatgccttgggttatccaattcaccgtcgcttcccggttaaaactcgtgttattcttggtggatcaagataa

SEQ ID NO: 177553 - DNA, 588 bp, Klebsiella oxytoca
atgacagaatccgcaaaaaaaccgcgcctgtctccggcgcaatgggcagagattgaggttaagtggcgctcaggcgaatacaccctatcgatgctcgaagaagagtacgggactcgctctgagacgttctcgcggtacttcaaaaagaaaggtatcgctaaaggctcagacagtgtcggggagatgatccgcgaatcgttaaagtcggatgcggaaattcgtgcgcgagcgcgagcgcaaaaagtagaaagcaggaaagaagaatatgacaagtgggcaatatggctgagcggtctcaccattaaccagatcgccaccgccaagaaggagggtcgctcacttagtttagttgaagacgatatcaaggctcttcagcgtgctgccgctgtcgttcagaagtgtttcgacgtgtcgagccgcgctctcggtctggaaaaagatgacgttatcactgacgaaatcccgaatcttgtgttcggcgagctgacttcagcccaggtagatgagcttaaaaaaatggacgaggataaccttgtcgatgaagaggatctgtaccttcctgatgtagacgatgagggggaggaataa

SEQ ID NO: 177554 - DNA, 267 bp, Klebsiella oxytoca
atgaacctgacttctaaacaaaaagacgtcatcaaaaccttgaatctcggctatgagcgtggacatcttctcgatctggacgagctgctggagattttgccctatcgcacaacgaaacagagcattcagttttcgctgcgtgcgctgatcaagaaaggtctggttgaaaagcacgactgccggccgcggggcgaaacgctgcatcaacgtcgcacgctggggttgactattcttggtcgagcaaaagcgaaaatgctgctggggtag

SEQ ID NO: 177555 - DNA, 891 bp, Klebsiella oxytoca
atgaccgacatcattatcaaacgccaccggcctgaagagttcccgcgccacctggacttcatggaacgcatagttgtgaagaaaggcacggtagacgactggaatacgttgaaaggcttgcattacaaaactgacggtaaaccttttgccccgtcttattaccgagctgagctggacggccgtctcatcggtgttctggtcatggcttacccgaaacttctactggcgccgcgtcatcgcatgttcccggatatcaaaccgacatcaaatacgcgtgaggcgaaccagatttggggtaagcgtgtgaatcaggaattcgccgttgtcagccgtctggtagccgatacgcagtatcgtggtctgggcttatcgtatcgtttcatgaatatggtttgtcgtatgcacgacaagccgatcctcgaaattcagtcgtcaatgagcaagtacaacccattcgctatgaaagcagggtttaagttcatcaagccagaaagaccaaagtcctacgaaagcgctctgaaagtcttccagcgccattttagagctgaccctggtgataacgagtctgtggtgaaagaactgctgagaatggcggaggggcgcaggaaacgtgcattgcatgatctggttgcgaactaccacaaaaattcgtcgctggcgaaagctggacgtaaccgcgggacgactgttcaggacattgcagacacactgacggacgaagcgagcattgtgaagcttctgaaggatattcacacgctgagtttcaccagtccgctctatggtgtgtatcggaacccggattttggacgtcagctgcctgacgctctgccacttctcgcatttgataaccagccgctggatgcgccgctggatttaacgaaaattttgtaa

SEQ ID NO: 177556 - DNA, 558 bp, Klebsiella oxytoca
atgagcattgataacaaggttttcccgatttatgagggcgcccagctgaggcgccgttttaccactgaagaagagtggaaagactggctgcgtgcgcacggtgcatatggtttccgtgtggccccgtattacagtcgctgcgttgtggtatttggcgcagatcgttatgtcgagacgatgaagcagctttacggcgtcgacgatagcgagtttatcggcgacgctggtggctgggtgacggatatgggttacttcgaagcagaccgttcggttcacggcgttttcctgcctgacgtccgggacgaaaaaacgttatggcatgaggcgctgcatgttgccatgtcgaccgcagaatcgcacggcgttcatttggtcgatcaggaggccattacctatctgcaggggtacatcgccgagaagctggatgctgcattcagacaattcaaggctgataaaaaagcaggtggcttacctccagtagaagccatcgtgacccgagatccgcattccatccgtcgcggagtttatggcagtgtcaagaaggtggtgaagagatga

SEQ ID NO: 177557 - DNA, 642 bp, Klebsiella oxytoca
atgagtaagtacgtcatcaacgtctccttcaacacgcgagtcaataagacgatccgcacgctggagatcgccgaatctttcgggcttggtttggacgaaaaggcgtggacgctttatgacaatctggaactggatatcgaacgcggtgacgtagtttacgtgaccggtcagtccggttccggcaaatccgttgttcttcgtgaattgcagcgtctgatggctgatgccggccagcgcgttgcgtcaattgacgactttgtctttgctgacgacaccaacgttatcgatcagttagggaagaccaccagcgacgcgctggggctgctttctatggctgggttgaatgacgcctatctgttcgtcagaaagccgtcagagatgtctgacggccagaagtatcgtctcaaaatcgccaagttaatcgaatccggcgcagatgtctgggttgccgatgaatttggcgcggttttggatcgagtgactgcccaggttgttgcctccaatctgcagcgtgccgctcgcgctgtcggcgcgacggtcattgttgcgacaacgcatgaagaccttaaaaatgctctgcgcccatcagtgcagatcaccaaacactataaagagcgtgtgaaggtggattatgagcattga

SEQ ID NO: 177558 - DNA, 675 bp, Klebsiella oxytoca
atgaaaaagtcgtttgaaattcagtatctcgatccgcgtactctcatcccgtatgagaaaaacgccaaaaagcacgatgagcgccagattaaagacctggctgcagccatcattagtcgtggatttgaccagccaatcaccgttgacaagcatcgtgtaatcattaccggccatggtcgtcgtgaagcggctctggtggctggtttggctcttgtgcctgtcattgttcgtgacgatctgacagaaagcgctgtgcgagcgaaacgtctcgaagacaaccgcttagccagtatcgattatgacgctattcgtatgcaggaagagctaaacgaactacttcaggacgaagacgttgagatctacggctttgacgagcgtgagttgaaggttttcatcgaagacctgaccgaaaaaatggctgacgatacgttgatcgacgacctgaatgaagaggctgagcgccagcgagaagagcataaagcgataacggaagaagtcgccggtggcagaactcgcatcatcgacattctggggttcaaagatgtgccgaccagcagtgcgatcgccgttggtgatttgttggctcacatggaagagaaaaccggtctgatgggagaagccgcttttattgcctttgcggagaagatttccgaagaggtggccgagtatgagtaa

SEQ ID NO: 177559 - DNA, 714 bp, Klebsiella oxytoca
atggattgtatcaaaaatatggacgttaaaatcagtattttgacggtggagacagcgcagttacggccgaatccctggaatacgaatgtcgttggcgctcgaaacttcgacaagctgaaaaactcaatcgaccggcttggcttttttaagccgattctggttcgtgagttgctggacggcacttacgaaattctcggtggggagcaccgctggcgtgccgctattgagcagggtatggcaaccgttccagtcacctccgttggcgtgattgatgacaacaccgccaagcagatgtcactggttgataatgagcgttacggtgaagatgatgccgtcgagctgcagcgccttattgaaagtattcaggctgaaattgactattcgctggcagatattgccccgtatgacgaggaaatgactgaaacgctggcgcgtgagtccagtatcgacctggaagagctgggtctgttgggcgaagaggaagatcacgtcgttgagccggacactcgcgagaagaaggagcgtcttggcgttgaacaccagactatgcgcttcaaggtttcgtttgacacggcagagagcgtgacggaagtcatcaaaactatcatccgggagcaggggattaaaaccggcagcgaaatggaagacgctggcgaagctctggtgtggctcactcaatattacaaggacgtgaccgatgaaaaagtcgtttga

SEQ ID NO: 177560 - DNA, 1578 bp, Klebsiella oxytoca
atgacagtcagaatcgtgtttgacgcagtcaatgccatcgtcaagggagcaaatgacgatgtgaaattgaaaatacagaaaatgctcagctatgaagtagacggcggaagatacggcggcggcggaagtggctgggatggtcaaagctcaatgttcagctgggccaacggtgtatttccggccgggttcgctcgtgccgttgctgcagatcttggccggtctggcatcaaatgtgctctggttcgaaaagaactgaccaaacctctaggcaacccaaaccccgtcgtaagcccattcccatacaatcctgattacgcctatcaggacgagacttgtgagcgcctggttcgatttggtggaatgattgctcaggttgccaccggtggcggcaaatcgcaaatcgcgtgcaaagccgcagcaaggatcggcaggatgacgctgtttatcaccactcgctcgatgctaatgttccagatggctgacaatttccaggagtccatcgattatcgagctgcccatggtgagccgtggctcaaaaacgaaaaggtcggtatcattggttccggcgagctgaagttctctcgatttattaacgtggcgactgtccagacgctatccagcttcctgagcgagcctggtagcgatctgtcgaaagagaaacgagaatttcatctacgtcgacgtgaactgatgaaacaaatgctgtctaaggtctcgcttctaatccttgaggaagctcatgaggcgtcgggtgagagtttttatgaaatcgccagactctgcaaaaacgcagactatcgtcttgcgctaaccgcgacgcctttcatgaaggacagtaccgaagataacatgcgtctgatggctgtatctggtcgaatagaaatcaaagtgtctgaaaaatatctgattgataagggtattttagcaaaaccagttttcctttatcgtaaaatcgggtacgttccagatatcgagcttctaaacaaggaattaacaggcaaacatgtcaacttccgcgttagtatgtcgaccgcataccaaaaagcttatcagttaggtatcacgtataatctcgccagaaaccgagctatcgtggatactgctgaagagtttaagcgccacaatctgagctgcatgacgctggttagacatgaacggcatgggcagattctaaagactatgttggaagagcgtgggctggtttcgagctttatcaacggcaagtcatctgccacaactcgttccgcaaaactggcagaactggccgcggggaaaatcgacgttcttatcggctcgacaattctggacgtcggcgtagatgtgccaagcgtaggcgcggtcatcatagccggtggtggcaaggctgaagttgaacttcgacaacgcgtgggtcgtggtctacgaaagaaaaaggggaaagcgaacgtatgtttcattgccgattttctggatacgtccaacaaacatctgatgtctcactcttacgagagaaaacacatcatttccactacgcctggtttttctgaaggcattttagatatagacgggaaattcgacttctcgattcttgaatcgtaa

SEQ ID NO: 177561 - DNA, 549 bp, Klebsiella oxytoca
atgaacgcacctacagacttcacttacggcatagacgctgagaaagaaagaaacctaaacacaacgatggattatttcaagaacgcgcaacgcagaaaattacctgtaagggtggttacagcgaacgagctggttttctcgatgcttgttactggatttgacatcaagtcccatcgtatctatctcagcccattaaccgacgaccataaggctaatcgcgtcatcatacccgtcgattacatcatctcggcagagcgcattgccgcctctgaagtcgacacagcctataagggtcaaacgacactgaagcgcggggattttgaggatggtggctttgtgcgttcggggaaagatttctttcaagttatccgatacgcccaccagcagggaaagcctataagggtctatctctcagacaaccgagtcttgaatggcgtgtccaccggcatgaatgagcagtcagcaggtataaggttgtcggacggcagagtcgtccagattttctatgattgggttgaccgaatcattccccttaatcaagaaatataa

SEQ ID NO: 177562 - DNA, 654 bp, Klebsiella oxytoca
atgactactcttaacaatctcaaaaaatccgacgtcctgaatgctgcgatcgttgtatcaaaagaattgagcgcaagcgcgaaagcgatggaaatcaaatttaacgagcgtttatctgctggcatggataccaagaaggacaaagcagatctacgtgctgcgcaaacaaaaagcgcttactttgataacaacattctggaagcgatgcgcgacgaaaaacaatgtggtgttttttacttctccattaaaatcgcgaaaaaagagccagaattgtttttccgtgaaacgttagcgaatagctatgcactcgaaaaactggcgtatctgatggcgtcgatggcttcaggaaaatgcgtcttcaatagcgcgctttctactaactcacgcgtttttgcgatgattgagattatcaagaaagatccgacaactttcagcaatggcgacgtttttaagatcatgaacaaagcaaaacaagagaacgagatgaagccagatgcaacatatacgcaagccaaccagctgataaagttattccgcgatctgggaatcgtggaagcgatcaaagatggcggaaaatctgagtttggcatggcaaaattcaagtttataaaaaatgatttgtttaatcatatcgctaccagttttagcaagtaa

SEQ ID NO: 177563 - DNA, 483 bp, Klebsiella oxytoca
atgaaccagttactgaccgttaatactcgctttggcacatccaccgcgctgttcaacactatccataagcgcttaataactgtcatgcacggcgatgaggatgtaaccaccagcctgcaggaatgggaaaggaattcattacagcaggatctggcaaatggcttcggttacacgcaaacctttaaagccgctcgcgtcgtctccaccgggttcggaacgtttattttcccactgcgcgggagagactgtgaaagccgccgtttcgaaatggctgtgcagatcgcaggatggttggccgaaacacgaccgcatcaggattcagcctaccagacaagcgcagccgttcgagctgtcgaaaatagtgagcggtacaccaacgtcgtctacaaagccggtcacgaccaattcagtatcgtcataaacggcaacacgctggggaaaacgcgtatcaaatccgacattatcgtgctggaaggtaagtaa

SEQ ID NO: 177564 - DNA, 447 bp, Klebsiella oxytoca
atgagccttaaacgtaccgatttggtatacgacctgttttacgcatctaacactgacccgatgaccgcggatcgcatcgcaacgctgaccattcagctgcgcgacgaagccggcgtaactcaactatcaacccaactgtctcgcaccgttctgcgctccaataagcagaaagtctatgccgtagggcagcagatgattaacgacggcggcgacccgctgctggtggccgcagaagcattcttccgcaaagacaccgcaacactgaccgaagggctgatttccgaggtactggacttcatcgaagggaatcttgccgccggcagtacctggatgggtgtttacggtatgaagatttactccggcgaagcactgaccgagctgctgcccgtagacgttctgaaagccgacgggaccgattcagcgacaaccggtgcaaccaccgcctaa

SEQ ID NO: 177565 - DNA, 366 bp, Klebsiella oxytoca
atgtatctcaacgaaacacgaaacgagatttacaccatgaacaacactgagcgcctgttatcttcttactacgctacgcaacgcaacgagttcaaagagaagcgaaagacgaacctgtccagcgtcactcttctggatatcgtcgcaaacggaactgcgatccgcgtattcaaagagagcgccgccagttttgataatggagtgtctcgccgcgttgtcgttagtgtgcgccgcagcaagctgaagtctggctggactgctgtgcagaagattttccctatttcgcagcttgagacagccattgtgtacgcaaacaaaatggctcagaaagagatttcaagagagtcccttgctgctatcgcataa

SEQ ID NO: 177566 - DNA, 363 bp, Klebsiella oxytoca
atggaaaatcgctttcactacttcaccactcgcaacgcggaaaagacttctttcactgcgatcatcactgagcctgtagatgggcaaaacgagttctatgtggctccagacttgtctaacgtgctggcgatggttaacacgtatggagacggggattttggaaccgtacacgtacacaatgcggaaaagctcgcgctggttgattttgacaccagttatgaatatttagccaaagacgctgtcaaaatgtctaaagagtacgacaatggcgcatctggtgattttgcttacaagatgtcggatgacgctcgattggttgagggtgaggatgtgactttctacatggatttagatcgagtttga

SEQ ID NO: 177567 - DNA, 369 bp, Klebsiella oxytoca
atgagcctgaccattaaacccctgctggaaccaacaaaggcgttgatgggcgcctgcaacgatatgcggttcgtgtttccgttcatcggcaatctcacggctgataagaaaacggagatggcccgaaagctatgcggctggtggaatagcgatgccggctgggacgcgctgaagaagaacggccgttttcgaactgacattcgccttgacatggctaacagccttggtttcttcgatcgcttctgtggccgctacaaatccgttgaggcgaagactgtggttttgacgaccggcgcggagatggtgagctatgccggcgataactgtggcgggagcatcgagccgcacaacttcgtgataatcgagtaa

SEQ ID NO: 177568 - DNA, 201 bp, Klebsiella oxytoca
atgagccacggagataaagcgccgactaaccccaaggctgcggactttaaaatacacgcacgtcttgatgcgggggaatctttggagagtattattgctaaccctcccaccacaataagtggcaaggttactacagagggtaatatcatttcagaatggcagaaatggcagacccttaaaaagagagcatcaaaccattga

SEQ ID NO: 177569 - DNA, 321 bp, Klebsiella oxytoca
atgagcctgaatattactgaatcatacaaagtcgctgttatcagcaccgctcacgttacccaagcggactccgagatactgcctcaaatcagctttgaccccatcactgatcgcggctacaactggattcatggcactgagtatggctggattgtccgtgccggtcttcacgctaagtcatggaaggagtctttgcgcgaggaaggcattagctggccgactatcgagaacatcgagaaagtccttaacgccggctttgaagtggtgcatttcgaccgcgacgcagatacgatagaggggctgaaaatctgggaatggtag

SEQ ID NO: 177570 - DNA, 234 bp, Klebsiella oxytoca
atgaccccttcaaacacatatctgaccgtcagtttaacaggcactaaagaagtcactccaaacgacctggcagcagtctaccgcgactggatgaacaattacctttccgttgtggcattcgctaatgactacggcatcactgaagcacaggcagagctgaccatcgcaaaaggtcgtgagatccacgacgcccacgccgactggcttaaagagttcgcccacaaggaagcctga

SEQ ID NO: 177571 - DNA, 189 bp, Klebsiella oxytoca
atgtttgagataacactgaaggaatataacgccatcccaaaagactacaggggcgtctggtctacggagcgaaccgactggcccgattgggagaaagtcagagatcagtacatgggcaagcgaacacttatgagagctggtggcctgctaattgaaggtctccacttcacaataaaagaagtgccttaa

SEQ ID NO: 177572 - DNA, 1674 bp, Klebsiella oxytoca
atgtcaacagccatctctatcattgaaaacacagccaacgccgtagacttccgcaaggaaatgaacgtcattcatgacattgtgggagagtgcgaaagagagatcgccctgatgaatcaggtgcatgatttcgtttactcaggtgagcgcgtgtcgatgattaaccgcctgcaggtgctgagtcgtcgcccgaatgatgagaacctccgaaacgttccgcagcttaactccgttaacctggatttcgttaagcaaaacatttgggccgaatactggcgcaaggtgacggatatgactggcgcccttctcatcatgccagcagagcgccgcgaccagtggcgcagccagttcactttaggtttgcaaaaggtggcgaagagagaccgcggtggattcgagcgtcaggttgaagagttcgtcggcgttcctgaattcacggccgacacagttatcccaacgatgacctcgttacttaatgatcgccacaagtatctggccgagcgcgtctatgggctgttcaaggcattaaacccaacgcacaagaccaacaaaacatacggcttcagtgaaaagctaatcatctcctactgcgtgaccgatttttggaatagcagcattagcctgaactatcacaaagctgacgttatcgacgacctgcgcgtcatgctgcacttctttgcacataaggagttcattacccttaatagttgctctgagatgctctcggcggcgtacagagcgcacaactgtgaaaccggtcagtggatgaatgtcgacggcaacttaatgcgtgtgaagattttcaaaaacggcaatgctcactttgaaatccacccggatgtcgcatggaagttaaacgaggtgctggcctacagtatgcctgcagcgattccggcaccatgtcgcaaggcgccaacgacaaaggcgccaaaagagtttggttacatccaaaaaaccgtgtcgacgaaaacgcgaatggtgatccgcgaccggcgacacaatagtgccaatgagacctggtacttttccgactcatcgttacagaagacagagaagcaagaccttgaacgcactctgagctttatcggcggagtgaaggtgggcggcagctggaagtttccgtatgaaccgtccactacgttcgacagcatcgttagcttgggtgttattccagaggtgaaatcgcaccagttttacccaacgccggcatcgatagcgcagtacgtcgcgcagatactgaaatgccagccaactgatcagatattagacccggacgccggccgcggtgatttggtggcgtttctcgatgtgcctgaagagaacataacgagcgtggaaatctcaccgctgttttgcgacatcctcggggccaagggatttaacgtctacaacaaggattttctggcctggtcgaaggaattcattacagcccctggctacgacaaaattgcaatcaatccgccatattccgaaggaagagccaaagaacatacgctggcggctctgaaccatcttaacgaaaaaggaattatggccgcagtgcttccagccgggtacaagccggaagagtggatcggtagtgagttcgtttgcgccaaatcaggtcgtgagttcgctggcgagtttgaggataccggcatcacagtagcagttttcgttttcagaagagcatag

SEQ ID NO: 177573 - DNA, 639 bp, Klebsiella oxytoca
atgaatatcatcgacaaggctcaaatgttcgcggccggcgcccacgctggtgtaggccagaagcgcaaatataccggtgaggactacatcactcgcccgattgcagtggccgagattgttcgcaataacggcggaactgacgaaatgatcgcagcggcaatgctccacgacaccatcgaggatacacaggtcacgttcggtcacatcttcagtatgttcggggaccgcgttgctgaaatggtcgatgcgctgagcaataaggccaagccagaagacggcaatcgtgagacgcgattctttatcaacgtccgtgcgctacgtgagcgactcgacatgcagagccgcgtcatcaagctggctgacctgattcacaacactcagtcaattacgaagtacgatcagaaattcgcggcgcaatacctggctgaaaaggcgttcatgttgagcgtgatattcagaggtgtcgagattggcgcgtctgatgaagagattgagtccagagtcggcgaccaccctcttttggttgaagcggaaaagattgtcgccacagcgctttcccgacttcccgatgagttgttcttcaagtcagatcgaattaatgccggtctgatggagaaatggaagtcgatggaagcctga

SEQ ID NO: 177574 - DNA, 261 bp, Klebsiella oxytoca
atgattttcagacagagacattatctgttcattcgcgaacactataagcattctcgcttcgaggggcgcaacgacgctacatgggggcgtgattactcttatcgtatcgcgcagagcggtctggactcactgtcgaagtatgggtatggcctgatatcgcagcacgaatcgaaaactggtgaggcggtatattacgatcgcaacctgaatattctgaccgacgaacagattaaggctgctctcagaggggaattagcatga

SEQ ID NO: 177575 - DNA, 297 bp, Klebsiella oxytoca
atgggattcgggcttcaatgctgggatgagaatggaaatctagttgtcgacaccagtgactacaactgcaggtacataggaacctacaatgtatcaacgggtggcggtaattcagccactgtaggcgtttcaggtataaaccaaggcaacgcctatgcagtaatcgttgctggttcttacggaagcgcttttaacgaggcgttttgcgcagtaaacgacaattcgttcaccctatttacgctgtctggcgccaatacatcccagacattcacagtagaagtgtatcgatatgcttag

SEQ ID NO: 177576 - DNA, 651 bp, Klebsiella oxytoca
atgagttacggatttgaggtctataacgacgcaggggcgctacaaatagactcagacaacaagacaacgcttttttctgatatcagaaacatcgatggcctgacagataacgggtactacaaaatcgataacccgttcggcgggtcatatccatttggttttctaaaaccagcagacacaccagtgccaggctatctatattggtttcgtctaaacgctggtgcatttgccatgcctggagccttcagcttccagaacggcagcggccagatcattagaacaactcgaaaccttggcgttgagagcggatatcttgatgtgatgaatggtaacggcgatctgatatggagtgcaaaaagtgccggccgtgtgcctcgtatcagaggatttatcgatctgccagcaaactcacctgtcgataatcaggtaatatccttttctccaggatttaacccatggattttgatgaatatggtgcctggcaatatttcggatgatggtgaggccacgggttactctggccttctcatcaaatggactggctctcagatccaagtgaaatacgtgtcacgataccaaaacacattctctcaatcgtttggtggaagaggggggttaaaaatcccctacgcatacttccaaggctattaa

SEQ ID NO: 177577 - DNA, 318 bp, Klebsiella oxytoca
atgaaattaccgctcattctcttagccgtttctctggtcggctgcagcgctcgacctgttaacacaatcaaattccctgatcgagcatatcaatacggtgtctacggcactgttcgtgtgcaatacgatgtcagcaaagacggccgcatagaaaatatcgtggtcaacgacgacgatgaaggctttttcacaaagcagatcgtcaatgacatgaagcattggcggcttgagaaaggccatccgaagaaagcccagaaacttatcgtagctttcgaaagagatcgcgttcgagctaaaggtggattccttgaaaattaa

SEQ ID NO: 177578 - DNA, 435 bp, Klebsiella oxytoca
atgtgcattcgctgtgaagaacgtaaagcaaaaaaagaagtaatcctgagccacgccaacgaaatcgccgatcttgccatcttagttgacggtggagtcaaaggaatctcggatgcgctgcgaattacatctcgtcttgaggcattgagtagtgaagatcttcttgagcctatgagcttgatcactcttatcgcccactttgccagccagaacaaagagctggcggctgacaacaagcgtcttcacgagactctgaattatatggcgatgagcgaaaaatctgcgccgtcggacggtaataaaatgtcgaacgaagaggcgttgcatgtcgtcgaaaccatcgtaaataccttcgaactggctcaggcacgagcaatggacggggctaatgcccagatccgcgaactgaagaatcgctttagcattaacaagtaa

SEQ ID NO: 177579 - DNA, 789 bp, Klebsiella oxytoca
atgaaagaattaattatcaaaacctctacgccatctatgacgagtgccgagatcgctgcgctggtgggcagtcgtcacgacagtgtgaaaagaaccatcgagcgactggttaaatcaggcgtaatcacttctccaccattggtggaaaagcccacggcaggccgtccggtggcggtttatgtgttttctggtgaagaaggaaagcgtgacacctatgtcgtcgttgcgcagctaagcccagagtttactggtctactcgttgaccgctggcaggagctggagaacgctgcaaaagagccgccactcccgcgtacctacaaagaggcgctactccatctggtggcccaggtagaagagaacgaacgtctgactgaacagaatgaagcgctggatgaagcgctgagcatcgctcgccctaaagctattctcatggatcgcttagccggaacgtcagagcaactttatggtatcaacgaagctggtcgcattctgggtacgtcaggggctgttatggcttcctgtatggatatggttggcaatgtctttgctaaaagaaaatactccaccaccccgcgccagtttgtgaagcaattcattgatcgcgagtacggccgcaacgtaaccagcaccagtggcggtcacattcaggcgaagtttacgtttaagggactttgctacgttgcactccacctcgttaaacgcgggatcatcaccgtagacaccattccgtatcgcccatgccgcgacagcgtcgaagccgccatggcaatgaaaaagtcagcagcctga

SEQ ID NO: 177580 - DNA, 156 bp, Klebsiella oxytoca
atggcccgcgtcagcatcgcgctggcgctactgatgttatctgtcctggtggacttcaccagccggattatgtctgtagccgctgacggagtccttgtcattacggggcttgtgattctcatgccgatactgattaaaggcataaaagttaaataa

SEQ ID NO: 177581 - DNA, 426 bp, Klebsiella oxytoca
atgtttggtatttttaaaaagaaagttcgtaaagcagccgtagaagtgaagaagatggaaaaccgcgacgccgtagaagcgactgtctggggcgcctatgcgatcgcatatgctgacggcacctgtgacgcgaaagaaatcagcgttctggaaaaaaccatcgctgccctgccctctttctctccgtttgctggcgagatcgcccagatgagcgccaatattcgctctcgctacgaagcttccccgcgttctgctaacgctgaagcgatgcgccagctggccgacgttgctggcacaaccgatgcagttgacgttctgtgcctgtgtctggatatcgctgataacgacggtatcgatgagaaagaagagcagatgctgaagaaaatcgctcaggctctgcaactgtccctggatcagtacctgtga

SEQ ID NO: 177582 - DNA, 477 bp, Klebsiella oxytoca
atgattaatttcctctctgatctttttcgaaataagcggtttgagcgaaatgttagctcgaccctcagcttgctcgaaagtcgcatcgaaaacctcaatgaacgaatccgagtgctggaaagtacagtagtgtcacaggcaaatactgtcgcctctctcacgaagagcagtgactctaccacgcgcccagactcgttccccgataaaagtattgccaatggaaaactaccaacgaaaaaggctgcaaccgctggcgtttctggttatcggactggttctgatacctctcgccatcgcgccagctacgcagatgatagcgccagctatcagcaagccacgcccagcgccggccaccacaactcaggccaccatcatcaccaccacgactccggcctgtgccataacagtttcggagacactggagggtatgactctggatgctccgattcgtccttttcatcagggtcttgtgactaa

SEQ ID NO: 177583 - DNA, 570 bp, Klebsiella oxytoca
atggcgaagaaaacaacaaaacaaaaaggcatcaaatacaaccggcagaaacatgtctctgacaaaaacatggcgacaaaatttgacccgcgcttgaaagaggttgttctgtatacggacggatcatgcctgaagaacccaggcggtgctggtggagttgcggccatcgttcgttttggcgaacaccataaaacagttcaagaaggttttcgctccacaaccaataaccgcatggaaatgctcgctgcgatccgagggttggatctacttaatcaaaaatgcaacgtgacgatctacacggatagccagtacctaattaatggcatttcgctgtggattaaaggttggaaaaagcgcggctggaagctggcgaacggtgagcgagttaaaaatgtggatctctggcaggaattggatgcggcggtgtccggtcatcgtgtccgttggtgttgggtcaaaggccatgatggaaacccagacaatgagctatgcgacatgatggcgcgatcggccgctgaatcaccgacgatggttgatcgtatttacgaatcaatttctgcctataattga

SEQ ID NO: 177584 - DNA, 225 bp, Klebsiella oxytoca
atgacttatgaaacaaacatcgtcgccctggcggagaacgaatttctggacaacactcggaagctgatggagaagcgagatacggcctttagtctttatcaatgggtcgttgatagtctgcgtgaaggaaaacacactgaagagattgggatgctggttggcgacctgattaactcaaactttgctcttgaagtgcagctaaagggtcgtgctggcgctcggtag

SEQ ID NO: 177585 - DNA, 633 bp, Klebsiella oxytoca
gtgaacggttctcagaaaataaaaaacagagagcgcgatggcaatctacgcgacctctggcgaacgcctctgtggttgtttcatgctttcgaagtttatctcggcatgaagttccaggtcgacgtcgcgtgcaacaaagacaatgcgatcctgcctgactttatcggcgtagaacgtgacgcgctaaagtccagctggtgcgaagccggtacaatcgcattcctcaacccgccctactccaaaatcaaaccatggatagacgccgcggcgcgtgaacaggtcaatggtgttacaactgtcatgctggttcctcagtccctcgacactcagtggtatctggacgttaagcgcagcgcgaatcagaccgtacttattgttggcggtcgcgtcgcttttatggagccagatacaacgctgggattggttgaagttcgcgagaatactggcggtagcatgttgctggtcttccggggcttctatggcgctgctggacaccagacgacggagatcgacatcggcgtgatgaaattgttgggtggctatgatccactaacggcgaaacggaagccacgtaagaagcctgttaagaaagcatctccaccccttaataaaaagactttaaaagcgctttaa

SEQ ID NO: 177586 - DNA, 1083 bp, Klebsiella oxytoca
atgaaagaacaaatagacttagcaataaaagaagataagattttttttcttggtgaaaaattacaagatgattggtatcaggcttttgctgagtggtctgatatagctcggaaggataataatcctgaagcatatttcaatatggcatattgctatttaacaagcaatggaatcaaaaaaaatatagaaaaggctattgagtattatgagcttgctggatcattaggtttaaatgaagcctacactcacgcctacaaagctagggctgagtatgttttcaaggatgacattaatgattatatttcttatctagaaactttgaaagaaaagggtgtttggagtcatgcccctgacgaaaaagggtgcagaacctatttttcttgtgagcacgaagcattgcaatttcaggatgttgtcgaaaaattatcaatgacttcgattgaaaagcgagtggcaaaagccaaggagttgcaaaaaaaacatacggcccacttcataaaattagatttggcttattttattgcaatatctgaagtttccgctgaagtcgagtatagagagtcaaaacttagcgatatagaaaacacaggtcgaataaataagggcagatcagtgttgcgcacaaaatattcatataaagctgaatatctagtcaagttaaaaaattcgggcaaggaaaatgcgaaatttgatttaacaatccgtgctgcgaatgcggcagaaataaaggcagctcatgaaaaagacccgatgaatggggtgcaaaaggtgtataaaacaatccccggtataatattatatccaggtgagcagaaagagcaggcattagtgactgatctgccaataaaagacctaggggaaaattgcataaaattttcttttgatttcaaaagagaatttgagaaatattatgtgtcaagtagttatagaggtcatatcagctatgatgttgatgtccaacctgggcgggtttcagtttccagaaaggcaagtgatgctgaaaaatataaggtaaagcagtttatagcttatgcggtagtaatcttgggtatttatctctacataaagcacttattgggttga

SEQ ID NO: 177587 - DNA, 795 bp, Klebsiella oxytoca
atgagcgctacacattcaactaataaagaaaacagcaacgcagacctgatcgcaatgctgtcagagctagatggcttaaaccccattgaagagcacgaagaggttgcgggtgaagttgttgaggtgaaaaaacctacgacctacacgactgatgatctgttcagcgaactcttgccgctggtctcatctgaaaagcccgtcagaagtgaagaagaggcgatacaggagcttctaagtaatattgatgatgaaattaagccgattgagaaatcgatagaagtggttgaagagccggttgaagctgttgcagcgccagtagctgaagaacaggcatcggatacaaagtcagaacctgaaaagccgaaacgctcaccatcttcaaccggcgctcgcaaaaaacggttctcaatggatcaactttcagacgaagtcatggctgagctaggttttgaacgcaaagccttcatggatgcatataatgcttgtccggtaaaagcgatggacaaggtgcagaactttatggcctggagtcaggggttggctgagcttagcgtatatacccagatatcggtcactcatctcattaacgcaggcaccagcgatacggcaggattccgtctggctatgatgagcaatccaacaaagccatacccttcatcgaccgcgtcagcgcaggcggggcagatgatgagcatccttccggtgttggggatggcgatcaaagatggtaaaacgctcacgttgaatgaagattcaccgttggttaagaaatttagaagagaaatacttttgtga

SEQ ID NO: 177588 - DNA, 543 bp, Klebsiella oxytoca
atgacagttgcaacaggtgtggatattgagaccactggtctcgatgtttactcaggtcataaaattattgagatcgctcttgtctcatatgagttagagacctcgcggaaaattcatgaagtgtcgctgaggttcaacccacggcgcagcattgacgcgaaagcccaggcagtccaccacatctcgcttgagatgctggccgactgtccactgttcgaagataaagccgctgcgctggctaaagcattggcagcggcggatgtgtgggtcgcgcacaacggtcgacagttcgatatccccttcatcaccaagcaaatgagtgattgcggcgtagagctaccgcagcgtccgctggtggacaccatggatgcgcggtgggcatgtgagaacggcaagatcccccgattacaggaactagccgtcgccatgggattcgtctatgacgaggaaaaggcgcatggggcgctttatgatactgacctcatgatgaagtgttttatgaaggccagaaacgattacggattcttcccaataccttcctga

SEQ ID NO: 177589 - DNA, 408 bp, Klebsiella oxytoca
atgtatagcgctgccgaagaacttgacagaaaagtttcagaaacccttgtggacataatcaaaaagcagactggcggattgatgacgacgaatgaggcgaaagcagccattcattcggtgttctgttctgtcatgggtctggtaggcccggatgtcgccgaacttctagaagaggcaatgaatacgatagagaaggagcgaccgtcgccgttccctctctatctgaaaactgccaatggcgtttatatctcggtaacgccagaccctatgatcaggagagttttcgtcagggttatggctggtgaatatcgaacaatgaattacgagtgcgaaagcgcaagcagcacgattaaaaaggcacttgaagtggtgcagttacttgtcaaacagggtgcaaaacgactatga

SEQ ID NO: 177590 - DNA, 651 bp, Klebsiella oxytoca
atgaaaattggcctttgtggtgcgcaaggaacgggtaaaacgacgctggcgaaagcttacagtgaagtgtcaggtatcccatacatcgacgctaaagtcggcgattttctcaacgagatagacgtagatttgtcacgaagcgatatgccgattgttgaacggatgaaggcgcaattaatggtggccggccacatcgcgagcataactgaggcgccagatctcctcaaaaccgggtttattatcgaccgcacgcctatcgacgtcatggcgtacacccacgacattgccgttccacactacaaaaatgatgaggtgctggagctgtatgctcagacgcatatggtatgtatggacgcggtctcggagaattttaatctgtgtctcatgctgcgccccggtgtccagctttcctcgcaagaccattaccgaaagcagagagcctcactgcagccgttctacgttaaccacatcgatatgctcatggtttcgatgatcatgtcgttttcaacgaaagtggttgccggctcactatctcgatttgcgtttatgcaggacgacgttgttgacctgagcctccgcgtcgatgccctggaggacatcgtgagaaatatcgctttaaattctgttacgaagcgcgagccttgtcattga

SEQ ID NO: 177591 - DNA, 483 bp, Klebsiella oxytoca
atgagaatgatagcggccgttggccgaaattttgaaataggcagaggaaatgatctgccttggaaatgccccgcagaactgagtctcttcagacagttgacgcatgggttcaccgtaatcatgggcagaaaaacagccgagagtctgggtaaggcattgccgggtcgacgcaacgtaatgctgacacgttcaccagctgtagtggcgcctcaaggcatccagaacgcctcagtcgaacgctgtttgcgcgagttccccaatgcgtgggttatcggtggcgccgtcgtgtatgaggtgatgcttccgcatgtgacggaaatttggctgagccatatcaatattgaagtgccggatgcagacgctttcttcccgtttgaagcaatgcgtcagatgggttttgaagcggttgataaggtgaatgaatttgctggtgatgagaattcaccatcgtttaaacaaattgtttacaggaagttgaaatga

SEQ ID NO: 177592 - DNA, 414 bp, Klebsiella oxytoca
atggctaagggaatgttcgcgctcgtggagctggatgacgtagtcgcagacagcagacaccgcgcctccgtagacattgaaaaagaccgcatcgacatgatgtccggtgacgagctgatttacccaacgagcaggatgctgaaaggcttctatcgctcgggtattgaaatcgtgctggtcacaaccaaacgtcttttgaaagaagagcgggaagttacccgggcgtggctttccgctcacggcgtcagttacgactatttggttcaggccgaaagcgtggagcatctggctcgatggatcaaagacaaccagcgggaaaatatttttgtcatggcgatttgtgctggcaacaagctaatcagcatggcgaataaccacccgcacaagcctcatatttaccaggttcaacgatga

SEQ ID NO: 177593 - DNA, 1092 bp, Klebsiella oxytoca
atgaacgaactattcgaaaacggccttttgaccgattcatcctacgcctgtgttctcgcggaagccgcctcctccaacattaagtcagacaatcgcactggaactcctactattggcacctgctatgtgaattcacagtatccgctctggggcgctgccgttccgcttatctccgccaaagccgtcaatctgaagcctctacttgtagagcttgagtggtatttgaaaggaaccggtgatgtctcttttctgcgcgaacacaacgtaaaaatctgggatgcatgggtaaaagaagacggcacgcttggcccggtatatggcaagcaatggcgtcgctggaacgatacccggatcgtcaatcgatatgaattcgttaaaaacggtctggactatcgcaagcgcggctacaaagtcgagggttatctgggccacgaagaagatcgcgtcgttctctctcgtgaaattgaccagttacagcgcatcgtcgacaagctgcgaagcaacccgactgatcgtcgcatgatgatgagcgcgtggaatgttggagaactcgaagacatggcactgccgccgtgccacttcatgtatcacgtttggagccgcgaactcggctttgaagagcgtctgcgccaggccaatgccatcggtgaggttcatgcaaaatatctccacgagtcacgctatacggctctactggccgagattgagcgccgcggcgaagccagcgaagaaatgctggactcattaaacatcccccgccgtgcgctctgttcggcaatgattcaacgtagcgtcgatgtgttcgtcggtatgccattcaatatcgccggctacggcatcctgacgtctctgattgctcagatcaccaaccacatgccgatgatgttctctcacttcggtatggacgttcacgtctacgaaaaccacatggacggtgttaacgagatgatggatcgcgacatcccggaaaattcagacccggtcgtcatttttcccgagtcgtggaaagagattgatgacttctgctggcaggacgttcgcatcgaaggttacgcgccgcatccgtggatcaaagtgccggtggctgtttga

SEQ ID NO: 177594 - DNA, 867 bp, Klebsiella oxytoca
atgttaaagaaagtattagagacatctcgcctgaaatctgaagccaaaaatggcaaaaaaatcgacacgcttcacgagatctacccaggcggtatcgacattacgatgaaaatcggcgagatggtgtcagagtttcatgaattatttcagcatccgatcgcggtcgacgtcacgcctgagcttttagaactgcgggctggtcttatccgtgaagaggctgtagacgaagctgccgaagccgttgaacgcctggacatggataaggttctggacgctatggccgatggtttatacgttggtattggcacattgatcagcgtgcgtggcggtgtggctaacgccatggcccacttcacaaaagagcagagcgaagacatttacaccagctatgttcatgctcatagcaaaaagccgcaggaagacatcatcctcgggctatctcagtttggtgtggccgtagaagagcttgaaattattgcggccaaaatccgatctgggtatgcggataccaccagtctggccgtggacttgcgtggcgcaatgaatcgcatctacgtggcgtcacagatggtttatcacctggcggatttgatgaatgtccctgttgttgatctggtggccgaagtccatcgcagtaatatgactaagctttggccggctgacgccgaactgcgcatgaagttggttgcgaagtgcaaatacgacaaagatgacctggcattccgtgttgctgaaggtcgggatggcatgatcggatatcgaatttctgatggcaagatcctgaaatcgccgacatatgactcggcggacttgtcccggtttgttgatatggcaatgaactcaataatcgggcgtcactttttctaa

SEQ ID NO: 177595 - DNA, 1143 bp, Klebsiella oxytoca
atgtcatattcaaccttccgtctcggcgcaaacgacgcgacgaaagaaccaatgtttctcggcaactccgttaacgtttcgcgctacgacgttcaaaagtaccgtgaattcgaaaagctgattgagaaacagctgtcattcttctggcgcccggaagaggtcgatatctcgcaagaccgaatcgactacatgacgaaattggccgatcatgagcggcatatcttcaccagtaacctgcgctaccagacactattggacagcgttcaaggccgtagccctaacgttacgctgctgccgctggcttccatcccggagcttgaaacgtggattgaaacctgggccttctccgagaccattcacagccgcagctacacccatatcattcgaggcatggttgatgatccaagcgagattttcgacggcatcgtaactgatgaacagattatcagccgcgcatcgagcgtatcggcagagtacgacaagctttatcaaatggtctgcgctcgcgagcatctcggggaagatgaatttgagcgtctgtacgcgtctgagttcggcgggaagccatacccgatgcaacgccagctgttccgcaccctcgtgtctgtaaacgcgctggaagcgattcgtttttatgtcagttttgcctgcacgttcgcgtttggcgagcgaaagctgctggaaggcaacgcgaagattatgcgactgattgcgcgtgacgaggcgctgcactgcgaaggcactgagcgcatgttgcgaaatatgcgaaatggtcgcgaaggtttgctgtggaagcagatcgccgaagaagaagagccgtttgtctaccagacgatgctcgacgtggccgagcaggaaatgcgttgggctgattatctgttcaaagacggctcgatgattggtctgaatgcgaagatcctgaaacagtacgtgaagtaccgcacaaatctggcgatgaagcgacttcatctcaaccctctgtttgacgatgtcactttcgatccgctgccgtggatgaacagctggctgttcaccgacaacgttcaggtggcgccgcaggaaacggagatcccttcgtatctggtggggcaaattgacgcagccgttgatacatcaatgcttggcggatttggcgatctgtaa

SEQ ID NO: 177596 - DNA, 405 bp, Klebsiella oxytoca
atgactgtttacgatctgtctgagttcgaaatcaacatccgcctggcgaagttgatgaaattgcaggttcaggaaattgatgacagccgatcaaccggcatgacgtcgtggtatcaccaccagatgccgcatacagtctgggttacggacggcgaatcaccgtggcgccagttttgcgcgacgcgttcatgggaagacattggcccggtgataacagatttgcagatcgcgcttattccagaagcccacgaaggtcgtttaggcactgaagactctgaaatgtggggtgcaaacgtctattactctggcggcgaagagtttactactcgatatgtccagcgacctgagctggccgcgtctattgccgcacttgtcgcgttaagcggcactgaatttattaaataa

SEQ ID NO: 177597 - DNA, 2328 bp, Klebsiella oxytoca
atgattcgaatcatcaaacggaatggcagtgtcgaagcactgtctgaagagaagtataaccgcgtcgttatgtgggcaacggacggtgttgatggcgtaagcgcctctgccgtcgctatgggagccgcagcgagtatcgttgacggcatgacgacaagccaagtacacgacgctctaatcaaagctgccgccgatcttatcagtgccgacacacctaactacagccaggttgctgcgcgtctgagtattttcaaaattcgcaaagatgcccacggccaatacgaataccctgacttctacgaacacatcctgaagaacgttactcgcggcgtttatgatgacgaaatcatgcataaatacagctgcgaagagatcgacgagctgggcgcgtacatgaagcctgagcgtgacgacaacttcggttacgcggccacgacccagctgcgcggcaaatatctggtacaacatcgagtcagcggggaaatctatgagtcacctcaacatatctacatgctggtgggcatgtgtctatatcaggactgggctgacggtgatatgggcaaaacacggctggaaatggtcaaaggcttttacgatgtcactagtacattcaagctgtcgttacctactccaattatggccggtgtccgcactcctactcgccagttctcaagttgcgtcctgatcgagtccggtgattcactgaagtccatcaatgcaacgacctcggccattgtggagtacatctcccagcgtgccggcatcggcgttaacttcggttctattcgtgcgctgggtagccctattcgcaacggtgaagcgacccatacaggtgttattccgttcctgaagctgttccaggcggctgttaagtcctgttctcaaggtggtgtccgcggtggtgcggcaacggcttattatccgctatggcatctggaggcgaatagtttgctggtgctgaagaataaccgtggtgtcgaaagtaaccgtgttcgccacatggactacggtgttgaattgaaccgcttaatgtactgtcgtttgatcgagggtggagctatcacgctgtttagccctcatgatgttcccggtcttctgaatgccttctatgctgaccaggatgagtttgagcgtctatatgttcagtacgaaaatgacccgtcaatccgcaaagagtctgtgcctgcagtggagctattctcttcgcttatgcaggaacgagcatctaccggccgtatctacatcgccaacatcgaccatatgaatacgcatggcgctttcgatgaggctgtggcgcctattaagcaatctaacctttgcgccgaaattgccctgccgactaagccgctggcatttactgacgatccgaacggcgaaatcgcgctgtgtactctgtccgcattcaatcttggcgctcttgagtctctggcagatctggaagaagtagccttctacgctgtctctgcgctggactgtctgcttgattatcaggactatccgatgtttgcggcggaaacaccagccaaggcgcgtcgtagtttggggattggtgtaaccaacttcgcttactggctggctaagaacggtgcaaagtattccggcgttgatggaaacaaactggttcacgaaacatttgaagcggttcagttctatttgctgaaggccagtaacctgcttgcatcagataagggagcgtgcgaatggtttagccagacgaaatatgcgaaaggtttgctgcctatcgatcactaccgcaagcagctggacgccccagaactgaatgccaaccaccctcttcttctggattgggatgggttgcgaaaagatattgagcgatacggtctacgcaactccactctgtccgctcaaatgccctgtgagacctccagccaaattaccaactctaccaatggcattgagccgccgcgtggcccggtatccgtgaagtcgtccaaagatggtgtcgtgaagatggtcgtgccggaattttctcgcattggcgacgcttacgagtacctgtgggacatcgctgataactttggctacctgaccaaagtggcgatcatgcagaagttcatcgatcagtctatttctgccaataccaactatgacccgacgcgcttccccaatggccgcgtgccaatgcaaaagatgctgactgatttgctggatgcgtatcgcatgggggtgaagacgctttattaccacaacacccgcgatggcgccggcgctcgcgaagacgacaagatcacacatcaggcgcatcttccatcttcgaccgaatttgtcgaggaagaggatgagtgcggcggcgcttgcaaaatctga

SEQ ID NO: 177598 - DNA, 573 bp, Klebsiella oxytoca
atgagtaataaaattattaaattcgccgggtttgacccaagtcttcgcaactttgggatcgtcactggctcattaaacctcgatacgtcagaagtgtccgatgtgtcaataaaactgattgaaacagaggctacttcagcaaaaaaaactgttcgaaccaatagcgatgatctgcgtcgggcgaacgaaatatggcgaggcattaagccaatcgttgatagcgtaaatatcgtgtttgcagagctgcctgtgggtagccagtcttcccgcgcccaaacgtcatacggcctgtgtctcggcgttctggcgtgtatcgataaacccattattcagttgacaccaaatgacatcaaaatgcatatcggcggaaaaaaagacacctccaaaaacaccatcattgaatgggcggtatctaagcatccggatgctggctggtttacgaagaaggttaaaggtgaagtgagtattgtcagcaaaaacgaacatccggccgacgcattggctgcggtttataccggactggagacggatcaataccgtcaagctgtctctatgatgagagcattcttttaa

SEQ ID NO: 177599 - DNA, 699 bp, Klebsiella oxytoca
atgtcgtttaatccgacaggcaatcagtttggtcagatcgttacctgcgttgctgcagcgcgggtaatggctatgcgttttggcggtattgtagacttcggttctttcacaagccattacaaagacaagctgacacaccagcgcattgccgagacaagcgaagctctgtttgacgctcaatggataggcgattcatcgcttgtttacatggggaatgtatttggtgtcgatcatatgggcgacagcatcatcatttcgagcaaggaagacactgatattgtctttaacccggtgaagtccgtcaaaatgtctggccgtatccagcatatgagcgcaaggatggctgttcgccgcgttcagaatgacatggctcgatttgggcaacgacataaatcaaaggcattttcgaaggtggagatgccggtaacgctgattagcgatggtgttctgcacttcggcatatgcttcgatgacaaagttgaaacaggtttcatcgtgtcggctgctgacccagatgacgcaaatgaaagccttcagtacgccagtgaaactatgaaaaaactggccgtttgtatcactgaaatatggcccgatatcattgccggcttctcagaaattcgggcatcggactgcgaacttgatgaatttagcgaggtgagagagcttcgaaaagctaaccccatttggggaacgtggtaa

SEQ ID NO: 177600 - DNA, 1917 bp, Klebsiella oxytoca
atgaaattcctaaatctgaaagttgaaaactttatggtcattgctgaggccagcgttgatttggatagccgaggcttggttctgattcagggcattaacgccgcggactccagtgcagcgagtaatggcgccggcaaatcaacgctgatgaatgctttgatgtggtgtttgtacggggaaacagccactggatacaagggcgatgacgttctgaactcaacgacgccaaagaactgccgcgtttccgtgaccattgaagacgaaggtaagcaatatgcggtaattcgtcaccgtgctcacaaagaattcaaaaatcgtctcattgtccgcagtgaagacggtgatttgaccaaaggcaaggacacgctgactcaggaactggttgagcggctgatcggctcttcgaaagaagtattcatggcatccatctatgccagtcaggaagccatgccggatttaccaggtatgacggataaaaacctgaaggcaattgttgaagaagcagctggcatcgaccgtctgacaaaggcttatgctatcgctcgcgacagagctaatgcgatgagcgctcgactggacagagcaaacgcacaagccgaaagcacagtgtcgcttatcacttcgacagagacagagattgagaccagtacagcagcagccgaggcgtgggagagaacgcgttccgttcgtctcgacgaagcacgagctgaagcgactatgatcgaagtcaaggtaacagaggccagcatggaaatggccgacatcccggccaccatcagcaaaattgagaatcaaatcacggatgaaaagaaaaagctttccggcagggctgaacatgataagaaagttcaggcagcgaacacaatggtggctgatgcagcggcggagatccgagcgactgaatcagcccgcgacagagccgttagcgcagcaaaaaaagccaagctgaatgcggataatgtcaattcaagcgtaggcaagccatgttcgacgtgcggtaagccatacactagcggtgatctgtctcacgttcatgacaactacgtcggcgaagtccgtaagtatgtaggcgaagctaaatcactaacagcggatttagcggccaaaacggagcgtcacgataaaatcgtcgtgctgcgtgatcgtcttgtcgcctcgacccccgacgtctccgcaatcactgagcgcatttctgagcttacccgtagtctgggtaacgtaaagtcacgacaagttgaaataaaagcggcagagagtgctctggctcgcgcaaacgcacaagtgaaagcgatctcggaagaagttaaccctcacaatgcagccatttcccgtcatcgcgaaaatctggcaatccacaaagagaagctgaaagagatccgacgcgaaatcgaagggatgaaagatcaggcactgctgcttgagaaggcgcgtcaggtttactctccggccggagttcgttcacatattctgacggcggtaacaccattcctgaacgataaaacggcggaatatctgagcacgatgtcggacggcaacatctctgccatctggtcgacgatggataccacgaagaaaggagagatccgcgacaaattcaacattgccgttgagaagaccggattcagtaaagacttccgcggtctgtccggtggtgaaaagcggaaagtgcgtctggcttgtgcgctggctcttcaggatatggtcgcgaaccgggccagcaaaagcattcagttgtttatcggcgatgagatcgatgatgcactggattcggcgggacttgagcgtctgatggggattctggaagcgaaggcgcgtgagcgtggtacggtgatgatcgtctcgcacaaggagatgaagtcgtggttccgcgaaacggtgacgctggaagtcaaagagggccgcagctatgtcgtttaa

SEQ ID NO: 177601 - DNA, 1086 bp, Klebsiella oxytoca
atgaaaacgatatacggtgtgatttcagacccacactatcatagctggtctgcgttctcgacaatcagcgtcagcggtctgaattctcgtttaaaaattcagctcgatgcaaccatcgaggcggcaaaagcgatcaaagcttctggcgcaaaatacatgtttgttgccggcgacacattccatacgcgcggctctataacgccttccgtactccacttcgtcactgaagcatacaaaaccatcattaacgaaatcggtctggaagtctggatgctggcaggcaatcacgatctggaaaccaatgactcagtattttcggcaaatgcggcagcatcattgcagtcaattggcgtaaacatcgtttgtggcccggcccagagcgtgaaaattgatgatgtaacagtccactttatcagctggcgtaacagtcatgccgaactgctggcggatatgaaatcgcttcgtgagaaagctggtgccggaatccacgacatcgtgatccacacaggtatcaacaaagccattccgacaatgccagacgttggcattgaggcgaatgatttgaaggaactcggcttccgtctggttctttccggccactatcacaatcacaaagagataatccctggtgtcgtgtcagtcggtgcgttaacccaccagaattggggcgacgttggtacgttggccgggttcatgttggttcaggaagacggttcattcacgcagcacgaaacatcggcaccgaagtttgtatctctggaaggcgatgtgactgaagacgatattcgcggcaattatgttcgctatcgcgcagtcattgagaacgacgccgaggcagtgcaaataaaagagcaactggcgacgctgggtgccgcgggtgttgtgacaaatctcatcaaaaaagcgtcgatgatggctggaactgcaagcaccgaatccaccagcaaaatcgacagtctctctgaatcaatcagtgcctactgcaaggttgtccacgatacggatggcggcttcgatctggctaagctcgactcactatgcaacgaaatcctattagaagcggaaagcgcggggacgtctgaatga

SEQ ID NO: 177602 - DNA, 648 bp, Klebsiella oxytoca
atgaatatcaaacagtcgcgttacatcagaagacttgaagatgggacttacaccatcaagtctgactctaaactggttgcttccagggacatgtgtgaggtttgcggcatcaaaaccgcctgcccgatctacaaaacccgggcatcactgctggaacaaggtgcgtcatttgaaatcaacacatgcgcacgatacgttccactcatttccttcagaaaaccttatcttggcttaaaggaagcttacttcaacacaatgcgcagcggcgtaacctgggtcaaccgcgtcagtgaaaattctgtcgtttgtctggttggcgctgagaacggcgagataattcgctttgctcgcgtcgcgaaggtattctctggccccgtcgacaaaatgctcaagataaacgccaggttcaaccatctgtgtctcggcggcaaaacgcaggatgaggtaagaaccgttattcaaaagtcatacggtcacttcttaaaagaagacagcttgctgacggtgatctacctgaaaagcctaaagcacgagtacgattgggagtatcataccgaagaagaaatccgaatgatggaggacatcacccctccagataacgtcgtgagtctcgatgagttaagacgcaggttcgaagagaagatttaa

SEQ ID NO: 177603 - DNA, 1113 bp, Klebsiella oxytoca
atgtccacaggcaaaaaaaagaagaaagaaaacataccgttaatcgatgatgatgacgcgatcgacgaaagtgttccggcgttattcacaggcgacctcacccctaacagcaacaataccgtacaacccattgcgttgatgagacttggattgttcgttcccacgctcaaaggcacgaagaatagtaaacgaaataactccaaccagatagacgcctcaaaagaactggtgcaactggaggttgcgagatctgagggttattccgatatcaaaataaccggtccacgtctcgatatggatcacgacttcaagacgtgggttggtgtcgtccgatcacttgccgagtatggggaggccagtgggcgcgttgagctaagcatcacgaagtttgccaagttctgtgggtatccatcttcccagatacgcaagacgctgcgagacaggattacgaacagcctgctgaagataatgcgcacaacgctttcgttccagcgcacatacgaagagaagaacgtggacggctcgaacaagatatctctgctcatggttcatctggtgaatagcgtggattacaatgagaaaaatgacaccatcatatttcacgccgaaccaaagctgtcagagctataccggtttgaccacaaagttcttctccaactgaaggtcatcaacaaacttccacgtaaagaaaccgcccaggcgctatacaccttcattgaaagtcttccggcgcggccggcgccaatatctctggctcgtttgcgtgcgaggttgaatctgaatagctcaagcatcagctcccaaaatcagaccattcgaaacggtctgaagtctcttaaagagcttggctacctcgattactcagaggtgaagcgtggtcgctctgtatttattcagattcatggacgcaacccgaaacttaaagtcattggtgaagagaaaccgtcgaagcctgagaagcctgcagagcaagtggaagggccacaagagagcggcgagctggacgtcgtaaaacaaaacatgatcaagaagatagctgaactttctgcggatttgacgcctgagaatataaagctaattgagatacttagtaacggtctgaagttgctttga

SEQ ID NO: 177604 - DNA, 216 bp, Klebsiella oxytoca
atgaacaacatcgctaacagcatggaaattgaaaaaataagaccatactggcgtgcaaaaggatttactcgcccggaagacttctcaacaagactggagcgtgacgactgccagattgtgtaccgctatcgttcatggcagatgattgaaatcggcgagacaaaagcaaaggctaaatcacatcgcctctacaaccttctgtcttcaatcacctga

SEQ ID NO: 177605 - DNA, 339 bp, Klebsiella oxytoca
atgaaaaagattattgcagcctctatgatcctcttctcatccgtggcgtttggagagagtgagaccgtcatgaagtgccagatgaacattatgcgtataagcggcggaaaaatgatcggagatccgcatcagttggcggaggcgattctgacagcggatacgcgacagttctatgctgtcatcggtgagcgaatcatcagttcaccattactttcagagcaaaaaggtggtttagccgcataccaagctggcgccgcttactttatgcgtaaagacacctttggtgttatttacgatgacttcggatatgtgtttgatgaatgtgaaaaggttgcgtaa

SEQ ID NO: 177606 - DNA, 159 bp, Klebsiella oxytoca
atgccgctcctgtatttgaccacgtcgatttttctgctctttgatagtgtttttgttgggagttttcgcaaagcactggctcccgtgaatggtcggatcatagacgtactcgtgggcgtttttctggccatcgctttagggaagtgcttcgcatcatga

SEQ ID NO: 177607 - DNA, 273 bp, Klebsiella oxytoca
atgaaagccttattacacgtccacgcttcactgaactcttcgtactccccctattccattctggaatttcctgaagggacggacgaaaatcagcttcaatccttggccattaaatttcttccgtctctttacggtgacgaggaaaccgttttcgttgacgaggacggtgtttgctggaacaacggagagtgttggtatatcgaggacttacgtctcattagtgaagaagacgcggcgcacttgacccgtattctgggcatttccacgctctaa

SEQ ID NO: 177608 - DNA, 279 bp, Klebsiella oxytoca
atgttttgcttgatgataagtaagcacttatctattatgtgtaagcttttcaacaagagaaaacacatgaccacaaaactgtatttgaaaatctgcgtcacgatcgggtttgcgatgacgatggtagggttagttatcccctatctcatctctcaaaaaagcgacatcactgtcctgattggcttcgttctgatgttcgcaacccccttcgcttcctataaagcggctaaaagcattatccatcaactaattctcttcacggcacattcacagaggtaa

SEQ ID NO: 177609 - DNA, 630 bp, Klebsiella oxytoca
atgggcatgagttcttcagctgaactcgttcattggctttcatcacaaggcacgatccgaggctccaagtccaaagaaaaaattaatgaaaacaggcataaagctgccgcgttatggatttcaggtctgtatagcgctcccgaattacttgaaatgtttaaaggccgtctgggtatacagcgcaaggaatctcttcttttctggttccggcaaaatggatacgtaagaaactcggagtcgcccgacgctccgaagaatccgcgagcaattttgagagaaagagccgtggaattaaggaaagccggccagcacacaacccgacaaatctttgatgaactctctcccgagttaggtatgaaaaacgtcggcgcacttagacgctggtttaagaaaaatggcatcgtacctgagcatccgagaaaacctcgtgagaagccccctaaaccgaaaccggtaaatcctcgtgttcaacttagagctgtatgtactgatatgtgggcatctggcgaatatacaggtaaggacattcggtctcaaatgggcgaaaaatttccatttgccagccttggcgcaatgtatggtcatttctctaaagttggtgttagaaagggaagtaaagagagcgactga
